United States Patent Application Publication US 2004/0214272 A1 - sequence listing, part 33

SEQ ID NO: 136303 - DNA, 288 bp, Zea mays
  Clone ID: MRT4577_55783C.1
gggtagcgcttttttgctcttataccttctttctgtttctattcattttttggggccccaaacggggccgttcccaaattttgaatggccaaaggtctttcatttcatgatactggctcacccgaccccagaacacaagatcatttttgcctgcctggaaacatccccttcttacaaactttttggggtgaaaacccccccgtggaaaaacgattatttccttttttatgaaccacatgggggggtcaaaaacccaaaaaccgcccccctcgagggcaatctaccctt

SEQ ID NO: 136304 - DNA, 402 bp, Zea mays
  Clone ID: MRT4577_55784C.1
cttaaagggcccaaacccaaaattttttttttccttcaaaataaccggccccgttttaaaaacaaaaaattagggttgttgggttttaccctgaacctttgaaaaaaaatttcccctccaattccaagtgggggaaccaaatgattggcccccccccttttttgggttttttttccaccccaatttttaccccggggttacccctgaacttctgaaccaattattaacttttttacgactgggtgcccccgggggcaaacctaaatctttttcaacaaaacccgtaaccgggtgaaaaatcgcaatttttcccctgggggttgggtttacaacccaaaaccaacctttttttttgggcaaaggggaccccctttttttgtttttttggggtcaccccaaaaa

SEQ ID NO: 136305 - DNA, 316 bp, Zea mays
  Clone ID: MRT4577_55785C.1
cctttattttattttttgatacgtagtacgcagggggggattttttgggcgaacgtgcgtgcacactgaacatgcatgcaaggaataagaacactagcctgtgacacagaacagatgcggagctcacaccgtgggcgacacaagcataggctaggtagcctagctatatatatgagcatacttgtgctagctgtggaggtgcttataactggggaagtacgttaacgcgcaccatggtcataggaagatcactgctggcaacgaaacccgcgctggccctgtcttgctgtacctgctcctcgaaggggacgacaat

SEQ ID NO: 136306 - DNA, 489 bp, Zea mays
  Clone ID: MRT4577_55786C.1
ttttattttcaaaacaaattttattgggatcttttgtgaatacactaacctatagcataccgagtatgataattatacagctatggttactatacaaacaaatccctgcggacaaaaataaagagagagaaaaggattttattacaggatcgaagagtgttgttacacccaggctcgcctttaactatacacatacttttcttataagctttacagccagtaaacgtcatacttatatgttgtattgacgtatctactattgcatcagcagaagattattcacagtcgcgtttatgttggttgtcctcatcaaatcctctataattagctcgtcaggaatatgaggtagaacttcccgcaccctatctaccatagtgagtacctctgaaagacttccattgcctgtgcctgcactaccacggagccgcaatcccgaagcagatgcactacccggcaccattgaggaagtggatggaacaagagaggacc

SEQ ID NO: 136307 - DNA, 196 bp, Zea mays
  unsure (1)..(196): unsure at all n locations
  Clone ID: MRT4577_55787C.1
ggcacgaggccccatcagggcgggagcgggggcgggggcgacggncccagctacctaccggttccttcctctgaatcggccaatcggccgcagctgntcttggcccagctgctctgctcttgttgagggatggtcgagtnctnctncnacaaggctncccgncgacattaagctactgtgtcttacttagcgctgc

SEQ ID NO: 136308 - DNA, 166 bp, Zea mays
  Clone ID: MRT4577_55788C.1
gacgtagtccctgtacatggctacgcctcactctcatgagcccccccgctgaagcacacctagattgcgaacctatgctaccgggtgcacgttctgccttgggagcagccatcaaggcaggacgctccggcaacccttgctccatggatcggctcagctgctgcgc

SEQ ID NO: 136309 - DNA, 1631 bp, Zea mays
  Clone ID: MRT4577_55789C.1
cccccccgccccttccgatggtacctcgagccggccggaaaaaaaaaaatttccccacgcgtccggtcgatttgttgaggtcccctcctcctgtaggtgtccaacttgactacagccacctctcggctccattctgcccctcctccttctcagtcggcagccaccatgccaccgcacgcaaccaaggatcccgtcgccgcgcctgcagcagccacggcggcggcgctgtcgcgggccctggcggcggcgcgccctttcctgcgcggggaggaggcggaggtggacccggcgctgcctggcctcgccgccgtgctgcgcggcgcgggcgccggcgagtgctggcacaagcacggcacgttcctggcgcacctgctggacgtgcaccggatcctccgcctgtggggcgcgcccgacgccgtggcgcgctgcggcctctaccactccgcctactccaactcctacgtcaacctggccatcttccagcctgacaccgggcgcgcccacgtcgctgccgtggtcggcggacccgcggagcgccttgtccacctcttctgcgtcgtccccaggcagcagctcgtccacgacgacctgctcttccactactccgaccaggacctcgccgacgacctagccagctccgaggagtcggtccgggacgcccggcgcggcgtgttcgacgacgcccagccgtggcggcgcaagatccagcgcctcctcccggcggacggcatcacggtcaagcacatcaggacaggggaggatgtgtcactgtccaggcgcatcgcagcgacgttcctcctgatgaccatagccgacttcagcgaccagctgttcgactggcaggaccgcctcttcgacaacagcaacggccgcctcgagttcagcggcaacacctggacctccctctggcccggcaccggcaagcctggcctctgggtcacctctagctcccgcatggccgcgctctacaccctcatcgtccgcgaggaggagatacacatcacgcagcgagcgcgagatacacatggccgggacgaggacatggacctggtgatccccccggtgttcaacggctgcacccgattgctcaacgccgaggaccagaaggtggcacgagacctctactgggaggcggtatgcggcgaggaggcgtcggactggctcaaggtggagcagctcctccagcagagcattgccaagaacccgtttgtgggggaaccacacctggtgcttgcccaggtgtaccttaacatggagaggtacggcgaggcgcagatgcaggcagaggaaggtctgaggctgttgctggagtggggcagcagctgggacaagaggatgccatgggagggctgggtgtcctggggcagggcgatgctgaccaaggccaccgacaaggattggccgcatacctcattcgggatcctcagccttgggcttgtcaaatgatacatatattctcaccgtatgcatatgtatgtatttgtacgaaataataaacccaaggccagggggtcaagccaaacaataatttgatgtacttggaattcagatgtgttatcaaacacaacttgtctgccagtcctcttcagtcatagttaagttcatatgacattttatacacaacttgtctg

SEQ ID NO: 136310 - DNA, 320 bp, Zea mays
  unsure (1)..(320): unsure at all n locations
  Clone ID: MRT4577_5578C.1
ctaccttctatttgattgtctgtatctcgacacggacgacccgctgacgcgcgctaagctccggtgctctgccttttgtgtgaactgtactgtcctatggctctcccacagcttttctgtaaggaagatgtgtacatgaggacatctctgcttcgcnggctgcagaggtaccacgagatggttcacgtcttggagaaggtagccaagactgttgactcggtggagctctctgatgaggagcgaaacctcttgcacggtgcataccagaacgtcagtggagcccggctggcctcattgcgcatgatcttctccatccaaca

SEQ ID NO: 136311 - DNA, 340 bp, Zea mays
  Clone ID: MRT4577_55790C.1
tggtacgcctgcggtaccggtccgactacccggtcgaacccgcgaccgcggtattctggttcggtttcgtattgctgtttcttctctgctttatttctattcttggcttgttgttcgggttcatcgcacttattgattagagcatacaccccacgtaaaaattataaagtagtggcgggccttctatgactttcactattaccattcgcgagaatgggagcacctatgtcttttctagggtccactaaatttaatagactgggcttgggtttacactcttattgacttggaaaacactgtctttacgctacttattagccttgcaacaaattcctcttta

SEQ ID NO: 136312 - DNA, 2095 bp, Zea mays
  Clone ID: MRT4577_55791C.1
aaaaaaaatccatcgtgttgccgatttgctccggctcgggcgctggaacgcacctgcgccctacgcctccatccgccctccatcgcctccaccgcaggccatagagcccgtcgtccgccgcacctagcgccttcggctccggtcacaggccccgccggaccgcccgcaggctgcagcgccgcgccgccggccgccgcagcagtcccgcgcggtcgcgcagttctggtcgtctggtctggcctgatgcccgtagcgctgcgtgcccgcctgagaccctgagtaggactgtaggagactaggaggtagtagcaagcagcagcgtgctccgcggctccgcactccgctggtctgcttgagatttgaagagttatttcggtcaaggttctagtggaagtggaccaaacactcgtgctagtggagtttgcaatgaacccgaaatacaagttcaagttcaagagaataatagtgaagaaattccaattgttcaagaagagaatgcacatattccagatgccaatggtgaagatgttgatggtataaatcatttaaacctggatcacattatttctaatctgggacttcatattccaattaattcctttgctcctaatattagagatgaagttagaagggctttcatagctaaaggtccgactcaacaattggtcataattttcttgtcacatgataaaaggagctttcaaaaacattggtttagacaacatagttgtttggaatatagtgtggagtagaataaggcttattgcttctattgttacctttttaagcatgatcgaatggatgataaattttgacaagatgcatttacaaaagttagcttctcacagtggagaaatgtttatacggtattttcaaaacatgtcggtgggcctaatagcatacacaatgttgcagcaacaacatttcatgatttttgtaaccaaaggtccagtgttagtcataaggtttcaaattatagcaaagatgcattggtcaaatatgagacacggttggaaacattcttaagtattgtctgtcttcttacattgcaaactatcatttcggggacatgatgagactagtacttccttgaacaaagggaatttcttagaatttcttgattggtacaaaaaaggaatgaagaggtgagaagagctttagatgagttgtgtcccaaaaatgccaagatgacttcggggacgattcaaaaagaacttgcaaactgttgtgcagaagaagtcacacatgcaattaaagaagaaatggaggattgatattccatgttcttgttgatgaatctcgtgatatatcaattaaagaacaaaataagaaaacttgatggtgtgctacattaaaagaggaatttttaaaagactcgatcttcagaaaattaagaaggcatttcaaaataaggaaactagacaaatacaattgcctaggttttctagaactcgactcaactagagattttattcgatatatgacatttggttgtaaatggattatgatcacgatgacttttaaataagcctttcctggatgatgcaattggacaggaagtagatgatcatggtgaggatgcccacgtccttggcctccgacgccatctctccttcaactccgcatagtcgccagatgcggttgcctgcgtcgtcgatggccagttctttgtactccctcgagaggttgcaccaaggcttcgtttgcgagcatgccgcacggacggacaacgacaagcgcgcgggcggcaatggcggaggaggactcaacaacccaggtctacgtccccgtccctgccccgacgctgtttcgtggggtcggctcactctgcgacgacgtgccgctcgcggagtaggatgcctaccacgcgccgcgcattggcgctgccaccactccagccacctgggctgagtacgacgacatagtcttcaccgcggacgcaggctgccgtatgttggttgtgatcgtgaaaaaagctatatgcggacctaatcaaacatacttcactaactccattaaatcttttgaagctgtagctgtccatgttgaataattagacaaattccaatctaaattccgaatataaatcatgacc

SEQ ID NO: 136313 - DNA, 554 bp, Zea mays
  Clone ID: MRT4577_55792C.1
cccacgcgtccgcccacgcgtccgcggacgcgtgggaaaaaaaaaaaaaaaaaaaaaaaaaaaaaaaaaaaaaaaaaaaaaaaaaaaaaaaaaaaaaaaaaaaaaaaaaaaaaaaaaagaagacggggcgtgccgtgtttcaggtttccaggtctccttccttcgtgcttgctggcctgtttttttttcgtgtccggcccccgaaaatcccgtgcggtgcccctcgtctttccctcctggtgcctggcgaatcccttgccatcttccctttttttgtggctttgcccccctttcccctttcccccttttgcgtacttgccaggaggcccccgcccttcccccttcccccctttccacagcctgaatggggatggccccccgccctgtcattcccctctccgcgcgtgggggttgggggctcctcgccccgtcacctttccctttgcctgcgccctggtccccgttcttccccttttttctctttctttcgtcccccattgggccccctttccccttgttgctctgaatctcttcctcccttcccgtttccggtt

SEQ ID NO: 136314 - DNA, 246 bp, Zea mays
  Clone ID: MRT4577_55793C.1
ccgattcgtccgaagagtatgaacaacaagcttcaactgctgatgaagagcgttcaagtacaccctgggctactagaccgttgttaaaactctgcgcaacttcaaggtaaagctgatcatcatcgcgaacatctgtccttcacttatgaagtctgagattgagtactacaccatgctggccaaagttagtgtgcaccattttcaccggaaacaatgttgatcttggcactgtctgctgcaagttct

SEQ ID NO: 136315 - DNA, 1579 bp, Zea mays
  Clone ID: MRT4577_55794C.1
ctcggccgctggaacgcacctgcgccctacgcctctatccgccctccatcgcctccaccgcaggccatagagcccgtcgtccgccgcacctagcgccttcggctccggtcacaggccccgccggaccgcccgcaggctgcagcgccgcgccgccggccgccgcagcagtcccgcgcggtcgcgcagttctggtcgtctggtctggcctgatgcccgtagcgctgcgtgcccgcctgagaccctgagtaggactgtaggagactaggaggtagtagcaagcagcagcgtgctccgcggctccgcactccgctggtctgcttgagatttgaagagttatttcggtcaaggttctagtggaagtggaccaagcactcgtgctagtggagtttgcaatgaacccgaaatacaagttcaagttcaagagaataatagtgaagaaattccaattgttcaagaagagaatgcacatattccagatgccaatggtgaagacgttgatggaatgaagaggtgagaagagctttagatgagttgtgtcccaaaaatgccaagatgacttcggggacgattcaaaaagaacttacaaactgttgtgcagaagaagtcacacatgcaattaaagaagaaatggaggattgatattccatgttcttgttgatgaatctcgtgatatatcaattaaagaacaaaataagaaaacttgatggtgcgctacattgaaagaggaatttttaaagaactcgatctttagaaaattaagaaggcatttcaaaataagaaaactagacaaatacaattgtctaggtcttctagaacttgactcaactagagattttattcgatatatgacatttggttgtaaatggattatgatcacgatgacttttaaataagaagcgagatcatgctttttttatggctgcaatcgagttctgcctctttactgtggcatgcttatgcatgcactcgttcatgcacacatacatgcatttcaaatctcaagtcgagttagagacgagtaccaagtacgacatggagtacctcctggctgggcagcctttcctggatgacgcaattgggcaggaagtagatgatcatggtgaggatgcccacgtccttggcctccgacgccatctctccttcaactccgcatagtcgccagatgcggttgcctgcgtcgtcgatggccagttctttgtactccctcgagaggttgcaccaagccaccaaggcttcgtttgcgacttgcgagcatgccgcacggacggacaacgacaagcgcgcgggcggcaatggcggaggaggactcaacaacccaggtctacgtccccgtccctgccccgacgctgtttcgtggggtcggctcactctgcgacgccgctcgcggagtaggatgcctaccacgcgccgcgcattggcgctgccaccactccagccacctgggctgagtacgacgacatagtcttcaccgcggacgcaggctgccgtatgttggttgtgaccgtcaaaaaagctatatgcggacctaatcaaacatacttcactaactccattaaatcttttgaagctgtagctgttc

SEQ ID NO: 136316 - DNA, 292 bp, Zea mays
  Clone ID: MRT4577_55795C.1
cccacgcgtccgcgaggagctcatcaggaataggctcgaggaactccggagacggagggaggacgggtcgctccgggacgtggtgttctgtatgcgcggcgatcttgttaggaacatggggaacatgtgcaaccctgaacttcacaagggcaggctagaggttcctaagcctataaaggagtacattgaagaggtttctactcaactaagaatggtgtgcgaatctgacactgacgagttgctgttgtaagagtaacttgcctttgttcaggagaccaggcatgcctttggg

SEQ ID NO: 136317 - DNA, 836 bp, Zea mays
  unsure (1)..(836): unsure at all n locations
  Clone ID: MRT4577_55796C.1
cctcgaggccggccggggatagaagaagtgctgagaaaatacaggaaatccatgcggcacttagatctttgctgggaagaaagaagacattgatgaagacaggaacaccgctctaagaaaaactgagtcaattatattcacaagctctgtaagttccgtttcagcctcttgttcatgcacaagtttctgattatatagtataactttttgcaaggttctattttcagcaccattagtgtttcctcaattgtacctacggttgagccattcgttagtatattgaagccagttaaatctgcatatgtcctaagcacaaaaatcagatgtcacctagataataatgatgcttccacctcagattctaaagagaatgcatttgattggggtaggatatggaaaatggatgtcctgaataaagtcaaaatgtttgtatggcgcatggctcacaatgctttgcaggtgaagcggaatatagtaatgaggggaggggatctggacactctttgcccaatgtgctcaaggtttgatgaagatccaaatcatctattttttaaatgcaaggagggaaggctggcaactgctaaacatggaggataaaagaatcattttagggctagcttggccactctatttttccaagggattttttattttcctagggtaaatccctcaggaaaatgaagttgtcaaactacccgttaatgagaaaagaattctcctcaggtggggctgcataaaatctggaattttgacatgattgccaatggaaaatatttttattcttatggccctggtggnctgcacgacataaaaacattttcggtgaaaggagaaat

SEQ ID NO: 136318 - DNA, 743 bp, Zea mays
  unsure (1)..(743): unsure at all n locations
  Clone ID: MRT4577_55797C.1
aactctccgtccgcgccgcctccctttacgcccttattttacttgagggttcgtgccccctgattcagatgaggatttgggtttgacgaccgctcatcggattcgagttgcaggtttcaaggggcagaagcaacctcgccacataactgcctaatcccaatttctggtacctaaaatctaaggaagagtccagagagaatgccaaagcgaccctacgaagggcgcgttggcaagaaggtcaagcgtcgccgtcgtcacctttatgttgtcatgaaggacgaggacggtagatgcggtatccacaaatttgatttatctacgaatctgttggacgatggccacccagttgtggaggttctaccgcccgctctcaaccatttcgattctccctcgaggggattctttgtggccttcggcaccaagatcatggtattccattcaaaatcggacaagatcggcccccctttctttgatgttagcactcacaacatggggtcagggtcctcggaccaggtcacgtctttctcaacccatatantctgccggtttgtgacaagcttgttgctctggatggcaaccactcggagcttctttatcttcctccactggaagggaaatggttgcggtgtaagctcccaaacctttccttcaacctccaagacattatctctcacgctgtgcaccctgacggcgggaccatctttgtcagcttcaagagttactcatccaccgccacattttcc

SEQ ID NO: 136319 - DNA, 522 bp, Zea mays
  Clone ID: MRT4577_55798C.1
cggaattttcgggtcgacccacccgtccggaggtggcgtccgtcctgcatcctcctgcactggaggggcaccttcacttgatgattcctctccctctaccctgggacgtgttgcggtggtggatatcacctatgatggggtggctgcacatgcactccgtgatctacactctccggctgatgatgctgagggcgcattcctagcgcctgcaccggagggggatgcccatcctcgtcacggacgtgaacctctgctaggacctggacgtgcgcgtgctctcatccatcctcatcgtcttcaaccgagaccaacactcaccattgagctcatcctagatctcgagctctgaagaacaatctcaacaacgcgatggcgtgcacatacagacatatttatgactcgccgatcgatatgtgatccatagagcacagcactggccttacatgattccttgataaacagacaatgtactcaaacgttgcatacggacacgagagactgagaggtgaacaattctatgct

SEQ ID NO: 136320 - DNA, 233 bp, Zea mays
  Clone ID: MRT4577_55799C.1
ggcaagatgacaaatattttgataatgtattttatcagcgagatcattctgataatggggagcagaaattaactaaagacacatgcatagctacatgccatacaggaattcatgtatcattgtacatgttgcctgagtatatcaccatgctaattgtagaagccattacacatcttttctaatcaataatgcatcttctaaaaccaacttctataactacattgcaggatcct

SEQ ID NO: 136321 - DNA, 713 bp, Zea mays
  Clone ID: MRT4577_5579C.1
cattgggtacctcgaggccggccgggatcgaacgatctattctccctagaatatataacagcagatcctgcatgcgaacgaaagcgctagcccccttcgtactgtctcgatgggccgcaccatcctcacggctaggaactcctctgacgacaaggcgtcaaggaagcgcctggtcaccaatgttcctgatcaagtctgccccaggccactgcctgtactgaacaagccccatcgtcttccgccccgataccgttatgctccgggaaatacgcaagaaccaaaagagcacgaacttgctgatcctaaagctgtcgatctaacaactgctgtgtgagatcgaccaaaacttcaagaccgacctccgcttccagagctccggctgcgccgcgctgaaataagagtccgaaatctacctcgacgggctcttcaaggacaccaacctctgctgcattcacgtcaaaagcgacaccatcatggccaaggacatccatttcgcccggcgtatccctggttataagacctaggattcttaccggtggatgtagtaatcagcagcggccgtttctgtcatcactgactgaatagaaggtgtatagatgtgccgaatgtctgtagctagagttatcggtgaaatcatgatgtatctgatactacactggtgtgaataactatgtctatgcatggccaatgaaggtctcccttatcatctccct

SEQ ID NO: 136322 - DNA, 362 bp, Zea mays
  Clone ID: MRT4577_557C.1
gaaggaaaaaaggggcccgccacgcgtccgcaacattcaacatcacaccaacaattcttttttaacaacaacctaacaacaatggccccgacaatttcaaccctgcttgccctaattgctctttacccaaaccctacaaccacaattattactccataatattcacttcctacaacttccattcttacacccttccttccatcaaatacttcaatacccttttaacacccacttctgcaaccctataggctacaacacaccatttcccctagcgtcatacaacaaccaacttcccatatgcaacaacaatacttatcccatttgacaatacaaaccactctaactattcaccaacaacactt

SEQ ID NO: 136323 - DNA, 1791 bp, Zea mays
  Clone ID: MRT4577_55800C.1
cagcgttccactcgcgttgaatttacagcgctcgcagctcggtcggggggacgtcgccaatgccgttgggtggcggattcactctctctctctcccccctcctccgcccatccaaccaccatataacaacctagtagccgccaacgccacattgtcccctcggggcgggccacgagtagtcctactggtccttgacgtccgtggccactcaggttgtgttctcggagttctttcgccggggccgggtggggaggcggagtgcgcggtcgaggaaggcctaggccttagcggtcggatcgatcggcgccgtgcttgactgcctgtacatgaggagcggctgcggcggcggcggagggagacaacctggggaaggaggcgggggaggcgctggggctgctgggctgcgtcaatgaggtggtggcggcggtggcagccacgtgggggcccatgaccgacggcgcgcgcgtcgagacggcgcccaggctcgcccaatggcgcgtcgacccgctcccctgctacacctaccgcaagtcactccccttcctcatcggcctctggaactggtgcatatctgtggagagaaataacaagcaaacctgtgttaagctctttgcagagaatacaagttctctcaagaacggttcctcagccccaatagcttcctttatcgccaaacttattgtatctcttccccctaatcagcagaccatagtccccccaggaatttttgacaaacagctgaaatacgacggttttgtgtggacaatcgatagcaccgtcactgggaggtttgtgattgagatagagtttcttgacctgaaggtcgctgatccgtctggcggggagccggcctcgatttgggcctcccgccaggtcaagcagtgctcggacagcacggccctgtcgtccctggctcggatgctgcacgaggacgtcctcaccgacatcaccatcaacgcggcggacggcagcgtgggcgcgcaccgcgcggtcctggcgacgcggtcgccggtgttccggagcatgttctcgcacgacctgagggagaaggagctctccaccgtggacatcaccgacatgtccctggacgcgtgccgcgccttcctcagctacatctacggcgacgtgcgcggcggcgaggagttcctggcgaaccggctggcgctcctccgcgccgccgacaagtacgacatcggcgacctcagggaggcctgccacgagagcctgctggaagacatcgacgcgcgcaacgtgctggagcggctgcagacggcgcacctgtaccggctgccgaggctcaagggcggctgcctgaggttccttgtggacttcaggaaggtgtacgagatgcacgacgacgacctcaacgcgttcctgcagacggccgacagggaactcgtggccgaggtgttccatggcgttcttgccgcgtggagcgggcggtaagccgggcgcatgccatggcactgccgctctgctgcaggtgttgcacatctggttggttcagttcgtcacaactcagaagcgttgtttgcaactggaggattcttgctgggaaagcgtgtaaatatttgcaaactgtacatgcgtgccagtggttggtctaaaatttactgtgcatgccttgattggattttgttcctatgatgtggaaatcagctcatatgctgctcatattcacgttttgaggaatttcagacttgatcttcaggtttacacatggcatggcaacagagagaggcaatgctcaataatctcattgtacatggtttcgatcccaccccccccccc

SEQ ID NO: 136324 - DNA, 189 bp, Zea mays
  unsure (1)..(189): unsure at all n locations
  Clone ID: MRT4577_55801C.1
ctcaacttgtttntagaatttaggaacaagttnttgntgcttgttttgactgggagtagtgccntgnattntagtatctttgctntgnatantatancancgcttcgagtggtaccctataaataaagatgaantgtggccnatctcnagtggntntagtttagtggatcttaaatgcntgcgtgtttg

SEQ ID NO: 136325 - DNA, 862 bp, Zea mays
  Clone ID: MRT4577_55802C.1
tgcagaagtattaattatcattcaatgttcttgttagcatctttttaaaggttaagaatgtttacataactataattttatcttcatcaatgaagataaaatccataaaaacattttgttatagtttgcttttcatgacagcacaacgctagagacactgaccgagtcctcacatcgtcatctcgatgttgaggctaggtatagccaaagatgtcggataggaggtccgagacttcgagagcctgtcgtggaggtctatgatcttgaagagtttctaggggggcgaccgatgctgatggcctcggcgaagctgaagaggtgcagcgcggcgccattgatggcctgagaacgatgtccttctcgactttactaatatctttgtgcttctgaacatcgcaattcatacaatacaaagaaaatatattaattggagtttgacaaaagaaaaaccaaatatccgaacagcattcatcagatagtgaaaacatatccactattgcaaatggaacctaaaattttcttttaaacaagcaacaataaatttagtactacacgaagcaaaaggagcagttgctacaatacaaatagtcaaatactgtgaggaattgttaatatcacaagatacatgactatttcagatcataactatttcagtaagttttacctctagcagctcacacttcatagattatttgcaacacataagttacagtttctatcttccaaatcataccagttcatagagtttgatacgattcaaggcttgcattaacaaaaataagaaactggtactgctcaaaatccaaatctatgagatcgcaaacatatgtatgacaagcaatatatttagagggcaaaaacc

SEQ ID NO: 136326 - DNA, 462 bp, Zea mays
  Clone ID: MRT4577_55803C.1
acactgccgccgccgcagcaaacccttgcgcactcgccctccaaccctccgccgccgccgctccacagcctcaccgccgccgtcgacatgggtaaggtgcacggatcgctggcccgtgccgggaaggtgcgcggccagacgcccaaggtcgccaagcaggacaagaagaagcagccccgcggccgcgcccacaagaggatccagtacaaccgtcgcttcgtcaccgccgtcgtcggcttcggcaagaagcgcggccccaactcctccgagaagtaggcgcatggcaccaccgcgccatgaaaaaggctcttcctttgctctagttttcctctcgtttgttgttacgcaagaagatgatgatggaagagactttacttacattcgtactcaagtgttaaagtatgcaatgttttgcttagttgaagaatctgagatattggtggtatgagtatgcatgcatgt

SEQ ID NO: 136327 - DNA, 214 bp, Zea mays
  Clone ID: MRT4577_55804C.1
atgttgtgttttttggacaaggaaagaaactttcacaggcaaaaccaatctcctatttaagcgttcccgtttagaaaataaaatcaccattggttgcaaaaaccaactccagatttaaaagggctggtgtcccaagtttatttcaatcgggttcaccacaaacttataattccatgtcttagagaagctttactcgctttattttcaattaata

SEQ ID NO: 136328 - DNA, 272 bp, Zea mays
  Clone ID: MRT4577_55805C.1
cgcgtccgaatcgctttgctaatgcgatctggggtgtagttttgtacaactttaattgttcgcaattttagcgagtgttgtgaagcttaactgatctaaggtgtagttttgtacgactatgtttaattgttcgcagatttaaaaaaaaaaaaaaaaaaaaaaaaaaaaaaaaaaaaaaaaaaaaaaaaaaaaaagacaaaaaaaaaaaaaaaaaaaaaaaaaaaaaaaacaaacaaaaaaaaaaaaaaaaaaaaaaaggggcccaccttaaa

SEQ ID NO: 136329 - DNA, 923 bp, Zea mays
  Clone ID: MRT4577_55806C.1
cccgcccccgcgcccgcgggctccaggccgagcggaagctaggcgcgatgtcgctgtcaccggcggacggcgcggcgtactggctgcgatggcaggtcctcgtctgcggcgcgctcatcgcgctgcccacggtggccgcggcagcgctgctgccgcggctgcggagagcagcgccgcccctgcgcgcggccgacctctgggtcccttgctgggcgcgcctccacccgggctggctcctcgcctaccgcgccgtcgcgctcgccgccgccgtagcgcttctcgcgcgcctcgtcgtcgcgcgcggcatcaccgtcttctacttctacacccagtggacgtttctattagtcaccatatattttgcgtttgccacagctatatcagcccatggatgtttggtttactcaaggaaaagtttgaggaaagccgacgaatcccgtggacttcttaatgctgatgtcgaaaatcgtgatgtttccatttctggagagaggaaaacagatgagacaaatatgatggtgagctattatgaacaaacagtgaatgagagaagagctgggttctggggccggtgcatggaaatcatataccaggacaacgctagagacactgacctagagtcctcacatcgtcatctcgatgttgaggctaggtatagccaaagacgtcggataggaggtccgagacttcgagagcctgtcgtggaggtctatgatattgaagagtttctcgggaggcgaccgatgctgatggcctcggcgaagctgaagaggtggagcgcggcgccattaccaagcatcacaatactcgttgagctttgaaaccaatttacacgataagttgagcttcaaatagaatgtccttctcgaatgtaaagtaaacataagaacacacctgagaacgatgtccttctcgactttact

SEQ ID NO: 136330 - DNA, 545 bp, Zea mays
  Clone ID: MRT4577_55807C.1
attcggctcgagtttgtattgtatgaatttctatgttcagaagcacaaagatattagtaaagtcgtgaaggacatcgttctcaggtgtgttcttatgtttagtttacattcgagaaggacattctatttgaagctcaacttatcgtgtaaattggtttcaaagctcatcgagtattgtgatgcttggtatttttgttcttcacacccccttcgccaaggccatcaatggcgccgtgctgcacctattcagcttcgccgaggccatcagcatcggtcgcccccctagaaactcttcaagatcatagacctccacgacaggctctcgaagtctcggacctgctatccgacatctttggctatacctagcctcaacatcgagatgacgatgtgaggacttggtcagtgtttctagcgttgtgctgtcatgaaaagcaaactataacaaagtgtttctatggattgtatcttcattgatgaagagaaaattataggtatggtaacattcttaacctttaaaaagatgctaacaagaacattgcatgata

SEQ ID NO: 136331 - DNA, 441 bp, Zea mays
  Clone ID: MRT4577_55808C.1
acttgattcccgtatagctgcactgaacgcacctccaccgcgtgccaagcgccaccgctaaatgctaccgcgaactcatggggtcgcttggcccccccctcctcgccggcgaccagggctgcccgcaactggtgcccggccaccggcatcgcgaagaagccccaccgcttccgccccgggaccgtgccgctccgcgagatccgcaagtaccagaagagcaccgagctgctcatccgcaagctccccttccagcgcctcgtccgcgagatcgcgcaggacttcaagactgatctgaggttccagatcctctctccgtccgcgccgctccaagaggccgccaagaagcacctgacggacgccttcgaggacaccaacatttgcccaatcccccgccagcgcgacaccatcatgcccacggaccctccaccccgcgcggcgcat

SEQ ID NO: 136332 - DNA, 1367 bp, Zea mays
  unsure (1)..(1367): unsure at all n locations
  Clone ID: MRT4577_55809C.1
gaatctatgagatctctgaaggtcgctttccaaaatgccgcaaaccatgagatgtcgtttcacattatgcggttaccaaaaagtaactctctccttgatttgattgaagacttaaagtcaaaggttgaaatttcttgtaatgatgctgaatttcggttttttggagtctaccttcacaagatatgcaaggtgtatcaaccctgttttatttgatagattcagttaatgaccatggacccttgtatattgaagaggttcccgaggatgaaaaaaatgccgggcctcatgaccgtttggttcatgtctatcattttgaatataatcatcatattcagtattttggtgaacctttcttcttcctaattcgtgatggtgaagctttgtcggatatgaaagtacggattcagaagagacttcaagttcctgatgagcagtttctaaagtggaaatttgctcatgttacattcagtaagccagaatacctccaagattcagatattaaacagagacctgtttatggaggttgggaacaacaccttggattggagcatacaggctgaacccctggagtggagtccactgtcaccaaccagatgtgactaaatttcctcactacagtgtacaccctgtagtagtattcttacggacgaatcaaactgaacatcaacccgagatcagaatatgcgttcatgattttgtttttgaggaattggatgatgtgttgtttactatcctcggggctacatggtgtggactgtgaaggccggccgatgtacatagagaggccacggaaggtgtcccagagtttgagagagcatttagggagaggttctctgcctgcacattaactgctaagaggcatattgactccactaccatcttcgacatccaaggggctcacatggatcatccccgagcgcaagcaaactttgagatcgcgccgaaagcatgccatccctggaatccttcagttgggagtaacatttagttccactgtgtggtttttgccctctaaatatattgcttgtcatacatatgtttgcgatctcatagatttggattttgagcagtaccagcttcttatttttgttaatgcgagccttgaatcgtatcagactctatgaactggtatgatttggaagatagaaactgtaacttatgtgttgcaaataatcaaaaaaaagtgagctgctagaggtaaaacttactgaaatagttatgatctgaaatagtcatgtatcttgtgatattaacaattcctcacagtatttgactatttgtattgtagcaactgctccttttgcttcgtgtagtactaaatntaattgtgcttgtttaaaagaaaatttaggttccatttgcaatag

SEQ ID NO: 136333 - DNA, 324 bp, Zea mays
  Clone ID: MRT4577_5580C.1
agaaggttggatacaaccctgataagatcaccttcaaaaccagagattggttcgaaggggacctcatgagggtggggtccaccaatcttgagtggtgcagggggcgaacccttctgcgtgctctggacttgatcaatgagccaaagcggccgtcatacaagcccctgtgtatctcgcttcaggatgtgtacaagattggtggtattggaactgtccctgttagacctttatagactaacgtcattgagcccggtctggttgctacttttgggcctactggtcttactactgaagttaaatgcgctgagatgcaccatgagggtc

SEQ ID NO: 136334 - DNA, 2244 bp, Zea mays
  Clone ID: MRT4577_55810C.1
ccatactggtgactggaaaattgatgaatcaccagtggatggaaaaaaatttgaccgacaagcattggaggagctctccaaagaaggtgttactcttatgatgagtgactcaacaaatgttctttcccctggaagatcaatcagcgaatctgttgttgctggttcattgctgcgacatatttcggaagcaaaaggaagagtaattacgacacaatttgcttcaaacatacatcgaattgggagcatcaaagctgctgcagatttaactggtcgaaaaatggtgtttgttggaatgtcactcaggacataccttgaagctgctttcaaggatggaaaggcaccactggatccatcaaccttgcaatcaaggtagaggatatggatgcgtatgcccctaaagatcttttggttgtcactacaggttcacaaggagagccacgtgcagctctgaatcttgcatcttatgggggaagtcacgctcttaaactatcaaaagaggatgtccttctttattcagctaaggttattcctggaaatgagacacgggtaatgaagatgatgaatcgtctcactgatcttggcccaaaaattatcatgggtaaagattctggcctgcatacctctgggcatgcctaccgagaggagctggaggaagttcttcggattgttaaaccacaacatttcttgcctgttcatggagaactcctatttctcaaagaacatgaattacttggaagatcaactggcatacggcacacaactgtaataaaaaatggagagatgcttggtgtgtcacatctaagaaacagaagagttttgtccaatgggtttgtttcattagggaaggaggatctttaggtgaaccatttattttacacgtcgtttttttatgtcttttgcagttatgatatctaacatgatatatgatattacagctcatgtatagtgatggtgataaggcttttggtacatccactgatctctgcattgacgagagactaagaatcgcatctgatggcattatttttgtcaagtagcttcttgtacagttttggagtattttctaggtttatcttcagcaaaaatttctcctcgcatgtgaaatgatagtgatttatgtcgaaccttgtgatagtcaaaatggtaaaccatatatagtattgttcggtgcacctaaacattttacatgttactcctttgcagcatggagatcttccgacctcagaaggaacatggtttagcgcagactggtttgaaaggaaaatttaagattactacaagatgtctatggcttgataatggaagattgttggacgcactctacaaagcagctcatgctgcattgttaagttgtcctatgaattgtccacttagtcacatggagaggatggtagctgaaatcttgaggaaaatggtacggaagtatagtgagaagaggcctgatgtcattgcggttgctatggagaacaccacagcaagtttctcagaacacctcgatgctaaatcatctggaaattttgaaccttcctcagctactagccatctgagcaggagtccagctatgagtcttgaaggcagttataaaacacacccagacaacccagaggtggatgctgaagaagcccttcctgaggccacgagaacagcactggatgatgcaaccacactgttatgcatctatcatgcataatggataatatccgatgttatgtttctttcaccagtggaaatttgctcatgttacattcagtaagccggaatacctccaagatttagatattgtaatgaacagattccataaacagagacctgtttatggaggttgggaacaacaccttggattggagcatacaaccactaccccaaaaaggtcctacttaggcaacaaccagaaccaccattcttttgagaagcctgtgaagatttacaactaaagctgggaatactttttacaagtgatgaatggatatgaaggcagccttgttccaaaagcagtcttttggtgatgtacatagagcttttgcatagagtagtttatgtggcagttatctcaagaattttcatctggtggatgtacagggttcgtatagcaacatttccttgtagaaagttgaagttgtatatcgagggtggatttacctgtgtttatcttttcgaccctaagcctctgggaagctgtgaaccatagcctcatgaaatatgcctgttgttgattcagtgtttgtgtttttcttgtttgtcaag

SEQ ID NO: 136335 - DNA, 294 bp, Zea mays
  Clone ID: MRT4577_55811C.1
aaaggggaaaagggccccaaccaaactcgcgaccacgattttgaagcctggaaaaagggctccatatgtgtgctaagccaacactttcttccgttaaagtttatttcttaacggaacaaggaccccccccttttgtagaggctaaccccaaacctcctttaaaaccgtttcgcgggactccagatctgggtgtaaagacgtctccacaaattttgggggggggggtcctattttttcggcccactaaaaaggtcgcgggtggccaagcccttcctgggggccattaacccgagc

SEQ ID NO: 136336 - DNA, 904 bp, Zea mays
  Clone ID: MRT4577_55812C.1
ggcaagcggggacgcagtcaatccaacttatggaagagttttcaaggagtctgtgtgtctctcggtctcgctggttccggcattgtgggttatgtcgtttgaggaggaggcggtgatggcaagatcggcggcggcgctgtcaagggaggaggctccaactccgtgggaggcgcaggctctatcaactcaggtggcggcgttgcggaccagtaaacggcgacgaagacaatcctctaccaagaagaagactggtcgagtgagagagatggacggcggcaagggcagcgggattggtggcaatgtcgtaggaggaggcggtgatggcaagagcggcggcggcgctgtcaagggaggaggctccaactccgtgggaggcgcaggctctggcaactcaggtggcggcgttgcggggcatggtgatggtgcagggaagtcgggctccggcggcgacggcatgatgaaggctcccggcggcggcggctacatcccccgctccgacttcgaagccaacccgaaggagttcttccagggcctccaccagcagggaggaggaggcaaaaagtagatccatcgagctagatgctagctagctagctgcttgttgcatggcaagctagcgtgggatttgtgatcctgaatgaatgtatggaccgtcgtcagtctccgtagcctctaaataaaatgttaagctgctcgatcgtttctgggtatcatttgctcgcatgtttacgatagaagtttattatatgtcattaggcaggctcgtacgtcatcagctatttacccgatatatttcgatatatcctgttatatccatatatatcccaatatttgcacttttggagaatcctagggataaatctcttatctcgctatttaaaacaatggttcgattgagttagtt

SEQ ID NO: 136337 - DNA, 543 bp, Zea mays
  Clone ID: MRT4577_55813C.1
ctcacgcttacctagctctttgcgtccgcgcctgcgcatcgacctattggcatggtgcactccaccatcattgtagcctgttggattgacggcgtgctggcgctcactcttgggtggcacggccagagcatccggtccctggaacaagtcgtgcgtgatggggcgcacctgcgccagcgtggagcagtggctacggtggcgcaagcaccagcgccggcactggcggggcccttggcgccgacaccttccggtagcaggtgcgcccgagccagggacgacattcgcgcggccgttgagagggacgcggatggcaacccacgcatgggagcctatgtgatgatcctccatgtccatgactggttcgtcaatggctgccacggctccgttcttctggaccagaagctgctcttcatcgactagaagacggatgtgtgcaacggctactcacttatgggctacaaggtcatttacatcatcaagaccaagcttgagcgcaagtgcccatatacaaggggctgtgaggacctccttgccatcgctacc

SEQ ID NO: 136338 - DNA, 686 bp, Zea mays
  unsure (1)..(686): unsure at all n locations
  Clone ID: MRT4577_55814C.1
gtacgcctcgcggtatcggtccggaattcccgggtcgacccacgcgtccgggcgaggagaacggggcggcgggggcggctgacgccggcgcgatggaggaagaggaggcagcgtcggaagacgagaacggcgacgaccagggcttccaggagggggaagacgagctcggcgacgaggaggagggcgcgggcgacgagaacggtcacggggagcagcagtcccaaccgccggcagcggcggcgcagcagcagccttcccagcagcgtggtccggcaaggaggccgcgggcaagagcagcggccccacctcgctcttcgcggtgacggtggcgccgccaggggcgaggcagggccaacagcaggcgggaggagacggcaaaacagaacagaaaggtggagataaaaagagaggcgttaaaagaccgcgagaagatcatggccgagggtattttgagtacatcgaagaaaacaagtacagcagagccaagtctcctcagccacctgttgaagaagaagacgaacacttcgatgacacagtgggtttgtcttgatacttataattggtgatctgcattntaaaatctcgagagaccgtctgagtgcttcttcccttacttggnagagttntgctntcctgtgggctgnaggaagagcttctacggtgtgtcaaaggcanagtctgctttg

SEQ ID NO: 136339 - DNA, 131 bp, Zea mays
  unsure (1)..(131): unsure at all n locations
  Clone ID: MRT4577_55815C.1
caagtgcccacgtanaattcatatgacgatggttgcagttgcaaccaagtgtgtgcctnnctttttcttttcctggcgtgtctttcctatcgctgcgggaaatcaaataagcagtttacgtaatcactacc

SEQ ID NO: 136340 - DNA, 254 bp, Zea mays
  unsure (1)..(254): unsure at all n locations
  Clone ID: MRT4577_55816C.1
gtgtcgtttctggtttcggttcggttttttcggtttgatccatgcttccgctcactctttcgctcactcttcctgtggacagatatctagctacatcagctgctgttgcgccacgttcanttctgctgatcctcttctgttgacgaatggtcttggcttccctacctcatacgctggactagcttccaagtcgactgtttccantcctgatgatgctattacggtgaaagatgcgcccgctcaggtacggtagc

SEQ ID NO: 136341 - DNA, 287 bp, Zea mays
  Clone ID: MRT4577_55817C.1
cggactcattgcttcactcacacgtcactttcttaatcagacatacaagcctctcatcaggggtcatttagatggttacatcatatctaacatactcctacaagcacagctacttccatggctcacatatattatcaccttaatccagttacacacaccatactaccagacactactggctcacaatataaccataccactacatccaatacagctatcaatactcactatatcactacacatacttcaattatccaagatacaatcaacatctaccactattctat

SEQ ID NO: 136342 - DNA, 356 bp, Zea mays
  Clone ID: MRT4577_55818C.1
ggggaccaaaaatttcccctttaaaccaaaattctcccttaaaccaaaagaggcccttatggtaaaaatgaatataggggcccccccaaaataaacccccgcccaccggtttcacacaaaatttttttttaaactcggggccccttttgcccccccaagggacatatgaacccccgtttttgtaccccccgtttaacccagagcaccccgggtgccctccctgtgggaggggggcccccccaaactattttgttgacttgtgggacccttccccccccccaaattttttttttcaagggaagggtgaccacaaaaaaaaacagccgggaggggtgaaaaccgaaaacaaaaaacaa

SEQ ID NO: 136343 - DNA, 590 bp, Zea mays
  unsure (1)..(590): unsure at all n locations
  Clone ID: MRT4577_55819C.1
ccaacctgctggccagcaccctggccaacatcaacccggtcgcgcatgcggcgngagtgatccccaacctcacccggatggaccgcggcgaggcctggccgctgttcggccacttcaccggcgtggtcgccaacatggcgcaggcgctggatggggaacggctggcgctggccggggcgctgggattcacgctgccgaccctggcgcagcattactcgcgctcgtaccacgtgccgctgggcccgttggaggacatcgcgcgggccatcgacgcacgcggcgccggcccgctcggcccggcccggctggcgcatcgctacgtgctggaggacgtgccgttcggcctggtgttccaggaacggctggcgcgcctcttgggcatcgattgcccgctgctgtccgcctgcatcaccctgctggaggcggtctacgccgaatcgttccgcgaccgcaatgacctgctggccgcgctgctgcccgacggcatgtcggccgaggcgctggtggcggcctgcaggagcgcgtgcgcggcatcgtgaaagcgctcgatgatgtcgtcctggtgccacggcgtccggtacaccatcacg

SEQ ID NO: 136344 - DNA, 222 bp, Zea mays
  Clone ID: MRT4577_5581C.1
ggaagaacacacgggcgggttatttgaagcaacttgacctatcaacccccacacacgggtggtggtgctggacctgccaagaattatactgcaaatgccctccagacgagctcaacgggactaagcgtgtccaaaggaggctctcaaggatcaaactacagctatccggaagaaaccgcggggaggacgacaaagcatccggcaattagcggaaactaaccc

SEQ ID NO: 136345 - DNA, 316 bp, Zea mays
  unsure (1)..(316): unsure at all n locations
  Clone ID: MRT4577_55820C.1
ataatgtggtgtttttttttgaggncaatgctcaggtcacgtactcatttgttgatcttcatgatctacactactgggtgggggggggggattacttttncttntttanaatttattttantatttgtagttctgtaggttgatgggtagtattgttctgtggttttgtattatttggggtgttcttgattgggcaaaaggttttgttgctgtttattacttagatttttttaaatttgtttttataagggttgnaattgttttatagttttgatgtttgtttagttaatgtttaggaatgtttttaaattaaatt

SEQ ID NO: 136346 - DNA, 161 bp, Zea mays
  Clone ID: MRT4577_55821C.1
tatttttcgggatagctgtggctggacgattctatttcggaacacgaatgtcctagggaaaggggtcttatgcagatggattagggcctgtgttgcttgggggcttcacacttgctttaataactgggtgcatcctccttctggatgggcagagtcaattc

SEQ ID NO: 136347 - DNA, 253 bp, Zea mays
  Clone ID: MRT4577_55822C.1
caatgaacctatgatgggatcaaacagattgacaccaatggctcctcatggatgctttcccgcatatttacctgttccttttcccgtgtggccatcaacttgggttcacccctttgaagaagttaagggaggagagacatgccaccatcagatccacaagccaatcccagtcattccaaaggaacctgttaatgttgacgaacttgtgggaatgtctcatctaagcattggggaagcacaggtacgtgataga

SEQ ID NO: 136348 - DNA, 276 bp, Zea mays
  Clone ID: MRT4577_55823C.1
cacacccttttctgggggttgttttatcccctgcagctctttatcaagttgcagtctgagtttggggagggtgccatctccgagagaggtggggatgccaaggataacaataggaagtttcactgagactgtggaactttagattggtctgaagatttatgatccacataaggacaagcgtttcacgggctctgttaagatgccctatatccctcgtcccaagatgaaagtgcgcatgcttggagatgcccaacttattgaggaggccgataagat

SEQ ID NO: 136349 - DNA, 432 bp, Zea mays
  unsure (1)..(432): unsure at all n locations
  Clone ID: MRT4577_55824C.1
catggaggatgctgacgcagtgcgattattgtctagggctctagctgacaaagtgaagagctgtaatcatatacgggtgaactgcagcagtgactatgactctgttaacgactccaaaggactcgcgatctaaataccgacgcccatgaatggataaacggagactacgacttactccatgtgtactatccagaagaaaccacacgacgacggacactgtccttgctagaattagacgccgaaagaagaccatgatgagcttgactctgagtcctactaagagagatgactagagaggcgtgaataagtgagagccttctgtcgcaagtgacataccactacttttaacgttattatacgacatcccaccgaccggtagctgaacaccacgccttgttttatgtcaaacggacgcnctcgtcgattctatcc

SEQ ID NO: 136350 - DNA, 204 bp, Zea mays
  Clone ID: MRT4577_55825C.1
tcgcttagttctacggcggcgatacccccctgcacttcccaccctgttacccccacaaaataagttctgcggcggcgatggcgcttttcttcttccgggcgaagcaccttctgtgccccattctgcgggggttccacgccttaacgcgggcccttgcgcgggtggagccgcacgagtttttcaaggccagcgagttcctgggca

SEQ ID NO: 136351 - DNA, 315 bp, Zea mays
  unsure (1)..(315): unsure at all n locations
  Clone ID: MRT4577_55826C.1
gtacaagctttttttttgtacctgcccgggcggtcagtcttgcaggttaaaaaaaaaaaaaaaaaaaaaaaaaaaaaaaaaaaaaaaaacatggcagccattttttcaaagggcacacactaatgggggggggggggggcnnaactttctgtttcgtgctacaaaacaaaggtgggggaggggaaaaatactgtcgccagttttacctaaaccctacaccaccgcaaagggcataatcccatcacacttcagggttcgtccttaacagaattcatagcttgattccaactcttgttgtactcatggggagggggg

SEQ ID NO: 136352 - DNA, 1081 bp, Zea mays
  Clone ID: MRT4577_55827C.1
gggactcacctacgggcacgttgccaagcttgctgaggagatgaagaaaggcgccgcttcagttgaaggcgtggaggtcaaagtatggcaggtcccggagattctgtccgaggaggtgctcggcaagatgggcgcgccacccaagaccgacgcgccggtcatcacgccgcaggagctggcggaggccgcggcgtcctcttcgggttccccacgcggttcggcatgatggcggcgctttattaaggccttcttcgacgcgaccggcgggctgtggcgcgagcagagcctggccggcaagcccgccggcctcttcttcagcaccggctcccagggcggcggccaggagaccacgccgtgagcagctcctctccttttttttacaacatccttccccttgcagcaccaaccgatcgaatcgcagaagcagtgggtaacgtttccccttggcggccaggctgacggcggtgacgcagctgacgcaccacgggatggtgttcgtgcctgtggggtacacgttcggcgccaagatattcgacatggagagcgtgcacggcggcagcccgtacggcgcgggcacgttcgccggggacgggtcgcggtggccgacggaactggagctggagcacgccttccaccagggcaactacttcgccggcatcgccaagaggctcaagggcggctccgcctgatatcgctcgcaccctcctatacgtatacataattattatagggaacatatcttgtgcatatatagatttagtgtacatggtgcatatattaaatcagcatcactcattttagagtatagtggtggaaaatattatttataaattgcaatgatcaactagagacgttaaatctaaaataaatagtgatgatttaatatgtgccccatatgtactaagcttccatgtacaccagatatgtcctcgttattacatgtacaccaggtatgatatgcattccatgttttcgtggtggtttcgattgtattgttgtgtgaaatttggtaatcggacccatattaattaataattatggcgtcattcatgtgaccaaaaaaaaaaaaaaaaaagcggcc

SEQ ID NO: 136353 - DNA, 290 bp, Zea mays
  Clone ID: MRT4577_55828C.1
attcggctcgagcaacccctggacattattttggcgccggttagatactgtaggttggggcctgctttacaatgggtccgctaccctagtggggctaggtaggatgctcgccgctgaactggttaacaacattcttggggtgagcttggaaaactgccttgacatataaaagattgtgttgagagagtgcgacattaacttgttaagacatttaatgataatactcctatccctgctcgagatggacgcttactataaccagctatccgtggtggcgcgacaggggctac

SEQ ID NO: 136354 - DNA, 381 bp, Zea mays
  Clone ID: MRT4577_55829C.1
ctcacgcgtgcgatgtcttctctgtctgttcgtgctcctccgactgatccatccaagacgggaatcgccatgctgtactcgcaggaacaccacttggaatccaaggccctcgctgaggcatccaatacctacccgcagcttgctggcaccattcgttacaacggcttcatcgtgatcgacagccatccctgctcggttgctgaggcttctacatccatgactggtactcatggtcactcgagatgccgaatcagctccatctacatattgcaatggaaataacttgactatattcgtccttcatctcacaactgctacattccgaatgtgaactggactgagtatcagctgattgatatatccgaagacggattagtgagc

SEQ ID NO: 136355 - DNA, 301 bp, Zea mays
  Clone ID: MRT4577_5582C.1
tgaacataaccatcctatagcgaccaacattctttctggccttgatgccacaggacatgtgctcaccttggactgctactgctgatacatgccaatgctcagcgtcatcaactagctgatgtaccagctcccgttgcagaccccccagcaggtgttcatgcaggaagacgtggacctcaaacgactcatggactccttcaagctcattaatgctgagtcgtttgtcgatcctagaatgcacatgcttctttattagctgcatgctcgattcctttgttcccggacaaatagtaatatcact

SEQ ID NO: 136356 - DNA, 1331 bp, Zea mays
  Clone ID: MRT4577_55830C.1
ctcgaggcccggccgggaggccccctcggaaaaggccgggatccacgaaaacagcacagagagagagagaaccccagcgggcaaacgcctccctccccctgcctccaggccccagatccggccatccgggtagctccagaccttctccaatggcggtcaaggtctacgtcgtgttttactccacctacgggcacgttgccaagcttgctgaggagatgaagaaaggcgccgcttcagttgaaggcgtggaggtcaaagtatggcaggtcccggagattctgtccgaggaggtgctcggcaagatgggcgcgccacccaagaccgacgcgccggtcatcacgccgcaggagctggcggaggccgacggcgtcctcttcgggttccccacgcggttcggcatgatggcggcgcagatgaaggccttcttcgacgcgaccggcgggctgtggcgcgagcagagcctggcaggcaagcccgccggcctcttcttcagcaccggctcccagggcggcggccaggagaccacgccgctgacggcggtgacgcagctgacgcaccacgggatggtgttcgtgcctgtggggtacacgttcggcgccaagatattcgacatggagagcgtgcacggcggcagcccgtacggcgcgggcacgttcgccggggacgggtcgcggtggccgacggaactggagctggagcacgccttccaccagggcaagtacttcgccggcatcgccaagaggctcaagggcggctccgcctgatatcgctcgcaccctcctatacgtatacataattattatagggaacatatctggtgcatatataaatttagtgtacatggtgcatatattaaatcagcattactcattttagatataatgtctctagttgttggtatattttgctaagaacaccctccgacgtggtgaagtatagcggtggaaaatattatttataaattgcaatgatcaactagagacgttaaatctaaaataaatagtgatgatttaatatgtgcaccatatatactaagcttccatgtacaccagatatgtcctcgttattacatgtacacgaggtatgatatgcattccatgttttcgtggtggtttcgattgtattgttgtgtgaaatttggtaatcggacccatattaattaataattatggcgtcattcatgtgattccatgtataccagatatgttctcgttattacatgtacccgaggtatgatatgcattccatgttttcgtggtggtttcgattgtattgttgtgtgaaatttggtaatcggacccatattaattaataattatggcgtccttccc

SEQ ID NO: 136357 - DNA, 842 bp, Zea mays
  unsure (1)..(842): unsure at all n locations
  Clone ID: MRT4577_55831C.1
ccggccgggccggggtttcgaacacactaatcaaacaaagacgaccccagcagccagcgggcaggcgtctccttcccctgcttcagcccccagatcttagatctgagtagctccagcccttctccaatggcggtcaaggtctacgtggtgttttactccacctatgggcatgttgccaaactagctgaggagatcaagaaaggcgccgcgtcagttgaaggcgtggaggtcaaagtatggcaggtcccagaaattctatccgaggaggtgctcggcaagatgggcgcaccacccaagccggacgcgccgatcatcacgccgcaggagctcgccgaggccagccgacggcatcctcttcggcttccccacgcggttcggcatgatggccgcgcagatgaaggccttcttcgacgcgaccggcgggctgtggcgggagcagagcctggctggcaagcccgccggcctcttcttcagcaccagcagccagggcggcgggcaggagaccacgccgtgagtcgtcatcgttgacccgacctcggcacatcacctcacctcgcattgcttgcaccaactcatccatggcagtggcagtgggtaatagtgtagcatatgctcacgttttcccttaatttgtcgggctgacggcggtgacgcagctgacgcaccacgggatggtgttcgtgccggtggggtacacgttcttataacattttaagaagttttctaaaataagtcttcattttatttttnttaataagaaagaaaagtctcatcgaaacatatttgtaaagaaagttctttgaagacaaaaagttgttgaaaaaaaaaaaaaaaaaggcccc

SEQ ID NO: 136358 - DNA, 652 bp, Zea mays
  Clone ID: MRT4577_55832C.1
tttttgtgcatgcttcacataaaatagttactggtatattataccctaaaagtatagtagtcaaatcctttttgttaccccctaaagcaagggtgttaggagggattaaggggattaaatttcctaacagtcaaaattctcctcaatcctctccaatccttcctaatcactatgatttagggatgaaacagataaggtctaacgctgcacaattccattattggctcggcacacgcacaaaagtagagagtcgtatgatccctaattcatcttggacgatccaagaatggcaacatctgcctcgattaagcagctgcccttcacaaggtaccagtccttcacagacttcgtcgccatgaaatttgaccatccccagccttcgccctccgtcgcttggagctggcaccggcctgtcattgttttgcgattgctggtcaccttgtctttgatggacagactgacttctacaagcaccccagagttctggagggaagcgtctccgtttggcttggccatatgcaggtagagggagagaatttccttatcaccgtcgatgccagtgccagaagggtacatggtcaggtacctgaaggatcacaggagttagtgcatcatgaactgtcgacaagttgatacttgccccacgcgaacg

SEQ ID NO: 136359 - DNA, 281 bp, Zea mays
  Clone ID: MRT4577_55833C.1
cgcgctcacgtaagctcggatcctgtatagtggccgccactcggggcgtccgtatctaaatgataccattttatatgtatcgttagtcttaagatcctggttggtctcgcaagccggagagcgttacattgaaccgaatggtttctggccatgaatgtcttgaacagaaaaaatcgcctcattcatcatgtcttttttcaggggtggacaaacaaaggaagaacccaaaactgaccccccacaaatatgtttatttttgatacccgacaataaggggggac

SEQ ID NO: 136360 - DNA, 238 bp, Zea mays
  unsure (1)..(238): unsure at all n locations
  Clone ID: MRT4577_55834C.1
ggagaaaaatntnaataaaaaaatggattatttttaggaaacacatgccggtatgagggccccatgggcgagtccctcccatatggaagcgggggagggcccccccaacgaggggtggctgcaaggcagggttcaggggaaacagggggttgaagggaaaaaattgttgttgctgaaagtagggaaaaaggtttgccaaagctacttggttgaccagagggagcacgagttgccccgc

SEQ ID NO: 136361 - DNA, 311 bp, Zea mays
  Clone ID: MRT4577_55835C.1
taataattttttttttttttttttgcctaaagtctgacagatcctgaacactgcataaacgaagaaccagacatccaatttgagaggacgcataaatgcaaaagcccttcaagggccacgagacgcccgccaaggggtgaacacctggtgccctaggggggaagcccctataaaaaccaccgcactcatgggcgaagcatgggaaaacatatcatgctacatggtgctgacaacaagatagcagtccccacaggtagatccaccacactacttcgcagagatcaccatataccggaagtggtgcgttcaaa

SEQ ID NO: 136362 - DNA, 256 bp, Zea mays
  Clone ID: MRT4577_55836C.1
aaatattgtaccggccacgctcaataagaacgaaagtaatcgtaggccacaggcttggcagggcttatatagttatataaaaaaaaaaggccagcttcaagattaggaaaaacccttggcctgatgtaccggctactattccataggaggtgcaacatgactaaatgggctatccaaaccctgcaaggttaatcgaccacggtggagggagttccactttgcagaatgacgagaataatgccaggcccctgggagg

SEQ ID NO: 136363 - DNA, 267 bp, Zea mays
  Clone ID: MRT4577_55837C.1
ctagttctgtccgaatccaaacgcgccatccgacacctcccggtgtagtgagggcaacagaccccaaggcagtgccggcgatgcgctagttctcgctgacgccggtccaggctaccgctgaggacattgtcttgtgtgtcgacgtctacctcaaggcccgggccgagatgaactccgactacggcgccggagcagcgtgctatggcttcacctccaccgcttggacgcatacgacgcatccctatggggccgggggtgacaccttgg

SEQ ID NO: 136364 - DNA, 1907 bp, Zea mays
  Clone ID: MRT4577_55838C.1
gccggccggccggggaaaaacttcttttccccctcccctgttaaacacgcgcagcgaagcaacgcagcagcaacaaaccttttcgctcgcagctgccaccacctcgtcgtctcgcctccccctcggcctccgcacgcgcgcgcgggatctcgccctcgcccgcctcgccgctcgcgcgcgcgcaccgaggaagggcgcacccacccgcaggcttcctggcgggccgatacggcggcgatggcgagccgggtcaaggaggacgagaggcacgagaagatccttcgcggcctgctcaagctgcccgccaacaagcgctgcatcaactgtaacaatttgggaccacaatatgcctgcacaaatttctggaccttcgtttgtaccaattgcagtggagcacatcgggagttcacgcatcgagtaaaatcggtttccatggccaaatttactgcacaagaagttactgcccttcaagaaggggggaatgaggtaacatgtatctgtttttttttttctacttttcccatcaatcccatgtcttctattcaacacggcattgattttgaaggagaatagaattggtgtaattgaatggatgtattgcaatattgcattgagcccttagtcagtttatgtagagtacaagacttgggagacaaggaacacatggatacatgtggcggtctacgatacacaatatctaaactaccaaatatactctaacaaccctccgcagtcgtagcgggaacatcgcagacgattggactggagaagaggagccaaaggctaacattctcctgaagtcgtagtgacattgcaatgcaaatgttgcaactagagtagaaaccaacaaggagcttatgtggttgtgccaatgcgaggtagccgagcataaggcacaattgatgtggttgaaggagtcgtgctgaagatagcgaggccgacatagttgtggtgaggttgctgtgttggtgtagttgcaagcgcataagaggtgtcaaggagatgatgaagacatgtctgggtagtcgtcgtggaaggaggctatactgaggttcatacagtcagggctgccaaagacgaaggtgaaaggagacgatgcaatcgaggcagatggggtgggaacatgagagttgatgcctaccactttgtgcccccagtactgcaatcttttggacaatcttttaagcttcaaagacaccttctctagagggcaggagccttgaactggctggttcaagaggcagcaacctcatccaagaacccagggaatttaggccacaaactttctaagtgtaacctgcgctttcccttgaggtccattttgagcttgagaatcaaaggacaatggtcagaggtttcggtggcattactatagagcatacgatccgggaaaaactcttcccagctgctagtacagaatacatgatctagcttaacaagagtaggatcctccctctgatttgaccaagtgaatctccttccagccaacagaatttccttcaaatccaaggagttgactgagtttctgaaactacccaacaaggtctggtttacattggaattgttcttgtcttccgatctgtaaatcatattaaaatcacccgcaatgatccatgggcccccacatttgttcctgacctctctcagctcatggagaaaagcttgtttgagattgtcctgataaggcccatacacacctgtgaaccaccaaagttgaccagacattagttctagagaagtatttttcaaggaatgggatcctcaacgaaatggataccctgacagcaggggaccttttttattaatttatttttgtaaattgcaatgcttaaatctgtatggaaatatgacatgtttcttttggcctcagtaacgctgacaaattgagaaattttattaagcatgtg

SEQ ID NO: 136365 - DNA, 2739 bp, Zea mays
  Clone ID: MRT4577_55839C.1
cattgggtacctcgaggccggccgggccgtttcccctatcgcgattctctctcctccgtgtttccgtcgccacctaccacgtgaaccttcctgtcgcgtgtgtgctgaaaggccgagcagactacaatccgctgcttacctctgttctgttctgtctcgcgattacttgcactagagagagagatttgtttcgccttgctgtgctggttcgatgcgattctctcggactccgctaaatcattttagttaaaaaaataccgcgctccctttccaagatgcgatttgatttggtgcgatgcagctgaacaaaatccttgtgctgattcatttttgtcgttccgcgcgtgtcgactcgagccaaaactcccgggaaacattattccgctttcctgatccggtggtaccgatgagatgtgaatgtgattatgccaatgcaggtaagtctctgatccggtccgacgatcctgagtggttcttcttggcgcccaaggaccgcaagtaccccaacggtagcaggtcgaacagggccaccgtggccgggtactggaaggctactggcccggacaggaacatcaagtccaagggcgacaagagcaaacagtttaccatcggcaagaagaagacccttgtcttccaccgtggacgcgccccgaagggcgagcgcacagggtggattatgcacgagtaccgcaccaccgagcctcagttcgagtctggcaagcagggtggttatgttctttatcgcctcttctggaaaccagaggagaaaactgagcgctccagcccaaaggaaatggatagaagtggcaactcgcctactactattcgttcttcacgtgacaaccaagaggcgaatgaggaagctaatacaccattaaataaaaaatctctagaatctgctctgcatgatccgattgagctgcccaattctgctgaaacccctgctgggccaaggaaaatgtgcctggcggacagaaatgataatttggtggctactgcaccggttgtttcccatatacctttccagggacatgctgctggtgtagctaaggttgatccttcagctgctgcttcagcccacttcgttaatccccagaatggaaatgacgactgcaacaattttatgtctgatttcacccccattctaccgcatgaaaatgcattcttcactggtacacagcaaggagcttttggttttgatggaaatggcatcatgaatcatcctgatgccctggatgctttcttgaaccaaacacttgttgatactgatgaacattcatcgacaacatcaaaagttcagtatgattctgacattccaacagaatttgcgaaccattggaatatgcaggatgagcatcaagactggtgggaaaagttagattttgagccatatgaaccaactttgcttccttatgacaccactgacctagacgtactctcagtagactctggcgccgattccttcaatgacctcttcaatgtgactggcattactcttaggcctcaacggttggactccactgtgcaaccagactgtgtgttccctgatcagggcactgcactaaggaggctgaagctacaggttgttgagtgtggggagagcataactaaagatgagagtgaagatgaagtatcatgtgttgaaagtccaaactattttgatgaatctgtcgagttcgctgcagagaagggtgtggcttcttatggggatggggctgactcaactgggattgttattagaagccgttaccctgccccaagttcaagctcagagagttcattcactcaacagggaactgctatgcgaaggctacggttgcagttgggccttaacgaaggcacatgtcctagtagtggtgattcatcaagctgcatcgtagatgaatcagaaagtcagcagaaagcagagattgaagaggatgcaagcacgaacctagctggaagtgttgataatctacctggcaatagccatgatgatgagcaaaaggacatccctgaacatggagttaaatctgtcctgaggctgcggaaaacttctgcggaaagtctgaaggatgtgaagcaggaggattgtctggagccagacgggagagcaccgatgcagagggtaggcttccaatcatccatcatctggctggttctttcggtggctgtgctgctgcttctctattgtggcgtatggatgagtatgatatgtatcctggtgcggtgttttgcgcacatgggttcctggcatcaacctgatgtgtgaacttctgtcataacatgcgtttgacagcagtaagacatcccgacatatgccaatgcagctaaaaataaaaaaaagaggtagcaagtgaagagggagaaaaaagagatgtgttattgtaggtcttagtacatcctagtcttgccaatgcagctcaaaagaaaaaagaggtagcaagtgaggagggagaaaaaaaaagaggtgttattgtaggtgttactaatgttgtagctgttgtgcagttgtaaatcccccttcggcagctggttttatttcctgatgtaatgtaagcaagagcaaggtcctgtcagatgcgtgcgctgaaagtctgaacctccgataatatctgatgcttcttgtagatagctgtttcagaattttcggttaatgaacccagttactgcttgcttgttgatctattttctaaaaagctatctgatgggattgttgtggtgaattcgagttcattgggaatacatgacagaattgtg

SEQ ID NO: 136366 - DNA, 304 bp, Zea mays
  Clone ID: MRT4577_5583C.1
cggacgcgtggcgtgacgcgtggggaagccagcagctcgcggcgaatctcccttcttctccggtatccaccaccgcttcatctcggtaccgcgatgcgtcgacatagtcggcaccgccttccgccttccgccgcccagaccggcgaccggctacctgtctatgctgtcttcctgcctccaggatctcccacgacggcacgaattgcctccgcccgtggttgatttcggttaggccttgccttgccgcttaattcagatgaggtgttgttgaggtcttgaggacatcacgtcgtcactagtggac

SEQ ID NO: 136367 - DNA, 855 bp, Zea mays
  Clone ID: MRT4577_55840C.1
atggataactgacgatgggggtaacaagcttcacagaactctccctcgagctcagcgctaccctgaacaactgaagccgaaatggcgagcctgcagaacctggtctgttccgtatccaaacaactggctgtgccgaattgcgcggcggctaccaaactgaacagggctcctccctcagctgtggcggcaagctcgaaccaaggatctttggacgacaccaaggtcacgaagagacggctagctttgcttggtgctggagcgttagccactggcctactgaggacaagctctgctgcgttcgctgaagaggtgccgaagaattacaagtcgtacgtggacgcgaaagacgggtactcgtacctttatccagctgaatggagggatttcgacttcttgggtcatgattctgcgttcaaagaccgcaacctggcccttcagtgtgttcgtgtggggttcattcctaccgagaaaacagacatccgcgacctaggaccgatggatgaggccatcttcaacctggtaaacaacgtctacgctgccccgaaccaaataccgtcgatctacgacatgcaagagcgcaccgtggacggcaagaactactggacgtttgagtacgatctggaggctccgggctacggcgtttctgcgtttgcgacggtcgccattggaaacggtcggtactacacgctgatcgtgaccgcgaacgagcgccggtggagcaggctgcggaacaggctcaaagtcgtcgcggactccttcaagatctcggacctgacggcgtgatcgcttgcttctgtgacggcctcatgagcatggtgcggcaacttgtttagcgaaagatgggggggggggggg

SEQ ID NO: 136368 - DNA, 447 bp, Zea mays
  Clone ID: MRT4577_55841C.1
caccgctgcacccatgatcccggcatccccaaaaagccgatcccgtccccgcgccaaatcgcagcgctagtgctgagccatccgtcctccacgctcaccgccgcgtcggcgcgctccctctcggcgtccctcctggccgccggccccgcgtccgcgttcccgatcccgacccccgtgggcagacgccgtcatcaaactcctgtggcaccacgccccacgcgcgctcctcttcttccacgctctcctccgcctcccagagcgctcgcgcgacctctccccgtgcacggtcgacctcgcgctcgacctcgccgcgcgcctgcgccacccacgtcagctcacgagctccatcctcgcgctcttgccgcgccacgggctggtctttacccggagcacgttccccatcctgttcgagcggtttgtgatgtgcgagcggcggcccgacctcgg

SEQ ID NO: 136369 - DNA, 841 bp, Zea mays
  Clone ID: MRT4577_55842C.1
cccacgcgtccggtaacaagcttcacagaactctccctcgagctcagcgctaccctgaacaactgaagccgaaatggcgagcctgcagaacctggtctgctccgtatccaaacaactggctgtgccgaattgcgcggcggctaccaaactgaacagggctcctccctcagctttggcggcgagctcgaaccaaggatctttggacgacaccagtaaccccccttttgttgttgttgctgttgttattgttgtttccgttcatgcatctagtggtcgacagaatcctggttcataacatctctccgcttgtatagaggtcacgaagagacggctagctttgcttggtgctggagcgttagccactggcctactgagaacaagctctgctgcgttcgctgaagaggtgccgaagaattacaagtcgtacgtggacgcgaaagacgggtactcgtacctttatccagctgaatggagggatttcgacttcttgggtcatgattctgcgttcaaagaccgcaacctggcccttcagtgtgttcgtgtggggttcattcctaccgagaaaacagacatccgggacctaggaccgatggatgaggccatcttcaacctagtaaacaacgtctacgctgccccgaaccaaataccgtcgatctacgacatgcaagagcgctactacttgattgagtgccagcacgtagctgtgctttccgcaagaatttcaccattgggagcctcgaacactttcacgtgtgaaccgaagtcgtcttgccgaactcaagacccacggagacctacctatagtgacgtcaaagtaccagtgagcatggaggttttggtt

SEQ ID NO: 136370 - DNA, 415 bp, Zea mays
  Clone ID: MRT4577_55843C.1
ttgtcactggcggcggggactacgatgcatgttgactttgtcatgcccaaggacggaaacttgactgcatgtttggagtcctacaagcccacaaccacaaaagctgtcatgcattattggtttgacatggtcattacaaagggggagggatgaggctgcaagggaaatggaagcgatggttaaagaacatgggataaatattttcaaggtactgatggaatataaaggcatccttgatgggtactgatgacctgctcctgcaaggcctacacgaaatgcaagtcgtttggtgcccttgctatgttccatgccaagaatggtgatgctagcgccgcgggacaacagaggaagattgaccttggaataactgctccagaaggacatgctctgttatggccttcaaatttagaaggag

SEQ ID NO: 136371 - DNA, 578 bp, Zea mays
  Clone ID: MRT4577_55844C.1
ggccgcttttttttttttttttttatttttttttttttttttttttttttttttttttttttttttttttttttttttttttttttttttttttttttttttttttttttttttttaggcccaaacccaaaccgggtttaaggggggataaaaaaaacccggggccccacaaaggcccaaagggcccttaaccgggaaaaagggctttgtttcaccgggagggacaaccccggaaaaaaaccggccgggggaacccaaccccccaaaaaaaggtcacctggccccaaacccctggaaggactaggaacccggggggggctgaaggaaatacaccagggggggggctgccccaagggcccgggccgggacccgttcatgtgggcccgaagaaacccacgctgaaccccaacgaaaagccagataacttccctggcggtggcccccaccaatttttataaaaatagggggaggaccccgcggagggaaaccggacaagcttgcggggggggccaacaaaaaatccccccagggggggagaaaaaattttcccaaaaatacggggcctccccggggcgccc

SEQ ID NO: 136372 - DNA, 924 bp, Zea mays
  Clone ID: MRT4577_55845C.1
aggggaggagagtttcccgcgctcagacggcggccaccccatttccatcgcgggcgggcagggaatcctagtctaggggtcttcggcccgtgaatcaccgtacctcatggcccccaagcgacgtcgcgcggatcagggctcatcggtgcctgcgccacctcctcctttgcggaaggcaaaacttcagccggttgtcatcttcgcccacggcgccggtgccccttcctcctccgactggatggtccattggaagaagatggtgcaggacgcattaaatgctgtagccgtggtgacctttgactacccatatatgtcgggtgggaagcgcagggcgccgccaaaggcagagaagcttgttgatcaccacctgggcatcgtgaaggatgctgctgataagtatcaggggcaccctcttattttgatggggaagtccatgggatcgagggtcagctgcatggtggcaagctccactgaagttgatgtttctgctgttgtatgcttgggctacccgctaaagggagtgaatggagcagtgagagatgagacactcttacagctgaaggtaccaacgatgtttgttcagggaagtaaagatgccctgtgccccttagataaacttctgtctactcaaaagaagatgacctgcaagaatgaactgcatatcattgatggcggtgatcactcttttaaggtcggcaaaaagtacctagaatctaaagggttaaatcaatatgatcttgaaatggaagctgtcacaaaaatttcacagtttttccaggattccttcactgagagttgtacctagccgttctgtatattttccttaacaccttcatggtgactaaacctaatctctgtcttcgaacaagattaatatgttagtgtaatattttggtgtaagatgctagttctgattgacagtcc

SEQ ID NO: 136373 - DNA, 384 bp, Zea mays
  unsure (1)..(384): unsure at all n locations
  Clone ID: MRT4577_55846C.1
aaccaattgccatcaatccaggcatccatccatccacccgccccgctgacggaagcaatggcccggatcgtgctcttcgagtggtgagtggtcgcgccgttacaccgtctgcgcgccggccggggcgccattgcggcgccgtcaccccccgcgctctccgcggcgccgcgccgtcgtcccgcgttcgcgttcattcaccgcgactgggcgctccgcgtnttcgcgcccacccgcctcgccttcggcggcgtcgaggaggacaagccgagcgccgcgcctgggcatgaagaaggcgcagaaaacaggtttatcataacacaaaatgcgataattagttacccgccaaccgactttgcttgttggctatataaatgtacatggggc

SEQ ID NO: 136374 - DNA, 205 bp, Zea mays
  Clone ID: MRT4577_55847C.1
agaactcttccatctgtgcccggcgatgagatcgtgcttacatgcagcacacagaactgtactaggcaggcctccatgagaccaaagcccagcgaactgtcgtggaacaatctacgttagcaagaaagctcttattagttgctggagcattcatcattaatcaacctattgaatgggccccagtcgtttggaatcaaatgctaaa

SEQ ID NO: 136375 - DNA, 413 bp, Zea mays
  unsure (1)..(413): unsure at all n locations
  Clone ID: MRT4577_55848C.1
aaacacccaaaaatcttcacccgttcgttctttaacaagaggagctgccgctataataatccttcaacattcatccttcactactaaagactcctataatacctcctttctgcttctttatcttcaattttactttttcattccattcctcacaaccctactttattatattctaccatctaacacntttaacatatttatcatcttattagatcaaaatcacttctttccttctttttacatttccttattaactctattcaagtgtaagtcttatcataaattctcattcattacttatattttatacttatgatttataacatttaatttctcataactactcttataacattttatattatttataacatattctctcttttatcattttatttaaaactttccattta

SEQ ID NO: 136376 - DNA, 913 bp, Zea mays
  unsure (1)..(913): unsure at all n locations
  Clone ID: MRT4577_55849C.1
tcgaggccggccggctattgattatttaccatgagaggttttttctgttatgtttgccatgagaggtttttacactgcagggttgaaaatgaccccgtatacctaggtccgtgatcaagggtcaatgcttttaaccctgttttacgtgactagatcatgatgtgataaaaatttgtgtaccgtattgttctctaaaagccatggtctgtttgagtaacactctaaattaatgtataatattgttctatgttaagttttattcctttcaagttgatatatgtttattgtttcttctgttatgatggtattattgttaaactggaaatagataatatcaacttccttttctaagtaagatcatatggtagtgatttcggatgctttgctgatttattttgtagcaatctgtccatatattatggctactcattcttttttgtgcgatatgagctgaaagtcatggaaattaaaatacattgttacaagttctgatgaaaatgcaacattgttcaggttgggaacatcagatagcctgttgcatcaaattcaggagaaaatcaagtgggctgacacaatgagtgatgtgaacaagaagcaccagaaagaatttgaagacagagtggaagaggccaaaaaatcaattaaggtgagctagattaaactgaaacatttggtcttaggaaaggaataaatttgcatctgcttgtgatgagttaatgctgtgttttcctcattttcctacttctgccttactgcctcatgtttagatatantatttattttttgagtgttcatataatgggcactattgtaanaaatagtgttgccgaaccatgtttcttacttgatggcagaaagtgaacaatttagccagcagacatcgacatacgagggcatgatgactagctacctc

SEQ ID NO: 136377 - DNA, 116 bp, Zea mays
  Clone ID: MRT4577_5584C.1
tcaacacgtaggagatggccgcacctattgcggctctaccgaggtttcaacctgtgtcaccagtagcacgcacagtagaagccaacgccaacacgacaggcaaaggtataggacgc

SEQ ID NO: 136378 - DNA, 163 bp, Zea mays
  Clone ID: MRT4577_55850C.1
tctcgaccatccctgcaaattaccgctatggctcccaagatcctagtcatccttgtgggcctggtcttattctcaccggctgctctggccgccttccatgtgatagatatgctggccaataagtccacttacattcaacttcctgaagcttctgcataacacc

SEQ ID NO: 136379 - DNA, 385 bp, Zea mays
  Clone ID: MRT4577_55851C.1
ctcctacttgggttgaactgaagctgaagcaggttttttgtctctatgtctgtttttggaaccaaggataggggctctgtcattcatatcaggaagaagagaacacaccttccactcgggaaacatgttgtgaaaactgccagaggcatccagatcttggaggtcaccatcgcgagaattgagcaagcgcacaagcaaccacaggtgttttgtagcctcagaaacaaatcagacaatgaatattttgagaacttgggatgccctggtcgtcttgagctgccaatattatacgactatgttggctagagtgaccaatcatgtttatatgatcatacaaatgaccctgcctttttatactacgcacaacatatctgctgatagacgt

SEQ ID NO: 136380 - DNA, 275 bp, Zea mays
  unsure (1)..(275): unsure at all n locations
  Clone ID: MRT4577_55852C.1
aaaaaaagaatgaaaaaaaccccaaaataaagggggcggccaatttgggtttattatagggtggggaataccggaaaaaaaatataattggggtatccaaataagcataaaaacgggtctccccgattggggtgataaaaaaggagggggcaataaaatattttgtttccagaaacattttaaaaaacactgnnnggggtttatcattttatccaatttaaatatatcactgataaagggtaacggcctccacaagggcctataaaaagggaaac

SEQ ID NO: 136381 - DNA, 418 bp, Zea mays
  Clone ID: MRT4577_55854C.1
tttatgttttgttttttttttttttagcaggaaaaaaatatttcaattgattggaagtatctatatagaatgatagctgggtaagttgacctaccacctacattgctaactccaattaatctaaactgacatgtttgtgcttgtaagaacggcaacgagaacctaatgtacataactgactaatgcagctccatcttcagcctatacattgatcgatgctcagggaagaaaaaaaatgcgtacatgaatggatctgaggaaaagaaaaccatttattgctgtagcttttgattacgaatcaagtatcccaatttgtatgaaccactgcaaggtatttcttatagaggtatcgaagattttgtttgcactaagcatggcatgatgtgtatcatctagcacgaaccgttgcttgttgatt

SEQ ID NO: 136382 - DNA, 324 bp, Zea mays
  unsure (1)..(324): unsure at all n locations
  Clone ID: MRT4577_55855C.1
cttgaacgagatgatgaggtaatacttcagggcgaactatgtctcctttattgctatcctgctcatcttagtttgttgtaacatgcaatgtgatagttgcagtttcctgaatatgaaagatttgatgcaatcagctttttatgtagaaaggagagacataattaacttgttcttttgtgttgnggggggggatttggccattttggatatgaagtgcaataaatatgaactatattgtttttgctcaagtagaaaaaggttgaacttctatatcagtggactgtttttcttcattctctttcaggatgtgtattttgatgatga

SEQ ID NO: 136383 - DNA, 669 bp, Zea mays
  Clone ID: MRT4577_55856C.1
ggccctaggggcctttttttttttttttttggttttttttttttttttttttttttttttttttggaccgggtgctttggttttttaaattaaaacacaatttcggttttggcaatgtttaactgtaaaaccagggcaaagtaaccctaaccccaaaacgatgaagttgccgacttctgcttcagatccaaatccgaaaaagaaaactggtcctgttggacctgtgacaaagaaaaaaaacttcaaattgatactctaactatttgacggtggcttttgcagttttctctgccgcagcctcaagatcttctgcattggtcaaagtcattcccctttcccttagaatcctcattccctggcctagattggcggcggccaaccgaaaaacaacaagaactttaaggttcacctgtttgggagtgttaacaattccacttgctattgcattacatttcatattgccaccggcaacggtcacgagaattggcatcgccctatcttctgaagccggaatcttaaaagtttaaacaacctggccctgtgatgcagttgcaccgacatcaagaaaaatggaggtggtaccaccatgccactttataatattcatggtcgccgtggccaaggccgatcctgttcccatgccaccgatctctctctctagatcaatat

SEQ ID NO: 136384 - DNA, 667 bp, Zea mays
  Clone ID: MRT4577_55857C.1
cctcgaggccggccgggattagagttcccccttccagtctatgcggcgcgcatagctcaacgatgtgcgccgatatcgttgggtagttgtggtcgcgtcttctcttcataaatctaccgctgcggccctatccggatcacttcatcgctcctgcacccaaaatccgtgggccagaccaccaccgtggcagcgaaggctaggagcggtcagggagtgccggcaacgcggagctcgtcctcaaacggcattctgggctccacggtgggtctgggggattcacggtgtttcttggaagtccgtgtggccgggagcgaagagatcaaccatggtggcgatcggagtccttcaccggacgtcggaggcctgcgctgtattgcggtctgggcatcgtcggcgtcattgattaagcgcgaggacacgtgtcatctgaaaagcaagttgctacctggaatctcaagtgccaggagaagaacatgtggttcaggaggagccacaaggcgaggagtatgatctgatctaggtggcgtttctcagtcgacattggcgccgacgatccttaattcgttttacatttattcctttattttgtaataagtcttccgctatgtaataattgctctgatgttttatgacatttatctctaaaaaaaaaaaaaaaaaagcggcc

SEQ ID NO: 136385 - DNA, 542 bp, Zea mays
  Clone ID: MRT4577_55858C.1
gccggccaggccgggaccctctgtgctctgccccccagagtaccccttgcctgcctggtactagtactgcaatgtcaagtggtcgtgagcttctccggaggtgatcgtcagggtatacgccgtcattcgcctccagtgtcaccttgttcgaactgcgctgctgaatcactgagcaccactccacataagctgtcgaacttgaaacatcttatcagccggaggaagagtgagctggagcgattccctcagcatggcggaccgcattgccaccagacttataccgtgaatacgcgaaatgtcgacagaacaatacaagacgttgtgctgctaccgcaatcgattgagtgccgcaccctagatgactaatgtccaggaacctgaagctgcactatgttatgctctgactcgtgcagcatggaatacgcggaatcctcgatgtgaatcagcataggacctccttagcgagttagacatctcctgagtagagcgatagcgaagcagcaccgcgagagagtagactacagctaaatgcccctgaggtg

SEQ ID NO: 136386 - DNA, 1686 bp, Zea mays
  Clone ID: MRT4577_55859C.1
tgggtccctcgaggccggccgggacctgatttcttccgccttgtcagcgatccagacccacccgagccaacaacccatggccgccgcggcgccgcgtctcctgctcgcggtcgcgggcctcctcaccctcgccgtcctcgccgccgcggtctcgccgtctctggcggcggggccgccggtgctgcaggacccggcggagctcctgcgccttgccaaggagccggccttcgcggactggatggtcggggtgcggcggcggatccacgagaacccggagctgggatacgaggagttccagaccagcgagctcgtgcgccgggagctcgacgccatggggatcccctacaagcaccccttcgccgtcaccggcgtggtagcaacagtcggcaccggcggtccgcccttcgttgctctgcgcgcggacatggacgcgctgcccttgcaggaaagtgtggagtgggaacacaagagcaaagtccctgggaagatgcatggatgtggacatgatgcacatgttgctatgctgttgggatctgctaagattcttcaggagcatcgtgatgagttgaagggtacagtagttcttgtcttccaaccagctgaggaaggtggcggtggggccaagaaaatgatagaagacagagctgtggaaaacatagatgccatttttgggcttcatatagctgactctgtgcctattggtgtgctggcatccaggccagggcctattatggctgggagtggattctttgaggccgtaataagtggaaagggaggacatgctgcacttcctcatcacactatagatccgatattggctgcctcaaatgttattgtgagccttcagcaacttgtttctcgagaagctgatcccttggactcacaggttgtgacagttggaaagtttcaaggaggtggagccttcaatgtgatccctgattcggtaactataggtggcaccttccgagcctttctgaaagagagttttaatcaattgaagcagcggattgaagaggtgattgtgtctcaagctagcgtgcagcgctgcagcgctgccgtggacttcctcagcaaggaccgtcctttcttcccgccgaccatcaacagccccgagctccacgacttcttcgtgaacgtggccggcgagatggtcggctcgaggaacgtgagggacaggcagccgctgatgggcgccgaggacttcgcgttctacgccgaggcggtctcttccacctactactacttcgtgggcatgtacaacgagacgcgcgggccgcaggcgccccaccactccccctacttcaccatcaacgaagacgcccttccctacggcgcggccgggcaggcggcgctggcagctcgctacctactcgagcgtcagcagcctgctgccgccaccgctgataaggcagaaacccatgatgagctgtagattagtacatgatgtttgcgtccctgcccctgtccctgtgttgatggaattagattgagcaataatttcttcgccaagtttattcagcggctgtacatatcctggtatctccatgctttggtaatgatcggttgggatcagtcagcaaatagtctgagaaacatgctttagtctgagaaacatgattccatcccttgatcaacgtcgcagtaactatcttctgctgatttaaaaaaaaaaaaaaaaaagcggcc

SEQ ID NO: 136387 - DNA, 408 bp, Zea mays
  Clone ID: MRT4577_5585C.1
tctcacgcatccatacatgcgtctgcatactcgagagcggacgcccgttcgaacgctgacgtggatgtcctatacgacgaaatggaacttttccatactctttccaggaatactgtcttcaaccactgtactgtcagtactcgcagctgacgataatgccatgctaccacactgcgaattcctttgctcgttgctttcaatatggatcgtgtgaccaccaacgctgggaccttccacatcatgacctccatagacagctctgttaccgagatcatgccgagtcaccaacagaagtcaccctgctcaaggcggacgacaccaccgccaacgcccacgtggagcagctgcacgcgaagttgctcaaggccacgacctcgcagtcggccctcatcgagatcatccagttgt

SEQ ID NO: 136388 - DNA, 1147 bp, Zea mays
  Clone ID: MRT4577_55860C.1
acctgatctcttccgccttgtcagcgatccagacccacccgagccaacaacccatggccgccgcgacgccgcgtctcctgctcgcggtcgcgggcctcaccctcgccgtcgcggtctcgccgtctctggcggcggggccgccggtgctgcaggacccggcggagctcctgcgccttgccaaggagccggccttcgcggactggatggtcggggtgcggcggcggatccacgagaacccggagctgggatacgaggagttccagaccagcgagctcgtgcgccgggagctccacgccatggggatcccctacaggcaccccttcgccgtcaccggcgtggtagcaacagtcggcaccggcggtccgcccttcgttgctctgcgcgcggacatggacgcgctgcccttgcaggaaagtgtggagtgggaacacaagagcaaagtccctgggaagatgcatggatgtggacatgatgcacatgttgctatgctgttgggatctgctaagattcttcaggagcatcgtgatgagttgaagggtacagtagttcttgtcttccaaccagctgaggaaggtggcggtggggccaagaaaatgatagaagacagagctgtggaaaacatagatgccatttttgggcttcatatagctgactctgtgcctattggtgtgctggcatccaggccagggcctattatggctgggagtggattctttgaggccgtaataagtggaaagggaggacatgctgcacttcctcatcacactatagatccgatattggctgcctcaaatgttattgtgagccttcagcaacttgtttctcgagaagctgatcccttggactcacaggttgtgacagttggaaagtttcaaggaggtggagccttcaatgtgatccctgattcggtaactataggtggcaccttccgagcctttctgaaagagagttttaatcaattgaagcagcggattgaagagtgtggactgtcgtgcagaggagactgcgagtggacctcagtaagctactctgtttctcatgtctcacgtgattgtgtctcaagctagcgtgcagcgcttcatcgctgccgtggactttctcaacaaggaccggcctttctttccgccgaccatcaacaggcccgagc

SEQ ID NO: 136389 - DNA, 176 bp, Zea mays
  Clone ID: MRT4577_55861C.1
atcaccagctgtcccaatggactcaaagattgccgtgtatagtggtactgtttctgctacagaaaaggagaagttcaaggagcagcctagttctttggggtgtttgaccacaggagaaactcaggataaatcaggtaaccatccacatgctcattcactgaaatgccagactgaaa

SEQ ID NO: 136390 - DNA, 562 bp, Zea mays
  Clone ID: MRT4577_55862C.1
gttcatggagcttttacaagcctatggagttatgtgtgatccatatataccagcgatttatgactcacacatgtgagaagtatgcccatctaccgtgggtaattgacctggtaggtgggcaggcctgctcgagatagcatcccatctttcagctcctttattctttgggatcactcactttgtagtgctgtggtgttctgctacctaactgaatgattttgcttgctatatttgattaattctctgacgaggcttccctgaattattttttctatggattctcacttttacagcctgataagaaagagatagttggtatgcatgaacaggcctttgcgtggaaaatcatgcagctggatgacgaatgtgtagccttatgtgacagaatgtttccagggacatacactcttgcataaggctcttacagaagcctctgaggtcttgtgtaacaaaggtgtctatggcagatagagtgcccagttgttggctaccttctgcgaccatattctgaaaagaggttgcagagaaaaactcactgatggaaccatcgaagatgcccttg

SEQ ID NO: 136391 - DNA, 310 bp, Zea mays
  Clone ID: MRT4577_55863C.1
tctggagcggccgccctactcaaccagtcttgttttttttattacacaagataccaagagcacggggcgcgcactgtctttaattcgcgcagagcctaaattgaaaaggatattaacgcccgtctatgagggctgcccacctataaacataggtgcttggcactactatagggatacatggatcaagggtggtgaagggtgtagagagtgtggatattgcttaaaacattaacccacgtcctggtgatgtttcatcactaggggcaggcggcgtcacgaaggccaccctcagaataacaacgccaggatt

SEQ ID NO: 136392 - DNA, 831 bp, Zea mays
  Clone ID: MRT4577_55864C.1
ttttttttttttttttggaatacccaagaacatgtgagtgacatgtttctcttgtgatgtatgtaagggaagtacaaagcatatatattgttcaggcaatcatcagttcagatccgaagtacagatagatctaacccagtgtttattgcttacataatctagcctgcatgatctccggggacgacaatccggggacgacaaccacactctggctcataataattaagctacccgaaatacatatatatatatatatatatatatataatatacctacttacccatgcaggagtagaaattgaacaaccaaattattagcttgaagcagcggcacgtactctattctggagtaatagtacgtatgtaggtagcactactacgtcatgctcttcgccggtttgcctatatattggcctatacgtactctcgcagcatatctcaatcagaactcagaacacaggtcaagttcaccagaacgcggcgggttctcgatcaggcagcaggagcgcagtcgtagtcgtcgtcgtcatcgtcgccgtcggtctctgccatccttccccgtgcgctgcagcacccatcgcaaggcgcggcgtaaaccgcacccgaggaggaggtaatgctgccgccttggacgaggtagtagctagccgccgccaccgacactactgctggtgccatcctagttagtttaagactttaagtgtgcgagcgaattgcaagctgacagcgggaagaagcaaagctctcgcttggtcagttggtccaagatagctagctctagaggagtctagctaggtagtggaagctgctatactgtggctgatggaaact

SEQ ID NO: 136393 - DNA, 205 bp, Zea mays
  Clone ID: MRT4577_55865C.1
ttcttaaagcctgcagactgcactgaggagggtgtttttgattaagaggcggaggcatccaccaagccagacggatggttggatgatgaacctgaggagactgatgatcctgaggcaagcaatccgtgacgactgggacaatgaggaggatggtgaatgggagagcgcgagaagattgccaaaccctcaagatgatgaagtaggc

SEQ ID NO: 136394 - DNA, 364 bp, Zea mays
  Clone ID: MRT4577_55866C.1
gagcaccttcggggcggtacgtctgagcagatctaagaggacgtagccaatattcaaatgagaactttacaaggtctatgtagggtaaagcgataaatatgcaacgggactcaaacatgggtgagcccatcgtacaggggccgaaaacatgcatattcgcgatcacacgcgtcacacatgagggatataccaaaggatttgacgaccacccacgatgaggaggaaggaaaatttctcaataccggactactgccacatggggcctatcaaagagacaactctggtgcttaacggcaccgtcaaccctggaatcagatagacctagataaagtccacctttcgggaaatcaccgccttagcgccg

SEQ ID NO: 136395 - DNA, 579 bp, Zea mays
  Clone ID: MRT4577_55867C.1
gaacaaatgggcctaagggtacttgttacgtatctttcctgctttcctacaaactgtacattacatttatatcttgctagtacttctgaattgccaatggcattgttggaaagaagcagcagcatagattcttgacaaaataatcctccttttttggcaaaaagtattggacaaaattgaactctgaatcgtgtttttgccatgctttgcaaacctgtaaattctggcatctgcatcaattctccactgcactgctaccaagaaaatctgcagatttgcttcgctagtgctacgccatattttgcttctccaatatacacatcatgcaacctctacgaatggttgctgctatgtgcaacagtaaataaatgcaaagatatgggcaagacactacaatttggatggaaatcatttattcaaaaatcatttgcatcaatgctgctttgtagatatgtaactatgatatcctcactaaatttgtgttttagcccctaataacatgcataataatttgtaggttattttgtagcccaagtcttctgtatttatttcagttttactttattatgactgcttgga

SEQ ID NO: 136396 - DNA, 300 bp, Zea mays
  Clone ID: MRT4577_55868C.1
ggacaatagcaagaatccagccctcaaaatttggtacacccaccccattccatttttgtttccctttcctttcgcaggtgcagatttggaaaccaggggaaaaggatttggggtttaatgccacccaatttgcaaaaactgggggcggtcctcaaccacctgctattacatattgaacggcgccgtcgatgggctattactggacggcggcgtcgcccgagtccaactgtttgagcagcgaggcgcaaaagggccacggcccttccttgaggtaacccaacgggttggcggggcccaagt

SEQ ID NO: 136397 - DNA, 386 bp, Zea mays
  Clone ID: MRT4577_55869C.1
atttttacacatctttttttttaattattggtatgggttttatttttttttagcaatgaaacccaaccatactatacattaaatggtacatacatttgaaacatacacagaaaaaaaagaaagaaaaaacagaaaggaacaccccatttggttaacgcacgctaaaccaccaacacaaacagtaaaatgctgataccctcttctttagcctcaaaattgcaaagtaaggcgtttgaacccctgtaaccgaacctccctaagagctaacccaccccgagcaaacgaaaactgacttggtcgccggaaacatgcaaatcaaaagcccagcgccccaaacagcgttttgccctgcccaaccttaaaataaaaggccaacatggcaaaca

SEQ ID NO: 136398 - DNA, 767 bp, Zea mays
  Clone ID: MRT4577_5586C.1
gaggctggccgggatcttccagccgccctccgcccagcagcagagccaccatcctctcaactcggatccccaagccctcgcctccagctcttgccacggcatccatcccctgttcggacctccacccggccgcgtcctcgccggtggccagcgccgctgcatcgcccttcctagcgtcggccttggcaccgcttccccgagcgccccagtcgagctcgcccatcctctgctctagccctttctccacgccgtcgctgagctcgcccctcccctcagccatggacacgacgacctgcagcccttcttggtggccaagcccatcttcctgctcgcgccccctctttttccacctctgcgcgtatcagctcgtccaacccccatggtgtttcctccctctcggctcccttgctccctccccatggcgttccccctggatgttggtgatctgttccccacggtgcaggcaaatgttctttccctccctgcagcagcaccttggtggttgtcgagcagcacgtcgcgcttgcgcagcctcggtcacgacgttgttcaccccgtaaatctgcacttttaggagactcggagttcgtcctagatgcaaaagtaccttgctggttatggagaggtcagctgaaggttggagcaggatcaggtggtgttttggaggtagatttaaacattttggaggtggattgaagctttgactggactgaagtttattgcatctggagaacatcatttggctctacctgtattttattggggaa

SEQ ID NO: 136399 - DNA, 443 bp, Zea mays
  Clone ID: MRT4577_55870C.1
gttcttcaccccaaacagtagcctataaactctgtatcgccgcggctgtcaccgtcgctatctcttcccatgaacggcttcggggacctcggtccacatgatccacatcttctcgggactcccgcgcctcgctcaagagctacgccacaagatcctgctcacccccgtcacaagaaaacgcaaggagcatggtacatgtatggtgttacgagcagaggtacgcatgaaccgtcttcacaggatgtatgtactcgctactacaactcaggtgatgaagtggccagttcatcaccgtgtctgggtgcattctgcggtcgtatgcaacggaccacccgcaggcagctacgacccacgactaggacgacgagtctgtcgcgacagggggctcgacgccgcctattacctgctcgcggtgatagtcgcatcaacgcctccccttcgcg

SEQ ID NO: 136400 - DNA, 494 bp, Zea mays
  Clone ID: MRT4577_55871C.1
gccgtggttgtttttttttttttttttttttttttttttttttttttttttttttttttttttttttttttgggccccaaacaaacacacatattttcacctcggggttcaagaggccaatcctgggggcaatcggacatacatgaaacatggggggggggggcaattcaatacgggagaaccaacccaacaaggggagggttacttttaacatgacagcaactctatggctcacttcataaatgggagggaaaatctcccccaggaaaaaacatggggatcggttcatgccccttgttctccaaacttacatccccaaacccaggaggaaccagggggtggatccatccatccattgggaccattcataagggaatcggtttttacttgccccacccaaaggacgaaaatttcgatgaaacctaaccctcctcctcctgctgcttggggcccttggtacccatgccctccttgccgtaccccggtggcttccc

SEQ ID NO: 136401 - DNA, 389 bp, Zea mays
  Clone ID: MRT4577_55872C.1
aatcttccagacatggatacaaataacctagcagaccttgctctcatatcgactatccggtccttcttctccgtgtttacgcggatgctgatgataaccatcgttgcaagcgctgtctccagcgagacgacctcgcggggcgaccgcctcgagaaatgccatgactgcaccatgtaaaaagtggagggccgactcggcattcaagtgcttccgaggtggcgagcacgcgcgataatcgtccaggtgatgacagatgccaaggccatggacagagttgatgggtcgtggctcttgcgcatcccacttagcacggacctccacggcagctgactgcggtgcataactccacagcgcatgtgaggcaacccggtgtcccagtccaaccaacc

SEQ ID NO: 136402 - DNA, 1087 bp, Zea mays
  Clone ID: MRT4577_55873C.1
ctgactgaaattgtaacgtaaagtctgaaaatgaagctccaacataatgactaaaacgctaacggggcgactgaaactgtgatgggaataactgaaagtctgaaactataacgaacgactgaaaactcaaagaatcaatggaatgacaaaaaatacgtatttaatagcataaaatgtgcccacctaataaataaataaataacggaaacgttgtcccatcataatctacttcaccattgattgtgatagtctattatcttctcatggacggacggacgaaaaaaagtggccccgttcccacggtctagtggggttccaccgaccatgcgtcgcgcacgcgggctactcgccgattagtccgtaggtccagatgatacgcgattggctcgagtatctctacatacatacagagagactagtgtgtgtaaggaatactacgtaagtttggcatgtatttggaggaaaggagaaaggacacagaagtggtggagtccggttgttgtctaaaaggccctggcgaagctgtataaatagattagtgttatatagaatttataaggttcatgttgaaataaggaaactatataaataaaaagaagcaaacatatcaccaaattccggggcaattgcatccttatagttttgaggtgttgaaattgtctaaatcatcaataaatttgaagatctcatcatgaattggcgaatagtaatctcatcatcaatttgtcttcttaatgctgtcatctccaattcacaaatcaaaactgaatattacaatgtaatgtaatgctaaacagagtattttaaaaatatatgtatctttcagtctcaagtggtaaaaactagatactgctttgactagtgagcgacagtgtcgtctgaggaataagtgtattaatttggaaggacagagagagttgatcgaaatacactgatgcgcgtgcaggtgcagttggggcggccgaccgccgcaggcatattcaatcctcttaaatgggtcctgtctgggcctttaccctgatgagagatggaatccatggcggggcgggggtgaaggcgcgagtgaaccggccgacccgagggtacc

SEQ ID NO: 136403 - DNA, 1200 bp, Zea mays
  Clone ID: MRT4577_55874C.1
cattgggtacctcgaggccggccggggcactcaagccctgcccatcagcacaaccaccaccaccgcctggccgtcgtcacacgctcgcctccttccatggcgcccaggaacgctctccccgccgccagcgccgtggccaacggcatggtgatggagccgaggttccgcggcgtccggaagcgcccgtggggcaggttcgcggcggagatccgggacccggccaggaaggcgcgcgtgtggctcggcaccttcgacaccgccgaggccgcggcgcgcgcctacgacgccgccgcgctccacttccgcgggcccaaggccaagaccaacttccccgtcgcgttcgccgcgcttccgccgccgccgccgcccaagaagccggccgccgtgaccgtgagccccagcagcagcagcaccgtggagtcctcctcctcctcctcctcccgggactcgcccgccacgccgcccagggccgcgtctccgtcccagcaggccccgtcgctcgacctcagcctaggcggcacaccggccatggtggccgcccagccgttcctcttcctggacccgaggctcgcggtgaccgtggccgtgccggcgcccgtgccctaccggccgaccgcggtcgccgccggtgccaacaagcatgctgcggcatcctgccgtgaagaggagcagagcgacaccgggtcgtcgtcatccgtggtggacgcctccccggcggtcggcgtggggttcgacctcaacatgccgccgccggccgaggtggcgtaggtggagcgcccggtgacacgtatagatgtccaaacgggccacccggcacggacccggcccgaacccgtttcggcccggtacgaatagggccgggccaggcacggcccgttgatgcttcgggccgggtcgggctggcccacgtgcctagagacatgcccaaacccggcacgcacagggaaaaatcgtgccgggccggcccgttggcccggtgggcctcaacggaccgggccggacactggcccgaaccaacagtagaacggtatataaatacatatatttaacataattaatcatatataataacatattatttatatatattaagacaacaaaatatttatgtatgcattttatatttatgtatgcattttatatatgtttggccgcgtatttagtatttacatactatgagagaattaaatgtatttacat

SEQ ID NO: 136404 - DNA, 777 bp, Zea mays
  Clone ID: MRT4577_55875C.1
cactccagccctgcccagcgcaccaccaacacctggcaccgtcctcctccgccgtcgtcactcgctcgatcgctcctccatccatggcgcccaagaacgctctccccgccgccagcggcatgacgctggagccgaggtaccgcggcgtccggaagcgcccctggggacgctacgcggcggagatccgggacccggccaggaaggcccgcgtgtggctcggcaccttcgacaccgccgaggccgcggcgcgcgcctacgacgccgccgcgctccacttccgcgggcccaaggccaagaccaacttccccgtcgcgttcgccacggccacggccacggacacgcgcgcgctcccgctcccgctccggctcccgctgccgccgccgccgcccaagaagctgtccgtgagcccgagcggcagcaccgtggagtcgtcgtcccgggactcgcccgccgcgccggcccccgcgccgtcgctcgacctgagcctcggcatgccgcccatggtggccgcccagccgttcctgttcctggacccgaggctcgcggtgaccgtggccgtggcggcgcccgtgcctcgccggccgaccgctgctgccgcgggcgcgggcgccagcaagcaggcagcatactcctgctgccgtgaagacgagcagagcgacaccgggtcgtcgtcatccgtggtggacgcctccccggcggtcggcgtggggttcgacctcaacatgccgccgccgggcgaggtggcgtagctggaccgcgcggccgctttaaaggatc

SEQ ID NO: 136405 - DNA, 433 bp, Zea mays
  Clone ID: MRT4577_55876C.1
ggcgactgctacgtcgccaggagcggcatgttcatgctcgcgatggccctggtcctggtcacggaactgatcagcctcggcctcaacttggcgaccgaataggacgcggtggcctgggccacaacgctcagactagtgagaggcgatgagcgcgatgatacgtgcgtacgcggagctggcgtacgctgtacaactggactggcgatccaatcactacggcacgcacgctggcatgctggcagatgcaggggagaagcgcagcgccgaccaacaggaggctgctgataagcggaagggatagtgcgtgatgcataaggacacgaccgcgtacacaaccgtaagtagtaggcgttgagcgaactgaagtggttggacgaacgagcacagattgattatcgaatttatgccggtacgttagatctgctgcagtcgt

SEQ ID NO: 136406 - DNA, 887 bp, Zea mays
  Clone ID: MRT4577_55877C.1
actgtcacagtcacagcacatctcgcggcggctgcgtcggcggcgacagaggcaggcggcggaggcagcgtcagccatggtgcacgtgagcttctatcgcaactatggtaagactttcaagaaaccaaggcgtccttatgagaaggagcgtcttgatgctgagctgaaattggtgggtgagtatggcctgagatgcaagcgtgaactgtgccgtgtgcagtatgccctcagccgcatccgaaatgctgcaagggagctgctcacccttgatgagaagaaccccgccgtatccttgaggcgccgccttcagaccattgtcttcaagaatggcatggcgaagtccattcatcacgcgtgtgctcatcaggcaacgccacattagagttgggaggcaacttgtcaacattccctcattcatggtgagagttgactcagagaagcacatcgacttctcgcttaccagcccacttggtggtggagaacctggaagggtgaagagaaagaaccaaaagaaggcttctggtggaggcggtgacgacgaagaggaagagtgatcatgtgatgctagctccttcgttttgttagggacctaattttgttacatgaaaacaaaaagttggctgccgagggttctgaaaaattgcaatttaaaattttgagaactgtaattgctaagactcttcattgccgaagttgtttatccgatgaacatgttaattcagtgagcttgcactgctgcctacatgagatcactttctgtcaggaagatattagtgagcttgcattgccgaagttgtttatccgatgaacatgttaattcagtgagcttgcaaaaaaaaaaaaaaagggcggcccggacgcggggcggacgcggggcggacgcgggg

SEQ ID NO: 136407 - DNA, 282 bp, Zea mays
  Clone ID: MRT4577_55878C.1
gtgtgatgcaatacctaccaatagcacgcaagtgtatcagctggtatgcatgcgatggcttgaagctgacacgctcagtacattctctacaactaattcttgttgtctacttgggaccaaccagttggttggtgtgtcgtctaccgccacggctgcattccacatgtcccttctttatcatgttgctcatcttcgatagatgccatgattcagtgaattaagcatttatatttgagaaaggggcccggttttatgaataaaaaaatgacaggattgtatatt

SEQ ID NO: 136408 - DNA, 389 bp, Zea mays
  Clone ID: MRT4577_55879C.1
ctccagtagtagtagacatcagcactgagctctcttcctcacggggcatcagcatcacgatgatgatcgagcggtctgcagccatggctctgctcctcgctctcttactcgtgctactcttggccaccggtggtcaagccgacgccgatgagccggcaacgtcacagcagcgcgctgttccggcggagcaggcgccggcgccggcgccgaagggctacgaaaccctgagggaggaaccggcaccaaccggcggtcaccgtcaccgggagatcaagatcggcgcatgcttccccatcagcgacggcggcagcagcgctttctcctgctaccagcggtgcacgagcaaaggctacgccggcgggcgctgcgacaccctgcccagcggcttt

SEQ ID NO: 136409 - DNA, 601 bp, Zea mays
  Clone ID: MRT4577_5587C.1
cccacgcgtccggagggatccgagccgcatgcggccactttattcacggccttcatctgtatttgctgtgttgttattggaaacttggatttgattacacccacgatcacaatgtttttccttctgtgctatgctggcgtgaacctgtcatgctttctgcttgatctccttgatgctcctagttggcgccccagatggaaatttcaccattggagcctttcacttgttggggcattgttctgtgttggtatggttcttaatacttttaccattttattttgttttatcacaatcttcagcatgaacagttgatacttgagttaggtccttggtttgagactttgtccacttctattatttttaatctaaccaccttctcttcacctacaatactcaattattatttatcatgttttacaatagcaaatatctaactgaaacagccatgaaagcatttataattataagtgttgacatgaatctttgtatcaatttcagtgattatgtttctgatctcctggtctttcactgttgtctcccttgcccttgcaagcctcatctattactttgtgagcataaaaaggaaagctgggaactgggg

SEQ ID NO: 136410 - DNA, 639 bp, Zea mays
  Clone ID: MRT4577_55880C.1
acgcctgcaggtaccggtccggaattaattcccgggtcgacgagctcactagtcggcggccgccgagcggcgtgggcagcgtcatccatggtgcacgtgagcttctatcgcaactatggtaagactttcaagaagccaaggcgtccttatgagaaggagcgtcttgatgctgagctgaaattggtgggtgagtatggcctgagatgcaagcgtgaactgtgccgtgtgcagtatgccctcagccgcatccgaaatgctgcaagggagctgctcacccttgatgagaagaaccccgccgtatccttgaggggtgaggcactcctgcgccgcatgaaccgatatggtcttctcagtgagggccagaacaagcttgattacatgcttgcactcactgttgagaacttcctgcagcgccgccttcagaccattgtcttcaagaatggcatggcaaagtccatccatcatgcagttgggaggcaacttgtcaacatcccctcattcatggtgaaacttgactcagagaagcacattgacttctcccttaccagcccgctcggtggtggcgaacctggaagggtgaagagaaagaaccaaaagaaggcttctggtggaggcggtgatgatgaggaggaagagtga

SEQ ID NO: 136411 - DNA, 436 bp, Zea mays
  Clone ID: MRT4577_55881C.1
gcaaccgaacaattcgattaatatttcagcaaagcaatcatctcaagtccaaaaaacacgagattagccgggacaactagtaagggcgtgtttggcatgggtctgctccaccccagagcagctctactcctaaactctggggggggcagctctgctccagagtttaaattggttctcataaccgggggcaggggggggtaaataactccaaactccatgactaagttggtttttttggagttttcggagcagcaaaagagtactccaaaaaatgtactggagctccaaaaactccatagagtttacaactctggagttagggggtttggcatgctctgaccagctcctccttggagttttgctctggagccatgccaaacaggccctaaatttgtctacaggagtaataaaaactgagagcaaacaaaagtgtata

SEQ ID NO: 136412 - DNA, 1170 bp, Zea mays
  Clone ID: MRT4577_55882C.1
ctagccaggaaggcagcgcccgcggcgggccggggccacacccctcacaaaccacaaacacatctcgcggcggcggcggcggcagagacaggcggcggccgccgagcggcgtgggcagcgtcatccatggtgcacgtgaacttctatcgcaactatggtaagactttcaagaagccaaggcggccttatgagaaggagcgccttgatgctgagttgaaattagtgggtgaatatggcctgaggtgcaagcgtgagctgtggcgtgtgcagtatgccctcagccgcatccgaaatgctgcaagggagctgctcacccttgatgagaagaacccccgtcgtatctttgagggcgaggcactcctgcgccgcatgaaccgctatggtcttctcggtgagggccagaacaagcttgactatgtgcttgcactcaccgttgagaactttctgcagcgccgccttcagaccattgtcttcaagaatggcatggcgaagtccattcatcatgctcgtgtgctcatcaggcaacgccacattagagttgggaggcaacttgtcaacattccctcattcatggtgagagttgactcagagaagcacatcgacttctctcttaccagcccacttggtggtggagaacctggaagggtgaagagaaagaaccaaaagaaggcttctggtggaggcggtgacgacgaagaggaagagtgatcatgtgatgctagctccttcgttttgttagggacctaattttgttacatgaaaacaaaaagttggctgccgaggtttctgaaaaattgcaatttaaaattttgagaactgtaattgctaagactcttcattgccgaagttgtttatccgatgaacacatgttaattcagtgagcttgcactgctgcttacatgagatcaaaaaaaaaaaaaaaaaaaaaaaaaaaaaaaaaaaaaaaaaaaaaaaaaaaaaaaaaaaaaaaaaaaaaaaaaaaaaaaaaaaaaaaaaaaaaaaaaaaaaaagaaaaaaaaaaaaaaaaaaaaaaaaaaaaaaaaaaaaaaaaaaaagggggggggcctttttaaagaaccaagttttcttccccgtgtcggggaaataaaaattttttttatggggccccaaaaaaaaaattagggggccgggttttaaaaccgggggaag

SEQ ID NO: 136413 - DNA, 184 bp, Zea mays
  Clone ID: MRT4577_55883C.1
tttgggtcgtttaaagagaacccgtgcgttacaccgtatcttccacgtccgcacaaacgcataatagaaatacaaattcacgcattagacgcgaaacatgacatgatatcacgtgagtcgtcagcatataaccttcgggcaagtatcatgcatgcatatgctacaccctacagccgaattacgg

SEQ ID NO: 136414 - DNA, 439 bp, Zea mays
  unsure (1)..(439): unsure at all n locations
  Clone ID: MRT4577_55884C.1
cttcgaagaccaattttccaactgggcttgggaccggcgcttttcccattttcacattggcggcccgggcaagttccggattggggaacgggaataaacacccggacacaaggtggttttggcacttacccttacccttgttttcctgggcccccaatttccagggggcttcttgccccggcggcggcgggggcgtccccgaagaagaagaagccggtggtgaagaagaagaacccgccgccggtcaagaaccagggggcggccggccggaaaaaggccgttccggtcgcccgttcttggggggggtcggggcggaagccgccgccggctttggcccaagaacggccgaagaaggatcgaccggcacaccaaccccccaangggttggcccggccggcccagccttttgaagggtgggccggcccggcccggccttaac

SEQ ID NO: 136415 - DNA, 700 bp, Zea mays
  Clone ID: MRT4577_55885C.1
gtatccataagaaagaacctctcctccccacgcagagcacttttaccatcgactaaggggaaagggtcgcttcttgcggcatcttgctttccttccacgccatgaacgaccgcctaggagacgatggctcgccatcaccgaccctgcggccccagaacgtggacgcatcaaaatcgcccctgcggtctgctgatgacggggcctcaacgtaggcgactgccccggcgccggaagtaaggacccggctactcacgcttgttggagaggacacttccgtgcagaggcccttgacctggtgatgactgctgatgctcctgctatggaaagacaagaaaactactgctggtgaaataagtgacacaactgtcatcagatgtctgtccgactcgtctgataaccacctcctgaccctgatatcccatgtactgattgaaagcgctagacaccctaatcctggggtacatagcaaccacgttcatatgagaagagaccaccggatataccgctacttgcacgtatctgaagaacttgatgcgaatgttgctcggctattacggaatgacatcaacagaccgattcacttgttccgtgtgatcgcaaggggcatgatctggacacgtattttgctcgagatcgcgcttctgtgccctctctccggagttgaaagcacgtgtgacttcctcccggtgacatacattgc

SEQ ID NO: 136416 - DNA, 370 bp, Zea mays
  Clone ID: MRT4577_55886C.1
gttgatcttttgctaggccaaaccagtttgttattttcttgtctaacaatactgccacgacataacattgggagctctgtacagatcaaagaattccatccttgtgtttgcatggacccagaaaatgcagatttaagaatgatgcgagtgatggaggcctatcaggtaactttgtgtactatagttgtgtgtttctacaagtgcgtatggatgctatcataataaccacgatcaaacatcatcaaacaactacaatttacagtgcaagtttggtgcgcaattggtggtgatattatcttctagacatatatagatttattaatttcccctttttagtagacattgcctatttttttctacaattgagttt

SEQ ID NO: 136417 - DNA, 353 bp, Zea mays
  Clone ID: MRT4577_55887C.1
gcctctctctctggtttaccgggcccgtcgcgtacgctgtatcaccggcttcgacaccttcaacctactccaagagccctattctgcaccctcaggacattagacggggagtaacacccggcaccaactaacatagtgcattgacggtatgatgactatgggactatcggctatttataacctattgatgattaacaaatcaagcggtcttgtatactgcaaggactatggtttagctgggaggatggataccaatgacagtccaaaatcatcaagtctgtggcattcaatgcatgctatattgcaacaggtctcacataccgctgattctactggcattgatctgtgacaag

SEQ ID NO: 136418 - DNA, 684 bp, Zea mays
  unsure (1)..(684): unsure at all n locations
  Clone ID: MRT4577_55888C.1
aggcatactccaacatatcagagaagccatgtgccgaaccgccgctcttgagcttccccttcttcttccttctctgcgtagccctcgcctgaagcgaggcatatggagaaagcgacgcctacggactacggggacatctacggacgaggaggtggaccacatcccttcccagcggaggtccgcgcagatgctccgcgcgttcttgctgcgggacaggacaacatctacgacgccaacccacagcgtagctccaacacgctggctgcgacgaactgaacagactccattgtggaggcaaaccatgtcataccgaacgtcgccgcctctgctgccgcctgctacctgtgagtccacgagaacctggtccccaactacccctcgactcaggacaatgttcttctcgcggggaaccagatcctctcctacttgcccatagctaactccagctggtacacacgtgctgcggcgatggagaacatgcaacggagtctcctgaagaagagtatcagcgacgtcaagatctgtgaccactgtcgccatggacgatctagccaactcatccatctcgtgtccagcgcgggacgccgagttccgcggagtattcgtaccagcctgtcgtgcgcccgctgctgcacttcttgaacggcaccactcgntactacttcggcgacgcgaacccctact

SEQ ID NO: 136419 - DNA, 207 bp, Zea mays
  Clone ID: MRT4577_55889C.1
ataaaaaaaaaaaaaaaaaaaaaaaaaaaaaaaaaaaaaaaaaaaaaaaaaaaaaaaaaaaaaaaaaaaaaaaatgtttgtccctaaggccgaaaccacccttaagggcaaattttgcaagaataaccataacactgaggggccgttttgaccttgcttcgtagaaggccccaatgggcctttttgggagtttttttacaattgggg

SEQ ID NO: 136420 - DNA, 185 bp, Zea mays
  Clone ID: MRT4577_5588C.1
taacaatttaactttctatatcctttcatttaacaatcacgatctacatcccatgaacaagctgctcttatttcatcttcaccccttttctccataaccctactagagtcctcaaccaactcgccttattattctaaactagtctactttttaaaagtttgatatatccataatccctttattta

SEQ ID NO: 136421 - DNA, 226 bp, Zea mays
  Clone ID: MRT4577_55890C.1
gaaaataggccatattgaggatgttacttttttccccacagacagcacacgcaagaaagggtggttgaaaaagaaagtggctgttatttccagtcctggcgtggtgccctgtcacatgtttccgttcaagtctgtctgcatctaatatactgagttattagagctttagtatcaaattgaagtgtccgagtgtactcatgattgcttaccaaaactcattcttgtc

SEQ ID NO: 136422 - DNA, 443 bp, Zea mays
  Clone ID: MRT4577_55891C.1
gttattatttggggcctaacaactcgggatgccacgaaattgtggtgccgcaagcgatacacgccggcctgatcaaacagaggggcccggtcgaccactacgatcagtaaaaggacatggacgacaactagcgatatgccatgacacgtccattgctaccgaccgcaatcggaggccactggttgggactaaaccacagaacctttcaaccgggactacaaaaatgaacctggaaaaggaaaggtaaacataaaagaaactgcgttgatgtaccaatgagaaaacctttatatgccagtgaatctaaacgcagggcaacacgctggcatcaaatcggaccctattactagtcatacagtacataaagggctgtaggtttggaggattcaggcataactaacatttgtttattccttctgaactttactattttacacggaaaa

SEQ ID NO: 136423 - DNA, 420 bp, Zea mays
  Clone ID: MRT4577_55892C.1
ggggggggggaaggaaaattttgggggcccaaacaaaaaggggggggcaagggaacttaaaacaggggtcctggaacaaaaaaaatcgcccgggggaatttaaatttaaaactgggttaaagaaaaaattttagggccgggggaaaacccggggccaagaaaacttaatagggtaacggaaaaggcaccctaagggccagactcccctagaaccagaggggggaaacaaactattgggggggggaaaccctcggcccagcctaattttcctggaggggcctttaagggttaaccccaaaatccttttggggggcccgaggaacctcccggggtgtcccaagaccgaactgggggggccggaggaattccaccttggggggaaaagccttttaaaggggaaagaagttgggggaaaacttc

SEQ ID NO: 136424 - DNA, 401 bp, Zea mays
  Clone ID: MRT4577_55893C.1
gggaaggggggggggggctttatccttaccccggggcgcaaaccgagcccaacacgggggggcccgggccgccaaacctgaccccaccggggctttgcccaaggggggcaaggcccctaaccaagaagctgcccaaaacccgggggagtacctttggggggggggcccggcgggccccccccacccataaaaaaaaaacccccgccccctcgggaaccaaagcggttgggtcggatccggcccaaaaaaagagttccaccattctgggcacttccttgggaaaaaaacccttagtgttggggaacgggttcctgcaaacaaaccctttgttcccggaaaagacaatcaaccccccggaagaaaacctggcccaaaccctaccgggcggtcgcggggggggg

SEQ ID NO: 136425 - DNA, 325 bp, Zea mays
  Clone ID: MRT4577_55894C.1
gggaaaaaacccccacttttggaaaaaaaacctgggggtttttggggggaatcaaacttccttttaagcctttcccaggtgccttcccgcgccaattgcctaagggggggggttcccttgaatgctttttaactgggggggggtgatcggggggccccccttcggccattttaaaaccgtttgggggggggggggggggccttccccgcctgggtcaccccctcccgggtttttcatgaaaagggggggttccgcgccaccccctttcctggggacccagctgggaccaccatgacccttccgccctgggcccttgtatttcccc

SEQ ID NO: 136426 - DNA, 333 bp, Zea mays
  Clone ID: MRT4577_55895C.1
gccggacccggcccgaatttccgggcccggcttccttttaggttttcaattaaacaaacctttcatggtttaacgaataaattggtcagaaagtcttatatgggggacgggaacctcaacctaattcttgcaagggcttggacccgaccactttttgtagaccgccgcggagcttcattggctgcctaccagggggatcagggcggtggttctcctaaaccatgggaacgtggtcaaactggccctgccaaacgaaccctcactatttacttacatcgtcgcccaagaaggtatcattggctttttaaggatttacctcaacaactcttaaaa

SEQ ID NO: 136427 - DNA, 731 bp, Zea mays
  unsure (1)..(731): unsure at all n locations
  Clone ID: MRT4577_55896C.1
tcggccattcggcacgagggaaggctgcagcaacaccaccaaactgctcctcctccagtctccgcttcccgtgcgccgcgggaacaaggttctggaagcttcggagatggggaagagtagacgcctcgaaggaggaggaggagaacgacggggtgcgggtggtggaggggtggccgccgccgccttcgccgctctgctgctgggctgcgtcgtcatggccctcgtcggcggcgccgccgcgcagggcccccggctcccctccgactacaaaaccctcagcggcgccgctccgctcgtggtggccagaggcgggttctcaggagcgttcccggactccagcgagggcgcctactccttcggggcgtccgccagcgcgcctggcacggccatgtggtgcgacgtccagctgaccaaggacggcgtcgggctctgcctccgcgacgtcaacatgaagaactgcaccaccgtcgaccagacgtaccccgggaggaagcggacctacgtcatcgacggcgtccacaagaccggttggttcgtcccggacttcaccagcgccgagcttcttcagtccgtgtacctaacacaagcaatctggtctcgcactgagaggatggacggcatatatcccatcgtgactgtccctgacgttcagtccatcgtcaacacgtctcctatctggctgaatgtccagcatcccatcttctacaaacaacgcnatctgggaatgagca

SEQ ID NO: 136428 - DNA, 308 bp, Zea mays
  unsure (1)..(308): unsure at all n locations
  Clone ID: MRT4577_55897C.1
gtttcaccagcgacaacaagggcacatgcaaggcacagaaacatcagcggctgctgtgttgtttatgttaaaaagcnaccaccacaacggagggcgccatcaaagcggcaacaacagcaccaacaccaacaagaaggggggggccaacagcaacatgaccaacaatcacaagggcatgggcaacaacacgaacagagccatgagcaacaccaaggacagagccctgaacaacaactacaacaacttgtgctagcaaaccttgctgcctactctcaggaagcagnaggttctttgcattcaaccaacta

SEQ ID NO: 136429 - DNA, 405 bp, Zea mays
  Clone ID: MRT4577_55899C.1
tccagtaccagctgcccagctaccgcactcaacccctgtgtgcgtctccgctgccattccgccctactactgattcatgatatttgggaaatttcctctatccatccctctctatctatatatgtaataatgcagtacgacgaggcacatgatcatgtgtggtatgaccaataatatttgcatcataataaagttttggttttgaaaaagaaaaggaaaaaaaaaaaaaaaaaggtttgtgctttgggcgtgtgcactctgggggctttttgtggggatattcttcagattggctttcgattgaatttggatctttagtgggcaattaggccctttttgggccgtttttcaatctattggccgttcttttaccccggtttgactggtataagcttggcatttccc

SEQ ID NO: 136430 - DNA, 661 bp, Zea mays
  Clone ID: MRT4577_5589C.1
gaccctcgggttcggccggaggaccctccgaggccccctcggccgggctcctctcccactcccgctctcctgctactctgctccgtgatctggtctggtgagatcggggatcggaccgtcgactcggcgagacatggcggactggggccccgtggtggtgggcgtggtgctgttcgtgctgctctcgccgggcctgctctgcgagctgccgggcacccaccgccacgtcgacttcggcggcttccacaccaacggcaaggccatcttcgtccacaccctcgtcttcttcgccgccttcaccatcctcacgctcgcgctccacatccacatctacaccggctaggctagctagctagtgcggagcacatgccgccggtctggactcgcggaggtctaggctagctagctagtgcgtcctgtgtttctgctcttgttcctctgcggttcgatcgattcgaccaagtgcttgtaactgtaactgcctagcttcctcgttgctatgctagttactctctgctatctatcatgtaaaggccgccatggtcgtccatctgtagctgggcttgcagcaacaggaactagtgcgtgccctttaattaatggaatctgttcgttggttgcttaaaaaaagaaaaaaaaaaaaaaaaaggcccctagggcc

SEQ ID NO: 136431 - DNA, 154 bp, Zea mays
  Clone ID: MRT4577_558C.1
gccggcgtcgaagtggtggtcccaagtttgcgccgttctccgacacgtgccgcacgtggtgtctgcggtctggagatgccttacgggggcggcacaccaccctgaggcggtggggctctcctctcaaagactcactcggacggtgcgttttagt

SEQ ID NO: 136432 - DNA, 575 bp, Zea mays
  unsure (1)..(575): unsure at all n locations
  Clone ID: MRT4577_55900C.1
agcacacaaaagctctagagctttgcctgcttcacagaccaaccaaaccaaagcagcggtggtcgcgtcgccgccgcgtactcgcgtgcgtgccaggaagacgaaccaccagccagcccaggccccaggccaacacgcacgcacgcacgccgtcgctacctggcgaggaaggctgcctgcctgatggtccaggacgaaggctcgtcgtcgtcggtcacatcgtccccgctgcacaacttctccaccatgccgctccacgcgttcgcccggcggcgcgccgaccccgacgccgccgtggctggtgcgcgagctccgctccgacgagcgcgggctgtgcctcatccacctcctcctcaactgcgccgcggcggcgggcgcggggcggctggacgccgccaacgccgcgctggagcacatcgcgtcgccggatcgactctaaattcagtcgatccctttggggtttcgtcaggtggggcgttgttcaatttttgcaaacttttttaaatcccttcttatgtnttagattcctttttttttgtatatatttttcatnnngttttccccttatatttttt

SEQ ID NO: 136433 - DNA, 626 bp, Zea mays
  unsure (1)..(626): unsure at all n locations
  Clone ID: MRT4577_55901C.1
gccacggttagntntcgctngaacactgtgagatggagacggctaattttgacaagtctccttttatccattaacgtaccatggatagcagccctgagtttcaactcgcagtgagacagcaatttcccgatattgtcagctgtcgcagggccatccgcaacactgtcattctctgccactgtgagatacanaccgtgaagtctgacaagtcccgcttcaccgctaagtgtgctgcctagagctgcccgtggcgcatacatgcagcaaggctccccggtgtgcccaccttctccattagaaccatacatgacaaccacagctgtgtcgggatcaaccatcttggccatcagcaggcatctgttcagtgggttgcgaacactgtcgaagagaggctacgtgagaacccagaatacaagcctaaggaaattttggaagaaattcacaaggcccatggcattaccctatactacaagcaagcttggagaggtaaggagcggatcatggctgcggttcgagggtcttttgaggaaggataccgtctcctgcctgagtactgtaggcaggtggaaagaacaaatgcaggaagtatagctcgagtgtatggaaacccagatgacaattgcttt

SEQ ID NO: 136434 - DNA, 520 bp, Zea mays
  unsure (1)..(520): unsure at all n locations
  Clone ID: MRT4577_55902C.1
cgagcgaatgattaggcggggggcgggctgtgcaagggaaagtaacccagcaggatcgatcgggtcgaggcgggtgaggacagggatccagnagggtagctagccatgngcggagggaagcgnntctgcgcctgcgggcgggggacgggaagcgtccgccgggggaagatgacnnnatggtggtagggggtggagcgagagctatcacagctntctacgcgcgtgcagtgggcactgncagcactttcttcccgccggggccagccgcagcagtacccgcctcgtcgtcgtcaccgcgcaagcccaccgcgcgcctccgccgtgcggcgctcgccggncccaggcgcccgcgggatgtgcctgcgcgtaccgtggagggcggagtctcaaggcgctccgcgcctgcgcgtcgtgcgaaaaagccaaaggcgctctgcacacaggcgaagcgacgctttgtgtttgagggcgctgggagggggggacgctagggaacgtgcccctctgcgagggcttgtcg

SEQ ID NO: 136435 - DNA, 374 bp, Zea mays
  Clone ID: MRT4577_55903C.1
gtagttttggattaaaaaacctggacgcatgggccattttggcagatagtgccgtaagttacggggacaccaaaaaagaaccaccgtacatatggttaaatcgaagcggccagacaaaatggtgaagcggcaccgtactcaggaactgaatgctaacaaataacaaatgcgaccaccataaactaaccggtcaggggtaccgaactactgcagcaaacaaaggcgcgctaatgaagcacacatgtaccttagctacctatgtacaattcgctggtaatgcgcgggttgccgccggaccggtgggccaccagggtatgtgagcatgcggaggcgagagccacttgctcagacaggaggagaaaagcctggacgcg

SEQ ID NO: 136436 - DNA, 296 bp, Zea mays
  Clone ID: MRT4577_55904C.1
tcgcggacgcgtggggttcaggaagctcatcgatctcgttgtacttgtaccgaactatctcaagggacatagtgcctgtttgtctggattgctgctcggccacaagcacagctgtctggcccggggcaccatccaaacaatcccatatagagcgtgtttggacgcagtcatgcgcttgggttttgcttttgcctgtctgtgcccggcagattcatgggcctgtaagcaaacacgtcccaattatctgaactcggaattatttacgcctcggcaaaaaacttgccagagcccataaa

SEQ ID NO: 136437 - DNA, 417 bp, Zea mays
  Clone ID: MRT4577_55905C.1
tttttacaaaacacaacatttttaaattcatagcagttaagcactgcattagtacaagagtttacattacaatgtgcaactgagcatacgacaagcttaactagtgtgcatagaatcgcactttccaaaggcgagggttcagatttttcacctaaactacgcattagagtattgatttttaacatacccaacacaacatatatataaattaaggataaaaaaaaaaacacaacagtggtcatttcctgcaaacaattcccaacccatatgaaaacttggggcgatcaagggtgccatattctatcacttgttggggagtgggctctttctcagacgaactttcctgtgagaacacgcaagaaccacgctgaggagagagcaaagagcttgaactgtgcttgtgttgtacaccaacaa

SEQ ID NO: 136438 - DNA, 531 bp, Zea mays
  Clone ID: MRT4577_55907C.1
accgaataatgagttgacatgccatcgcgtgtgactcattattaacaataaaacaagtttcctcttaaaaaaaaaaaaaaaaaaaaaaaaaaaaataaaaaaaaaaataaaaaataaaaaaaaaaaacgagaaaaaaaacaaaaaaaaaaaaaaaaaaaaaaaaaaaaaaaaaaaaaaataacaaaaaaaaaaaaaaaaaaaaaaaaaaaaaacccatctcccggaagttaaatctgccccaacaaccatgccacaacaaaaagggacaacgaacataaaaaaaaatggtttgggtttccgggctacccccccccaactgaaaataataaactggctgggattgttaatgtgtaagccgcgggcgcgcctacggtcagtcaaaaaccaaaaaacgttttatgcggggaatagcgggttttcgcgggggagaccctaaacccaaatgccaataataaaatagcaaaaccccggggggcagaatgtatggagtaaaaacatataattcattcccctgaacagggtcatttaaa

SEQ ID NO: 136439 - DNA, 2973 bp, Zea mays
  Clone ID: MRT4577_55908C.1
gaaatccaaatatacgaaatttttttatatgcttccagaagtattatcttgatggtacactgcctctgcttcacaatccttgtcagactgtaaaatcatattaccaaagcattcttcataagcctattatgcaatggaaatgcaagctacacggtcagccatgtgctgcttgctcacgagcaagagcacagacggagacataacgtaccgatacacacttgagttatagggcaagcctaatttacatgtacttcttattggaaggatttttatccattctgcttctcttacactacgctcttctgccttcagctgtttcagtaactgatgacgatgagcaaaccaatcgccgtgacgatgatggtcgacgggaccccgaatcggaggtggctccagaaggtgaggttgtagccgaagaactgggcccgcctggcctgctcgcagacaatcagattcgccgcagagcctaggagggtgaggttcccagccacggtgctgacccatgcaaggatgagccaggctttcctctctgaaccatgagaaatcgaagccgctgatgcagccactcttgtaccgagcaataggactgtaggaacattagaggccacgtttgaaaggataagaatcaccacggcaagaagtgcaacacctttcgcactatcgattcgtgaatatggttccactaactcccatagtgtgttcggtatgcccgttttgttgaagccatcaacagtgataaacatcccgcagaaaaagatcagcagtgaatatgacaccttctcaagacaagcttgtgcgtccgtaaaatcgagtgccagaagaacaagagctgcagtgattgcagtccaggacatgttcagtcccattagaagtgcaatgagcataccgagagtgataagataaacagcagtcttccacacaagtactttccatctcttctctgcaacttcagtttctttctccttttccccattaatctctggggagggtgctaaatcctctattatcacgctcctttgctggctagcagtccttgtgaacttccttgaggatgcaccttcatctctccgatcaggaaccgtcgagacctctaccatctcatgcgacatgcttgatgcccgcagagacttgatcgcaagctgaatgtcagcctcagaattgatgcttctgcttctcaggttctcattcccagtagtactgacactgttgctcctgatgatcggttcgcttacgcaatccatgtcatctggattcagagaagaaacatgtgacattctagccggtgtgaaccgatgggaagtaacctcatcgtcggcaaccacctctggtcctgtgggctgcccaccctcctgatccttctccaccgacaagtatttccagaagtacaaaaggaggatagcagcgtttgtgagaaccccaacgatcatagctgggaaaactcccagcaagaactggccaaatgagatcccactctcgacagctatgacaaggttctgagggttgccgatcggcgtggcagcagagccgatgttcgaactagtggcaagggccagaaggaaaggctgtggtggcaggttgttttgcctagcaaccttgaggatgaactcggtgaggacaacacagcatgtgtcattggtgaaaagcgcgctggcaaacgcggacacgatgcagactcggaagagcaggtccttgctgcctctgctcttccacgagagcaggttcccgaggtacttaaacatgtcagccctctcaaggaagatgctgacgaccattgtcccgaagagcaggccgatgatcgggaggtcaatcgcggcgtacgcgtcctccggggagatgacgcggaacaggaccattagcatagcaccaaggagggacccagccgtccgcccaacaggcatgaacgggacggtggggaagacggccatcacccagaaaatcccaaaggcgatacatcccagcactaaaattaaagagagagtacagaacaacccccccagataccaaggacggtcagatcgactgggctcacgagaaggatccctgctggaatgaaccacctctcctcgcccaacttaactcgaggtcctgcaaaatcggagggcaaagaaacattgcacgtgaaccaaggagctcaaaggcaaggcagtattttacagtgaaaaatatattcaagagatttgcaatgattcatcataattgttccaagaaagaaagaaagaaagaacaaggtggttcttgatccctcaaactaaaacgaattagcaacaagctgcacgaaaacggggtatcaagcaccatcacgcctactcacggtgtatccttcgagtaggggatggagtatggggcgggtagtccacactgctgcctgcgagcgcgcggacgaggcggcggatcggtggaaggctttgcaaggcagaggtggtggagtgaggtgtgaggacgagacgaagtggtggtagtcctggagcctggactctggactggacactggaggcatggagcccggccggcctcgagggcgaatctgattgtctgcgagcaggccaggcgggcccagttcttcggctacaacctcaccttctggagccacctccggttcggggtcccgtcgaccatcatcgtcaggcgattggtttgctcatcgtcatcagttactgaaacagctgaaggcagaagagcgtagtgtacgagaagcagaatggataaaaatccttccaataagaagtacatgtaaattaggcttgccgtataactcaagtgtgtatcggtacattatgtctccgtctgagctcttgctcgtgagcaagcagcacatggctgaccgtgtagcttgcatttccattgcataataggcttatgaagaatgctttggtaatatgattttacagtctgacaaggattgtgaagcagaggcagtgtaccatcaagataatacttctggaagcatataaaaaaatcgtatatttggatttc

SEQ ID NO: 136440 - DNA, 3023 bp, Zea mays
  Clone ID: MRT4577_55909C.1
cgaaatttttttatatgcttccagaagtattatcttgatggtacactgcctctgcttcacaatccttgtcagactgtaaaatgatattaccaaagcattcttcataagcctattatgcaatggaaatgcaagctacacggtcagccatgtgctgcttgctcacgagcaagagcacagacggagacataacgtaccgatacacacttgagttatagggcaagcctaatttacatgtacttcttattggaaggatttttatccattctgcttctcttacactacgctcttctgccttcagctgtttcagtaactgatgacgatgagcaaaccaatcgccgtgacgatgatggtcgacgggaccccgaatcggaggtggctccagaaggtgaggttgtagccgaagaactgggcccgcctggcctgctcgcagacaatcagattcgccgcagagcctaggagggtgaggttcccagccacggtgctgacccatgcaaggatgagccaggctttcctctctgaaccatgagaaatcgaagccgctgatgcagccactcttgtaccgagcaataggactgtaggaacattaggggccacgtttgaaaggataagaatcaccacggcaagaagtgcaacacctttcgcactatcgattcgtgaatatggttccactaactcccatagtgtgttcggtatgcccgttttgttgaagccatcaacagtgataaacatcccgcagaaaaagatcagcagtgaatatgacaccttctcaagacaagcttgtgcgtccgtaaaatcgagtgccagaagaacaagagctgcagtgattgcagtccaggacatgttcagtcccattagaagtgcaatgagcataccgagagtgataagataaacagcagtcttccacacaagtactttccatctcttctctgcaacttcagtttctttctccttttccccattaatctctggggagggtgctaaatcctctattatcacgctcctttgctggctagcagtccttgtgaacttccttgaggatgcaccttcatctctccgatcaggaaccgtcgagacctctaccatctcatgcgacacgcttgatgcccgcagagacttgatcgcaagctgaatgtcagcctcagaattgatgcttctgcttctcaggttctcattcccagtagtactgacactgttgctcctgatgatcggttcgcttacgcaatccatgtcatctggattcagagaagaaacatgtgacattctagccggtgtgaaccgatgggaagtaacctcatcgtcggcaaccacctctggtcctgtgggctgcccaccctcctgatccttctccaccgacaagtatttccagaagtacaaaaggaggatagcagcgtttgtgagaaccccaacgatcatagctgggaaaactcccagcaagaactggccaaatgagatcccactctcgacagctatgacaaggttctgagggttgccgatcggcgtggcagcagagccgatgttcgaactagtggcaagggccagaaggaaaggctgtggtggcaggttgttttgcctagcaaccttgaggatgaactcggtgaggacaacacagcatgtgtcattggtgaaaagcgcgctggcaaacgcggacacgatgcagactcggaagagcaggtccttgctgcctctgctcttccacgagagcaggttcccgaggtacttaaacatgtcagccctctcaaggaagatgctgacgaccattgtcccgaagagcaggccgatgatcgggaggtcaatcgcggcgtacgcgtcctccggggagatgacgcggaacaggaccattagcatagcaccaaggagggacccagccgtccgcccaacaggcatgaacgggacggtggggaagacggccatcacccagaaaatcccaaaggcgatacatcccagcactactttggaggtccctgccaacgccatattagcaaatccttctcttcctctacaactaaaactcttaacaattgcacttcaagaacctgtcacgactcacaaattaaagagagagtacagaacaacccccccagataccaaggacggtcagatcgactgggctcacgagaaggatccctgctggaatgaaccacctctcctcgcccaacttaactcgaggtcggtgtatccttcgagtaggggatggagtatggggcgggtagtccacactgctgcctgcgagcgcgcggacgaggcggcggatcggtggaaggctttgcaaggcagaggtggtggagtgaggtgtgaggacgagacgaagtggtggtagtcctggagcctggactctggactggacactgggggcatcccggaggcgatacatcccagcactactttggaggtccctgccaacgccatattagcaaatccttctcttcctctacaactaaaactcttaacaattgcacttcaagaacctgtcacgactcacaaattaaagagagagtacagaacaaccccccccagataccaaggacggtcagatcgactgggctcacgagaaggatccctgctggaatgaaccacctctcctcgcccaacttaactcgaggtcctgcaaaatcggagggcaaagaaacattgcacgtgaaccaaggagctcaaaggcaaggcagtattttacagtgaaaaatatattcaagagatttgcaatgattcatcataattgttccaagaaagaaagaaagaaagaacaaggtggttcttgatccctcaaactaaaacgaattagcaacaagctgcacgaaaacggggtatcaagcaccatcacgcctactcacggtgtatccttcgagtaggggatggagtatggggcgggtagtccacactgctgcctgcgagcgcgcggacgaggcggcggatcggtggaaggctttgcaaggcagaggtggtggagtgaggtgtgaggacgagacgaagtggtggtagtcctggagcctggactctggactggacactggaggcatcccggccgg

SEQ ID NO: 136441 - DNA, 480 bp, Zea mays
  Clone ID: MRT4577_5590C.1
cctcgcccttttttttttttttgttccatttagctggtcaaaggtcagtaaaaattttttttttttggttggggttttattattttatttttttttttttttttcaaaacccagaaccacgggccttttttttgaaaaaatcccaaccaggggagggggcctcccccccttggcctggcttatcttttgcaacaaaaacttgtgcccacaccccccaacccattcaattttttaaaccctaaactagagcgcccttgcccctcctgttgggggcttccaaaaaaaacccccggtcttaataaaaaacactgcgagccaaaaaaaaaacaccgcttaccatttggctgaaaaaaccccctgccccgggggaaaaggggccggccctacacgggaactttggacccttgccctccaaggtttattggccctctttaaccccttcccccccactttaaaacccaaaaactttttactggtttg

SEQ ID NO: 136442 - DNA, 4315 bp, Zea mays
  Clone ID: MRT4577_55910C.1
cgaacacactatgggagttagtggaaccatattcacgaatcgatagtgcgaacggtgttgcacttcttgccgtggagattcttatcctttcaaacgtggactctaatgttcctacagacctattgctcggtacaactgctgccaggacatgttcagtcctgcaatgactgcaactcttgttcttctggcactcgattttacggacgcacaagcttgtcttgaaaggtgtcatattcactgctgatctttttctgcgggatgtttatcactgttgatggcttcaacaaaacgggcataccgaacacactatgggagttagtggaaccatattcacgaatcgatagtgcgaaaggtgttgcacttcttgccgtggtgattcttatcctttcaaacgtggcctctaatgttcctacagtcctattgctcggtacaagagtggctgcatcagcggcttcgatttctcatggttcagagaggaaagcctggctcatccttgcatgggtcagcaccgtggctgggaacctcaccctcctaggctctgcggcgaatctgattgtctgcgagcaggccaggcgggcccagttcttcggctacaacctcaccttctggagccacctccgattcggggtcccgtcgaccatcatcgtcacggcgattggtttgctcatcgtcatcagttactgaaacagctgaaggcagaagagcgtagtgtaagagaagcagaatggataaaaatccttccaataagaagtacatgtaaattaggcttgccctataactcaagtgtgtatcggtacgttatgtctccgtctgtgctcttgctcgtgagcaagcagcacatggctgaccgtgtagcttgcatttccattgcataataggcttatgaagaatgctttggtaatatgattttacagtctgacaaggattgtgaagcagaggcagtgtaccatcaagataatacttctggaagcatataaaaaaatttcgtatatttggatttcaaaacaaaaaaaaaaaaaagcggcccttgtcttgagaaggtgtcatattcactgctgatctttttctgcgggatgtttatcactgttgatggcttcaacaaaacgggcataccgaacacactatgggagttagtggaaccatattcacgaatcgatagtgcgaaaggtgttgcacttcttgccgtggtgattcttatcctttcaaacgtggcctctaatgttcctacagtcctattgctcggtacaagagtggctgcatcagcggcttcgatttctcatggttcagagaggaaagcctggctcatccttgcatgggtcagcaccgtggctgggaacctcaccctcctaggctctgcggcgaatctgattgtctgcgagcaggccaggcgggcccagttcttcggctacaacctcaccttctggagccacctccgattcggggtcccgtcgaccatcatcgtcacggcgattggtttgctcatcgtcatcagttactgaaacagctgaaggcagaagagcgtagtgtaagagaagcagaatggataaaaatccttcaataagaagtacatgtaaattaggcttgccctataactcaaggtgtatcggtacgttatgtctccgtctgtgctcttgctcgcgccagcatttgtttgtttattttttatttgcttccaaaagtattatcttgatggtacactgcctctgcttcacaatccttgtcagactgtaaaatcataattaccaaagcattcttcataagcctattatgcaatggaaaatgcaagctaccaacggtcagccattgtgctgctttgctcacgagagcaagagcacagacggagagcataacgtaccgatacacacttgagttatagggcaatgcctaatttacatgtacttcttattggaaggatttttatccattctgcttctcttacactaccgctcttctgccttcagctgtttcagtaactgatgacgatgagcaaaccaatcgccgtgacgatgatggtcgacgggaccccgaatcgggaggtggctccagcaagggtgaggttgtagccgaagaactgggcccgcctggcctgctcgcagacaatcagattcgccgcagagcctaggagggtgaggttcccagccacggtgctgacccatgcaaggatgagccaggctttcctctctgaaccatgagaaatcgaagccgctgatgcagccactcttgtaccgagcaataggactgtaggaacattagaggccacgtttgaaaggataagaatcaccacggcaagaagtgcaacacctttcgcactatcgattcgtgaatatggttccactaactcccatagtgtgttcggtatgcccgttttgttgaagccatcaacagtgataaacatcccgcagaaaaagatcagcagtgaatatgacaccttctcaagacaagcttgtgcgtccgtaaaatcgagtgccagaagaacaagagctgcagtgattgcagtccaggacatgttcagtcccattagaagtgcaatgagcataccgagagtgataagataaacagcagtcttccacacaagtactttccatctcttctctgcaacttcagtttctttctccttttccccattaatctctggggagggtgctaaatcctctattatcacgctcctttgctggctagcagtccttgtgaacttccttgaggatgcaccttcatctctccgatcaggaaccgtcgagacctctaccatctcatgcgacatgcttgatgcccgcagagacttgatcgcaagctgaatgtcagcctcagaattgatgcttctgcttctcaggttctcattcccagtagtactgacactgttgctcctgatgatcggttcgcttacgcaatccatgtcatctggattcagagaagaaacatgtgacattctagccggtgtgaaccgatgggaagtaacctcatcgtcggcaaccacctctggtcctgtgggctgcccaccctcctgatccttctccaccgacaagtatttccagaagtacaaaaggaggatagcagcgtttgtgagaaccccaacgatcatagctgggaaaactcccagcaagaactggccaaatgagatcccactctcgacagctatgacaaggttctgagggttgccgatcggcgtggcagcagagccgatgttcgaactagtggcaagggccagaaggaaaggctgtggtggcaggttgttttgcctagcaaccttgaggatgaactcggtgaggacaacacagcatgtgtcattggtgaaaagcgcgctggcaaacgcggacacgatgcagactcggaagagcaggtccttgctgcctctgctcttccacgagagcaggttcccgaggtacttaaacatgtcagccctctcaaggaagatgctgacgaccattgtcccgaagagcaggccgatgatcgggaggtcaatcgcggcgtacgcgtcctccggggagatgacgcggaacaggaccattagcatagcaccaaggagggacccagccgtccgcccaacaggcatgaacgggacggtggggaagacggccatcacccagaaaatcccaaaggcgatacatcccagcactactttggaggtccctgccaacgccatattagcaaacccttctcttcctctacaactaaaactcttaacaattgcacttcaagaacctgtcacgactcacaaattaaagagagagtacagaacaaccccccccagataccaaggacggtcagatcgactgggctcacgagaaggatccctgctggaatgaaccacctctcctcgcccaacttaactcgaggtcctgcaaaatcggagggcaaagaaacattgcacgtgaaccaaggagctcaaaggcaaggcagtattttatagtgaaaaatatattcaagagatttgcaatgattcatcataattgttccaagaaagaaagaaagaaagaacaaggtggttcttgatccctcaaactaaaacgaattagcaacaagctgcacgaaaacggggtatcaagcaccatcacgcctactcacggtgtatccttcgagtaggggatggagtatggggcgggtagtccacactgctgcctgcgagcgcgcggacgaggcggcggatcggtggaaagctttgcaaggcagaggtggtggtggagtggggtgtgaggacgagacgagacggagtggtggtagtcctggagcctggactctggactggacccggaggcatagcctgcacccccgaaaaatatatttagactgcatgtgaatgaaggagcttaaaggaaag

SEQ ID NO: 136443 - DNA, 246 bp, Zea mays
  Clone ID: MRT4577_55911C.1
gtagtccatcacctggtcccaatcatacttctaatagtagtaatgcatcaaatgcaacagttgtaccacagaattcttctgcccgatccacgtgttcattaacgcctgcactagcagcacacttcagtgaaaatctcataaaacacgttcaaggatggcctgcagatcatgcagagaagcaggcatcaagattacgcgaagaagcgcataatcatgggactattcacatgtccgaaatttgtactg

SEQ ID NO: 136444 - DNA, 1339 bp, Zea mays
  Clone ID: MRT4577_55912C.1
tcggacgcgtgggcttccttccgccgtgccacccaccctcctctcgcggtcgcgggggtagggccgggtgagcacgagcgctgcccgctcgctgaaccatggcgggctccgcggtggccgtcgtcctcctgtcggccgtcgcgctgctctgcctgtaccacctccttttcctctccctgtccgtcccggacccggcagcagcagcagcagccgtcccccgccgcgccggtggccaccatggcagcaacgttccgtccgggtcaggaaccgccaacgtcgtcctccgcttcggcctgtccgggcagccgctccgcctccacgaccccgcctccgccgccggcctcccggacatcgacaccttccgcggcaagctcgagcggctgcttcctcccgacgaccacgaccccggctggtcccgccgcttcgacgccgagctcggccccgtgcaccggtacttcggcccggacgcgccgctggacgtgcggcagcggatcgcgtacctgttcgcgatcctcgaccggtcgtccaggggcgtcggcgtcggcgtcggcgtcggcgagctggaggcctggctgcgctggcaggccgccgcccggctggacgccgtcacgcggagggagatggctccgcacgacacggaccgcgacggtgccgtcacgctgcgcgagttcttcgcaggctggatcaagatggagtttgcgagagcggacagagacggggatggctcgctcaacgccgtcgaattcaacgacttcctgcatcctgaagacagcagccaagagagcgtgatgctgtggctactcaaggacaagctaagcgagatggaccatgacggagacggcaggctaagccaggaggagttcgtcgctcaatctcacatcatcatctccggcgcgcgtcacgccgacgacggtggccatgcccatgaccttgagcgtgccgaagctgcgaagaagttcacagaactggacgccgacaaggacaactacttgacggtggaagaagcgcgctgcgtactgcagagcctcgtcacgggggagttctcctatgctacctcacatgccaagttcttgatgaaggctgatgtgaaccatgacggcaaactgtcgctggaggagatgctagacgactacatatccttctacagcaccgtgtatatggatgatcattacgccagtgaaggtgaagtagatagtgattcccgcgacgagctatgagcagttaagccaggacaggacagcaagtcggaggttctttactttcaaatacactaggattttgcagccaaaggaaatgggaaatgtacaatcagctgcaaacatcaattttgttcatcgag

SEQ ID NO: 136445 - DNA, 201 bp, Zea mays
  Clone ID: MRT4577_55913C.1
aaaagatattttgaggaaacttgtttttttgttaataatgagtcacacccgatggcttgttttctcaaaaaaaggaacaacacaaatattttttttttgaatgcaggaccaacaaaggggggctgtaaaaacatggggggaacccccaaggcctttgggttgaacatgaatgggaactcctgtggcagcggacacaaaggg

SEQ ID NO: 136446 - DNA, 1255 bp, Zea mays
  Clone ID: MRT4577_55914C.1
cctcgaggccggccgggcttccgccgtgccacccaccctcctctcgcggtcgcgggggtagggccgggtgagcacgagcgctgcccgctcgctgaaccatggcgggctccgcggtggccgtcgtcctcctgtcggccgtcgcgctgctctgcctgtaccacctccttttcctctccctgtccgtcccggacccggcagcagcagcagccgtcccccgccgcgccggtggccaccatggcagcaacgttccgtccgggtcaggaaccgccaacgtcgtcctccgcttcggcctggctgcgctggcaggccgccgcccggctggacgccgtcacgcggagggagatggctccgcacgacacggaccgcgacggtgccgtcacgctgcgcgagtgcttcgcaggtgagtgcgtgcgtccgtgcgtacgtaacataagcctctcccgtgcgcacgacgatggatatatatacgaagactggatcaacatgggacatgacaaaatggggtggtggatgcacaagtgtgcgagcgcggacagagacggggacggctcgctcaacgccgtcgaattcaacgacttcttgcatcctgaagacagcagccaagagagcgtgatgctgtggctactcaaggacaagctaagcgagatggaccatgacggagacggcaggctaagcctggaggagttcctcgcccaatctcacatcatcatctccggcgcgcgtcacgccgacgacggtggccatgcccatgaccttgagcgtgccgaagctgcgaagaagttcacggaactggacgccgacaaggacaactacttgacggtggaagaagcgcgctgcgtactgcagagcctcgttacgggggagttctcctatgctacctcacatgccaagttcttgatgaaggctgatgtgaaccatgacggcaaactgtcgctggaggagatgctagacgactacatatccttctacagcaccgtgtatatggatgatcattacgccagtgaaggtgaagtagatagtgattcccgcgacgagctatgagcagttaagccaggacaggacagcaagtcggaggttctttactttcaaatacactaggattttgcagccaaaggaaatgggaaatgtacaatcagctgcaaacatcaattttgttcatcgagaccagctgcctatctattctacagtttctttatataaaaaaaagctaaacatataacataagggaatgcgttttttttttctccggcacgag

SEQ ID NO: 136447 - DNA, 942 bp, Zea mays
  Clone ID: MRT4577_55915C.1
cggacgcgtgggcctgcttcctcccgacgaccacgaccccggctggtcgcgccgcttcgacgccgagctcggccccgtgcaccggtacttcggcccggacgcgccgctggacgtgcggcagcggatcgcgtacctgttcgccggacgcgtgggcggacgcgtgggcggcggcgtcggcgtcggcgagctggaggcctggctgcgctggcaggccgccgcccggctggacgccgtcacgcggagggagatggctccgcacgacacggaccgcaacggtgccgtcacgctgcgcgagttcttcgcagactggatcaacatggggcatggcaaaatggcgaggtggatggacaagtttgcgagcgcggacagaaacggagacggctcgctcaacgccgtcgaattcaacgacttcttgcatcctgaagacaccagccaagagagcgtgatgctgtggctactgaaggacaagctaagtgagatggaccatgacggagatggaaggataaacttggaggagtttgtcgcccaatctgatcttgagcgtgccgaagctgaagagaagttcagagaattggacgccgacatggacaactacttgacggtggaagaagcacgctctgtactgcaaagcctcattacaggggagttctcatatgctacttcacatgccaaatttttgatgaaggctgatgttaaccaagacggcaaattgtcgctggaggagatgctagatgactacgtatccttctacagcaccgtttatacggatgatcattacagcaatgaagttgatagtgattcccacgacgagctatgagcagttaagccagggcaggacagcgatacggagggaggaggttctttttactttctaataggagttcgcagccaaaaaaatgaaaaatgtacagcagacaatcaactgcaaagatcaattttgtt

SEQ ID NO: 136448 - DNA, 669 bp, Zea mays
  Clone ID: MRT4577_55916C.1
cggaccgcgacggtgccgtcacgctgcgcgagttcttcgcagtttgcgagcgcggacagagacggggatggctcgctcaacgccgtcgaattcaacgacttcctgcatcctgaagacagcagccaagagagcgtgatgctgtggctactcaaggacaagctaagcgagatggaccatgacggagacggcaggctaagccaggaggagttcgtcgctcaatctcacatcatcatctccggcgcgcgtcacgccgacgacggtggccatgcccatgaccttgagcgtgccgaagctgcgaagaagttcacagaactggacgccgacaaggacaagctacttgacggtggaagaagcgcgctgcgtactgcagagcctcgttacgggggagttctcctatgctacctcacatgccaagttcttgatgaaggctgatgtgaaccatgacggcaaactgtcgctggaggagatgctagacgactacatatccttctacagcaccgtgtatatggatgatcattacgccagtgaaggtgaagtagatagtgattcccgcgacgagctatgagcagttaagccaggacaggacagcacgtcggaggttctttactttcaaatacactaggattttgcagccaaaggaaatgggaaatgtacaatcagctgcaaaca

SEQ ID NO: 136449 - DNA, 486 bp, Zea mays
  Clone ID: MRT4577_55917C.1
aagcaacaaaaagctaaaagaaaaccagggcatagttacaaaatatgctctatggtggacacgttgcataacaaaaatacatccatttcaaggggacaggttggccaaaatcccatatctaagatctcaacttcggatgtgttgaaacagcctaactattccgccagaaccatttatacccataagtccacctgtgagcccggggaaactaccattcaaaatgttgatcctggcactcttctttggactgatgacctccaactccttcggaaggaccgctgccatgtcaccgaagcccaaagacccaagggcaaattgttaagatccatccccgagaacctgcctaaccacacaaggaccgtcatcacctccggtgaacacattgaccaaaacataaagctgcaggcatgtagaattaaccctcacaagctattatcggcgacataatatccattccagcattacctggggataaagggtgaccac

SEQ ID NO: 136450 - DNA, 317 bp, Zea mays
  Clone ID: MRT4577_55918C.1
ccccaaaaaaaaaaagcccccggtttaaaaggcggggccacccccttggaaaaagggggggggggcaccgggtaaaaccaaaaacgtaaagggaaaaagggtttgttttttaaagggctaaaaaaaataacacggccggttaaaaaaagggggggggttcttccggtcccttcataaaaatttttccaaggcccgggggaaaagaatggcctttagggaaaagggttttttgggcttaacggccacaaaaaaaaaaacccccaaccgggggtaggttttaaaaacttttgggaggtgaaaagattctttccaagggg

SEQ ID NO: 136451 - DNA, 561 bp, Zea mays
  Clone ID: MRT4577_55919C.1
ttaattcggcacgaggtgactatgcactgcgcgagttctcttgcatataacactacctgtactaactacccagagccatgggctgtccctcggaacgcagtggtactcgcgaccaacttcggctctgccgtagcacatgtcgtatccggcggcgcgtgatcccaacctcacctcgcggccaagctccttgcgctgtacagggccaccatctccatcatccactccgtacaccggcttaacaacaacgggcccgtcttccacgcggcgcgcgacgacttagtatagtggctatggggcggccacggccgtgcaagaatccagggacgccggtatagggggcggacgacagctggaagacgaagaaggcgctgaagaatctcatagtacccaaaccataaggagctgaacacggtgctcatgatcatctagacgataccgtcagtggcgttagccggataggcgcgtcatctagaggagcgcatgaccgaagacgccatggtccgttccttcatcctccagtgcggagactgagccgagagcttcaaggagttccacgccaac

SEQ ID NO: 136452 - DNA, 1368 bp, Zea mays
  Clone ID: MRT4577_5591C.1
gactggaattcctttctaatttaaataaacttgattggttgaaatattccgggtcaatccgacgaaacgaacaaaggcctaaacaaaaacctttaatctgttcgcagcctcgacgacgagttggttacgcgccttcaactttgaaccacgctccagcatgttctgatcccctgccgatctattttttatttttattttttcagcgataaaactgctgcagagcgtcccaaacaacgccgcgtcacgccctctcgaggacgggacgtgtgagtgagcccatgcccagggcatgcggctcggattgtctgtgtctaaaccagtataccgtccgtcggtgggccgtgggcggtgcgcggtgggccaaggcatcgggttcctgacggctgccgtactctactctagtctctcctccgcagatccataaaccactccacactccccctctcctagtctcctctccacactcccgctctcctgctactctgctccgtgatctggtctggtgagatcggggatcggaccgtcgactcggcgaacatggcggactggggccccgtggtggtgggcgtggtgctgttcgtgctgctctcgccgggcctgctctgcgagctgccgggcacccaccgccacgtcgacttcggcggcttccacaccaacggcaaggccatcttcgtccacaccctcgtcttcttcgccgccttcaccatcctcacgctcgcgctccacatccacatctacaccggctagctagctagtgcggagcatatgttgcgtcggtctggactcgcggaggtctcagatcagaaaggaacgccggccggcggcgcgtcctgtgttgctgctcttgttcctctgcagttcgatcgattcgaccaagtgcttgtaactgcctagcttcctcgttgctatgctagttactctctgctatctatcatgtaaaggccgccatggtcgtccatctgtagctgggcttgcagcaacaggaactagtgcgtgccctttaattaatggaatctgttcgttggttgcttaattaaaaaaaaaaaaaaacgaccgaaaaaaaaaaaaaaaaatctggactcgcggaggtctcagatcagaaaggaacgccggccggcggcgcgtcctgtgttgctgctcttgttcctctgcagttcgatcgattcgacgaagtgcttgtaactgcctaagcttcctccttgctatgctagttactctctatctatcatgtaaaggccgccatggtcgtccatctgtagctgggcttgcagcaacaggaactagtgcgtgccctttaattaatcgaatctgttggttggttgcttaaaaaaaacgcactctgttaaataaaaaatataaaaaattaat

SEQ ID NO: 136453 - DNA, 351 bp, Zea mays
  Clone ID: MRT4577_55920C.1
ttaattttttttccgggattccggggaagggttgcccattagaaaacgtttgactccccaaacaggttgttctataaaaattttattacaggtccccatcttttaaaattttaaacaccccgagaaccctccgagcaatgtggacccaaaattttggttttagccgttttacaaacaaaaaaatttacggggatcttttttttgataaaactgcccaagatacaaaggcgaacttttgggattgtggaaaaaaaaatttgttgggaaaaaccaaaactggggggaataaattctcaatattcccgaatagagatttatactttttcgctgccactgggggtggtgtttttc

SEQ ID NO: 136454 - DNA, 220 bp, Zea mays
  Clone ID: MRT4577_55921C.1
gttggatctcgcaaaaatgctagttgcttaccagggatggtgctgaatttgaaaaaggcagtatcgtaccccaaccatcttggctttgagtgtagtgctgctggaggcaggctagagtgcacaatgcaaaacattgcagatggttttatgaacacttttaactacagatgcagcaaaggaatagaaagtgagcttaacactttcattgtatatagatgaa

SEQ ID NO: 136455 - DNA, 472 bp, Zea mays
  unsure (1)..(472): unsure at all n locations
  Clone ID: MRT4577_55922C.1
gggttgtactgccggctggcgcctgactcttgtaccctgaccctgctccacttagntccagggtcatagctttacgttctcagtggatgggaccgctcatagtgccagccattgttccttccttcgcccctgactgcaatcaggtgggcacagactcccaccggtggggcacgaacgaagccctcattatctgcatacctcggccaccgccacgccgcccagagactctccctccgccgagctcacgcctaaggctacggctagagggctcctccgctgcttctccgacgaaatctccggcgacttagcaaggggcatgctcctgtgcacactgcacccatcctggcgcgacccggggctcccccacgagccagcccggcaacggaacccaggctaccgcttgctctgggacataggatactcccgcacctgagcacaaatcttccggaccagacgaggttatcactagcgg

SEQ ID NO: 136456 - DNA, 672 bp, Zea mays
  Clone ID: MRT4577_55923C.1
gacgttgagtcccgcacgagtgcacgacggcagctcacggagactgagaacggcgggcggcgggaggttgaaccgaaccggtggcgacgacgtcgacacgccgcactccgtccggcatccgtatcctcctgtttccttctctccgttacccgagctggaagtctatacacacatagacggcataatatgcactggaagttgatctaattaatgagtgcaaggaaagggaagcaatgcaactggcttgcctggacacctgctgcctgaatggttgtgtgcaacagctatgaagcctacagggtggtactcacagcattcactgcaatgataggacgacaggatcagaatacatcatatggagggctgatacatatgtagacttgccagatctttctgcacatcttactacgttttatgcatggtaacagctagtttcaaagaagaacaccagcaaagtatcatgctatattttgctcttttattagtttatagtcatttttgtatgcatatgttcctttttactgtgtagtggtaaccatcaacagaaactgatggttgagctacgacttatgtaagaagtaagatgttttgtgtaaccctttatgtttagcaatttcgtctcaacaaaaaaaaaaaaaaaaaaaaaaaaaaataaaaacaaattaaaaataa

SEQ ID NO: 136457 - DNA, 215 bp, Zea mays
  unsure (1)..(215): unsure at all n locations
  Clone ID: MRT4577_55924C.1
ttttatgggtacccctccgngggctcggccgggnaaaaaaaaaaaaaaaaaaaaaaaaaaaaaattaaggactttactatataagattattacatgcatacaaaaggaaaaagttttgggtttacctttttggtttattccagccattaaggggttatggtttctccgtttaaaagtttcccttaaaaaaaagaaaaaaagcccgctctacgaac

SEQ ID NO: 136458 - DNA, 108 bp, Zea mays
  Clone ID: MRT4577_55925C.1
cccacgcgtacgacgacatgtactacataaattaaccacattgtcctattatcactaccagatgtattgttatccctagcttttcattaactgacgacgaggggctcg

SEQ ID NO: 136459 - DNA, 594 bp, Zea mays
  Clone ID: MRT4577_55926C.1
ctccggtggcggcgagtgcaagtagcacaaacttatgtgaaatctactccaacctacgatggatccccagatccggcgacggcgagggaaagtgacatagacttcagtggtagtggctctagattacaacacaccccgagcggatcaaccacatagattcattgtgtattgacatatcattcataggaccactgatgcgtatcctctcagatccaaattctctcaccctttttagatctagtgacattgagggcaagtagaagagtttggcaacagtcgtggactacgacagatccaaacaagtcaacctctcaaatctggagtaataagcaggattcaaagatgatggttacacgagagcatccaatgaggagcagggaatgccagctttgccatgaaaacccgctctcttcgccaagcatgaccaaaatgattgtagaggcgatcgctgccctcaaggagaggaaggggtcgagctcggtggccatcagcaagtacgtcgaggggaagcacggcggcaagctccccaccaacttccgcaagcagctcaccgtgcagctgaagaagctcgctgccgccggcaagctgacgagg

SEQ ID NO: 136460 - DNA, 1152 bp, Zea mays
  unsure (1)..(1152): unsure at all n locations
  Clone ID: MRT4577_55927C.1
cctgtccgggatacgtactacccaccgcctccgccgccgacaacagcgtagtgtagtgtagttccggagagggttggggagagtagtagtgatccgcaatgtcgacggaggaggctgttgtggctgaggtcccggtgaccgaggtgccagcggaggtcccggcggcccatgtggccgaggcgcccaaggcgaagaaggcgcccaaggagaagaaggcgcctaaggagaagaagctttccgcggcaagctgacgagggtgaagaactccttcaagctgccggccaccgacgccaagcccaaggccgccaagcccaaggcacccaaggccgcgcccaagcccaagccctcgccgaaggcgaaggccaagaccgctgcgaagcccaaggcggcgtcgcccaagcccaaggccaaggccaaggccaaggccaaggccaagcctgtcgctcctgccgccgcgtcgcccaagccccgcgggcgccctcccaaggtcgccaagacctccgccaaggcctcccccgccaaggcagccaagaaggcggctgctcctgccaagaaggggaaggcagcggcggctcctaagaaggtggcaaccccgaagaaggctgctgctgccgctccggccaggaagggcgtggccaggaaggccaagaagtaggctgcctgccttgtcgctggcgagatcccccctcaattccgcctatagattcccctcttgcctggattttgatccaatcgtaatattgtcagtagctctagattcgtcggtagctccagcatgagtgtcggtggtagttctgtgcctgtaaaaacttgggatggttgatcgcgtgtgatcagccgtcatgctcctccagtctctatgaacaagctaagctataatagtattttgctataaaaaaaaaaaaaggacggcggcgaccccacgtcaatatttttgcggggaattccaatttcacattttcaagaaacgtaatattgtcagtagctctagattcgtcggtagctccagcatgagtgtcggtggtagttctgtgcctgtaaaaacttgggatagntgatcgcgtgtgatcagacgtcatactcctacagtctctatgaacaagctaagctataataatattttgctatcctatgatccccgggttgttggct

SEQ ID NO: 136461 - DNA, 694 bp, Zea mays
  unsure (1)..(694): unsure at all n locations
  Clone ID: MRT4577_55928C.1
ggtaccctcgaggccgggcggagatcaggttctctctccctttcaactccggtggcggcgagagcaagtagcacaaacttatgtgaaagcgactccaaactacgatggatccccaggagtaataagcaggattcaaagatgatggttacacgagagcatccaatgaggagcagggaatgccagctttgccatgaaaacccgctctcttcgccaagcatgaccaaaatgattgtagaggcgatcgctgccctcaaggagaggaaggggtcgagctcggtggccatcagcaagtacgtcgaggggaagcatggcggcaagctccccaccaacttccgcaagcagctcactgtgcagctgaagaagctcgctgccgccggcaagctgacgagggtgaagaactccttcaagctgccggccaccgacgccaagcccaaggccgccaagcccaaggcacccaaggccgcgcccaagcccaagccctcgccgaaggcgaaggccaagaccgctgcgaagcccaaggcggcgtcgcccaaacccaaggccaaggccaaggccaagcctgtcgctcctgccgccgcgtccaaaannnccccccgngggcgcccttccaaggtcgccaagacctccgccaaggcctcccccgccaagccagccaagaaggcggctgctccctgccaagaagggaaaggcagcg

SEQ ID NO: 136462 - DNA, 366 bp, Zea mays
  Clone ID: MRT4577_55929C.1
ctccaacctacgatggatccccaggcaagtcaacctctcagatttggtgacaccttaacccattaactcttcatagggtcatggcgtgcgctctcttggatccaaactcttcttctcagattcagtgacaaagagggtaagtagtacggactctggttgcagtgacggcgccagatccctagatccggcgacggcgagggaaagtgacatagacttcagtggtagtggctctagattacaacacaccccgagcggatcaaccacatagattcattgtgtattgacatatcattcataggaccactgatgcgtatcctctcagatccaaattctctcaccctttttagatctagtgacattgagggc

SEQ ID NO: 136463 - DNA, 259 bp, Zea mays
  Clone ID: MRT4577_5592C.1
ccaaagacagcaaatatccttggggagagaagaacaaagagatgctaccggccaacacaatacacacaagaaggggattccacacccaaccgatcgaaatgacgaataaccccccattaataaacccccgccttataaaaatagccccggctggaggccggaccaccaagcaaccgaaaacgaggaaacaaaaaaagaatcaccgggctgcaagaacaagacctgggggcagccccaatgtaaaaccaccaaccaccaa

SEQ ID NO: 136464 - DNA, 454 bp, Zea mays
  Clone ID: MRT4577_55930C.1
gaatgggtctctacttttctgctgctccgatgcccagtttttccggggggcagccggccaaaaaggagggttccaaagccgaaatgggaccggcgcacgcgaaaagggaggggcgtccgccgccccctcctagcttggtaaaaccaacggcccccctgggggcggccgcaggcctaaacggggggggctccaaaaaaccccggcgcaaagccgggaattgagctgcgcctgccgctcgccctggagggcctggacgtggacggggcgcgcggcccccccccccgcgctgtgcacgggcccctccccgcccctgcggaggccccggggggccgtcgccccgggggggggacgggccccctggcgggcggcgacgccggccaccgccgtgcagaaggcccgctcccccccccgccggggggtcgcggggaacccaaccccgcctgggggggaaaaa

SEQ ID NO: 136465 - DNA, 775 bp, Zea mays
  Clone ID: MRT4577_55931C.1
aaatcgctcctcaaaccaactggtccagtcgacacaagcagcatcccgccggcggtgatggacctggcgtccagcgacctcgcggagctgggcgcggcgatagctggtccgcgtctacgggatcatcccgcgagaggatccgagcaccttgtaactactcagcagtctgaggcatattcactatgatccgcaatgttcacgcgaagacggtgatgtcgatgacgtccctgcgaccgatccggcagcggaagtcccggaggtccacgtggcctaggcgcccaaggttaataaggcgcccaaggagaacaaagcgcctaatgagaagaagccgtccgcggcgaagaagccggcggcgcaccctccctacgctgagatgattgtacaggcgatcgctgccctcaaggagaggtaatcgggtcgagctctgtggccatcagtaagtacgtcgaggggaatcacggcggtaagctccccaccaacttccgcaagcatctcaccgtgcagctgaagaagctcgctgccgccggtaagctgacgagggtgaagaactccttcaagctgccggccaccgacgcctagcccaaggccgccaagcccaaggcacccaatgccgctcccaagcccaagtcctcgtcgaaggcgaaggtcaagaccgctgctaagcccaaggcggcgtcggcctagcccaatgccaaggacaaggtcaaggccaaggccaaacctgtcgttcctgccgccgcgtcgcccaagcctcgcgggcgtcctcccaaggtcg

SEQ ID NO: 136466 - DNA, 1377 bp, Zea mays
  Clone ID: MRT4577_55932C.1
ttgggaccctcgaggccggccgggagatccaggttctctctccctttcactccggtggcggcgagagcaagtagcacaaacttatgtgaaagcgactccaaactacgatggatccccagatctagtgacattgagggcaagtagcaagagtttggcagcagtcgtggactacgacggatccaaacaagtcaacctctcagatctgatctggtgactacaaggtcaagcagcacaaactttggtggtagcagcttcagactacgaaaggtcgccaagagtaataagcaggattcaaagatgatggttacacgagagcatccaatgaggagcagggaatgccagctttgccatgaaaacccgctctcttcgccaagcatgaccaaaatgattgtagaggcgatcgctgccctcaaggagaggaaggggtcgagctcggtggccatcagcaagtacgtcgaggggaagcatggcggcaagctccccaccaacttccgcaagcagctcactgtgcagctgaagaagctcgctgccgccggcaagctgacgagggtgaagaactccttcaagctgccggccaccgacgccaagcccaaggccgccaagcccaaggcacccaaggccgcgcccaagcccaagccctcgccgaaggcgaaggccaagaccgctgcgaagcccaaggcggcgtcgcccaaacccaaggccaaggccaaggccaagagcctgtcgctcctgccgccgcgtcgcccaagccccgcgggcgccctcccaaggtcgccaagacctccgccaaggcctcccccgccaaggcagccaagaaggcggctgctcctgccgccccggccaggaagggcgtggccaggaaggccaagaagtagtctgcctgccttgtcgctggcgagatccccccctcaattccgcctatagattcccctctttcatggattttgatccaatcgtaatattgtcagcagctctagattcgtcggtagctccagcatgagtgtcggtggtagttctgtgcctgtaaaaacttgggatagttgatcgcgtgtgatcagccgtcatgctcctccagtctctatgaacaagctaagctataatagtattttgctatccaaaaaaaaaaaaaaaaaaaaaaaaaaaaaaaaaaaaaaaaaaaaaaaaaaaaaagggggggggggaaaaaaaaaaaaaaaaaaaaaaaaaaaaaaaaaaaaaaaaaaaaaaaaaaaaatgaataaaatataaaaaaaaaaaataaaatgaaaaaaaaatgaaaattaaaaaggttagtgtttgtggaaaaaaaaaatttttattaaactgattgtgcaatagaaagaaattttcctttgagggaacgttagtttaaaacaa

SEQ ID NO: 136467 - DNA, 1662 bp, Zea mays
  Clone ID: MRT4577_55933C.1
ggccaagccccttgggaagcccaagggggtgtcgcccaagcccaaggccaaggccaaggccaaggccaaggccaagcctgtggttcctgcccccgggtggcccaagccccgggggggccctcccaaggtggccaagacttccgccaaggcttcccccgccaaggcagccaaaaaggggggtgttcctgccaaaaagggctacgcaccggcggctcttaaaaaggtggcaaccccaaaaaaggctgttgctgtccgccccggccagaaagggcgtggccaggaaggccaaaaagtaggctgcctgccttgtcgctggcgagatccccccctcaattccgcctataaattcccctcttgcctggattttgatccaatcgtaaaattgtcagtagctttaaattcgtcggtagctccagcataagtgtcggtggtagttctgtgcctgtaaaaaccaccgcctccgccgccgacaacagcgtagtgtagtgtagttccggagagggttggggagagtagtagtgatccgcaatgtcgacggaggaggctgttgtggctgaggtcccggtgaccgaggtgccagcggaggtcccggcggcccaggtggccgaggcgcccaaggcgaagaaggcgcccaaggagaagaaggcgcctaaggagaagaagctttccgcggcgaagaagccggcggcgcaccctccctacgctgagatgattgtagaggcgatcgctgccctcaaggagaggaaggggtcgagctcggtggccatcagcaagtacgtcgaggggaagcatggcggcaagctccccaccaacttccgcaagcagctcactgtgcagctgaagaagctcgctgccgccggcaagctgacgagggtgaagaactccttcaagctgccggccaccgacgccaagcccaaggccgccaagcccaaggcacccaaggccgcgcccaagcccaagccctcgccgaaggcgaaggccaagaccgctgcgaagcccaaggcggcgtcgcccaaacccaaggccaaggccaaggccaagcctgtcgctcctgccgccgcgtcgcccaagccccgcgggcgccctcccaaggtcgccaagacctccgccaaggcctcccccgccaaggcagccaagaaggcggctgctcctgccaagaagggaaaggcagcggcggctcctaagaaggtggcaaccccgaagaaggctgctgctgctgccgccccggccaggaagggcgtggccaggaaggccaagaagtagtctgcctgccttgtcgctggcgagatccccccctcaattccgcctatagattcccctctttcatggattttgatccaatcgtaatattgtcagtagctctagattcgtcggtagctccagcatgagtgtcggtggtagttctgtgcctgtaaaaacttgggatagttgatcgcgtgtgatcagccgtcatgctcctccagtctctatgaacaagctaagctataatagtattttgctatcctaaaaaaaaaaaaaaaaaaaaaaaaaaaaaaaaaaaaaaaaaaaaaaaaaactcgaaaatgctatcctatgatccccgggttgttggcttattcacaagctaagctttaatagcatttcctaaaaaaaaaaaaaaagggcggccgcccccccggggag

SEQ ID NO: 136468 - DNA, 360 bp, Zea mays
  Clone ID: MRT4577_55934C.1
aaataaacccttatttctgcggagtcgagtataccttgagaaggtgttgtatttgcttgaagtagttattaacaatgctgcatcccaagttgattgtccacctcactctgtacagataactaacaattcagatattgaattcgttgatgggacaccatatcaaacacaggtggaaccatctactttggaacaaggtcatatcccggataataaccaaagtagagatgttgaggtcccaccatcttgtgctaaactggatgttaatgtgcatgcaatccttacccaacttcctgatgctgaattgcataatctgtgcaatattcttgcacttgagggtcttccagataaagtgtactcact

SEQ ID NO: 136469 - DNA, 290 bp, Zea mays
  unsure (1)..(290): unsure at all n locations
  Clone ID: MRT4577_55935C.1
cgggcgagggacgcacacaccgaccgacccacgaacttcgatccttttgacaatccaaagccnggcggggcttgtggtgatgctgatctcagcaaagaccctcactggaaagactatcacactcgatgtggaggcttctgacaccatggacatcgtcacggccaatatccaggactaggagggcatacctgcggaccagtacaggctcaaatatgctggcaagcagatcgaggacaggcgcacacttgccgactacaacatccagaaggagagcaccctacaccttgttc

SEQ ID NO: 136470 - DNA, 546 bp, Zea mays
  unsure (1)..(546): unsure at all n locations
  Clone ID: MRT4577_55936C.1
tggnacctctaaacgcccggggggggggggggggggtttttttttttttttttttttttttttttttttttttttttttttttttttttttgaacacaaaaatcaccaaccggttcaaagacaaaatataggggtacattttggggcccccaaaagncacgggccagggggggggggggggggttttttttgcccaacccttccaagcaaaggactacagggtgggtctccctttttaatttaaggccccatcaaaacatcaatggtccccccagggttaaaacacaactttttttttttttccccctttcgggggttaataaataagaaaggggcctcctaaggggatcaaacaacatttgccttaaaaaaagaaacctgaatgggacatcaagggcgggggcgggctctgaagggggcccccncctgcctattggggggctgggccgnccgggggaggtttctttggggaccccgccaacaattgaccgggtgtggcggccccccaggaaaaaaggtttgggggcccgaatggttgcatggggc

SEQ ID NO: 136471 - DNA, 289 bp, Zea mays
  Clone ID: MRT4577_55937C.1
gtcgccttgggagctgctgcggaggcggagggagcaatgtgcctaggtgcacgtaccgcatttctggggaaggtggtgcgggcggtgggccctcggtgagatctgtcagcaatgttttaagcgtgcgcggtggactctagatactcgtaggtgccatgccagatcgaggttttcttggccaattactgaatctagtcagattaatggccctacggtcacttccggactccgagtggccaaatctattgtgacagttagatctgttgatggggcagcttccgccgagata

SEQ ID NO: 136472 - DNA, 797 bp, Zea mays
  Clone ID: MRT4577_55938C.1
gtttttctcaataaaaaagctaattgttttccaaacttgtccatagttacgttacttcccatttctatacacattacaagactcattgtttttgtcctttggaaggtaattgcaatgctagtttatgtagcttgtcaacacaggatttctcagtgctctcctgtgctttcaacacaggatttcttaaatgagatgtcacagaaggacaagaaagttgattccttagttaaaatggggtttcctgaagacgaggctgcactggctattactagatgcggatgcatctatttctgttctggtggattccatatatgcttcacagaccgcaggagatggttactgtggcaattttgcaatactgcagggtaattccaatggagggagaaacaaagggaggttcatggatgggaacaaaaaaaagagaaaaagatatggaggtcaagcacagggaagtagaggcccattagatggtagctgtgaagaacccatgcctgtcccaaatccaatggttggatttaacttgccggaccattggacaagaccagtagacagatcgctgcctacacaagctattggtccaccatacttctactacgagaatgttgctcttgctccaaagggtgtctggactaccatatctagattcttgtacgatattcagccggagtttgtggactccaagtacttctgcgctgctgccaggaaaagaggctacatacacaatctaccacttgagagaaggtcgcctctcctgcccatacctgcaaagacaatattcgaagcatttgctcgtacaa

SEQ ID NO: 136473 - DNA, 612 bp, Zea mays
  Clone ID: MRT4577_55939C.1
atgagcttaattattatcatgggtgttcacacttgtatggagtgcaatttcgggttaatgattcaaggccccatacgatgcttgagggagaaggaaattctgtgcgataacgagccgtaggtggacttagcacttgtatatatgcactgacaagagatgatacaagggctttgtcagttatcaaacatggtgcaatgctacattgcggccctgttgcatatataggcctaggggatatatgtcacatcgtgtgattgagtaggacatattaatggagaatctatggtggacaatgagtggtttaatatagttgtcagagctctcaagtggttttggttccacacaatctatttctcttgagctgaggagattgccctaggcacatcttggaacgcgaatatatgctgcccgtcatgtccaacttttccggctaaatcttgttgccttgggcttgaatcttcttgtgctcatctgttttaatcggttccctatggctttactctatggcgctggcttacaagcaatttgcgaagtcttccactggcacattgtgcctatcattattattggccgacgatgattcatcaatggctgctatttaaaatgaacatc

SEQ ID NO: 136474 - DNA, 856 bp, Zea mays
  unsure (1)..(856): unsure at all n locations
  Clone ID: MRT4577_5593C.1
ctgtgcggcgctcgtcgcggccggccgggccgctatctatatggggaacgcaatttccaccaccggcttcctggccctatgcgcctcgacgagcgccgtccacatggtaagctttctgaacccatggccgggttcgagcgccacggtagccgctcaagccccgccagcagtccacagcggggtccggatccgggacctgcagctcctggcttcggcggcggggtttttcatctctgtgggcttcatctaccgccaccacctccaccgtggcgccggcaacaggcgcctgccggagatcgtgcccttcatgctatgcgtctgcgctggcgttctccagttcctcctgttcgtgggggcttcagcagcttcaggtggcgcggacgtggtggatcaccgcgctgaagcccgcgcgcttggtctggctgctctccgtgtcctgcccgccgccgccacagtgaccttctttctgggcaccatgctgatattcgccgcgcttatcagcgccggaggcgtaggtggcggcgccgccggaagaagggagaggagccgatccaggctcccgtgggcctccggctcctcagcaggatggctttggctgctgcggcggcactgttctgcatgatggccgtggccgtctacggcgcctactgttaattatggcgttgacgaaataatctggaagaggtgctgggtggccaacgtctagattcataagaatctctctcctgtcattcccacctacaagtaatgaatttttgcaatgttattcangtgaatgttgtactaaatacggttgtgtgattgtcgagtcagggctggtactcccaacttgtngatgcctgttagtgattgcaac

SEQ ID NO: 136475 - DNA, 536 bp, Zea mays
  unsure (1)..(536): unsure at all n locations
  Clone ID: MRT4577_55940C.1
gcgtcacgccgctccccgccgccgccgtcgccgaccgcgtcacgccgccccccgccgccgccgaccacgtcacgccgccccccgccgatgagtaatcgaccgcgtcacgccgccccccgccggttagcctcgtcgtctaccattcgccgtctcatacaggacggtgacctggccgtccccggctcctctgcggaggacgtcgcccacgctctccgcaaccaccgttctgagctccgccgcaagaggctcaagcccttgacggaagccgtccgccgtgtactatcctctgactttgatgacgacgatgatgacgactccgcctcccgcggtcaccaaggtgcccacgccaccctatcctccaccacctgtctgtgggacgaatgcgcccacccggcggctccaccctatttagatgccaccaagaccatgctgtcctcccagtatgcctcgcagacgtccaaacagaacccaaggactaaccagcatctggtaatggtgatgaccggtganaaggctcgccgcctcataacatctga

SEQ ID NO: 136476 - DNA, 251 bp, Zea mays
  Clone ID: MRT4577_55941C.1
ctagttctctttcattctcaaacatgatacgcggggggtaaagcgttgtgggtcgggtacataatacacttatgatggtagtctgtaccttataattggaatgacccatcatttaatgattaattgacacaatatcagaaggcaattacacctcactaactgcactacagtagccttatcgggttatatagtgagcgggaaaccttaatatacatacttaatctgcaatttaattaggggttaaagatacc

SEQ ID NO: 136477 - DNA, 745 bp, Zea mays
  Clone ID: MRT4577_55942C.1
ccggccgggccccctttcttccttcctttctttgttgtactactactacttaagctcgccgcttctgttcacagtccatgtgattgattctctcctgctccttctttcttccatctctcctgtctctcttctctctctctctctgtctgtctgtctggcaaagggcactgacggccgcggcggtgtcgatggagtggtggcagaaggcggtggtggtgccggtgaagcgcgcgtggatcgccgccgccgcccggctgacgacgcgacataagaaagaagacggcggccacggcgtcctggtgaagctccacgacgacgtccagacgtgcgcgtacgaggacgtgcaggtgatgtgggagatgctgcagcgggccgagacggagaggctggcgcgcgagccctcgccaaagggcgcgcgcgcgctcgtctggctgcgccgccaccacaagatggacccgcgccggcgctgctgaggaggaggacgacgacgacaccctgatgcttttccttcctcctgctgccccttcggccttgcttgccagctgccgtgccaccctgtgcagccttgccctgtgatggtcgtctgtgtgcgagagccgctcatctgcggctgtgtgtacatattacatgctacatacagggtacagtacagccctgctgctgtgcctttggtttccttcgcccggatgtaaatattcacagtttcatctttccaaggaagagaagagagatagagagaccgaat

SEQ ID NO: 136478 - DNA, 355 bp, Zea mays
  Clone ID: MRT4577_55943C.1
tcgcatagccaccgtcaacatgctggggatacggaaggtgctgagcccctacgacctgacccaccgggggcggtactggggcaagttctacatgcctgagcgcgtgtagtgaggctcaggagcaggaatccgcgccttcgtgcccctgagccagtccttcgggtctttgggtacctctgatgtcataaccgaggagcagcatgtgaacagatgctctgaaaaactgtacgtcacctgtcggattcttttaagtacattatattaaagtttgagcgttagctcaaaatgaaaagactcctcgaaatgatacacaataacgtctaataggacggttattctatatggtccaagctta

SEQ ID NO: 136479 - DNA, 327 bp, Zea mays
  unsure (1)..(327): unsure at all n locations
  Clone ID: MRT4577_55944C.1
ntttattttttttttttttttttttttaagcgaaagctcaattttatacggtcagtaatgatgtcatttaagccccatatatagaccgcgggcagtccatttcaacatttcccaaaaaaataagaaataaagaaagaaatgcagagatctatcaggctctctcttttgaatctcggagcaaggccgtggtcgacgagcctctagaaatcttagaatcgctgctgctggtggtggtcgtcatcgtcgtcgcagccgtagtcgtaaaggagccaccactgtagctttcaacggacaaagctccataggcacgtncactgacggccaggt

SEQ ID NO: 136480 - DNA, 699 bp, Zea mays
  Clone ID: MRT4577_55945C.1
aattcggcacgacaatcgcccccgtgtttttttcactgtttggtgaccacgctcttcctgcctgatccgcgggggagcacaacgtttctatccccgggctctcagggtggggaggattttccccgtcaaagtcgtcgtcgcctctcctctctctcgaacccgccgccatctcctctccctacaaacccgccgtcgtccatcgcctccttctctccctcgcactcgcgcaccttccgtggctcgccccttcgtcttcctcgcgtagagcgtgccgctacggcaggcacagctctacacaggcggactgcaggaggcaatcatagctgcacgctagccaagggttgattccacatcacctccacgtacgctcgtcgccgctcaacctgttcaccctgctgctgcttgtgcagtaatcttgattaggaggtagccaaaccagcggggttgccacagatccgagggggcacattgggaacaacggcttgccacatatttggttgttgctagacgacgcacaacaagtggtgtgcttaatgggatctgaagcagtttgttggaaggtgtatacgttcctcaagagcaacatgtactggatctgaatgagattcttctatactcagatttgaaggcggcacataagggtttttcgtcaacaagtggtcgctaaaagaagagcttaaacatcaaaagcttaaacat

SEQ ID NO: 136481 - DNA, 186 bp, Zea mays
  Clone ID: MRT4577_55946C.1
attataaattttatggggggttttctttttaaagtgtgttatttatttaagcaaaaattctgggtaccaatgtttaccacaccaaatggaaaaatagccaataacactcttctcaagggagaggaaaacattccttatttaatctgatgggcttcttatctttttacggggccaaaaagtgttaaa

SEQ ID NO: 136482 - DNA, 326 bp, Zea mays
  Clone ID: MRT4577_55947C.1
cccacgcgtcctggatgatttgttgatgcagccaaggtgatcgtgccccgccgtggatggccgttgctgccctccttcctgacttcaatagtcgttgtcgatctctctaacagccaccactcgtgttcgcccgctacaaggacggtggcaacatatttcccatgccatggttgccggaccctaagtacgcccaggcgctcgccgtggcgctccgcttattccaggtacaaaaatccggtaagatggtgaacaacacgattccctggcgaggggactctgtgctgcgcgaccgcgaggacgccaagctggacctgtctaggggcatg

SEQ ID NO: 136483 - DNA, 598 bp, Zea mays
  Clone ID: MRT4577_55948C.1
tccgctttcagggagtggtggagactactaacaccatgtgcctggtattacttctccctctatgctagataaagtatcacaaattaaaattctcttggctgagattgtttttgtggtttgcgatctattaattttagaaaggcaaaagctaccacacactctaaacaatataaagttcaaggttaattactgtgctacagcagtcctttccttaaatcttatgtgcaaaagtagctcaggccgaacttattctatgttagtaagcatagagcttcagatttgcttgcatttggaaaatgaaaacaagtaatacacatgttctgtcttctttttgattcagtgcttgcactgctatccagtgcaccgtataaactatatacaaaatgcttaggtactacaatgccaatgcggtgtcaactagtggattagccctttactagaaaacaagtttaacatacaagtatatagctgtgttttcatcttagctttctagtttctacactggttataccatgtcatttagccagacctgtaacccactaagcttatctgaagtgtttctgtaatttgacgtctgcagcactctggtttcttacat

SEQ ID NO: 136484 - DNA, 408 bp, Zea mays
  Clone ID: MRT4577_55949C.1
agagccaccacgcaccaagaaaatgatgacctcttggactcttggtccgctgtggactatgcgagtgttcctggagatccaccgcggacataagaacccatggaagtctgcgacgtcggcctgagcgggatccggattggggggtgcagcggcatcggcgcgcaaacggcgcaaacactggcgctgggcggtgcacaactaattgtggcggtcaagagcttatgccgctggccaggcggctaaggacgctggcctccgccagacgctacggggtcaagctctacatggtggagctctaccatctcgtcatggactgtgttgggacttacctgctcaaactcatcaacaggggtctctccctcatgatccttatcaacaatgcacgattcatggcaataccttgtgcgc

SEQ ID NO: 136485 - DNA, 228 bp, Zea mays
  Clone ID: MRT4577_5594C.1
aataacttagtgggagaatccttctttcctagggaaagggtcaaaggtttaaaggctgaaaaattctccttccaatatggtttttataaaaaacaactatgccagaactcacatgaaaaaacatgtgttggaggcacacattatgggaaaaacggtaaaaaaataggagtacagaggtggaacacatgaaaatacaaggtggaaggcatgtgttatgtggaaataagt

SEQ ID NO: 136486 - DNA, 557 bp, Zea mays
  Clone ID: MRT4577_55950C.1
gacttttttttttttttttttttttttttctttttttttttttttttttttttttttttttttttccttttttttttatttttttatttttttattttttttttttttttttttttaaaaaaaacacccccctaaaaaacgtttattccccattggggggggggaaaagaattttttttgtttaaaaaaccactcgaaaccgggcttttccggaacaccttaaaaaaagcccccacccatggccggcctgggaaaccacacccttaaaaacccctttgccagggggggggccattggaccccggcaaagggcactcggccccatccaaaattttgcgcccggggcttggaggttaaaaaggggggggcttaaaaaaaaacccatgggcttggggggcccaaaaaaaggaagcccacctttggggaaaaaaaaaaggccgggaaaaaaaaaggcttgacaaaccggggggccgcaacttgccaaaggggagggcctcaccccccactcggtggagaaaagaaacatcctcaaaaaccccaggcttttgccctgggacc

SEQ ID NO: 136487 - DNA, 185 bp, Zea mays
  Clone ID: MRT4577_55951C.1
gggcgacccgcgcgcgcggcagcctttttaacccgaggccggcgatctccgccatgatcgccaaccactacaagctccgcgagcaacgacgccagctacaacctaagagggaatggggtgcaactgaggaagctcatcttcatcagaactccgcccagcacctcgattcaggcgcacacgggaca

SEQ ID NO: 136488 - DNA, 610 bp, Zea mays
  unsure (1)..(610): unsure at all n locations
  Clone ID: MRT4577_55952C.1
gcaaaagtgtttttgtgaccatacgggtggactactgtacattgcacctatatggtcactacnaacactgttttgcattgttttatatagcagattgcgctgtttatatagtgtaatttgaatatgagtatatgtatagataagctgctagagaggatattagggtaacactacacccgagcgtcttaccattgagccaggctcgtccgtaacccaaatgaattctagattcagattcactccttgcacccgtcagatcaggccgtgtaggaaacttggcatcgtgtttggtttcacacccccctcttttcttcggttctctcgttaatctcacgcacgtacgttaatctcagacgcctgtcctaattggtggtcgacacatggcaaggagctgtaatctttgttgcgagtggactagctgtaacgtatgtgtaattcttatctgcgcgcctgcatggtaaaatatcattcttccggcgctaccgaaggagcctaattaaagagggcagcggggagggagggattaatgtggttcttgtcttgttatccaaacaagctagctgtgtgtaacttttgtatgcttctctaataaactgaaacaccttcgctc

SEQ ID NO: 136489 - DNA, 293 bp, Zea mays
  Clone ID: MRT4577_55953C.1
ggggagcggacaccttcctggcttgatgcattgggcccggggccggaaacgagggcgtaagccgaaggattaattgttaatgcccccccagaagcaccggcaccgccaagcagggtaaaaatagagccgaccagggccttttcacctacaccacgcgcatttcagccagggaagcctgacaaaccccacgtgaagcgttgaccccctttcattaaaaaaccagcactgttttagtactcatttaccccgggggttcgtttgggggggtcggaactgaaacctaatattttccc

SEQ ID NO: 136490 - DNA, 798 bp, Zea mays
  Clone ID: MRT4577_55954C.1
cagaaaacttgtcagaggaagagatcgtgggcttgaaggaaagttcaaatccctggatactgacaacagtgggacaataacgctggaagaattgagagctggtttaccaaagctcggcaccaaaatctctgaatcagaaataaggcagttgatggaagcagctgatgtccgcgggaatggcaccattgattatgttgaatttatatcagcaacaatgcacatgaatagactagagaaggaggatcatatatttaaagcattcgagtattttgacaaggaccatagcgggcacattacagttgatgagttggaagaagctttgaagaagtatgatatgggcgatgaggcaacagttaaagaaattattgctgaagtagacacagatcacgatgggagaatcaactaccaggagtttgttgccatgatgaagaataatagccccgagattgttccaaatcggaggcgcatgttttaagaaagacttctaagatatatttttccgcggtcagaggggagagcaactgatattcgaaagtgggattcagtctgggcatatgtgcaagatattacagactttggacaagtcatcagtcatgggtgattgcctttgtgttgcttccattttcgaccatctcatcctacgatctttccaagttatctttaatgaggtgtgtcgtgtggtctatgtttcctgcctctggatcttttatgtaagagaaacggacttgtaaaacagttccaaattatcatataccaggcgaaaagtaatgcgatgggacttgtgatcctctttttttt

SEQ ID NO: 136491 - DNA, 868 bp, Zea mays
  unsure (1)..(868): unsure at all n locations
  Clone ID: MRT4577_55955C.1
gggccgacccacgcgtccaacttgtcagaggaagagacgtgggcttgaaggaaagttcaaatccctggatactgacaacagtgggacaataacgctggaagaattgagagctggtttaccaaagctcggcaccaaaatctctgaatcagaaataaggcagttgatggaagcagctgatgttgatgggaatggcaccattgattatgttgaatttatatcagcaacaatgcacatgaatagactagagaaggaggatcatatatttaaagcattcgagtattttgacaaggatcatagcgggtaatttcactccgaactccaccttttcgttacttttcacctttaacattaactttgtttgtcgcttgtacattcatgtacaggcacattacagttgatgagttggaagaagctttgaagaagtatgatatgggcgatgaggcaacagttaaagaaattattgctgaagtagacacagatcacgatgggagaatcaactaccaggagtttgttgccatgatgaagaataatagccccgagattgttccaaatcggaggcgcatgttttaaggctcatctcctacatttaattggaaaaaagaaagacttctaagatatatttttccgcggtcagaggggagagcaactgatactcgaaagtgggattcagcctgngcatatgtgcaatgatattacagactttggacaagtcatcagtcatgggtgattgcctttgtgttgcttccatgcctgggcatatgtgcaatgatattacagactttggacaagtcatcagtcatgggtgattgcctttgtgttgcttccatttttcgacatctcatcctacatttaattggaaaaaagaaag

SEQ ID NO: 136492 - DNA, 1982 bp, Zea mays
  Clone ID: MRT4577_55956C.1
cattgggtacctcgaggccggccgatggaggacgtgcgcgcgtcctacacgttcggccgggagctgggccggggccagttcggcgtcacctacctggccacgcacaagcccactggccaccggtacgcgtgcaagtccatcgcgacgcggaagctcgcgcacagcgacgacgtcgacgacgtccgccgggaggtgcagatcatgcaccacctcacgggccaccgcagcatcgtcgagctccggggcgcctacgaggaccgccactccgtcaacctcgtcatggagctgtgcgagggcggggagctcttcgaccgcatcatcgcgagggggcactactccgagcgtgccgccgccgccctctgcagggagatcgtctccgtcgtccacagctgccactccatgggggtcatgcatcgggacctcaagcccgaaaacttcctcttccttaacaagagggaggactcgccgctcaaggccacggatttcggactctccgtcttcttcaagcccggcgagcagttcagggatcttgtcggcagcgcttactacgtcgccccagaggtgctcaagcggcgatacggagctgaggcagacatatggagtgccggagttatcctctacatcctgctatccggcgtccctcctttctgggccgagaacgaggatggcatatttgatgctgttttgcgaggtcatattgacttcgcatctgatccctggccttccatatcgaatagcgcaaaagatttggtcaagaagatgctgcgccaagaccccaaggagcggcgtactgctgctgaaatcccgggtcgaaccacgcgtccgattagagaggatggagaggccccagacaagccactagacataacagtaataagcagaatgaagcagttccgggccatgaacaagcttaagaaggttgccttgaaggttgttgctgagaacttgtcagaggaagagatcgtgggcttgaaggaaatgttcaaatccctggatactgacaacagtgggacaataacgctggaagaattgagagctggtttaccaaagctcggcaccaaaatctctgaatcagaaataaggcagttgatggaagcagctgatgttgatgggaatggcaccattgattatgttgaatttatatcagcaacaatgcacatgaatagactagagaaggaggatcatatatttaaagcattcgagtattttgacaaggatcatagcgggcacattacagttgatgagttggaagaagctttgaagaagtatgatatgggcgatgaggcaacagttaaagaaattattgctgaagtagacacagatcacgatgggagaatcaactaccaggagtttgttgccatgatgaagaataatagccccgagattgttccaaatcggaggcgcatgttttaaggctcatctcctacatttaattggaaaaaagaaagacttctaagatatatttttccgcggtcagaggggagagcaactgatactcgaaagtgggattcagcctgggcatatgtgcaatgatattacagactttggacaagtcatcagtcatgggtgattgcctttgtgttgcttccattttcgaccatctcatcctacgatctttccaagttatctttaatgaggtgtgtcgtgtggtctatgtttcctgcctctggatcttttatgtaagagaaacggacttgtaaaacagttccaaattatcatataccaggcgaaaagtaatgcgatgtgccttgtgatcaaaaaaaaaaaaaaaaaaaaaaaaaaaaataataaaagaaataaaaaaaaaaaaaaaaagggcggcccggacgcgtgggtttgttgccatgatgaagaataatagccccgagattgttccaaatcggaggcgcatgttttaagaaagacttctaagatatatttttccgcggtcagaggggagagcaactgatattcgaaagtgggattcagtctgggcatatgtg

SEQ ID NO: 136493 - DNA, 388 bp, Zea mays
  Clone ID: MRT4577_55957C.1
ggcaggggaaaaagcaaaaaaggggctggggggccaaaaggggcccaaaagggtaaaaaaaaaacacaggggggaaaaaaaaaagcctggcctaaaaaaaggggaaaaaattggaacggaagggccctaaaaaaaaaacccactttgggggtaaaataacaaaaggggaagcccgggaaaaaaaatcgacccaaatcatccatatgcaaaaccaaggggcccccccttccaaagccaggggggggacagggccccctgggctttgggcccaccggggggcaaagctttatttaaacccgaccccactttaaggggatccgggaaaaaaccctacgggttgggggggaaaaaattgatctggggagcttcggggcccccatggccattt

SEQ ID NO: 136494 - DNA, 1128 bp, Zea mays
  Clone ID: MRT4577_55958C.1
gccgggaaaaaaaaaaaaaaaaaaaaaaaaaaaaaaaaaactatcattgggtacctcgaggccggccggggccgcccgcccgccccactctggagataaggctctccgcctccgcctccgcccggcagcctcccttctatcctctccggcacgagccgtccagttcagttcacctcggtccgggaccgcgactacaccgacggcggcgcgtccgagcccagccgacgccgagccaatggtgactccagcgacattctccctccgccccagcgcgccccccgcgccgcctcgtgccgggctgccccgcgctcgggcctgtttcgcgcccgccatccgcacctccccttccgtcgccttttcctaccagcctcggcgcttcagtggcatccgccgcgccgtggccgtcgactccgagcagggctcccccgagtctccagagcaggagaagaagcccaagacgtactacttcctggtggcaaacgccaagttcatgctggacgaggaggagcatttccaggagcaactcgccgagaagctgcgcaactacgccgagcgcgacaaggagcaggacttctggctcgtcgtggagcccaagttcctcgacaggttccccaacatcaccaagcgcctcaagcgccccgccgtcgcgcttgtctccaccgacggcaactggatcacattcatgaagttaaggctagacagggtcttacaagaccagttcgacgcagaatcagttgaagaggcattggcttctaaccctgttgagttgaaatttgagaagcctgagaaatggacagctccgtaccctaaatatgggtttggatggtgggaacccttcttgcctccaaagttcagcaatggtacggcatagagataagcagcaatccctatgaggcatgtaagattactcccctgtaagtgatgaatgtaattttaattttgatgatgaggatgtagtacttgaggttgtaccagtacagttagttgaattagttgcacagtttttgtaataccaaataatcagctgttttattttatttgagaaagtcgtggttctgttaaaaaaaaaaaaaaaaaaaaaaaaaaaaaaaaaaagaaaaaaaaaaaaaaaaaaggcaactagcggcc

SEQ ID NO: 136495 - DNA, 688 bp, Zea mays
  Clone ID: MRT4577_55959C.1
ccgggtcgacccacgcgtccggcagagacgcccgaggcagcgcagagcagcagaccgcacgtcacacaccaccattgcagcaatggcgcgcgccggcgctctgtgcctggcgctgctgtgcctcgtggccgcgcactcggccgtggcgcagaaatccaccccggtcccggccgccgcaccggccgccaccaccaccccaccggcgaacgcgtccaagaagacgcccgcgccagccgcggcgccgcccaccacccccgccaccctggccccggccgccgcgccgcccaccacccctgccacccccgcgcccgccgcgaccccgccagccaccctggctcccgccgcggcgccgcccaaggcgtcccctcccgcgccggcgcccaaggccaaggccaccccacccgcctccccgccggtggccgagctgccgcccgccgcctcgccccctgcccccgcccccgcctccccgcccaccaagcccgccgaggtccccgcgcccgcgccgtccaagaagaagaagaacccctcctcgtcctccaagaacaagaagaagaagtccaaggccccagcccccgcccccgtcgtcgccgaggcacccaccagctccaagcactccaaggctaaggcgccctcagccagcgaagccgacgcgcccggcccggtcggcgacgccgccgccgccgacacc

SEQ ID NO: 136496 - DNA, 298 bp, Zea mays
  Clone ID: MRT4577_5595C.1
atgcgggctctcaaggaaccgaacaagaacatgaagcttgataagaggcttgccaagaagtgccatgctttctaggcatcagaggccatcatccagcagattccccgactccatgggcctggactcaacaaggcacgcaagttccctaccctgggtactcaccaggaatccctctagtccaacgtgaacgagactcatgcaacccctaagttccagctcaagaaagctctctgcatgggtgttaccgttagcgacttgcctatggaggaaaagcagatccagcctaacatccagatga

SEQ ID NO: 136497 - DNA, 465 bp, Zea mays
  Clone ID: MRT4577_55960C.1
ccggccggggaacgagaacgacgaagcgaaattaacacacacgcgcgcacgcacgagcagggtacggcgggcatcaccacctcctgtcctgctccgtctgcgtcaccaccctcgccgccgccaaggctcgacagcaccctaacgcgttggccggggctaacagcaccactaactacaagggtaaacggcgcaatgtcatggtcatctggcacgggcaccccagcgtcggcggagctcctgaccacggcggcgtgtgcgggataaagaacgtaaatctgccaccttagagagggatgacggactaccaaaacgtccccatcgtcgaagacgcggaagggctgcggctcatgctacgaggtgagatgataagaaaaacctgagtgctggcgctatccactgacgatgtacatgactgacatgaactacgatgctatcggtcgctaccacttcgacttgatgcgcaag

SEQ ID NO: 136498 - DNA, 180 bp, Zea mays
  Clone ID: MRT4577_55961C.1
tagctcactagttttctgccgcccttttttttttttttttttctgggttttttttaattttataagccaccgtaacaaaaaaccagccaaatttaggtcattttaaataacaactctgcaacaagggcaggtctttttatccctggaagaaccagctggcttggagaccaaaacccattt

SEQ ID NO: 136499 - DNA, 1279 bp, Zea mays
  Clone ID: MRT4577_55962C.1
tcttcccctgaccgccgccgtcaccgccgatcacacctctagtcagcttccactggagcacgccaccccgaattttctcccggagtcgttgccctcctctcctacccccgtacactaaagctggttcgcagatccatccggacttgatcggttccttcttttatttcttgcccatagagcccaaacattattggatggactctgtcacttgctgcgacggcggcaaggaattggaataggacgaggtggggatcacgggctgcgacggcggcaagaaattggaaaaggacggcgtggggatcagggtattcgtcttgggaaaggggatggggggtctctgctcgaaggtctcagctgtagacaagtcaccgagcgacaccgcgcttggccggaaccaggtcgccgatcatgagccaggggcgtcgttggagttggagaagccaccggtgtcccgagagtcagctgcgccggcaaagcggctggacgagcagctgcagtctttctcgttccttgagagcgtcgtccctggggttgcttttcatgccggggctaacacgggcggcgaagcggggtccaggacctcgccgcagctgaccaggtcgctgtcccagagggctggtgtgggcaaggcaaaagccggcgctgccaaggtttcagaagtgagctcaattttaggtagagctagcactgctgggcttgaaaaggcagtggaggttctagatacacttggcagtagcatgacaagtttaaattccagcagtggttttgtgtcaagttctgcagcaaagggaaacaaaatatccatgctggcttttgaggtggcaaatactatagttaaaggctctaatctgatgcgttctctatcggaacctagcataaagcatctgaaggaggtggtgcttcattcagaaggtgttgaaaaccttatatccaaagattttgatgaactgctcaagatggcatctgctgacaaaagggaagagttagaagtattcacaagagaggttgttcgctttggaaaccgttgcaaggatcctcaatggcataacttggaccgctactttgaaaaactggcatctgaacgaaccccacaaagttatctgaaagaaaaggcagaatcagtgatgcagaaactggtcacctgcgttcaaaatacagttgaattatatcatgaattgcatgctttggatagatttgagcatgattgtcgtcttaaacagaaagaacaggatggcttgagttcaagaggagacaacctggatatactgaagcaggaatt

SEQ ID NO: 136500 - DNA, 896 bp, Zea mays
  Clone ID: MRT4577_55963C.1
aaatgagataattgttcaaacatgttccacacaaggccctaataagctagaaatgtccaaatatcttaacatcaccaggagagggaaacatagcaatgagaaaaaccaagcttgatgagatcagtggttagcaaggagaaggaaacatagcaaagatctcgtttgctgctgctctttggtgacttcgtcacacgacgcttcaatagatccatctgctgctgaagaatccgattgtgtagtggaaaaatcgtcgccgtcgggaacctcatctccttgcctgcagctggattgggaagttcgttgagcatctgcaccatcttccgcatcataggctgttgcacgctctgctccttgacgcagagaagtgcaacacagaatacatgcatgaccttgtgtgcacggtcgacagcctagggccaatgatcttgatcacctgctccttgtttgtgtttgtcatcgacttgacccgatggacaatgttgacgccgtcccaaaactcacctactggcttctttccggtgaccagctcaagaagcacgacaccaaaggtgtagacatgctcttctcattgaccttaggggtatatgcattcctggagcaatatagccataggagccagcaattgcagacatacactgtgatgcgccatagtcctcagatttgtgcccggtaagcttgctaacataatcttcttgagcacggatatcatggtggaggatgctcctatcacggcttctagaagaaagcaaagaactccatgcaagagcaccaccaatcctatcagcccaaatacctccaagtttctggagatgcctgagaaggtgagggcagggatgactgatgaggtaagacaaggcgagttgggacggtggcccccactgccgggtgggaattca

SEQ ID NO: 136501 - DNA, 190 bp, Zea mays
  Clone ID: MRT4577_55964C.1
tcgacgtgaatgcgtccgggcctggtgggtccttcgccttcccactttgggcgctattcggcactggcactacttaaccgcaccaagtctgtgcatgacgcacttcgcatcatgagtgcggctgcactctctaagccaacaatcctcatacccaagggcgacttccttgttggacaactcaacttcacag

SEQ ID NO: 136502 - DNA, 174 bp, Zea mays
  Clone ID: MRT4577_55965C.1
ttttttatttttgattattaaacgccccccgatccagcgcgggcatatataatctgttgtccaaagaaatacatgaccggtctttcagctgaaaaaaaaaaaacccgtgctcaaccaaaaaaaaagctccctttattatctgccacacgctccgccctatgggcccaacaagcg

SEQ ID NO: 136503 - DNA, 196 bp, Zea mays
  Clone ID: MRT4577_55966C.1
atacaaagctgcaccttcttccaatctttactacatcgtcaccttcaggcttcagataatcagatttcaatacacgtcatgccctatgtcctggaaacgatcgaagtttcaacacgagaaaggagcagatctgattcaacaaccttttcatttctcgtgtattcagatgaaccggacgcgtgggcggacgcgtggg

SEQ ID NO: 136504 - DNA, 267 bp, Zea mays
  unsure (1)..(267): unsure at all n locations
  Clone ID: MRT4577_55967C.1
gggtgaacacaggnaaggaagcatggtagtgtgcacggagaaggaggaggtctgcatgtctgctcgctttgatgccctcgggctctgatctcgcgggcctggattcgacctacacgcagattgtattcaaagataagagaggcagctagcgcaggtgcaagaaagaagctgtccctccctccctccctcccctgtgcnttctgctagctagctaggtgccctgccgaggagagatagggatacgatgggccggcgggtggcatcgtg

SEQ ID NO: 136505 - DNA, 208 bp, Zea mays
  Clone ID: MRT4577_55968C.1
atacatcacaacgcgaaagaaagctataggggggagattttaaaaagaaaacgggcaagagccaagggaaggaaaaaggggatcgggacctagatgaacccctcttacccaatcaggagaggttaacagcaagcgggtacgcggaagcgctgttggaccaaaaaccggataccaacacttacacactgactcagaccctgagccagag

SEQ ID NO: 136506 - DNA, 1602 bp, Zea mays
  Clone ID: MRT4577_55969C.1
cggggatacatagcaccgaccactcgcgacccgattcgaatcgagccagagtcccaggcagcggcggcggcggcgcccgcctccaagaccacctgctcacggaccccagccccaattgtaaggtctccctctcgtaccgttccccgctctgcgcgcgctcgtgcgtcatatctggcctgcgattcatttcacggcgccgtgtgcctctaatatggctggcgtctgtgcctctttggtgaggttttcgactccgtggctttgccttccctctagagacagcgggtggtgtcttcagccctgatggcaccatgtcatgtgcgcgattggatcatggggattctgatggttcacagcgcttcttcaccttctccgtcaagggttctgtatgttgcaaaccacgttaacagatgggggacgttgcgaaggacttgacggctgggaccgtgggaggggctgccaacctcatcgtcgggcacccgttcgacaccatcaaggtcaagctccagagccagcccacccctgctcccggacagctccccaagtacgccggcgccatcgatgctgtgaagcagacggtcgcggctgaaggcccgaggggcctatacaaggggatgggggcacctctggccaccgtagcggccttcaacgctgtcttgttcagtgtcagggggcagatggaggcgtttctcaggtcagagcctggtgtgccgctgacagtgaagcagcaggttgttgcgggcgccggtgctggaatcgcagtctccttcttggcttgtccaacagaactgatcaagtgcaggttgcaagcccagagttccttagccgaggcagccaccgcttctggtgtggctcttcccaaaggtccgatcgacgtggcgaagcatgttgtccgggacgccggcgccaaaggtctcttcaagggcctggtcccgacgatgggacgcgaggtccctggcaacgcactgatgttcggcgtgtacgaagccacgaagcagtacctggccggcggcccggacacgtcgggcctcggcaggggctcccaggtcctggcgggcggcctcgccggcgccgccttctggctgtccgtgtacccgacggacgtggtgaagagcgtgatccaggtggacgattacaagaagcccaagtactccgggtccctcgacgcgctgaggaagatcgtggcggctgatggggtgaagggcctgtacaaggggttcggacccgccatggcacgcagcgttccagccaatgccgcgacattcgtggcctacgagatcacgagatcggcgcttggttgatttgattggtgctggcctttgccatggccctttgcagtttattcattctccttgcgcggctggagcaacgcgaacaatgcgagacaattttagggaggaaagagagagagaaacttttcacttcaatgatgagattctttaatgaagcaaagcttactaagggcatgtttggtttcaattagtcctaggactaaactttagtccctatatgtttggttttagagactaaatagattctaaagtcattaaatacattgtccaaaaaaaaaaaaaaaaaaaaaaaaaaaaaaaaaaaaaaaaactc

SEQ ID NO: 136507 - DNA, 365 bp, Zea mays
  Clone ID: MRT4577_5596C.1
attatacactatgtggctggacaaattggagtcactaaaccaaaatagaatgcccggcgggccaaaagaatgaaaaaggcttggcaaacctctcaccccactaaaaagggggcgccagcccgaccggagcccccaaaatcaagaaaggcaaccacacaaaagggcctgcagacacgctacaaacaagagcccggccacttaaaaggaccacccaaaccccgggggggcccaacccttgacgaggggggcaaattacactcggggcggtagaaccatgcccgaacccccggggcctagaaggaccacaaattgattgttgaccccgccccccggaaaaaaaacccctaggcaaccgctcgggaaaa

SEQ ID NO: 136508 - DNA, 375 bp, Zea mays
  Clone ID: MRT4577_55971C.1
cccccccaattaatttcgggcaccaccccccggagccgacggggaaaaaaggggggggggatcaaccccggagggaccaaccaaggcgggtagagaagggaacgccagaaaaagaccccccccgctcccccataggaggggacagcaccgcgccccaaccggcggaccccaaacacggcccggaggagacggcggaaccggaaggcccacaacctggccaaggggaggcgggcccccggcagggggcacgccccccagagcaaccgcccgggcgagaagacgcacacacacaggggccccccggggcacagccccccccaaaagacggagcggacgccccacacgcccgcgcagccgaacgaaaaaaacaccgcc

SEQ ID NO: 136509 - DNA, 353 bp, Zea mays
  Clone ID: MRT4577_55972C.1
gaaaaaaaaaaaagaacccaggctttaattacaaacaaaaaatttatttaagattggtcaaagtttggggggggaccaaaaaaaaaaaaaagcggggattgttaaaccaaacacgcaaacttagaccgaacaggaaaacttggacaaccccccatgggagagggccccaaaagacacagggacaggggcagttaaaaagacccaagacttacgggccacaagggaaacggggcaaaagggggggggggcccccctttgggatgggggaaaaagcaaaggggcggccatcccccagcggggggccgaaaaaaaacaaagggggggggcccggagagaagccccccttgacctga

SEQ ID NO: 136510 - DNA, 287 bp, Zea mays
  Clone ID: MRT4577_55973C.1
ttagacatgtttctcttagtggtggatactgtctagctaggaagagagtcttgagggattgatggacgcatgcatcttcaattcctgtgtattgtattactacaggtacaatctgtaatgttacacactgatgatgaattgatgatggctgatgagcaaaaaaaaaaaaaaaaaaaaaaaaaaaaaaaaaaaaaaaaaaaaaaaaaaaaaaaaaaaaaaaaaaaaaaaaaaaaaaaaacctccccccaaaaaaaaaagaaaaaaaataaaggcctttctcccgcccc

SEQ ID NO: 136511 - DNA, 162 bp, Zea mays
  unsure (1)..(162): unsure at all n locations
  Clone ID: MRT4577_55974C.1
ggcacgagggttaagaagatagctcttcatgcattcaatcaagctattaaagatatcactgatgaatcatctaatagcaatgaaaggttcgttgcgataactcttcttccaactgtttattctttgtggttncatnnatagtgcatgcntaatnnnntatgt

SEQ ID NO: 136512 - DNA, 386 bp, Zea mays
  Clone ID: MRT4577_55975C.1
tttttggttttttttttaagcgggccggcccctaaaacatttaatttcttttttgttgcaaccataaaaaaccgaatgatttgcccccccaccccttcccttattttgaaagaccggatcaccccaaaaaaaactcgctgttttgggaaatccacccaaaaaacaaacttcaaggggttgggaaaaaaaaaaaatgggaggaatggaaccgcttaattaagcctccccttaaatttttttctggacggagtaaaacttggtgctcaggaaaaaggaccccaaggttaatggcaccaacctcactttatcccccttgttgggaaaaaaaaattcggggttcccaattgcccaaggggggtttttgaaagaagggggaaattgggggg

SEQ ID NO: 136513 - DNA, 296 bp, Zea mays
  unsure (1)..(296): unsure at all n locations
  Clone ID: MRT4577_55976C.1
caacgctccagctgtggataaaaacaangaggggggttccccagctttaagggatgctccttatatgaataatcaagaatacatcaactcgaggccaccaaccaagctatgatgagatgcaaggctaagacaattctcgaaacttacgaagcaaaggaagatgatggtcggtactctagtggagcctatccaaaatcaacaaaataaggcgaaacccgcctattgagccattctacacgcatattcaatccataacggttcatgccaacacaccaaatttacctatactgacaaca

SEQ ID NO: 136514 - DNA, 519 bp, Zea mays
  unsure (1)..(519): unsure at all n locations
  Clone ID: MRT4577_55977C.1
ccaggccggggaaaaaaaatatttaaaaaaaaaaaaaaaatcaaatactccaggcaggcacaccgancgaggtggnctgggatgcattccagttcagaagcaccacaggaaccaccacaagcacatgcgcgcaagagtggccgcggtctcccactctccttcccgtagctccatatccacagtgcatgcatacatgagctagctaggtagctaagatagcactgacctcggctccgtgtgccgtgcggnagtgatcagtggatcattttactttgctggaagatgagcaggaccaacggtaaggacgggtccaagctgcaggagctgcggctgagcctgtcgcggtcgcgcgggggcgttgggggctcgccgggggcgtcgacgcagcactacggcggcggcgggggcttcgcccaggaggccttcgtccgtcgtctgcccgaccggttctccgtcgagntcgcgcgtgtcgacggagggcagcaccgaggcgggggcaggtggcgccggcgcgtccat

SEQ ID NO: 136515 - DNA, 790 bp, Zea mays
  Clone ID: MRT4577_55978C.1
ccggccctccctcgagttttttttttttttttttttttttttttttttttttttttttttttttttttttttggtttttttttttttttttttttttttttttttgtttattttctatatgtaaaaaattgaatgcctttaattttaaccacacaccaataaagcaaaacccacaacccccaacaaacacaaaaagccccaccaccaaccgagagggcaaccaacaaggggggggggggccacacaacaaaacaagcagcgccggcaggcccgggccccaacaacaaaaaaaggaaaaaaaaggggggggggcccacaggggggggggacaagggggggaaaaaagaccacccaccccaaaaaaaaacacaaaccccccccgaaaaacaaaaaaggcccaaggggaagacgggggacgggcccgggggcggagggggcgccccccccccaaggcggggggggggggggaacccggcgcacgccggacaacagggggacaggggggggggggggcggggggcccacaccccaactgggaccaaatttccgaccccgggggggccacccccaaaacccggggggtgtcctggccaaggggcaggggggcccgccggagggacttgggccttttctgcaacaagcggcccgggaaaaaattttgcgggaaaccccagaaggggggtcgcccggggggaggcgccgggagctgggggccacctgctgaaaaccccgcctgcccttggaacatgggacccggggggggggggcaccccccccccggggggggggg

SEQ ID NO: 136516 - DNA, 261 bp, Zea mays
  Clone ID: MRT4577_55979C.1
agggcggtgatttatttttactttcttttttttttcaatttctattttttttttttaatcttttccccccgcccgagaaaaaaaattaaaaaaccccgagaaaaccccctttttggggacctcccgggggataaaaaaaaataggactacatcaagggcccacatcttccggggaagaactattttaaacaaagcaccaaagaccgttgcaaacactagaaaaagggaggccgtaatctgaaaagaccacacccccctttg

SEQ ID NO: 136517 - DNA, 855 bp, Zea mays
  Clone ID: MRT4577_5597C.1
cctacaggccggccgggatagtcacatacaacaggcaaacgagaagatctgcaaccagagagtgagaccggatcggacggaaatggagagagcaacagcggaccctcacttgctgctgcttccatggcaaggagccatcagccacatcatccccatgaccgacatcggccgcctcctcgcctcccacggcgcggcggtcaccatcatcacaacgcccgccaacgcgccgctcgtgcagagccgcgtggaagacctcgccgcggcactgcaccgtccgcgccgccgcccgagctgcgtcgtcgccgggatgtgccactcgtgggcgctcggcctagcgcgcgagcttcgcgcgccgtgctacatcttccacgggttcggcgcgttcgccctgctctgcgtcgagtacctctacaagcacaggccgcacgaggcggtttcgtcggcagacgagctcttcagcatcccggccctgccggcgtttgactgcagggtttcgcgcgcgcagctgccgcagcatttcgcgccatccacttccatgggcggcgggacgctacaggagatacgggagttcgacgtggcagtggacggcgtcgtggtgaacagcttcgaggagctcgagcacggctcctgcgagcttctcgcggcggcgaccggcaagaccgtcgtcgccgtcggccccgtctcgctgtgccatcaacatcccatgacaatgacagacgacgacgacggcggcggcggcaggcgggtcctggagtggctggacacaaggagaccagtttgtggtgtacgtcagcttcggcagtgccgggtgcatgccacccgcgcaggtcgtgcagctaggcatggctctagcgt

SEQ ID NO: 136518 - DNA, 287 bp, Zea mays
  Clone ID: MRT4577_55980C.1
gccatgttttctcttttcattgatacaagatattaacgagagggggatttattagaaagttcagatgcgaacatactatatggatataatagcagaaagaggcattgatgcacattacagaggacgaggagtaggttttgcacctgttcatgctgtaatatcaaggggacgaaatggctaggggaaagaaagatgattgaataacacaagcttagatctaaggattggttgattaactgcagtacgagagtggcatgaagagattgttggccatctgagttataggg

SEQ ID NO: 136519 - DNA, 265 bp, Zea mays
  Clone ID: MRT4577_55981C.1
caactttttgatcgctttatgcgccgccaacacagccaaagcccgtggcaagtggaagacaacctccaaccaagggtaaagagaagccccacagcaacatcggggaaagcgaacatgcccactccggcaggacgaccaccacacgacaccgtaactacaagcatggaagcattgccaagcgagtgaccgacagggctgagaaggaggctgaagaaaagaataaaccgtcctaaaaagacccgtagccgcacaacaagcccaaagc

SEQ ID NO: 136520 - DNA, 433 bp, Zea mays
  Clone ID: MRT4577_55982C.1
cccacgcgtccgcccacgcgtccggagacttatgtctcacatgaacaaactgatgacgagggcagcgggcagaccacctttagctacgaccgcttggtatcaaagtatactgacgctgtcaacgggatacgaccacaggctcacagagacatatttggtggacaatgagttcgagaccgagtttgtgatgaccaaagaggagttgtacgagcagtcaaggtgtaagcatgagttgcggaacaagaaagctgatcttttgtgaacttacacacacgggtaggtacgacacaaagccctcgcgttgcgcatcgacagctgtagtacagcaatctcaccatgctcggtataccgatgcgtgatcatcatgagctttatacgtgagttggatactctctatctgcacacgttttgagcgccttatatatattactat

SEQ ID NO: 136521 - DNA, 667 bp, Zea mays
  unsure (1)..(667): unsure at all n locations
  Clone ID: MRT4577_55984C.1
acatccccgcgcactcacatctctgcgagctcaccccgtagggttagggtttcaggcgggtagcgatgcgggtcaagaaaaatgtccccaagatcgacaggaagcgagactacgacatgaagctttgcaagttgctgaatgagtactccagtgtgctcatagtggaggcagaccacgtcggctccacccagctcgcggccgtccgcaggggcatccgcggcgagtcggagctgctcatggggaagaacaccctcatccgccgctgcatcaaggtgcacgccgaggcgacgggcaacgacaagatcaaggctatcataccgctactcgaaggaaacgtcggtctcatcttcaccaaggctgacctcaagaaggttcgcgaggaggtcgccaagtacaaggttggggcccctgctcgtgttgggctggttgctcctattggatgtggtggttccccctggcaacactggtctggatccctcccaaacttctttcttccaggtgcttaaaatccccaccaagatcaataagggcactgttgaaatcctggccccggtggacctcatcaagaagggtggacaagggtgggctcngtccgaaggctgccctgcttgccaagctcggtatccgcccattctccctatggggcttgtgatcacaaatatttatg

SEQ ID NO: 136522 - DNA, 515 bp, Zea mays
  Clone ID: MRT4577_55985C.1
cgttgctgtcgcttatgtctcgcaagttcaggggacacttttccttgctatggagattctcctcttggaagaaaatggatatgttgatcttcgacaaggaattggtcatcttattaatgcaatagttgctgttattggtccagagcttgctcctgatagcacattcttttcacgatgcaagtctgttattgcagagataagttcatcaaatgaaatggctacacttttagaatcggttagattctcccagcagcttgtgctttttgctcctcaagctgttcctgtgcacttgcacgttcaaggtcttatcccaatgctttactcaagacagccaagtcttagatatttagcagtgtcgacactgcaccatctgattgaaagggacatactggacatgatgtatacaataagcgaataatagttgcacgaaccaacatcgctgtttctgaatcggtctcctcatcaagcatactgaacagattctcttcaatattctcgtcaatcattgcagccgg

SEQ ID NO: 136523 - DNA, 359 bp, Zea mays
  Clone ID: MRT4577_55986C.1
tcgtgactatctatgaactagtgcgcgcacttcgttgactctgactgctactagcaggacggcaacaaggaggtcataaaggggcaggactggctccagaagggacgcatcatgcatgactaggcaacgagatcctagaccggcagctcgttatcggcgccaagatacatacaggcgcacattgtgagccacagtgactccatactatatctacaatttctatgcgcatggtcataccgcgaccggcaagggaggatagcgccaacgggaatctgtgcaagggcgcgagcgcaatgacaatcggtgctgatcatcacagtacagcgacggttgaggcaagctccgcatatctccggacg

SEQ ID NO: 136524 - DNA, 390 bp, Zea mays
  Clone ID: MRT4577_55987C.1
acatggcttgcgacgaccatgcatctcttcttcccagcgattttagcctgtatctttccttatttatagtctatacggtacaggcgaatatgaccacattgaggtgggatctatgtgctcctctcgtacagtcctaccaaaacacacacaggagcactgtcatcacgcacctactaaatccgatcctaactgacaacatcagataacgactgacaagggcaccaacgtctacacgaggccatcaaacggccagaaaccatcctcgacttaatcacataccacatgccacagcccagagcacatctacttggagttaggaacactgaagtaagaacaccgtgaccactacactacaattgctctaacaagagattctttatattcctcaca

SEQ ID NO: 136525 - DNA, 317 bp, Zea mays
  Clone ID: MRT4577_55988C.1
gctcggaattcggctcgagcccgattgtcaccccccgtatctttccccccccccagcccaaccaacaagggggggtttataaaaacaatgccgggttacccccacggcacacaaccgctaacccacaccgaggggcaacacgcccaccagaacccagcaccgccagcaggggaccaacacgcgcaaccaacacgaccggagccgaaccccccagaagccagggccccccaccaagataagaaccacaaccccgcccgagaacccgcagcacctccacacagaaccaagccagcgcacacaacgacgaagcaaccgaa

SEQ ID NO: 136526 - DNA, 493 bp, Zea mays
  unsure (1)..(493): unsure at all n locations
  Clone ID: MRT4577_55989C.1
actttcccacagcagagcaccgcccgagcggaacacctgcgctctctctctctctctctctaaaaaccccaggtaccgcgccgcggcgaacgccggcgagatggcggggcccctctcgcgaccgcgcaacgccagcgacgaccgcatcaacgagctaccggaagtactcctctcagacatcctctcccgcctcggtaccgcagaggcggcccgcaccgtcgtcctttccacgcgcttccgcgacgcgtggctcgcgacccccctccgcctcgacgacctcgagctccccgtccccgcacgtggcaatgtctccttgatccagccctggacggcgcgcgccgacgtcgtcacccgcgccctagcctcccaccccggccccgtcgcgctcttccgcctctcccggacctccttccgcggccgcgtccccgcggccgaggnctggttccgggagctcggcgccaagcgcgtccgcgaggtctccctctggttctcg

SEQ ID NO: 136527 - DNA, 410 bp, Zea mays
  Clone ID: MRT4577_5598C.1
acgggtcgataacgcgtctagtatgactggagctagccatgattgtggatcttccatggtatgaaaaatgtgtctacgtctaaaaagatccgtgtgccaggatttgtgcatacacttgcactgtcagtcatcgtgaggatgaccagtctatgccaccatcgtgatgcatacagtacttcgaagtatagccagtttgctctcgcgggacacgctggacgcaacggacaacctctggcgagcttgatgtatgaatctacagctttatactgtaaatggacactatagaatcaacatgctactcagtgtgtgcaacgctaggtatgctcgtgcggcgtcatcacttagattcaatttacgcactacttaacgtgtcacacgcttccattaaccgtacctccatggggattcag

SEQ ID NO: 136528 - DNA, 886 bp, Zea mays
  Clone ID: MRT4577_55990C.1
cccacgcgtccgcgtatatagttcagttgtagccgttgagacttgggaggcaggcgacatgggtggcgggaaggacgacggccacgatccctcgaaggcggacaagggattccacggaggagggtacccggccgccggtggatactacggcggccagtaccccggcggcggctaccctgctccaccgggcggcggtgcgtaccctcccgggcctgggtacccggtaccacctggtgggtacccgcctccgggtggctaccctcagcctggcggatacccgccgtcgcacggggcgtacccggcgccgggtgcaggcgcgtatcctcccagcgggtacccccatcaaccggtctacccacagcctggctatccatcgatgcccggtcatggtggcatgtacggaggaggccacggtgcagggggctctgcaggccacggggcgatgctggccggaggtgccgcggcggcgtacggagctcacacggtgtcccactcccacgggatgtacggccacggccacggccacggcaagttcaagcatggcaagttcaagcacggcaagtttggcaagcacaagaagatgtttggcaagcacaagaatatgttcggtcgcaagtggaagtgattaacgtacagctttaatccgattctggacgagcagacgtatatatatacaccggagtccagaatgctaagttatgctattttgattgtgattcgaatacgggaggttgttagggttttcgaagtacgtactgacggctgcctgtaagctttgttggagctgttcttgccgtgttggcagtccgaattaatttaaccatcgattgtgtcgaacagcatctccagctgccgacaaatagacgagtgatcaaagttttttttt

SEQ ID NO: 136529 - DNA, 315 bp, Zea mays
  Clone ID: MRT4577_55991C.1
ggaaaacccacggggaactggtggggttttttttttttttttttttaagctattcgaccagacaggggggttttgggcgccccccacactccttttggattttttttgggcgggggggggtggttttaaaccccaagcattttttctttgcgaaagggttcctctttttcaagggcccgggggggggggacctaccggggcctctgaattccttattttgggttcatcacgggggggggggggggtcccgggctcgggaaattccgttaatacttgtggggccacccctttggtgcgctttttttccggccgcgg

SEQ ID NO: 136530 - DNA, 648 bp, Zea mays
  Clone ID: MRT4577_55992C.1
tcctttttttttttttttttttttttttttttttttttttttttgatgagcgattcctttttttcaaaacggaccctgcagtctttttgtctgaggaactgcgggatgcaggttcaggttccagtagggccttgctttgcaggctgtatttaaaagttgtacagcagtgttttttttagagcgcaagccccagagtgctaccagactaccagagggaggtcaaaataccacgacccagaaacgaactaacgtacaaaaaaatggtacccgatcagagaacccaacaaaccaatcaacaaaattgttaacccggcgcaacgcaacaacacctggaaaaaccccgttgcggcgaggtgtcaatgggcagaaagcaaatcacttggccttgtgcttggggagcgtgagccccacggccggcgcggaaccccatcaagtgctgctgctgctgctgctgcttgggcaagaagcccctgcaccccggggtcggggtcgaaagcctgttggcccccgtcggggtggggcaccccatgtattgcaggccgggcaacagcctgatcctggggctggggcgcggcaacggaatgggcaggcgccggaacggggccaccgccgccacccttggggacagtttcacctgctccagggcca

SEQ ID NO: 136531 - DNA, 608 bp, Zea mays
  Clone ID: MRT4577_55993C.1
ttttttttttttttttttacgtgcataaaattatgtttcaagtggtcccttgcacttaaacgaagacagcgagctggaatagaaatagatggtgaattgaacacttaaaatttacaatcagtttgataagattctgaagacctattatagttggggaaccaagtctgtacccagtttcttgttagatgaggctggtttcgttacactggactacagtctacaggagccacgtttctatagtttgtccacggcacaccccatgaggagcaaaactaatttgtaacatctgctacgcagggaacttcacagcaaaggttataattcccagagcaatttgaatctggtgtgaattagtggctccaatccattctccacataactcccgattaggtttcctttgacgattcaccattctcacaaggagccatctgaggaacccgctccacgtagcaaacagccttgaccgtgacgcaggcagctctgcctccacatcgcgcgcattgcttcccctcatcagtcatcacgacaggggcgcgcgcacggaacagagcggcagggcaaacgtcgtccaacaacagtagataggggcagagctgcggagcgaaacc

SEQ ID NO: 136532 - DNA, 297 bp, Zea mays
  Clone ID: MRT4577_55994C.1
cccacgcgtccgcccacgcgtccgaaaaaaaaaaaaaaaaaaaaaaaaaaaaaaaaaaaaaaaaaaaaaaaaataaaaaaagacaataaaaaaaataaataaataaataataatgaaataagatcaaatacatagttgatactgtaataacaaatagaggaaaaaagcgtgcgagctgttcaacagtgttacaaactggtatatcattcgtgttcactatttgcagtggtttcgagaacctcttggattatgataattttggactcttgtataatcattaatgatgatggtatatat

SEQ ID NO: 136533 - DNA, 713 bp, Zea mays
  Clone ID: MRT4577_55995C.1
ctcgaggccggccgggacatgcacctatcatgacatagtatagaaatctcaccacgctgcgaacgaagtaaactacaataggagcagagcaaggtaccacagagcacgcattcacaacgtctcgccgcctccgacttctgggagatctaccatcccttcgccaccgcaatcctgcctcattgctcccgcatcgttctcctcagaggcggcaactccgcagatgaccacgcgctgcaggtagcgaccatatgtgctgcgtagatattccctcatcctgatactcgcagctacacagtgaccaggaaacatgcataacaagtcactccaagaactatacctcatgggcataagccactgatgccgatatctggaagctgagggcctatgcaaacatgatacccatggagaccatatcaatacggaccgattcatctgacatcacatccaagtatcgagatagtgtgattgctgaagactcacccggacgtcgaagctatgccccagcacagctactttggatgaaactgcccaccatacatcttccgagtttgccaacgataagaatgtcccataatgaaagacttgcaatatatatatatatatctccagaaggaggttatgtttatcatgaaagcactgcgatacccgttcatcgctttcacgtggcgcctctaataagtgacgaactagaatggcggtcctctagctccagc

SEQ ID NO: 136534 - DNA, 417 bp, Zea mays
  Clone ID: MRT4577_55996C.1
cgtcgcacccggtaccaacccccttcctcggtgccgctatccatcaaccacgacccgacccttgccgaatggccacgcagccaggaaccagctccagcccagccgggaaccaggtgggcccctgatcgcactcgcagcaacgaagcggccggctggggagcaggatcctgaccctgacgcgatgagccccggcgccatgctgctgcccggctgatgcgccgcgcccagctgctcccccctctggccggtgaccgcctcgcacgtcgtcacgcgggaggagcggcgggtggacgtcgccgccgggctcaggtcctacgccctcccgctcgtcgcgcaggtgccagaccgcacggtgctggcacgaccctccatagtttccgcttacagcgcgccccgcagacgacagtgctcgagcct

SEQ ID NO: 136535 - DNA, 268 bp, Zea mays
  Clone ID: MRT4577_55997C.1
gcacatacagtgccttttgtgaaaccaaaagcacacgatggcggcccctgaattgattctcataggttgttacttattcactttaaatagtaacaccttttgtttatacaaaggattgcttcgggttgcactgacccatttacaggttcataaaggacaacagcctgcaatccaacctttcgtttggacaggtggcaggcaatcaaaaccactttttgctcaggagttctaaaacgggcaacgcatgagctgctgatccatacataac

SEQ ID NO: 136536 - DNA, 399 bp, Zea mays
  Clone ID: MRT4577_55998C.1
attcggctcgaggtctgggcacacaattttaggcacgaatccatctggtcacgacatcatgaactgtaacgacaatgaaggtttattccgcaactaccctgtctttgatggtggaacttgaaatgctcttctttcgcaagcattggctaagcaggtgtactacccaattcttctcaatgatgttcaattaccttgcatgatggaacgtggattactacgcactgtaacagactataactggaacagattacatgaattgagctgttgaactcgcaagaaacctagacgatactgacggcatctgttaaataaagtactcggttgatgatgtacttgacacaacagctcgagaagaacatcatgaatattacagacaacgggacattgaatgccatcgga

SEQ ID NO: 136537 - DNA, 677 bp, Zea mays
  unsure (1)..(677): unsure at all n locations
  Clone ID: MRT4577_55999C.1
tcatcggcacgcggcgtccctcatcccatggccgggtcgccgacttctaagcgcctcgttcgaaacccctcccgaccaagagctgtcgcttttccccacccccaaaccccacttttttcttgctttcgtcattgtcggcaaatgggtcaactcctccctgtcacctcagtaggtgacacggtcccttccttggcacgttgtacctcaacaacatccttgttgcccccaacatcatccagaaccccctctcggtccgtcgcttcaccactgacaaacgtcgctctatggagtttgatccctaggggctcaccatacgggatcttaccactcatgctgtggttgctcgctacgacagttccagccccctataccccattcgcttccccacccaaccttctttcgcccatgttgtccaaccctacgttgttgcctccactgcccctgcctccacttggcacttttgtcttggccacccaggccacgacgtcctctcttgactcttggccattccttgccctcgcggcgacaccacctcgctttgccatgcctatcggcttggngcgtcatactcgcttacccttctattcttccatatcccgagctactcaccccttcgacctcatccactgtgacctttggacatnccatgttcccatcaactncacctctcgctcctt

SEQ ID NO: 136538 - DNA, 1806 bp, Zea mays
  Clone ID: MRT4577_5599C.1
ttgggtacctcgaggccggccgggatagtcacaagaaacaccggcaacgtgggcgagaagatctgcaaccagagagtgagaccggatcggacggaaatggagagagcaacagcggaccctcacttcctgctgcttccatggcaaggagccatcagccacatcatccccatgaccgacatcggccgcctcctcgcctcccacggcgcggcggtcaccatcatcacgacgcccgccaacgcgctgctcgtgcagagccgcgtggaagacctcgccgcggcactgcaccgtccgcacgggcacggcgcggcagggacgatcacggtcaccgcgatcccgttcccagcggcggaggccggcctgcctgagggcagcgagaggctcgacctcctccggtccccagccgacgtgccacgcttcttccacgccaacagactgttcggcgaggcggtggcgcgctacttccgcggcgaggctctgccgccgcgccgccgcccgagctgcgtcgtcgccgggatgtgccactcgtgggcgctcggcctagcgcgcgagcttcgcgcgccgtgctacatcttccacgggttcggcgcgttcgccctgctctgcgtcgagtacctctacaagcacaggccgcacgaggcggtttcgtcggcagacgagctcttcagcatcccggccctgccggcgtttgactgcagggtttcgcgcgcgcagctgccgcagcatttcgcgccatccacttccatgggcggcgggacgctacaggagatacgggagttcgacgtggcagtggacggcgtcgtggtgaacagcttcgaggagctcgagcacggctcctgcgagcttctcgcggcggcgaccggcaagaccgtcgtcgccgtcggccccgtctcgctgtgccatcaacatcccatgacaatgacagacgacgacgacggcggcggcggcaggcgggtcctggagtggctggacaccaaggagaccaagtttgtggtgtacgtcagcttcggcagtgccgggtgcatgccacccgcgcaggtcgtgcagctaggcatggctctagcgtcgtgcgcctggcctgttgtctgggtgctcaagggcgccgactccatgcccgacgacgtcaaggagtggttgcgtgagagcttggacgacaagcagtgcttgctggtgcgaggctgggctccccaggtcgccatccttgctcaccgcgccgtcggcggcttcctcacgcactgcgggtggggctcgactctggaggccattgccgccggcatgcccatggccacctggccgctcttcgccgagcagtttatcaatgaaaggctcgtcgtggacctgcttggtgttggggtgtctgtaggcgtgacaaagccaacagaaaacatcctcactgccagcaagctcggagcggatgtcgaggcggaggtgggtatggaacaagtggcgaaggccttggagaggctgatggatcagggtagccaaggggaacacaggaggaggaaggctcaggagctcaaggccaaggcaactggagcattgcaggatggcggatcatcctacatgaatttggagaagctgatagtccaatcttcggtttcgagaccgaatacatgtggcgtttaattagtacagtattatatttgctgaataacgtacatagctggtgctcatccatgtcatgagtgactcacaaataatcaaattcaatttgtttgatgtattcatgtaaaaaaaaaaaaaaaaatgatcgaattcaatttgtttgatgtcttcgtgtgaacatatgcatttacatttaattagttt

SEQ ID NO: 136539 - DNA, 670 bp, Zea mays
  unsure (1)..(670): unsure at all n locations
  Clone ID: MRT4577_559C.1
ctcaggaagatcgtcccgggccgcgctcgccccttgcgcgtcgctccgtcaccattctggccagctagcccagcgccgcgccgcccttccttgctcattcctactcccctccggtgagacaccgcggcagccgacgaacgacctttttctctatgcgcgtacaggttgtagaagaaagaaaaactgaccacgttcaaatggcgagcgaatagactggaaaagagaaatgccatgggccccacgatcccattactgtacgtgcgctatgctttagaaaaaaccatctcgtcatgtgtcagcgtcccataggcctagttgtgaacgattttcagcagccatgctctttatggtccgttgcgtggctgtgtttcgggccaatgaaaatgtgccacatcatcgtaattccacatgctattagatagtcgatatattttgggtcgcagacccgtttctacacgtttcagtcgcgttagctntataataatgtcgattacgtgttagtagcattattttgccacgacacgtgttataattaattaattaattgtttatttgatagtcactaaaatggctttctaattaaaactaatttatagttttttacttgcgctttataatacatgttattgaattaatgctaactcaaatattcttaattagtactcgctta

SEQ ID NO: 136540 - DNA, 1962 bp, Zea mays
  Clone ID: MRT4577_55C.1
atgggcaagaacaataagcgcaagcgtgagccaactcctccatcggaggagtttggtgactcggagtactcagaggaggagttctcctctgagtctgaggggtctccggctcccatccccctgtgtgagtcgtctgacgactcagacgactcccaggggctcgcagcggaggtctggacgtacatccgggccgtcgagcgctctgggctcgagggctcggatgagtcggagtactcctcggatgaggaggactcggacggcggcggcgaggacgaggacgacgacgacgacgacgacggcggtggcgacagtgacggtgacgatgaactcccaatgggtgtacccaacccgctgctgatcccaatgtgggtgctccatctgttgctgatcccaatgggggaggaagaaaatgaaattcctttgactcagaaaaacagtcggcagttcatcgccagcggtgaaagtagtggagttccatctcctgctttgtctgccctcattggtctgcaagaactgtccctggccaactttgatcagactcttgaggatatggtcccagaggacttgttatcagagctagtggatgatggtgtaatggaggtttgcgctgacgtgcctgatgctgggttgaggtcatctcgtgcctcgtcgaccttagagcgtgatctcgagggtcgggagactgacttggatcgtcctggtcctatggaagtagctgagggcccgtcaaccttagaggtggctactgcagagaacttggaccccaaggatggtgctgacacatgcccagcccccgaggatgtcgccggggatgacttggctcgggtggggagtgtaagccactgcccagcccccgagggtgctgccggggatgatccggctcaagtgggcagtgcaaactatgacccagcccccgagggtgcccgagcggggtctccctcctgtacttccatggacgttcatgcgggatctcctccacactctggctatatggtggtagcccaaaccttggaccagggagtcgctttagaggacagtgtccccgctgaccgagtgttgagctctgttgatggtaccgagctggtttctgctggtttgttgcaagctgcttcgggcggtggccttacacctggttatcaattgatctctcttgatttggggatcccttcgttcttttccaacctccaggctttggtggatgggatggctagccagctgaggctacagggtgcttctgtcccagaagtagcttcgtctcttgcatgttggaatccagtgtcacttcaacgtcgcgtctctgaattggaggcaaccaacgctggaataactcggcagatttcaactcttgaggaaaagcattcccgagatcaagctgaattggtctccgctgccttggatgacgccaatgcactgagttcttctcttcatgctcaactcaattctgagaaggaagaaaaacgtatccttgctgcttctcgtgacagtcttgacagattgtatcgtgattctagtaactcgctgaccatcttggagaggagtcaccgctttactatggaagaattggacaatcaacgttgtaagctgcaggaatccacggatgaagtggcccgtctcaagcagctgatatcagcgaaggacgctaccatcaaagaactccgagcttccaagaaatccattgtccaggagttagaaactgctcgactggctgccaaggttgccgaagaaacttctgttactctcagagcccagcgcgacagagccatggacaaggctattcgggcggggcgaatcttgatgaggagacccggcgtggttgttcctgaagatataagggctgatgtgaacgctgcccctgattcctcgagtcgtccttcctcgtcgatcgctcctgagaaaaatatcaccaagtggagaaacgttttgcgtgctctgagcgtgcggttagcatggtcagacatttag

SEQ ID NO: 136541 - DNA, 532 bp, Zea mays
  Clone ID: MRT4577_56000C.1
cccgggtcgacggcggcaggtgccgccgccggcgtcatctcagatgcgggtttgggcgccggcgaagcggacgccagccctgcccaacgccgcatccggtcgatcagcgtcggttcgggcgcgtcggctgccgtcacggcaggtttttgcgcggcgtgccccgagatcagcaccctgacgatcgccacgaaacgcctgacacgcgcgaatccgggatcgaacgggctgctgacggcatacagcggcatcttcgagtcgtccaggccatccgagacgagcgaagcgcacagctgcgggtcgcccgacatgagcaaccggtacatgaagggcacgtcataggcccattcggacaggccggagatggtctgcggacgatcttcgtacgacgtcggccggttgctcaggctgtagagataagatcggttggccatgcaggctcccaagttgacgagaaggtttcctggcgcggtgatgcacccactgtggcgaacgactcgatgctgtaccccgatggccgcctcacgcgaaatcc

SEQ ID NO: 136542 - DNA, 243 bp, Zea mays
  Clone ID: MRT4577_56001C.1
tcgcttggtccgcctgcctttgctttgcaggggctgttgctgctgccgcttgctgggtgttttgtagtgcagtgcttggccattgccatggaagtatggaagcccgtcttaaagactgaaggctagaagcagtataagtcggtatggattaaaaccaagtgaacgttcgagcagccgccaatttgctgtaggttttctgcggaatgaactgaccaatgggtgaatgattgccattaacccctt

SEQ ID NO: 136543 - DNA, 422 bp, Zea mays
  Clone ID: MRT4577_56002C.1
cttaatactcttaaccaatatagcctgcgagagcttgtttgagaatacttgccgaagggcccaccgcacaaaatatccaaggacgaccacaatacacaaccttctagtgctgcacttacgccaattatagcaaaaaggaacatggggagcctgactatactgtccttccaacaatagcaaagagatacaaggcgacacatgccacgcaactaaaatgctactcacataccccattcggggacagcaatgaccatgctgagcatggggcccgcccatctgctatactaccctactataacttggggacaggagcagcaaccttaaggtgccagctctagcctcacatcggtcttccagcttattatgtaaaaacaagaagaagtcagcactcaacagagcgagccctaattctgacacccaac

SEQ ID NO: 136544 - DNA, 316 bp, Zea mays
  Clone ID: MRT4577_56003C.1
aaaaaaaaaaatagcgtgcaacacacacaccacacatcccatcaaaaccaaccattaacatataaagcacaataaaaaaacgggcacgtcgaaacaaaatatttttgcttccttatgctccttggaccttctgcaagagctgctaccgcgaccattttcccgcaatgcttacaagcacctatagcttcccttcttcccccatacctatcatcatctttgtgtccactataagaaaacccaattcttcaaccctacaagatccaacaggcaatcacaacaagcatctatacctttataacccttgttattcaacaac

SEQ ID NO: 136545 - DNA, 805 bp, Zea mays
  Clone ID: MRT4577_56007C.1
gtcgccgccatccaccggacgcggcagccatggcgccagcggtgaggctcaagcgctccgccacgcagactatcacactgccgccgcccgacgcgcggctggctgtgcgcgatgtcatgcggtccacgatcccgtcgcggcccgccgaggctccggcgtccacggagaggccggcgcccgccgcggcgctgcaggggttcctgtgcctggaggaggtggacgggaggcgctggagctatgtggtggacggcgggtccgcgaaggggaggggcagtggcggggtcgctgtccccgctggcgcctccgtcagggccgtaccgctgcagtcgccgcttccgcctgccgaggaaataatgtcattcataagatcatatgttgtgcctgaagggtttccagacagtgttactccttcatatgtaccttacatgaactggagggctctgaagcatttctttggtggtgccatgggggtgtttacgacaagaaccttgctgagttctgttggagtctctcaaagcaaggatggtgctgggcgtgttggaaaaatgctttttgcacgtcaaggaaagaagtttgacaatgacctaaagcagttgcggttttctagtgatctcttgttggaaataggagctgggatagaattaactactgctgcattccctcagtttttcttgcctatggcctgtgtagccaatgttgtaaagaacgtcgctgctgttacgtcaacttcaactcgcactcctatctataaggcctatgctagaggagaaaccattggagatgtcactgctaaagggaatctgtc

SEQ ID NO: 136546 - DNA, 204 bp, Zea mays
  Clone ID: MRT4577_56008C.1
actagttctagcagagcagccgcatcgaactctacctgcctttctctcgtccctggcggcggcggcaggatggcggttctactggagacgtgaagtgtgacccacgatttcaggctatcgccactcaagtcgcagtgactctgtggttaatggaactcagttagagtcctcttagcctatgtataataggtgactgtagcagag

SEQ ID NO: 136547 - DNA, 190 bp, Zea mays
  Clone ID: MRT4577_56009C.1
ggacgacgacgtgcgaggcggagggcggcgcgcgcacgcgctctagccggttccacgcgcgccccatcatgtttaactacctcagagtggctcaggacccgtactttgcttatcaaaggggcgctggcaaatataatggattatttattcaaaaacatggcgggtaggggatttcattcgtttcatttgg

SEQ ID NO: 136548 - DNA, 267 bp, Zea mays
  Clone ID: MRT4577_5600C.1
taggggccttttttttttttttttttgtcatacaatttaggaccgatgattatatatatatagctaaaacaacgcatctaccactacacgaatagtacgctcgccctgcacctgctatcccaatgacatacatgggctcacaaattctgaagagcctcataagtgatgtggatgatgatgtggaataattcgatgcaaccaggtgcacatggacaacttgacttgttcctcatactcagaggggatccccctgctgaagagctactg

SEQ ID NO: 136549 - DNA, 759 bp, Zea mays
  unsure (1)..(759): unsure at all n locations
  Clone ID: MRT4577_56010C.1
ccggccgggactctatattatctctctttcgcccacctgatcaggcgtcgccgccatccaccggacgcggcagccatggcgccagcggtgaggctcaagcgctcctccacccagactatcacactgccgccgcccgacgcgcggctggctgtgcgcgatgtcatgcggtccacgatcccgtcgcggcccgccgaggctccggcgtccacggagaggccggcgcccgccgcggcgctgcaggggttcctgtgcctggaggaggtggacgggaggcgctggagctatgtggtggacggcgggtccgcgaaggggaggggcagtggcggggtcgctgtccccgctggcgcctccgtcagggccgtaccgctgcagtcgccgcttccgcctgccgaggaaataatgtcattcataagatcatatgttgtgcctgaagggtttccagacagtgttactccttcatatgtaccttacatgaactggagggctctgaagcatttctttggtggtgccatgggggtgtttacgacaagaaccttgctgagttctgttggagtctctcaaagcaaggtaataccaggtgccattgctatcaactggatcctcaaggatggtgctgggcgtgttggaaaaatgctttttgcacgtcaagggaagaagtttgacaatgacctaaagcagttgcggtnttctagtgatctcttgttggaaatangagctgggatagaattaactactgctgcatttccctcagtttttctt

SEQ ID NO: 136550 - DNA, 643 bp, Zea mays
  Clone ID: MRT4577_56011C.1
accctcttgtccggccgggaacactatagaaggccggcgggaaaaatagccccagtctgtcattccctccccacgccacacgcacggctccatccttctatctgcgctcgcgccgcccgggagctcgccgtcgtcacctcgtcggggcgccctcgtccagtccggctctcccttcgtcgctccgcggctctgccggcgtctggggccccggtctccgggctttggtggcgccccccaccggcccaccccagcgggcagcggcaactgccactctgcggctctgctaggggcagggaggagcagtggcgactctgctagggacagggaggagcagtggcgggcagcgtccttccttttgtttggcccggggcttcggaattacctggatccgccactgcatctaagtcctcctccgcacactctccaccgatcctcgacgcgcgcgtgagcaacaccaccgtggtatcggcgaccacgagcggcgccttttggattcgcccgtgacttgctcccaccgtgtttgccactcgccaggatgacgctgttgttggcccaacagcaactttccttctccttcgcctttccacctctccgcgccctccaccttggcagcccccttaaagcctatccgtcctccaaatgc

SEQ ID NO: 136551 - DNA, 310 bp, Zea mays
  Clone ID: MRT4577_56012C.1
cagagctgcaggaagttcttaaaaggaaaaacatggtgatctctaaattgaagaaagacatgtctgctctgaagcatatggttgttgaattatcaagggctaaaagagtctcttctgccataagtccaatctgcactgatctgccagtgatgtcaaacaatgttctgtatgatatgagcagttctagctcatcagatccagaatccccagttgcactacgagaataccttgatgagcatcttgttgatagcactccaggagatggtgattctagacggagttgtgaagtatctgtagcaaaagcatctct

SEQ ID NO: 136552 - DNA, 311 bp, Zea mays
  Clone ID: MRT4577_56013C.1
ctcgagaacctcgccgaccacatcgccgaccccgtcaacaacaacgcctgggcttacgcgaccaacttcgtccccggcaagtgaacgaaggcatgatgcttgcatgcgtgtacccgagacgtacgtattcctacgtacttgaagttgcaccagtatttgggaaaggagctttgggagccagaaattggaccggtaggggatttggatgcatgctggggaacttaacaattaaatatgctggaaatataatatggcttcaattattcctaccgatgatcaaggtgggagccaaaaaaaaaaaaaagggccgg

SEQ ID NO: 136553 - DNA, 481 bp, Zea mays
  Clone ID: MRT4577_56014C.1
gggataaaaacgtcgcgtactatcaactaaccactaaggatgaagaccaataccgtattcgtataccagttttgtggacttttttgtttgactatgcataaataggatataggatcggttatgcaaattcatattcttatttttaacattaagtttgtaaatattgataagagttaataatagatatataatttagatacgaatacggatatttgttcaatcttttgttctaataagcaaataatgcataaaaaatctataccatattttattcttacttataaaaatgtgtctggtaacaaaaaaaaacgttagcatggaatttttatacatatctgctttattccgatacccattttgatctctactaaccacctattagggtattactgctaatgaatggaaaaaacctctgcattccaattctggggaagatctaatccggaaattggagagcaaatgcctatttatctctaactta

SEQ ID NO: 136554 - DNA, 233 bp, Zea mays
  Clone ID: MRT4577_56015C.1
agccgcggtcctcccgactagccgcgactgcctcccctccagcggccaggtaggggctccacctcatcgtcgccctcccatttatccacctcctactcctccccgatctggagattcggcgatgcgcttggatttcgggccattggtgctacctgtttcgatctggaagcgtgcgagatgcggtgtgtagctaccacacagatccgtgagctctcgagcgtttgattgcgtcc

SEQ ID NO: 136555 - DNA, 296 bp, Zea mays
  Clone ID: MRT4577_56016C.1
gagctctcttgtcggcggccgccctcacggccggtacaggtggcacagtactgggtacgactggaagaagatgacccacgacggaaggcacagacttcacgagatgaagaaggctgatgtccgtcatgatgatctgccggagttgcagcggcagctggttgaccctgaaccagaccaggagcagagggtctttgcactgggcaggggccaataacgggacgattcccagacgtggggcgcgcagccaccagatgatggggctcctgctcctagttcgcgacggggagctcatcaag

SEQ ID NO: 136556 - DNA, 384 bp, Zea mays
  unsure (1)..(384): unsure at all n locations
  Clone ID: MRT4577_56017C.1
ccacgcgtccggtcacggtcaccaactcgacaaaaccgttgatngttttagaacaagggcacgaacaaggggaagtccgggctgccggacgacgtaccggcccctccgccggcggagggcgctacagatacagaggcatggcccccgcagcccggaaccataaccctaaccgctgccaccgatgctgcagcagnaggttcaaaaacagaatacaattttatctgttatgcctcgacgtgcccatgcggcggcnaaaccgaaagctcgcgtgggaccgcgtactcgcactccttttgtgacttgtcctcgtcagaatccacagcttcgtcgtacgacgcccgcgaagaacgatgggacctcacctggctgctcgacccattagcc

SEQ ID NO: 136557 - DNA, 466 bp, Zea mays
  Clone ID: MRT4577_56018C.1
tttcttatttctgggaagccacaaacatcagacaaaaactttttttttggacctttacctcttaaaaattttaaaggagggccccccccatggttgggtggtgggtgaacaccggttgggttggcaaaaccaggtgggtggatgggcaccattggtggcagtggtaaaaggggcccaccgttaggcccaccggcctgttgaaccggcaccacctggggttggttaaaaaaggtaccaggcttacccccacttacttggtgaatgggtataagtggtggttgtggtaattaaccagaaaagttaattgttgcaagttggttaattggaaaaattggttggggttagccacaagatacttgcttaattggaattggtggtggtgccaattaaaaaccaaagttaattgcacttagttgtttaattggaaaaacctgttgtgcttaaaagtagccaccagggttggtta

SEQ ID NO: 136558 - DNA, 383 bp, Zea mays
  Clone ID: MRT4577_56019C.1
gctatcacaggagacacctcgatgcctgcccccatacaaagcaataccgatcaaactgttcagggcccttttcttggttggaactcgcaagatggcatgcgcgcccaaggacggaaaaaaagccagcagtcaataagcccctacaagatgagcccgcgaccgatatggatgataaggatcaactggggaacaagcctaatgcggataaacgtctcccataggaccagtccacatgccacgcacagggcatgatgggcacgagaacatccaataagaccgtaacgacctacactatctacatcctcaaggtgctcaacctggtgcaccccatcatcggcatgtcggtcaaggccatgtacatcatgatattcacatcataaacg

SEQ ID NO: 136559 - DNA, 353 bp, Zea mays
  Clone ID: MRT4577_5601C.1
gcattctgtataacggacgccctccaattttccatgattctatagcagaatttattaatggagatgaagaaactcacgggacctacagttcaactcatatattccaaatctaacacaaaacaacatatcattgaaacatataatcactatagtcagcgcgattggtaacgagcactcaaaatcatttctaaatcatccaaagaacatactcttaaatatcatcaactaaaaccaaaatagctgcactcatattaaactaagtaacattaacaaaaacattgctcctctttatccccacatcttgtaaattatccaccttttaccaccatatcataatacctaataagcccccc

SEQ ID NO: 136560 - DNA, 335 bp, Zea mays
  Clone ID: MRT4577_56020C.1
gggggggaaaaccatacttttttggttgaaaatccaatttttttgggaaaaaaacattacatttccaaatttttactttttttccggggggaagggggcaaaattaaaacaaatttttttaaaaaaagcgggccccctgggggactaaatgggggggaggggttccaattaactaatcaagcccaacaccccaggggggttggaagggttaatgggcactcctgttccttggggcctccgggcccccccggaataaactggcccccctttttggcccccgggcccccggggaggcccttccaccaagcccttaattgggggaggccttggacaaa

SEQ ID NO: 136561 - DNA, 523 bp, Zea mays
  unsure (1)..(523): unsure at all n locations
  Clone ID: MRT4577_56021C.1
ggaacacacagttacattcacacaaacccaaaccaaaccgttttaatttttaccgtttagagagctgctgccttcgcttcagcactgagcactctccttcgtcgactatccattactcgtcgatcgtttagggaggggtagttaagttaagtgataggtacgataccattagaagctaggctagaggctagtactggtctccgactcgactagttaccggttacgggagatcggtttaaagttccctgtatagaactcccaatagggcttgagttcacaacagttgctgttaaaggaccatgtacatgttgatgagaggagaactgaactcagaactctaggaaggttgaacgaatttagcagtacggatgatagtacaaggtcaggataatgattattatcgttctgaactaggtcaactagatggacgtctataagattgtctttatcaacatgactatgaacaacaaggtaatnaaggtagtcatcgttaagaactataatcacaaggttgttatctagg

SEQ ID NO: 136562 - DNA, 420 bp, Zea mays
  Clone ID: MRT4577_56022C.1
aggtatcagaagcagcacaatagcgaggctgtgcatgactagctcttttactggaggatcagtaccagcttgatttgctgagcttgcacactacagacggatctttacctttggataatgaaatcttctgggggaccataaatataatatatagatattgatggtgacaccctggatgagttgatgctttcctgttacgcatatgaaagggttacgcccacttcttacattttctacaaattttgatgagcaagctcattggaagcttgttaaagagatgataactcagatatgcgctagttctaaagatcaccggtgagcaaaaacttttcatgaccatgtgtttgtcttatcatttgacgatggaaatgttttgttttcaaactatcagattttggttccccataatgagattgataa

SEQ ID NO: 136563 - DNA, 354 bp, Zea mays
  Clone ID: MRT4577_56023C.1
ccggccgggactctccccggcgtcggcgcggtcagttgaaccatgggcggactccaaggccacctcggcggtcaccctccgcacccgcaagttcatgaccaaccgcctcctggcccgcaagcaattcgtgcttgaggtgatccaccccggccgcgccaacgtctccaaggcggagttgaaggacaggcttgccaatccgtaccagccgaaagaatccaactacctcattcgccacttattcctccccaacaaccacccaactctcaaacacaatatatcttcatactcataaaaccacactacatttaacccaaacaaacacaagcatttttttttttcccccccccccccccc

SEQ ID NO: 136564 - DNA, 222 bp, Zea mays
  Clone ID: MRT4577_56024C.1
aatcacctaaaaaaacccatttgcgtgctgttatctttttatatttcacacaataaccaccacctataaatatcaccacccacactctacttgctcaaattagcacaaaactaccgtccaactactattcaacgaagctagaatctacagacttcattctccattgccttctcaataaccactttgacacaaaacatctacaaatcatactcaccacccaac

SEQ ID NO: 136565 - DNA, 196 bp, Zea mays
  Clone ID: MRT4577_56025C.1
cccacgcgtccgaaaagtaacaagagtagttcaaggctgaatgcacggaggacgaggccgggaaccggacgaccgcagtcactgtcccaaccgcattcaaacttgcaacaggtatgccaatctacaggttccatgcttccgaccccgatcatggaagagactgcctactttttattgatacctaaaatgaactcac

SEQ ID NO: 136566 - DNA, 770 bp, Zea mays
  unsure (1)..(770): unsure at all n locations
  Clone ID: MRT4577_56026C.1
aatccgcttcgcatctccgctacccccagccaactcgctcggtggctccgttctccgcgccttcgttctccctcgggtttcctgctgtttcgcctcggtcctgcttgctggctgcagatctgcgttcggcggctccttctccctgctatcgcatgccagccaggcgcccacgggcacggccagcccccaccccacaggcgtggcactgcccctgtccggctgttccttgcttttgcttgcctgtgcctgctcctgttgggcttcggcacctgcacataggagacagaggtatacagagccacacagccaaggatttctaattcgtgacttgttggagtttctgaatggccagcccgggggatgtggagggcatcaccgcctccatgggggagctgagcgtagaagcagcgccttcgtcagctaatggtggtggtgatgttgccgctgtcgaccaggatgatgtgtgggaagatgtttcagattctcaagggcacgcgtctaccttagacagagaatggatccacaggcagaaccagtttcaaaagatgggctatcgggacggtataacacaagggcagaaggactctgcccaggaaggcttcaatgctgggttcaggcaatctgtaaacgctggctacaagtggggccttgttcgcggngttgccagtgcgctagccagtcttccagacagcttgaaagagaactggtgccggacgtccagtgcagagggaaactacaggatctgcacagctccgtgcgaaaatatcagc

SEQ ID NO: 136567 - DNA, 402 bp, Zea mays
  Clone ID: MRT4577_56027C.1
cccggggctcagcggggatctccgcacactcagaaaggagcgcgcgtaactccgcttcgggctctgactgcttctcatgtgcacctcaccgatcctgtcaatggcctccctgttgttcttaatgtgcctcacaccgatctcgtaagcctcctgcgacatctgggtcgcaggcgactcattgtctctccgccagcttctctgacatggacttccttgccatcattctcatgctgacgtgccctatctgcgctccaccctccctctgagacgatggacccctttcagacgtaccggatggcgctgccatctgcttggcttggcctgtgatttgctgctactcaccacgagcttcaggggtcacctcaagctctccaactatgacctcctctacatctgtaccac

SEQ ID NO: 136568 - DNA, 914 bp, Zea mays
  unsure (1)..(914): unsure at all n locations
  Clone ID: MRT4577_56028C.1
cattgggtacctcgaggccggccgcggccgggaaaaccgtttcgcatctccgctacccccagccaagtcgctcccggtggctccgttctccgcgccttcgttccccctcggttttcctgctgtttcgcctcggtcctgcttgctggtgctgcagatctgcgttcgccggccccttctccctgctatcgcatgccagccaggcgcccacgggcacggccagcccccaccccacaggcgtggcactgcccctgtccggctgttccttgcttttgcttgcctgtgcctgctcctgttgggcttcggcacctgcacagaggagacagaggtatacagagccacgcagccaaggatttcgaattcgtgacttgttggagtttctgaatggccagcccaggggatgcggagggcatcaccatctccatgggggagctgagcgtagaagcagcgacttcgtcagctaacggcggtggtgatgttgccgctgtcgaccaggatgatgtgtgggaagatgtttcagattctcatgggcacgcgtctaccttagacagagaatggatccacaggcagaaccagtttcaaaagatgggctatcgggacggaataacacaagggcagaaggactctgcccaggaaggcttcaatgctgggttcaggcaatctgtaaacgctggctacaagtggggccttgttcgcggggttgccaggtgtatatccttccgggaactgatctcttagattgccattctcctctagtcttgccccgattttgatttcctttcctatctattccaaagtatgcgctagccagtcttccagacagcttgaaagagaactggtgccgacgtccagtgcagagggaaactacaggatctgcacagctccgtgcganaaatatcagcagatgacgctcttca

SEQ ID NO: 136569 - DNA, 501 bp, Zea mays
  Clone ID: MRT4577_56029C.1
cggtccgaattcccggcggggtcgtgcggttctacggggttcgggttcgtgggtgagcggatcgataggcggagtcagatgttgagtaccgctgctttgtcggaggccttgcctgggccacggacgaccactgcctgcacaacgccttgagcacctactgggagggcctatagtccaaaatcatcctacatcgggagacgcataggtcccgcgggttcggatttgtcaccttctccacggaggaggcgtatgcgagaaacgtccatctgagggcatcgaacggacaaggcagtctggaacggaacgcaacattaccgcgcaacgaggcccattccctctgcggccgtggaggcggcggctgccggtaccgtggtggccatggaggcggctgctactgcggtggtaggcgccgcgatggctgtggcggctacagcagaggcaggggctacggcagccgtggcctatacggaggtgggggtggcggctacagcggtggcaacc

SEQ ID NO: 136570 - DNA, 309 bp, Zea mays
  Clone ID: MRT4577_5602C.1
tttttgggttctttttagtgggtgcggttcctagcccatataaagcgcccctactccatgccagatcatactggttgatgaggatttactaatatacgggaataaggggggctttagaaacacatcgcctgggttcggcttcattaggccatggagccggcgggaacactcttaaaactcattggtgaccttaatctttgtgggaacactcgtgaaactgcagcaaggtttgcacttgtcgaaacaggggtttacattatagtcactaaccttgccggccaagctatggtataacctgaatcatctggt

SEQ ID NO: 136571 - DNA, 214 bp, Zea mays
  unsure (1)..(214): unsure at all n locations
  Clone ID: MRT4577_56030C.1
ggagcacagaaagcacaagagtggacctacaaacgcagacaaaagagagagccnccagacgctccaaggacanccagcaacngctgatacggcgaccatgatcccgcaaagcgcgcaagcaccaatagcgaccctgcagcccccgaacctcacaccagcgagggctacagcaagcgaaaacccaatacgacaaccctacaggaaccaacaggca

SEQ ID NO: 136572 - DNA, 318 bp, Zea mays
  Clone ID: MRT4577_56031C.1
cccagcgtccgcccagcgtccgccaaggggtccgcccacgcgtccgccaacgcgtcggcccaggcgtccgccaaggcgtccgaaaaaaaaaaaaaaaaaaaaaaaaaaaaaaaaaaaaaaaaaaaaaaaaaaaaaaaaaaaaaaaaaagggaggacgataataaaggaggcaggcttttttaggggggcatgcgttgcgttagctggttttgatagggtcacctattttcaattgggtggcctgaagttatacaactgggcgactggttaaaaccgtggggtttgggaaataaattggcgttgcaccaaattactcct

SEQ ID NO: 136573 - DNA, 1014 bp, Zea mays
  Clone ID: MRT4577_56032C.1
atcaaggatggtaatcaatagttcaaggaagttatgcaacaaaggtttaatcattcaactcctaccacctaatgcatcatataaatgataaaagtttaaaaacagcaaggaggtggcaaatgcaccggggcttgcctgggatacactaggttagtgtggttagatgaagtccgcttggcgagcatcaacaatcctgacacttgatcaagtcgtccatatcgagatgggtccatcaaagccaccttgtgatccatcctgatccatgccctccaattcgcataatcatctagcgtacctggcgggatcggatgagtcgcgcatgtcgttcacgagtgaggctttcgttgagcaagcgatgcgcaaggcaggacatcgacggagggcaaggtcgaccacaaggctagggattgcagatcgaggacgtgttgttgcggaccaacacggttgcggggatttcgacgacggcgcgcaggcgttgcagatcgggtagagctcgctgcggcattccatcgagcgggtcaatggcgcgacgcagaagagggagtcgttgtcggggctgcgcaggcacggcgagctgtgatggaggtgattgcttgggcgagctcgccatgggaataaaactaggtgccatggaaggggctggagacgaccaccggcaaagaagaggttggggaggattagcgccaaggcgcagttgacggcggtgctcagtttagggagggcgtcggccaccaggaagcagaaaatgccgccatggaaagctggggcagtggcggccagacgccaaggctgagggcaggggcgagcagaagactgggagcagcaccatggctagagaaggatggggagggctgggcgagctgagcgacgacgctcgatctgggcgagcgcgtctagggatgaggcaacgtgagggagctggcttcctatgcgcaggggataagcaaggactccacatatggttgatacgatgggaggaagccaacacctgtgcttgggcgagcagagacaagc

SEQ ID NO: 136574 - DNA, 182 bp, Zea mays
  Clone ID: MRT4577_56033C.1
cctctctgtatgagctcgtcttctttagaacagatgcgcacgggggtcaagagattggtaatgcgatgttagatgagtttctcacgtggctgaaacgatttagagagtttgcgctagttaggctagcctattataccttatctggcctcaataacttttttatatggaaaaaaataccaaaa

SEQ ID NO: 136575 - DNA, 314 bp, Zea mays
  Clone ID: MRT4577_56034C.1
aaaccgggccgcccaccgccgacctgcacatagaagacattttttaccacatggacacaaacaggggggtgatttgctctgggttctccgcaattgttgctaccgacgctttagccacaatgctaccacatgctataatttcctcattcccatacctctaaccaaccgcgataaatgtttaatacgcaatgaacaaacagttcggatccatctaggctacaacacgacatttacgatagctccagaagttaccacctaccctaaacaatcgaagatttaccaagtagcagcattgaactctgatgatgatttac

SEQ ID NO: 136576 - DNA, 829 bp, Zea mays
  unsure (1)..(829): unsure at all n locations
  Clone ID: MRT4577_56035C.1
gcatgctattctctctgacttcttgaccaagtcatcccaattcctctctagaaccctagaatcgccattgctaccgcgagatccctgccggggcctcacagggccggagggtggagctttagatctcgactgcaacggcgctgctcctccctcccgtgggccggggtgcagtaagccacctcgccgggggacgatgcagagcgcgacgcggctgactctgctgctgtgcgcggcgtgggtggcggcgctgctctacggcgagatgggcgcctactgggccgcccacctctcctgctcctggccatccgcatcctcttcctccccatcgccgagtaaccatgtcaaggttgccgtcattgctgatccacagcttatggacagaacctcccttggtctaccaccagggtcagttgcgctgcaagctgcagagttcttcacagatttgaacatgagaagatccttccagtctgtggtactgccattcaagcctgatgtcgtcttatttctcggtgactattttgatgggggcacacatctttcggatgaagagtggcaggattctctattccgatttaagcatatattcagcatgagcgaacagagaacaagtccccatgtcccaatctactatctgtcaggaaatcatgatatcggttactcagcatttcactcagttcatcctgaggttatcagtcgatacgaaaaagaatttggaccaagaaacttccattttttgtctgggaaggtggactttgttgntgttgatgctcaaactcttgatggaggagccaaacagagcaaagaaagatcctcttcttggggagtcatc

SEQ ID NO: 136577 - DNA, 357 bp, Zea mays
  Clone ID: MRT4577_56036C.1
cggggccaacgggcgaacgagggggaagagaaaaggaaaaacccccaaccaaccgggcccaccctggcccaaagcttaacgggggccacatgcccccttaagaaccttttgtgaaagtacaattacaaaccaaggctctcgggcccttttttggcccaaggttaaggggccaaacatgcttaaaccaggggccttgggccccaaagcgtcaccaaactctgggatcggagcaaaatctgacgcacgtgtacccggggaaaaaactgtttacgccttcagccgaggggcgtaccggataaccccccaagggagggggcgggccccactcgtaggaaacccccctaaaggtgaggcccc

SEQ ID NO: 136578 - DNA, 431 bp, Zea mays
  Clone ID: MRT4577_56037C.1
gggatgctgtgtgctgacctatcataatgctccgttgcctctcctttttatcctttgtttctctttctctctccccttcaattttcctctctttcttcttcaaaggattttcgaacaattttcttcatgttctgggataattatctcctgtttctccacaaaagatttgctcacttactaacgaaaggtttataaatttctcaacagacaaatgagtaacaaaaagaagaaatgacaggaacaaacaaatgcatggtctccatagattgcggcagcttctccaaccaaagagacgatctcctcaacttcccaaagaaggatgactgacacgaattctccgccgctgattccggcatgaacgctgccgttttgtccactattagaactgatcagtccgagttattcccgggttctgactcaggtttttccaa

SEQ ID NO: 136579 - DNA, 165 bp, Zea mays
  Clone ID: MRT4577_56038C.1
ccaggctctccgacaaggccgtggagtgtagactttttttcgcgccagacgtcgaggaggtatgctggttggtacggggtcaacggctgctacggcgaccgttttttcagattggtcaccagcgtctatagcgtgccgctttgcgcgccgctggagctcaagcgt

SEQ ID NO: 136580 - DNA, 443 bp, Zea mays
  Clone ID: MRT4577_56039C.1
gcctggtgtgggtcggcgcgaaaggcggcaccgcgcaccggaacacgccgctgcccgtgtcgatggtcgcgcagacctgcgcgttccgcccgacggtgctcgacgcgctgcgcggctgcgatcgcgcgtggcgcaccgtgttcgaaaacggcagcatcgacgcgaccgccgcgaccgtacgctccgatctcgccgagaccgtgtggctcgcgtacaccgtgccggccgacctcgacatgctgccagccggcagcgggctgcccgcactgccgaacttcgcgatcaatcttcatctgccgcgcggccagcgcacgccgggcgtggcggtactggaccgccacctgcgcatcggttatgcgcgcttgcaccaggacgttcttgaggagcccagcattcgtacctgagcctgcgaggccatggctgttctatcaggatgcgtaaat

SEQ ID NO: 136581 - DNA, 1383 bp, Zea mays
  Clone ID: MRT4577_5603C.1
ctgagcactcggcgctgtcgaatgcgggcgccgcagccccgggccccggcgcggcctcgcctctctcgctcggccacatcgtctttggcgttgcggggtcggcgcatctctggccacgccgccgcgagtacgtccacttgtggtgaaccctccagcctccactatgcgcggcaacgtcgggctcgacgcgggcgcgcccggcgcgccggggcctagcaccccctgggtgggctccctcccgccgatccgggtgtccgcggacacctcgcggttcaggtacaccaaccccacgggccacccgtcggggctccggatcgcacgcatcgccgctgaggtcgtgcggctcgtcggcggaggggcgggggcgcggtgggttgcgcttgtcgacgacgacaccgtcctgcgcgcggacaacctggtcgccgtgctcagcaagtacgactagagggaaatggtgtacgtcggggcgctgtccgagagccactccgctaacacatacttcagccatagcatggctttcggaggtggcggcatcgcgctcagcttcccactcgccgctgcactcgcacagacgctcgacgtgtgcatcaagaggtaccccaagttgtatggaagcgacgatcgcctccatgcttgcattacagagctcggtgtgcccctatcccgcgaatacggattccaccagtgggatatcagaggcaatgctcatgggttattggcatctcatccaattgctcctttcatcagtattcaccatgtggagcttgtggaccccatataccctggattgaactcccttggaaagtctggagctgtttacaaaggctatgaaaatggaacccatgagcttcctgcagcgttcaatttgttacgatcaaagccaaaagcttacgtttgctatctcgttgggttatgttgttgaagtatatcccaatgttcttcttccgcgtgatttggagcgatcacaacgtacttacgttgcttataataggatgagtcagagaaatgaatttgattttgacactagagatgtccagaagtctttgtgcaagaagccgatcttatttttcttgaaggatgtctggaaggatggaaacataactacgggatcttacacacattctagtgctagggatgacctcaaaagaaaggtgttttgcttccggtcaccccctttatctgacatagatgagatccaagtttcttcgtctccattaagtaagcgctggcatctggcaccaagaaggttgtgtactgcacttaaaggatctattgatggtactctgtttatggttgttcggcaatgtggactcgggacttttggtttagcttctgataccttatgactgattggaaacaaagatgtatatcctctgtccaaaa

SEQ ID NO: 136582 - DNA, 2345 bp, Zea mays
  Clone ID: MRT4577_56040C.1
tttttttttttttttttttttttttggagaataaggggcgtctcaacgcctcccaaattagatcctgcactacacaatcatacactccagcagagccaagcgctcgcatgggttctcgcgttctcggccttcagatcgaagtagtatacaatgcatatacaagattttcgcttaatagacggtcatagcaagaagctatatcaaaacttgctgacaatcttcgtgagatacaaattttcgaatgatggcaaacaaaaaatagtttaatgactcttatccagcagatcgcatcttcctttcacatgctgccgatcaaaattgccttcaaccaggcaagtcttcaaaataatttacaagtcggatgtgctgctgctccccacatcacttcaggagtttctgcagcctcctttccgctgcaagagctgttttattctgtggctccaatgccaaagcatgcctgaaatcttgaagtgcttctttgtaattcaaagttacttcccttgcaaaaccacgccgtagatatgctttaacattctttctatccaacagtaaggcccggtcacaatctgcttcggcctgcttaaaacggcccagttccagataagctgctgctctgttgcagtaatatgttgcatttgtgtcactcaaactgatggcctctgagtaaaactcaattgccttgatccactgtcttcttttgaaagcgctatttcccttttcttttagaagctctgatgcattgacatcaacatcaacattggttactggtgcagtttccaacttggatgccaaaactacttggtcctggatgagagaatatgtatccaagatattacggagtagaaacttgtctgatccatgtgctgctacaaatgaaagagatacatgatgatccagattttccatgggaatagtgacctcacaacagccagaaagtgcagcaacgcctacaaatttgtacattctatcctcaaatccagatgatagtctttctttagagtttctcttcagaggatatccagctgtggttggtagaactaaaattccagtatcctttagaagattcttgagtgcagcccgcaattcatttcttattgcgtacaaagatttgatgttttcccgtgcaaaattcacggcttgtagcacacgagtagagatatcaaggccaagcttaggtttaacagtgttaacccactcctcgtggtttgctttaaactcatatctctgtaataacaacatcactgtggagattgctttcagggctgatgttccttcttctaactttgtagctggttcgcaaaactccttcaggctaggtacattggaataaatatattggccaatattgatgtgtttaggtggctgatatccacgtaatgcctggacagcattttttatggcatgcacagttttctgattagagacctttagcagctgaaagcagtcatcggcaaaaacaaattgccttgtttgcttaagtccacctacagcggctggtaaaagaacttcaccaacacgatgaagaatacatggatctcgtgcaaaccatccgattgtgtcgagactttgtgaatttgctatggtcccaagagtagatataacaccataggaaggcctaaaacaaagtaaaccacagaaagaagctgggattcttcggacgcgtggggtatcagtgccaattgcaaagtcaataagttgtgcagcaactgccacagcagagccactgcatgatccaccagggacgagtgaagaagaaacagggttggctggtgttccatggtgcaaattttctccagtgacaccaaagcctagttcatccatgattgtccttccaacgcaggtggccccctgtttccgcagcattgtgacagccacagcagtgtgcctcgccgtctcatgagttttcttccagtctgggttcccaaacccggctacatagccctcgatctcgaagttgtcactagcggcgaaggtcagacccgagagaatgtggcgagccgcgggaggcggcggctgcgccggagggtgaagctcaaagcggtcgcagaaggatccagcgtcgggtgccgtgccggacatgccccgcagccaccggcggcggcggcgcgcgacctccgcgaggacgaggacgcccgcgacggcgatgctcgcgacaatccagacgcggggattggaagcaaccgtcccgccgcctccggcgccgcccgattgcgacgaggaggccatgggggagcgcggaggcgtacggaagctagggtttaaggagggggttttggaggagagcctcgggagtcaggatcaggactcagacagaactgcagttccgcttcaactttcccggccgg

SEQ ID NO: 136583 - DNA, 479 bp, Zea mays
  Clone ID: MRT4577_56041C.1
cccgccctggctcgacggctcgctcccaggtgacttcggtttcgacccgctggggctgggcaaggacccggcttcgtggatctgatggcggcttcgtggatctcaccgcgcagctgagaggtgagccacccaccacgcagccgagaggaaccaaaggtgagccacccaccgcgcagccgagaggaaccaaaccaaactcaaagggctacgatttcgtggatctgatggcggcttcttggatctgaccgcgcagccgagatgagcgacccgacgaaccagaccaaatcagtgctcgtggatctgatggcgcgtctgccgcgtcgcgctgctcctattctccggtgaacacggcggactccctgcatcgaacgggcctcacctccgctgtcacgccaggcacgttcatgatgccgttcggttcttgactactgtcgattgacaccggtgttggcctggtgtcgtccccgtgcgcagtcatc

SEQ ID NO: 136584 - DNA, 328 bp, Zea mays
  Clone ID: MRT4577_56042C.1
ggttagaggaaaaatatcaaacttgataaggattaaagccatcccggtgtataagagttttgggtacaacacaaaggacacaacaggtcccttaaaccaacgaagccacatccacgattcttgacacacaaaccacgggtttttattttgcgactacatccatttagaggtgcaccagagggcaccagaggacgcagatacccatttacatcagcatatttaatgaaccatgggttacttaccaccggggaggcggatcaccatgtggagagtgctctccttttggatgttgtagccctggtgggagcggccattctccatgttttgg

SEQ ID NO: 136585 - DNA, 241 bp, Zea mays
  Clone ID: MRT4577_56043C.1
ataaaacgggctggaggggctctatctgccagatttattatttcatagctcacaaaaaaatgtcctcagccctttaggggtccaattgacaagataattttggggggtaaaaggcccaatcttttaatcccaggtttttaaaaaaaggcttgcttcaccagtacaacattcatgcgggctggaacaaaagttgcatattttcttgaactgactcctccgaggggaagagcgcaaacccccc

SEQ ID NO: 136586 - DNA, 244 bp, Zea mays
  Clone ID: MRT4577_56044C.1
atgtaataactgtattttaagcgctcacgggagaccactatgtataggtagttacaatagaaaaatgtggtgacagcagatgcacttattcattactgaaaaaaacaaatggtagatttgtgtcgaaaacgaggactagaaagaaggcaagaaaagatacatgaaggttcagttgaatgccatatggggccgcgattgactagaaactgggtcaatgaacttgtagcagcaaacgtaatggttt

SEQ ID NO: 136587 - DNA, 209 bp, Zea mays
  Clone ID: MRT4577_56045C.1
ttcacgcgtaccaccatagatcagagttctgggctacgttggctttctttataattgcactgctaattaattgctctctgctgctatattatgaacggaacagttcaaaccggctacctagtcgatgcctgagttagctatcgatccacatatcggtgtgtgacctaattaacattcgctatcgtgcgccattatcacgtctgtgtgat

SEQ ID NO: 136588 - DNA, 555 bp, Zea mays
  Clone ID: MRT4577_56046C.1
gccggccgggtctgcgatctatcatcatgcaatccaaaacaattaagctttatctactcaaaaaggatcaacaaaccgaacaacatcatgatggacatcgcttctcgtcctgcgtctgcttcttctagctgccagcgcctcttccatgcatatgacctgcccctgcgcgtggctgcaagcgtcgtacggtgatgtacccgcgctgacgactatgatacctcccggtcacctgtacccctacgcgcatcacctgacgcagccgcacctgacgccgctggtgcacctgccctactacgcccatggtgcgcagacgagcgatatgtaccagccactccggcaataccgttgtcaacagcacatgactatgatgcatgcgcagtcccacccatagcagctgcaaatgatgattcaaattgagcgtgacgttgacgccagcagcagcctgtacgagccagctctgatgcagcagcagcatcaagtgcctgaagctcagggtctcaaccacatggacatcataatgctccacaacatgccaggcatggctggactctacca

SEQ ID NO: 136589 - DNA, 213 bp, Zea mays
  unsure (1)..(213): unsure at all n locations
  Clone ID: MRT4577_56047C.1
gtcgtgtcgacctccgttgccgattgatctcaacgcgctgacgtttgatgatgctgccgcggattacgaactaccccgcacgcggctttggctctgatgatgattatcgtgcgatgatgattttgatttctcatgtttctactggantttatgtaatagctatgcagaagacttatatatttagaatgatgatcagatgtaagattatggtaa

SEQ ID NO: 136590 - DNA, 575 bp, Zea mays
  unsure (1)..(575): unsure at all n locations
  Clone ID: MRT4577_56048C.1
agcggccgtgcaatgccggatgcagcgaagcgattgccgtctgttggaagatcgtgcttcagcagcaggaatggcaggggaaaggattcgattcttccaatgtgaggttcttcttcgtctgactagggatacatgacatggatacttctttttttgtgcgcgtgtgattccggtgaagatcaaggtgccagtaccaaagtctgcagatctcatgcatcctgtttccatcagttcctatgaattgaattgtggtaacactgtggctgcagacagaaacccatcgtctgcaactacaacgtttggtgactggtgagatctcctacactgcacctgcttggtgtttctactggataaaattgtatagggcttggaacacttctttttacctntttcttccgtctcaacaagattggattcaagttcagagaattctccctgcattagtgagttaagtctcttagaccataggttttttttctgggtgagaagtcagtcagtcagtcttcgnactggcttcttctaatagttgtcaacttaggagttagaacaatcatttgctgatgtgtgtgttgaac

SEQ ID NO: 136591 - DNA, 396 bp, Zea mays
  unsure (1)..(396): unsure at all n locations
  Clone ID: MRT4577_56049C.1
tttctcattgactagcatactacaccgttgcactaacataaagggggagtgccacaaaacaaanaatttttctttcaatacctttattctacttatgcttatcatatgccttaaaaaatcattgcctagcaaataatgttcttgtactttctttctgaattcaaatcatttatattctgtcattgttatcatataaaaccttatccattctctttgatttactttttgtttatgacattttcttgttgttcttcactccaattatggtcagtgttgctaaatcttttcattctcctataaaacttctttttcctactgcttatgatacactaccattctccatgcttttcctttcttacattttaaaaccttacattnttttttcactttcctttc

SEQ ID NO: 136592 - DNA, 1689 bp, Zea mays
  Clone ID: MRT4577_5604C.1
gattcaaagtaattacactgaacagagaggcatgtacaaatatgaaatgtgttaatcaagtgaatgaatactagacattacaatgatcatgtacagtggattaaccacgttgtgtgtggttagaggtaattggtgggaggaaatggaaagattcgagacaagggtttaatgggtttgaaaatattgacgtgatgagaagtttagacagagataggtggtgattgggcattaagtggaagatgtgtgcgcatcatgacttacggcaccactccaaatcccactcaccaaacagaaggatatgaattccttgtccagctctcaatatttaattcaatccacaagccaaacaagagaactgggagtacaaatctccgagggctggtttggtgaatcccctccaattcccttgaaaccaaaccagccccaagtgacagtgaattcccctaacagttccacctagcattttcatgcccctttccatctgttgccaggtcacaaatgaagacaactagcatcggttatgtcgatcggctccatgaatgtgtgaatccccataactccacattctttagttcaaactctggactatatgccaaacatgagtttccaaatgtctcacatgatccactgcttccatgtaacagatcttcatcaacacacaatgcgaagcttccaccacctccaaatgctaaagcattattcaagcacaaatagtagaatctgtttgcaccagttggtctgaaaagtctaggttcaccatgtattgttgtgaacacaaacgtctggtttgttccctgatatttccttttctctgtgggccgcagaggactgttcaataagccaccaaacacagccccttgcatatctccaacaatcaataggcatggaccctgaatattctcacttctacgaagaagtgttctcagagatatcccatgcttccaggtgctatatagcaatacccagtggcaccccttcaaagtcccagggagagaagattgaaagaatgcaaatagttttggagacacaaacatagacttttcagttagataacgaagagtgcccacacaatctgaagtcgatgtttcctcattgccatttgagttatttatgggcctatatgactgaaggactgggtcgttaccaaaattcccattcctttcatctctatcactttcagacccagactcctcactcaattccacgggaggatctttccaagttacatcactccatctccattttttaggaagtgattcaggaggtaatggtctcaaagtctctgaacaaggtgaattctgctcatgccctgtgtttgaggttggtagaagggaaaatacatacgaagataatgatgatgtcttggggggagtaaaatgttctggtggaaaagatttagcctgcgatggctcgacggcggcctgagcaggggagggagagacaggggagtcggcgagcaggcgggcgagacggtccgccaccttctccttccacgccagcatcgccccgcctcgccctcacctcacagttgcccccgcgcgaggaggtggcggtggcggtggttgtgacggtcgtggagaggaagcgagagcgcgagggcggcgggaggagaagggaaagagaagggaagaagtttcaacctcggttgatggcacacgcctgacgccgcccccgctgggtgggtgggtc

SEQ ID NO: 136593 - DNA, 323 bp, Zea mays
  Clone ID: MRT4577_56050C.1
tcttttgtattttctttcttgtttcttgacggaaaaactggcaacctttgccttgattcgcacttaaagcgagagtatgtaggttttcaaatgaacaccaccattttgcagcaccaagaacccccctttttttccttaggatttaacttaaaataaagcctgacgggggtaacagcccccatcgatcccaaacccatgctggttgatgcatgggtccgctggagcccaagatgaactcagccttaacaactgacacagagcgaccttcaatcaaaaccacagatgggcagccacacaccccagaccaacgaagataaactctt

SEQ ID NO: 136594 - DNA, 363 bp, Zea mays
  Clone ID: MRT4577_56051C.1
gaatgaagacaatccaacaatgctgcttgttttaaagagtggagagttgttgcaaagaggaacttaaagaaaacaatatcggccccacaggcttattggctccaagctgcatcttcccattaatctgaaccttttgtcctggagttcaacctggcaaggaatatgattgattccacttccagagaatggcagtggcagcagcttgggggtggagcataatctctactcctataatgcaaggagttctcaagttgtgcatcacctctcctcttccccattcctgctttctgcattggagtcggagctagcaagccaagccaattggggggcgcaattgctggcgctgatcggctcctgacccgg

SEQ ID NO: 136595 - DNA, 1687 bp, Zea mays
  Clone ID: MRT4577_56052C.1
ccggccgggacaaccagctacactacaaacgcctgctgcaggccgcttccttcccctgcctgctgtctactccgcggataattttgcaggtcacctctcgtctctcccgagcacagcaaatccatcaatccaacagaccaacacaaacccaacctgcccccggtcgatcgcgcaaaccctagcgccgtcgcctccctctcggttctacaccgtcctctccagcctcgcccgcgtgcaccgcagatcaggggacgtacgtcgcccgcgcgcaccgcagatcaggcaacgtacgtcgcccgccggagatcggaattctgtatttttccttccgtgctcgcggctgctacggcgatggcgggcggcgggagcaggcgcgccggcgcggcggagcagccgaagatcggcagcggcaacgtcttcgccgcgctcgagacgcttaagaagaagaagaagccggcggacaagggggccaagcccgccgccagggagaagaccaagccagacaaggggggcaagcccgccgccagggaggaccccaagccagaggtcttctgggcgcccgcaccgctcaccgccaagtcctgggccgacgtcgaggacgacgacgatgacgactatttcgccaccaccgcgccgcctcccaggcccgtctggggggacgcccaccgcgacgctgccaaggaccagcacgacgcgcccgcactggaagagggaagtcagagtggagatgatggcctttatgatgccgtttataatgaccctgatgaataccacactcatacagcacatcatgctgtcactgaaagaccactttccaagaaggaattgaagaaaaaggaactcgctgaacttgatgctgttctggctgagttgggccttggcacatcaaacaattccatacaagaggaacccaatggtaagaaaggtgcagatcaagttgcagatggagagaaaaaggaagatgcacctgctcctctagaaagcaagaactcaaagaagaagaaatctaagaaagaaaagtcttcaaaggagctaaaggaagcgcaggatcaagccaatgggtcggaagcagcagctgttgcagaacctgatgaagatacagcctctgtggatgtcaaggagcgcataaagaaggtagcctcgatgaagaaaaagaagtcaagcaaagagatggacgctgcggcaaagattgctgcatccgaggccgcagcgaggagtgcccggcttgccgctgcaaagaagaaagagaagagccactacaaccagcagcctgtgcggtgaactcccctgatctgaggccgcagcgaggagtgcccggcttgccgctgcaaagaagaaagagaagagccactacaaccagcagcctgtgcggtgaactcccctgatctggtgtctctagaaaccttttgagctctgatgtcccctgttcgttttggacctgcaataaaacttttgagactgttttttgacatggtggaggtgccgtctgatgctcgttttgggaattaaattacatataggtacataggggttgtcttgtcgctggattctgtttggtgtaatgagctatgaactgttcgtcaatcgtcatatgaaccctgctgactatttatatagaaaatgtgggatatttgatacctaaaaaaaaaaaaaaaaaaaaaacggccgcaaaaaaaaaaaaaaaaaa

SEQ ID NO: 136596 - DNA, 874 bp, Zea mays
  Clone ID: MRT4577_56053C.1
actcgaaaccttttcttgtgctctggctgtgtgtgttcccaagcaaacgaaagaggtcgaggatggcttggagctgcggatcaagctgcaactggggatcaagctgccactgcggcaagatgtaccctgacctggaggagaagagcggcgggggcgctcagggcagcgccggcgccgtcgtcctcggcggtgcccctgagacgaagaaggcggcgcagttccaggcggcggccgagtctggcgaggccgcccacggctggaggtgcggtgaccgctgcaagtgcagcccctggaactgctgatcctggtgcgttgtctcgtttggggcctggatggctgccacctctttttttactggccgcttcgcgcttggggcgccgcccgactacaggctgccccccgcggctggcctggctctggctcctcccccctgcctgcttcggcgccgcccctgccggccttcgcccgccccccgccatcgcatggcaccccccccccccggccctccctgatcccttccgcgcccgggcgcgggctcatgcccccccgcccccctcgcctcaccccccccgaccccccctccccccccccgcccccctcccccccaaccccaccccccccccccccccgcctcccgccccgcgcctccccccgccccacctcctctgtcaccctcttagtggaggcccccgcgccggccgcgcctcgcgccttatccccccccccccgccccccgctcccccgcccaccccccccccgctatcccccgcaccccccccccgctcgccccccccccccccccccccgccccccccccccgcccccccgcgcgccgcccccatcccctccccccctccgctcccccgcccccgcc

SEQ ID NO: 136597 - DNA, 1051 bp, Zea mays
  Clone ID: MRT4577_56054C.1
ccggccggggaatgtctactttggatgtcatgtttatgatgaggaataaaatgcagtgttcaggtgaaaaaaaaacaaaaaaaaaaaaaaagagcacagcaaatccatcaatccaacagaccaacacaaacccaacctgcccccggccgatcgcgcaaaccctagcgccgtcgcctccctctcggttctacaccgtcctctccagcctcgcccgcgtgcaccgcagatcaggggacgtacgtcgcccgcgcgcaccgcagatcaggcaacgtacgtcgcccgccggagatcggaattctgtatttttttccttctgtgctcgcggctgctacggcgatggcgggcggcgggagcaggcgcgccggcgcggcggagcagccgaagatcggcagcggcaacgtcttcgccgcgctcgagacgcttaagaagaagaagaagccggcggacaagggggccaagcccgccgccagggaggaccccaagccagaggtcttctgggcgcccgcaccgctcaccgccaagtcctgggccgacgtcgaggacgacgacgatgacgactatttcgccaccaccgcgccgcctcccaggcccgtctggggggacgcccaccgcgacgctgccaaggaccagcacgacgcgcccgcactggaagaggagattgagagtgaagatgatggccttgatgatgaggttgatgatgacgctgatgaggaccatgaggataaagcagatgatgctgtccctgctgaaccaaccgtgaagaatgcgacagctccacctgcaccacccaaagatactgaaagacaactttccaagaaggaattgaagaaaaaggaactcgctgaacttgatgctgttctggctgagttgggccttggcacatcaaacaattccatacaagaggaacccaatggtaagaaaggtgcagatcaagttgcagatggagagaaaaaggaagatgcacctgctcctctagaaagcaagaactcaaagaagaagaatctaagaagaaaagtcttcaaggagctaaaggagcgcatgatcaagcaat

SEQ ID NO: 136598 - DNA, 118 bp, Zea mays
  Clone ID: MRT4577_56055C.1
tccacgcacgctctccttcacactacatactttttgacactccttcacttctaaatacggggcgttttccaatagggatgaaggtcccctaaagatagataactatgactttgaaaag

SEQ ID NO: 136599 - DNA, 608 bp, Zea mays
  unsure (1)..(608): unsure at all n locations
  Clone ID: MRT4577_56056C.1
ggccaccccgcagttgtggttacgcgcgccccttcggaccgcggatcacgcgaatgggcgcactacggggtgctgcacctcagttattctgatacggccactatcatcgcacttaccaaccccaacaacgcagagtttggccgcacagatgccggttctcctctcaactccgtgtagtcggaagtaccgagttttgtgtgatctagacctaccattaggttctgtaaagagatccttgataggagtcgtagtaatacggaggccagctacacgttgacttcgtatcgctaggactagttagtcttgcgatgtcgtcgttgggtaagcctgttctcggcacgcaccggctcggatacctctgggacttcgaggggtatgaaggttgaccataggacctaccactctgagactaagaagaccctaggaaacgtgtacgcactactcagtaaggaaatgggccccaacgaaagtgacggtttgcaggggactaccctgaggttccgcgtctcgcctaggacattcgaggctccaataaccactaccgtaaaccaacgtataggtacctggtnttcctnttcgtttaggacggccgggttgtacgtccaggc

SEQ ID NO: 136600 - DNA, 537 bp, Zea mays
  Clone ID: MRT4577_56057C.1
attgttcttgtttttttctttctttgtgaccgtcgaggacagtatcatgagacatgctcaagtgccacctcacagtgaaagcatgattttatgtctccatcgttagcgataagaatggacgctatcccttttgtggcaccaccttggggtccatacacccggggaatgaataatgatcatggcggaagggtgcaaaaacaggatacgatgaagacccccgctcttctccctttctaccctgaaaaagcgcggcccaccggaccacccctatgaagatgccggcgggattatcgatgcgcgatcgataattgacctttttcggtgagatgcgctatagggctgcggcttccctcctacttgacatgggatgcacagggtgggggggtatttggctgtcgtcgtgggtcccagggaaccctcacgggttcttgctctcccacttcacaatattggggaacatattccggcacccgaacttggcctttaataggggctctttttacgatctagcagacggggtgcagacgatgtttgcag

SEQ ID NO: 136601 - DNA, 265 bp, Zea mays
  Clone ID: MRT4577_56058C.1
actggctggttagcaagaggtgcagccctttcagcctgtatagcattcatgatcatcacgggtgcctcacatcctccagctgcaagcttgcccctcctatttatcgatggcccgaagtttcacagtttgcaacttggtacgcgcttttgcctggagctgtaggttgcatcgtcctttgcttgattcaagaggtggtggtttacctgaagaagaacatcaaattttgactcaagtatcttgactctatggattcttgtggcagtga

SEQ ID NO: 136602 - DNA, 292 bp, Zea mays
  Clone ID: MRT4577_56059C.1
aagacctcagtgaacttccatgcggtcctagatacactactgaccacatcgcgtacccgcgggatgccacttgcgacaaatcaagagaggcatcataatcctgacctctttcctaaactataacatgcagtgctggtccctgagaccgtctgtgcaagagacaacaccttcaaacacaaaggcgatcacatagacagtacaccctactgcttactccagttcaacctgccgattgccctttcgaccgtggtaacatccaaagagcgaattgtataactgacaccagctcaga

SEQ ID NO: 136603 - DNA, 291 bp, Zea mays
  Clone ID: MRT4577_5605C.1
cttgggttttttttttttttttttttttttttttttttttttttttttttttttttttggaaatgaaactggacatttggctcgattcaatcgggagggcatagttccttttgccctgggagtccctacttcttcacaaaaatacccgtttttacaaactttggaatttacatcccgggggcatttgtaaaattttttgggagcccttacattaggacggggtcccgttttacttccttttggaagggcgaacacaaaccttaaaacctaaggattttcaaaactttccgt

SEQ ID NO: 136604 - DNA, 561 bp, Zea mays
  Clone ID: MRT4577_56060C.1
ctcgaggccggccgggccgggagatccatatcgtcaggcgaattcgccctccccttttctctccttgcgcgacgtatcctggttgcgaccggcatgtcgcactacgcgtatcagcatgggagccctagcaaacaatctagaggcgtggagacccatcatgaccagctcgcttccaggggccccgcatttcataaacatgctgaggttgcgtcatcgtactgcgacgattactatatctatatttgccactccgtgcatgtgatagccactgtgatgacacaaacttcgcgtgtgttcgctaggagaagtagaacatccacaccatctcgtggctctgcctgaatgaatagtactgcagaacctacagataaatgggtctgctgggaaccatatgaccatgtgtgcatctatgttaacaaagatcaaaacattgcggcagtattacctgcatgtagcatagagctgtttgtcatagactgggtctgtatacgatgggaaactctctcactaggtggaactgacatatgacaggatgatgtcatcgcactcttactgttattc

SEQ ID NO: 136605 - DNA, 222 bp, Zea mays
  Clone ID: MRT4577_56061C.1
aacaatgaccgaacggggccagaaatacaccatttctttctgacgcgagatggaaaaactttgacacatctaatgattgcagatgacatatggtggtcctacaattagaggaaatagattttcattaccaaaggtatttacaaccgcccagccgcttttatgagaacaacctagctgtgcagaacgatctatggctcatgggtcttgtcgaacactcactcg

SEQ ID NO: 136606 - DNA, 261 bp, Zea mays
  Clone ID: MRT4577_56062C.1
tcaagctccagatgggcagtctgtagcaacctctccaaccagggacggtgctacatttcgggagtctagaggtcatgtgcttcgaccggagctacgacatgatactccttacaccgccgcgcgacaacgacaatggtgaccgacagcccgaccgccggcggcggaatcgacgacgtcttccccgcatggtggaagaacaaccttcgagctcgtaccgcctttttcccagccgacggatgggaaggcatggcaaccaacgcc

SEQ ID NO: 136607 - DNA, 131 bp, Zea mays
  unsure (1)..(131): unsure at all n locations
  Clone ID: MRT4577_56063C.1
atcgcgcgcacacgnacggacactcggcacaacggctcgagatcgctggcctgaatactatgatggtaagcttagacggcatgatacgagcatccgacgaattccaacctggtcatcgctaagtagatctc

SEQ ID NO: 136608 - DNA, 637 bp, Zea mays
  Clone ID: MRT4577_56064C.1
cagaattttgttattatttgtatccaatatcatcttattgttgctaaccattattacgggcctgtttggttttccacctaaagcgccacaatctgcctaaacttagtcgttggaattgagaactaaccttagacaaaaaagttaggcaaattgtggcgccttaggcacgaagccaaacaggcctaaatcctctacatcctggtgccatggatatgagtcatatgacttgtacatataatcctgttttttctatattctatggaaaatgcttatttaacttgttaacaatgtaattttgtttctgttatttgtatgatgttattgttcttctttattaccatttttattagttatccaacttttaactcttgtaggttccatccgtcttgtatgggaatgaccattgagcaagcaaaaaagatagatcattacatgtgctcggattgtgctaaagaaaatggtgcaaagagaccctcaaattcatactcagtttcaccaaactcagattctaagattgaatcaaagaggcgcaagagataaatgctgcggcagaagcacccctggcaaaggagatgcggtatttatggtgtcagctcctcattactggtgcatatttgagatgttgatgtgtacactg

SEQ ID NO: 136609 - DNA, 250 bp, Zea mays
  Clone ID: MRT4577_56065C.1
gttcatagcattggatcatggagtggacacaccatcttagaggatgacactctgaatgaagaaaacacaggagtgtcttctggttctgcccccaggctatatcttctgatggacaggacctctaaggcgactctatatcttaaccgcagggatcgaccttgatctgcccgaggagtatagctggaaggcctcgactactacatctacaggaatatacgatgggcccgggccagacccccatcctcctgga

SEQ ID NO: 136610 - DNA, 1995 bp, Zea mays
  Clone ID: MRT4577_56066C.1
ggaacgaccgcacgcgttcgcggacgcgtggggtggcgccttaggcacgtagccaaacaggcctaaatcctctacatcctggtgccatggatatgagtcatatgacttgtacatataatcctgtttattctatattctatggaaaatgcttatttaacttgttaacaatgtaattatgcttatgatatttggatgatgatattgctcttgtttattaccatttttattagttatccaacttttaactcttgaaactaccaaattacccctagcccgctccctcagcttcctgctccgttggaacggacagccgcggcagtccccagcccccccgcttcctgcaccctcgctgctagggttttctcgcaatccagcccctctgtcatggccaagacgaagcaagggaagcgggatgtcgacgcctataccatcaagggcaccaacaaggtggtccgagtgggggactgcgtgctgatgcggccagcggacacggacaacccgccgtacgtggcgcgggtggagcggatttggagtcggacgggcgcggcagcgtgagggtgcgggtgcgctggtactaccgccccgaggaggccaagggcggccgacgcccgttccacggtgccaaggagctcttcctctccgaccacttcgacacgcagagcgcccacaccattgagggcaagtgcatcgttcactccttcaagagctacaccaagctcgacaacgttggtccggaggacttctactgccgatttgactacaaggccgccaccggtgcattcacccccgaccgtgtcgccgtatattgcaagtgtgagatgccgtacaacccggatgacctcatggtgcagtgtgaaggatgcaaggactggttccatccgtcttgtatgggaatgaccattgagcaagcaaaaaagatagatcattacatgtgctcggattgtgctaaagaaaatggtgcaaagagaccctcaaattcatactcagtttcaccaaactcagattctaagattgaatcaaagaggcgcaagagataaatgctgcggcagaagcacccctggcaaaggagatgcggtatttatggtgtcagctcctcattactggtgcatatttgagatgttgatgtgtacactgcgagagaagagccaagccaattgtagggcaaaacctatttgacttatcattcttctgtgtattctgcctagacattagtgtgatgagtaggtgagttccccgttgcggcgtgtgcatgatcagctgctggaggcgggatgtcgggaaatgctagaattatgctgactcttgtcgatgtaagtgtatcgtgtgtgtgtgttaacatatgcactggctggaaacgttcccatgtgtgaatggaggatgctgatgatagcttgactgttgtttcatattcagttagaaatatacggagagttgaaataatgagtttgatctcgaaaaaaaaaaaaaaaaaggggcggcctgctgtttcataattcagttccggtttgccaagcaaagacttgagataatattgagttcgatcttgaaacttgaaaaaaaaaaaaagaaaaatgtccaggttccatccgtcttgtatgggaatgaccattgagcaagccaaaaaattacatgtgctcggattgtgctaaagaaaatggtgcaaagagaccctcaaactcatacccagtttcaccaaactctgattctaagaattggtagttttgcctgcatttccactcccaaattatatcatgagcagtgcttagttttgggcggtcgattacaagtgctctttatggaagcataggtccaaatgacttctttgttcagctgtataccatctagacattggaacccttcagtgcagtgctggctcatttcattgtgaactaaagactgcatgccctcggggtgctcggctgtgtcatgtgcattgcagggtttgtggtcattgttgtggctactcttgctagggaatgtgctgaattttttctc

SEQ ID NO: 136611 - DNA, 1056 bp, Zea mays
  Clone ID: MRT4577_56067C.1
tgtgcggcgctcaggccgcccgcccacaggccacaccgtccatcctcttcctcccgtgccgcgcatctgtcggctgccgcgcgcggcaagctaatccatggatctgcactacggcgcccgggtcggggaggccatggcggtgggcgaggcggcctacatcgccaccgcgggcgccggcgtcggcgccggaccctccaccgtggtagacgttgtgactcgcgagtcggcggcgcaggcgctgggcacggtggtgcaactgcacttcgacaagacggtggagaagaagcgcgccgccgacgcgcagaagcaggagctgtggcgcctcttcctggccttcttcttcctgctggcgctggtcctgtcgggcgtcgccgcctccccgcccgcgcgcctccagtgccgccacctctgggcgcccgcgggcctgctctcgctcgcgcacctcgccttctacgccgccgtcgcgcaccacctccgctgcctcaacggcttccgctaccagcgccgatgccacaagctcacgctcgcgctcgccgccgacaggctcaggatgctcaagtccgcggccgatgtcgtcccggccgcagacgtcgaggtgccgtaccaggagccgcccgaggcgtacctcgccaagttcaggcggagctgggccatccactttgccttcctcatcaccacattcgcattctgcgtcgccgcctccgtcgcaatcctctgcttctagtacccttctatggctgctgcttctagtttttggatcgatctgtctaggagatcctggatccatctctctgcatagcataatgcatcagttgaatagagtctgagacgatggcatttcagtttcagaggagaatccagattacctaccatcgtttcttttctttattataagtagcacttctaggagctgcactagctatgaaatgaaaagagaggtcaagattctcctctcctaattgtgtcggaatgatgcttttgcctgcccctgctaccagcctaccatgagtatcagtcttttcattcattcaaaaaaaaaaaaaaaaaaggccccta

SEQ ID NO: 136612 - DNA, 400 bp, Zea mays
  Clone ID: MRT4577_56068C.1
ggcaaacaaatgatttttcaatgcattataggcaagaacggatccaagtcagaactgatgcgagttattccatcacacgcacacagcaggataggctagcatggatgtatgtagagcgtgcacataacccaccaactaccttccaggaaggatccttgtgttcacacgaaatcgctacaacgttagaagctccatactttttgtactgatgtttttttcatgatcgaactgttgtaacttaaggactataactactacaggatgccaaacattttttttccatgaactctgatccattgagacgaggcgatgaatagctcaggctacaggcgggctttgctcttttgttcatgggcacgcaataggtcgtcgcgaaggagatgcaaaaacagcaggagtg

SEQ ID NO: 136613 - DNA, 284 bp, Zea mays
  Clone ID: MRT4577_56069C.1
ctcaaacaatataatctatagttctgtgttctctattttacacgattcactgaatacaactttatcactatccaagaagtactgtgcaaggactgcaccttcacagaaaaattgtgggacaagataatgaactgggccaacctctcattcttacaaggaactcagaattcaggatcgctatatacatggtggaaaagtctgaggactcgctgcagtaaagatacaagaacattttttgatggcctatgatattttttggtggcactttggttggagagaatcgt

SEQ ID NO: 136614 - DNA, 322 bp, Zea mays
  unsure (1)..(322): unsure at all n locations
  Clone ID: MRT4577_5606C.1
agcgtcgagaaacacaccaagtgaagcgcactagcacgacctacanngggctaccaagatattagccctccttgcgcttttgccctttttgtgagcgcaacaaagcgttattattcacaagctcacttgctcctagtgccattattccacagttctcccaccatgtacttaatgggcttgaacacctagctgtgcaagccaacatgcaacaacaagcgcttgcggggcgtttacacaaccaattgcaatgcacaacaatccttgcaattaacataatgcataatcgcacagcatctacagtttctacagactgaccatctag

SEQ ID NO: 136615 - DNA, 251 bp, Zea mays
  Clone ID: MRT4577_56070C.1
caacccaagggggaatgtataaaagagggggacaccatgtacatggaatagcctaaataaaactggcttgcccccgttagcaggggggagctagaattcgagctttttgacacccagaagatacaccattcgttgccaagggtactttacccaaggggtaatcatccttagcccacacgatggcaaataaattaggaccttcatttcttccagtttttatcctaattttaatcccagtaataaagcaggtt

SEQ ID NO: 136616 - DNA, 419 bp, Zea mays
  Clone ID: MRT4577_56072C.1
cttcttcctcctaccttcgtgcctcgaacggcctctcgccagcagcgcgcaaaacctctcccacccgatcctgctctctctctctgctgccttctcgatcgtacgagcggcagccggtatgcaaggcgaagcgcggcgcgagggaggaggaggtccacgccgcgccgccggacttcccattcgaggaggccgcggcgacggcgggggagggcgacgacggcggggaggcgtcgcggcggccgccgggggttttccagttcccctggcaggagtgcagcggcgggctgggcgtgtccgccgcggggccgtgggagctgcgcgacgtcttcttccgctccctcgtcgacgggggcgccgcggccatcggcgtgccggcggaccggctggtgcctccgccgaccggcaggcgcgcgctcctc

SEQ ID NO: 136617 - DNA, 284 bp, Zea mays
  Clone ID: MRT4577_56073C.1
ccggcgctaataacccgccgcagcaagggattgggaccaacaacatcgcctgcaccgttctacgtacgcggcctctagtaaacgtggccctggacgcagaagcgccggctccgtatctatcagcggctccttggcggtcgcaccctacagcgtccgggacgccatggtccccatcttctggtactccattcactgaacccccggacaatgatccggtccggtcggaatacacaccgcagggggatatagcttgcagcgctgcactgcgctgctgctctcgcgca

SEQ ID NO: 136618 - DNA, 364 bp, Zea mays
  Clone ID: MRT4577_56074C.1
ttgatgcctggttcctgacgacgagcgtgttgcaccactagacgtacggcattagcatgcattcaaatcataaacctaggggctcgtcacgcgagcacctcgaaagttgaacctaacggctcacagggctgtgcagacccaagaacaaacaccgcccatgcgcgggtgatcgctcataatgaacaggcgctagcaggctgtgttgacgaacctacagggcctgaacctgaccaaaggccatctcgagctggtggccaagtgctaccacaaggacagcagcctggatgagtacacggagtgcgtgaagattggaaaagatctccagcaggttcactacaagctgctttaacatgacctttgctga

SEQ ID NO: 136619 - DNA, 222 bp, Zea mays
  Clone ID: MRT4577_56075C.1
tcgttttaccgaagctcaccgggaagctacgctacgacgaataatggcgtccgttaccgtccgagcccaggtcgtagccctgcgaccgacggcgaaaagggccttacttgaccactctagacggctcagacgtactgataccgcgttgtctacaaggtgcatagtcaaggctgaagctaagggacagatgctaccgggccatatttcttacgcctacctcga

SEQ ID NO: 136620 - DNA, 453 bp, Zea mays
  Clone ID: MRT4577_56076C.1
tttttttttttttttataataacggagtgtataaagataaatgtcacaatataatcagagtacttattatatagtggaagtcttacaaaataaaagataaatatagatcgaactaaagtccatccttggcaccacaaagtcaactgggagacgccacctagatggaatcgaacacctcgctatgtggctcctcttgaaccacctgttcttctcctacgattcagtgtaccaacggcgctggcgacaaattccgtgggcttccccggcccacgactctgatgaacctgctcctgatgatcccgccgggcttctagatggcacgccccagccggatggtcaccccaagcgcggatcgacggtggcggctgcgcacacagcacagcgcccagacggtggtggtgttgcgatacaagaagggggttcctgacctggtgagctatggtaaaggaagcg

SEQ ID NO: 136621 - DNA, 465 bp, Zea mays
  Clone ID: MRT4577_56077C.1
ggggggggggcaaaaaaaaatgctagatatacccgagatatgatataagcagtctcctttcaagttggttgacttcataaggcattaaacagttccctacgttgagttccagctaagtaaaacaacaaccacaaaaaaaaaaaaagggggggggcccccttttttttttgttttccttttttttaaaaaaaaaaaaatttttttggggggggggaaaaaaaaaaaacatattcttttaaagggatttaaattttttcccttttccaaacaaacccgtgcggggttatataaaaatcccaaacgggggtggaaactgaaacaaaccacgcacacccattgggtgaccccggaattcccgccccgtgcccggaggccaaccacgcttccctttttggagaatgaataaaccatcccgcaaaaaagggaaaaatttttttccgcgggaaatgtttttttttttacaat

SEQ ID NO: 136622 - DNA, 626 bp, Zea mays
  Clone ID: MRT4577_56078C.1
ataataacggagtgtataaagataaatgtcacaatataatcagagtacttattatatagtggaagtcttacaaaataaaagataaatatagatcgaactaaagtccatccttggcaccacaaagtcaactgggagacgccacctagatggaatcgaacacctcgctatgtggctcctcttgaaccacctgttcttctcctagcacttgagattgtaggtaccaggatgattcttcaaatcctcgtgacctcactgctacgattcagtgtaccaacggcgctggcgacaaattccgtgggcttccccggcccacgactctgatgaacctgctcctgatgatcccgccgggcttctagatggcacgccccagccggatggtcaccccaagcgcggatcgacggtggcggctgcgcacacagcacagcgcccagacggtggtggtgttgcgatacaagaagggggttcctgacctggtgagctatggtaaaggaagcgccgcatttatatggccgaacccccgaaccatggccagaggagatcggtagttggggcgcgtgatttggggcgggcacggagctgctcgcaaattccgtggacggttgaagaagacgcggtcctgggtggcc

SEQ ID NO: 136623 - DNA, 667 bp, Zea mays
  Clone ID: MRT4577_56079C.1
cattgggtacctcgaggccggccgggaagacgagagcagagcagagcacttgcaccgcacactgcacgctttgtccgtcgtcaagaagcctgccgagacacgtacagcggagctgaggcagagcacaggcagtagaagagatcaagagtcatgggccaccgtgcaacgctcgccgccgccgtccttctcgccgccgtcgtggcgctgtgcctggcggcgcggtgcgccgacgccgcgaggcccgtgccgccgagcccggccgccgcggggtcggcgtacgaggcgatggtgtccaagctgatggagatgctcccgcaggggccgagcgggggaggcgcgggccactgactgaacaccctgcgtcctgctcctgcacgtacgagtacgacgctgctgcgggtttcacgcaagggtgaaaccttgtctctagctgtagggtagccagggttctttggttcagtagtttacttctccatacactatttctttcttttgcttccctttgagcctcctctctggttctcaagagaaaaggagataggcctagctacctgcctcaatcttgtatatattttagtcatatattcttcttggttagcctagaacaaaaacaaaaaaaaaaaagcatgcatgattgatgagaaaaaaaaaaaaaaaaaaagtccac

SEQ ID NO: 136624 - DNA, 183 bp, Zea mays
  Clone ID: MRT4577_5607C.1
gtccagatctgcctcacatccatcagtgaggtgtcggactttcttcgactggacactgccaaaagacaggagccagtcagttaagcgggtctgtgtacggcccatgaacaatacaacaatcgagggtgatgctccgttgcttaacacgacttcaccttccttgaaggcttccgacatgaagcg

SEQ ID NO: 136625 - DNA, 1795 bp, Zea mays
  Clone ID: MRT4577_56080C.1
gaaggcgctgatcctagccttagccaaacaaagctccgacgaggcagcggccacggccagctggcatgctcctgctgcggcgccttgtccgggccggccggtcgtggggcaccgaggcgagaggcctcgcctcgggggccccgcgggaggcggcggacgccgtggtggtgggagcgggcgtcgtcgggctcgcggcggcgcgcgcgctggcgatggccgggcgcgaggtagtcgtggtcgaggcggcccccagtttcggcaccggcaccagttcccgcaacagcgaggtcatccacgccggtatctactaccctccgcgaagtcttaaggctaggctttgtgtaaggggaaaggaaatgctctacaagtactgtgaagaacgaggtgttgcccacaaacgaatcagcaaactcatcgttgccactggtgctgcagaggttccaaagttggacatgcttctcagaaatgccaaagaaaacggggtggatgatcttcagttgatggagggttctgaagctatggagatggaacctgagcttcgatgtcttaaagctttactatcacctagtactgggataattgactctcattcactcatgctctcccttttggctgatgctgaaaacttgggaacaactatatcatataacacatcagttatcagtgggcatgttggatccaatggccttgaactccatgtttgtgaaagcaaagagctgcagaattatcatgtagggtctcatgtgaacgcacaacttgttttgcttccgaagcttgtgataaactctgcaggtctgagtgcagttctacttgccaaacaatttcatggccttgaccaggaatttgtgcccactcctcactatgcgcgtgggtgttacttcaccctctctcaaaccaagagtcctttcagtcggttaatatatcctctaccagaggatggtggcataggagtccatgtcactttagatttgaatggccttgttagatttggtccagatgttgaatggatatctgatggtggaaaggaccatgtgtcatgttttctgaacaagtttgattactcagtaaatcccaatcgctgttctgtattttaccctgtggttaggaagtattttccaaatctcaaggatgggtctttggaacctggttattctgggatccgaccaaagctttctggtcctggacaacctccttcagattttgttattcaggggtgggatgtccatggtgttcctggactggttaatttgtttggaatagaatcccctggtttgacctcaagcttggcaattgctgaacacattgtttcaaagtatttgtgatgggagtctcctatacaaagcttcattgccagatgctccatgcactgcagaatgatgaacctgacgtgtcaggaccagggttcaccaaagaaaatcgtacagtaaaaacaacattttgagctgttttttttcttgatcatttggatgcttattgcatgtgactgttagaagatgaaattctctgaaagtttcagcgaaacattaatatgatggagattgaacgggtatatgcccctttacgggcatggtacctggtttggcctctgaatgtggcctagagaattatccccagttgcttgatagatggggcaaccccccttctagttgcccaccggaaattgtaataagcccccccctgtgaaacatgttggggctagccctagacatttgtgtcgggcgggcatcccttgctgccatcgaaacatatcccgaaccagccgaattcaaaagaatgaagaactatgaattgggat

SEQ ID NO: 136626 - DNA, 1100 bp, Zea mays
  unsure (1)..(1100): unsure at all n locations
  Clone ID: MRT4577_56081C.1
cctcttccacaggctgagnaccgacaccgnaaccaggcggccaggcgagggaagccaggcgacaggcgacgccaagtcgagaacaccctaggtggtcgctcgcaggctgcgagtgagagccgtggcggagtcgccgtccttgcccacggaggaggacacagccgccggcgcagtgggatggcgacgccgacgcccgatgcccggaagcgaggggacgctcgtggcggtgatgccgcggtccccgtccccgacgccggcggaggcggggacctcggcgaccgagacgcccgtgctaatattcctttacttccacaaggcgatccgcgcggagctcgaggcgctgcacggcgccgccgtgctcctggccaccgagcgcaccggcgatgtcgcggcgctcgccgagcgctgccgctttttcttcagcatctacaaacaccactgcgatgccgaggacgcggtacagatgctggctaccccgtgtggagctctgtttttgtgtttctggccattttcccctgtcgcttcctgttgggcggggggccttgacccgtggtggatttgggtttggatgtgcttgggcgtgggctaattttggcggtatttgggtttggggttgcggaattgctgccttcggttcgggtgtatctggtgggatcgggattgaatcgggcaagcattgttaggatctgaaattggatatgagttcatacggtggtgtagaagctttcaacgaattggcgttggatggtttggtgcgcaggttgagccgtgttcttggttgattagccatgctagtacaaacaattatttgcacttcgtccttccaatggtgacaaaatgagatgtactctgaggaaaacataaggggaaaatccctgtttactttaagctacggtggaaaatttattcatgccaccgtatgttgtcttgcctttctagtttcaatggtaacactaccatccttttgctctgatttgaacatgatgtccgcattagtcatatatctcatatagttttcactatccgtgaagcagcatatggaggttgcaacctttggactttgtgtagatttcaaagaatgaaaatggacttcaattatc

SEQ ID NO: 136627 - DNA, 636 bp, Zea mays
  unsure (1)..(636): unsure at all n locations
  Clone ID: MRT4577_56082C.1
nttcaccaaaatagctaataactaaactattagctagggtgtttggatgtttcaactaattttagccactaactattagctctagtgcattcaaataccccctagatctgtttatctgattactgacctaataaccccatgcttcctactcctatttactattgtgactttttacaagaggagtttgaaagcacatctcaatttgtttgtgcagattgttcattagtgttattgtttataaaatggtcaataaagaattgctattaattgagaagagaatctactaatggatgggccatgaaattgcatggtttttatttgcctgaaaagaatggagcctttcttgttgttttctgaatgatataactggacactgtagttgaagggcaagctttgaaaatgtcatccactgtgccgaagtcatcaaatatcttctggcatgattgcctagttggcaagactgatcgccagaaactactcaaccagaaaggctgtgttgtctggatcacaggccttagtggctcaggtaagcaaaccttgtttttctcgaactggtttgttgtgtgcttcttgctttgttgatgcaattgttaaaaaagttaagctaaaactaagataatgtcaactgcagttggt

SEQ ID NO: 136628 - DNA, 323 bp, Zea mays
  Clone ID: MRT4577_56083C.1
aaacatggattttagtaccaaagtaaaacaggaattgatttcaacttaacatgtgaaaagatcgccggagggagcttcttacgttaaaaccctttcaacacctatcgcataactagggtggttcgtcacttgttattttcgaacattgacctaacctcatccataacaaaacaagctttgagggcaacaattacttacgttttacactcttcatgctcccatagctgaatagtgggcattttagatacattaactcttttaaccaacccccgaggaactctattgacctttgttaagtaaaagcatacttccagatattctcc

SEQ ID NO: 136629 - DNA, 508 bp, Zea mays
  Clone ID: MRT4577_56084C.1
cgcctgcagttccggtcccgaatcccgggggcgggcggggcgtccgcggcgccttgtccgggccggccggtcgtggggcaccgaggcgagaggcctcgcctggggggcggcgctggaggcggcggacgccgtggtggtgggagcgggcgtcctccggctcgcggcggcgcgcgcgctggcgatggccgggcgcgaggtactcctggtcaaggcggcccccagtttcggcaccggcaccagttcccgcaacagcgaggtcatccacgccggtatctactaccctccgcgaagtcttaaggcactacaatactgcatggagcccttaattaatgtatcacagattctacctgcggattgccttttgtaggctaggctttgtgtaaggggaaaggaaatgctctacaagtactgtgaagaacgaggtgttgcccacaaacggatcagcaaactcatcggtgccactggtgctgcaaaggttccaaagttggacatgcttctcaaaaatgcc

SEQ ID NO: 136630 - DNA, 302 bp, Zea mays
  unsure (1)..(302): unsure at all n locations
  Clone ID: MRT4577_56085C.1
gtcatacttacatgcactttcaccccccagatagttctataaacaagntantcaacacgctgtcgcaaatactggggcctatggaccgccccacntaagatttttttccaatttaacttgttacctgtcatgttattgaaatatatagaaagacctgttatagtggcgacgagtcactatgtctcatgttctaagcaacctctccacgtgctgagaaggcttgccttaaataatcactttctcatactccactcatgtgcgagccttcagcactgagtatgaaccttacctgtgggataatg

SEQ ID NO: 136631 - DNA, 373 bp, Zea mays
  Clone ID: MRT4577_56086C.1
taaaagaaggaaatgtacttcctttggggaaatgttttggcagttcaccagagtaaaaaaaacaatttattttttggggatggaacctagccccaggggcaaaattggcccccaccaactcattatttggaatgctctttaacggttaaacatatttaaataaaaaggggtaatgttggtcctaagttgacgacatccaggaccagttttggggatttgaggactgaccactttatgcgggggtagtaggaaatttggaaaacctcttgtgatagtaaaaagatccatttcactcccaaaagtttttttttttccatttaaggcttagttgcccacgaagggaatgatcccacttctttacccatttgggttt

SEQ ID NO: 136632 - DNA, 275 bp, Zea mays
  Clone ID: MRT4577_56087C.1
tgaagcagcagcaacagttcgccgaagtcgagccacccctgctcccttcaaggtcgcttgctagcttctctttcaagccgacgtcgcgctcgccctggtgccgagaacccctccaacgctgccatctccagctcctccaagtccaggcgctgccacccaaccctcctgttcacatcgacgtcctcgcctcgccatcacatcatcgtcacgccgtcgtacgttctctagcttcttagcgcagaccatcctccaacgcgacgttttgcatccgtaga

SEQ ID NO: 136633 - DNA, 256 bp, Zea mays
  Clone ID: MRT4577_56088C.1
cgggcgacccagcgttcgccaccgtacgaccatcttttgtgacacgtggttgcaagactacccctcgggacaggcttataaatttaccacatcctcagtttagaatcctcaccgttccaaacaagatcaataaataatggtcggtctaacatcaaaactgttatcgcaaaacggtctgttgctagtgatacgaaagaacatcttacgtgagaacactgagcacgatgtgctaccgttctcgccctgaactcacttc

SEQ ID NO: 136634 - DNA, 597 bp, Zea mays
  Clone ID: MRT4577_56089C.1
cgctcgatgccggtcggacctgccatcgcttatcatctgcgcctctacatttcttctctctctgctcctccggctccgtctgatccatcctagacaggaatcgccatgtcagactcggaggagcacgactgcgaatcgaaggacgacgctggcccgaccaacacctacccgcaacaagttgggaccgcccggaagagcgggttcatcgtcatcaagaaccgtacctgcaaggctgcggagggttctacctccaacactgtcaaccatggccacgccaaatgccactttgtcgccgtacacatattcactgcgaaaaagctggaagatattggtccttcctcacacaactgtgacatgtccgcatgtgaaccgtactgagtatcagctgaatgatatatctgaggatggatttgcgatccttcttacttcacatgctgacagtaaagaggatcttagactcccaactgatgagactcttgtggcccagaatatttgaggattcgaaagctgttaatgatcttgatgtgactgtccagactgccccgtatgaggagcagatctgcgcgttgaaggatgttggccccaatccacttcctt

SEQ ID NO: 136635 - DNA, 184 bp, Zea mays
  Clone ID: MRT4577_5608C.1
cggacgcgtgggtgcgagaaccccatactaggaattgtttcttagacacctaaaaatcaatttatcttttagagtggatcttcttggcacatcttctaaattttcctttctacctctgtgacaagtttcaagtcgatctgatttgatttatttcaaatttaacttttggaggaacatttttaga

SEQ ID NO: 136636 - DNA, 680 bp, Zea mays
  Clone ID: MRT4577_56091C.1
gtgcagcgctcgatgcgtgcgatctcctcgcttatctctgcgcgctactttcttctctctgtgttcctccggctccgccggatccatcctagactggaatcgccatgtcagactcggaggagcacgacttcgaatcgaaggacgacgctggggcgaccaacacctacccgcaacaagttgggaccgcccggaagaacgggttcatcgtcttcaagaaccgtccctgcaaggctgcggagggttctacctccaacactgtcaaccatggccacgccaaatgccactttgtcaccgtacacatattcaatgcgaaaaagctggaagatattggtccttcatcacacaactgtgacatgtccgcatgcgaaccgtactgagtatcagctgattgatatttctgaggatggatttgcgatccttcttacttcagatggtgacagtaaagaggatcttagactcccaactgatgagactcttgtggcccagattaaggaagaggtcgaaagcgttaaggatcttgatgtgactgtccagactgcgacgtatgaggagcagatctgcgcgttgaaggatgttggcgccaagcaacttccttgcctttggacactataccctactgtgtcctcaacttgtatcgggaaagaagtgcatctcctcaaggattggtaccgatacattca

SEQ ID NO: 136637 - DNA, 112 bp, Zea mays
  Clone ID: MRT4577_56092C.1
agacacaccccgaccttccgctccacgcgacaacatccctctcggttctccctctgcacgagtggccctggacctgcttggcggcgcgcttattccctaggccggcgagcag

SEQ ID NO: 136638 - DNA, 133 bp, Zea mays
  Clone ID: MRT4577_56093C.1
gtcagactgtatatatcctgaacagcctgctaccttagagaggaatgcacttatgctgtgggacgcccataaaccgttctttaaagaaagacaactctacctaaggctccgatttctaatgagaagagaaaca

SEQ ID NO: 136639 - DNA, 470 bp, Zea mays
  Clone ID: MRT4577_56094C.1
ggccccatccccggtggaattttttaaggcttttccaaggcctcgcccggtgggaccggatttaatcctaaggcctggttgggtggcaaaggaattaatccctcctattattaggccagccggccaaaaaccgcccttgggttaaccttgggtttggggtaacccacaaggctttttttacgtggttgggaaaattaattgtgggggttgccaagttaccccatttttggcttaggttacccaaaaacctggcggttttttttgtttaaaacttaaaattggccccgttggttttaacttggaataaccaactgttggggaaaacccttttttttccccaaaaggaaggggtcttcaaatgaaaacacccttcccattggttccagttgggccctgccttgaactttaaaaaccattcctttggtttttggaacatccccagccaagggttgggaccccttttttaaacc

SEQ ID NO: 136640 - DNA, 357 bp, Zea mays
  unsure (1)..(357): unsure at all n locations
  Clone ID: MRT4577_56095C.1
ttttaaaacgcaccagtcgtcaggacacatttctgaacttccattnntggagtggaaattccccagaaagaagtgtatcagatctctacagcatcgtcatggcaagcacacacatgctttccatcacaactctccctctacatacaattgctaatcggaagaataagaaccctagcgaggccggtggctatcagagaaaaaattgtaactgaccgatctttgagagctggggtggcggcgcaaaaggcgagcaacgagggctcatgttgtttgaaaaaaaaaaactgatctgattttatatcttgtacaaatcctcgtcaggatggtccttcatgctgccatttggggacgccagtg

SEQ ID NO: 136641 - DNA, 591 bp, Zea mays
  Clone ID: MRT4577_56096C.1
caaaacatcaaccttcatagggattcgacccttcctgttgaaaaaaattttggggtccaccccccaggggacccaccgggccctttaacccaacgaacccccacccccgtttcttgacccacaacccacagttgttttttaaacaacaacttcctttgggggggcccccagggggccccaaacaacccaaatccccaggtccagaagcagtttaaaggacccagggtttactgcccaccggggggggggaccaccagggggagagggctctccttcgggatgtggaagccggctagggggcggccttcctccagttgtttgccagaaaaaataaaaccctgttggtcgggggggatcccctttttgcccggaatcttccccttcacgttgccgagggggggggacctctcaccctccagggttatggccttgccagcaaaggccttaacaaaaatcggcatcccacctggaagggggagcaccagggggggggggctctcctttgggatgttgaagccgggaagggtacggccatcctccagttgtttgccaaaaaaaataaggcgctgttggcccggggaaagcccctcc

SEQ ID NO: 136642 - DNA, 149 bp, Zea mays
  Clone ID: MRT4577_56097C.1
tcgagcgcggctaaaggatcgcaacagaacactaaaggctcgtctgtggtgcctgtctgcactgcacccttgaagaatgccctgcctgcgggtgaggtgacgcctgcgccgcgcacacatggcccgcggcttccctacaagtcctgagc

SEQ ID NO: 136643 - DNA, 485 bp, Zea mays
  Clone ID: MRT4577_56098C.1
accacgccttccaatacgccgggggctacccatcgcggagccaccggcgattccgtacccccttccccggagagcgatggtgacggaactgacagcggctctactgcgcgcgtacgacggtaccgtcccgtacaagtccttttacgtttccgttcggggcaaggtctacgacgtcacctccggccgcggattctacggtccctgcggcgcctacgccgttttctggggccgtgaggccagtcgcgctcttggcaagatgtccaaggacgaggccgacgtcttctgggaccttttcgggctctccgacaaggagctcggcgtactcgccgactgggagatcaagtttcaggccatgtaccccgtttgtgtccgactcgtcgccgacgcctgatctcgctactattggtctatatttactctgtcctgccttttgcggatgttaatgctgggctcgcttgcttgtagctagtagctttgctacccaa

SEQ ID NO: 136644 - DNA, 452 bp, Zea mays
  Clone ID: MRT4577_56099C.1
tgttactcttgtaaaaccactggggtgttttaatccatgcatttttcttcactattcaagagtataaatctgttgggttgttaaaatacatttaaacaaacagttgagaaacagaagtttggtaccttgtcagatccccttaaggggaagagtttaagctataaaatagtggctttgtttttattccaaaacatacatctgctgtttgttttggatttattttacatgcgtttatatattttttaatactggttaaatcttagcatcttggctaaatcttagaattctggcccttcgtagccatattacagaagtctgtattgtaaaagctaaaggtctgaacaggtttccaaaaacttttactttcatgaggatataaccttagcagagacctgaataacatttattctttggtacgctatgcacgcgtgtgtatgtatgtatgtatgtat

SEQ ID NO: 136645 - DNA, 791 bp, Zea mays
  Clone ID: MRT4577_5609C.1
cattgcctcgctcgaggccggcccacgcgtcgggcggcggctgccgcaacaggctcaacgctcacgcgcacacacaatccatagccgcctcccacatctcactctcgttccgagcttccggccatgacggtgacctccggcgcccccaacgacaacggccgggacgctggcgccgctgcgactgacgatgagcaccgcgtggatctggaagtcaagcacaaggacaccggcactagggactcgccagcaccgatagcggcagctgcgcctgcgtcccagtcccgagtggctggaaagcttggcccctcagatccaaagcacctcatctatgcgggatccaaatcaaagcatattaaagctgcacctgctgcaccagacaagaatcgccggccacctttgtctccaccagcacctgctgtcaatcgtggtcgtggatctgtgcgcacacctttgggtgaacaagtcaagtacaagtagcaattgacaagaaccttttggctctcatgaagaattgacatggatcttttggttctcatgtttttactcaatggtgaacttgtaatgaacttgtaacagatgtgcttttgggagcagtttgcacatctgttgatgtgcacctatgttgtaagcacattgtatgtgttaatttggaactttggatgtttaatgtggtgaactagtggcgccatgctaggggtggtggacactaagtggatattaatctagctgtgaacatttgatgtcgatgttttcaagggaaaaaaaaaaaaagcaacccttaacattgcccc

SEQ ID NO: 136646 - DNA, 189 bp, Zea mays
  Clone ID: MRT4577_560C.1
cccacgcgtccgaaaaataaataaacatattaaaactaaaagaaaaatgagaaaaaatcctgggacaatctaaaatagtaccacacaacaaacccaatccactgcatcattattgcaaagcgccagcagtccttcaccataatacaattttactcggctaataacggcacacttggtgtattactacat

SEQ ID NO: 136647 - DNA, 360 bp, Zea mays
  Clone ID: MRT4577_56100C.1
tcccacgcgtgcgctgacgcttggggttcgggtgctgcccatgtgagaaggcgcgcggtgtttgcttactgcgtcggctaggaaggacgaacagagccctaccctcactagagctcggcgagaggagcggaggctcatctgacactgctcgactcgacatggccttatatcgccaacgcacctatccttggtgtttcctaccgtcaggagagccacaacttttgctagccatgtcttgaccaccatgctgcagatactacaccacatgtgggataaaggtaaaactgatctcaagcctgatactgcaagagcacgacatgtctatggccagtttctagagacacgtactacatatgatta

SEQ ID NO: 136648 - DNA, 247 bp, Zea mays
  Clone ID: MRT4577_56101C.1
gatcgcaaactgccgccctttttttttttttttttattttctagtttccctatgatttacactatttaaacttccaatttgtttctagttccaagttcaaatccaaattccaattcaattcctattttgaacttcaaattttccagtgaatataacctctactatttacaatattattatttattcttttccttgttatttatttatgaaaggactaaatgacttcattaaaaaaaaaaaaaaaata

SEQ ID NO: 136649 - DNA, 466 bp, Zea mays
  Clone ID: MRT4577_56102C.1
gatacgcctgcaggtaccgatccaaaatttcgttggggaggcacacattctacttcctgcatctcgtgagcattcaaagctgttcttgcgggaaggtctctcaaaaggggggtgctaccgtcaggtgggaggttctctcctctactactcaacccttacatgcttgcttctacgggagggaaggcacactgtagggcgccccgtacacccattgtaaaagccacgctccaacttccgtgaggtctttttgcctgcgcatgctaccttctgatgaaaagtgcttacatactttattaatcaatcatgaccctgctccgggaactttaccgtgctgaacggcgacaagatacctactaactgttattggtgtataggagaggatcctttgtcaaactacatggcttggagtcttataggcaaaggctctttattcctgggaaggagaagagtgacagatattttcttc

SEQ ID NO: 136650 - DNA, 999 bp, Zea mays
  Clone ID: MRT4577_56103C.1
cccacgcgtccgagtccactcttctggtcctctcgcttttgcgctcccttggtcgtgttcgtcccctgctcgtctcccgtccgttttcggatgcccactccgaccaaaaccctagctacttcgtgaaggtggaggggaggagatggcggcagcggatgggcgcagcggcgacttccgggtcaggggtggcagcgttgggggtcggatcgaccgactggtggtggagaacttcaagtcgtacaagggtgagcagacgattgggcctttcgtcgacttcacagccatcatcggccctaacggcgccggcaagtccaacctgatggacgccatcagcttcgtgctgggcgtgcgctcaacgcaccttcgaggcgcgcagctcaaggacctcatttacgccctcgacgaccgcgacaaggaggccaagggccgcaaggcttccgtccgcctcttctactgccaacccaaccaggaggagctctgcttcacccgcagcatcaccggcgccggcggcagtgagtaccgcatcgaccgcaaccaagtcacctgggacgtctacaacgccaagctcaggtccctcggcatcctcgtcaaggcccgcaacttcctcgtctttcagggtgatgtagaatccattgcctccaagaaccccaaggagctcaccgctctcctggagcagatctcaggctctgatgagcttaggagggagtatgacgagctggaggagcagaaagccagggccgaagagaagtctgctcttgtgtatcaagagaaaaggaccattgtcatggagcggaagcagaagaaggtgcaaaaagaggaggcagagaagcatctacgccttcaacaggacctgaaactgttgaagacagagcattacctttggcaactctataccatcgaaaaagacatagagaaaattgaagctgagcttgtggaggatagagaatctcttcagcaagtgcaggaagagaatcgatccagtgactatgaactgactgc

SEQ ID NO: 136651 - DNA, 542 bp, Zea mays
  Clone ID: MRT4577_56104C.1
ctgggtcgtctgctgcttgctctgtactccgaccatccgtcgtttgttgttcgcctgctcgccgtggggatatgcgactgcggcagcgcggcggtggcgatcaaggaggaggacgcgtgcggggcgcagcggccgtcgacacgctagcgcctcttgcagcggccgtcgatgtgagctcgggctccgcttacccgtcgctgccggcatcgctcgatgtgctactgttcctcttctctagatacaggatggtcgtgctccttgcgaccttgactcaccaagtgcctcggtgagctacttgttgtgtgtctgtagggatcttactagctactagctcatcagttcatcactctctgaacaaatgttaacatgtcagagtagggttgcaactatgaatttttgtccaaggcattcacattcattggttctgcagtaacggagagtgcctgaatgtaaagttggtcatctatggtcggctattgcagtagctacccctgatctgctatatcaaataatgttgaagaacatgtgatatgcagtatggt

SEQ ID NO: 136652 - DNA, 535 bp, Zea mays
  Clone ID: MRT4577_56105C.1
gcggccggcggctgggagtcctgtagagcggccgccctcgccctttttttttttttttgaaaagggaaatgtggggcatgggggacatatatattggacacgatggatagatggggatcatgcctggacaatgaaacaaaaaagaccgttttaccccggtgtttttgaaaaaacacgtaaggaaaatccccagcacagaggctctacttttttggggggccaaaaataatttattaacaccggggggggggcccccccccaggtcaaggggagagggtgttgggcctaatcttataatcaaattggcctgggggccggagaatcccgaacagccggggggtgatataggggcccaccctcatgggggggggtttaaagagtgggttggaaaagaacccgggctccagggggaggtcttggggggcggaccccccacggccgaaaaattttgccgactccaggggggccaggacccgggggggggggacttgacaaacaaggaaagggggggggaccctttccagagggccggggg

SEQ ID NO: 136653 - DNA, 590 bp, Zea mays
  Clone ID: MRT4577_56106C.1
tgcacgcaagaatgtcacatggaaccgccatccattgcaacgctttggacgtttgaacaaggaatgcaagcaatgcaccgtatattgcagagaaaaaaaaatgccatggttgcttacatttgcccgaagggatttgcaagatgccgttgtgttggaggttgccccaggcttggtgctcgccgccggtcatcagattcatttgattttgatttcacatcacataggacaaagaaatgttgaagcctccgtttcaacactccagtgatttctttcatgcgtctttgcaggagtaattattgccgtcgagaccgcaccaaacgcaacatatgatgatgacttctcgagagagatctcgatgcggcagtgctcggccaccggtggaggatgctcctgttgttcgatgatcttttccttcttgccagcggcatattcttcttctttgtacaacaacaacttctctattctcgcgagcagtactgataacgtattggagcgcagtgaaaacgagacacagaaatgtagagagaaagtgacagttgtattgatctcatgaaatgtatacatatatatatacatagtgaagagacatc

SEQ ID NO: 136654 - DNA, 795 bp, Zea mays
  Clone ID: MRT4577_56107C.1
atttttcctccaacctcatttcttcccagccgccacagccttcttcctcctctcccccacacgcacagctctctccttccctgtacatggcgcagaaaaatctccagccatggcgtgagcaccattcccatggccgagctcacctccctgccgcgagtttgccagcgacccccacgcggatctccatttcccctagctgtcgctcgccgcagagttctctgctggcttcctcctcgtcgcgcacagggcacctttggcgttcgccccggtgagctccatagcctagccatggtggccaccgagctccccgctcccatctcctctgcccggcgccctccctattcctattccacgcagggcagccggctccccttccttctttcccccttctcccccatggccgagccccctctgttgctgaccgagcttcagctctagctccggccagcggccatggcgcgacgcccttgctatctcctcccccatgcagtgtccggccaccacttcatcaccagcgcaggatcccctagcccaacccctcgcggcggatgcgcagccgtcctcctcctgctatccatggagccaagcagcagccccctccctgtccatggccgccagcccctgctcctcttcaccgagccgagctcgtcgtccctgccatggtggacgctcggcactcgagctccattccccctgcttgcgtgctgctgcgcagtgcgccgttgacgcttgctatgtgctcgacgaaatgcgcaacaagccaggcgttgttgattcctcgcagcagcaccgttc

SEQ ID NO: 136655 - DNA, 348 bp, Zea mays
  Clone ID: MRT4577_56108C.1
tgctaggagcctgcaggcacgaggccccatcggctctcgtcgcctccgccgccgccttcctcttcgcgccgtccgcactgagcaatggggcttcgagggaacagtgtgcgcctggatattcctgagctagggcgaaaccgtctgcgcatgacactgcttatgcgctaacgtcaagattcacgaagaaagcttgtcaccaccgtggccgacgccgccagggtcctgctgtcagccggccgatggactgggtcaggacgccgactagaggctgactagatgactagtaggacacagctctgggggacggcagcgccagctaacagcagctcgaaggcaggataaccatga

SEQ ID NO: 136656 - DNA, 292 bp, Zea mays
  unsure (1)..(292): unsure at all n locations
  Clone ID: MRT4577_56109C.1
ggcgactgatgggctcgacgaggaggaggatcaggacgggacgtcggtgatcgacgtcatccggaggcgccgagagggcgacgggcaggagttcaggatcgaggacgagatcgaccgggccgccgacatgtacatcgccagggttcgacgccggatgtggggggggggggaggacctaattgcctaatcntgnctctncncctctgcctgcaatcagagatttttctttcttgtttggttgacctttgcactgctgncaaaaatttggntgacctgtntggagnttggaccg

SEQ ID NO: 136657 - DNA, 761 bp, Zea mays
  Clone ID: MRT4577_5610C.1
gccggccgggccgggagtaaccctagagtccagttgcctagttgcctcctccagtagcccagtctagcactctctaaccatttgcggcggctgccgcaacaggctcaacgctaacgcgcacacacaatccattgccgcctcccacatctcactctcgttctgagcttccggccatggcggtgacctccggagcccccaacgacaacggctgggacgttggcgccgctgcgactgacgatgagcatcgcgtggatctggaagtcaagcacaaggacaccggcactagggactcgccagcaccgatagcggcagctgcgcctccgtctgatctgcttccactacctgcgcctccgtcccaatcccgagtggctggaaagcttggcccctcagatccaaagcacctcatctatgcgggttccaaatcaaagcatattaaagctgcacctgctgcaccaggcaagaatcgccggccacctttgtctccaccagcacctgctgtcaatcgtggtcgtggatctgtgcgcacacctttggggtaagaatatactttatcttattgcccattaaacaatcattcatcacatatgtgctagcagctggtaggatttcattagcttattgtgctaataagctattagtattttgctagtttattgcaaaagtggttgctattgacatgtaatgaacaagtcaagtacaagtagcaattgacatgaaccttttggctctcatgaacaaagataaaaaaccttttggttcgc

SEQ ID NO: 136658 - DNA, 564 bp, Zea mays
  unsure (1)..(564): unsure at all n locations
  Clone ID: MRT4577_56110C.1
ccttattttttatttattttttttattttttgttgttgtggttattaagaaaattaaaagacccccccccaataattataaaaataaaccccccaagaaaacggaagccgaaaaaagggaaaacaaaaaaggaaggggaaaaaaaaaaaaaaaaaaaaaccatggggagggggggaaaaaaaaaacaacaaaaaaaaagggaacccacaacagacacgaaacgaaaaaaaaaaaaaggccaccccaaaaaaaaacctagaaaaaaaaaaaaaagagtctggagcgaaataaggaaggggggggggggggggggaccccaaaaaaaaaagaaaaaaggtgagcgaccaaaaaagacaaacaatgggaccgaggcatgcgggggagaaaaacagtaaacttccccccgcacaaatacaggaaccttggggaggcaacacggaaaaaaaaaaaaaaaaaccgtgntgggcatgaaaagaaccaggaaagcaaattacggtcaaaaagaccacgcaggagaaagaaacctccaaaacattgcgaaaagaaaaaaacggcaaggggcct

SEQ ID NO: 136659 - DNA, 431 bp, Zea mays
  Clone ID: MRT4577_56111C.1
cggacgcgtgggcggacgcgtgggcgtgtcgcttgggcggacgcgtgggtctgaattgctcagaactgtatcattaatcaaaacctctggtggactgctcatttgcactctgccaatgtgcagtcattaagaatgtcctgccctagtgcagtggtgagggctgtctctctgaatcctcaggtcgcggttcgaatcagtctatctacatttatggggaaaagcttgcctctatttatctcttccatagacccccccccccccctgcgaacctcgggtactgggtctgttttattccttgttagtcgatactggcacctttgagtttctcgtgtggggtttttttagcctggtcaattgtatgagctgattagtgctgagtttagagctaaacaagtagaggtacattccacatggtagacatgttttatatt

SEQ ID NO: 136660 - DNA, 401 bp, Zea mays
  Clone ID: MRT4577_56112C.1
gcgtgcgggcgagacacacacgccacagccagagaccgagtacaactttccgcccccggagcaggacacgagggcggcggggcaggacccggcgaggacgacgaccgcccccaaggaggagcaggcagacggccgcagcgccaagagcggcacccacgacgcggcacccaactacgacgacacccagggcaagaacagcggacccgacacgccgccgccgcccggggaggacccccacaccccgctctgcgcgacccccaggggcaaggggaaccagcccgccggagccgccgggatgggacagtcccgagccgaggccaggaaggaaccccggaacacgagacgaagacgggggcgaacaccgccaaaacaggcaaagacgcgaacccgaccccgacccc

SEQ ID NO: 136661 - DNA, 360 bp, Zea mays
  Clone ID: MRT4577_56113C.1
acccacgcgtgcgctaccctagttgtcgtctcactcaccccgccttcacgcctctttcacctaataaggtcccgcccttttccgacagggacaggggggacaggaaatcagcggccatggcctcgattccggcgacagaccttctccgtcatctttatcgtcctcttttgtgccgcggctggcaccgtcgtcaactacgacctcccccgacttcgttattcagtgccgcgtttattgcgaacacctgccgcgccgggttcgtgaccaatgtcacctagttcatcgcgggcgccaaggtgaggctggagtgcaagctcttctgtaccggcaagctcgaggctccatcgacggggtgaccga

SEQ ID NO: 136662 - DNA, 294 bp, Zea mays
  Clone ID: MRT4577_56114C.1
cctttggaggcacgcattctaccactcgttcgctctctttcttccgtttcttatatccttcctcagattggcatttctggccatcttatcggcgaccagagctcccagttcaatgaagcattcatcctcttcgacaaggactgctactgcttcatcaccaccaatgaacttttaactgtgattctctcgtttgggcataaccctactgatgcttatcttcatgacatgatcaacgaggttgatgcttattgcaattgaaccatctacttccctgagtttcttaaccttattgca

SEQ ID NO: 136663 - DNA, 247 bp, Zea mays
  Clone ID: MRT4577_56115C.1
actaaccaagtgctgcatcactataaacattaaaaaattaggacactatctttctcactagtacatttggatactattaccccacaccatcctctactattacacctccatattacgatacatcatacaaccatctatacaagacactccttttcgttccacatcctacaataacatcctatccctatctttctacatccccctctaactctctctcttcaacctcttctccatcatgcttacccaa

SEQ ID NO: 136664 - DNA, 575 bp, Zea mays
  Clone ID: MRT4577_56116C.1
ccaaagcgaccaacctcttgcttcccaccgtacctgcctgccacgccgcagcctccggctccgatgtcgtcgcagcgcccgggccgccaccagcgtcgcgcgtcgcagagcgtgttcgtgctcccggagaacctggcctccctcgacgtcgacgcggcgggcgaggtgggcgcgaattcgaaggccggtggcccagacggcgccggcgccgagcagcaggcgaggccgcccgcggggcgtcaccgccgcgccatgtccgtggccgtggcctccactagggacctcgagctgatcaaggaggacctcggcagctacaagctcggcgcttgagagagggggccggctggcacgtcgcgtcatgtgtatatagcctgtgggttagccgtgcccagacctggctttgatcggcgcttaacagtggcttaattacaaggtctctcctccgttgctctttttgttttcgctcaacacacgcatatgtaatactactactagtactatgtagtaacttttttcattacaaagaggaagtatttggacactttaatcgcgtgaaggtcctgctcagtggcagc

SEQ ID NO: 136665 - DNA, 152 bp, Zea mays
  Clone ID: MRT4577_56117C.1
tcaccattcgttccaactcctgtacacttgatcctggtgccagactagccaatagtaacgggaaggggaccatggactcgaccggcgccaaaccagggggtcaggggaagaagggagcggccgatcacaaggtcacgcggccaaggaagaag

SEQ ID NO: 136666 - DNA, 107 bp, Zea mays
  Clone ID: MRT4577_56118C.1
gctgctactggccagatgtaacctatctctggtcaggcattgtttgcgtgctctgctttaagatcagcttagggcagccgatcccgctccgcgtataaaataaaaat

SEQ ID NO: 136667 - DNA, 606 bp, Zea mays
  unsure (1)..(606): unsure at all n locations
  Clone ID: MRT4577_56119C.1
gtggggtgggtttttttttttttttttttttttttttttttgggaagagggggggggaatttaaaaaattaaccggggccggggaaaaaagtataaaaattaaaaataaattaaaagggctactgtatttacaaaaaccctttttgggggggggggaggtttaaaaacaacctaattattgttaaaaaaaaaaaaaagtaaattttgggcaggcctaagttaattgaaaaaatggtgcgcttagggacagataaacttaaaaaaaagtttaaataggaaaattgaccatcctttgggatcctttgttttgaggacactttattttttgataaaggccttttttaaaatgtgtgaaagggggaaaacatttttggattggcctgaagggatttttgggttttaagtgaaatatttttaaaaatcttgggatggaaaaaattaaatatgatttttgaaaaagggtttaaaccaaaagaaggccaaaaagaactttttgtgtgctttttggggggtgaaaattnggaaggtttagggacccaaaaattttttttggcttatgggtttaactgaaaaaaaagaaccttggaagcctcccccccccccccc

SEQ ID NO: 136668 - DNA, 493 bp, Zea mays
  Clone ID: MRT4577_5611C.1
acgatgaacagccatattccattgattgaagcgagcaaagctagctgcaatagttactacgtggtacacggcgcgggtgacgagccgctgctaatttctgctcctcatcaccacagccaaccattgattaatttccctgaccatctaactaattaagcgtccccgctgaaagtaaaagcggccagagcgcccccggccaccatcttcggtggccggcgacgacgcagcacatgcgccttagcttgctagtcgcaacaaagcctctatcggccttgccgcgcgctctcgagcgagctgcttcaaaacagagcccctcctccggcggcgacgccggctgcacagcgcacaggcgaccggcccgttagaactgcttgccagtgtaggtctggccgtagctccatccagccggcgcggcgttctcggacgtgagggtggcggccgtcgctgcccgtgacctggaacgacagcgcctggccgtccagcagcgcgccgt

SEQ ID NO: 136669 - DNA, 790 bp, Zea mays
  Clone ID: MRT4577_56120C.1
cccacgcgtccgcttttccaactttttaccagtcattttcctggagtccggcccgggaactgacccacgtcgtagcggcgtggaacgcttccacacaaaggcaagggggagagagcgatggctgtgtctcgtgaggcagcggtggcgaagtgctaaggcggcgggccggcggcagcagcagcaggctcacaacaacggcggcctagatccctgcaaggcacacagcaaggttgatttccctagattgctcacccgcgctagaaattggagaacaggctaccactgtcctaggatctgataccctctcatttagttagcaatgaatgtggaattaaagggccatcttagaaagtgaagagatgagaaagcgaacgagaaattttcattgcctgagattctgtgctatataggtgagtattagataatattaggcacattttcttttggtagtatcttacttgatgttggccgttggcattacatcgtggtgttgctttaagctagttagcaactcaggtggtgttggtgtcttgagactagaagggaaaacttgactgattgtcatgttgcattgttaggtttgatagcaatgtttgtgaaagtcagagttgttgttgtagcatagtattgtgcaggttgtggtgtttggctcattggtacttcagtaggcttagactgaaggacagtgtctaattgtaataataagtttgtacatgtgccttgtgtgttgtacataagttatatatgttttaatttattgcacaaaaaaaaaaaaaaaaaccccccccac

SEQ ID NO: 136670 - DNA, 245 bp, Zea mays
  Clone ID: MRT4577_56121C.1
accaagcgatacgccttcatgcatgaagaccaaactaggcatatgtgtgccttcgaaatcctatgcttctagcgcgaactacaaggccacggctacctaacctcccgtgaaggacttactcacgacaatgtacgagggcaacattcccacagtgagcgtacaatgggtcttctaaaacctagtcatttcttttataggcaacttaaccatatcatacctaacataggactcttggcttctttacc

SEQ ID NO: 136671 - DNA, 897 bp, Zea mays
  Clone ID: MRT4577_56122C.1
ttgggaccctcgaggccggccgggatatatatctgactgcgtttgaaaagggcgagagagggggaggaggctaggctaactaggagggtgaacaacgcaaagtggaatctttaggacaaagccaaagccaaaaaaaaacctacctcattgtcagcaacatggtcctgtgaggctgtgacctaaaatctacctcattatcatgcagcagaggctgccggagatgcagcagctggtgcggtcactcgccgtggacaacgagaggctccgcgaggagatgcgggatctacagggagcttgcgaggcgctgtccaaggaaaacgacgagcttgagacaaggttaggccaatcgagccgtcagagcgaggtcgcttcgaaggagcagagaggaaagggtctgcttgatccgcggcagcccgcacgggacagcttcgcgctacctgatctcaacctcccaccacaggactctgccgatgtctcaacagtttcattgatcgctccagatcgtttgcagctttgttaaccgaacaacaagtgtacagagaggaagcagggtagcagtctatgcatccgttcttttttatttgtcgcagtttagtttaaaaataaactagcggacggcaaattttcgagaactgtagtatttgataagttgttactagatcacagagttttatttcgactatagtcgtaagtgataagccacatctgtagctaaagggagctctaattttaactcacccgacattaattgttttcagatccagctgatcgccacactgtagtgtagtgggtttaaatggattttattcatgttatttcgcccgattaggcgaagaaatgttacatgtgaagatctgaaattatgagaaataaaaccgttatttctgaatggttttt

SEQ ID NO: 136672 - DNA, 2133 bp, Zea mays
  unsure (1)..(2133): unsure at all n locations
  Clone ID: MRT4577_56123C.1
gannnnnaaatccagcaggagctcagactttccgtgatgcgccccatccaggatgtgatagtcgctgtgggctcactgcaggatgtccgtaacactttgaaggatcattttacatacccaaccctccttggaaatcaggttgatcctgaacaggagaaattacctatggactttcctttctacccgacatatgctactttgtccacccaggaacttaagcatgctgttaggcggcaccacactcagtccttttgagtatagagtgcactgagaagaggcagagaacaagtgttggtataatatctccttatactgctcaagtgattgcattgagaagcatgactttctatctgttaagagtaaaatctattgatggatttcatggtggtgaggaggacattattttgatttcaacagtttggtccaataaagatgggaaagtaggctctctgattctgagagaatcaacgtggctttcacaagagccaagtatcttgccctagactccctagtatagtgaagtcacatttaaaacactcttccactgcatttttagttcagtaattgctatatttctgccataatagttcagtagtgcctttggattcttggaaatggaaccactttactggctagcaattcaatatgggctgatttagtctgtgtcgttagcactatcttcttgaatatgacaagtggaagtgtgtttttcttcttctaaaagatagaatgcagatgcattttagccatgaatcagttgttatttctgccatattagatagcacactgaatgcatgatagtctttgccgagtgtttttgacactcggcaaagaacacgattccggtagtgatagaataacacaacatcgtgttgttgcctatttctactttgatatgtttaccgacaattaagtcaggcttctgaaccggaatgcttagttagctatacatgttctgcatgttgtcaacaagactcgctagtggtttgattgtaatacccccatagaccatagtatgttgtcaacaagagccgctagtggcttatctctagctgttcgtcgtcgaaggacttaggtgctgtttggttgacgaaatgtaatgaaaatggtaatggtaacgattgacactcgaataccggcgctaacaaatttgaataaggatgtattcatttgtagtatgatattgattacggttgaactaaaataaacataatctaatgttattggttacccattgcattaccaatatatgaaccaaacggcatcttagcttgtttagtggctgctattaaaaagaccaaagtatatccgggtgcggtccaaacaagccatcgttgtttgtgttgcctgctaggagtattaaaaagggcgcaaattaaatagtgctcaataatacagcaagcacatcaatcagtggactccattactacttgcattggtccagtccagctatggccgtacgtacgagatatcgcgtcatcattttcatgggcgtgcactcctctcctatcaactaaccgttccttgtatataatcattacatggcgacgacagacaacacacgctccatatatctcatctgatagaagatggaggatgcttaaccatgcgccatgacgcgatggatgttgctgtctcgggaaaagctgtttttgactgagaatatcttggagatttttggaggcagacgttttatttatggagatggctattatctatggaggaggtcagaaattcatctctcctaaaattgattcacgggattgaagatgaactcgagcaattaataatcttggtcatacgtaccatttctcgtacggcgggcggattaagagtgcaagtcagccagacccggctggcgtaagtcaactcggaggctagagagccgatcgagctttgagttggagtttagactgtctctagcagcgtcctctatatacatcctctatatccgtcctttacagtcttctctaaaagatttcatcttctatatctactttctctccaacgacgtcctctaaatcacgtcctctatatgtaaatatctatattaaagacatttttaatttttaaatttttgtacatacgtatttgttatactgtcaaatgtattgcacatattttagttttatt

SEQ ID NO: 136673 - DNA, 356 bp, Zea mays
  Clone ID: MRT4577_56124C.1
acctgacctaagagctttgtgctccgacataaacacacagtgcgaacacagcggtcagagcatcatctagatcggcaaacggcatccatactgcacctatgccacgacaaataccagctgctgagagcatccctgcatggaatgaatactggcgtcctactaatacaaccagtgttccatctctatcagatgattctagtgcacaaactgcgcatcactcaatacaccctttagactgcaagactcatacaaagcaatttacaccacttgactttgatttgagcacccaagtcaagcagacatcatcagtttctcatgctacagcagctacgatgccatctagtcaaccacaacca

SEQ ID NO: 136674 - DNA, 220 bp, Zea mays
  unsure (1)..(220): unsure at all n locations
  Clone ID: MRT4577_56125C.1
ccgcgtcgtcgctgatcctcccctccacccgcgagtccacgtgcgctgcgctcacaatttcacagaacatacgagcatgctagaagcggatgctcttgctggaactggctgcngagggtgcagcatgatgtacccgacatggtgagcagatgaccaccaccacccaggctctcatcatgggtgtcgcaccatccaaggcgcacgccagagtgcgggtcga

SEQ ID NO: 136675 - DNA, 167 bp, Zea mays
  unsure (1)..(167): unsure at all n locations
  Clone ID: MRT4577_56126C.1
gaattcggnnctcgagggcaatattagagctgaacacgcagccacgaacacaagacgcagggtcagtacaagcagccacacacacggcatactgcgaaccaaccaaacagtcattaccaagggctccgagtgggccttcttagagcatgtaccattacccccccctt

SEQ ID NO: 136676 - DNA, 495 bp, Zea mays
  Clone ID: MRT4577_56127C.1
gtccgagcaccaagagatcgacggcctgtgacaacaagctcattttcctttttccttgccaagaaatacaaatggggcgccggcaggcaggccgtcgaacgcagtactgccaccgcctccatggactgacgcgccttcgtctacgccgatgaactcgtgaagaccgcaaaaactatcgcatgcgcggggcggtgcatcctggacatggacgatgccaacacgacatgctgaaagcggctggcgaacatatgtctggataacacagatgccaaccgggctgcgtaccacacgctgctgggcactgtgtctgacctgggccataacatatacggcgccaacctctataaggagacgctgtaccaggactgcgaatactgccggaagatcgtgggcatactgccggagcatggcatcgcgccggggatcaaggtggacaagggcctggtcccgcttgtcgggtacaacaactagccttggcgccagtgccaggacaga

SEQ ID NO: 136677 - DNA, 123 bp, Zea mays
  Clone ID: MRT4577_56128C.1
cctattccattaggaatgacataaagcatcttgagcgaagctgattctcttcaatcacattgcccgctttcacctaacattcacattgttccgctcaaccctatcttttgtgcttgcgttttg

SEQ ID NO: 136678 - DNA, 287 bp, Zea mays
  Clone ID: MRT4577_56129C.1
ctctcgggctagctcacactcctttgtcctctcaaacgaacgaacaaaaagaggccgcttccccacccagtcacctcgacctcagcccctctcccccctccctatctcgactccgatgccgccgccgctcctcgaggcgcgcgactacatgggcgccggcgccaccccgttgtcctgctcctccagcggcgagggtacggggccgcaactccagctgggtgtcggggtggcaccggccgaaggacatcgacatgcggatccgcgtccgcggcggcgggaagacgtcg

SEQ ID NO: 136679 - DNA, 861 bp, Zea mays
  Clone ID: MRT4577_5612C.1
gagtccaacaagaggcagttgcctagttgcttcctccagtagcccagtctagcactctctaaccatttgcggcggctgccgcaacaggctcaacgctaacgcgcacacacaatccattgccgcctcccacatctcactctcgttctgagcttccggccatggcggtgacctccggagcccccaacgacaacggctggtgatgcttctcctcctcctcctcctcctttgtccataactgttttttgtagttgcacatcagtgcacttagatctaactcccaggagtattggtactgactactgacccatcaaaccgtcccgaagggacgttggcgccgctgcgactgacgatgagcatcgcgtggatctggaagtcaagcacaaggacaccggcactagggactcgccagcaccgatagcggcagctgcgcctccgtctgatctgcttccactacctgcgcctccgtcccaatcccgagtggctggaaagcttggcccctcagatccaaagcacctcatctatgcgggttccaaatcaaagcatattaaagctgcacctgctgcaccaggcaagaatcgccggccacctttgtctccaccagcacctgctgtcaatcgtggtcgtggatctgtgcgcacacctttggggtaagaatatactttatcttattgcccattaaacaatcattcatcacatatgtgctagcagctggtaggatttcattagcttattgtgctaataagctattagtattttgctagtttattgcaaaagtggttgctattgacatgtaatgaacaagtcaagtacagtagcaattgacatgaaccttttggctctcatgaacaaattgatatggac

SEQ ID NO: 136680 - DNA, 146 bp, Zea mays
  Clone ID: MRT4577_56130C.1
ccgtccaaactgcccgaaccttgcctgctgcctgcctgcctgccactgagggttcccagcaccatgggggcctggatcttctttctcctttgcctggccgggagggccttggcagcccctcaacaggaagccttgcctgatgagac

SEQ ID NO: 136681 - DNA, 408 bp, Zea mays
  Clone ID: MRT4577_56131C.1
taagacgaactgtgtaccgggccgccccctctacgcggccgctatatttttctctagcctttctttctctccctctctcgggggaactgggattttgctcgaacgcctatcgggtggttaaacttctaaagaatgcaaaggcccgcctacaaacagtatacggcacaccgtaatgctagattcattgacactagaaaggactcttctgaattttcccatcttacggttacggaacaagattttagaggctatgacaaaataacgccgctttccttttacctgctgcttgaagcatgaacgtcttttgactccatagacgcctgtgacagttttttctggccaggatctagcaggcgaacttacagctgttgctttgctctcaccagctctcctgtcggtacggtctta

SEQ ID NO: 136682 - DNA, 323 bp, Zea mays
  Clone ID: MRT4577_56132C.1
gaggtgggcgctatcggtctctcgcctgcgtctatccttggacggggtttaccgaccgatttgtgctcgattcccaaacaattctgcgtagatgacggcgcactcgtggtgcgaccgggtttgtttttgatggacgctttacgctgttaggggggggggccgtcccaccgcatgggcagctgactagtgtttattcctttttcggttactttgggctgtggtttgcggtgcgcgtcgcacgtctcctcgctgcactcctgtatcgcctctccccttgggaagcacagcacgtgggctgcgtgctgttgcatctctctcgccct

SEQ ID NO: 136683 - DNA, 656 bp, Zea mays
  Clone ID: MRT4577_56133C.1
gccggccgggccgggaaaatcgatctcgctccgacatctagatcttgacgtgtgtgtgtggctgccacagcgactagaatgcccccccactcctccgagccaccatccctgctctcctccgacgggtcctctgatgagttcaccacggtggcgcatacctgccgaccgagcgcaagcagatggataccgtcccctatctatcagattcctatgacgccgacgacagccgtcgcctcctcatgggtgcagatggtgcacatccgcaagcacaagcgcgaggaaagtctccacaataagcgccgtgatgccatacctccctccgacgtcgatggggcgccgatgtatgactccagcgcgctccatctacagctccatgatttgccggagtagctgcactgcgatcactccaacgacccatccatagctagcttctttgcaccatatggccaactaagatgctttctatacagtggactcccccagtctagatggagatcagcacattggtgtcgccgcgattcatggagtcacttacacgtgacgacaatccccaattccagtgtgagggtgcctgagcactctcctacgttggatcatcgacatatgaggactcttaggcggtgtcagacagtgatgctgcgcccatctttgtcaag

SEQ ID NO: 136684 - DNA, 553 bp, Zea mays
  Clone ID: MRT4577_56134C.1
ctttttcccctttttttttgaccggggaccgcccttttttttatcgaaaaaaatccctgtttagaaaagaagcacatatgtgcatgcccctgatagattaaacagcgtttgaaaataaactcggggagaactatttctttattttttacacagttatatgggggcctccctgggggcttcaactactttggaaaaacacctgcgggcctttttttttttccttcattaccttcattcatggggctccaaatggggccaatggttggaaggccccggcccttggtgcctttaataacaactttgtgaactgcaaatactgattccctatcggggggggttatataaaaaccagctcgtgaatttattgcgtacaatagtttggtttgcctctgctccttggtttacatagggggggagcttcaaaatgttcatgcgggtatctgatgtccgcaaggggggggcatgctcctcccgacctgaaaacaccaaaattttttaatggcgaaatttgggttcgagtttctgaaaacccccggagggggccccgaaaaac

SEQ ID NO: 136685 - DNA, 384 bp, Zea mays
  Clone ID: MRT4577_56135C.1
ccccttccctggaaaatggaattttggccggctaaaaaaaatcccaccctgccccacaaggggaaattaaggggggggcaaaaccccttaaaaaaggtaaaacccctttgccccgcaaaaaaaaacccccgggggaaactgacaaacttttacattttagggggggggacccccccccaacagggaaaaattttaggtttccatttcccccagggcccaaaaaaaaacaaataaacgggggccccccccggaaaccttgtcatttccccctttataggccccataatcacggggaatctccttgttttgagggggctggaaaacacgtttataagaacccaatttattttcaaaaaaggccgggaaataaaaaagggggggaac

SEQ ID NO: 136686 - DNA, 488 bp, Zea mays
  Clone ID: MRT4577_56136C.1
aaaccttaaataattaacccctccagaaaacttttttttggtggggttttattagaggaaatctgccgtttattaccacaccaacaaatataaaaaatttatataaataaatacaccgcacccggagagggtaatatttattaaaaaccaccccgggttacaaaaaacacgggagccccaaaaaaaaaaccggaaaaaaaaaccccgtaaaaaaaacccaaccttccaataaagggccaaaaaacccccatgacaatttgctagaacaaacaaaaaaccaaaaaaggggttaataacaaaccgggcttttcctcaaaggcacaaaaaaaaacccaaaaggcaaaaaggggccccgggggcgcaacaccataaaaaaagagagggacacacaaaaccccctccgggaaaaaaccaaaccacataaacagatttcaacacacccctaaaaaaagaaattttaaccacacggaggaaaaggaccccccctc

SEQ ID NO: 136687 - DNA, 393 bp, Zea mays
  Clone ID: MRT4577_56137C.1
aagaatgccaaattgtgtttactgtaacaagccattgagaacattcaagaagagaacagattggaatgcaagaagaatgcatttgaaatgttggcaaataacgcgaccgctatgagaagaggaattaggtttcatcaacaggttcatgcttctttttttgtttcttagctaatgcagccctatcttggcgaatttctttacttaatgtatcgtttcgacgctcctgagtcactaaataatgagaatatcgttcacaaatgtagttgtgctgttgtaccacttctgcagctgtaacaacagcagccatagcgttttgggcggtaacaaccgcagccagtaattcttcttccttttttgcacgtgtagcacgacgacgcctttcccctttgactg

SEQ ID NO: 136688 - DNA, 377 bp, Zea mays
  Clone ID: MRT4577_56138C.1
gattcccctttcaaacaaacagggtatagggagaggagaggacagtagaggaaaggatagatttgcccatctcacaccctgtctacgaccaaatctgttctgcacagtgacaatctttacccttactaggtgctcatccccactatatgagtcttgatgctactactacatcttgcccatcaacttggtcaccgtcgagcacaagatctcctaccaccttttccgcaacccgttctggtcagttcccagctctgcatgatggtgacttgtacctcttctaatcacgagcaatctgcaagtacgctgctcgcaataacaagccacagctgttgaaggatggaaacctctaggaggcaccaatggtggatgtctggatc

SEQ ID NO: 136689 - DNA, 307 bp, Zea mays
  Clone ID: MRT4577_56139C.1
cccccccaaaccaccccttatgcaaacaaccccttgaatcccgttcccaaccccccccaaccgggcttgggggggttggaatttttttttacccccccccccctggagcccccaagggggggggcccacccccaataaacccccccccggggtccccccccctcgctgggaaaaacccaaacttaacccgcccccaaagcccggtcctttgccggggtgtttgtcccccctcaaagaaggggccggcccccttccctttttaattacccccaaccccgggccgaatcacaaacttggcgcggaattt

SEQ ID NO: 136690 - DNA, 225 bp, Zea mays
  Clone ID: MRT4577_5613C.1
tttttctcgtacgaccacgcgtgcggccacgcgtgcggaatgtggagagagagagcgagaatatagagagaagagagagagatagagaggagtgggagacccgcgagaggctgacgtgtatggaccgtgtactcagctactgcgaaagatggataaggggatggcctgtatcggaccgatcaggcaggactgggagcctgacgttgtgtggaagaaggcacccac

SEQ ID NO: 136691 - DNA, 349 bp, Zea mays
  Clone ID: MRT4577_56140C.1
cgcctctctctatctactcgccggcgttgcccctgcttccatggctagccgcgcccctgctcatcttccccacgtgcgcctgctccccatggccggctgccagcccttgttcctccatcggactgcgcttcggtccctcccatggcgctcggtgcccagcctccaacgcgcacccggccagagctcttgtgcgctgcggctttccttcccccaagctccctggcacgctcgcctatccgtgcttgcccagtctacgcgccgtcccatcctccgcttgaccggccatggccaccttttcgggtgttcatccctttctagcttaccatggagccttgctatacttgcccca

SEQ ID NO: 136692 - DNA, 848 bp, Zea mays
  Clone ID: MRT4577_56141C.1
gtcaactcagttcacaaacgccgcgggccattgccatgccgcctccgctctcattccgcgtcgccgtcatcggcgcgggagccgcggggctggccgccgcgcgcgagctgcggcgcgagggccacgtgcccgtcgtgttcgagcgcgcccacgcagttggtggcacctggctgtacgaccacgacgaccgccaccactccagcagcctgtacgcgtccctgcgcaccaacctgccacgcgaggtaatgggcttcctcgacttccccttcgccgctgtcccggactccgccgacgcgcgcaggtttcctcggcaccgtaccaggaggtgctgcgctacatccaggccttcgcgcgccgattccaccttgacggcctcatccgcctccgcacggaggtgctcgccgtcagcaaggacaacgacgaggggagcagcggcggctggagggtgaggtggcgccggaacgcagccggagacgagtccgagcaggagcaggagggagggtgttcgatgccgtcgtggtctgcaacggacactacacggagccgagaaccgccgccgccgacatccccggcctagacgcctggccgccgggcaagcagatgcacagccacagctaccgcgtgccggccccgttcgcggaccaggtggtggtcataatcggcgccagcaacagcggggccgacatatccagggaaatcgccggcgtggccagggaggtgcacatggccgacagatcggcccccaccgccacctgccacacgctccccggttaccgcaacctctggctccgctccatggtggagcgcgccgaccaggacggcaccaccgtcgtgttccgagacggcag

SEQ ID NO: 136693 - DNA, 412 bp, Zea mays
  unsure (1)..(412): unsure at all n locations
  Clone ID: MRT4577_56142C.1
gccggccggngtacggacatccggcatcaatactaaccaaattctccccagcaaaagcccggtccttctcagtctccctcgtctccctcagatctaagccaccgtcccttcccccagctccggcgatcaccggagtgcctccgccttggggcatgatggacctcctcatcgcgcagatcaccactgacctccgacgccgagctcttcatgaagtttggcgaggtgatctcgcggagcacggaatagtccaatagatggatcattttgtgttacagtttacaataggtgtctgccgccctgtgatgtgatgtgactcgctgtaaatatcctgctgccttctcgttgggactccactaggcactagtagctatttttctccgttatgcaaaaaaaaaaaaaaaaaaggccccta

SEQ ID NO: 136694 - DNA, 494 bp, Zea mays
  Clone ID: MRT4577_56143C.1
atatattcctacgccaccgccctcattagcgcaatactccgacctgagctccacgcgactccatcaccacatgtccacaacgatctagaacctaccaacctgcagatgagacgaagaggagctagggaaggaatatggcctgtagccgcagcgcacgatagtcggtcgggtgtaccaacggacttctctgaggatactcatgcggcgctgcgacgcccgcggaacaacctgctgccactcgaagaccacctgatgctgctgcaccacctccatgacccccattacaatcagagctaggactgcctctgacaataccccgactccccctggatgccccgctcggaattctctgaccctatcgtcgctgagaatatgttacttccggcagcacctagaaacctcgcacatcctgagcactacaggtacccagaaggatatcgtgaagcaatgtatgagcttcgccgaatgctgcatgaggatgactcacgcgatgc

SEQ ID NO: 136695 - DNA, 305 bp, Zea mays
  Clone ID: MRT4577_56144C.1
gctaatgcagtgcatagtgcgaaattaatatacaatgttctacacttggattctgaataatcatgaatccacggagtcacagacaggaatgatcgtcagtagtcaaacacttcagggttattgacagtgtgatgcctgtgcacctcatgaaaggtagtagcgccatccttgtgatgatggtgatgccttttgtggatgtccttttcaagcacctcgccttcgtggttcaccttcacttcctcttcctattcatcgaacacttgctgctttgtagggagtggggaaggctagaggatctgatccac

SEQ ID NO: 136696 - DNA, 573 bp, Zea mays
  Clone ID: MRT4577_56145C.1
ctcgagttttttttttctttttttttttttttttttttttttttttttttttttttttttttttttttttttttttttttttggaaaaattggccacaaatttttttttttaaaaatttaaacgggcccggtttggacccagaaaaacccagaaaaaaattggttttccccccaaccccgaacgggggttggggggtttttggttacaagcccatggaaaaaaaaaaaccccatttgcttttttgtttggggggggcggtcatttggaccaaggaccttgggtaaaaacccggaaaaggggggcccccccaaccaaaaaaagggccgaaaaaccccggggggtttcaggaccggacccccccgggggtggactaaaggacccagggggggggggggctccccacccctaaaccatgacaacgggtccgggaaaggaaaagggaattccctttagggtttttccttggggccggggcccccccaggcccccaaaaaggggggcctgggtaaaccccagggggtaaatagaaaaggttccccccggggtccagttaaacatagggcttgccgttt

SEQ ID NO: 136697 - DNA, 388 bp, Zea mays
  Clone ID: MRT4577_56146C.1
gggggcgaaaagctatcgacccggtttactattttaaactttactttatgaaccacactggaaaagggttttgattactaaaaaaaagggggtttatttcactcgacccaaaaacgaccctactaactttgcaaacaggcccaaatgcgatgcggtatttacccccaaatcgagcacctggaatcctgggaatacacaaaaacacaggtggatgcaaaggttacaactacccgaggatctggccccacccaacgcaaggggttcaatcgtaggcggggcttaaaaaagccttgaccaccttggcggaaaggaactggaggacccccgaattgttggcccgccccacccaacgcggggacttgaactgggttacgggggcccccaggga

SEQ ID NO: 136698 - DNA, 802 bp, Zea mays
  unsure (1)..(802): unsure at all n locations
  Clone ID: MRT4577_56147C.1
ccgcgagtcccatagggttatttttctgcagtatttgtcagcaaccgatcctttggttatggctcgtgtcctacaggatgtgttggatacctttacaccaaccattccactaagaataacatacaacaatagtcaagttctggcaggtgctgagctaaagccatctgcggttataagtaaaccacgagtcgatatcggtggcaatgacatgaggactttctacaccctggtactgattgacccggacgccccaagtccaagccatccatcactaagggagtacttgcactggatggtgacagatattcctgaaacaactagtgtcaacttcggtatgaatgcatatagttatctgtcattccgttgcgtttctgctgaatactgtggagcttaggctgtagtctcttcttgcttctcggacttgttgaccactgaattggtgcagataatgatgcaatcaatacatgaaatcagcaaccataaactgaatgctagaccaacttgttaggtgaatgcaatatcccagcttagcgcttactgaaagccactaacttagtagcataactaataaagcaatcaggtagaactcagtttcaatctagaccattgccggagtctggatatattggtattanatacaaacaagtatttaatagtgtaaatgaataggtatacgtatgattcacaaggcccatgtttgtcccttaaattggntggcaacatcagcaaaattaggttcatttacagtggtcatatttaaagtatattctagtagtacatttttagnatatataattttttc

SEQ ID NO: 136699 - DNA, 273 bp, Zea mays
  Clone ID: MRT4577_56148C.1
ggacggcaattcaggctttggagttttatctgctctggacgttgatgcacgtaagctccaaaattaggacaagggttttacactaatactagaccgacccaaacttgttccatttaaaacaagcaacacattaatcactggggcttgctgcggctttaatccgactgcaactggagtttcaataggattttggatttatagattgcagctgcagcagtccaaacacctgaagccagccagccgaaaaatatagggggctccttttccgctttg

SEQ ID NO: 136700 - DNA, 777 bp, Zea mays
  unsure (1)..(777): unsure at all n locations
  Clone ID: MRT4577_56149C.1
actccatagggcgattgggatcctcgaggccggccggggcgcccagggttccgagcttgaggatggacaggtgttgaacaacaacggcgtcaccaacgctactaccaacggcgtggagaatggtgatgccaagtccactcgcgtcggcaagttcgtgccaggtggagttggtggtgttcagaagaagggtaacttcttctccaagtggctcaagccctggatctacgccgattacgccactatgcgccagcttgtgccccacgagagcaccatgggactcgactacactgagcaggttgagcgggacgcttacttcccaccctcaatcacgagcgagactcccatcttgtggattcccgccgaccctgctggtatctcaaagcaggaggtgttgcacacaagcaaggtgatccccatctcagacgagggttgcacactgaacgacaagaacaacatcgagtgggacacagagggtgcacgacctcctatcttgaccgagaagatttactactaaaggagatgattttgtctgtgtgatacccaaacacaagccggctatcaggctgtgtagttttgaaaaggatgcaagaggtggacggagcttggaaaaatgatggtggaatggatggggatgtgttattagatcgtgacgagacccgaaataacaactggggcgtctttgtgcggttgtaagacctaatagttatatgccaatgaatcctaatgtagtatcanaaaaaaaaaaaaaaacaaaaaaaaaaaaaaaaacccgcggcc

SEQ ID NO: 136701 - DNA, 1848 bp, Zea mays
  Clone ID: MRT4577_5614C.1
cattgggtacctcgaagccggccggggtccaccatttgtggcggctgccgcaacaggctcaacgctcacgcgcacacacaatccatagccgcctcccacatctcactctcgttccgagcttccggccatggcggtgacctccggcgcccccaacgacaacggccggtgatgcttctcctcctcctcctcctcctttgtccataactgtttttttgcagttgcgcatcagtgcacttagatctaactcccagaagtaccggtactgagtactgacccatcgagccgtcccgaagggacgctggcgccgctgcgactgacgatgagcaccgcgtggatctggaagttaggcacaaggacgccggcactagggactcgccagcaccgatagcggcagctgcgcctgcgtcccaatcccgagtggctggaaagcttggcccctcagatccaaagcacctcatctatgcgggatccaaattaaagcatattaaagctgcacctgctgcaccagacaagaatcgccgaccacctttgtctccaccagcacctgccgtcaatcgtggtcgtggatctgtgcgcacacctttgggattaaaaaaatgtctaccgaaagtggcagtcaatccccattatctcaagcatcacaagcaccgatgtctccatctcatgaacctgaatcgtctcgtcctgagtcagataatgactcgatgccaatttaaatagatgacaatgacaacattgaagtagaagaggaagaatacgacgctgaagctggttctaagagaaagctcacctcaactgtttggaaagagttcaagagagtgaagttcaatggcacagtccgggcaaagtgcaactattgcttcaagcaactttctgcgtcaagtaataatgggacaaaacatcttcatgttcatttaaaaaattgtgtgcaaaggaagatataagttgaaaggggagacattggcacaaacgtcttagagacttagtaaatcggaattatgttttatgataagagatagtcctaattatgagaagatgacgccagaagtagtacttggtagatttatccgtcatgaaatgatggaaaatgaagggcttcttgaagctgaacttggaagatttgtgatgcttgctgatgagtcagctgaaatggtggaaggtagctggaactcgttttcctattttaagaaggattgcaagagacatatatgttatccctgttacaactgttgcttcagaagctgctttcagcactagtggtagagtacttagtgagcatcgcagtaggcttacttcaaagatgttggaggctctcatgtgctctcaagattggcttaggaacaaatacaaagttgatgagaaaactaaacaacctgccaccttttggtcctgtctccaagacatgcaagagggcctccaggaacttgcactttgacattttcatttcaaggatttaggtggcgttaatcttttggctgttgacatgtagtgaacaagtcaagtacaagtagcaattgacaagatcacaagaaccttttggctctcatgaacacttgatatggatcttttggttctcatgtttttactcaatggtgaacttgtaatgaacttgtaacagatgtgcttttgggagcggtttgcacatctgttgatgcgcacctatgttgtaagcacattgtatgtgttaatttggaaatttggatgtttaatgtggtgaactagtggcgccatgctaggggtggtggacactaactggatattaatctagctgtgaacatctgatgtctgatgtgatcaatggtgttatgatttgtgaaacacttaacattgaccacaaaaaaaaaaaaa

SEQ ID NO: 136702 - DNA, 527 bp, Zea mays
  Clone ID: MRT4577_56150C.1
aattcggcacgaggggaagctctctccccggcgacaggggacgccgacggagacggagacggagaccgagacggagatggcgccggccccaccccagatgccgacagacgcactacctggcattatattattccgaaccaccacgaccttcccgacgagccgcgggggcccacacttgatcaccgactgcccgacgtggccaccacaccttacctgctcgctcaactgcctcgctcccgtgctatctgcgaacatacactcgttcgttctgctgctactcctgcttccgccgtacgacaccggcgggtagctggtctgttgtccgcgtccgtccactgctatcgcacgccagacagggaggacgctcgatccgatcgactaatgacccctccccgctctccggccacgtcgacggcagagaggtcgcgctgggcctacaattggctaaccatgtgcattgctcttgtgctgcgcgtccagatgcccgcaactacagcgcaggtgatggacctgagtaaccccgacct

SEQ ID NO: 136703 - DNA, 429 bp, Zea mays
  Clone ID: MRT4577_56151C.1
ggcacgctgtttttttttggtctggcttctgtttttttcgttttacgggtacatcgtgatgtgcctcatatgtacaccccagagtgaggaaccaaacggttgcttggtcgtcgggtcaacgctgcacgatttggggaccatgcagggggggggggcggggacccgctgccgttgtaagagggttcctgcgttaggcgcatcgtgctggtagaacgccatcttctgtgattgggtgtcaattgtagcacggtctcagacctgctcgctggctcggtggtactggttcttgctggtgcggatagtcaaaagggcgtagtgctcccacttggttgaattggggagactgctgggggtgcgccttggggggccggctgcgcgtccagtgttggtgttgctaatgagatgcggggttcattgcagctagttggt

SEQ ID NO: 136704 - DNA, 332 bp, Zea mays
  Clone ID: MRT4577_56152C.1
tcgcgatctagaaccggacgcgtgggcggacgcgtgggtcagagttgatctcatgaatattttgcagcaaagcatctctagcacactcgagagacattatgtaaccagaaatgtttaggtagggcttaacaaaacacttctgctcatcaacatctagatatctgttgtagtccactatatgaggctttgatgaatgatagtctgctgccagctcacagaaatgttagcaatgtcatatgcaactgggttgaagcttgaatacttttatgactactcttagttgaaaaatactttcattaaaccatttgtacaccttaagccggacgcgtggg

SEQ ID NO: 136705 - DNA, 1872 bp, Zea mays
  Clone ID: MRT4577_56153C.1
cgcgaaagtgcctggtcggcccgtgggacgagtggacattcgcccgcttcccgtccatttattaaactttcgcaagcgcaggtatctccccacagggcagcgcgtgcggaaaccctagtcgccgccgatgtcggaccctttctacccgtactaccgcggagccttcccgggcggcgacggtgcgcagccgccgccacgttactcggattttgaggtcgacctcatcgcggcccgttacgccggcaccctattgccttatccatcctctgccgacgtcggcgccttcgactcgtatgtcggcgcgagacgatccgcggaagttctctatcaccaatcttttatgggaagtcatagtactgttggccagaatgaggctttatattcatcgaatactatggctaaacgccctaggcttgaaagcagccttcctatatatccacaacgaccggggcaaaaggactgtgccttctatatgagcactggaacctgtaagtatggagagacctgcaaatttgaccatccacaacgggttccagagggtggggttccaaactggaaagaggccccgactgttgaagattcttatcctgagcgaccaggggaaccagattgtccttatttattgaatagtagatgtaagtttaaatctaaatgcaagttcaaccatccgaaggatatggtgaatgcattaggaacaggaacaaacaatgaatctctaattgctgatagcgctgtcttaccagtgaggccttctgaacccatttgtgtgttctatgcaaaaacaggcaaatgcaaatttggtgccatttgcaagttcaatcatccaaaagatattaagacatcacctttgattgcaaaggaaaccatatatacagcaacaactgatgcagcagatgccccgaccgaggcgtgtaacgcaaaggggcttcctataagacaaggtgaagtggattgctcgttttatatgaagacaggcagctgcaaatatggttctatttgtcgcttcaaccatcctgatcggccagggccagctgcggatataacttttatggttccactggttcaagctactcttccttcatcagcacccattgtccctgcagtggttgaacctttgccaatgatctatcctcaaaggccaggagaaactgtttgtgatttttacatgaagacaggatcttgcaagtattctcagaaatgcaagtttcaccaccccatcagtcgttttgcaccgcattccaaagaaaacggggatcctcaacagcctgcgacacttgctagcctgccaaggagagaggacgctgaggcttgtgccttctacatgaggtctggcatgtgcaggttcggtgcgcactgcaagttcgaccaccctcctcgcgaggaggctatttccgagctgcaggcagccggaaaggaaggaatagaagggccgagcctcgtccagcgcgaccatgatgtctaatactgtatcctgcttcagtatgtaataccatgtgaatcgcactgttagttaatgcttggtgctgtcagtcttgttgggagtctgactcgtaaagctcattatcatcggaagtgtttgtcggaggagtgctggcactaactatttatcttcagttggttgtcgtgttgccaacttgcgatgtcaaggtgcatatttcagtttttttagagtaaaaatgcactttacatcctgccgccaaacttaactatgggcctgtttatggccctgtttggtttaccttcggcggatgaatggtgtcaaaaataaaaatacacaaataattcgaaaaaaatgaaaaaaagatgcccctaagaatgtgagaaccaagttaccgtaaatctaaaaaaaaaaaaactcgagagtcttctaga

SEQ ID NO: 136706 - DNA, 1038 bp, Zea mays
  Clone ID: MRT4577_56154C.1
atggggcggcggttcaatctgaccatgtcgctcctcgccgtcgtcgtcctagtgcttctcgccgcgccgtgtgcctccgccgcgcaggtcaagacgaccgatacgcgctggagcttccagctccctttacccagcggtgtcagcggcgccgagagcctcgcgttcgacggcaagggcgaggggccctacgccggcgtctcagacggccgtgtcctcaagtggggcggcagcgccgtcggctggaccacgttcgcgcacagcgccaactacaggaagatcccgctgtgcacggcgggcgtggtgccgtcggcggagaccgagagcatgtgcggccgccccctgggcctccagttccacgccaagaccggcgacctctacatcgccgacgcctacctggggctcacgcgggtcggcccgggaggcggcgaggccgaggtgctggcgaccggtgcggacgacggcgtcccgttcaacttcgtcaacggcctcgacgtcgacgaggccaccggcgacgtctacttcacagactcgagcgcgacgtacccgaggaggttcaacacggagatcatgatgaacgcggacacgacggggcggctgctcaggtacgacgcgcgcacgaggagcgtctccgtgctcaaggccggcctgccgtacccgaacggcgtggcggtcagccccgacggcgagcaggtcgtggtcgcgcacaccgtgccgtgccaggcgttcaggtacttcctccggggcgcccggaaggggcagtacgagctgctggcggacctgccgggctacccggacaacgtgaggcgggatggcaggggtggctactgggtggcgctgaaccaggagaagcagcggctggacgcgactccggcgacgggccccgtgaagcacctcgtcggggtccgcctggacgcccacggcgtggtggtggaggagcttacggcggccaagggtgtcacgctgagcgacgtggcggagacgaaggggaagctgtggctgggctccatcgagctcgagtacgtcggactcgttgcttga

SEQ ID NO: 136707 - DNA, 347 bp, Zea mays
  Clone ID: MRT4577_56155C.1
ctcacgcgtccgaccacgcgttcgatccttgcttgcattggaggagcactattatgctttccacgacagctcataccaagcctcacatgatgctggtgccgatcccgatgcacggtcacatgacgccgaacgagcagatggggcgcgccctccgtgccaggggggtctacgccatgctcgtccacacggagctggaccactgccgactgctgtgcacaaaggatgagcatgccaccatcagtgacgacaccatggacccagacgacggcttgttcgtcgagttcataccgaacaggctatctttggaggacgaaccgagcacgcttcgtgcgtaccactaggcgatg

SEQ ID NO: 136708 - DNA, 397 bp, Zea mays
  Clone ID: MRT4577_56156C.1
cacccaccaatcccttggtttcttccaagtgggtagggtgtcaaatttttgcggggtttgacccccccgagtttttcggggaaaaaatttttggacccggaaacttggcgtttaaattcttgttttttgtgcccaaaaaaaatttccgtttcaccccggtttccgtaaaaattaaatggcccggtcaaaccccttttggcggtttttggcttgattttttttttttaaaccccccgtcccagttcctttaagttgggcgtccttgggggggagcttccttgttttaaaaaaaaaggggacccttttcctttttgggggtttggccgtgccctttgcgccggggaaccccaccccgggttgacccctttttagggagggggtttccggggggcttttt

SEQ ID NO: 136709 - DNA, 260 bp, Zea mays
  unsure (1)..(260): unsure at all n locations
  Clone ID: MRT4577_56157C.1
agtaactccaagctaggcagcacacaaccctctccacccccagcaatcctcccctttcccctccccggcggattccctcccctcccgagctcggcaatggcaaacgcatcatccggagctgggatccatgatgactgcaagctgaggtttgtggagctcaagtccaagaggatgcaccgcttcataacctacaggctggagaaccagaaggaggtcattgtggaccaaactggggagcngcgnnaggccnnacctatgag

SEQ ID NO: 136710 - DNA, 278 bp, Zea mays
  Clone ID: MRT4577_56158C.1
gagaaaccaaacggatcaaatatacaccacaaagtgctcctgtataaaaagaaggaaacgactatctatacatcaaaccttatgccatgcaaattccaccaagggtgaactatgcatagccctagctgccaaggaatcttgagctttaacaactcacacctgactagcatgtaacccatttatagggcttcgacacttatcccacaccgcatcattcacaactctacaggctcaacaccatgcctgggggcgccttatggtccaagatcgatctattg

SEQ ID NO: 136711 - DNA, 359 bp, Zea mays
  Clone ID: MRT4577_56159C.1
tcggttctggcctggccactggctttcggagggctatcctgcgatctgacgcgaggatgggaccctctataagatgggaggagcgacgaatccgatcgcttgctgtgtggtacagcctccgcaccatcctccgcgtgaagaagttcgacaaggattacaggagccacctagaagatactctgtctcagtgtaaggacaagtacctcgactacaacgtacttaagaagctgatgatgaacctggggcgacgcaagacctcgatgagctgtcctgtcactactcatgacctcgtcgacgccgacgcactagaggccgtgggctccagactacgcccacggcaacctcaaccggctcgactg

SEQ ID NO: 136712 - DNA, 465 bp, Zea mays
  Clone ID: MRT4577_56160C.1
ggggagcaattaaaccgccgtgtaattgtctcgggaggataacctggattgttattactcgcacagggcaaaaacaattcgacgcaaaaaaaaaatttaaaatccacgacttgcaagagctcgacaagacctaccggccaccatggatcgggggcaggctaggccaacccgagtgcatgttttgaagaaagaaaattaagcaaaagtacatgcttaccccagagcagcgaggtagcagcgcaataaccagaaaaaaacaacgacggggacgtacgatacgaggaccaagcaagcaaagcatgtgggacccatgccatcttatggcggggacgggggttcacttgaagaactccagggcccaagcgtaggcgtaaatgtagggggccttgaacccggaaaagccggccccctttgagaactcgaggaacttgggctagtacccgtccttgccggcggggttgtgcc

SEQ ID NO: 136713 - DNA, 325 bp, Zea mays
  Clone ID: MRT4577_56161C.1
tcccacgcgtccacccacccattttcattatgcatcaacctaaccacaattggtggcagaatattatccctgcttgcgctacttgcgctttttgcgaacacaacatatgcgttcattattacacaatgctcacttacttctagttccattattccacagttcctcccaccagttacttcaatgaccttctaacacccaactgtgcaagcctataatctacaacaagcgattgcgacgaacgtcttacaacaaccaattgtccaatttcaacaacaatccttatcacatctaacaatacaaaccatcacaactcaacatcaacaac

SEQ ID NO: 136714 - DNA, 413 bp, Zea mays
  Clone ID: MRT4577_56162C.1
tcgacgcgtgcgctattgcgtttcagtactgcacgtgtgactcgataacatctagcatgcagcgtgcttgtttttggccgaggtcatcgcctccgcaacttcgtgggcgggggggtcgcaccaccgtggttctcttactaggccgggaagtgatgaatgcagtccttgcgagggtggctacatcaattgagccggccatgactactatggacggaaaggtggttacgtagatggtaggttcggttgccacgactatggtcgaggcaccggtggcggaagcttcaacaaggtcggtggctgcgatgactactgtcgtagcggaggaactactaccgtcgtggtttcgtggaggctggtacaacaagttttgaaactatagttacttcagtgggtacaacagattgggtactatt

SEQ ID NO: 136715 - DNA, 276 bp, Zea mays
  unsure (1)..(276): unsure at all n locations
  Clone ID: MRT4577_56163C.1
tattactgacactgcgggcgcgctctatctgtcttttataggttccaatttgccctaataacaggggcattacaatcaactgttcagtcttttacaacacatgagactagagaaaaccctcggcgccacacaatttaagggcactagcagaacatnctatcttttaacagttggggggggagggaggacgtccgcactgaacgaccctaccaacagagggatggctctgaatgaaaaagggaacaggctctgtatctggttattaaacgaaattaa

SEQ ID NO: 136716 - DNA, 1359 bp, Zea mays
  Clone ID: MRT4577_56164C.1
acctcgaggccgcgagggcggctaggtcggcacgagactccactccactccaccacgcctgacccgcccactctaccttcttccctctccagtctcctcgcgccaacgaccacatcccaccgaacaccgatcaaggtaaacctgttcgctgctccgccagaagccgaggtcgagctgttcacggcagcgagcatgcaccacgatcccaaccccttcgacgagggcgccgacgagaaccccttctcgaatggaggcggaggagcgcgtggcggaggcgtcaagccgcagtacgggttccggccgacggagcccgcggggttcggcggcggcaggggcgatgcgaccaccgacatccctctggacaccatgaacgattcgaagggcaaggcgaaggagctgtctcagtgggagtcagatctcaggaggagggagtcggatatcaggaggagggaggaagctctcaagagcgctggggtgcccatggaggacaagaactggccgcctttcttcccaatcatccaccatgatattgccaatgagataccagcaaacgctcagaagttgcagtatcttgcgtttgcgagctggcttggtattgtgctttgcctcttttggaattttattgctgtcatagtctgttggatcagagggggagattctaaactatttttcctggctaccatctatggtatgcttggcatccctttgtcctacttgatgtggtatagacctctgtaccgagcaatgagaactgacagtgctttcagctttggatggtttttcctttgttacctgctccatatttgtttttgcatatttgctgccattgctcctccagttgtattccgtggaaaatcattaacgggtatactggcagcgatcgacaccttttctgatcatgcaatagttgggatcttttactttgtcggatttgccttgttttgcttggagacacttgtgagcatatgggttcttcagaaagtatacatgtacttcagagggcacaagtaggctatggaagcacttgcaatagtcaaccaactaccatctgatctgattgccatgtggttttgtatgttaggacaacgtatatttttccgtttgcattgtggagggtaagtacgactatatgtataattttcggtttgcatggtggagggtaaatacgactatattgtagcgtctctctcgactgatctgtttttaaccccaattctttgctcatatacaaattgtgctttgtatgcacttttgtttgctaccaaggctgcacattgtatgcacttctgttggtgccttaaacaaggagacaaatattttatttgacactagtaaagattatggtttattttggccctc

SEQ ID NO: 136717 - DNA, 314 bp, Zea mays
  Clone ID: MRT4577_56165C.1
gcctcaaagcgcccccggaggcaagttccgtttaagttttcagaaccaacctgggcggccacgaaggggtaacccgcggggacgctcggaccgcccaggttatggaccaaccgcctcttttcccgaaggcagttggggctcgaggttttccacccgggccgggccaacgtttttaaggcgggcctaaaggaagggctggttaagatgtccgaggggagggatcccaccggcatttttgttttaaggtacggaacccactttgggggcggcatgttaaccggattcggttcaattaacaacacctttaatttatc

SEQ ID NO: 136718 - DNA, 308 bp, Zea mays
  unsure (1)..(308): unsure at all n locations
  Clone ID: MRT4577_56166C.1
aaaanntcttaacacctttaactctttcttttntcttcccctctgtctcttacaaaactgtatatgtgtttttctacattctacactanaatcctttttatcttttttccttgcctctccccttggggggggcggcgnatnattcctcttnnacctcctcntctcaacctcatctntnaaaacaaaaatctcctcaaaataaccccctccaatcgttttgtggtgtacctcctctatccacttctctcctctcgtggctccttcccaactgcctnacttactcacccctctgtctcaatgttggccct

SEQ ID NO: 136719 - DNA, 1145 bp, Zea mays
  Clone ID: MRT4577_56167C.1
atgcgatgacgtcagcatcagacacggacgcgctgcagctgagcgagcaagaagaacaagccacgccgctgccgaccgacggccccggcgtcacggctcaggaggaccaccagcagcagcaggatctagaaggctccggaaccttcgcggtgaggccgcccttgagcgggtgcgggaggaagagcctgaagatcaccatcccactgaccaccccctccaggacgatctccgcgctgacggacatcctgtgggacgagctcgccatcagccacttctcctcctcctccaagaaatgcatcccggacgggaagcagagcgtcagcaagaccaagctccggcacgcggagaagatgatcaagcgcgccttcgtcgagctctacaaggggctgggctacctcgccacctaccggagcctgaacatgatggcattcgtgaagattctgaagaagttcgagaagatcaccgggaaggaggtcctgtccatatatctcaaggtggtcgagacctcctacttcaacagctctgatgaggcgctgaagctgatggacgaggtcgaggacatcttcgtccggcacttcgccggcgacaaccggcgcaaggccatgaagtacctgaggcccgcgcagcgcagggactcgcacgccgccaccttcttcacggggctcatggccggctgcttcgccgcgctgttcgtgggctactgcgtcatggcgcacatggcggggatgtactactactactccaccccggcgccgccgcctcgcgcccgcggtaccggcggcggctcggtatcggtgtcggtggctgtgtacatggagaccgcgtacccggtgctgagcatgttcgcgctgctgttcctgcacctgctcctctacgggtgcaacatggtggcgtggcgcaggtgccgcgtcaactacggcttcatcttcgagtcgtcgccgtcgcccgccggcggggagctcgggccccgggacgtgttcctcgtctgcgccgcgtccatggccgccgtcgccggcgtcatgttcgcgcacctcgccctcgtgctcaggtggggctaccacgcgtcgccgcacgtggaggccatccccgcgttcttgctcctggtgttcctgctgctgctgttctgcccggtcaacgtcgtgtac

SEQ ID NO: 136720 - DNA, 105 bp, Zea mays
  Clone ID: MRT4577_56168C.1
ggagaacctgcgcatgaagcttcccaagcctcccaagcctgtgagcaagatgcgcatggccaccccgctgctgatgcaggcgctgcacatgggagctctgcccca

SEQ ID NO: 136721 - DNA, 129 bp, Zea mays
  Clone ID: MRT4577_56169C.1
atcccatctgaaccctggtaggtgcctggttgagaaacatctcaggggcctaattacatatttcattttagctgcgagattcttaagcagaactcaaatgctgtcgagctgaggggcatacatcttaca

SEQ ID NO: 136722 - DNA, 448 bp, Zea mays
  Clone ID: MRT4577_5616C.1
ctgatctccgaccccgcgctccgaatgccggaacatctggcgcgcctcccctagcgtgtgaccgagatggcgctgcctaataacgggaccggtgattaccccagcttgaagctcgtcatcgtcggcgatggtggaactggtaaaactacatttgtgaagaggcatgtgactggagagtttgagaagaaatatgaaccaaccatcggtgtggaagatcatacgctggatttgaccactaactgtgggaagatcagggtgtactggtgggataccgcaaggcaagacaagtttggtggcctcagggatggatactatatccatggccagcgtgcgatcatcatgtttgatgtaacctggaggcttacttacaagaatgttcctacttgggcataggacctgtgcaggggatgtgaaaacattcccattgtgctgtgcggtgataaggttg

SEQ ID NO: 136723 - DNA, 206 bp, Zea mays
  Clone ID: MRT4577_56170C.1
attcggctcgagcggtaagagaagggcccgttttacattccaaacgattgccgcatccagactgtgccttctggctcccaaacagggactcacccagaccgatcaccacatctgtctccctcaatggatcagtgcaggcacactgttgtggatagacagaccatagccaaagggggcctcctatggtgcttgtacaagccagaatt

SEQ ID NO: 136724 - DNA, 575 bp, Zea mays
  unsure (1)..(575): unsure at all n locations
  Clone ID: MRT4577_56171C.1
ggngaaagcttcataggtgactccccagctgcaagtcacaaaggaatggaggctctaattcaattttcaagcatctcctgaggaccaggaagtgttttctcctcaagggcacttccactgatggaaacaaatggaaagaaagatgctcaggtagagagaagggatgtatctggtccccttgacatctgttggggccaaatatatactccttagtgtacaaaacagagaacctactcctttttccctattaccactgaagatagaagaagaaaaaaaagaatgctaacaaaacaataagagcatttgcccaaatctacctactgcagctgggagaagggggtcaaagcaaggatctttcacacatagaaagagagcactgaccctgatggtgatggactatttaagccctaactcagcctactttatagcataagggaccatagtgtctgtgtagaccaagggggcagctggccttacaccttattaaagaagagaagcagggtattgtcagcatcttctcactcccttctccttgataacagctaccatgacaaccctgtggtttccaagagctt

SEQ ID NO: 136725 - DNA, 177 bp, Zea mays
  Clone ID: MRT4577_56172C.1
cgagagaagacctttctacaacagaaacagagagaggacacggctggcggaggtgccgccatgggggatttctgtacgacggagtcaggtcctcggtggtcagtcgaggtgtatcgtttaggtagtgtgggagattaaggagccattgataaggagggcaccgacctcgaccctatg

SEQ ID NO: 136726 - DNA, 376 bp, Zea mays
  Clone ID: MRT4577_56173C.1
aaataaatataaataaattaacaaaaaatattaaaaaatccaaacttacatacacatgcggacaacataataacgtattctatattgtcacctacattttaatacactagccaaatattatacaactccgttacttttaaaaacccttactttacccaacttatatccctttcatcacatcccccttttaccagcttgcttaatatctataaagccctcacctatcttccttcccaacaattcctcatcctgatttactaatattgacgctccctatatcttttcattaatcccctcaatttttatagttacactcaaattgacctctacacttgccatatatcctaacgccctatcatttctctttcttcccttc

SEQ ID NO: 136727 - DNA, 1069 bp, Zea mays
  unsure (1)..(1069): unsure at all n locations
  Clone ID: MRT4577_56174C.1
ttgggtacctcgaggccggccggggtctcacatctttccctcccgtcggccagcagccttccggttcaggccccgtcgcatctctcctcgtcggccagctgcagggcacctagcgcgtggtcggcgagcgcgcgggcgggcggcagggggcgccgcggcggcgagcgcgcaggcccccactcacagacgactgggccggccttcactgctacttcggccccttcgtcgccgacgagaaccaccgcttgttcgggggaattttttctaggtgctggttggaatggcaagtacagcatgctttgtgattgtcagtaagaatgacatcccaatctatgaggcagaagttggatctgcacccaaaaaagaagatttgtcttatcaccatcagtttattctgcatgctgcattagatgttgttcaggatctagcatggacaacaaatgcaatgttcctgaagtcagttgatagattcaatgaccttgtggtgtctgtttatgtaactgctggtcataccagattcatgctgcttcatgactcgcgtagcgaggatggaataaaaagcttttttcaagaggtccatgaactttacatcaagatattcctcaacccgctttacctgcccggctctcgcatcacatcctctcatttcgataccaaggtgagggcgctcgcgaggaggtacctgtaatacgggcatatgctggggtttcatcgtaaagcaggcacgccgatttttttgtgccatcatcatctgataacacatacgtctaatttttcttggcgttggctttgttatgaccgacctatggatcattttttttttcgagaacaaaatgacttgtctaatttttcttggcgttggctttgttatgaccgacctatggatcatttttttttcgagaacaaaatgacttggcgataatgttcaaactttagaaatgagatgagatgaatggattagagacgccgcgcatacattgcccctttgctccagggttatccttgcctatattaaaaaaaaaaaaaaaaagttaaaaagcagcttnnnnnnnnnnnaaaaaaaaaaaaa

SEQ ID NO: 136728 - DNA, 282 bp, Zea mays
  Clone ID: MRT4577_56176C.1
gaaggacaggggtcgactttttatgaacaaaaacaatgggttcccaaacatggtttacattataatcagcacttgttgtcaacaaaacgtttttttccttgatccaaatccataatttgggggacacaaacgaagtttaccttacccttgcccatttaaaaaaatcgataccccccgcttggggttttttgggtatcccattgccatctcttgaattgagcccagcttgttttttggcccagcttgaaaagaatagtccgaaagcccctttcaacttttgga

SEQ ID NO: 136729 - DNA, 296 bp, Zea mays
  Clone ID: MRT4577_56177C.1
aaaaacaaaaacattttattccccaattggctccctaggggtcgggaaacaaggctcccagttccgggaaatttggggggggggggctttacagggggcccttggaaagccagttgggggtcgagattccccgggcatgggggggctaataaacgccgtttccccggtggaacacaggaggggcccccatcccagaacctttgcacatagaaatcactccgaaccgggaatccttggcggggggctttatttaattgagaaggggactgaccccccgggcccctggtgcccccaac

SEQ ID NO: 136730 - DNA, 433 bp, Zea mays
  Clone ID: MRT4577_56178C.1
cttatctaaactaaacgcgcctgcttgatgtggttactatggaactgcgataaaacatttatagtatgaatgcgaaaatagaccaagccacccttatcgagtatttttcgcaatttcgcgtattctggacaagccaaggcgtcaggaatattttatacatatgattatgccatatttgtttgaacacgtcttctgaacaacttgatgacatgcttcacaggctggaacgatgtactctgggacaataatcgtaacatacactgctctataagcttatttgccagcgaattgctgggcatattcacagtcttcatgatttgaatcctgcaagcgatgatcgtatagcatctagtattgtatgctgcctcctgtgcaatgcgagacacttccagactactacttgatatgcttgtaatatgaagttgcttttaca

SEQ ID NO: 136731 - DNA, 169 bp, Zea mays
  Clone ID: MRT4577_56179C.1
ttaactatttatatttttcagcctcacaaaagtacaatatgggggggttctactttaaatgcacaagggaaaaaatacggacaccgtaaaaacataggttggagttcaaaactacaaaacatctcgcacccttatattcatcccccacacttttgcaatacaacgccat

SEQ ID NO: 136732 - DNA, 108 bp, Zea mays
  Clone ID: MRT4577_5617C.1
cgctaaattaatccatagctcaaggacatatatgagttcgagcatcggaagtatgagtggcacaggcgagatgaacatggaaactatccacttaattctcgaatagtc

SEQ ID NO: 136733 - DNA, 272 bp, Zea mays
  Clone ID: MRT4577_56180C.1
gttcgtcaaagagcaaataggcgcggccaaaaagacaacagatccatggcactgcaaaatgaacatacgacaaagagggcgcacatagcagctagaaaaaatctcggcaaatgcacactgagactagttaccagaaagaattaaatgtgtagcgacggtgatgacccgtaccatgaagaacgacactgcatggagggccaaccgcgtgacacagcacttgatgcacggaggcaaggacaggaacatgaaactagtccaaccgcctgggaaga

SEQ ID NO: 136734 - DNA, 569 bp, Zea mays
  Clone ID: MRT4577_56181C.1
gtgcgttgcgccccgagtccagtcctcccggcggcgccgcctctgcgcgctttgggcaggaggccgacgccaccattgccggagacctcgcaccccttcggacccaagtaggagtccagtgtctttactctggagagcgatggattctccagaaattccgccctctgaccgcagagaagagcggccgccagcgtcgctgccgctgccggcggcctttctcgagttcctcggcgagaatggcctggaccccgcgctctactccaaggcggacaccatcccgcgctacatcaggttaaaaccaggcatggagtccagtgtggtgacagagatcgaaagcgagctcaagtgtgatctcatgagggtgtcgtggctgccggacttctatgcgatcccgcctgaaattcagattgctggatccaaggcttatcagcaagggaagatctatgggattgatgcagcttctggagctgccatcttagcactcgatgttcaatcaggagaccatgttcttgacctctgtgctgcaccaggtgcaaagctttgcatgcttgcagatatgcttggtagct

SEQ ID NO: 136735 - DNA, 727 bp, Zea mays
  Clone ID: MRT4577_56182C.1
tctcatagttgaagcaaatggtggtctgaatcaacagcgtctttctatctgcgatgcagttgctgtggccagcttgcttaatgcaactcttgtgatcccaatatttcatttgaatagcatttggcgcgatcctaggccttgaggtgtttggtaaactacgaggctctgcggtttggtgaaccaataagggttcttgcagacgatatggttgttcgaatgatgaaaaagagttctttggctggtgggaaatatgtctcggtgcatctccattttgaagaggatatagtggccggaaggagaaaattgaaatggaaaatgcccgtgaaaggagctggagagggaagtttcaccgacctggtcgagttatcaatcccgaggcaaacagaagggatgggaaatgcccacttactcctctagaggttggtatgatgttgtgaggcatggggtttgacagtacaaccttcctctacgttgcctccggtaaaatatacaatgctgcaaaatacatggctcccctttgccagatgttctctcttttacaaaccaaggacactcttgcattgtctgaagagcttgctgagtttgaggggtactcttctcggttagcagcattagattacaccgtctgtgttcagagcgaagtgtttgtgacgactcaaggggggaacttccctcacttattgatgggacacgggcgttacctgttaggagggaatgcaaaaacaat

SEQ ID NO: 136736 - DNA, 847 bp, Zea mays
  unsure (1)..(847): unsure at all n locations
  Clone ID: MRT4577_56183C.1
ggccgcgcctccgacggccgcctcgtgatcgactctctagggcaggcgatggggctgccgctgctgagcccgtacctgcagtccattgggtcggactaccggcacggcgccaacttcgcgacgctggcgtcgacggcgctgctgcccaacacgtcggtgttcgtcaccgggaccagccccttctccctcggcatccagctcaaccagatgaaggagttcaggaacagagtgctcgcctccaaaggaaacaacggccaactccctggcccggaaaccttgggcgacgctctgtacacaatcgacatcgggcagaacgacttcacctcgaaccttggatccctcggggtcgaaatcgtcaagcgaagcctaccttcagtcgtcagccagatctcctggacgatacaggacttgtacagcagcatcggagctcgcaacttcatggtgttcaacatggcgcccgtaggatgctacccggcattcctcgcggggcttcctcgtgacagcaaggacctggacgagttggggtgcgtgaaaagctacaacggcggggtgacgtactacaaccagctgctgaacgacagcctagccgaggtgaggaagaaggtccaggacgcgtcggtcgtgtacgtcgacaagcatgctgtgacgctcgaactgttccagcacccaaccgctcacgggctgaagcacggggctagagcttgctgcgggtacggcggtggaacctacaatttcgatcgagatgtttattgtggtgacagcaaggtagtgaatggagaagctgcgacggcnggggcttgtgcagacccgcaaaactatgtcagctgggacgggatacatgccactg

SEQ ID NO: 136737 - DNA, 482 bp, Zea mays
  Clone ID: MRT4577_56184C.1
ggccgcttttttttttttttttttccttttttttttttttttttttttttttttttttttttttttttttttttttttttttttttttttttttttttttttttggggccaccaaaacggaaacctaatggttaattttttaacaaagcacaaaaaaaccaaaactggggaattcgttacagggggggggcggataagtaaaacccaaaaagacgggggggccaaaaccaggggggaccccgggcccaggggccccggtcacatttattcccggcataaacaaacggaaaagagggccggccaccaaaggcccttggggcccccccccggtggggggggaaaaatttattttcctacaagcccacggggtctggaaaaagggggggaacagggccaccacccgggtgctggaccccccctcggtgggggcccaccaaacaagcttgaaaaaaggggccttaaaggaaatccccgccttgggg

SEQ ID NO: 136738 - DNA, 262 bp, Zea mays
  Clone ID: MRT4577_56185C.1
cttctatattttttcttggggggaacaccgactaaaccacgattaaaaccattatgaatgttctttcattctttcacaaaaaagccctactcgcctacaaaccaaaagaatctctgcctgtcacggtccgccttaacaaaccaccaggccaaattgtgttccagcccctgcatctagatgttccctgcccctacccccagtgctggggaaggttagtaaatcggcccgggggaaattaattcacggcctgccctctggtaac

SEQ ID NO: 136739 - DNA, 316 bp, Zea mays
  Clone ID: MRT4577_56186C.1
ctagtacgacaccgcgcacggacaatggaagcacagagagatgaccgtgaaggactacaacacgcttctctttggggagaagccgaccaccgattttggcataaagaacccccaagagatcccgcggcgtgaggatggagctgaatatgtcctggagtgcaccggtgtcttcactgacaaagacattgctggcgcacatcggaaggatggcgccaagaacgttgatatctatgccgcaagcaaagatgcacccatgtttgatgatggtgtcaccgacgacaactgcacctgcgatgtttacattgagcacaaggct

SEQ ID NO: 136740 - DNA, 192 bp, Zea mays
  unsure (1)..(192): unsure at all n locations
  Clone ID: MRT4577_56187C.1
accgtcttccacnaccattagaaaacgctctgttaaccatacanaaacaactcggccaacgtatcatttatctattcgctgacatcctcctaaaacctttcgcaaccacatcaatagaacaaattcatcttccaactctcgcaaattacaaacctgtatcatgtacacttcatcatcacagtgtaaacaaaa

SEQ ID NO: 136741 - DNA, 391 bp, Zea mays
  unsure (1)..(391): unsure at all n locations
  Clone ID: MRT4577_56188C.1
gttggtagtgtggaagtttttttggggggatgttcaggtgggacgggggggggatactaataggattttttttaaatatcccagaaatttttgaatgaccttttaacagggcaataggtgcaccccataaaccaaccttagaattaccaccagaacctgggggtgagtttcatgttttacaaggaaaaagggaatttgggggggtaggataaagatccggcagggaatccaggggcggttcccgtggggcaacaaaggggccctttagggaggtgatagaaaagggggattaccctagggnaaagttggtcccagtggcagnatccttacggcccgcaagcgcaaacagcatacaccgggggggcttaggggggaaaaaagggggagaaaa

SEQ ID NO: 136742 - DNA, 648 bp, Zea mays
  unsure (1)..(648): unsure at all n locations
  Clone ID: MRT4577_56189C.1
gcctcccagctatggtcagtggggtttattcggatgacaataaccttcagcttgaggccaccacacagtttcgcaagttgctatctatagagaggagccctcccnattgaagaagttatcaaatcaggtgtagttccaagatttgtgcagttgctcacaagagaggatttgccccagctgcagttcgaagcagcatgggctctcacaaatattgcttctggcacttcagaaaatacaaaggttgttattgatcatggggctgttcctatatttgtgaagcttcttgggtctggtagtgatgatgttcgtgagcaggctgtgtgggctttgggcaatgttgctggcgattctccgaagtgtcgtgaccttgttctcgccaatggtgcattgatgcctctgctagcccagttgaatgagcatgcgaagctctccatgttgaggaatgccacctggactctgtccaacttttgcaggggaaagccacagccatcatttgatcagactaagcctgctctgccagcacttgcacgacttatccattccaacgatgaggaagttctcactgatgcttgctgggctttgtcatacttatctgacggcttgtggagctccttctccatccatcaccgtcggtgcttatacctgctc

SEQ ID NO: 136743 - DNA, 235 bp, Zea mays
  unsure (1)..(235): unsure at all n locations
  Clone ID: MRT4577_5618C.1
ccacacccagggaaggcgacacggccaccaaccgcacgcggaggggggggcccngcaagacaacaccaaggacaaggccgcacccgcggaagacacacaacaaccagcccacgaagcaaaagagcgccccccaggacaggcaccagcaagaacgccaaggccggggggcagggacaacacccgagccgaacgcaagccagcgggccaggggagaaccccgagcgccnaccgagca

SEQ ID NO: 136744 - DNA, 979 bp, Zea mays
  Clone ID: MRT4577_56190C.1
ccggccgggaataacagtcccacgcgtccgggcctcggcccacgcggcggggaacgcgtccggcgtcgcccgcgaagggacgaggccagcgtcggctccccgtctccctcccttgagtcccttcctccagatctcggcgcgagttcaccctgcagattgactctacaatacatcggcgaggaagaagagctgcggttcggaagagtaaactctacccgccgtctcgcgccggttgaccggcgcgaaggcgagatccgggcggagatccagggcgcggcgccggccatggcgagctccggactcgcctaccccgaccgcttctacgccgccgcggcctacgctgggttcggagtcggcgaggccacctcctccgcagctatctcccgcttccagaacgacgtcgccctcctcctctacggcttgcaccagcaggccactgttgggccatgcaatgtgcccaagccaagagcgtggaaccccgtggagcagagcaaatggacgagctggcatgggcttggaagcatgccttcagcggaggcgatgcgtctttttgtcaaaatcttagaggaagaagatcctggatggtactctagggcccctgagttcaaccctgagcctgttgtagatattcagatgcataaaccaaaagacgagccacatagtgtaccgggttcaacaaatggaacatcaattccagaaccaaacatttctgaaaatagaagttctgcggaggctcaggacaaagacgttattctggaaggccttagtactgttagttctcatgatcagtggactccattatctgtcagtggtcttcgtccgaagcctcgttatgagcatggagcaactgtgatgcaaaataagatgtatatatttggtgaaaaccataatggacgttaccttagtgaccttcaggctttggatctgaagagtttgacctggtccaggttgatgccaattgcaagcagaacctgctgat

SEQ ID NO: 136745 - DNA, 140 bp, Zea mays
  Clone ID: MRT4577_56191C.1
ggcgcgaggggcgcgctgccccagccggcgcggattcgcttcgcgtctatagccttggagacccgatcggtgagctagcgccaagacgatatcggcggcgatgatgatggacgcgggaggatcgtaagtccttcagggca

SEQ ID NO: 136746 - DNA, 1200 bp, Zea mays
  Clone ID: MRT4577_56192C.1
gcttgaagtagggaattggatctctattatcaccagaacgtcatgctgccacatatcacagcacagacctggattatggaagtttttgaccgggttagtgtatacaatgttacaagcagtaattccacagatgggaacttctggtgtatttacagccagtctccagtatcactttcaaccttcttcccttccctcctacagaatgacaatgctagaaatactacttttcatcccttcatatctcaaccgtcttaggaacgatgtttcggcaaatcttcgaggtcagattcctaaactactgaaactaatacaccaaagatccaccggtattttgatcataggacgaacagcacactggttcacagctaaactcgtgggatgctgcagagggaaccaagttcaactcatggggttatacctgttcgttcagagtgtttctttttcaccttctttctccttcggaacaaaaattagttatccatccaggcaaattgttggtcagtctatttacacccttgaagccttgtattatcaccttctttccaatcctgtagccgcctagaccccagctgctgcataatgccacaccctcatgacgaccttcgccaacttttaattcccttttgaggcagtttgaacgggctccagcttttcctgcgcttcgggctgtcagcgaagacgcctgacgccagtgcctgctgaagccacatctcgaattcatcgtcggggatcatctctgcgtccaagctgaagggataccgggaactgtaggatctctgaggcatcctatctgcgccgaccatgtttaccataaaagttggaccgtgagtgttaggcttacactccattccctggcaggtagcccactcagacacatcaaatattttgctctcggcacaaacaagggctcgtggtatttccatcttgatggaggatgaaaatctggtttcaacccatccatctccatccttggcttgatgaaactgatcgcagccctgacagaatcttgcttttgttttgcttctcttcgtgcatatccatatatggaaattaccacacttagtgcactgtatgcgtctggactcttctgagagaaactctacaccactctgttgcgagacagcacgtgatcttggggtcattttctgtgattcttctttcctcagttgctgatcatagctgtttttctttgtaaacccg

SEQ ID NO: 136747 - DNA, 961 bp, Zea mays
  Clone ID: MRT4577_56193C.1
gtggcggctcccgtcagcagctgccttccgtgtcgcccttccattctacggcaacctcggcggggagcgttaaaagcgtcgcccgcgaagaacgtgggccagcgtcggctcgccgtctccctccctccttccagatctcggcgcgagttcacccttcagatttccatttccaacacgacggcgaagaagagctgcgatccggaggagtaaaccctacccgccggttgcccggtgcgcgggcgagatccgggcggagatctagggcgcggcgccggccatggcgagctccggactcgcttaccccgaccgcttctacgctgccgcggcttacgctgggttcggagccggcggggccacctcctccgcagctatctcccgcttccagaacgacgtcgccctcctcctctacggcctgcaccagcaggccacggttgggccatgcaatgtgcccaagccaagggcgtggaaccccgtggagcagagcaaatggactagctggcatgggcttggaagcatgccttcagcggaggcgatgcgtctttttgtcaaaatcctagaggaagaagatcctggatggtactctagggtccctgagttcaaccctgagcctgttgtagatattcagatgcataaaccaaaagacgagccacaaagtgtaccggcttcaacaaatggaacatcaatttcagaaccaaaaatcatttctggaaaatggaagttctgtggagactcaggacaaagatgttattctggaaggccttagtactgttatttctcatgatgagtggactccattatctgtcagtggtctccgtccgaagcctcgttatgagcatggagcaactgtgttgcaaaataagatggtatatattttggtggaaacccataatgggacgtaccttagtgaccttcaggcttggggatctggaagaagttgatctgggtccaaggttgataccaa

SEQ ID NO: 136748 - DNA, 646 bp, Zea mays
  Clone ID: MRT4577_56194C.1
ccggccaggacgctcttgtccgcactctactcgccgagagtgtgagtcgagacgcctctctcgccctctcttctcctccctccactccgccgccgcgcccgagaaaagagagttccaatgcgcctcctcccgctgctcctgctcctgtccctcgccgctgtcgcggccggcacggacgcggacgcggacgcgctgctggccgcgaaggccgcgctctccgaccccactggggcgctcgcgtcctgggacgcggcctcctccgaccattgcgcgtgggtgggggtcacctgcgcgccccgcggctccggcggaggcgtcgtcgtcgggctcgacgtctccgggctcaacctgtccggcgcgctcccgccggcgctgtcgcggctccgcggcctgcagcgcctctccgtcgccgccaacggcttctacgggcccatcccgccgtccctcgcgcgcctgcagctcctcgtccacctcaacctctccaacaacgccttcaacggctccttcccgcctgcgctcgcgcggctccgcgcactccgggtgctcgacctctacaacaacaacctcaccagcgccacgttgccgctcgaggtcacgcacatgcccatgctccgtcacctgcacctcggcggcaacttcttctccg

SEQ ID NO: 136749 - DNA, 2436 bp, Zea mays
  Clone ID: MRT4577_56195C.1
gcgagctctggactcgcctaccccgaccgcttctacgccgccgcagcctacgcggggttcggcgctggtggggccacctcctcctctacggcctgcacagcaggccacagttggtccgtgcaatgtgcccaagccaagggcgtggaaccccgtggagcagagcaaatgggccagttggcacggacttggaagcatgccatcggctgaggcgatgcgtctttttgtcaaaatcttggaggaggaagatcctggatggtactcaagggttcctgagttcaactctgagcccattgtagatattcaaatgcataaaccaaaagaagagccacagattgtaccgggttcaacgaatggaacatcaatttcagaaccaaaaatcatttctgaaaatggaagttctgtggaggctcaggacaaagacgttattctggaaggccttagtactgttagttctcatgatcagtggactccattatctgtcagtggtcttcgtccgaagcctcgttatgagcatggagcaactgtgctgcaaaataagatgtatatatttggtggaaaccataatggacgttaccttagtgaccttcaggctttggatctgaagagtttgacctggtccaaggttgatgccaaattgcaagcagaacctgctgattccactaaaacaacacaaattgctccatgtgctggtcattctttgatttcatggggcaacaaatttttatctattgctgggcatacaaaagatccatctgaaggcgttacagtgaaggaatttgatccgcatacttgtacttggtcgattgtcaggacttatgggaaaccaccggtttctcgtggaggtcaaacagtgactcttgttggaacgacactagttttgtttggtggtgaagatgcaaaacggtgtctcttgaatgacttgcacatccttgatcttgaaaccatgacatgggatgatgtggatgcaataggcaaccctccttctccaaggtcagatcatgctgctgcttgccatgctgaccgctatcttttaatttttggtggggggtctcatgcaacatgtttcaatgacctacatgtccttgattgctggaatggtcaaacaactgcgtgtcggcaagaactggtacatagttgggggtgacaataataaaagtggtgtttctgaaacacttgtgctcaacatgtcaactctgacgtggtcagttgttagcactgtggaaggacgtgttcctcttgccagtgagggcatgactttagtgcatagcaattacaatggttatgattatctcgtctcttttggaggatacaatggacgatacagcaacgaggtttacactcttaaactcagcctcaaatcagattcacagccaattgtagaagaagaaactgtctcagatactatatctagggtcagagaacctgagaccgaaatttctcaagatgggaggatacgcgagattgccatggacagtgccgattcagacctgaataacagaaatgatgaagcaagtgaacagcttgtagcagatcttaaagctcagaaagaggaactagaagcaacaattaacagggaacagctgcaaactgtgcaacttaaagaagacattgctcaagcagagaccagaaatgcagagctgacaaaggaacttcaagctgtccgtggccaacttgcttctgagcaatcaagatgtttcaaacttgaggttgacgttgcggaacttcgacaaaagcttcagagtatggacgccctggaaaaggaggtcgaactgcttcggcgacagaaagctgcttcggagcaagcggcgctggacgcaaagcagaggcaaggttcgggtggtatgtggggttggctcgctggaagtccgccaccatcacagtagttcgtacaggccgtggttcatatattttacttgtaacattacatatcatttgacatttgtctacattttttttgtcacatggcattcgtgtttcgttttgaccacacaaagaacaacgtgctctggcgagcgttatattgtgctcatagagaatcgttaggttgccccctcacaatcactcaaatgtatcattaggttttaacaatgtactgatcatgtatgaacttccatttgacgttgtgctggttgcctataggtagtttatttttcaaaaaaaaaaaaaattagaggttttgctgcattgcatgtgtcatggagctggtggatggcaagttttcgttgttcctttttgtggtttattagatgacgtgaattagtggtgaattgagccttattagagtgggttaaatacaactgtcccaagtttcttcgctccagcagattgtttgagggcagggctagctaggaacttcaggaattgctaagcggtactacctacctaaggacatgtttggtttgacaaaaaaaaaaaaaaaaagcggccctcgagctc

SEQ ID NO: 136750 - DNA, 277 bp, Zea mays
  Clone ID: MRT4577_56196C.1
gttcacgcttttaaagatgcattgggaaaacaacatagtcctccttctcctacgggggtttgctgtaatttatccaaacctagtaattgctacttgcttgttctccaaaacatactgctgtcctcctaaatcaatgctaatagtacatttaagcctgtataccccctttattctgtccatcttcaccatagtgtgtatgtacaagatctgagatgtgccatatatgtccatgaactgcattatctatttgttcacaccttcatataaagcttaaaca

SEQ ID NO: 136751 - DNA, 798 bp, Zea mays
  Clone ID: MRT4577_56197C.1
cctcgaggccggccggggggatgtctaggaccaacaataagcacacttgctacagaggtcactagcaagcttgcagccttaaagggactcgatgcaaggcttagggagatccgaagctatttggatcttgtaattgacgggaagctcccactgaatcacgaaattttgtaccatttgcaggatgtctttaatctccttccaaatctgaacgtaaatgagctaattaaagcctttgcagtgaaaactaacgacatgatgttggtgatatacctgtcttctctgatccggagcgtcattgcgcttcacaatttaatcaacaataagatgctaaacaaggagcacgagaaggccgaggattcgaaaccaaccgccattcctactgctgccggaagctaaacgtgcttttgatcactgattggattggtggctaagaaaagggaagaaacttgtgatgacatgttagcacggttgtgctcgaaccaactgtcttgaccctgaatggacattttttatgtttattttatgtatgatcaggtcaacggcaagagaaaccaattacactgtatgagctttagatcacacctcaagttattctgtagatcttggtgctatttcatctgatgggtcatgtttcatgatgttgactccgtttcctgtgattgatttatagcgagcctgtacgttgtatgtcatgcaattcatctatgtccatgaatgatttgtagcaagtctaaaaaatcaactatctggaccgatcctgtttgataagtaaacatgggctgtttggtttcgtggtcc

SEQ ID NO: 136752 - DNA, 1504 bp, Zea mays
  Clone ID: MRT4577_56198C.1
cccacgacgtcacctgaccttccacttccgcagtcccgcaagaaagaaagagaaaggagaaggaacagggaagcaaagcacaagaggtggccgccgcagtccgcaccccctccccaatcacgccacccgacaccgcgctccgcagattcgtagtcgctgctaggcttccggcgagatggacgtggtgaaggcggcgcagttgtcggggcggacgctggaacgggtagtggtgcatcccttggtgctgctcagcatcgtcgaccactacaaccgcgtcgcccgcgacacccgcaagcgcgtcgtcggcgtcctcctcggcacctcatcccgcgggtccgtcgatgtcaccaactcctacgccgtgccgtttgaggaggatgacaaggatcctaggatctggttccttgaccacaattaccacgagtcaatgttctccatgttcaagaggattaatgccaaggagcatgttgttggctggtacagcactggcccaaaactaagggagaacgacttggatgtccatgcattattcaacagttatgttcctaatccagtcttggtgattattgatgtccaacccaaggagctgggtataccgaccaaagcgtactacgctgtggaggaggttaaagagaatgcaactcagaaaagtcagaaggtatttgtccatgttccttcagaaattgcagctcatgaagttgaggaaattggagttgaacaccttctaagggatgtcaaggacacaacaataagcacacttgctacagaggtcactagcaagcttgcagccttaaagggactcgatgcaaggcttagggagatccgaagctatttggatcttgtaattgacgggaagctcccactgaatcacgaaattttgtaccatttgcaggatgtctttaatctccttccaaatttgaacgtaaatgagctaattaaagcctttgcagtgaaaacaaacgacatgatgttggtgatatacctgtcttctctgatccggagcgtcattgcgcttcacaatttaatcaacaataagatgctaaacaaggagcacgagaaggccgaggattcgaaaccaaccgccattcctactgctgccggaagctaaacgtgcttttgatcactgattggtggctaagaaaagggaagaaacttgtgatgacatgttagcacggttgtgctcgaaccaactgtcttgaccttgaatggacattttttatgtttattttatgtatgatcaggtcaacggcaagagaaaccaattacactgtatgagctttagatcacacctcaagttttctgtagatcttggtgctatttcatctgatgggttttcatgatgttgactccgtttcctgtgattgatttatagcgagcctgtacgttgtatgtcatgcaattcatctatgtccatgaatgatttgtagcaagtcttaaaaggcgctcggttttgaggccaaaaaaaaaaaaaaaaaaaaaaaaaaaaaaaaatttcacctgcccg

SEQ ID NO: 136753 - DNA, 246 bp, Zea mays
  Clone ID: MRT4577_56199C.1
cgttttatttaaaaaaaaaaaaaaaaaaaagtgtttgggttaaaaaaatttttggggcgacaaaaaaaaaaaccgggccggcccccatctatgatcatcacaaccctggaattaacacccacccaaacccttcattcttaccaactttcccaaaattaaccccccttacaccatgccacaatcattgtcataactatttcccgcataaaattattatcccctcacatttccacacaacaaacaacc

SEQ ID NO: 136754 - DNA, 219 bp, Zea mays
  Clone ID: MRT4577_5619C.1
gcagctagagacaacctctgcgtaaacgaatgcatcggcatgtattctcgtgtggttgcggaggtgccctcctactcccgcctcttctcaatgccaccgcttgctcgactaatgaatctccgtggtcctgcccgcgcctccgaccgccatagttgtgggcatgaaccattgggcgacgatccgctctgccccagcgagccgacggcagagcactttagt

SEQ ID NO: 136755 - DNA, 262 bp, Zea mays
  Clone ID: MRT4577_561C.1
gtttgatttgggtattgaggactattacgaacaagatgaggatagctcaggggcaaaaggtgaatatgacagcgcattcacctttgttagctatgatgaggatcaagacgattttgacgatttatctgatgaagatgaatatgatgatcactacgatgaagatttacgagatttgactgctaggggtttggaactgtttttgtgatgtgccgctctgaattagagattctttggacgtggaacttctgtgtctgggacattt

SEQ ID NO: 136756 - DNA, 758 bp, Zea mays
  Clone ID: MRT4577_56200C.1
cgggagaaacatctcgctgtcttggtccagctcactcctttcttttcgatcaacttgaggtgcaaacaccgccgcaatgcgtgtcaccgccctcttcccagcccttgcggccattgcacgagcacaggatgctggcgatgccgctgagtcggtgtcatctgctgctactgaggtctcgagctcagtaggcagtgtcgttgagtccgtcacatcgtcggcggccgacatacctaccttcacccccaccacattgaaggctcccttcctcgagcagttcacagacgactgggacagcagatggcaagcttcgcacgcgaagaaggagaacacggaagaggagtggcagttcgttggcaactggaacgtcgaagagcccactgtgctccgcggcattgcgggtgacaagggtctcgtactcaaggacaaggctgctcaccacgctatatccgccaagtttcccacggcgatcagcaacaaggacgacactctcgtcgtccagtacgaggtcaagctccagggcggcttggagtgtggtggagcttacatgaagctcctccaggacaacaaggccctccacgccgaagagttctccaacgcttctccctacatcatcatgttcggtcctgataagtgcggctccacgaacaaggtccacttcatcttccgccacaagaacccgaagactggcgagtatgaggagaagcacctcaagagcccgccagcggcccgcatcactaagaccactaccctctacaccc

SEQ ID NO: 136757 - DNA, 728 bp, Zea mays
  Clone ID: MRT4577_56201C.1
atcttctcgcccgccacgagaacagctgccgttgatgcttacgggacaacagaatgaggggcatcggtgaagactcagtaagacgcacgtgccggatcttcagaccgggtctctcgaggcgtgatatcgtcgacgagaggaggcactcggcaacgacacgactacgcgggagcaggatcgaggcatgattgagccaagcagaacaatcactctagcacctgcacgccgagatagcacattctggtatgtgcgatcttcaccatcaggacatcactgcccaaatcatatctgcgacgatagctcaacgatatggtgcttgcttctgcctactcgcatgcgttgccaccatatgctcttgaatttggcttgatgatctatgtagatgtgtactgcattgggcttctgttgcctcacccggagctcaagatcagtgctctggatctggagtacaaggggaatggtcatgccactggcgacgacttctctgttgagacagctgcagcagaggatggctatcctgtgctctcttggatgcatgtccttatcatgactacaaaagcgaaccgagactttgtctgccctctccgtagcattggatgccagcctggctattcctcatggcaaaaagaggtttgctggattgaataaggtcgacatatgtctgaatgatgtagacccagcggaggcacatctatgggggccatgatgctgagtacttgaagaacctt

SEQ ID NO: 136758 - DNA, 869 bp, Zea mays
  Clone ID: MRT4577_56202C.1
acctcgaggccggccggggaagtactatcagggacgccggcgtgcgtcccccctccctagtccctacaacgactataacttatgtgcagtgcatcgatcttccttcctcgatgccccaatacaatgtttcagaagaacctgctgcccctggccgcagtcctcgccgtcgtcgcatcgctcatggccgctgccgccggttacccgtggtcagtgtgcggtgacagcaccgacagcagcgactttatgcctaacggcgcataccaggcccatctcgacttcatcgcagctgccttgcccaagaacgcctccaagtcgccagacctcttcgcaaccgtcgtcgccggcaccgtcccggaccaggtctgggccgtggggctctgccgcggcgacgccaagcccacggcgtgcttcacctgcctcaccctggccttccaggacctgcccggctactgcacctacgccaaggacgccagcatctactacgacagctgcatggtccactactccgacgtgcacaccctctccggcggcgacgacaccggcccgatgatggacagatacgtcgtcggcgacacccaaaccatcacgtcggaccccggccggttcgtcctcctcgtggcggcgctcgtgaacgccaccgccgactacgccgcgtacggcctccgccgcccgccgggggtttgcgacaggcgaagccgacgcaggcttcgacccggagttccccaagctctacgccctggcccagtgcatgccgggccagacgccggcgctgtgccgggagtgcctctccaggctcatatcgcagtcgctggacggatccggaacagtatcggaggcagggtgctcgccgtcagctgcacctacaagta

SEQ ID NO: 136759 - DNA, 190 bp, Zea mays
  Clone ID: MRT4577_56203C.1
cggtcgaccacgcgtccgcccacgcgtccgaccaattgcattcaaatttatgttctaaatttagcatctatactatgggaacggtaaaattcttacttggctcaatacatattatggtagatacactttaggtaactcaattcaaaattcaattaccatacatctaaacaataattcctgagcataccaa

SEQ ID NO: 136760 - DNA, 189 bp, Zea mays
  unsure (1)..(189): unsure at all n locations
  Clone ID: MRT4577_56204C.1
ggccgggttgtttgcagcagcccttgctcaaccttngtagcgtcgcttgcatctttgcgagatcacccttatttggtcccaagtcctccatcgatngagctntgattgctgagccgtgangccccagcgcntcgtcctttgacnnagaaccgtcaanatnatgatcttcaaaatttggcgttttccctg

SEQ ID NO: 136761 - DNA, 698 bp, Zea mays
  Clone ID: MRT4577_56205C.1
attccgcttcgcctcgggccaccgttcgtttcgctcctctacgcgagcaccgatccgaagagatggcggtgccgctgcttgcctgtaagaacgagcaaaaggatctccaggggaacaagaggcgccaccacaaccactacaaacgccttatctcaaaatgattgaggtcacatcgaagtgactcccgtgtccagaggaagctacagggatgcaactcgctgaccaacaatgcagtatgaccactgacagcttcagcaggtactacctccccaacaagtgcaggaagcctatgtgccactacggttctgaactgtagatgttcctgaagcaccacacgacctactgcacagaaattgctcacaaatgggccactaaaaatcgcaaggatatcgtgtaccgcgctgcacatctcaacactgtggacacaaacaaacttgttaagctccgcacacggtgagacgagtacaaccgacttctagacgtaacgacgaactgtgatgttgccatctcctttcatgtaggaaactactttgcttgtgacctgctatgactgagaatcacagacactcctaactctttcgcatcagatctacataaatgtgacagattcctctacatgagaactgaaagaacatgccctcaagctccatccataggtcactgtaaaggagattaataacgctacctccggaatcatg

SEQ ID NO: 136762 - DNA, 418 bp, Zea mays
  Clone ID: MRT4577_56206C.1
ttctcgcctacctcgacgccgggcgctgcatcgacatcgtggtagacaacccggcgccaggacccgacggggaggaggacgccgtacacgtgccggtcatttgcagactatcgcggtgcaaccacagggacatcctccccgtgcgggagggcgtgcggcacgcgcgcccgccccagatccacaccttaatagtcaccagcgacattcacatgcagcataagctaaggaagacgcccgaccaggtggtcgccattggcacgggacatggaacactacgcccgcagctcttgatgcactgacgcagcattcagccacgaggacgccggcaggccaacaggagagctctcgtatcataatctaggggaagtcataaaagctggagctacacactcttaatatcacggacactgtgggatac

SEQ ID NO: 136763 - DNA, 837 bp, Zea mays
  Clone ID: MRT4577_56207C.1
gtcgtggggaaacacttgcattgtgtccggtgtgcgacaccgacacgcgcccgcaggcaccgagccgctgtgtaacgaccgagcgagaatggtggccacgaagccgcggatcgccgtagttggcgcaggcgtggccgggctcacagcggcgcaccggctctgcgctgcaggcggcgacaggttcgaggtgacggtcgtagaggccggcgcccgcgcgggcgggcgggtgctcacgtccgagttcgccggccaccgcgtcgagatgggcgccacgtgggtgcagggggtcgatgggagccccgtgtacgcgctcgcgcgcgacgccggcgcgctcgcctgcggcaaggaccttctcccgtacgagcgcatggacgggttccccggccgcgtgctcacggtcgccgagggcggcgaggaggtcgacgccgaccgggtggccagtccgatcgaggagctgtacaggggcatgatggaggccgcgcgcgccggcgaggccggcagcggaggtggcgtcgaggagtacctgagtcgcggcctccgagcgttccaggcggcgcgaccgggcggcggcaaggagctggaggaggtcgaggacgcgctgctcgccatgcacatcaaccgggagagggcggacacctccgccgacgatctcggcgacctcgacctcgccatcgaaggcgagtatcgcgacttccccggcgagcacgtcacgatccctgccgggtactcacgcgtcgtggaacacctcgtcgcggcgcttccgccggataccgttcgcctcggccaccgcctccgccgcctcgactggagcgagactcccctgcgacttcacttcga

SEQ ID NO: 136764 - DNA, 533 bp, Zea mays
  unsure (1)..(533): unsure at all n locations
  Clone ID: MRT4577_56208C.1
cccgggtcgacccacgcgtccgctgttcgcaccactaccttctctccggagttgaaaccgaacacatctctatttccgccgcagcgccgaagaaaaaatcggagactgtcacggngccgacaccggcagcgaagaagaattcgagcgtggaggaggaaacagaagaggaagtagaggaagatatgccgtggattaagagagggggagacctancgagtcactggatcggtgagtcaggcgattcctgggcctcgagttggaagtagtaaattgccgtggatgctaggcggtccggtagcttacgccggggtcactttcgnaactgntttcgncaaagccggggagaaggttcngtnntcctaaagctaagngcaagaaactgggtgaatcnngaaggctttgctttggcnatttatagatgaggtnatttaggaanaggtggaacagtgcatnagctcggagcttaagggtacttgaacaanagacagaggttagccctggagggagatattggcggaaatacatttcgttat

SEQ ID NO: 136765 - DNA, 597 bp, Zea mays
  unsure (1)..(597): unsure at all n locations
  Clone ID: MRT4577_56209C.1
nagnaaaccgcgtctacaacacagnanaagcggctagggcacagagaancggcggcgacatctacacttgctgaccggcgccattccgtcggtgtccgcttctcgccgatagtactcacatcctcctcctctccttttcatcgcgtgcatcgcttgcatctttccacagcgaagctggtgctggacgccgacctaagcgcgccgtgcgacgccctggtgctgttcgccggtagtactaatcatgttgtcaccctaaattgctacctatagtactactggtgctagtagctagcgcaaccagacgttttttgcctggctcgtcatcgaagcagcgacctctctacatcgcatccagttccagaccgcgctgtcgtcagaccggcaaacatgtcgtcctccctgttcttggcccacagcaccacgtatagtccatcgaacatgagcacgatccccacaaagctgcagcaaaattgcaaaagcaaacagtattatgagcattagcagcagcattgcactggatcccagactcccagtagttaactaaccgatgagtgagttcacggcattgctagttttcctcttctttattagtcttta

SEQ ID NO: 136766 - DNA, 649 bp, Zea mays
  Clone ID: MRT4577_5620C.1
gaacaaacggtttgtgtgcaaattgatgcctactaataaaattctagataatctctgccattgtttttgaggcatcatataggcgtctaggcacccccggtgctgggtgtcacaggatgccacaagaacttttttctgtctccgggccaaccccatttccattaatcgcccgacaaaatacagatgtttgtgatcaaaccaatataagtgagaggggaaacataagtgaggggaaacagaccacaaaacattatcaaaccttattaaaatgacagtctgtttcagatcatcattctagcaagatggatgcaagacataaatgactggtttcagaccctactgatgccacaaggttttagttatgccatatggcattggtgccacctagaactctagaaggtgcctaggcatggatgcgtaaccccagcgtcacaggatgccacaacggctaaaaaaccatgatatctatatcacatttcatagttcatacattgattctagttaagtggctgtacattcttaggctgtcttctgcagctatcatatctcatcccctatttcaaacttcactatgtaaacagtgcaatctacagtggaaaaaatcctttattttacacgatttgccgcggatagccttaaggatttgatc

SEQ ID NO: 136767 - DNA, 284 bp, Zea mays
  Clone ID: MRT4577_56210C.1
acgtaagctcggaattcggctcgaggtttttaaaagcaagacgtgttctgccagaccaagcacggtgcctagattgtgctttaacacgccaccgcggccgctgccccgtataccaccagcaaggcgatagttgaactagtacacccaggcccacaagccaaaactacggctttagatagacccaactgctgggcaagcctaaccgaccagaagaaccacgctacgcgggcaggttggcaagatacgctccgccactagaagaatctagacatatttgacaagaa

SEQ ID NO: 136768 - DNA, 249 bp, Zea mays
  unsure (1)..(249): unsure at all n locations
  Clone ID: MRT4577_56211C.1
cctatgattcacatccctccctttgtgccctcgtagggacagttttttttttcttgagcatanaggagagctgtctatcattatattaaagaacatggttaggaaactttacacacacatttggttacaagatcacccttgaagccaaagataactaaacgaccttgactaacaggactttggttacttgtggtattagactgttatttggctgggtcataatccatattcttgcangatggattcatt

SEQ ID NO: 136769 - DNA, 494 bp, Zea mays
  Clone ID: MRT4577_56212C.1
cggacgcttgggcggacgcgtggggccgagcaccgcagaaaaagaaaaagaaaagccaaaggcaaaggcaaagtggataccctgctgctgggtagtactagtgtattgctgttgaaacctgcaaatatctgggatcagctgatggatgaagaacaatgagtagtctctgggtaaaatagcatgcctgcgcaagcgagcggacatgagtgacaagaagctgtgagtgcctgcctgcctccatttagagctgatatttaggtgggattaaaatccatggtgggattgggtgtaagaatgaccggacaaggcctaatgtgtatcagcagattgacaacgcaacaagagcgaagccacaagaggtttcagggtagggtaccatctaatgtgtatcagcagcagcaggtttttctcaggtgttaagaaccaccgacatgaaaaagcaccgagtttgctcgttcattccttggcagccttgtcgatgagctcctgtggat

SEQ ID NO: 136770 - DNA, 471 bp, Zea mays
  Clone ID: MRT4577_56213C.1
gatcagaaagggggcccaaaacgggcaagccccacacaccccggggaaactgggccccggcgaaaacaagaattagggcggaaacgagagtccaggggggggccaaaatggaaaaaaaaacaggggggggacccccaccaggatccattggaaaacaaagaagccccgctgagaaacaaacaactaacacaaacaaggttcaagccaaaggcgggaaccgcagccgcagcttcagcaggggcactggccccgacaagttcaccccccgggtaccccctggccccgtccttggcgacaatcttgaacacaaaggtcgggggcgccacaaccagccggagccggatctccctaaggcacttaacaacgagggctaccgcttcctaaacggtcatgcccgggcgggacagcttgcccaacagagacaggcagaaataccacccggacccaaaagcgcccttgtcaatcttgggc

SEQ ID NO: 136771 - DNA, 305 bp, Zea mays
  Clone ID: MRT4577_56214C.1
ttggggggtttttttaaactattaaggggactgaacagtcctgaaaaccaagctaaggatttaaagtttacataagcagataagaggggaagagacgtaacagaaaacatgaaacaaattttactaacaccagccaactggattctgcacaaatcacctatgctggccctggggtaccaaccatgctggtgtcatcaggaagcgcacgcgtggttttatactgctctgggagtgacagcaactttgatgtattatcatcaggccggctgcctggttccgaatctattgaaattcacccaacacca

SEQ ID NO: 136772 - DNA, 500 bp, Zea mays
  unsure (1)..(500): unsure at all n locations
  Clone ID: MRT4577_56215C.1
taccctcgagcctgccgggttcctctttttcccctttgcgccccttcgtcgctgctatattccgcgaccgcctcgcctaataatagtcgccgcgggcagtggataccgcgaccgccaccgtcatgggagcgctctagggggccgcgagggactgcgccggacgcccaagcgcgtctccaaggccttccgcgacggcacccgaggttacaggcaaaaagtgaaggacatagtgcggggggctctgtttccagaggttggcgcggacacggggactggaagctgctggacatactcctggncgactccttgacgcttctcttcggggagaagccggtcaccgtgtttggcgtcaggatccccggggcgatcccgtggggggaggctgctgctgcctgtgggggggggggcaccggggggtcggctggcgtgggcggggctgttggcgcgtgaggcgcgggtggcgcgggaagggccaggtggtgtgcccggggcgggggtgg

SEQ ID NO: 136773 - DNA, 1579 bp, Zea mays
  Clone ID: MRT4577_56216C.1
aaaaaattctactcctgtatcccagccgccacaaacagccagccggccgtcaggatttctccttgcgttcctgcatggctgcatggccactaacagactgccggccgccaggagctatccatgcatttctgcatgggcctcatggccgagctatgctcaagtgccgcctctggtttccctttttttttttttttaattttcttctccccagccgctgctccactcggccgccagggagcatcacgcttgtttctttctctgattctttgtctgagcagccgctagagcacagagctactggccgaacgtgcccgagtacggccgttcctgcgcgcctatctctctcttttttttttctttctttcactgtttactgattttggagattactaacgcacggttggcttcaatgcaccggagatggccggcctgagccgccccgcatccccatcccgccgacgtgcgcgtcccttcgggtgggcgcgccgtcgtcggatgggtgctgcgcggtggtcgaggcccagtccgacgagttaagaactgcggcactgttagccgtcgtctgcgaacctctctctccccaggatctatcctcaactcgatccctcaagtgattttgtaacgggagtcgagttttggaggtaaagaatcatagatctgggtcccgcgatatttctgttattttctgtgatgattttagtgcatctgtacacttttgatttacgtggtttttgaaaaaaattagggttctaaccctagcttcgttctgtacgacttttttctgatctgttcttgaccgtttattaaaaaaaatcacgagtacctgtttacaggtgtaccgattagggttaggtcataaatcctaaccctagacagttatgtgacctctctctggtttgaggctgagacacactgtgtctcttacagtggtcaaacctaaatctctagggttagggaaaaccctaacctgagagcatcgacttctttctgttctattatctctctgatctcggtgataaacaataataaacgaacgtccacgcgtccgcggtaatgtgggcttttctgtgatctcataaaactgatgtggattaggagatctagggttcttaggacggctttgataccattgttagaatctatactgtctaggatcgattcctaagtccctataataccaatccgtaactgaaagtaaaaccttgatgacgtgtcgatctgatctactgatctattgagaggaacggggaaacacacctttgttgttgttgctatcttcataccgtcgccctgtagagaagcaacagggcattgggatccaagccgctgtaggttgtcgcgtttccaaacactccgacgcctaggcgatgggggcctctgaggactagggttttagggcgaggtactagcgttagtctttcctgcgaccccttagtcctatatatagcgtcgtgtgtctgggggctccaaccgaggttagcgtgggccctcccaatcaagggcccatttaaagagatagatagttgggtttagcccaatccggtcacagttgaccagctgtagaggacacacccaacac

SEQ ID NO: 136774 - DNA, 649 bp, Zea mays
  unsure (1)..(649): unsure at all n locations
  Clone ID: MRT4577_56217C.1
caagttaaacaaccaagagtccaaaaatctttaaaaagggggaattccattgggtagccaaaattttggggcaccagagacaaaagcggcagcaaacaagccaagcaatgtcgttcgataaaaaaatgagggctacagggggggggaaatactaccgtcggggaaaaaaaaatcgcgcagggggggttgctggatgctatcttttcacgctagctttcttcgagaacaaccgcaaatttgcaatttgcctgcgccattcatttatcggtacagcggggaatccaccgtagtcaccaggctcctgaatatcttttgtcaccaagctattagctgcgagtcgaactgaagggtggcggcggcagggcactagggcggctctcagactctcagtttccggcgcgcgcggtgggctacggatctgcagcgggtagcaagcagaagctaattacgtttcactaattgggctatgtacggacctgcgcgcgacgggccagaccaaggagcggcgtgctctctgctgtgtcatgggtgatgggccttagcgtccactcgtcgtctcgtccagtccagatatatttttctttctttttccattttagtttnttcgaatgcgactgagacatggccccgaattgccacactaccaccc

SEQ ID NO: 136775 - DNA, 288 bp, Zea mays
  Clone ID: MRT4577_56218C.1
attattattgttataaactttttttattcatatacatttttaatgtttggttttaattcacgtcccccaaaaaacttacgatgggggggtcataaaacatatcttctgaaaaagcaggagcaaatacaaaattttcccaaaaatgtccaaagatataacaaattgggccccttctcatgttgcgggcccttaactgttcctatttgtgccaaggcttttaaaccacaattacaaaaacggggtttatttaattaacaacaaaaaaaggatgcttggcccccttcccgg

SEQ ID NO: 136776 - DNA, 464 bp, Zea mays
  Clone ID: MRT4577_56219C.1
cgaccagatggcgtgcacaaacaatgcgatgagagccttgtttctcctgatcctctattgcatcgtgcatgctgagaaagaacaatcaaagggcctcgctgcgatagcgtccagtcctgatgggtccttctacattaccaaatggggcgcctacagctatggcaagacaaacaggactacagctgtgcaggaggcatggacatcgacatgcggcaggactgggaagcatacattgctcatacccaacggtgacttccttgtgggacaactcactttcacaggcccttgcatggtcgacgtgaccatccagacggatggcaatctgctggcgaccactgacctaagctagtactaaagaccatcggtaatgaggatcgagattctacgtgtggatacctggcctcaccgggatggtaaaccttgaatggcaagggccatccccgtggagcaagaactcctgctcc

SEQ ID NO: 136777 - DNA, 520 bp, Zea mays
  Clone ID: MRT4577_5621C.1
gccggccgtttcggaatatcatatctcgcctttcatttctcctgtcgcttaacaccacggcaaggagaaccacagccgtggcgagcgcaccatgcatcgctctcctcgccgacaaaacctgaggtgttccgcggagatcaagatgcaacgagctccggaacggccgcctcgccatgctactccatgttcggcctcttcaggccagagcatcatccccggacacgacaccggtcgagaagctctctctaccacgtcgtcgaagcgcgcataacaacaagacgagttcctatgccaccaactttgtgtccggcgagcgatcggagatgcaaggcttcaccttatgccgagctccgatgggaatgtgtcagcgcatacttgcacgatagatgggactggctacagtttgctccatgatgtagagtagttaccggaacagtgcccaatagcttgggaaaagatgacgcgttgactggcctgctactactcatgacccagtatgacatcaactgtactctggaac

SEQ ID NO: 136778 - DNA, 472 bp, Zea mays
  Clone ID: MRT4577_56220C.1
aggatagggctatcgtcccagctccccggtgcatgggcgagccgagtgctggccgcatctgtcccctccggtggcagcatagatgccgaccgccatcaccgctcaccgctgatgcagctgcagtactcgatcacgaaactagtcccggatccctcagggctccagaacgtcatgcttcgcgtcgctcgcaactgcagctgagaaatgtaactttatggaggtcctcactctcatggaataatgactatggggaagacttgctcttcctcagcagctcgggtatcttcaaacctccactaactattcggtgatgacataacaatctgctttccccaattcggatcacatcgcaattcatgaacaacatggactccctacgaatcggctgtggactattgacaccaatacaccgcctttaacattgaaccctagctattatagctataggtgatctgaatctgaaggcctctga

SEQ ID NO: 136779 - DNA, 432 bp, Zea mays
  Clone ID: MRT4577_56221C.1
cggccgggatcgtgttcacaataaggcatcgggaggtaggcgtcgtgcgccactcttgacatctcgcttgccggagactcccgttgtaccagcagcggcggccaccccttgcgacgaatactaccggtggccataccataccggtcggaagatgaggagcccacatcacttgactatctcatcggcgactatatctcggcaagagcacaatgctggtgattctgcgagaagaagcgctggccactccatccaggacggaagaccgcgtcggcctcctcccctcaccatacgccgcccctattcaaggacattctccgtgcaccgcccttgtatccccgaggggaggttaggtttccacgccgaagcttgtgtcaggcttgtcctagaacataatattgctcgcctctcctgtcttctctcctcggcgagcgg

SEQ ID NO: 136780 - DNA, 538 bp, Zea mays
  Clone ID: MRT4577_56222C.1
cgcaagctttaacttctttccccgtagcctcgaataatgggtgcaccatccgtgacatcacggcagcggggagcttgcaccatgcatgttaatgcatttacctgatggtagcttcttcacatgacaaacaatgggcccgtgagggcacaactaccccagttgtgcccccacgaacccattgtggttatgcagcaggatccatggacgctaaatgaactatttggaactctcccgccggttcgtcaacaactacaccgttttttcagtctcgcgcagacgaaagaataacttgcgcctctggtggcacatctctgcgaggatcatgactacacgacgtctaaactcatcactgtacgtggtttctcgacgtaaattactatcaaaacactagtgttcaccacattctagcccttagcatacatccaactttctgcagctcctgttgtgtcaaataagtcccatcagttgggtcttgctaactgctcggtatccagaatggcaaattgtacctgcagctgcatttattaattacacatct

SEQ ID NO: 136781 - DNA, 426 bp, Zea mays
  unsure (1)..(426): unsure at all n locations
  Clone ID: MRT4577_56223C.1
gacccgacccacacccaccccaccattcggttgaattgaattggtgctgtatgtactgtgctgtgttagttgcatcggttttgccggccggcaggccagcatggggaggtctccttgctgcgacgagaatggcctgaagaaggggccttggactcaggaggaagatgagaagctgctgcactacatccagaagaacgggcatggcagttggcggaccctgccgaggctggccggtacatgcatgcccttctccggtacatgcagggctgaacaggtgcggcaagagctgccggctgcggtggaccaactacctgcggccgggcatcaagcggggcaagttctcgcgggaggaggagcagaccatcctccacctgcactccgtcctcggcnncangtggtccgccctcgccccncncctnccaggcc

SEQ ID NO: 136782 - DNA, 319 bp, Zea mays
  Clone ID: MRT4577_56224C.1
aaaaaaaaaaaaaaaaaaaaaaaaaaaaaaaaaaaaaaaaaaataaaacataaaaacaaaaccacgtctaagggtcgattttcgtgcaaatctacatcacactgcacccccggttggcttctccctggtggggggcccacccccgccctatatgtgagctcgttttacctttcctctggcgggccgtttcacccccttttgacggggacaaccctgcctttactggagtgacccccctttcaacccccccccttttccccacttggggtaggggaaaacacgcccggtccgatccctattcccttggtgcgcaccgcct

SEQ ID NO: 136783 - DNA, 277 bp, Zea mays
  Clone ID: MRT4577_56225C.1
ctttttcgtacgctcactggcgctagtgtatccaccacattaccggtcctggactgaaatttaaagcgtaaaacgaaagaatgagcataatcaactgttttatagtttgagctatgctagatggtagttcggccctaaattgtattatcatctaaacactactatgcgtcgcctacaccatactcgtcattggtaaccttttcatgagtcatagggtaaatggacacacttgtatcgatgtactctaatgatgacagtccacgaggaatgtgggata

SEQ ID NO: 136784 - DNA, 1286 bp, Zea mays
  Clone ID: MRT4577_56226C.1
ccggggacccacacggccacacccaccccaccattcggttgaattgaattggtgctgtatgtactgtgctgtgttagttgcatcggttttgccggccggcaggccagcatggggaggtctccttgctgcgacgagaatggcctgaagaagggcccctggactcaggaggaagacgagaagctgctgcactacatccagaagaacggacatggtagctggaggaccctgccgaggctggccggtctgaaccgatgcggcaagagctgccggctgcgctggaccaactacctgcggcccgacatcaagcggggcaagttctcgcaggaggaggagcagaccatcctccacctccactccgtcctcggcaacaagtggtccgccatcgccacgcacctccccggccgcaccgacaacgagatcaagaacttctggaacacgcacctcaagaagcgcctcatccagatgggcttcgaccccatgacgcaccgcccgcgcaccgacttgttcgccgcgctgccgcagctcatcgcgctcgcagccctccgcgagcagctgtccgccgaccccgacccgccgcagcaggccgggacgacggcggcggcggcggcggctctcgccggtctcatcggcgccctctgctcgccgccgcaactgacgctcctcgacaccaccaccgctactaccgctgctgctgccccgccggtggtgtcgtcgtcgtccgcggacgacgatgccgcccaccagtactacttaccgcgcaccacgttccccgacgcgcccggcagcggtgaagctgcccaccagcggcaacagcaagcagcaggcctcatcagctatggccgacgacccgacgacgccggcggtgatgttgacgtgttcgcgtgctacggtggtggcggtggaagctcgctgccgcccctgaccgacctctccgacgacgcagccaccctgctgcagctgcaggtggacacggcgtcgtccgaattcggcagtggcggctccagcccgctcctcccttggccggagttcttccccgacgatcccttcatcactgatttcctatgacatcgtcacactgtatatttgctcgtcgactcgtcgtgcaatcgtacatgcggatccatatatgtacgtcgtatctccctctgaactttgtaagctttgcgtactgtactctacacacacaaacacatacgtgcattcctttcagaacagttggaaagtgtgcagagcagggtcgagtgaggcttttccctccctttctgtttctgcttttgttggcgacc

SEQ ID NO: 136785 - DNA, 338 bp, Zea mays
  Clone ID: MRT4577_56227C.1
gccttcctttttttttttttttttatttttttttcttttgttcgttttttttttttttttttttttttttttttttttttttttaaaaaaacatctattgcaaggtgtttacacccgccagccttacctacaggggtaataattctttgaaaaagaaaaaaaactagctttggctcacctttcccacaaaaaaaaaagaaaacgaccgctcccaaaaatcaacgaaaaaggggggggggctggaacaacccctgatgagccttattggggaaaccgccgctttaacaccctgcgccgggaacccgaaaaaatttggccggggccccgatttttggggg

SEQ ID NO: 136786 - DNA, 151 bp, Zea mays
  Clone ID: MRT4577_56228C.1
gctgttggtcggagcaagactaccgaggggacatgcgatgggccataatacgctaaaccatcggttgatctgcaggaaagagaaacggttagggccattttaggtgacagactcactgattatctaccttaaacctaattactgacagttt

SEQ ID NO: 136787 - DNA, 118 bp, Zea mays
  Clone ID: MRT4577_56229C.1
gcttattaaaacattagccgttggcttctcatattactgggccgcttattcatcccggccctttatgttatccaagggagccctacccctgtcccataatcattaagctctggaacta

SEQ ID NO: 136788 - DNA, 556 bp, Zea mays
  Clone ID: MRT4577_5622C.1
agcctctctctctctccctctctctctctctctctccttacccagccgcctcgtgccctcgtcctctcccgtctccgaccgcgccgccgccactaggccacggccgccgccccctccccaagcctcgcttcgctcccgcggggatggaaagccccgatggttcctcattgccagactttcttgagctccagcgcacccgtgttctctgcaaggccgatgcccccactcatacagaagggtttcaatactcgggtgcttttgctgctatgggagttgatactagtgtctcagttgagaagttctgcaagaactttaaaatcgagataaatcgacttacagatgaggatatggagtttgatatgattggcgttgatgcatcgatagctaatgctttccggagaatcctcattgcagaggttcctacaatggccattgagaaagtcttcatggttgacaatacctcagttatagcagacgaggtcctttcacatcgactaggccttattccacttgatgctgacccaaggctttttgattatatctctgatgatgtcac

SEQ ID NO: 136789 - DNA, 1020 bp, Zea mays
  Clone ID: MRT4577_56230C.1
cccccggggtttaagggccgctaaaaggggggttccattttccaattagggtgggcaaatttttggaaaggggaaagggtggggcctttttggtatttacccaacttgggaaaaggggatttttttcaaagcgaataaatttgggaaacccccgggtttttccaatcaccacgtttttaaaacacggcccatttattttattttgggggccctaaaaaaaaagtattacgtttcaaacaaggggatgtaaaatttggtttttttaaaggggcccccccttttttttttttttttttttttttttttttttttttttttttttttttttttttttttttttttttttttttttttttttttttttttttttttttttttttttttttttttttttaggaacgaaaacttatttatttctgagaagttcaccacaggccgcagctattgcgaccacacctcacaaacaaccatcagagttcaggcacttcacacctcaccaaaccaaacctcgaacactaaccaacttaatccacctcctcgatcttgggaccagcaccgctcccaccaaacggggcatcctcatccatgccagcagcagcgcccatgcccgcgccctcgccctggtacattttcgcgatgatggggttgcagatcccctcaagctccttcattttggcttcgaactcctccacctcagccagctggttgctgtccagccagctgatggcgccgtcaacggcattttcgatcttttttttgtcctcagcggggagcttggaggcgatcttgtcgtccttgatggggttcctcatgttggaggcataattctcgagcgcgttcttggggtccaccttttttttgacctcctcggcctttgccttggacttttcagcctcctgcaccattttttcgatctcctccttgctaagccggcccttggcgttggggatcgggatcttgttcttctggccgggggtcttgtcctcggcagaaaccttgaggatgccgttggcatcgatg

SEQ ID NO: 136790 - DNA, 2367 bp, Zea mays
  Clone ID: MRT4577_56231C.1
ggccgcttttttttttttttttttaggaactaaaacttatatttattaagaagttcgaccacagcccacagactgtggacaccaccccatctcacagacaaccttcagagttcaggagtacttcagaccacaccaaaacaaaccgcccgatgctaaccaatttaatcgacctcttcgatcttgggaccagcaccgctcccaccagacggggcatcctcgtccatgccagccgcatcgcccatgcccgcgccagcgccttggtacatcttggcgatgatggggttgcagatgccctcgagctccttcatcttgtcttcgaactcgtccacctcagctagctggttgctgtccagccagctggtggcgctatcgacggcgtcctcgatctttttcttgtcatctgccgagagcttggaggcgatcttgtcatccttgatggtgttcctcatgttataggcatagttctcgagcgtgttcttagcgtccaccttcttcttgacctcctcgtcctcggccttgtacttctcagcctcctgcaccatcttctcaatctcctccttgctaagccggcccttgtcgttagtgatcgtgatcttgttcttctggccggtggtcttgtcctcagcagagacgttgaggatgccattggcgtcgatgtcgaaggtgacggtgatctggggcacgccgcggggagcaggagggatgcccgagagctcgaacttgccgaggaggttgttgtccttggtcctcgcgcgctcaccctcgtacacctgtatcaggacgcccggctgattgtcggagtacgtcgagaagacctgctccttcttggtcgggattgtggtgttcctcgggataagcaccgtcatgacgccacctgcagtctccaggccgagagacagtggcgtgacgtcgagtaggagcaggtcctgcaccttctcgttgccctcgccactgaggatggcggcctgtacagccgcgccgtacgccacagcctcgtcggggttgatgctcttgcagagttctttgccgttgaagaaatcctgcagcagctgctgcaccttgggaatgcgggtggagccaccgacgagcacgacgtcgtgcacgctgctcttgtccatcttggcgtcgcgcaggcacttctccacaggttccatgcacttgcggaacaagtccatgttgagctcctcaaagcgagccctggtgattgtagagtagaagtcgatgccctcgaacaaggagtcgatctcaatggtcgtctgggcggtcgatgacagcgtgcgcttggcgcgctcgcacgccgtgcgcagccggcgcagtgcacgagggttgccgctgatgtccttcttatgcttgcgcttgaactcctggacgaagtggttcaccattcgattgtcgaaatcctcgcctccaaggtgagtatcacccgcggtggccttcacctcgaagatgccctcctcgatggtgaggagggacacatcaaacgtgccaccaccaaggtcaaagatgagcacgttcttctcgccagagctgctcgccttcttgtcaagaccgtaggcaatagcagcagcagtgggctcgttgatgatacgcatcacattgaggcccgcaatgacaccggcgtccttggtggcttgcctctgcgagtcgttgaaataggccggcactgtcaccactgcattcttgatagtagagccgaggtaggcttcagcaatctccttcatcttgatgagcaccatggaggagatctcttcagcagcgaactgcttctcctcacccttgtaggagactacaatcatgggcttgtcaccagggccagggatgaccttgaacggccatagcttcatgtcactctgcactgacgggtcagagaacctcctgccgatcaaccgcttggcatcgaagacggtgttggtggggttcatggccacctggttcttggcggcgtcaccgatgagccgctcggtgtcggtgaaggcgacataggacggcgtggtgcggttgccctggtcgttggcgatgatctccacccggtcgtgctgccacacgccgacgcacgagtaggtggtgccgagatcgatcccgatcgccggaccctcgcccttcgccattgccaccagcgtccagctagagaatcgctctcccgaacgaaagaaggaatctaaaagaagtagcagagcaactcgagatctagagaaatggagggaaattggattgcgtgctttgcttttgcaatgatagttgaagttgaggaagggagcagcgcgtgggtttttatcgtggtgtggacgtggtttcgggaacgttcgagcgcggcggagacctaccgttgccgatccacgtcacacatttttcccggccggcctcgag

SEQ ID NO: 136791 - DNA, 2415 bp, Zea mays
  Clone ID: MRT4577_56232C.1
gggggggggttttttttttttttttttttttattttttttttttttttttttttttttttttttttaggaacgaaaacttatttatttctgagaagttcaacacaggccgcagctattgcgaccacttcgtaagatcacttatctcacaaacaaccttcagagttcaggcacttgacagttgacacctcaccaaaccaaacctcgaacactaaccaatttaatccacctcctcgatcttgggaccagcaccgctcccaccagacggggcatcctcatccatgccagcagcagcgcccatgcccgcgccctcgccctggtacatcttcgcgatgatggggttgcagatcccctcaagctccttcatcttgtcttcgaactcctccacctcagccagctggttgctgtccagccagctgatggcgccgtcaacggcatcttcgatcttcttcttgtcctcagccgggagcttggaggcgatcttgtcgtccttgatggtgttcctcatgttgtaggcataattctcgagcgcgttcttggcatccaccttcttcttgacctcctcgtcctctgccttgtacttctcagcctcctgcaccatcttctcgatctcctccttgctaagccggcccttgtcgttggtgatcgtgatcttgttcttctggccggtggtcttgtcctcggcagagacgttgaggatgccgttggcatcgatgtcgaaggtaaccgtgatctggggcacgccgcggggagcaggagggatgccggagagctcgaacttgccgaggaggttgttgtccttggtcctcgcgcgctcaccctcgtacacctggatcaggacgcccggctggttgtcggagtacgtggagaagacctgctccttcttggtcgggatggtggtgttcctcgggatgagcaccgtcatgacgccacctgcagtctccaggccgagagacagtggcgtgacgtcgagcaggagcagatcttgtaccttttcgttgccctcgccgctgaggatggcagcctggacagcggcgccgtacgccacagcctcgtcggggttgatgctcttgcacaattcctttccgttgaagaagtcctgcagcagctgctgcaccttggggatgcgggtggagccaccgacgagcacgacgtcgtgcacgctgctcttgtccatcttggcgtcgcgcaagcacttctccacaggttccatgcacttccggaacaagtccatattgagctcctcgaagcgagccctggtgatcgtggagtagaaatcgatgccctcgaacagggagtcgatctcaatggtcgtctgggcagtcgatgacagcgtgcgcttggcgcgctcgcacgccgtgcgcagccggcgcagtgcacgggggttgccgcttatgtccttcttattcttgcgcttgaactcttggacgaagtggttcaccatgcgattgtcgaagtcctcgccgccaaggtgggtgtcgcccgcagtggccttcacctcgaagatgccctcctcgatggtgaggagcgacacatcaaacgtgccaccaccaaggtcgaagatgagcacgttcttctcgccggagctggtggccttcttgtcaagaccgtaggcaatagcagcagcagtgggctcgttgatgatacgcatcacattgaggcccggagatgacaccggcgtccttggtggcctgcctctgcgagtcattgaaataggccggcactgtcaccactgcgttcttgatggtggaaccaaggtaggcttctgcaatctcacgcatcttgatgaggaccatagaggagatctcctcagctgcaaactgcttctcctcacccttgtactggacattaatcataggcttgtcactaggccctgggatgaccttgaacggccacagcttcatgtcactctgcactgacggatcagagaacctcctgccaatgagacgcttggcatcgaagacggtgttggtggggttcatggcgacctggttcttggcagcgtcgccgatgagccgctcggtgtcggtgaaggccacgtacgacggcgtggtgcggttcccctggtcgttggcgatgatctccacccggtcgtgctgccacacgccgacgcacgagtaggtggtgccgaggtcgatcccgatcgccggaccctcgctcttcgcccattgccaccagctagagaatcgctctctcgaacgaaaggaggaaccaaaactagtagggggtagtcgagatctagagaaatcgcagagaattccgattgctttgcttcgcttttgcaatgatggttgaggaagggaggaggctgtgcgtggggatttatcgggggtgacgtggtttcgagaacgttcgagcccggcagagaccgaccgtggatccagaacggaggggcgttcgagaagggtcccggccgg

SEQ ID NO: 136792 - DNA, 281 bp, Zea mays
  Clone ID: MRT4577_56233C.1
gttggcactgtacttatatatcacattaaccatgagaagttgagagccacatacggacacatcagtatacaatagccacagaactcgcggatcgatgatttgcaacgcaagaaacatcagttgggaattggcgtggtattcccgaccgggccctgctgcgcgtcgacatttgcctattgtggggggtctttgatctgggcgcatgatcgggctcaggtgttgctgcgtgaatttgggatcggttcccgcttgcgcaccacattcgcgtctggtgcgtcagt

SEQ ID NO: 136793 - DNA, 413 bp, Zea mays
  Clone ID: MRT4577_56234C.1
tgcacccggccgcaagcttgaatcctttaaatctacaaccctcgtcctttttttttttttattttgaaaaaacaaaaagggcgcattttaatttaaattcaaatacatcactatattaaaaataaattactctatagacccacccaaccttactactaaaatttatcacacaaaaaaaaacttctaaaaaataaaactttacccttttcacattaaaaaagtgaagtttgctaacaatcactaaaagccattttaattataaagagcaataacttgtgattttactcaatatcaacttaaaaaaactacacatttttttaaccaaataaactttcaggggaaatttacattttacaagatttataaaaaaattaataactctttaataattttccgcattattaaattaaaat

SEQ ID NO: 136794 - DNA, 296 bp, Zea mays
  unsure (1)..(296): unsure at all n locations
  Clone ID: MRT4577_56235C.1
ggccgggccggggtcncacgggcgtagagagagagagagagagtgcgaagagggcgtgagagaggagggaggccaagccgtacgcgtcatctcctgctgtttcttcggttcttcccatccctttcctgcctcggcttgcaccttcaaccttgcttgtaagttccatcgttttaactctacagaggctttttgctcgcgaatatttcggaacgaacatgctccgccttgacttccaacgccctcccgacaccaacccccccccccccccccccccaccaatccacctccctcccccc

SEQ ID NO: 136795 - DNA, 478 bp, Zea mays
  Clone ID: MRT4577_56236C.1
aaaaaaaaaaaaaaacccctccgggggacttattttagaggccaaaacgacacttccacccggggaacaggaaagctcactttccgggggggggggggaaaacttttgaaaaacatgcagggcagcagcagcagcaacataaacagggggggggggcattggagccggccggccgggggcccctaactccttaaggttaggggggggctccatggccacggcctcgccgagggggcctttttcgacatgggcccaccagcccatgaggaagttggccaccaccagcctgaaccaggggggaaatttttaccccgtccttgccaggggaagccttccggaggagctccttgagctcggggggggtaacgtacttaacgtgagggactttatttggggtggggtggaccttaacgtcccggacaaaaaacaggagggagtaaagcttatgctccccccatttcccgaaaaaggggccttg

SEQ ID NO: 136796 - DNA, 373 bp, Zea mays
  unsure (1)..(373): unsure at all n locations
  Clone ID: MRT4577_56237C.1
ggcacagcggcacgaagcccgctgtttgagcccggtccgagcccggcacgcccgacacgaataagcgggcggactcggacaggaaactaggcacggtgggctagcccggcacgcccgtttacctctaagcccgctttttttacactaaaacgtgcttatcggcccgcatagcccgctttttggcctgcttttttcgtgctaaacggccggcannngaccgggctcgggacaggaaattgagtccgcgtgcttagaaggcccggcccgttttctaacgtgctggcgggccgggccaaaangggcgggcggcctttggggccatcttctaacacgaagngcagtgttttctantttcatgtgggntctggnaatt

SEQ ID NO: 136797 - DNA, 229 bp, Zea mays
  unsure (1)..(229): unsure at all n locations
  Clone ID: MRT4577_56238C.1
gacgaagcttgtatcccgtatcgcgagattattaacancccattaatgcagaccagacgaaggcacaaggacggagccaaaataggaaangccatccaaagactttcctaagacaaaaaagatctttgagggtggtattccaccaatctctaccgaagataaattaaaggagcactaactatcgcatgggaaggtggctgcgcactagataatgctagaccatagcact

SEQ ID NO: 136798 - DNA, 459 bp, Zea mays
  Clone ID: MRT4577_56239C.1
aaacaagacgagcattaacaaacgctccatatgagcattttcacagccctgattagcttcaaagagcctgttcatacccaatatatagtccaaacaacccagggcgcatctcgaaccttaactactctaccacactcaacacccagaactatgagttatagagcccggacgcaccagccctatgagatcttggagccagaccgtgtccgcaccggaaccacacagggtaacccccgcattaatgcacaagagtgggctaagaatggatgaccatcaaagaaggtacttaatgaaactacaacattttacggacacaagggctgaaccaccgatgccccgctaaatcacggacctgtacctaacatgccaaccacctatctgtacacatagcattcttagaggtcggaataaaacaggctgtacatattgcctgcgacaaaggagtgtccgctgacagtg

SEQ ID NO: 136799 - DNA, 1013 bp, Zea mays
  Clone ID: MRT4577_5623C.1
cgcgggtgagtgataatcttgggcaaatgagccagtcgttgggttacttgtataactcacatctttgtgtcaatgattgggggtggaactttcttggacgcatcggtggagggtacttctcagagatcattgtcaaagactatgcgtacccaagggctatcgcgctaggaatagcccaaatcctgatagcgatcgggcacttcaacttcgccatggcgtggcccgggacaatgtacgtcggcacgctgctcgtgggggtaggctacggcgcgcactgggccatcgtgccagccgcggcctctgagctgttcggggtgaagaacttcggggcgttgtacaacttcctcacggtcgcgaacccggccggctcgctggtgttctcgggggtcatcgccagcggcatctacgacgccgaagcagcgaagcaggcccagcagcgccacagcacctctaagctgctggcgacgagtgggagagtggtgagcgtagtctctgaagcagctccggcgctgaagtgcgagggcgccatctgtttcttcctctcgtccctgatcatggccgggttctgcgtcgtcgcgttcggcttgagcttgatcctggtctatcggacgaaggtcgtgtacgcaggtctgtatgggaagccgcgtacttgaaagatctaaaccctcaagggccagatggcgtggatgtacaggcagtgttgtgtcttcccttcgttctgcacaagttctttgagagtagaacatgctgctgaatgctgatgcacctgagccatagaaggtgcagatgggaggttcattgtaaagtttacaacgaacgaagtatacggaggtcgaaagttcgcggtggaaatgctgtattttgctcaaattttgctgtatttttagttgcgagaagctgtatacgtatgtaataagtacgccagagtggaggccgaaagaacatattcttttatgatttgttgaaactttaaacccccacctaatgaacactagaatcagaagaaaaatata

SEQ ID NO: 136800 - DNA, 336 bp, Zea mays
  Clone ID: MRT4577_56240C.1
ggcaaagtatccgcgtccaagaaatgtcctagcagagttccgatcccctccctagcataaacacgagccttgtgccgtggaaacaatctcaagtcatcgattcatccagcacaagcagcatcacacaaaaccgatcaatctcgcagagggagaaccaaccaatccatcatctgtctcgactctctcgcgtctccgccggtcccagcccggcggcgcccgtccccgcccccccgcccccggccggcgcttacgggtacccgccaccgcaggccgccgcgtacgggtacccgccaccgccacaggccgggtacgggtatcagcagcagcccaagaaga

SEQ ID NO: 136801 - DNA, 222 bp, Zea mays
  Clone ID: MRT4577_56241C.1
aaaaaaaaaaaaaaaaaaaaaaaaaaaaaaaaaaaaaaaaaaaaaaaaaaaaaaaaaaaggggcgggccggctctaggagaacccaagctttacgtcacgcggtcgcatgcggacggtcataagcttctttcttatagtggtccacctaaaattacaattccactgggcccgtgggtttttacaaacggtcgtggactggggaaaaaaccctgggcggttac

SEQ ID NO: 136802 - DNA, 401 bp, Zea mays
  Clone ID: MRT4577_56242C.1
tacgcccgcaggtaccccggtcccgcgaattcccggggtcggacccaacgcgtctcggtgacaggagcagcacacagctacgatcgtagcgagcggagttcgagcactattagtatataggttgcaggtgcgattcgagaggctattcgctatgtggttgcggagtgtgctgtgtgaaatttgaggactgcacgacgacgatggcacactgatgaatccggtgagacggcgaccagctttggcatgggctggattctgattattcgctacgtaaggcataacggtgcctctggtgtcgatcttggcctcagtatcagagctgtattctatgcatagaggacgtacacggacatagaaaagggggagacggggaaggagaccatggatttcttcccccagat

SEQ ID NO: 136803 - DNA, 841 bp, Zea mays
  unsure (1)..(841): unsure at all n locations
  Clone ID: MRT4577_56243C.1
ccggccgggtctcccaccctggcgtcctggattgaaggaggtaacacttgtgcatcatttactattagtgtacgaactgaaagtgtgaggtaaccttttccacaaaatgcacaatatagaacttgggtagattgcctttagtgctagaaccaaactatttttttgtgggtgtgggacagcacagggggaggggtgttctaaaatgtcctcgtgattactgctatcacttaatctgaaagccttctctgcaaatggctaataaagctgttgcataatttcattgctacatgaaatttgattaaagcttatattatgagctttttagtttctttcttaggctttcattagcgaatagttccttttattggagtctacaatttgtgatcctgcccttattgttgcttctgcggttctgcctctatgagctatgtcaaaacttactttctcgatcagatttgtcttaattgaaaataccactgcttgtcatcaatcagatgttcgatgcaataatttgtgacccaccatatggagtccgggccggtggccggaagtctggtggtcggaagctcataaaaggcgtcaaaggcccttacacagtgcctgatgagaaacgggacaatcacatcccatcaaccgccccatatagcctcgcagagtgcgtccatgacctcctccaccttgccgcaaggatggtagtcatgggtggcaggctcgtcttcttctaccctgtactgcgaggtgaagatggcactgcgaacccgcagttcccttgacacccctgcttcaagttaatcacctnctctgagcagatcctgagctttcggtacagccgggttctgct

SEQ ID NO: 136804 - DNA, 2957 bp, Zea mays
  Clone ID: MRT4577_56244C.1
aattcggcacgaggcttgagttggtcctcgactactttaagtgacgtcgcaactgctgtcgtgaagtggagaaaaagtcatgtggatggtactgctgacaaaacccgcaggaaagagcccctgtttccttcagcagcgattaacagttgcaaacaagtgaataatgtttctcaagatagatcaaatggtgtgcctacagcatcacctccatctgggcagttgcagcagaagaaatcgttggctgctaccctgcttgagaatattaaaaaggatacaattgctcttgttcctgctgacattgcaagattagcacagagattcttttcacttttcaattttgcactctttcctcataagtcacctccttcacctatggccaatagggttcttttcactgatgcagaggacagattattagctctaggaattctggaatataataatgactgggcagcaatacaaaagcgctttctgaattgaagtccaaagcatcgggaaatttgtgagaaattcaaatcgtagctcctcgaacgatttagatattcaatcctgtgctgaatgtgccataggcaaagtggctatgttcagtctgttagcactgaggtgttgggtagatgctcatcaacgtctataacgagcatgctggagaaagcaactttgcgatcccccgtagagatccatcactgctccaacgtcaatggagagttgcaagtgaaatcccgaaatcttacaatttctccagtgctgaaaaagaaagaaggcgaacatatggagcaaagaggagaaagctgagagcagccatgcccgattcactccgtgagcaagaggctgatcacaatgcttctgaagatgttgaaaatgatgatgattcgtatgtcaatgaagcatttttggaagacacagatagtaggagcatgaacatgatgccttgtcagctgtccttatcaaaaaatgctggaaaaggcatgatgatgcagtcaggcacaggcatcgatgaagaatgtggttacatcgaaccgcagaaaggaactggtgcgaaacttgatgtaactacctcatatataccttttatgtactgcccctctgatggctcatcatatgtgagaacaccttcaactgcagctccagtggcatcatgtggatctctggaccaactatcagcttccaaattgagtaaagagaaaggtggttgtgtagtcaagttggctccagatttacctcctgtgaaccttcccccttctgtccgtgtcttatctcaggtggcatttcatccgaacgcaacacactttcatggcacctcggacaatgcagcaaagaatatgtatcctgtgccaccactggcctttacagagaatgcttatagacagctaaatctgttccccgaagctaattctaggttgcagcagaatgggatcaccaatgataatgctacagaagatggttctgagcaagatttgcagatgcatcctttactgtttcattatcctcgagatgtggtttcgtcatatagtcatccggttcaaaatcttattaatcagtcaagaaaatatgatcttttcccctttgagaaagttcaagttgagagaagtaacaaccagactacaggttccaccaaaaatggtactgtaaatgctaacactatcgacttccatcctctcttgcaaagaacagaagttgatgtgcataatgatgtaccagaatatgatagtaaccttgattaccatcagtctgataataacatgagcaaagttccagtagatgaccagtcaacggctgggcaagcatccacaggcccttctgagagggagacaagtattgacttgaacattcatttatgttctccaacggtcataaaagattcaaatgacttcagaagtagttttagcagatcaaatgttcaagatgaagtttctaggaaggacaaatctagtgttccagggctcgagattgtaaattcctattttcatcattgcattcaagaacctaatgaagaatcaatgcaaggaattgtaatggagcaagaagaattaagtgattctgaggaagatagccagcatgttgagtttgaatgtgaggaaatggatgattctgaagaggagcaagttcagggtccagaagcctctccaattcaaaataagggtatctcagcatcagttgtttgtggggaatttcatgttagcaatgaccagagtcaaatccagcaaggatctgttcaaaaggataaacagggtgcaagctcgatgcagaaaacgcaagttccttctcggtcagtgagggctaagctgaagccagaaactgcaaagcgcacaggatctaggacgtccacttctcgcacagttgaaactagccggagcaaaaccagaagttctaaagtgccacagggacagtcgagtgctgaatggaagtccaatgattcgagaagaactagaaaaattccggccccaagatgaaggccaatttagcattttattcctgtgctgcatgtgccataggcagagtggctaagttcagtctgttgtcactgcgttgttgggttgattatcatcaacgtctattcagcgcatgctggagaaagcaaccaagcgaacgtctgtggtcatttagctcgaattgtcatgtgaaaatagcagtgggagcaatgtaccaaatatatgaatttctccagttagatagatgagacgaattcataatgttgttggtgactgagtaaagcattcccatgaatagatgagacgaattcctcgggagttttgtacgacgtcctcaaaggttatttgtaatgtgccttgtaatttcaaccaccaaccaggttagttgctgtatgcgcattcgttttgtgtactgggtagagaaatgaatccgggatacatcaactaacctggattcttaactgatcgttaatacatgtggcactagcaactcctgcaatagctgaatgaaaaaaaactcgagagggg

SEQ ID NO: 136805 - DNA, 1025 bp, Zea mays
  unsure (1)..(1025): unsure at all n locations
  Clone ID: MRT4577_56245C.1
acgaggaatcaatgcaaggaattgtaatggagcaagaagaattaagtgattctgaggaagatagccagcatgttgagtttgaatgtgaggaaatggatgattctgaagaggagcaagttcagggtccagaagcctctccaattcaaaataagggtatctcagcatcagttgtttgtggggaatttcatgttagcaatgaccagagtcaaatccagcaaggatctgttcaaaaggataaacagggtgcaagctcgatgcagaaaacgcangttccttctcggtcagnnnnnnnnnnnnnnnnnnnnnnnnnnncaaagcgcacaggatctaggacgtccacttctcgcacagttgaaactagccggagcaaaaccagaagttctaaagtgccacagggacagtcgagtgctgaatggaagtccaatgattcgagaagaactagaaaaattccggccccaagatgaaggccaatttagcattttattcctgtgctgaatgtgccataggcagagtggctatgttcagtctgttgtcactgcgttgttgggttgattatcatcaacgtctattcagcgcatgctggagaaagcaaccaagcgaacgtctgtggtcatttagctcgaattgtcatgtgaaaatagcagtgggagcaatgtaccaaatatatgaatttctccagttagatagcaagactgaagtggtgatcttggccccgtagcttgaacatatgtttataaatcataatgttgttggtgactgagtaaagcattcccattaatagatgagacgaattcctcgggagttttgtacgacgtcctcgaaggttatttgtaatgtgccttgtaatttcaaccaccaaccaggttagttgctgtatgcgcattcgttttgtgtactgggtagagaaatgaatccgggatacatcaactaacctggattcttaactgatcgttaatacatgtggcactagcaactcctgcaatagctgaatgaatgttgaacatgcctttgnnnnnnngggaaaa

SEQ ID NO: 136806 - DNA, 475 bp, Zea mays
  Clone ID: MRT4577_56246C.1
taaacaaagccgtccttccttccttaattagaagggaaaaaatggggtccaatgggccttttaaacccttattaaattccaccaccaaaccgaagaaaaaaaattcaagggacctccttttttaggtaggattccaaactacaaaggcagtattaccaggaaaaaaccccttcaccaccaatgtttttttgaccaacggcttcagcccatcgatttcaaacctttttttcgcttcaaaactttagcacaaacccacccacccccacaagcccagcgatcaggcccttacccaccctgttgccagccgttgccgttgccgttgaaccccttgtcggcggcgttacccctgcccttccggatggcaatgggccacgtgatggcctcaaggcaaaccgcaaccccgccgaccgtggccagaacaacaatgtaggcggtcttgtacccgctggccggcttgaggatgtcaagccccttg

SEQ ID NO: 136807 - DNA, 415 bp, Zea mays
  Clone ID: MRT4577_56247C.1
cggacgcgtgttctagggctaagctcaactgcgttgctaggcattgccttggaggccatgatccaagcacgacctgatcctgtgcaagatcccatgagttcagtaagacttctagcatatttgcccgaaaacaaacatgaatacatactttctacacaaaatcgacgttctcagttgttcaaaatagattatttacgcaccttaattttaaaacaatgtacattttacaatattggcatatacacatatctgagagctcttatactatattcatgtaaagatagtggctgcatagctgcaatccaatatctgaagctcttgcgctatctcaatataaggaattgtgattcattgactggcaaaaatctgaatcacttgacacaatcaatatgtcatctttacagccttgagaaac

SEQ ID NO: 136808 - DNA, 348 bp, Zea mays
  Clone ID: MRT4577_56248C.1
atgtcaaacgacccacatcccaatgctgacccaacccgaggtttgaataggtctaccttcgccactgaccaagctgacacgtgccgatcgcctgcgagctcgccatgcgacaccaatgttaacgatgacaccttcatggacaaggtgaccagggagcttatgattggtgtcatggatgttttgatgattaggaaccttggagaggaccaagaaggacttggaaaagaccaagatgtcaaggaggaaaagctaggacgttctcaacaagagaaatctaagtttgactcaacttcatctcctccttggagtctggaacagacgcccaggatgcatccgaactccaattag

SEQ ID NO: 136809 - DNA, 152 bp, Zea mays
  Clone ID: MRT4577_56249C.1
gactacgcatagtacgatctgaattcggcacatacgaaattgttttgcctctatcattgaaaaatagttacaattcgtgtagtgtgtcaaggaaggagcagacagtgatcgtgaaaccatgtatgttgagtctatgtaaggcgatggtcaca

SEQ ID NO: 136810 - DNA, 343 bp, Zea mays
  Clone ID: MRT4577_5624C.1
gcacatacttcatcgcagtggactgtgtccctcggtgcagacattaccagattcgagggacgaggtcaacgagatatgataggcccggatgttgctgtgccccatcagcagcttgacgcgtggtcacaggacgatttcactgacactgcgaactctcaggactaccgttaccatgaggttaggtgaagtggtttaacccatacggaactcttcatcttaaactacacgttgaatatcagcccaataattctgcattagctggattccgggccttttcaggaggtactgtgaggtcgagcaggcaccagcagcagaatggggaatggagaggtgggcaggggtt

SEQ ID NO: 136811 - DNA, 333 bp, Zea mays
  Clone ID: MRT4577_56250C.1
ggtgtcacaaggttcagcctttttttaataaacccaaccaaatagggtccatccctgggttattaaaacctataacgaacaattaactacacgccctccctcagtaaacgaaaagtttaacagttaaagacccctttagaaaatcaaaaaacagaagggggggcctaacagaaaccacatcaacaatacaattaaaggggggggggcgttcaaacaattgttgtttttacatttcaccacctaggggaggggttctgaagaggggggcaacaaataaaaaaagaagcctgtgcataccccaattacgcctttaaggcagaataatgtatatgg

SEQ ID NO: 136812 - DNA, 1695 bp, Zea mays
  Clone ID: MRT4577_56251C.1
atttaaatcaagaaatgtttctgcaaataaagatgctatggctaatttgcgtgcaagaagggcaattttgtcttttcgtactagaacctatgaagaaggcactttggctgttgaggatatggattgggatgcactgacagtcaaaggaacatgtcaggaaattgagaaaagatatctacgacttacagaagcacctgatcctgccaaaataaggccagaagatgtcctggagaaggcccttgcaatggttgaaacatcacaaaagaattatctttacaagtgtgatcaactaaaatctatccgccaagatcttacagttcagagaatccagaatgaactgactataaaggtttatgaaacacatgcccgattagctatgcaagctggtgatttacatgaatttaaccagtgccagtcacaactgaagaggctatatgcacaaggaatcaagggttgctattttgaattttctgcttaccacgcgttcggtgtcatgctacactctaataataaacgagacttgctgtcatcaatggcaagcttatcaaaagaagccaaacaagatgcagctgttaagcatgcccttgcagttcatgcttctgttttatcttgcaattacgttctatttttcaaactgtacaagaaggcacccaatttgaactcatgcctcatggatctatatgtggagcggatgcgctttgaagctatgaaatgcatgtctaggtcatatcgcccaactgtacctgtgggatatgttgcacagattttggggttcttgagaacagatacaggctgtgcaaccaatggggatgatggattagaaggatgcgaaaaatggttgaaagcgcatgggacagttctttcagaagatagcagtggggaattgcagatagatacgaaggcctcttcttctacactctacatgccagagccagagaacgccgttgcacatggtgatgcatcacttgctgttgatgacttttttgcacggactgacggacaacttaaaaggggcagcagcgatggaccaacagtggatactccgtagtagtattgggggctgccgtggcagtagtgctgaggtggcttcttccgtagaaattacaacagggggcatgaaatggaactgaccaacgatgccagcggagctacagtcggaacatgggtgctctaactgatccagtcatcgggttctggcatttgcctcaaagtgatctagtcatccagagttgcaccgcgatgagcttcgttgagaagacagagaagaaagcagcattacccgacatgagcagaagtttttatgtcgtggtggtttgctcacaagggcctgttccgataggagtagattgaaggtattagaagatattaaatttcttagtcttgtttggaagtaaggggattggaggaactgaagatttgaaggggccaaaatcctagaaggggattttagccttggctgatttgatgacccctccaatctctctcaatctccttatcatcaaatcagccctgccttgattctcttctcccaaacaagccagcccttactagtaaaaattgaatagaaaaaaaagatttaatcctcctcaatctccttcaaccaaacaaggtctaacttgcattaagcgtagaaagtattgtgaaaaacagctacagctttgaagcatacatcatacatgtatcttttccggtgct

SEQ ID NO: 136813 - DNA, 176 bp, Zea mays
  Clone ID: MRT4577_56252C.1
tttcttatacacgtccaatgagttctcgccgatttttacctagggggggggcaccaagcattcaatgtaccattccaaaccctcctactagactgcgcaaactgcacagagccaatatatccttatttgattattaacgcttgtggtcattaggaaagtatgcttgcattattctt

SEQ ID NO: 136814 - DNA, 513 bp, Zea mays
  Clone ID: MRT4577_56253C.1
cagaagtgtttattataagtaaataaggtctctagttggttttttgtcttaaaagaagcaatctgttccattctagtagtttgctaggtttcactgttgtcctgtagaatttactcttcattttccagttcctaacaataataccgcactgatacaaattctcgtgtatgtttattagtttattttagtgtctaatatttcaaacttatattcgactttggtattgcacacaacaagatttagtttatgacaacggtttagtaccttttgtagcgatttattttttcctctaaactgtttctgtcttcgtgatatgtattggttgctcactcattcaagttttcagatgtttgaagactattaatagcaaaaaatatggggtcgaactagtgtgcttcactgataacccaaatattgtcttatattcatcaaaaaatggctgggatggtaagtcctcttttatgttaatttgaaaatgattgatttcatgtactgaaaataagtaatagtgca

SEQ ID NO: 136815 - DNA, 503 bp, Zea mays
  Clone ID: MRT4577_56254C.1
cattgggtacctcgagccggccgggaccaacctcttacccaaggatactacgtggaggagcagccatgacttcatcagaggtcgccgcggcgatcacattcctgggaacccgcctggcggacccggtgccacagaacgggcagcatcgaagaccggctcgggctcagcgagggcggcaaggcgaatcctgctccgaagaaagtggcgaagacatcgacctcctctgaccggccgctgtggttccccggaggcaaggcgcccgactacctgggagcatcgctggtccgcgactacagggatctagccactcggtctcgagaagcccgtggagtacctgcatttccagttggactcgctggatcacaacctggtcaagaatgaaggcggcggcatcatcggcacccgaggcgagtcctcccaactcaagtccaccccgttgcagccctacaggaagggagccggcctccatcggctacatgagtgcgagctcatccacgcccgct

SEQ ID NO: 136816 - DNA, 638 bp, Zea mays
  Clone ID: MRT4577_56255C.1
cattgggtacctcgaggccggccgggaaccaccaccaaatcaatcccgcgataccctctcactaccccagatttgctctcgtggccactcatcagtcacgatgcagtctatccgacaacccctgcgctctgcgctatcaaaggccgcaaccaggcagtatgcgaccgcttcctcgcagtatgccgagacgattaagaaccttcgcatcaacagcgacacaaaggttctgttccagggtttcactggaaagcagggaaccttccacgcacagcaggcaattgaatacggcacaaaggttgttggaggcacaaaccccaagaaggccggcacccagcatctcggactgcccgtcttcaagaatgtggcagatgctatgaaggagacccaagctaccgctactgccatcttcgttcccccaccggtcgctgccgcgagtatcgaagaggctattgccgccgaggttcctctgattgtgactatcactgagggaattccccaacacgacatggtgcgcatcacagatatgctcaagtcccagagcaagtctcgcatggtcggccctaactgccccggtatcattgctcccggtcaatgcaagattggtatcatgcctggattcattcacaagcgcggccctc

SEQ ID NO: 136817 - DNA, 676 bp, Zea mays
  Clone ID: MRT4577_56256C.1
aattcggcacgaggggcgaatcgacctcctgggcccgggaagagattgggtactgtagagagaccgggtagagatagagaggccaggatgagagtggcggtggtaggcgccggcgtgagcgggctggcggcggcgcacgagctggcgaggagcggcggctcccgggtgaccgtgtacgagaaggaggactacctcggtgggcacgccaggaccgtggccgtcgaggacgccgacgccgccagcaccgtgcagctcgacctcggcttcatggtcttcaaccgggtaacatacccaaacatgctggagtggtttgaagggctcggtgtagagatggagatatccgacatgtccttctcagtgagcacggaattgggggccagcggcagcagatgcgagtggggcagccgcaatggcatctcaggactcttggcacagaaaagcaatgcactcagccctagtttctggcgcatgattcgggagatactcaagttcaagaacgatgctctcaggtacttggaggaccatgaaaacaaccctgatatggaccggaatgagactctcgggcaattcattcggtctcatggatattcacagttcttccaagaggcttaccttaccccgatctgtgcgtgtatatggtcatgcccatcgcagggggagtgtgggatctctgctt

SEQ ID NO: 136818 - DNA, 276 bp, Zea mays
  unsure (1)..(276): unsure at all n locations
  Clone ID: MRT4577_56257C.1
gctcatcaacaccgtctttgattccaagcgtgtcatcggaatgaaggtcagggacgcgtttgtccagattgatatcaagctgctgcccttaaaggacatgtatgagcctcgtgtgatgccaatgatagtgggcatcacactggtcaggatatgcagtctgcattaaagagatctcctctataggtcttataagatgcgtgagattgctgaagcttaccttgttagcacgatcaaggatgctgtggtcacagtccntgtctacttcaatgactcaca

SEQ ID NO: 136819 - DNA, 698 bp, Zea mays
  Clone ID: MRT4577_56258C.1
ctcgaggccggccggggtgtggcctcccaataaaaacgccaccccgccctccactcgccggagcccgaccgccgggatgcctcgagatttgcgaccagccgggatgcgcctgttcggcgtcaccatcgcgccggtgcctgaggcgaatcctccgggacgaaatccgagccccaacccacccgtggctgccagggaggacgtgatgcgcaagtgcaagagcatgggcaacctcgcggcccttggcgctggcctggacggtggaggaggatgcgcggacggcggagttgctggcgacgggtacctctccgatggcgggctgatgcagtcgtgcggaaagcggcggagggcgcaggagaggaagaaaggtgccgtcttttgctcttgttttgcgttggaaatctttgttttttgatgcagagaagcacagaaatacacaaagatctggtgaccaataataccgtttctatggtaggaatgtttttagtttgatacttttttaaaaaaaatctttggaggtaggaaggtgcggcatttctgttttttttatacagaaatgctattgctatgtatgtgtgcaagttttatagggttcgcaaagataaacaattgtgctatatctatatgattggtctgctggtttatgtgttgagcgcataaagcacgtttctttgctacaaaaaaaaaaaaaaaaagcggcc

SEQ ID NO: 136820 - DNA, 310 bp, Zea mays
  Clone ID: MRT4577_56259C.1
gggggcctcttacattatccaaaaaattttttttttgaattcaactaataagcaatctaaaagagggcacccccaatgatgtgttgggggtagaaggctgctggggttggcaaagcaaggtggacaaagggcaccaactggtgcagttgtaaaaggggtgaggggttagccacaaaccgctgggggaacggaagcacttgttgattggggaagaaagaaaagggcttgttgtaccaactggccaaagggaagagaattgctggtggaaaaaacaaaggggtcagggcggccacatggttaaatggaaaag

SEQ ID NO: 136821 - DNA, 114 bp, Zea mays
  Clone ID: MRT4577_5625C.1
gccggccgggttcagaaactgtggtcttccgctcccaatctttccccccgcaaatctgaaagctccggcgttgacactgcctcagagctcgcaaggacttgtgtgcctcttacg

SEQ ID NO: 136822 - DNA, 267 bp, Zea mays
  Clone ID: MRT4577_56260C.1
atatatagtatcagatcgtatcattgttgtccaatttatatattgttacagcttattctattttgttaaccaacttgcatgtagactcacgtacatgttctcatatactgattctaaacatttttaaagagattgcttactgtataactttgtttctcaattatataacattcacatctatactatatttatttatgttaatcaacttagttctcgtttattaatgtttaactcacctcctcacgttttatagataatttttatatt

SEQ ID NO: 136823 - DNA, 810 bp, Zea mays
  Clone ID: MRT4577_56261C.1
gtatcgtgcttagatcgattcctacatggtcttcaaaaactcatcttcagagcagtgtcataccaaaagtacctagatcagctgctgctcttgcaaagagaaaaattaaggagattgggaggagagaatctaccaaactagataattatgatatagtgaggaatcccacttcagtgaaaagatttgaagctaggattctttccttctccactgcagggccaagcaatggaccaaacaggtcagcatctacatcaaagaagatccggaagcaccgatctccgttgaggactggcaggcgtgcattttcaccttctagtactagattagttcatggctttggtgaagagcatgaacctgagaccagacatgtaaataagaaattcaggattactagtaatgaggctcccaagaagtttttgaagcatactgaagaggatactgcagataatgacttctcttttgcaagtgacatgccagtatcgggacaacagaatgatcaatatgatgttgcacaggaaacagagggtacacaaatggattgtgaaggtgaagatgctgaaactgatgtgccatatgattcagtatccagaagtgatcctgctgagtgttgcaaccaaataagtgatgtttctctgagtcctgaaaactacagaacagcagacgatgatgttttggttgaaggctgtagtgtagctgtggaggatccaaactccagtgagcaattagcacatggccatgaatccaacagtgctgccaataatgaaatggatgaatggcagatggatcctacttcaacagaggaatctagtc

SEQ ID NO: 136824 - DNA, 226 bp, Zea mays
  Clone ID: MRT4577_56262C.1
tttcctctttttttttttcactttttttttttcttgtatttctttttattgtcccagtgtcatttccactcatttagaaagcctcattccaatattttttccatatattgggaacatgatctctttacccccacccccttccaacttaacccacatcaaccacctgaagtacctttccagtcaaccaccagcccaaccagaaagtcctccgttttaccgccctctc

SEQ ID NO: 136825 - DNA, 208 bp, Zea mays
  Clone ID: MRT4577_56263C.1
gttcttcagaccattagctttatctactccagtgcgcagaagaacccgatcgtcaccatgagggtgttgcttgtcgtcctctctatcctggatctagctgtgagtgccatcttcacgcttacaagcggtggctgtggttgacagccaccgttgtctttcattttaccgccgttgtagcatatgtcaacttcggttcatcttgccatct

SEQ ID NO: 136826 - DNA, 436 bp, Zea mays
  Clone ID: MRT4577_56264C.1
gggaaggccatttggccacatggggttaaaaacaggtttggggggttaaaaaccccaaacccaacttcactcctaaaattggtccgaaaatcccttttaccccttggccaaaaaatttaaaaattcccctcctaaaaggagcaccctttgggcagtcttgggggcctaaaccaaacaatgggatttttaaaaaaaaaccttggggacccccccgcgggttttttcccctccccccccctagttccaatttgggaccaagggggaaaaccccaaccacctttttaggggggggggggcttaaaagctttggaagcaaagggccaggacttttttatcccaagcccaggggggggattctagccttccgagggggagtttaaaaggggggcggggcgggggccttttttttttttaactggcttccccgggggggggg

SEQ ID NO: 136827 - DNA, 650 bp, Zea mays
  Clone ID: MRT4577_56265C.1
ctccttaggtttcagttctcctccgcctccggtctcgagagctcgccagaatggtcgcccacaggttccaccagtaccaggtggtgggtcgcgcgctgccgacccccggcgatgagcagcccaagatctaccgcatgaagctctgggccaccaatgaggtccgcgccaagtccaagttctggtacttcctgaggaagctcaagaaggtgaagaaggccaacggccagatgctcgccatcaacgagatctttgagaagaaccccaccaccatcaagaactacggcatctggctgaggtaccagagcaggaccggttaccacaacatgtacaaggagtaccgtgacacgaccctcaacggcggggtggagcagatgtacacggagatggcgtcgcggcaccgcgtgcgtgccccctgcatccagatcatcaagactgcgacggtggacttcaagctgtgcaagagggacaacacgaagcagttccacaactcgaagatcaagttcccgctggtgtaccagaaggttcgcccacccacccgcaagctcaagaccacctacaaggcgacgaggcccaacctcttcatgtgagcgggtccctactctactggcctgtgtgttttagcgtgtaagagtttgaagatttttgcatgt

SEQ ID NO: 136828 - DNA, 419 bp, Zea mays
  Clone ID: MRT4577_56266C.1
aaccaaaaggaatctcgaaactgattaaccattgatgaccaaatcattttatgttgccaaagttctaatggtgcacataaactcggaaaattcagaaaaatcatcatgacattagcccatacaatcaatatttttgggagataaatagggaaacaacataagaactttcatcatctaccaaacactctgtaagaaacataaacaaaaacagcatcctagggcttccatcgttcaccaagcacttccagcggaggttgctggtagatgatgtcccacggaagggcgatcggtggaggggccgcggcgatgggatatcgcatgcagcaccgccatctgtgcgagacgagaggcgaacgagccgggatagtccgccgacgtctacacaccgggcgtggtttcacgcgggaaatgggctgaca

SEQ ID NO: 136829 - DNA, 510 bp, Zea mays
  Clone ID: MRT4577_56267C.1
ccggccgggacacacagcctcaccctccaaataaacgggctcacgccaatctatacctccgctggcctagtaagtgaagcatcttagatccctgccttatgatgctctggcacggcgggagtggttaggatacacatatgtgggcgtgatggtgttgctgcatcgaactcggcatcacctatcgaggacaataaaggtatacgagactgaacacatgatcgtcaacgctaacgctgtcacctcatccgaaaggaacatcgaagaggatgtggtcaatgacttctaatctaccatgaacgatggccataccgtgaccaggaaacgctacaccaacgtcccccccaagaaccccccctgtatcaagaatgctgtcgagtccggcgtctacaggatgatggacctgtccttccctggcaatgacgacggcgtgaccaataatgacgacgacaccaccatccacatcaaaacagaatacgaacttgatgacgacaaatgtcatcctgccgacga

SEQ ID NO: 136830 - DNA, 1218 bp, Zea mays
  Clone ID: MRT4577_56268C.1
caatgttagttagcgctgggtctgggctggccgggaaaggtaacgagccccatcgacgcccgcccgcgtgtacctggagccgtcggcttccgccagcgcccagctggaggtctcgctgttcccttcacgatacgcccccccaaagcggatcaaaccctagatctcgtcttgtcgccccgttcctccgatcccatcctatccgatcctcatggattcctcctcgtccagcctcagccagcagcccgagttcgactacctcttcaagctactccttatcggcgactccggcgtcggcaagagcagcctcctcctccgcttcaccgccgactccttcgatgacctctcccctaccataggtgttgacttcaaggtgaagatggttagcattggtggcaaaaaactcaagcttgccatctgggacacagctggacaagagaggtttaggaccttgaccagctcttactacagaggggcacaggggatcattatggtgtatgatgtcagtcgacgagagacgttcaccaatctttctgatatatgggccaaggaaattgacctgtattcaaccaaccaggactgtgtaaagatgcttgttggaaataaagtagacaaggaaagtgagagggctgtcacgaaaaaggagggaattgaatttgccagggaatacggttgtttgtttctagaatgcagtgcgaaaacaaaagtaaacgtagaacagtgttttgaggaactggttctaaagatcttagacacgccaagcctcctggcggatgcttcctcagcaggggtcagcaagaagaacatcttcaagcagaaggctccagaagctgacgccgccacaggcagctgctgttaacatggttttggtcctgtatattgctatatgtggtgaagacaattggcagcagctatataatgatgtatcaagttaaacttacctgacaatatgtagtcttgcctcccaaccgcagctaagtagcagaggcacgggtgggtggcatcaataccggcatgatacagtatcagacactgtcatctatataagaaacagccatacttcggttcgttggttgcctaagctcgctactccaagtatctcggtggttggccttgcgcttctactggtggacagcaatatcaacatgtctatatgtgacagaaaacagcctcacttctatttatttgtgccgtgcagtcgtgcagatgatatttcatctc

SEQ ID NO: 136831 - DNA, 314 bp, Zea mays
  Clone ID: MRT4577_56269C.1
cctcgagctcgccggcaagaaaagtacgtctccagatctactgccccccgactacgaatcaagcctcatgcacgaccgcactgcctccactcctcctcctgtgccgccgcctcgccgcgtccctgctcgcgcgggctgggcggcggcgcggccgctgtggcgggtggaacccgatccctgacgtgagcgactcgacatccaggagcaggcgggtggcgctgggcaggcgaagcaccagaagctggccgccgcgggctgcggttccgccgcgtggtgcgcggcgagcagcaggtcgtgtccaggatgaactaccg

SEQ ID NO: 136832 - DNA, 1149 bp, Zea mays
  Clone ID: MRT4577_5626C.1
attttatcttagggtttggaatgttttcggccaggcattaaattactgttaacatatgattttagaatacaagtttttagacatgtgttgtgtatttggctgtatgttaaattgtaaacaaaaaactcttagtcgttgtactctaaccttgaatttatttgatagatttttcatagtttgtttcattaatgcaatagggggggggggggggggctatgtagcaaggatgtgatgtaattatgcgcagctattacaacaatttcttgttctcaatggctttgaattgcagagtgctagccacatcacacctcgaatgcacacaaggtgcttgttgtttttgctgttatggtgtgcagcttcagtctttgaatttgcttctccgattataagctcaaagatttatgtgtttataaattttgaaagtaatattccaagcatacattcagctccagctgccctgtgtaacatccctggtgttactagaactaaaaccttgacatgtcatcatatgcatcagcatcattttgtttgatacaccttaaatgcattttactaggtccaaaatttcaattggaaacctaaactagcccaaaaagtagaaatcaaaatcgagagagaagttgctgaaagtccatataccaaagtggtaggtcttggcaagttgaacaactttcatgagtggagatgtccaagttttatagaaaaaaatgtcaattagctaactttgggctgttgtaacttttgatttataggcatttttgtgctggtcactgtagcacagttgtagggctatcttagatgtacaaacttgtttaagttacttaaccttaaagccatatggaattaggagtaaaactagtccaaagtggggatgacaggtttggattttcagacttagtgtggcagattgaaaactgaatttcagtgcttttggttcaactttgggacttctttgtgcctaattcatgtggttttggaccgaggttgttgtagcaagtttgaagaccatataatagtgaacacattttctcaagcaagttttgtttggtgctacaccaaatttggagtaaactgttctcaaactctctctgtcaggcgaatggtgtgttaaacacagtttcagtaacagaagaagttcagattttagtg

SEQ ID NO: 136833 - DNA, 1289 bp, Zea mays
  unsure (1)..(1289): unsure at all n locations
  Clone ID: MRT4577_56270C.1
gccggccggtttgggctgacacattgtgttcaagaaagctatatgactacatcagagtatggaaggtgcaaatttaatttgcatctttacatgaacacagctgagtaggtgtccccttgtgccatgcaaacttcaagcatgtgtgaaacagaaaacttaagaattcttatattattacagttaccaaatttcattcgtagttacttttgtgggccgaacagaagaaaacataaacattgaagctgagttcatttttatcaaacgatattttgttgaagctatatggctagatcagtgtatagaaggtgcagtttgatttgcacttttgcatgccttgtgccagttcttgaaatatttcagcacaggggtttcctctttcatgaagaaaccatcgttcttggtgattggcaatttatgtggacacaaacatattttatgcatgaataacaaacaaacaatatggatatggatatgcattcactgatctcgtctgtcaagtgcaaatggcacaaggtagaacaaacagaaagtcaggtgctatcttttctcatgctgataggttacacaagatattatactagaatcacaatactcttgtgtagctcttgaaatgtctttggctcattggcttttgtgttgtgatgcccgcgccatttgttgtcctgcatctttgggactgtattggaaggaatggatgtcatcaccagcatcgcaaccatacctacctacaaaccagctgaaaggatccgcctcttcaacggctttgcgcagttgattggtgatggaagggctcaaactgcccgggctatgtgggaccgcccgcttaagaccgtgtatatcagcgactgcggggagctgacagtaaccaaaccatctctttcccctccaagcttgccatgactgccagtgtaatgacactacccacatagccagttttctgtctctgttgcttgggtcctctttctgtactctatatatgcagtgtatatattacctgtgttattaaacttatgcatgttccannnnnnnnnnnnnnnnnnnnnnnnnnnnnnnnnnnnnnnnnntatccaaacagtaagctagcccagctaccgatcatgaatcactacaggagtcctgacatgggagattcggtggacttcactgttcatgtcgcaacgccggtggagaaactgtccctcatgaaggagagactgatgcattaccttgacaacaagaaggagcattggtaccctggctccatggtggtcctgcgcgacgtggacgacacgaacaagctgaaggcctcc

SEQ ID NO: 136834 - DNA, 664 bp, Zea mays
  unsure (1)..(664): unsure at all n locations
  Clone ID: MRT4577_56271C.1
cccacgcgtccggcgccatcggtgcttgagttcctccaccggcaatccgagaaggcacccaccgatgacgacggggttcccctcgacgagcgcaaccgcagaatcctccggtgcctactgagctgggtccgcgtgaggtgcttctcagagacgccggcagcctcgcttgccaggcacccacttctcacttttgcgttcaactcgctgcaggtgtccttctcgtttgaggtggccatagaggttatgactgagcttgtcagccagcaccaagaattacctgaggcctttctgagtaagacaccttatataagggaggctcttcttctaccagctttagccaacagaaatgagaaaattattgctggtcttgcctgtttgatgtgtgaagttggccaggcggcacctgctttggttgcagaagggggtagccaagcacttgctctcaccgatggacttttgaggtcaatttattgcattgnttatgtgatgtgtagcttttaccagtgaagattgggaaattgcagagtcaaccctgcaattttggtgtagtttggcacatttcattcttggtattgatgtgaagtcagccaaaagaaatgtggcccaagagttgcttgggcctgtgttttcttcgctgctggatgctcttttatttcgtgctcag

SEQ ID NO: 136835 - DNA, 407 bp, Zea mays
  unsure (1)..(407): unsure at all n locations
  Clone ID: MRT4577_56272C.1
cgacccacgcgnccggnncnagaccgcgagcggacaaccacaattcaaangccgggaacacaaagcaaaggaaaaaggagccagcaaagccaaggcggggagcagaggagagaggggaacaggcaaaacgacacacgcgaagaggcaacccacaggagaggaagagaaaaaaaaggaaccaaccaggggagcgggaaggaaaccagcggaagcaccacaaaaggggggaagagcagggccaaccgacgggaagccgaaggcaaaaaaagacagggggaccgaaggaagggaaccacaaaacagcggaacacgggaaaacaaaaacgcacgaaaggaacaaccaaagcggcaaaagacaaaaaaacgagccgcacgggggcaaacggaaaaagaaaaaaagcaagggg

SEQ ID NO: 136836 - DNA, 589 bp, Zea mays
  unsure (1)..(589): unsure at all n locations
  Clone ID: MRT4577_56273C.1
ccgggnaaaaaaaaaacaaaaaaaaaaaaaaaaaaaaaaaaaaaaaaaaaaaaaaaaaaaaaaaaaaaaaaaaaaaaaaaaaaaaaaaaaaaaaaaaaacctggggggttggaaaaccttacccgccttttttaacgatccattcgaccccaaacccggggaagggggaggggcgatggcccccggggtggtgtcggaaaaggggggcccggccggggccaaaaaaaaggggtgggtttctttaacaatggattgccccaagccggggggggacaaaatctggggggccccctcgttggaaaagttcttgcaggaccccataagggtccccgggggaagggttggaaacctgggggattccgtaacattttttggggaaaagaccaaggtcaccgtaacttttgagggccctttttcaaaggggaccctgaagtccttgcccaaaaagtctttgaaaaaccacaacggggggaattggttacccggggttgttgccaaaagggcccaaaccgtttatgacccccgttatttaaccattgttgaaaacgagggcgggaaaaaaaattaaatggccttccctttattttta

SEQ ID NO: 136837 - DNA, 1528 bp, Zea mays
  unsure (1)..(1528): unsure at all n locations
  Clone ID: MRT4577_56274C.1
ctcacgcccgccagtgctcgatcccagctccttgccgcgccttccagtccctctgccggccatggagctcggccctagctcagattcttgcgccgcgcccggctgtttctcccctgcgtgccgtggctgtgccgttcctgtgtgcgcggctcactgctcggcgtccattcccctgtgctcaccatggtcgtcgttgctccctggtgtaagttgccgcacacgttgtatcccagctcggagctccctctgcacagctcagattcagcccagccgtgctgagttcggcctttgcttgtccctgtgcttgagctccgtcctcccagccatggcgcacacactggttgcctctgctcgagctcgcccggccagagttcccggtcgccgtgtcctgtcgagcttggctccgtgcgtgcgctttttctcccttagctcgccccgatgccgcaccttgaagccctctgcccggtgctcgagaccccttccatgcctgcgcatcctgttgcctgctcgcaccctgctctctctgacgcgcgtctgttccagctcgcctagccgtcgaagctccctgccatcgtcgttttcggccctgccgttggtacaacatcgtttgctgttgctagttgatgtaacgttgccgtccttcgacgccgcgccgtgagcagcgacttcgtcgatccgtcattttgacagggtacttgcgctgctctcctgtgtatgtgatgattgngaaaaggagtcccagctgatgaaggattaaggaacgaaagctttagtacaccccgcctgccagctgatcgtcgtacatcctgaaccagggtttaatcattttctttgtgaagttcgagccgattataattttggaaggagattggtgctgaagtcgaagctagcagcccctttattcttcgtcgtcaacccacgccgcgtcgcgacatgcccgtcgatcccgacgatctatctgccagatgcgtgccacttgtgttgagctccaaagcccctgtcgagctcttcccctgaaagccgccttcgagcacaatccctgtcatgtgtttgatgggaagtctgaaccaatgttcatcgtcgatctacgattatcaaatcattctggtcatagtaagtcgatgagttattcagaatagttcaattgttgaataaattaatgtgctagtgtgatgctcactagttgctcgataaattacgcgagtcacggaactctcgtcgacttcgcggttcttgcgattatcgagccaggttctattatagcgagttatttcgctattccggacaattagctgaattagtgtaccgagtagaatattagtaggccaatattttaatcccttgtaaagatgtagtataaattataaagcaagagataaggttagcatttaattaattagctggtgagttgtgtaggttaattgtatttcatgtgtatagtttgttgttcgtgatgtttgtgttagattcgagaagcgtaattattgcgcttagtcgtacgtctgtaactagtgtttccgtagtatag

SEQ ID NO: 136838 - DNA, 610 bp, Zea mays
  Clone ID: MRT4577_56275C.1
ggcccgctcgaggggccgccgggggccgggatcacaacatcacaatatttcatcttaccacaatacacaaacaccaacaaactttaaccaacccaacaatcctcccaccactatcatcatgagctccaccgaagtccccactggcaacgcaatggagaactcctaccaatcccgcatcggccaatccgaaatccccgtcctcaaagacgaagcccccattgaatccaccgagtatgacaacggcggtgattctgaccagcagctcgagcgcgacgaaaaggaagccatcgaccgcgacaacattatcagcgagcgcactcgtggtgcggcaaagcagcctggtgcatatgccgagccgggcgatgaggaagggcttggggatgcggcggatggtatcgatgggacttcttctgtaaggtaggtgattgaagtttctatgaatatatgggatttatgaggagggaacagtttgaagtttatatcatgtattattagcagtaggttcgaagttaattgaggggtttcatgtgaaaaaaaaaaaaaaaaaaagcggcctgattcccagtttctattcgtgaaaaaaaagaaaaaaaaaaaaaaaaaagcggcc

SEQ ID NO: 136839 - DNA, 436 bp, Zea mays
  Clone ID: MRT4577_56276C.1
gacagacctacataggtcgaacagtgcgtggaagaaactcaccgctgcacctggacgtacatcatttccgccgcgtacctcagcgtcgtgctcggggcgaccgccgagaagatggctgcggccaaggtgggcatcatgggccgtaacgccagcaacaggcgcaagctgtgcgcgtaggccacctacaacgtgaagctgatcacgccatagggggaggaggaattgaaggtgaccgacaacatgaacatcctttttttttgcgaggaggacggcatcgacctgacctactcctgccgcgcggggatatgttcctcttgcgccgggaaggtcgtctccggctccgtggaccagtccgaccatagctacctctacgacggtcagatcgccgccggttgggtgttcagctgccacgcctaccccaactctgacgtcgaca

SEQ ID NO: 136840 - DNA, 249 bp, Zea mays
  Clone ID: MRT4577_56277C.1
aggaaggcccaggggaagtggcaccctcgctcacattatcatacaatacaattaccggctccgagccgttaaaaacaaacccctggtatttacgggtcccacaaataccaaaccgcaacagcaatggctcggaaaaaacccaaaaaaaaacacgaccagcccaacccaatcccacaggtaatcccgcctttttagatcccttccagcaactaaccccgcgctgcagggcaccccacttggctcatttgt

SEQ ID NO: 136841 - DNA, 328 bp, Zea mays
  Clone ID: MRT4577_56278C.1
tcacacattattacctacatcgcctacttcaacatctacactgatctgctacccaacttcctaaatgaacccttcaacatctatgctcaattccgcgataacttccatttctacatcttcaaatctacagatatcatacaagaaaaccccacttaccatacataattcgatcaataaagctctcgtgacataatggcatactcctttctacagatgaattgaaatgttgtagcacatttacccaacatgctacatagctaccattgactttatactcaatgctgaatactaaatacttcttactacaattgcctatttcgtacctaat

SEQ ID NO: 136842 - DNA, 226 bp, Zea mays
  Clone ID: MRT4577_56279C.1
gagttattgtacatgtcaccaacttctattggttggcgattgcttattgaagtaactagatatgtgctcgtgcattgcgacggaagtaaaaaaaattgtatgaaactggtagaactacggattctaccgggcagattgtagggtggggatttggtgcgaccagggcggcaacgctgaggcgccgtcgtgatcctagctgggtcgcgcgtagggaggagatcacagg

SEQ ID NO: 136843 - DNA, 562 bp, Zea mays
  Clone ID: MRT4577_5627C.1
ccggccggggggcaattatgttggtgttaccttggtgggcaagacgctagccgtcatgggtttcggcaaggtcggtccagaggtggctcgacgcgcgagaggactcgggatggacgtcgtcgcccacgacccatacgctgccgccgatcgagcccgggcggtcggcgtcgacctggtgtcgtttgacgaggccatctccacggcggacttcatatcgctgcacatgcctctgaccccgtcgacggcgaagcttttcaacgacgagactttcgcgaggatgaggaagggtgtcaggatcatcaacgtttcgcggggcggagtggccgacgaggaagcgttgctgagggcacttgacaacggaacagtttcccaggaaggtgtagcccttgaaattgcagaggctgttatcggtgcactgcgaggagacctggctgccacggctgtcaacgccccgatggtccctgccgaggttctatccgagttatctccatacgttgtccttgcggagaagctgggccggctggtggtgcagctggtggccgttggcagcgggatcaaaggc

SEQ ID NO: 136844 - DNA, 372 bp, Zea mays
  Clone ID: MRT4577_56280C.1
cccagagccggagaggccccagagggcaggcgcccgaagcgcccgcggagcccgcgagccggccggaggccgccgggcgcgcggaccccccccagcagccggaggacgagaaggcgggagcggcgcccgccgcagcggcgagcgacccgggagcaggcaaaaccgggagagccggccggtgggagaggtgcacagcccgcgcgcgccaacgcggagcgacagagagcggaattttttttttcccccccccccccccgaaggcggcgccaccccacgctgagacccgagcaggatggggcacgcggaaccccgggcgaagcggccaggaccaccctgcgagggcgcgcacccccgggggcccgagagcggagc

SEQ ID NO: 136845 - DNA, 485 bp, Zea mays
  Clone ID: MRT4577_56281C.1
ccgcccgtgtcgtgtagtgtgtacttccaccacctagcgcgcggctgtgtatccttgcgggacatgaccgggccggtgctcttgaggctcgagacgggagccgaactacgccgcggcgcagagcgcacgaggccagccgactgccagccaatgaggagtccagggacattctccctgccgcccaatggacccccagggccccctcctggcgggctgccccgtccccgggcctgaatcgcgaccgcgatacggacctgagcttccggcgccttttcgtagcaggcgcggagcttcagcggcatccggcgccacgtgcccgtcaagtccgaggaggtgttctccgagccaccagagcaggagaagaaccccaagacggactactccctggggcctcaacgccaagtacatgccctaggacgctgatgatttccaggagccgctcgacgagaagctgcccaactacggcgagcgccacacggagcagg

SEQ ID NO: 136846 - DNA, 1173 bp, Zea mays
  Clone ID: MRT4577_56282C.1
ctaggctccaaaaaacatccgaacccgtacgctcgggagcacagcgcgtccattgctctcccaggtacgctcctctcccttcgctcgtttcttccccaaccttctctgtcaccgcatcctaccctctcgtcgtcgtcccctggtctccacgatggccatgtgatttgctttttctggaatagatctggtctccatgcgcataaactcgcggccagatctggtctccatggccgccgagtagtccttgccgagcagccagatctacacagctggcttgtcatccggttgcaagtattcagggcacaaagactttagagcttaaggattgcatcggggccattgacggcacacatgttcgtgcctctgttcctaaggaaatggaggctgcattccgtggtagaaagagtcaccctactcaaaatgtaatggcagcagtagattttgatctaaggttcacttttgtaatggccggatgggagggtacaacccatgatgccctcattttaagagatgctttagaatgagaaaatggtcttcgtgtccctgaaggcaaattctacctagttgatgcgggatatggagccaaaccaggttttttaccccctttttgtggtgtgaggtaccacttgaatgagtgggggcaataatccagttcaaaatgagaaggaattgttcaaccataggcactcatccctcagagttacagtagagcgtgcctttggatctttgaagaggcgattcaaaattttagatgatgctataccatttttccccttcccaacacaagtagagattgttgttgcttcatgcattatacataattgggtcatagaagatgggggcgatgagttcattgtacctgaggccgaagatgagctacctagtattaatcatcaaagatcatcgcatggacaagcaatggaacatgcctttatggttaactttagacaacaaattgctaatgccatgtgggaagaccgtcaacaatatcaaaatactacatgaatgctatgttatctgctatcactatgtatctttgctttatatgaagctttgagcttatgatttgtatgaaacaatgtatctttgatttatgtggaactatgtacctttcatttgtatgaaacaatgtatctttgatttatgtggaactatgtacctttcatttgtatg

SEQ ID NO: 136847 - DNA, 341 bp, Zea mays
  Clone ID: MRT4577_56283C.1
atagcaacaagattttgtttttcccccaaacaggcaactaatcaaatgcagctggggaatgggccctcagaaaaaaactgctgaggaacctgtctgaaggtctacaccccgtggagctgccgatccatgatgcattcctgcgtggaggcatgctactgctgataggtcatgagccccgtgacccgcgaggaggtgctaaccagccagaccgacagccaccaccgggtgaagccctggtgatgtcgggccaaaacgcccataagggactagtagcgcgtgacacagcgcgatccacagcgtgatctaacggtatcgaccctatcgtccaacatatcgtacat

SEQ ID NO: 136848 - DNA, 242 bp, Zea mays
  Clone ID: MRT4577_56284C.1
cgacgcacagcttgcgcaagagcaatggaactcgtgggcgcctcctcgagactccatcaccgacggcgcggggctccgcaggaatgggcgccagggcgggggctactagctgcgatcctcctcctcatctgactcgttaatgccgggcaagagtaagatgaggagagccaacgaatcgcgcgcgcggccgaccgggcgccgagagaacagagagcacggccgggaggctagtcgtacagatc

SEQ ID NO: 136849 - DNA, 787 bp, Zea mays
  Clone ID: MRT4577_56285C.1
gaggttcggccgggaaaaaaaaaaaaaaaaaaaaaaaaaaaaaaaaaaaaaaaaaaaataaaaaaaaaaaaaaaaaaaaaaaaaaaaacctctccataactcggcacgaggggcgacgctggacaccgagccgccgccctacgccgtggcgactactggacgtcgccggcgccctacgccaggtcttcgccattccattctctggagacaagcacccaacagataccgatcaggcattcaagaagtaaattcttcttctattgtgctgaatatatctgattctacatggctatggtgccaagtgattcatcacatcatggagctgtggacaatagccctaatggattcacccagggtcggcgtgaggaagctaggaaacttgggccatcatggtatttcagtagaaaggaaatagaagaacattctccatccaggagggatgacattgatttgaagaaagagtgtagccttcgaaagtcgtattgcagttttctacaagatttgggcatgaagcttaaagtgccccaagtgacgattgctacagctacggtattctgtcaccgttttttccttcgtcaatcccacgcaaagaatgatagacgaataattgccccagtttgtatgttcttggctgggaaagttgaagaaacacctagacctttgaaggatgttatcctggtatcttacgagcttattcataagaaggattctacagctggccagagaatcaagcagcaaaaaaaaaaaaaaaaaaaaaaaaaaagtactctgcgttgttaccactgct

SEQ ID NO: 136850 - DNA, 802 bp, Zea mays
  Clone ID: MRT4577_56286C.1
ggccgctccctctattccttagcgcagaagcgttcctcgcgtcttccctgctcacctgcgcccttcttctccacgggcaggagaaatttcccccatccatggcgccacaaatctccagctgccttccccctgcatcttcctccctgcgctcctgcaggccgccctcctggcgcacctcgccagcagcgggattcctcctctccctcttcctctactatcctgctcgaccacgtgaggtcgttggcccctgctccatccgccgatagcctcccttcccatggggccgagtttttccccttgacgttggctgattctgaacgccgagctccctacgcccgggttccctgcatctccctcctcgcttcttctcccgagcacgcaggagtagggactccatggcgtcccctcccctggcccgagctcgtacagccggtcttcttccccaactccggcacccagtcaagccccggttgtggtctgccagtgctgcgcgcgagcacaagcccaggccgcccctgcgattctccaccagcgctccccatccatcttccccaggggcgcgcccccttcattcaggcagcagactgtgcctgcgcaccaggaacgaccgagctcgcctctacaactccctcgtcaccggcctccatggatgcacggctcccactcccatggcgcctctgctcctcccatacaaggtgtccgaccccctgctcctacctccagccccctcctctctgttccttgcgcagaggaatttcttctccaggccaacgttttgttttccccgcttcatctcctccgc

SEQ ID NO: 136851 - DNA, 2332 bp, Zea mays
  Clone ID: MRT4577_56287C.1
cagtgttgtgggcatgggtatggggtgcccccgcgcggcgagaatccccacgcgccccgtcccaccccacagtccaatatggccgcttcatccagatccaggccgctctccaagctctccccttcccacctcgtccccctcgacctctccacatcctggtgctgcacgccccacggtctcggcggccacgccccacactcctcgtcctcgtcctcctcctcgcacccctcctccccggcccgcgccgccgcccatcacatggacccgccgcccaccagctctaccgtggcctcctcctacgccactccgccccagccttcctacgcgccctcctaccctaccagctacaccaagttcaactccgcgctcaacgcggggttgctcaatcccatgtccccgccgccgctgccacttgacaagacgcgctccagccccacactcttcgacatgatggccaacgagcaggactaccacccccgcaccgccgccggcatccactccatccccgccccgccccagccgcaccagctcccgcccgcgcgctccatggacaggcagatgctgctccaggaccgcatcgccgacctcatcggcagctgtagccccgggaaccagttcaacgacgccgactcctccgacgtccgcctcaccctcagctccaaggacggcctctccgtcacgctctgcgttcaccgccacatactcgtcgcgcacagcaggttcttcgccgccaaactgtccgaccgctggtccaagcagcagcggacgctgccgcacatcgtcgagatctccgactgcgacgacgtcgaggtgtacgccgagacgctgcggctcatgtactgcaaggatctccgccggaggctgatgcgggaggatgtgaacaaggtccttggcatcctgaaggtgtccgcagccattgtattcgatgccggggtgttgtcttgcttggagtacttggaggctgcgccttgggctgaggacgatgatgagaaggtggctacgttgttgacgcagctgcatcttgagaactccggggctggggaggtgcttaagagggtgtcactggaattggccccttcgtcattggttgaagaggcagatgaaggaggcagctgcaacggtggcaattccagtggtggtgaggaggtattgctgaggctcctgcaggtcgtcctggaagggaaggacgaaaaggcaaggagggagatgaaggggctagtgtccaaaatgctcagggagaacagcacatcccgtggtggagcaattggtggcgaccttcgcaaggaatcgctctattctgcgtgcaatggatgcttgtccctgctgtgcgagcaatttgtgagggcttcagagggtgatcactcagaggtggcgcggatcgcaaggcaggctgacaacctgcattggatgcttgacatccttgttgagcgccagatcgcggaggatttcttgaggacatgggcaacgcagactgagttagcggcgatgcatcgtaaagtgccagcgatacaccgctacgaagtgagccgagtgacggcaagactctttgttggggttggcaagggtcagatcttggtgtccaaggaggcccgttgccagctcttgagcacctggctagagcccttttacgaggacttcggatggatgcggcgagcatgcaaggggcttgaccggcatttgatcgaggatggactggcaaacacaatcctgacgctgcctcttgcaactcagcaggagatccttctggcatggtttaatcggttcctcaactctggggaggattgcccaaacattcagagagggtttgaggtgtggtggcggcgggcattctggaaaaggaactctgagccagaaccaccatcccgtttgaggattactgcgatctgcgagaactcttgatgacgacggttcatattcgacatggaatgtggcggatgttgtgatataattattgattttctgtgatatgtagtagtgtctagctgtttctcagttttttttttgttatgtctgattaggcagttagccaattacacatgtcatcttgatcctgtttcaatgcaatgtataccaggtacaatgtactactatgccgcaaccattttgattcgaagtgaagtagagtgactatttgtggtttgctatatagcataagcaaacaatggaaggattcagacacatctggagtttggaaatggttgcacatctggggtttggaaatggttgtcctgaggccttatttgatactatccatatgtattggtgtggattggagtgtaaattagtttaatttacacctgaggtcttgttcgattattgatattacatgtgt

SEQ ID NO: 136852 - DNA, 341 bp, Zea mays
  Clone ID: MRT4577_56288C.1
ttttttttttcctaggctagtcaaacaggtgtggaggcagataaggaggtatttgcttctatctactttttggagatactagtatagaagattgtcttttcgactcacaccttgactacctgatcatggtgcgtatagctgttaaatatcacgatcagatgaccaccatcatcaccacatgcctctctggatacttcccttgtagaaatgtttctggttaataactgatagattctctatagatttgatgaagtgactgttccccataggacatgctccctctttagattgatcgcaatgcaaaacaattttacatctgaattcaagtaggaggcacaggc

SEQ ID NO: 136853 - DNA, 338 bp, Zea mays
  Clone ID: MRT4577_56289C.1
ggggggggggggggggggggggggggggggggcagcatacaacaatcaattataaaggccctgaaaaggggcatagtaacccccgatacgataggccggggtaaaataccaaaacgttaggagtttagaccgcacacaatgaactttgcaaatctaggttgcaatggaccgatcaccactcctactacccccactgctgcgcctactactattgccctctccgccctttgcattgccttggcccttagtagtttcctcttgcaaatctgctccccctgtatccggttgttgcggtgtatcacactccatatccataagcgctctagccaggctctagc

SEQ ID NO: 136854 - DNA, 779 bp, Zea mays
  unsure (1)..(779): unsure at all n locations
  Clone ID: MRT4577_5628C.1
cgggggacgcaggtgacgcgggaggtgttcgaggccgcgcgcggcaggctccgtgtcgtcgggcgcgccggggtcggcatcgacaatgtggacctccaggcggccaccgaagccggctgcctcgtcgtcaacgcgcccaccgccaacaccgtcgccgccgccgagcacgccgtcgcgctcctcgccgccgtggcgcgcaatatcgcgccggccgacgcgtcgctcaaagccggcaaatggcagcggggcaagtatgttggcgttaccttagtgggcaagacgctagctgtcatgggtttcggcaaggtcggtccagaggtggctcgacgcgcgagaggactcgggatggacgtcgtcgcccacgacccatacgctgccgccgatcgagcccgggcggtcggcgtcgacctggtgtcgtttgacgaggccatctccacggcggacttcatatcgctgcacatgcctctgaccccgtcgacggcgaagcttttcaacgacgagactttcgcgaggatgaggaagggcgtcaggatcatcaacgtttcgcggggcggagtcgtcgacgaggaagcgttgctgagggcacttgacaacggaacagtttcccaggctgcgctcgatgtatttactgaggagccaccgccaagagacagcaagctagtgcagcatgagaatgtcactgtcacaccacaccttgnggctagcacaatagaagcgcaggaaggtgtagccctcgaaattgcagaggctgttatcggtgcactgcgaggagacctggc

SEQ ID NO: 136855 - DNA, 541 bp, Zea mays
  Clone ID: MRT4577_56290C.1
gccgggctgcggtgggaccggaaacccgagcccggcgagttcctaccgcactcacgaacgctttcctattagcgccggccccgctggtgcaagagccagatggccgtcgcgcagaaaaggacaccgctaacgcacgccatggggaggatgcacagccgcgggaagggtataacggggaaaacgccgacgtacaagaggacgcctactacctggctgaagacggacgactacgacatgaaggagatgatcacaaaggcagcgaagaagggacagatgccggcgcagatcggggtcctgctccgggaccaggacgggatccaccttgtcaagagtgctaacgacagcaaaatacctccgcatcctgaagggccatgggcatggcaccctgaaatcccggaggaccacgtacttcctcatcaagaaggcggaggcgataaggaagcaccttgagaggaacaggaaggacaaagcactgtaaattcaggctcattcttgaagagagcaggatccaccggcttgcccgctactacaaagcgcaaaa

SEQ ID NO: 136856 - DNA, 264 bp, Zea mays
  unsure (1)..(264): unsure at all n locations
  Clone ID: MRT4577_56291C.1
ctaagtttgattcccacaacaagaggatgggcnctagatngnacctagtgccattccgaatcccgaggagggcaaatagaatgcagtggtgggtggctatcgctgagggatgaaaacgagccggatgcagggtcatcctggatccgaccgtaatgtatttctcttggatacgagaccggatacagggagttaagattcgggacggatagaggacgggaccaggtaataatccggatgggtaagaaacggatgacggatactact

SEQ ID NO: 136857 - DNA, 500 bp, Zea mays
  Clone ID: MRT4577_56292C.1
agcacaaaaaggtcacggggtaaaatggccatcttttacaaaacacagggcctttcaaggggacaatgcaacaacaatcaaaaaacagggggggcctacaagggatgaaaaccagttaccgggaggggggggaaagggcccagtacaacccacaggtaccccatgaaattctacagggacctttttaacaaattcaaaccctccagcaaaaatggccaaaaccatcaaggggacagctgggaaacaacgaggcctcttgaggataaatttttaaacaaaaaacaggggaggtatcattagtctaaaggaacggaacccattttagctccaaccccaactcacccgattctacggtctggagctttaaaggcaccccctggtttaccttacctgccaaaaaattaaccgggctatttttaaaaaggggggtggctttgggcaaaaaccaccccccaatttggatggcaccaaaacgggaagtatctccaaaagccatgggg

SEQ ID NO: 136858 - DNA, 298 bp, Zea mays
  Clone ID: MRT4577_56293C.1
gcatctctctctccctccgactgcggcttcgtgcggcgcccgcgactctcatgtctcgtgaagtcgctgaatagactgcgagcaaggaacgagtctgtgacctccacccggcgttccctgctcgcctgatccctaatcccggagaaccctagctgacgccttagcagagccacgtaaaacaactaccaacaaacacacgactgatccatgcatgctatctacatttacgaagaaatcaagaacagtcctctgctggattgacagcaaaggcactactagacagctgccgccaccggac

SEQ ID NO: 136859 - DNA, 275 bp, Zea mays
  Clone ID: MRT4577_56294C.1
gtatttgcaagataaaattttctatatgccatatcaaggaagggcattacatataaacgacttatgcatgacacaaaacaccacagcccgggatttttaaatccaagtccacaaattcgaaatggtaaagaaagatgttcaatagatgaacacaatcatagtctgcggcttactcatgaagcatgccgactggaaacccaaacatgggccaccttacgctggaaatatctgtcttgggcacgaacccaaataatgggccctggtcaggcttgccc

SEQ ID NO: 136860 - DNA, 290 bp, Zea mays
  Clone ID: MRT4577_56295C.1
ggttaatctagccaaaaagattatatatagcagctgttttttgacaagcacaccgggcgggctttatacaatacacaggacatgggtgcttggcgttcgaaaataaaacaggggcagaatggtaaaatatatggaattgcttattgcacagtacacattcacacattgcattgggagagccgctttatatatatgtatgacgctgaatgctgaatacgaacatgcatcatgctaggcatatatatagattcacgaagggtgcttattgtaccatgtgcaataacccccaa

SEQ ID NO: 136861 - DNA, 3175 bp, Zea mays
  unsure (1)..(3175): unsure at all n locations
  Clone ID: MRT4577_56296C.1
tcctcggcacgaggcacctggtattgtgctgtcgccgcagctgtaccgtactgcctcccctcgtgccggtcgtgcccaccagatgaccgtcatccctagcatcgtctcctctcgttagcagtcgcaagtagccagcagtccagcacacgactccgccgccgctatccactccgccctcccctcctctctgctattgggccccggcgggccgacccggcattcttgaacttccccttccccgcatcaaatcccctacccgtgccgtcgctgcgcccgcgctgcgtgtccgaattttcgccgtaatccggctggtttttcccgtgcgcagcgggccgtaatggcgctgtccgcgtccgcggcgtcggccggccgggggtcgcgggcggagaaggtgaggaggatcttcgagcgcttcgacaccaacggggacggcgggctagaccggaacgagatggccgccctcgtcgtcgccgtcaacccgcgggtcaagttcagcgaggaccagatctccgccatcctggacgaggtgttccacacctacggcgaattcatcctccccgacggcaggggcctctccctactagggctgcttcgcacctacgatgacggcgccggggacgtcgaccgcgactttctcgcgctctccctacccgccgtcgactccgacgcctcctccccggacatcgccgcaggggacgctgccgcccactcctccccgccctccggggctgccgccgccgcatcgctgctcgacgaccacgccaagccgctcggcgccggcggcgctgcgccgtcggtcagctcccgcgccgccgtcgccgcgccggcttgggcgacctcgcccaaccacggcatcgccttcgactcctcctggggactcctcgacgacctggagatactcgtcaagcgcctccgctcaaagcagctgcggaagggctccatcgacggcgccggcaacaacaacttcgactccttctccgaggccgggtggtccagggagatctccggcgcggcggattccgcatccaccgccgctccgtgggacgagacgagccgcgactacctcaccttcgtcaaggaactcgccgtgctccgcacgcgcgccgacgcctcccgctcgcgcgaggaggccttcgacaaccacatgatcatcggccgggcgctttccgagcaccgcctcttccgagacgccctagccagcttccgccgcgcctgtgagctgcagcccactgacgtccgtccccacttccgcgcggggaactgcctgtacggcctcggtcgctatgctgaagccaaggaggagtaccttcttgcccttgaagccgcggaggctggtggctcacagtccgcggacatcctcccgcagatccatgtcaaccttggtattgccatggaggccgaggggatggtacttggtgcctgtgagcattaccgagaagctgccatactgtgtccatctcatgccagggcactcaagctcctggggagcgctctctttggcgttggggagtaccgagctgctgagaaggcactggaggaggccatcttcctgaaggaagactatgctgatgcgcactgtgaccttgggtccgctctgcatgcagtaggggaggatgaccgtgccatccaggagtttcagacagcaattgatcttaaacctggccatgttgatgccttatataatcttggtggattgaacatggatgctggtcgttttgtacgggctgcggagatgtatactcgtgtgctgagcatccgaccaaaccattggcgtgcacagctaaacaaggcagtggctttgcttgggcagggtgagtctgaggaggccaagaaggcactcaaggatgcgtttaagatgacacaaagggtggaagtgtatgatgctatctcacatttgaagacattgcaaaagaagaagccaaagccttccaaaggaaaagatgacggtcaaggggagcaggcttatgttgttgtggaggcatccaagttcaagagggttgggaggaagactaccttgcggcaggatttggccaatgctctagatataagggcctttgagaggatgacaaaactaggtcactgcgatgtggagcttcttagaaaagagatgaatgagactgatgtccctgtatcttactcgggcaccggcatccctgagaagtcaatacgcaaagcagctcttgaggttattctccgcaggctcctctcttttctcaagccagacacctttcagggtgctattaaggcaatcaacgaaagaattctctctgtccttgatgcttctggctctggtcgtgttgatctgggcatgttcttcgccaccattgctccaatctgttctggccctgtggatatgcgcaagcgtatcgtctttgatgcactcctttggcgtcctgctagcgaaggcagcaatggccagataaggaggagtgatgcgttaacctacattaagcttcttcgagctgtttatatacccacgcatggggctagtgacatgctcgaaatgcatggggagtctgaccctaccatggtatcatacacggaattcttagagatgttcaatgacccagattggggatttgggatcctgagcactctggtgaagcttgaggagagtgatcacatacgtcacggtcgccacacatgctccatctgcctgtaccctatcattggttcacggtttaaggaaacaaaacactccttcagcctgtgcaaccggtgctacagtgaagggaaggttccgtcagcgttcaagttggaggagtacaggttcaaagaatacggtaacgaatccgaggccctcattgataagtgcatgtgcttcaatttgcattctaagaagctggaagctgatgcttgatcattcaaactttgatctcgagtgctcaagcatgaatctgtgtatttacctaggtgcaaagatgtctagttagctctcccactcccttgtaaacaaagttgctgccattcagggtttctctagatgtgtcccggttactaatatatgaccgtaatgtgttagctgttgttttaagtgtacgggaacgagtaaatgtgaattccatacactctgtcgccccagtccaattcagccttgttgaaccttgcatatttttgtgtgagcaaaaacaattttgggagtcaaatttccgngggggggacccggtacccatat

SEQ ID NO: 136862 - DNA, 822 bp, Zea mays
  Clone ID: MRT4577_56297C.1
cccagcaagccgcccagcacgaccgccagccatcaccggccagtgagacggtacagcaaatttcccccgtcgcgcccggtcattacgacggcgccggccgagcagacgccgccgccacgatgccgcccgccaccgtcgccgacactgcccccgccgcggggaccgtgctcctcggcaggtacgagctcggcggcctcctgggccgcggcgcctccgccaaggtgtacctggcgcgggacctgctcaccggccgctccgtggccatcaagtcgttccccaacccacgcgccggtggcggcggtgtcaacgccgccatcgagcgggaggcgtgcatcctccggcgactgcggcaccgccacgtggtgcggctccacgagatcctggcgacgcgcaagaaggtccacttcgtgctggacctcgccggcggcggcgagctgttctcgctggtggacgcgtcggggcgcatgacggaggacctggcgcgccactacttccggcagctggtgtccgccgtgcgctactgccacgcgcgcggcgtgtaccaccgcgacatcaagcccgagaacctgctgctggacgagggcggcgcgctggtctggaccgagctgctggagccggccgtgaagcccccggcgctgagctgatgaggtggggtggaagccgcgttctctggttgcgattcttttgtttcttcttttttgtcgtcgcctgctatatatcattggcgagatcgtcgtgtgtaaattattcactcgctccgtggctatatccaacaaagcaagcaaggaagaagaagaagaatccttgcggtttctgagagtc

SEQ ID NO: 136863 - DNA, 245 bp, Zea mays
  Clone ID: MRT4577_56298C.1
acaagcagttcagcctgacggcggcgactgctggtccaaggaagcaaacgatgcgagcggggccggcacaggggcaggcctgagacagtctacgatgcatgcacgtgcacgagagaaactaaacggcggcgagcggggcgagagcgctggatgctagatgtgctgcgctgcgcacccgtgggtcggtgggatatggcttttagtagtcggcggaggacggctgctcgtggctgtgggagatgaac

SEQ ID NO: 136864 - DNA, 348 bp, Zea mays
  Clone ID: MRT4577_56299C.1
acaggacatgcagcctagagctcgccagccggataagaggaggcgtgcattggcctatgggaggagggctgtacggaagctataacatggacactgacaagctcccacagacaagcgcgaacgcgactacggccattacctccgacggccgcgaaggacaatgcccactacgccggcggcggccgcgctgcggatgctcttgtggacacggccgtacggttgagacaccgaggacgagggcgcgacgtcgccataccaggacgccagcaaggacggggacgaacgcgtgacggacctggtcgcgcggatgacgctgacccagaaagacgagcagatgacgcatatagc

SEQ ID NO: 136865 - DNA, 499 bp, Zea mays
  Clone ID: MRT4577_5629C.1
cgcattggtgcttgcccttctggtcccttctcgagagactgaccccagggtagcgttccggagggtgcaacactggggtatcatccccgcgagttgagaagtaaagccagaagaagcggtagccgtccccaactccttcttctggatgcagggcagggtggtcgctaaccctgggtcaccctcccagagtgggtggggccaggctgccaactgtctgggcacctagggggggatgtcttctcccgaggggggcgctccgccagggcgataggcctgcttctcttacgtgagaagagaaaagtggggtttgcaactttctcagaatggactcgggaggttttggtaatattatggctggtagcggggcctgacaatgcttgtgtaaacctggactttgtttgagcggagtgacagctaatatggtggtggttggcttttgctgagggagtggcaatgcaaatgaaatcaagtggtggcggtatttgtcaggcttcacaac

SEQ ID NO: 136866 - DNA, 1863 bp, Zea mays
  Clone ID: MRT4577_562C.1
cgaagtcttccctgcgcacgtcttcttccccgtcgtgccctctgctccatcttcaccagccgcgcgctgtgaagcccctggcgtgtcccttgttttcccagccgcgcctgctccctgtcccacgctcgtccggtggcctgggcgcgttcgtgcggtccgcttcggtgcggtacgcggccagacggtagagccagagtctgccgctgccccgaaactgtagcacgcggttaggtcgcgtactgaccccgagctccagccatgagcgccgacgtcctctctctgtgcttgatctccctcaactccgactgtgttgtctgctgcgtcgagctcggggcctgctcgcaagtccttcagctcgcgattggcccagattgaatcttgcttcagctcgccgtctcctttccttgctgtggtagttggccgctgctgctaggctttgctgatgcgcgtgatttgccggccatgtcccttcaccggtggtctcctcgacccgtgcgttggtcgccttgtgtgctcggccgcaggcgccgtcgagctatcgaatcccgcccaccctctgcctagctgctgcttgtcactgccccaatgctgtggccggctctggaccctgctggcgagtttttcctcagcgccgtctgtttgccggtaatcttctgctcctccccatgtcggtgatgttctccaccaccgctcaaatttccgtgctcaattcgtggatgcctcggctccgcggtattcgtcgggtctcatcctcgacgtcggtcgctcctggtgttgaacccctagcttctggtgtcacacatcttctcatcgtcgctccctgcgccagcgctcatactcgccatcagttgcgccatgttgctgtgcctccttgcgtaagtgtcgtcgggcgcttgccagcgctttctctgctcgccgacggctcaaccgttgttttcccgcgagctcgcccccatgctcgggctttgctagtagtcggctccctctatgtcgcgcccttcctgcccggtctcgcagacgccgagttcgcccaggtcgcaagtctaagtgtcctcgccgtgtccttgctcagctttttcagctcgcctgtcatctatgcgcacacgtcatcgcctcccctagccattatgcttggccgacgactcgctttgtgccactgcgtcgatgtctgcacaggcttgcgatgtcccgtcttagctgccagttttagcttttctctggccgtaaggccgtgctcctcgttcgacctcgccgttggctgcttactcctgtcgttgtgcaagctatcaggttgtctgatgctgctctagtactcgccagttggatgctgaactgaagaaggcgacgttccgatgcgtcgctcatcaagcgttcgatcgaagaattcaatcagagactgtcatcgattctgtggtttcgagttggatttaatttaggtacgataattaatcacgtgaggcggaagacgatccaagtcgaccacaagatatcgatacgcgtgagtttcttcaaaagataatgttgatggattaacccgaagatggatggacgaagcaagtattggaacaaaggctggtcgtcaagtggtcgccacctaacaaacactaacgtagtgtttattccaggcaagcccaggtcatagttttgtgctactgatggtggtgttaagtgccggtgggctcggccttcttataagtctaagtaattcttctatacttcttattgaggatggtcacataagctagcatatatttcaaacttacaaataatttataacatctcaaagttattcctttgaaccacttttgtaatcactctgataaatacaatgtaaacttgttgtaacttgtaaaatttggtagt

SEQ ID NO: 136867 - DNA, 919 bp, Zea mays
  Clone ID: MRT4577_56300C.1
aattcacgcggaggcggctcacatcaaacaccccctcctcccccttcagctgtgctcactgccgcaaaaccacacagccacacaggcaaccagcgcccagcgccctttgacatcaccacatccacgctccgttccatggccatgtcgagcagcgccagcaagaagcaagcccaggcccaggcccagaaggccgggcgaaggcccccggcggtgtcgtcggccgcggccgcggacgcggagatgcagagggtgttctcgcgcatcgacgcggacggcgacgggcggatctcgccgtcggagctggcggcggtgtcgcgcgccatctccccgccggcgagctcctcgcacgggcggcgcgaggtggcggccatgatggaggagctggacacggaccgcgacggcttcgtggacctgggcgagttcagggcgttccacgcgcgcggcggcggcgttggcggcggcggcgacgacgacgacgacgccgagctccgcgccgccttcgccgtgtacgacgccgacggcgacgggcgcatcacggcggccgagctgggcagcgtgctcgcccgcatcggcgaggggtgcagcgccgaggagtgccgccggatgatcgccggcgtcgacgccgacggcgacggctgcgtcgggttcgaggagttcaagatgatgatgcgcggcccccagccccagccccaggccggcgccggagtgacagccgtgccggacaaggccaagaaggagtgacgacaggtgtaggtgtactcatcagggcatcagtcggggggaagggatcgggttcctctgcctcttctgttgctttcacctagtctggactggaggaatggaaatactcaacttcctgcataagactacttattatctacagtattattatgtaaaaaaaaaaaaaaaaaaaactcga

SEQ ID NO: 136868 - DNA, 382 bp, Zea mays
  Clone ID: MRT4577_56301C.1
acgagcgacatagcacgtggaatccagtagccacgacagagcaacaatggcgaccaagatagttaccctccttatgctcgttgctctatctgcatgtgttgctaacgcgacaattttccctcaatgctcacaagctcctatagcttaccttattaccccataccttacatcaacgatagcttcagtatgtgaaaactcagctcttgagccctataggcttcaacaagctatctcagcaagccacctacctttatcagccttcgctgtttcaccatcggcaggctctatgttgggtgcagtcattggtacataccatcaaggcacatgagctgcatcaactcgggctacctgtgatcaacccagtagctctggcaaacctttc

SEQ ID NO: 136869 - DNA, 503 bp, Zea mays
  Clone ID: MRT4577_56302C.1
atgtttttttttgtttttttgtttttacaacgaactaacaattaagttgtgttttatcactaattacccaggtctttaccacgggtttacatactacttttgtgaaggtaccaaagatgctcgaatattgatatggtagttcaatccggttgaggcaaagcggacaggcggtgatgagacgccaaataccggctgttgagcgccgcagcctgacggggatcttttggttacctgcgcgacgaccggggggaataaccgtggtcctgggcggatgtgagttgctgctgggacgcgacgacctggtccatggtgggcctcttcctggagttcttggagaggcactgtagcgccagcgttgccgtcctttggacggccaggagcggatagtggccggtcaggcggctgtccaggatgcgggagacgcggcgcttgctggtgcagtaggggcgcgcccatgcgacgaggataggctcggaggacgagcggtttttgtacatggcgcg

SEQ ID NO: 136870 - DNA, 482 bp, Zea mays
  Clone ID: MRT4577_56303C.1
acctaaggcaattccccaatttttacaaaaccaaccggttccggatttaacggttccaaccagttaaccctgacggcaacaactgttgttccaaggaaaaccaaacaatgcaaccggccccggcccaccggcggcctgaaacagtcaacaatccttgcccttccccaaaaaaaactaaccggcggcaaccgggaaaaaaaacctgaatcccctacctgccctgcccacccttaggtcggtcggtttcggtttttattattcggtggagggaacctgctcgtgggtgtggaaaataaaaaccacctcgtaaataaccccggcaaggccgccgccaataaggggcccaacccattccacccactggtagccccactcccagctgacaagggcggggccaaaggacacggcggggttcatggacccgccgtcaaaggccccgcccaccagaatgttggcccccacaatgaacccgatggcaatgg

SEQ ID NO: 136871 - DNA, 495 bp, Zea mays
  unsure (1)..(495): unsure at all n locations
  Clone ID: MRT4577_56304C.1
ctcgaggccggccgggattttatctgcgacttggaggctagggtttccggattcttgcgttttaatctttgcaattcaaaagcatggggcactccaatgtgtggaactctcatccaaagaactacggacctggttctcgcacctgccgtgtgtgtgggaatcctcatggattgatcaggaagtatgggcttatgtgttgcaggcagtgcttccgtagcaatgccaaggaaattggcttcattaaatatcgctgaaggattagtgtccaactgccccattcggtttggattcttgcattaggctgggttgattttactgtctgaagaacctaagaatttttgtgacatttagtgaagttaattatcaaaactcaatttgtggaactaagaatatttttgttttttatataattgttttgagcttctannaaaaaaaaaaaaaaaaaaaaaaaaaaaaaaaaaaaaaaaaaccaaaaaaaaaaaaaaaaaagcggcc

SEQ ID NO: 136872 - DNA, 311 bp, Zea mays
  unsure (1)..(311): unsure at all n locations
  Clone ID: MRT4577_56305C.1
cggacgcgtgggatcacccgaatattaatatttttacacacaagaacaaaatagcggggacgtgtaaacttggtttgcgatctgncccatacctcacctgcgtggaacgtggacaatacgaattccatggtcaagagaccagatcggcagcgttcttctacttgccctccaccggcctgcagcgcgccaccggcagctttggccgcataattgttaacaaccgtcacattataaccgcgcccttattccgcaccgacggcgacatcaccatcttcatcggcgactggtacaacaagaaccacactgatctg

SEQ ID NO: 136873 - DNA, 885 bp, Zea mays
  Clone ID: MRT4577_56306C.1
ctcagctgagccgagcggaaccagctcgcacgagaggaggcggccaaacggagaggaagtgagaccgaggtgagaaactgacaggacaggagtacgatcaccgccgcccgcagcaagaagagagcatggacttcctcacgcttccccgccgcgatctgcaggcgctgtgcaagcgcaacggcatccgcgccaacatgaccagtgccgccatggccgacgccctccgcgcgctccccaaggtcgaagggatcgaggagtacgttaaggttctgcagccggtctccgtgccgcaaacggcggctaagccggtgaatgaggagcagaagcaggagagtccgcttccgcgtggccgccgcgtcacggcccagtcatcggagcccattgaggcggaggaagacaaggaaaatgatgcaaagcgacagtcgaacaaagaggacgtgcaggtacctggcgtcgggcggcgtggtgccagccgtcgcgctaggcccgtgcccgccgtgcctcagccgctgggcaaggcagtggcggaggaggatggccagggagagcaaaatctgaagcgggaggccaaaaaggatagcgcgcctgctcccgtcgtgggccggctcgctcggccctcgactgttgtaatcgcgcgggcagacgagtcggaggttgcaggtgtggaagaggagcagagcaaggaggtggtagatgatgcgctggcccttggcgtaggccgccgcggtgccagccgccgcgctcggccggcgccttctattgctgcgctagcaggcaatgtggtagcggatgaggagcagatagtccctatcccacgcggccgtcgtgtgaaggcccatggaaactcgtctgagcctatcaggttggacaccagttatgatgatg

SEQ ID NO: 136874 - DNA, 523 bp, Zea mays
  Clone ID: MRT4577_56307C.1
gacacacttgcgacatacgaatgcgcaaatgtagtaccgacacatggcgagcctctgtattactgcttgcgttatcgcttgttcgagctaccatcgcaagtcgttcgatactctgcatcctatgtgccgctacagactgctatatcgaagcatgtttgatgagcatgtatccgtcacagtgcccacctatacgatacttgatcgagctgggtgtgctatcaatgggtgggaacaaccgaatgagacggctctacaggattcagcaggcaattgaagcacgaatgctacgattatcaccgttggaacttcaactatagtaagcgctactagagcaggtaccttagcaccattagactggctcaaaaaatgatgtacacataactacaacaacttgagctagcaagcattgatgcatactctcagcaacatgagtttcttgcattagaccaactggatgcattgaactatgctgcttatatgcaacagcaatgactagtcaacgcagtagatgctgtctaccccc

SEQ ID NO: 136875 - DNA, 502 bp, Zea mays
  Clone ID: MRT4577_56308C.1
tttttttttttgtttttttttttttttttttttttttttttttttttttttttttttttttttttttttttttttttttttttttttttttttttttttggacaaaaaccccggcccttaaaaaataaatccccaagggggaaaaaaacggggccaaagggggggcaaccaaaggggaaaaacattccttatttctgggggggaaaaaaaaaaaaacattggggcaaaaggccaccaaggggaagcccatgggaaaaattttaaaaacccaaaagggcctcccaccccaggactggaaaaagttaaggcccgggccaacccagggaaaaaaaattggcttttgaaaaaatttaaaggggaaaaaacctgggaaaaggggacaaccataaaaaaactggaaagttagcgggaaaaaaacaacccccggggaaaaacctggggggggggcctcccttaaagggagggattccagaaaccttaaaaaacggaagagccccggggc

SEQ ID NO: 136876 - DNA, 1128 bp, Zea mays
  Clone ID: MRT4577_56309C.1
atggctattgatagcaaggaggcagatccactcgagactatcaaggttatgtcagaatttctggatgtgttcccgaaaaatttaccaggtatgccatctaagcggaaagttgagtttgccatagagcttattcctggaactgcccccatttctaaaagagcctatagggtatctagaccagagttggttgagctcaagaagcaaatagatgagctatcagagaaaggttacatcagaccaagtacctcaccttgggccgcccatgtcctgttcgtggagaagaaggatggcactaggaggatgtgcattgattatcgagctctgaatgaagttacaatcaagaacaagtatccattgcccagaatagaagacctgttcgaccagctgagagggaccagcgtgttgttttcaaagatagatctgaggtcaggttatcaccagctcaggatccgaccttcggacatcctgaagacgacatttattaccaagtatgggttgtatgagttcacagttatgtcttttcgcctaacgaatgcaccaaccttcttcatgaatccgatgaacagtgtattcatggattatctcaacaagttcgtggtgcccttctcggtgtattgcgacacttgctacactggcttgggatgtgtactgatgcaagagggaagagttgtggcttactcgtcccgacagctgaaggttcatgagaagaattatccaatccatgacctagagttagcaacagtggttcatgcactgaagacatggaggcattatctgtatgggcagaagtgtgatgtttatacagaccacaagagtctgaagtacatattcacccagttggagatgaatatgagacaacgaagatggttagagttgatcaaagattatgaattggaaattcactaccatccaggcaaagcgaacgtggtagcatatgctttaagcaagaaaagtcaagtcaatatgatggtcgctcacccaacgccttatgagttggccaaagaatttgataggttgagccttagatttttgaataacatgcgaggagtaacagttgagttagaacccaccttagagcgggaaatcaaaatagcacagaagaatgatgagaagatcaatgaaatctag

SEQ ID NO: 136877 - DNA, 572 bp, Zea mays
  Clone ID: MRT4577_5630C.1
agtagacttggtttattgattcttgaatatatcgagcttcttttgcaccactacggactaggatgtcttgcaactgcggatcaagctgcggctgcggctcaagctgcacgtgcgggtaatatataatagatatataagtgcaccgtgcatgcattaatttctccagccttattattgtcttgactagataatatgccttcttctttatgtatttattgtccattgcaaaacacacaaacaaacaaactaatacaatactagaacaaagagtactttggatcgagtagttcaatccattcgcgcgctgtcctttttcagcaagaagtaccctaacctgaaggagacgagcaccgccgcgcaggccaccgtcaacctcagcgtggaccaggagaacaaggccgcgcccgagttctgccaggccgcggaggattccggtgaggccaaccacacctgctgatgctgtagcagctgcaagttctacccctgcaactgctgatcacatcgatcgacgaccatggatatgattattatctatctagcttgcggtggtggttgaacaataataagcgagg

SEQ ID NO: 136878 - DNA, 664 bp, Zea mays
  Clone ID: MRT4577_56310C.1
acactcctatgggcgattgggttcctcgaggccggccgggaaatcgagatccagcaccacacctcatctcactccactaccccctcattatgccttccaacacaatgagcgaaatcttacgtggcgcccctgcagcctgctcctcgacgaccctgtgctcccctgcgtctgtgccgatgaactgccgtcaacactccagcgcatcaagtgtccacatgctacgacgtgaaggacattgcagctcgtccgagatccgtggccactcggacggcatgtgaattgccactgcgcccactcgaggacatctccttcctaaccgccacgacacaccgcattcctacagctgctcgactacatccaaggccagaacgcgtaccaacagacgatctatatgaacttcgacgaagctgacgcgtcagccgcccacccacgggtccttctgcggctcccgcttctaccggaccttctacgagccaggctacaaccatgtggacccgccttcgcacgaagtcctgcgcgtgcatgcatgggcctgctcgagaacgcaatcgagcaccgattcaagggcttgcggtgcgtagtgcgatgtctttcagcacccaatgcgatctcatagacagctccaagaaacattatgccccctctcccagactattattctttt

SEQ ID NO: 136879 - DNA, 253 bp, Zea mays
  Clone ID: MRT4577_56311C.1
gcttagttagggctagcccatctgttacaaatctgtaagagaattgtcatgctatgtccatacacaaatgactgacggatccctgtgctccgcctggtggagtgcctccctctatacgtgcgctaccttttctttttgttcgcatcattgtatacactttgcttgcagtttactggactttgtctagctgtgaatatgcaggagttttgttttctgttagaaatatatatatatatatctgctttattgcggc

SEQ ID NO: 136880 - DNA, 459 bp, Zea mays
  unsure (1)..(459): unsure at all n locations
  Clone ID: MRT4577_56312C.1
gaacgaccgggccgacccacgcgtnccttaggatccttctgttcggtgttttcagcgttcacctgttgccaccatgcagagaaacatgtctaatccatgtactacaccaatcatatccatcttctgctcttgttattactgatgcatctactgctaatcccccaccacactccactacccatttagactcctttggacactaactacatccactgacttaaacatcccttttagttttgaaaaaataaccacagcattcctaaccactatgaattaaaagcactaccacatatatactgttactgtctgaagcatgctttttactatactcctggacccacacttttactacacaattgtatgggatctaaatacacagactagactttcacccctacaccaattttctaatagaaaagattttttatcttcaacatacaaattttaaccccaactttt

SEQ ID NO: 136881 - DNA, 241 bp, Zea mays
  Clone ID: MRT4577_56313C.1
ctttgagaggttactggaagaggaggctctgacgacaagcacaccgccgccggtggtggtggtgccgaactcttgttgctcaaccggcctaaatgtttaccggccccccgtgattgaaaaagccgcaaccaccattgcgcattccgcggtgagtaatgccctaataggggaccccatggagtccaatgccctacttaggaggaaatttaaggagaaccttaaggccttaaaaatttggggg

SEQ ID NO: 136882 - DNA, 123 bp, Zea mays
  unsure (1)..(123): unsure at all n locations
  Clone ID: MRT4577_56314C.1
tgataaacgagttcgaggaangaaggatggcctcactaggtataaaatttattagatagcctgtttcgangctatctttgtggaattcgtggcgggttaataatagtactctggtttactact

SEQ ID NO: 136883 - DNA, 1315 bp, Zea mays
  Clone ID: MRT4577_56315C.1
ttcctgttcctacgcgccgagatcgcgtgtagctttcccagctcgtcgttcttccctgcgcgcgcaagttctctgttgggcgcgcgcgaagctctctattcgccatcgaatcgcctgctcgctgtccgtaccgacgaaatttcctcgccgtgcgttctggcatcggctgctgccgatctcgccataaagttcacaagcgctccttgctcggctcatttcgtcgtgggcaatttttccacgcctcaaatccgtgctgcttgccccgtgtgcgctcgctcttcgtccatcgggtttcgcgcgtgttcacgtttgctgtcgagtcgtcgaacccgttatcccctgctcaacctcacttcgccagctcgccctagatataatcccgtcgtcgttcgtgcatccccaagaaatcccaagaatcgggtgaagacaaagctagccgagtggtattcaccaagtacgcgacaaaagctcgaacatcctgcgcgactcaagttcggttcgtcaaaattatttagccaaggagaagatcttcatcaattgattaccgaagaaaagaaggcccctggatgacgtcaaccggaacccgtaatcgtgcttgcgactatcgcgtcgaattagtcagggtaagttgtttcgtattcccgttaattaggtctataaatagagtaaatggaattattgatctcaataaatgttattaatttagcatgcgtatattgtgatgatcgatttagataaatcagtaaatcaagtaattaagatacatagtttagagagttaataaaaagctaggaataaaaatagattttctagtgtaatatgtcaatttggttaatggatgtagtcaatgccctgctgtgatatccatggtgcttaatgcttggttttaaagtgtttcatcctttttagtgtagattatctatactatattcgtgctcatacatgtgcatcgtgcatctcatgaggtacgataaataatcacgtgacgcggaagacgacccaagttgaccccaagcgcgggctaatccgcaggctgaagctgatgaatcaacctgaagacggttaaatcaagcaagtgctcggtcgaaggacactcgtcaagcggacgtcacctaacaacactaacctagtgttactcaggttatagtcttgtgctgctattgatggtgttaagtgccggtgggctcggccttcttatataagtatactccgtctttaccttcttattgaggatggtcgtttgagctagcatatatttcaaacatatacttttgtaatcactccgataaaataatataaaatttttataacttgt

SEQ ID NO: 136884 - DNA, 523 bp, Zea mays
  unsure (1)..(523): unsure at all n locations
  Clone ID: MRT4577_56316C.1
ccccgcgtccggcagcccgccgccgactgcgactgctcctccgccacctccggctgaagtgaactctacgtacgccggcgaccagcggacgccgccacgccgcttgagtgagctgctagcaggtgggtgcatgcatgggatgggaccgacgatcatggggcggcagggcattcatcaaacggtgtgattgggtatagtcgatcgtaggtgcattatattcatcaaccattaccatatatatgaaccggtgtttttttttacttcctcctctgcagctctgtgctctctctttttttttctctctcctctccatttgttcttggatatggttttcagtgaagaatttctgttgtgcgcgcgatgcatgtgacataatcgtccgtatatatgtatatatatggtgcttgtacgtgcctgtgctaggctgctagccgtgtgtgcgtgtgtgtaattaaagtccagcgcgcggtttccatgttattttcctgtatatatataaaatgaacatgaatctctcgcnnaa

SEQ ID NO: 136885 - DNA, 288 bp, Zea mays
  Clone ID: MRT4577_56317C.1
gaatgagtaacatgtactgtaatagctcacactcagggacaacgcgctcctaatgccaaacagattcctaaaagaggcaccttccgtcgtttgagaagtcagcgttcacccactcggtgtttttgagcatcgacctttgggggctgtcttggggataagcgcacacccaatcagtgccatcctggctcccgtggggcttctactatctacacattggatcgactgcattagctgaactcagatgccgacttagaggaagggggaggcacatgctggctgtctacagca

SEQ ID NO: 136886 - DNA, 556 bp, Zea mays
  Clone ID: MRT4577_56318C.1
gtcggttccttccatgtccggcctcccttcctccccacggctgcagcagggcgcccatcttccctagcgcgcaggaagctccctccctgcccatggcgtcgtcccctccctgcttcatgggcgccgccccatctctgatgcgctgctcctgccatggaggtcagccggttggtgctgcaggcaagggctgctcctgctgagccaagtcgcctccctccactctgctccctggaacgccgcagcacgccagagcagggccctccccatggcgccaccccccagcagcttcccctctacctcagcgcccctcactgttccgtttttccctctgctcctgcgctgcatgctctgctcgaagtggagatccctggccgagccccctctattgcagaccgaactccatctccgaccagcagtcacggcgccctgcacaactttccctcgcccctgttttcccccttggtcgcgcaggagatccttgggccgacctcggcgaggtccatgtccatggcggcgcagcagctcctcccctcccatggcgcccctgcttttccct

SEQ ID NO: 136887 - DNA, 471 bp, Zea mays
  Clone ID: MRT4577_56319C.1
gggaccctcgggcctgcccgccgcttgagtgagctgctcctgctagcaggtgggtggggtgggtgggtgcatgcatggggtgggaccgacgatcatgggggcagggcagggcattcatcaaacggtgtgattaggccggtatagtcgatcgtaggtgcattatattcatcaaccatatatggaccggtggtttttatttttttacttcctcctctgcagctctctgctctcttttttttctctctctcctctccatttgttcttggatatggttttcagtgaagaatttctgttgtgcgcgcgatgcatgtgacataatcgtccgtatatatgtatacatatatatatggtgcttgtacgtgcctgtgctgctaggctgctagccgtgtgtgcgtgtgtgtaattaaagtccagcgcgcggtttccatgttattttcctgtatatatataaaatgaacatgaatctctcgt

SEQ ID NO: 136888 - DNA, 484 bp, Zea mays
  unsure (1)..(484): unsure at all n locations
  Clone ID: MRT4577_5631C.1
agccttaaagctnacaccctccgccccnccncnncttttttatttttttaacccccgaacccataccagggtgacgttgactttcatcacccactaccccccaactacaacaaaaactgaattccacttaaaaccgcacctcaatcatatcatcaattaaacaaacttatcttacttaacaacacaaaaaccccaaaaaccatccctccccccataaaccatattatcacacataccactctaaaaataactatctaaatataaaaatcgtcaccaaaaaaaatcctctatctaatcataaaacatgcaccaaaaaacaccccttcttatactacaaaaaacacttcttaatcaacacaccaatcctaaaaggctccaccctctccccatattttatctctcccctcccataaaactcactgtcctttccaccaccaccccacttgaccaacacaccaaaagctttaaccctctcaccataaac

SEQ ID NO: 136889 - DNA, 470 bp, Zea mays
  Clone ID: MRT4577_56320C.1
cataatagatagatcatcatcatcatcaggtaatcatcctcgtgtacatgttttctcatcacagttttgcctcgcatttacttacagaaggacctttccttcaaaagccgctccacccgcgatctctaactccttctaatcaagtggtgctatagcttagtggcttaagatcacccgccaccacaaaggtcagggtggcggcgttggaaaaccaagacgcgaggcgcggttggacacgcgtggagtttgcaggggccatgcccatcatcttggaatccgccgatttcgcccccgccatactggccttgaacatgccccattccttcctgctccgagcccttacgcttttgcatgaagccctgccgttttctgactatccctgccacctccaaaaaggaaccacttgcagaactacccactgccaatcaacgaccccaaccttttcctgagcacgctccacacattgccgg

SEQ ID NO: 136890 - DNA, 414 bp, Zea mays
  Clone ID: MRT4577_56321C.1
cccctgggaaacacaggaccaaataattttttaaaaccttaacgacgacgacaaacaacgaccaagcccacaccaggaaaacttaactaaactggggagtttttttacggcccgaacaaaatttgaaaacggggggcgggttccttttacccatgaaaggaaaaaggcagggggcactcgggcccggatcggaaaaactaaaggggtcctccaacacaaagggagaggggggggtttttttaagcaaaatctaaaagggggcgggcccataaaaccaacaggggggggagcaacccgatctgatctggttggacggacggacccggccacacctaacggggggcagtccggggcaatggggccggcctcccccaaattgtaacaggaggggtcgccgccacccccggggggggg

SEQ ID NO: 136891 - DNA, 301 bp, Zea mays
  unsure (1)..(301): unsure at all n locations
  Clone ID: MRT4577_56322C.1
acccacccgtcctgcgagagggagctagtaccatcctcatccctaggagctcgcctatgccggggaaggcgaccatggggtggctgggcgactacactcatcttcttcctctcccccatcccctaatncctcttcactctcctctgcttcaaccgcttgccctccacaaaccttttccattttaccttagtgactacacctttaattttttgctggataatgtatgcaatcgtctaccttgctcacatgaaaccatttatcaaccccattcttaacttagagttgacgcttcatttgtttt

SEQ ID NO: 136892 - DNA, 417 bp, Zea mays
  unsure (1)..(417): unsure at all n locations
  Clone ID: MRT4577_56323C.1
ccacacaaggcaccaagagagaccccnngccccggcccnnnnggagcgcacaagcgncannanccacaagncacnngcccaggccannanccacagnncccccccaggggcggggggggcnncgaacacccagcagngcaagccnacaggcnacaacaagcgcnngcggcgagcgncnnacaacaaccaanngcccaannacaacaacaanccnnggcacancnaaccanacaaaccancgcaacgcaacagcaacaacaannncnaccagcacngagccaacnagcngnggngaacccngncgccnacnngcaacagcagnngcnngcanccaacccacnngcncnggcaaacaaagnngcanaccaacaacaacaacaanngcaacagnnncaaccagcgcncagncaaccagcc

SEQ ID NO: 136893 - DNA, 781 bp, Zea mays
  Clone ID: MRT4577_56324C.1
cattgggacctcgagccggccgggacacctcttcaacgccggctgcctcccccttcctcacgcgctcggcctccatccccaagcaccgcgccctggtggtcgccctcgtctctccctgcccatggatcttgccgtcgtcctggaccggtcgagaaccctacccagtcgccggaccgctcctcgccttcctcccgctcgtcctccatgggtgccgccgtgagctccatgctctgacatccgtgccgccgattcgcccgaccgtcatccccatggctgcaacgccgtcctccactcggcctccctgcaccgcgccatggtgaccgcgggaccggccgtcccctgctcctccctcccttagcctagacgtgctgtcgccggaccgtgcaccgccgtgcgtcaaacctcgcctcgccgtgctctgccgcgagctcgctgtcgaccctgtccaagcaccggcgttggcaccatgcccctcctctgctcgccgggtccgaagtcgccaagccgccggactcctccaacgcgcccaagaccgagcgccgtcgccctcgctcggccatggatgcccagctcctcgcctctcatcgccggcagcggacctcgccagcgcccaggcccctgcgccggactccggccctgtctcctcgacgtgctgaggcagcttgaggcacttgtattttttagtgcaatccgaggaaaaaggaagcagcgaagaaacctatacaaacaaggttatccaagctgctaaagaaccagggctacgtccttacccatatccata

SEQ ID NO: 136894 - DNA, 632 bp, Zea mays
  Clone ID: MRT4577_56325C.1
ccggccgggagcaagcagtcaagcacgctcgtcgctctccccagaccaaaaatctctattggtatttggtagtattggccacggctatgggcccgcggctcctgccgctctccctctcgctgctcgtcgccgcctccctttgcgtcaacgtcgtcgtcgtcgtcggcaccggagggagcgtgccgtggcccgtcgccctcgccgcgttctgcgcctggatcgccgcgtccaccgcggtcgcggtgcgcctcccggcgccaccgcgcgcagtgaaatgaagagctcgcgcagctccgccggctgcgggctgccctgccgtcccgctgcaggcgagggccgtatggcggccgacgctggctcgacaccagctgtgtttgtccagctcgggaaacctactgcgcgtccagaccatccatctgctttgtttgtgtctcgcgctcatttgggtcagaagaaacgtgctatatgctagacattgattgttctgatcttcttcgtgtgttgttaaatagtacatagaataagaagttcgtctgtcaacaaaaaaaaaaaaaaaaaatttgctgtgctacgacagtttttttttaatgaatgatccagcaagaaccaaaaaaaaaaaaaaaaaagcgggc

SEQ ID NO: 136895 - DNA, 361 bp, Zea mays
  unsure (1)..(361): unsure at all n locations
  Clone ID: MRT4577_56326C.1
cggcgatcgacagagagactcagctaacgtatgagctacggtacattcggactacgaagccagnggacatcaccatcatcgatcacacgcgaccacagctatacacgacacaagccagccagacagcaagcatacatagtccctaactcagacgtcactcactacctaccatacgaggacaacccacgatacactcatacccattcaagaaggacaggacgaggatgacatggatgatgccccttactatcaccctatacatatagtagatgctgaagtgcttactaggaccttttttccctaatctttttaagccccatctaagtacactgtcctctctatgatagctatataattgtgt

SEQ ID NO: 136896 - DNA, 265 bp, Zea mays
  Clone ID: MRT4577_56327C.1
ttgctattccctcatcttctcatctccctttatatgatctttccacactaatctcaaatagggccttttggtcctatttaatgaacccatctatcacaatgactctgttttccattccccctatatacccatcctctacatcaataactgtatcttcttcttcatctctattaccatcaacatgtactctaatcaccacaattatattataactaatcatgatcattccaatctcactgcctactctatctacatcatctttaac

SEQ ID NO: 136897 - DNA, 487 bp, Zea mays
  Clone ID: MRT4577_56328C.1
cataaaaacaggccctgcataaatggaaggaaagaatgatttccatcgtctaactagctaacttttgtccagtttccgattttccatacccgacacggaaatggctctaaaactccccctaaaaaacgggtggccccagctcaagagccataaccatcactccttgggccttctccccactacccatcttttctcccttttaatccgcttttatggcctcatcatatatgcagtaaactcgccattccattttaggccttattcagttgctgaaagggatttaatcctttccaatcccctcctaaccgaacaagcccttatcgaaaggggatatcaaaagtccaggttttctcaatccaaaccataagctcgacaaacctagcgacttggctccaaaacttgggcagttacaaaaaccaataccagacctccaggtctggtgcgagactgcaaggcgaccttttcgtcaggtcgctttgtatgccaa

SEQ ID NO: 136898 - DNA, 256 bp, Zea mays
  Clone ID: MRT4577_56329C.1
cgactccacgcttgcgaaacacatacgtcctgactgctagacgacaggttcagcagatatctcacgtcgacctcgctaggccattggggtaacctccgtctatagtccgtgccaccatagacaccggcatcttatcacaatgcaagcccacgctcgctatcgactactgtatcatctctctatactgcgaccaatcatctgttcaattgactgtcactttcaaccatactattggtgcaacctctggtgatctcaa

SEQ ID NO: 136899 - DNA, 411 bp, Zea mays
  Clone ID: MRT4577_5632C.1
gttgttagcatgcaaacaatcgggcggcattcaattcatagcaggtcatcgccaaaaccatgcccgtcaatcctaaaatacatactataggttaagatttacgggaacagtttctactaaacatttaacctgcagatgtgcatgcgacacaagtacgagggccgggcgagctacacaccaacttggatagattccctgagtctgattcctaagtggaacctacacgatatttatgccctaaggcgggggggtgcaccggctacatactaacgggggtgttctgatgactcgcacggtgaacatgcttttgacggcacggccgaacatgcgaccacagctcaccggtccgtcatggacagggctacagtgtgccatagtatggtgacaggagccctaaagagctttggatat

SEQ ID NO: 136900 - DNA, 1085 bp, Zea mays
  Clone ID: MRT4577_56330C.1
ggtgtttctaatctcataatctctcgaggaggataccacctcccgaacatggtgcgtcgacgacccgccaccggggcagccccgagaccccacctcgccgccgtcggtcgcgggctgctcctcgcgtccgtcctcgcggccgctgcctcctccctcccagtagccgagtcgtcctgcccgcgagacaactcactggtgagagacataagccgaatgcagcagcgcaactacgggagggaaggattctcgcatataactgtcacaggtgctcttgctcacgggacgaaggaggtggaagtgtggctacaaacatttggtccaggtcaaaggaccccaatccacaggcattcttgtgaagaggttttcattgtcctcaaggggaaaggcacgctcttactcgggtcgagctcgctgaagtacccaggacagccgcaggaagttcctgtctttcagaataccacattttcgatccctgtaaatgatccacatcaggtaaaagagaagggttgtcatttatatgcacttttactttgtctgatacagtgatatctcgtgtcctgatttgcacaactctgctgattatatggtactgtacctttgctagttttaagatattgttggagcttgggtagggcctatttgttagtgtctatcatctttctctttcttgcaggtctggaattctaatgagcacgaagatttgcaagttcttgtgatcatatcgcgccccccggtcaagatatttatatacgatgattggagtatgcctcatacagctgcaaagctgaaattcccctacttctgggatgaggactgcttgccagcaccaaaagatgaactctaggttaagtgggtcctgcaatttgtcagcttcgtgttcatccacaatcctggtggactacgactcacatctacaagttgaaaaccattaggggactcttcatgtgtagacttgtgttgagactctgggaaatccatattgacaacgtttataaaattaagcacttctggagcaaaaaaaaaaaaaaaaaaaaaaaaaaaaaaaaaaaaaaaaaaaaaaaaaaaaaaaaaagggcggccaaatg

SEQ ID NO: 136901 - DNA, 223 bp, Zea mays
  Clone ID: MRT4577_56331C.1
atatttcctaccttcctattgtgtacccatctcttttccccccttgacttcccagaatacattttactcgtataggatctgaatattttgtaccttcctagtgtggatggatgatgttattctctgctgacatgccctgtcttcatatggatagtattggtattgaaatgtggtctacataaatattgtgtcctggtgtatattccattttcaatttgatcag

SEQ ID NO: 136902 - DNA, 562 bp, Zea mays
  unsure (1)..(562): unsure at all n locations
  Clone ID: MRT4577_56332C.1
aaattcaaaatgcgattttattaaagcaaaacaattaaattacacaagatttgatttgattgatttgaacaaatgaatgaattcgaaagaaacgaagcttagttgagtttgctgtcttcgtgcagaattgaaatgtagttgtatgcttgttgggttcgaatcgtggaccaaacgaaagcacttccagttgctacaatgtgagcagcagcttgagcagcttgtttgtgtcccaaagccaaagtggcacccagtccgcttggcaagcgcaaagaactccaaacatcgacacccaacgatgcaacatcgtcggttggtggacagctgatcacgggaatggttgtgttggcagcagcaactggtcctagaccattgctcaaaccaacgcatgcaatgattgctttgcagcttggccattgagtcaagttggcgaccacttcaaccgcgtaactggttgctttgtgtgcagagcaaacgtgcacggcaaccgaacgtacgcccatttnggcaaatgagtgcgaacttgttgagcaaaagcttaatcgaccggtgatccctaaatgac

SEQ ID NO: 136903 - DNA, 624 bp, Zea mays
  Clone ID: MRT4577_56333C.1
ctcttgagattgccaatcctagccgcctatctcacgatccactcgagcaccccgccgagggaaggtgaggagggatgccgcgcgtcgcgctgccagcgaagggcggcgcggccgcgggcaagaagaaggggtcggcttccttcacgatcgacgtgcaccaagccagaggaggacaagatcatggaggtcgcctcgctcgacaagctcctgctggagcgcatcgagggcgccgacgacgaggttgctcacctcggcgactccgccaccatctctcgcgagaagaccaaggacagcgtcacctctgacggagccttctccgacaggcacctgcaagtacttgaccaagaagcacttgaagaagcgccacgtgcggcattagctacgcgtgcttgctgccagcaaggaccgaaaggtctatgagctccgctacttcaacattgctgagaacgatcgagaggaactaagattacattgcactacgcttatattgtactattgaactcgatgcgttttgatgcctgtgcccggagcttcgcaaatgtcccatgatatggtgcgagatgcttaattccaagaatgcctatgcactggatctctgcagaaagctatgttgtggacaaccag

SEQ ID NO: 136904 - DNA, 499 bp, Zea mays
  Clone ID: MRT4577_56334C.1
attatggtgggatggggtttttttttttttctttaaattttggcaaagaacccggggcaaaaaataaacaggcaaacgggacagttgcccgccccatgaaggccaaacacaaggccgaaaccccggggccacaggaaaccccgcaagaagcccccacctaggctatcctgagccggacaggccccagcccatttttagaggagggcaaccacttcgggcccccggggggggttagagccctgcaggaaaggccaagcggcccaaaccaaaaaaaaaagcccacgggggagacctccatccaaaaaggaaaatccggcgggacccctggaaaaaaaaaccgcactggtcggggccccttaccacgcccatggccctgaaaaacctgccggggggcccctcgagggccggcttcccccccccgggcccggaagccaagacgggcttgaggtcctaccccaagcagaaggccccgaagcaggaggccctttggacgaacggc

SEQ ID NO: 136905 - DNA, 209 bp, Zea mays
  Clone ID: MRT4577_56335C.1
ccgatgtttgttgatgtcctacagaaaacatccaatacaaagcgaattctccgggcctccgcgggggcgtatcccctggcgcccctaacacaaggagggattggggggaacaaaaaagaaaagggagaggaatgagatcccagcgtcttgccgcatcatccaaggggtgatggaaaaagtggggaacattaacatgatctactgggact

SEQ ID NO: 136906 - DNA, 296 bp, Zea mays
  Clone ID: MRT4577_56336C.1
gcgcggcgtcagcctgatagggaactagtgcttacccatgctgtataaaatgaaagcgcgggggttagctcaccgagcgagcatccatgcagctcaacttcgacctcgattcagcctacagggccttcttggttgctctgaccgctgatggtctgtcacggggtaaggatctaccagcttgattgttatatggtcaggtcggactattatgcttgggacactggatcactactctgcactactatagtactatagatatctgaaatttctggactgctattcgacggaataacaaa

SEQ ID NO: 136907 - DNA, 238 bp, Zea mays
  Clone ID: MRT4577_56337C.1
gcgcgagtgccactgggccggagctgcctgctcgacattagctgaacgctgggtgctagtcaaagctgtaatgaggctacctctacatatgatccaactgagcagctacccaggacctacatacgggcgcggcaagattcacgagagagatagcagggaggcttgctagcagcgctcgtgcgacgaaggacgggcggacttgggaggaacatggaggcgcctctgctggcgctcaacc

SEQ ID NO: 136908 - DNA, 358 bp, Zea mays
  Clone ID: MRT4577_56338C.1
tacagcctgcaggttcagcaaacaacgggcgcagcagcagacgcgtcaggggcgcgataaattttgatggtacaaatcacaggctacaaaaggtgaccacaacatatcaatcaaatcaccccaccgaccgtgtcactgctccctcccgtcctcgctcgggtttttttttttcagatgcctaggtcccacagcaactacctaagaactggtcactgctaccagggtcccacgtgtaagccgaagaggattcactgatcgccgatgccgtcccacgcgagcccgaggcggccgccctcctgcagcgcgcgcagtagctgcgcgcccttgcgacgcccacgcgcgctgcactcgccctgca

SEQ ID NO: 136909 - DNA, 266 bp, Zea mays
  Clone ID: MRT4577_56339C.1
gttctttttaggtgaggctgacagtgatagctgcccaggattaggcttgatctaagaaagctgccctaccaatgagggagatcaatgattggtgggcaagtggcaaagaaaaaatctcacaaggtgggcaaactatattcgggctagtacaaattccggggattgtgaagccttttgctactatggatgtcacacgttgaatatgaaaagcgtgacatctccttgctgcacaacataatacttcccttccaacctgagcaggcctt

SEQ ID NO: 136910 - DNA, 361 bp, Zea mays
  Clone ID: MRT4577_5633C.1
catgtaaaatacgtacgacacattgtatgtacttgttatgcacgcatgcggaaggtggcttgttttacatgcacgcgcgcaccgacggccgtcggccggtacggtggtgcaccatggtgctgatcagaaatgttcacgcctgtgaggcaggctccgagagagagatccatattcacacacgcacgcactcacccgttgattttgattgggggtggggagctagggaccatgaggttatattaattaggcgtggatggacgtgggctggatgatggagttcaggtcggaccttgtcgaccttaccacgcatacggccggtaccggcagtttgtctatctggtgctgcggtcggaggaacttt

SEQ ID NO: 136911 - DNA, 210 bp, Zea mays
  Clone ID: MRT4577_56340C.1
tattaaaaaataaaacaaaaaacaaaaaaagtgaaagggtgggtctttgtgacatatccacgccggcttgctatcgacctccctgacatggagcttctatagtgacacttaactctcaattggctggccgtatgttaacatcgtgcttaactagacaaaccctgtcggtacccaatttcatcgacttgcaaaacatcgcccttttggcag

SEQ ID NO: 136912 - DNA, 496 bp, Zea mays
  Clone ID: MRT4577_56341C.1
tttcccttaccagcggccgggcgggccggcgctgtacaggtacttactcgcgctagcctctgtcccctccgtattacagaggtgtttttccatgagatatggaatacggcagtacaagcacatgacatcaacgatggagaggaacaaggatgataacatgggtgaagatcacacccaggggggggggaaaacaatgggtaaaccctaacactaaggaatccataccttatagaaatacaggggctatgccattgcatccacagaccctgcttaaattatcatggataagaccctgggaggctaggcctctgagaagcaccatgcaaagctggactgcaacactactctacgtgcaaagagcattggtggggaaaaagacacagacaagcttggccatccactacttaacaggagtatgatcggaccactttcttttccccacgtgtcaggtcgttttcttccttgagagaggcaaagaacagcgactacgatcgag

SEQ ID NO: 136913 - DNA, 415 bp, Zea mays
  Clone ID: MRT4577_56342C.1
gaatgatgggtcttttgttttcttttttttttgtcaaaaaaacaaaaaggatcccatgtcccccccggaagagagggaaaaaaaaaaacaaaaacaaatctaaaaacttcagagagggttcacaaagaaaacccccggggccctgaaaaaaaaaaaagggtacaatctgcctagggggggggggaagctcccaccagggttttttgggcccccggggggaacctccttgcccctcccaggaggggggcacaaagaccgaacggggggaccctaaaaaaggcttttaaaccccggccgaatccaaaggaaggatttttggccacaaaggccttctcccccaaaaaaaggaaccccccccccgaaaaaaccccggggaagggaacccacccctatgggccctcccgggggccaaaaa

SEQ ID NO: 136914 - DNA, 240 bp, Zea mays
  Clone ID: MRT4577_56343C.1
cataaattcaaatggtagtgctaacgcacaagtctcctttacattgtgaatttattttccttttacacatttgcaattcctatgtacgtctgtagtgcatcaggtgttgttgcccttgtgtaaaaggaaaataacacctgattcacaatgtaaaggatacactaccatttgaattgtattcagtatcgaagcaacctggcgacgagttcattgcagaaaaaaaaaaaaaaaaaagcggcc

SEQ ID NO: 136915 - DNA, 256 bp, Zea mays
  Clone ID: MRT4577_56344C.1
cccacgcgtccgaaaaaaaaaaaaaaaaaattaataaaaaaaataaaaaaaaagggaaaaaatataaacaaataataaatcaactaacacatatatctacaatataatccatccttaaatacactagatgcatactttatggtgttgacaataaacgcgtccagagacaacatgtagacgatcctcatttaactccacgtgcttgtgacgatcttgatctactataatctcacctagcttctgttcattgtcacta

SEQ ID NO: 136916 - DNA, 457 bp, Zea mays
  Clone ID: MRT4577_56345C.1
tgttgctagctgcattataaatatcttactcttcgattctcgaacgtccgatccgtcctcagaacaacacggccggtagatgtaatctaccatgtctatgtgctgctctcactcacacgtctaatggacatacgtttcggcacctgtcatgttgcccgtatcaccgtcctgtactaggcgcacactttgaatgatcatgtgaggcttgcactccagatgcttaagcaccaccacggactcaccattcgtctacactaagctgttgttcgatgcgttgctcacggcagcaatagctgatcgaaagtgtacaacgattcgtgcatcaactaccataacaactgcctatctatgatggattcgatgcttctgacggctataattctcgtgctaggaccatgtaccatagagcgccgttggttgcaatatcttcgtgacagatcatcttgtacaagtatgt

SEQ ID NO: 136917 - DNA, 185 bp, Zea mays
  Clone ID: MRT4577_56346C.1
gcaacctgaaaacttttatgcaattacaaatttaggattattaagatttattttttcccaatatttttgtttgtggtacaacatagtctgttggagtataaaaaaatggtatggccataaaaactgctcttttgtatttttcatttgaatattgtatgaaataagatgtaatcgatattcactct

SEQ ID NO: 136918 - DNA, 3675 bp, Zea mays
  Clone ID: MRT4577_56347C.1
atggctggagagactttttccaccatctatgctcaagaagccaccaagtttggtgcaacaacacaactcttccagtttgggacaaatccaccagttgcggtgatcaagtacgagggcaagacgtactaccacatcaccaaagatccagccaagcctgacactggaaagcatgcatccatgaaggcgaagaaacatagatgcgaggcgatcactaaagctcgctatcttctcaagaacaatgaagtacttcatactaagcaaaggaagagaagtgaagttaaggggttgtatgaagccctaacaaatcgtgtcattcaggacacaagaagcgaagaggaaccacatggctctgtttatttagatcctgtggagacaccctacgtattgtctataaaggcaagacgtcctcatgagctaaagcaactcattagagatgctatcatgaatgagttctggacacacaccatgaaacatccggttcattttcctggttgcaaaccaccgccacttctacaatctacaatgctagtctcggtcaatcacattacgaccaatgataataccaaaaataggtttgcaacacttcctaacgaggttctagcacctcattctgatggtcttcaacgtcagttccaacagctgcaagctcagatgatgcagcttcaacaacaattgcaagggcgtgaggaaggcacacaggctgaggtcaggcctatttgttctcatgtgaatgaacatgcggggagcagacctattcattttcatgaaaatgaaaattatacacatgctgggggtaggcctagccgtccttatgagaattacacacgagccgggggcaggtctatgcaccgaacttgggaccgttatcatgaagagccagagtcatctcgccaagctaatatgaggcaacacacctcgggttatcgttctcaatatgatcaaagaaccttggctccaggaagaggttctcatcaatacttcaagactaggcatgcgtcatcgtcgtcacatgtctacaagcaagcacgtcaagaatggcgacctgtgtcgccaaggcaggagcagcatcatggtgaacccacaattacatttgcttcacgaggacaagagggcccaatgccgccacctcagcgacctacaagtgcacccactcagattgcaactacatcaagccctcaacagaataggtcattgctaccaacaccatcaatccaacctatcgctgcatatgttccatcagtaaacaaacgcaagcgtgaaaatcgtcgaaacaatcgacgtgttttgtaccaagagcttcaagaattggtgctcaacaacgtgcgagtgaaagtgcgaccagaaggtcaagtacacccattctatgataaaattatgttgcgtctctcccctgccttgaagcagaatgaaagatataggtatctggtggaacgcctggtacccaagcctaagaaattacaagagaatgcgcaaacaatcacacccgagcaggggattggttctcttaaacccaaggcagctgcaatggaggtcgatactaaaaattctataaaagaaaaatcagaagctttaactcctccaaaggagattgagcaaacaaaggcacaacatgtgacaccattacgagattttgagcgaaagggtgaagagatattgcaaaatactgaagatggtgataatatgaagggtgttgacaataatgttgctctatgtggcactctttcgacactctcagaacaaagtgatgaccccaaatgggcgccaccacaagtaacacatgagttttcttatccttcggacgaggaaatagttcccaaccccaaggcaagttattccaagaggggacttcttcctaatctaggaaaggtctcagctagtgggagatcacgaggtaggctatcaccacgtcattacataaatgtggagtcacgtctgccacaagataatccctcattggagattatcgcgcaaagagagggtgttagcactcgtcttaagatgattgcatcacagaaaatagcatgtacctcaccacatgttaataatgaaagttttgaagaagaggaatcagatggagattctagtacatcactggaagaacgtcctaggtcccctcactattctgaactcgcacattctatagtatcggatgatgacactgaagagggcaatttatatgatgcaccagctaatgtaatcattgctggagatgaagataaagaaaaagactccggcgccggtcagctagttgagcttttcaagaatgtcgcgggtgatgtgtccaataaagttattggcccgcaaatggaagagcaagaagaggatgaaaattggcatgaagcaggaaaagatcatgaacaattcatgttccaaaagcaacaagcaccaccaccattacgcacattgaaggattatcatgatatcattaatgacttggttgataagaagatgaagaaaatatcaatcgagaaaagaccacaagtttctgaaagtgagcttgaaaagccatatgaagcatggcatgatttagtgcccttcccatcagggtggcacccaccaaagtttcgtctatttgatggcactggtggtgcaagagagcatttggcgtactttgaagccattcgcttgccagttggctccatacctgactggaaaaccatgaaagaattgtttaaatcccactttgtgtccatgaagaaggaattttccattgtcgagctgcttcaagtcaagcaaaagcgagatgagaaaattgacgactacatactacgcttccgcaatagctatgtttgccttgcaagagaaatgcaccctcaagaagctgtttatatgtgtatacatggcatgcaacaacattggtcactcgaggtgtctcgacgtgaacctagagatttcagctccctcagttcggcagtggcctcaacaaagctagagtttgagaagtctcctcaaattatggagctttataagaatgccggcctctcagacaacacaaagaggttcaatgctacaatgaagcctaacaataataataacaaactgaaaatggctgaaacaaatacaacaagggttggttcatcaatgccgcaaggcaatgtacctattctaggcactagaaatgaagctccaggaggccgacagcgtccctcaatgcaagaattactcaagaagcaatatgtgttcaagcggtcaatgattaaaggtttcttcaatcaggtgctggaacatgatcacattaaattaccagaccctaatagacctgatcaagtcaggatgacaaacaatcctctctattgtccatatcatcgttatgttggacacattattgaggattgtgtggcttttaaagagtggctccaacgagcaattgacgagaagaggttgggaatccaacctgacgctataaatctagattatcatgccactaacatggaaaacctaccacaagttgatacaaggaatgcaccaatgaatgatggagatgctgcactcaaggttgattataatgtggttgcacacctcaagcgtataccagcactgttaagtgtgtatgatgccctcttactggttcctgagcttcgccaagcacttattgtggcattgcaaaagccagaagtttatgaaataaacatggcaaagcacaacttgttatgtaactcggtaggagccaactga

SEQ ID NO: 136919 - DNA, 637 bp, Zea mays
  unsure (1)..(637): unsure at all n locations
  Clone ID: MRT4577_56348C.1
cccgggggaataccagaactcgtctatgcattgcgagaagtttgcttcgtttggtccatagtgcaacaggagagaaagatgatggtgataggagcactaacaagactaataaagatgaagatgaagcttcgngaaaacgcatctactaggcaaaacaaggtctccaaacaaggaagcagaaacaaccactaatccaattgatcgtatagtggcccatttgctgttccacagacattgctccaaggttgcaaaagcaacaaaagaaataatatcgtcaatccccttgactctagaacctgagccgaaggtacccttgggaactcctagggttccatcaaaagatcaacgagatgagcaagaaattgtgttgcaaccatcacaataatgataaaaagttatgcaaatccagtgatgatggcagtcttatgatcgcctgtggccctggagatcgcttgtgtaatatgtagccatttcaacattgtaggatccttttattttcatcctgtaagaacatctcagattgtataggaacctacgattttgtgccgagccgtaaaaagagcaaaccttggctctggacataaggcgtgtttaggagcaagaggattaaagcaaaccttggctnttggctctggac

SEQ ID NO: 136920 - DNA, 296 bp, Zea mays
  Clone ID: MRT4577_56349C.1
tccgtttctttctttaacatccaatctttttttttccgcaccagcatcttaacacggcctggattacccccaaactgaccgggtcattccatttttaaatattctacttatccaaccaaccccaccaattcaaccaattccattttcctttacctactttttcactttattaacaccctttagacaattttttcccttattaaatttccacttaccatatccaaaattttccttgtttattttatttctcccatatatttccatttcttttttaattttttttctttatttttttt

SEQ ID NO: 136921 - DNA, 192 bp, Zea mays
  Clone ID: MRT4577_5634C.1
aaaataacaccgcggcaaaagtacatggcgacacccgcgggcagaacactaaccaccacccgcccggggacccaaagtcaaccaaaggataatcatcatcatcgccgtccatcaagaaacgagcgcagcaccccccaaagtaaataacacccccaaagggaaaaaaaaccagatgaaactgaacatggagcg

SEQ ID NO: 136922 - DNA, 2380 bp, Zea mays
  Clone ID: MRT4577_56350C.1
ggcttccatcgccaaactgcagccgcctgcccaatgagcagcggccacgcattctcccttccctggactattcttggtgggtggagagagccgcagaaggcagctggaagaggagaggaccgcgcgaggctccgtgccggcgagttcgggtgcttttcctgcggtccgagatgcgatcgttgggacccgggagacagcgcagctcgggttcgggttcgggggggcggtagccacctgagcaggatgtttaactggaacgacgagcagcaccaggtaagggatgcaatatgggctgaattcaatgagtgtgatgaccatattgtgccttgtcctaaaggtgcacaagatagcacgatagttagttccagggttcgcaagaacaatgaggaagaggtggctagtattgctgccatcactgaacagtctgcaggtgttcaaaatggacatcaagggatggaaaagcagactgcaagtcacacaagtgcacatatttcagccacacaaattgacatggaatcctggcctgatcttccttccctgaatcctacacttgatagaaattatagtgatgacaacatagcatccacatatctggatttttgtgctgcaaccagtttacaagaagtgaccggaaattctacagagcaactagatggtaaatcagaagtgtttggtaatgatcaagaagaaaagagtaacagtttccttgattgcgactggggcaatattggagattttgatgattttgaccgtctatttagccatagtgactccatatttggtaatgagatagttgccaacgacagtgattttctttctgcatcttcgaatttgatggatactgctgtgctatcaatcccaattccggtcgaagcacataagaggccagtgtggtcacgtagaaaaccagaggaaagaggtaaaagtaaaatatccagcagtacaagtggcttctcccacagcaaagtagagagttcatcgacgaatttgcaaactcctatggaacctgtacagactcctcaatatgcactgttccaggatagcaagaagataggagaagttcagcatgctaatcagtttatgtttcctggatatgggtatcctgcatatccatttcctaccattccgttagtgtcaaacattcaagctgaaggctatcagacaaaaccagctggcacaagctaccgaacttcggaagattacctaaaacagtcaagttccacagaaatgtcacaagatataccatcaagaccactaacaatgacaccacaagaaaagatagaaaagcttaggcgccggcaacaaatgcaagcactgatagctattcagcaacaacagcaacagtttggtcaacagggtcctggcagtgacacaatggtgtctcaagcatacacccctggtaacaaaaatccggattccttagggagttcaattgtcatagatgaaaacacaaataaggttatttcgcctgagatgattccaactgaccatgaccgggttcacaagagttctgcaatttcagatgatccctttatagaggaaaaaatatattatcagctacaagatgctcttggcaagttggataccaaaactcgactatgcattcgagatagtttgcttcgtttggtccatagtgcaacagagagaaagattgatggtgataggagcactaacaagactaataaagatgaagatgaagcttcggaagacgcatctactaggaaaacaaggtctccaaacaaggaagcagaaacaaccactaatccaattgatcgtatagtggcccatttgctgttccacagacattgctccaaggttgcaaaagcaacaaaagaaataatatcgtcaatccccttgactctagaacctgagccgaaggtaccctttggaactcctagggttccatcaaaagatcaacgagatgagcaagaaattgtgttgcaaccatcacaataatgtgagatgtgctagaagataaggttttactcaatttgagtaaacttatttgcatttagttagcctatgaatctaatgtcgtccttctaatgagtatagtacacatgctgattaatcaactgttcaggataaaaaattatgcaaatccagtgatgatggcagtcttatgatcacctgtggccccggagatcgcttgtgtaatatgtagccatttcaacattgtaggatccttttattttcatcctgtaagaacatctcagattgtataggaactgtataggaacctacgattttgtgccgagccgtaaaaagagcaaaccttggctctggacataaggcgtgtttaggagcaagaggattaaagcaaaccttggctcttggctctggaaaaaaaaaaaaaaaaaaaaaaaaaaaaaacacaaac

SEQ ID NO: 136923 - DNA, 1509 bp, Zea mays
  Clone ID: MRT4577_56351C.1
cattgggtacctcgaggccggccgggagcctgctccttatcgccggctgccgtgccgccgcgtcctgctccccgctcccgtgttcgtcgtccgaagcaccgccgagcgccgcggcctcgcgccagcgccaccgcccagaaaccatctttccctcccgcgccgctgagcccatagcccatatcggggcctcgttcgacttcgaccgaagcgcgctgtgtcaaatttctgcgaccttgccgccgccttcatcattctggagctcggattgatttcttcctttgctgtgctgtcattaccgaactaaaaacagtttctgagagcaagcgtcacaattgccatggaagctgggagaatggatcagccttgcatggcttctatcaatagccagcctttcgtggctgatactgagccagtgaagaaagccagtggggacatgcctgcggcgccgacaggaagcgggtgcttcgactgcaacatctgccttgattttgcagcagaaccagtggttaccctctgtggtcatctctactgctggccttgcatctacgagtggctgcgccctggggtggagtcaaccgccagcgacaacggcagttcggcaaggcggcaatgccctgtatgcaaggcaacactctcaccggacacccttgtgccgctatacggccgcggagggaactcaaagaagtcactggatggcatggccatcccgcgccgccccatggtacaccgggaggctgttgagcaacagaatgcacggagcaacgtcaatgaccagcactaccaccagagcacgggagacagccctcagcaccagccattgatgcaggcgcaccaccatcccgttccccctgggttcgacttcatctaccctccagcgccggtagggcgtggtttgatccactcgactgccggaggggtgctcggagggatggcagaggttgtgctcccgtgggtgctccgtggccagctgccagccagcttgcactacacgagcccataccatgttgcggcacagaacgtgaaccccaggctgaggcgtcatcagatggaaatagagaggtccctgcaccagatctggttcttcctctttgtgtttgtgctgctgtgcctgctcttgttctgagacggaggactgttctatatgcctctttgtagatattgaagagggggagagagggatactaatggatgatgcgtatagtagacagggtaatggtctgtatcgacaagcatgtgtctaaagcatgctgatatagagttgtaatatgatgagacatgggaggtgaaatgtatatttcattcttctcgtcataacgtcagcggtttcctgatctatcgctgttggcctgttaggtaggttgcctacctgacatgtcttcatgtcagggccttcgatttgctcatttgcatatgtaaatcgaaaatgatgttttggctaccaaaaaaaaaaaaaaaaaagcggccgcgtcctcttcaatccctgttccgaaattgatacggcaattttgt

SEQ ID NO: 136924 - DNA, 505 bp, Zea mays
  Clone ID: MRT4577_56352C.1
ggtgatctcctttttttttttttttactgattttttttgctttttttttttttttatccgctcaagcccggaaccgccgggaccccgtaacggccccaaaggataaaaatcgtggttgtggcagggctacaccttcccccctggtgccgcaccgggactgacctgggggaaaagagggggctaaatctaggtgcccaagatcttcaaaacccaacaaccttatgaagaaaaacaggttccaggttttttataccgaacacatcattaagcacaagagaataagcgggccaaactacctggaaatccacacaaacggacgggaacgcaaaggaccgctaagcggggtcacccactggccccgggtgggacattgggggccccaaccgggggatcccttaaagccccccccgggggggcggccccctttggggggccaatgggggcaccaataggccttttttggggggggggggcatttgcattggggggggcaaaaaacgcatcc

SEQ ID NO: 136925 - DNA, 155 bp, Zea mays
  Clone ID: MRT4577_56353C.1
cttacatgtaaattattcctatcacgtatctaatgctttggtctcgactcgaaactagctgcctctagtgttgaagatcgaactaccctgttgtgtataaaaagtttacatggagtttcagctaatatattatggatgatagttgctattgtacc

SEQ ID NO: 136926 - DNA, 619 bp, Zea mays
  Clone ID: MRT4577_56354C.1
gccctcctctcgagttttttccccccccccccccctctcccctcttcttcctttttttttttttttttttttttttaaaaggaaaaaaaaaaaattttggaatataacatttggttgacaatttatccaaaataactttttttgataaaaatttgggggggggttggaaaaacccttttaaccaaaaaaaaaaactctggaccccccccccttgacctttaaagggggggggggggggccagggaaaacccaaaaaaccccaaaaaaagggtggcaggttcctaaaaagttgttttttacctttgggacaacttttccagggggagggcaaacttgggaaaacttttttgggggggggcccctttttaaaggttaattcccttattggccggccccttggggggggaaatttttttccgcccctttaggtaaatttgggggcccaaaaaaataccctggggggaaaaaactgttttttgatcccccaaatgggaaaaggcccctttttttccaagggttttttaggcccctttgggggcccttcttttgggggtgggaaacaaaaaccattttctttttttgacccttcccgaaaaaaaatttctttttggggccaaaa

SEQ ID NO: 136927 - DNA, 420 bp, Zea mays
  Clone ID: MRT4577_56355C.1
gggaagacatgctttgatcagggtctaaccagatcaaaacactgcacaaaaagctatgcctgacgacagcgggcatacaaactagagatggggccttctagaatattacacatgtgatacactcagctaatggaaccatgcgtagcaccaacaggctagatcccaagactagttgaaaccattcctctgcagacggtaagggcgtaacttcatcaacgcctacacagcaggtcaaaatggcccatcgggtgctccaacgacgaattcttaagattccttgcggtacgggagggttccagtgactcactcaggagagggttcgatagccaccaaagtatcgtgttgcaacgccgtaccaccagtcagtgcaacagatggagcatacttgggcttgatggtgcaagctgagacctgaagcct

SEQ ID NO: 136928 - DNA, 419 bp, Zea mays
  Clone ID: MRT4577_56356C.1
ggggccaaacatttttagggtttaggttcctggggggaaaaaatgaatacaagctcgaattatttttggggaaaaaaaaccaattactttttttaattgttgcttgggagggatgcaaaacccccttaccaaaaaaacaatatgggggggcccaattaagttcattgttaccgggttaaaagagcacccccttaaaaaaaaaaccccctgggctttaacaacaaattttgggttttaattgggttaaccgaaaccgaaagttcacaaaaccttttttttttttttacatgggcaattatgcccacgctttttacctcctataaaaaacttgcatcccgaaaaaccaaaaattgctttcctcaaaagaaactggaacaacagttttgaacatattgaaggcacgcattggggacccgggg

SEQ ID NO: 136929 - DNA, 376 bp, Zea mays
  unsure (1)..(376): unsure at all n locations
  Clone ID: MRT4577_56357C.1
caaaaaaaactaaactaatttcacttaaaaataaaaaccccttaaaaaaaagggttctcaaaatacccctaaaaaatccaaaaaacccccccctttggggttgtttggcacaacatacctttttccaaaaattcattccataaggattcttcaaattaaccatccccccccataacattnaacatttccaaaactccccttcccnttttcaaaatccaaccatttcaatcctaaaatataaccctantccaatctaatcttcttcctccccctcnttctcaccaattttaaattanccaacctcataaacttttccnccctttttnncancaaccacccttacccaatcccccactttttccttcttcaaatcctt

SEQ ID NO: 136930 - DNA, 366 bp, Zea mays
  Clone ID: MRT4577_56358C.1
tgctcgttcgggcgtcagtctgatggatatctgcataattcgccctttctagcggtctcccgggcatgtacgcggtgacaatcattgggttctagggcattttacacagagagagcggaacaacagttctttagagtaattttctgacaatgtcttctcttagtcatttacttgttcttgtgtttctctatgttctgcttttttactcatctgaatctcgcaaaccccaagttctttatgacactggatctagcgattatggtgcaaaaggcacaagatgggctgttctaattgctgcatcaagttattattataactacatgcattatgcttacatatgccatgcatatcatgttcttctaaaag

SEQ ID NO: 136931 - DNA, 286 bp, Zea mays
  unsure (1)..(286): unsure at all n locations
  Clone ID: MRT4577_56359C.1
gggggggccaatagcaagaatccccccctcaaaatttgggccacccccccaaaaacattttgggttccctttcctttttaaggtacaaattttgaaaccaggggaaagggatttggggtttaaggcccaccaatttgggggcggcaacaaagggttataactgaacgcggtngccccccgaatccaactttttgaacaaggggggccaaatgggcaggggcccctcctttaaaaaccccaccgggttgggggggcccaagttgtcctttatcccaccctcctgggg

SEQ ID NO: 136932 - DNA, 884 bp, Zea mays
  Clone ID: MRT4577_5635C.1
aattcggcacgaggcttttgtgagccggcaattcatcctggtcgccaccagtaccacctctccatccttaatccttcactagcttagctagccagccacctccgttcactccatctcttgccggccagtgctccgtcgatcgacccgtagccaaccaccgacaactagctagcaacaatggctgccgtcgtcaacgcgcgagccgcaactgctcgttgctcggccgccggcgggccaccacgcggtgctgcgtcttcgtttccgccgtcgacgataaggacgaggaagaggacgacggcggcggcgggcggccgcggccggcttgtcgcggtctcggcggtgggcgacgtcgcggcggagggcaacacgtacctcatcgccggcgcggtggccgtcgccctcgtcggcacggccttccccatactcttctcgcgcaaggacacgtgcccggagtgcgacggcgccgggttcatccgaaaggcgggcgcgacgctgcgggcgaacgccgcgaggaaggacgaggcccagatcgtctgccccaactgcaacggcctcggcaagctcggacagatcgacaagtagctaaataatcccatccaccatgcatgctacgtactaagctcatatacatgtgctgatgtgcatgcatggaccaaccaaactgctcctttgtataagctcttaattaaatctcctctccgacaatgtctgaatgtatatgctgagtgagtgttaatttggtctgtaatataacctgttgctttgtcagaaacgatgttgtgcaataacattgttgtcggtggtgttgttgtatgtgctagtgatgtctctcaatatatgtatgtctatcagatcaaactgttgtgcaatcaagcttttcgtgc

SEQ ID NO: 136933 - DNA, 849 bp, Zea mays
  Clone ID: MRT4577_56360C.1
agctcgcgcacacccgccgcgtgacgccgaccacggacgtgttcgcgttcggatccttcgtgctccaggtggcctgcggccggaggccaatcgagcgcggacgccgcggagacgacgacgacggccggttcgtgctggtggactgggtgctggagctctggcacacgggcgcgctcgccgacgccgcggacgcgcggctctgcggcgagtaccccgcagacgaggccgagctggtgctgaagctgggcctgctgtgctcccacccggtgcccgccgcgcggccgtcgatgcggcaggtggtgcagtacctcgacggcgacgcgccgctgcccgagccgccggcgtcgtaccagagcttcaccgcgctggccatgatgcagaatcagggcttcgactcctacgccgcgtcgtacccgtcctcatcggcgactgtgacgagcggcggcgccatgtcttccgtacattccggagggaggtgatcgagattcgaggccgcgacgaatttctgagtctgcagtcaattcttggcctcattttcgaagcagcgggttggttgactgattgaggaatcaggatttgagccacctgtgcgcgtgccgccgatcagaggcatcgcaggactcgtctcagagcggtgacggatcagcaatgtgacagtgaggatccgctccgagcgtcaacagcatgataaaggccctgaagcaacagaagtttttaacaaaccaatttttatcttttagttagaagatattagcttcttagtttttaagaatagagaatctaatttctataactgagtcataaacttttatgtttgtaaccacctcaatttttataaataagtttatt

SEQ ID NO: 136934 - DNA, 198 bp, Zea mays
  Clone ID: MRT4577_56361C.1
acttcattctccaaacactcgagctcgagcccatcgcacgtctcctcaaacaagagtctcagatctcgggcagctgcgccgctgcttcgttcgtgtgtaggggagaagagaggaaatggcgtggaccgaggtcgtgctcctgcggatgtgcaactctctcttcgacatctccgccgtcgtcgatgacgccttcctgac

SEQ ID NO: 136935 - DNA, 384 bp, Zea mays
  Clone ID: MRT4577_56362C.1
atgggaggaagcaccccagaagaactaaccgaggaaggggaagcgtcgctccactgctgggcctttgagcaacctgccatcatgcaggaagggcccaatggagaacacagcaaggaacctggctcaagggaagagaagcaagccgggcaggaagccatcgcggcggaggaggtggctgctgggtccagagaaggcaccggcgtggggctggtgggaagggacagggggaggggaaacgtaacttgtttagaccctgttgacataactgtgctattcaaggatggggcattccagtggaaacgactagaaaaccttatagttcttgccaaggagaatgtgtccaagatgagtagcaaccccgcactgaaaaagaatagtttgtga

SEQ ID NO: 136936 - DNA, 1285 bp, Zea mays
  unsure (1)..(1285): unsure at all n locations
  Clone ID: MRT4577_56363C.1
gcgctgttcaggggcagttccgtacttgcgcgagctccacgcgcccacgcctggttctagtggtctacagaacaaccggggtccctccctgcgaattcgccgcaagtccaaaggcaaagggcaaagcagaagttgcggttggcctcgtcctcctcttctccgtcgcggctcagatctctgcgtgcgtcgatggcgtcgttctcggaggctccccccgggaacccgaaagccggcgagaagatctttaagaccaagtgcgcgcagtgccacacggtcgacaagggcgccggccacaagcaaggtccaaacttgaacggtctttttgggagacagtcgggtaccactgcaggctactcctactctgcgggtaacaaaaacaaggctgtagtctgggaagaagacactttgtatgagtacctgcttaaccctaagaagttactcccccttccactaagcactttgaggttagagaggcattgaaaaggatgaaaggggaggtaaggtgatgggctctaatggtattccaatttaggcatgaggatacctcgcggatatagctatggtatggctaaccaagttgttcaaccatacctttcggtcaaacaagattcttgataagcggagaagtatattggtatcgatctacaagaatagcagagatatttgaagttgtactaattaccggggaattaagttgacgtctcataccatgaagcaatgggagagttattgagcaccccctgagaggagtgacgaggatctttatgaactaatttggtgatcaactataaagcctttttcttaataagacaagtgatggagtaatatagggtgcagaagaaggacctacatatggttttcactgacttgaagaagtcctatgccaaaccacccaccaaatgttatgtggtccggtttggacaaccataaagttccaccaaagcatgttggactctttaaggacaggtacaccanatgttgtgactagtgtttaaccaagtgatgttgacatggatgccatctcgattagaataggactacatcaaaggccacctttgagtccttacctttttgctttggttatgggtgaggtcacaagggacatgtaaggcgatatccccttggtgtttgctatttgcggacgatgtagtgctaattgatgaaagctggatatgagtaaataggaaactacagttgtgacaagacttttagactcagtagaactaaaaccgaatatatgagatgtgacttttgactctagaaaaaaaaaaaaaaaaaagcggcc

SEQ ID NO: 136937 - DNA, 944 bp, Zea mays
  Clone ID: MRT4577_56364C.1
acaacgcacgcccggccggggcaacgctttggtagccccattctcatgtattcgtgtgtgtaagggagtgggtgacatcatgggcgcgatccctgtgttgccgatcgccattgagctatgcattcgacaaccggcgtcaacaattggtaccgaggctcagtgtatattctacgacagtttcgtgagcccacatcggacgtagtgacaagaaggatcctgtcgtcaaggtgatgtccaagggaacgccaagacggaaggcggagctagaacatctggtgctcatgttgtccacaattaatgccatgcacatcgagacgaggtcgctcgacgtcatgacatccagggtgtgcatggctgatcaagttatgcatcttaatgagaagaagatgttccctactgatcacgacaaaggcaacaatgtatgggtccttgacacaggggctagcaatcacatgaaagggtgtctcgaggcgctcgcgccactcaacatatctgtgcgcgacacaatgcgttttggcgatggatcactcgttgagattgagggtattggctttatgatgctctagaccaagacaaagagctataaggtgctcgttgaagtctactttattccaaaattgaagagcaacattgttagtctaggtcaattggaggagggggctgcaagattgtggttgaggatggattctgcaatgtgtttggcatcgagcgctcactgctatggcatgtttgctatgaacacctcaattttcaggcactgagctcggcacaaaagagtaaagcacttcaccacgacgccatacataccacaacaaaatggtgtcatagagcaccataatcatacactaggggtgtaatcggatcggatacgaacggatactactcgttccatatttgtatccatattttctctcgaataaggatattatcgaattgtattgaat

SEQ ID NO: 136938 - DNA, 521 bp, Zea mays
  Clone ID: MRT4577_56365C.1
catccattctaaatcaataaactgcgttctcaaactggataataattaaggacccttgggcgtggagaaccaacttatggaggggcgaactacaccgtagaaataaacattacaattgcaatactactatgtaacttgccaggatgctacccaaattagaaaagttcagtatggaagatgtccacttctcggcgacgggtgagtaacgcgtgataacacatatccaccataatcgcactctcttaggagggaccagcagatattgaaacaacacgccaacaccgctgacacggtacaaactagcagagacccttagaaacatcacgttgctatgctgtgcaaaatcacggtcacaccacaaggcttcagaacaatgtgtcagcatagggcaagaaagggtgggaggaccataacttgctgcctctttggaccttagtgctctccagctctctgatgctgcctgctacaaacatctttttccgtgggcatccgagctgctcgcctatggagtcacacttgga

SEQ ID NO: 136939 - DNA, 359 bp, Zea mays
  Clone ID: MRT4577_56366C.1
gtgcgagaatgaacaatgttaccacgtaaaaacacttttagtgccgtgtactaaaagcatacgtctataatacaataaagtctatgccccatgaaagaaatgggcgcggtataagaactactcaatggctgcataaatgttagctggtgaacagaaaactagaatgaatgggtcgactaaaaaagaaaatgatgcttatcggttataggatgattaatatcagtgtagatactgattggctttcattagacgagtacaccctaagagctttagatttccaatgattaacatagaggaatgggggtgataacaggtttataacaatcgagttgtattagcgaactgagcttttagttcac

SEQ ID NO: 136940 - DNA, 270 bp, Zea mays
  Clone ID: MRT4577_56367C.1
gcactcgtacgggaatttctcaagacctctcttaaggaatttttggatgattaatcatccattatctttgtagtcatatttaaaaactatgctgcccattatatatgtcttgactcaatccctcttgagccttccatattatataatctcataaatgcttatctagcatatattaaagagagaaacccaattattctgtatctattctcattatttttgtcttttactataatatcacttctatctatttttattcattattcatacttt

SEQ ID NO: 136941 - DNA, 145 bp, Zea mays
  Clone ID: MRT4577_56368C.1
atgacgctttggccaaagttatccagcatcatccggacaggcatgagacactgaaggagctagaggctctgggcaaagaattagagcatctctcgcatattaaagaaagtgttgaagataagctggaattgagacggaaacaatt

SEQ ID NO: 136942 - DNA, 123 bp, Zea mays
  Clone ID: MRT4577_56369C.1
atcatgccatggaggtgccgctctccccagcgcgggcgcactacaggatccactgctgcagctccatgcacgtcatcgtcgggctccgctcgaagtccgccaccgttccgtgcagcggttcgc

SEQ ID NO: 136943 - DNA, 778 bp, Zea mays
  unsure (1)..(778): unsure at all n locations
  Clone ID: MRT4577_5636C.1
cctcgaggccggccgggccgggcagtgcagtacacagcatcatccatcgacgcaagcgcaaccacctcctccctcgtgatccggccctgccccgcttcgtctaattgacatcatttcccttgcgccttcttgccagcaatccatccaatccatccatcgtgatcacctggcaaccaaaatgtcaaccgccaccgccccaagattgtccgtccccaaatcctccggggcaagctaccggaccgccgctccggcgcccaagacggccctctccttcgtcgccggccacaagaggcagcaggcgctgccccgcgcgcgtctgtccacgtgggcggaggtgtggggtggcgcccgcggccgtgcacagggtgaggctggtcgggccggacggggcggagcacgagttcgaggcccccgaggacacctacatcctggaggcggccgagagcgccggcgtggagctgcccttctcctgccgcgccgggtcctgctccacctgcgccgggaagatgtcggccggcgaggtcgaccagtcggagggctcgttcctcgacgacggccagacggccgagggctacctcctcacctgcatctcctaccccagggcggactgcgtcatccacacccacaaggaggaggagctgtactagtagagttttgggtcgcttatatatgcgacagtcagtgtttgtggcgaatgcagtgaactgatttgtataccatacgaggaataattgattccaacaattccatacaaatcattggatcggcccctagggnc

SEQ ID NO: 136944 - DNA, 492 bp, Zea mays
  Clone ID: MRT4577_56370C.1
ggccgcttttttttttttttttttatttttttttttttttttttttttttttttttttttttttttttttttttttttttttttttttttttttttttggcccgaacaaaaggaccccatgctgatacacaaaaaaaaaaaagggctctacttatggacgggaggggttaaaaacaaaacccccttggggaccggggcaagcaaaaaagggggggaaaaagggaccccccactttttttggcccagacccgaagacaaaacatttggcattttgcaaaaggggaacctggggaaacccaaagcaatgaccggggcctatgtaggccttctttattagcgggaagacctcagtttcggggggcaaaaacgggacccccccctttttgggggggggggggggccccccccccttagcgaattgaaaaacctctacaagctttttttgggcttggcggggggggggatctttaacgacccttcggggcggggccc

SEQ ID NO: 136945 - DNA, 302 bp, Zea mays
  Clone ID: MRT4577_56371C.1
aagatattgacccatggctgaaaagttgagcaagcagacagtgcacctgtcatatgatgatgtttatattcaaagccagttcaaggggcgtttgctctgtcagtgatcggtccatgcatgtgtctgctgatttcttgggcttcagttgtttcattttcacataatatcttaacgtgtcatctctaaacatcttttcctctaagtcagtctaagtgcacatgtgatattatgattacctttttaataatctgtttttttaaaaaaaaatcatatacaacatcttgtttaccaccggtggtgga

SEQ ID NO: 136946 - DNA, 265 bp, Zea mays
  unsure (1)..(265): unsure at all n locations
  Clone ID: MRT4577_56372C.1
caacctagtacnaccaggaaccgttgattcacacaattggtcatcgcgcntggttgaaaagccagtggcgcgaactaccgtgtgctcggattatgactnaacgcctctaagtcataatccaagctancaaccggngcctntgctncgcntcccgcnccgacncacgttangnncgttcgcgccctcaagggcccgtgccattggctcagcncgcncnnnctacncgccnggcgtgccgcctcgaagctcgcttcccaacgggcgg

SEQ ID NO: 136947 - DNA, 450 bp, Zea mays
  unsure (1)..(450): unsure at all n locations
  Clone ID: MRT4577_56373C.1
gaccgagagggcgcggcgcgagcacgccaaagcgcgacaacaagccggcgcgccaagaagccagcggaggaggagcccgccgcggcgaccgcccagggggagaagaagaaggagggggagaaggggccccgggcggccaaggcaggcggggaggagggcgaggaccgacaagggcgggaggcaagcgaggaaccaggaggaaacccacaggagcgacaggacacggggggcggaagcagggcaccccgagcaggggccgcgcccaaggggaggnggaggacgaacgccngcaccagcgagaggcnggagacgagagcccgcgagggcgcaagagcgcgcgcgcnacagcaccgaaccgaggcaccacccgcagcgggagccaaacacggagagaggacgagcagcccccggggggcaaggcaagcacgcgggcgccgaggggaccaaggc

SEQ ID NO: 136948 - DNA, 160 bp, Zea mays
  Clone ID: MRT4577_56374C.1
agcggaccagccgctgaaagaaaagggttcctggcccaactcgcatccgtgtcaccgcgtgcgcgggtcgaatcatccttcttccgtcaccatacatactgtagacagtcgaacaatcgccggctagacgcccctcttctggacgccgcacgccttgacg

SEQ ID NO: 136949 - DNA, 464 bp, Zea mays
  unsure (1)..(464): unsure at all n locations
  Clone ID: MRT4577_56375C.1
gtatggctattggcctgtttcgagaggtaaaatttggaggtgctgcatcaaaaaaaaaagaaaaaaaaaaaaaaaaaaaaaaaaaaaaaaaaaaaaaaaaaaaaaaaaaaaaaaaaaaaaaaacccctggaaaaccgcaagagacaggggtcttccgaactccgcctatctccgcgaactcaaagttttcccccaattcncccccctttctcccatttcctcaccaccggccgccggtcccccccgtttcaacaacaccatgaggggagggcatcctcgatccacatcggccaggttggaatccaggtcgaaaacgcgggctgggagctgaactgcctcaagcagggaattcaggttgagggccaaatgcccggggacaaaaccatggggggaggggaggaggctttcaacaccttcttcagggagactggggtgggaaagaacgtcccccgggctgtttttgt

SEQ ID NO: 136950 - DNA, 281 bp, Zea mays
  Clone ID: MRT4577_56376C.1
ggggttaaaaattttaaaatccatttttggtgggcaccacacaaacgggaaattgtaaatatttttgccattgggcaaaatcccaggggggtgcccaacttggttataaaacttttataaaaagccatttttcgggggggtttttatggtcccatggaggcactcaattgaggcaatttgattttgtgaatggtacaaaaccctggaatattaaaattggaccatttttggcccctattggctttttatacaggggagggataagggtagtccccaaaacc

SEQ ID NO: 136951 - DNA, 620 bp, Zea mays
  Clone ID: MRT4577_56377C.1
agcagccaccaccgtccaggccaccagcgcagccctcgcctacaagaacaccacccccccaccccaccctaaccttgatggctatttcctcttagctctcccactcagcatctcgtcttccttctccttctcttcttcctctcttccgttccgcgtagactgacccaaggagcggtcggatgggtaaacgggaggcgctcgtcgctattgcggtcgtggcggtatttctcgcggcgtcggccgggaaagtggacgcagctaaggcggcggccaaggggaagtaccgagcgctgttcaacttcggggactcactggctgatgttggcaatcttctgatagcaaacggcgtctcagacaacctcaccaccgcaaggctgccttacgggcagacctacttcggcaaacccaccggccggtgctccgacggccgcctagtcatcgaccacctggcgcaagaattcgggttgtcgctgctgccgccgtccaaggccaatcactcggacttcaagcacggggccaactttgccatcaccggcgcgacggcgctcgatacgccctacttcgaagctaggggcctcggtgcggtcgtctggaactccggtgccctcatgacccaaatc

SEQ ID NO: 136952 - DNA, 301 bp, Zea mays
  Clone ID: MRT4577_56378C.1
attggcagaaaaaaaaaataacacatcccatttcctttaaaacaaaaaacaccacccaccctatacatatgccaacatcccgtacttatcaacaatcactaacattaaattaaattctttaccatacaattctattgactatatgaacccaccctaaaacttattatttctacccccaaactaacacaaaatgatttttttcttaccccccccttgctataatgtacaaaaattaactcaacctccataaaacgtattattggatccaatttctcactttattcaacttaaactccaaact

SEQ ID NO: 136953 - DNA, 198 bp, Zea mays
  Clone ID: MRT4577_56379C.1
gcggtgtagcgtccatccgttctgctgggggggaccgtaggtggtgggggcggtggctccagtagtattaccatctgtgcctgtcacgagttgtgttgactctagtattcacatgacgatgaacccttcatgtctggtgtgttattagtgatcagagcataaaaggcatgttttccagcaacatgggatttctttcaa

SEQ ID NO: 136954 - DNA, 186 bp, Zea mays
  Clone ID: MRT4577_5637C.1
gttctagcccctagcacccaccagaaatttagccaaacaacgagaaaagggaaataaaggaatcagaacccaagctcgtaacatcgtgagttaatgccggcgtctcatttaatgtccaacaaaaatgcactctctctagccgtccttttttttgatggaccacctggccgtataatcaattggatc

SEQ ID NO: 136955 - DNA, 191 bp, Zea mays
  Clone ID: MRT4577_56380C.1
tgacgtgcactgcaaccgaacggcaagcatagtaattcggatcgagtttattttttggatcttatggtcaacgggatggagtttttaactatgggcaggtacctacaccagcgaatcctgtagataacagatgttctgttgtgaattctatttaacatgtgttattttttcatatattattattatatttt

SEQ ID NO: 136956 - DNA, 1120 bp, Zea mays
  Clone ID: MRT4577_56381C.1
ctgtgcggtgctcgggccggccgggccgggacacagattccttcgattcccgctgacagcgaagctgaggagaatcccaagaaacagagctggtgaaattgcattgtcgcaacaggcaagcgaagaggagaagaaagaaatggctgcaatacctgcagcgatcccgggctgctgctcttcgtctcgcctgtctcagcttgctggcctccctgcctccacaagcagaaggcgcttcaaggtcacggccatggcgccccaaaagaaggtgaaccgctacgacgagaactggtcgaagcagtggttcggcgcgggcatcttcgcggagggcagcgaggtggtgtccgtggacgtgttcaagaagctggagcggcgcaaggtgctgagcaccgtggagaaggccggcctgctgtccaaggccgaggagctgggcctgacgctctcctcgctggagaagctgggcctgctctccaaggccgaggacctgggcctgctcagcctcgtcgagaccgcggcggggacgtccccctccgtcctcgcctccatctcgctgccgctcctcgtggccgccgtcgccgcggtggtcgtcgtgcccgacgactccgtcgcgctcgtcgccctacaggccgtcgtcgcggcggtgctcgcggcgggagccgccgggctgttcgtgggctccgtcgtgctcgctggcctgcaggagtcggattgatgcattgatctgcagctgcgcaaggtagaaccaagctgtgtacgtacgtcgacagtaccgccttgtgtagtaggatcgatcttgttagcagagcagaactcgttactaaaaaaatctatagtgtctgtaatataatataatactttagctttttgataacttgccgtgcaaatgtggtaacatattatgaagaaaattgcgatcaaatggacggttaactcggattcaaccagacacttttacaaccaatgcaaaaaaaaaatcgtttcccagagagaggagagccggtcatgtccttttggctgtttggtttatttttgagttcatgcggtctttatttatttccatgtacccagtacccaccttgtaccatgcatgttccttatgatacactcacctctttttgtttgc

SEQ ID NO: 136957 - DNA, 544 bp, Zea mays
  Clone ID: MRT4577_56382C.1
gggtaccctcgaggccggcctgctgtcaaggccgaggagctgggcctgacgctctcctcgctggagaagctgggcctgctctccaaggccgaggacttgggcctgctcagcctcgtcgagaccgcggcggggacgtccccctccgtcctcgcttccatctcgctgccgctcctcgtggccgccgtcgccgcggtggtcgtcgtgcccgacgactccgtcgcgctcgtcgccctacaggccgtcgtcgcggcggtgctcgcggcgggagccgccgggctgttcgtgggctctgtcgtgctcgctggcctgcaggagtcggattgatgcattgatccgcagctgcgccccctgccgcgctttgctctccgccgagcaaggtagaaccaagctgtgtacgtacgtcggcagtacggccttgtgtggtaggatcgatcttgttagttaagcagaactcattactaaaacaaaatctatagtgtgtgctgtaatataatataatataatattatctacattttctaaaaaaaaaaaaaaaaaagcggcc

SEQ ID NO: 136958 - DNA, 247 bp, Zea mays
  Clone ID: MRT4577_56383C.1
aaaaaacgttcgttacctaacaaaaaacccaatggaagcgactttcttttgcctcccccaccttacatgcaagaatgcatgctttccccatgcatacatacattgatgcatccaccctccttttgttcactatcaggggcccggacattcaattagggcttcactaatgggccgggcgggcttttttttaaggactgtccccccatttctcccactcatgtgtggtatgttgcccccatcgttccac

SEQ ID NO: 136959 - DNA, 141 bp, Zea mays
  unsure (1)..(141): unsure at all n locations
  Clone ID: MRT4577_56384C.1
ccgggncgacccagcgnccgccgatttcgacagacganagcccagcgaaggaggacacggcagcnggnggccgcaaacgggcgggggaggagcacgaggagccagggccagccagcacgaccacagcggcaaggaccacaa

SEQ ID NO: 136960 - DNA, 119 bp, Zea mays
  Clone ID: MRT4577_56385C.1
gtgcggaatttatcataacacaacggggacttacctagatgaaaaaatacagctcagaaaggagaaatacaaataccgggaaactagaaccacaaactgttccgggggaagcatgagga

SEQ ID NO: 136961 - DNA, 265 bp, Zea mays
  Clone ID: MRT4577_56386C.1
cctgcttctgttttgcactttctatgcgtatttttgcactctatatgtgttaaggttgacttaaatctgattattcgctcggttagatttggtatcctcatagtgtgtaggtctatctgtcttagaaatactaagtcaaatgttccgcattagcttgcaacccaaagtcttccgcagatagtaatgatatacggaatatcacatttggcagttgatattgattatttaggcgaagggaaatggcaaccgttccaggggatctgat

SEQ ID NO: 136962 - DNA, 576 bp, Zea mays
  unsure (1)..(576): unsure at all n locations
  Clone ID: MRT4577_56387C.1
tcaaaaaaaaaaaaaacttactttcatgccctctgtctcatgttcgcgtcctataattgtaatcggcgaggaaaaataacactaggattcaatgacacaaggcgacatgcctgttcacctcgaggttcccattactttgagatgtgtcggattagactttttaggcgattagcaaaaaaatagctaaattgattaattgaggtattctctaaatgttttttaaaaagagtagattagttcaacatgctcgataaattcagaactctgtatgcaaaagcgaaaaagggggggccccggggggggncncaaaaaagnnnaggagngnggaggaggaggggnagggngaaaggagnnaagnnnaaanaaacacaaacccttttttttttttttttttgtttgggggggggggggccccccccccccccccccgaaggaagggggaaaacaaccaaacaacccttttttatttttgggtgggggggggggggccccccaactcccttcaaaaaaaagagggggggggggggggggcggccccccccccccccccccccccccccccctcttttttttttt

SEQ ID NO: 136963 - DNA, 181 bp, Zea mays
  Clone ID: MRT4577_56388C.1
gatctaagctactcatacacagatgtcgagctcgaactcgtggtagttagccgccactgcacaagtgacatagattgggtgtgaggcataccgagacatacgagggtacgactccagataccacacaggtagagacctacgagcttccatactactatgtatcaacactacaaaatactgt

SEQ ID NO: 136964 - DNA, 364 bp, Zea mays
  Clone ID: MRT4577_56389C.1
ggagaaggaggcccttgcgcccgcccgccggccggatcagagccgtagccaccaccacccatgggggacgtgcacgaacctttggtgccccgtaagaagaaaaagggtttggtggacttcttggtgaaatttccattgattcttgtgatctttgtgggcctttcttttttaacttttatttatttaacctctttcttgggcaacttgggggcccgccttaaattcgaaaaaaaacccccaaagccagccttccccacaaatgttaacggacttggccttttcctacccccccgggccggtcctaagggggaaggagttcaccggcccggaggctgtccacaggctgaagcatgggttgatcaaa

SEQ ID NO: 136965 - DNA, 222 bp, Zea mays
  Clone ID: MRT4577_5638C.1
acgatcgagatggcggcgttggatgttgagtaccgttgctttatcttcggtctggtctgggccacgaacgaccactccctccacaacgccttcagctcctactgcgaggtccttgtgtccaagatcatcctcgatcgggagtcgcatttgttccgtggctttggattcgtaacctccttcacagtggaagcgatgcggtctcgccataggtgggcatgaacg

SEQ ID NO: 136966 - DNA, 659 bp, Zea mays
  Clone ID: MRT4577_56390C.1
ggccgggatcatcattgctaaagcgaagcaagcaatcggcattctctgcgatttctctagatctcaactacccccactagtcttggctcctcctttccctggacacagcgattctgttgccaatgcacgaataccgaggcgccggtgatcgggatcgacctcggcaccacctactcgagagtcggcgtgtgccaacacgaccgtacggagatcatcgccaacgaccagggaaaccgcaccacgccgacctatgtctccttcaccgacaccgagcgagtcatcagcgacgctgccaagaaccaggtcgccatgaaccccaccaacaccgtcttctatgcctggcggttgatcggcaagagcttatcgtgatccgactgtgcagagcgcatcatgtaagctatggccgctctacgggcatcccaggggctggcgacaagcccatgattggagactacctacaagtagaggagaaggagctcgctgctgaggacatctcctccatggccctcctcccgatgaaggagattgctgaagcctaccttggatccaccatcatagaaccgccagtggcgacagtgtcggccttcttcaatgactcctcgaggcaggccacctaggacgccgccgtaattggcggcctcaatgtgatgcgaatcatc

SEQ ID NO: 136967 - DNA, 266 bp, Zea mays
  Clone ID: MRT4577_56391C.1
tgcctctgtgccgggccagcaggataacatctggcgatgatgtaacagacatagcgatcgcaaacagattgaaggaatgctattcgaaggcaacgggggtgggccactctgcaagggcgaaactaactgtcagcttaaggaggtgtgcaacaacactgagaggaacagccagacttagctccaggggctgactaggcgggctggatggtaagccagctactggctgtgctacaaggggacccgacctgtgcgcaggagcctgctag

SEQ ID NO: 136968 - DNA, 272 bp, Zea mays
  Clone ID: MRT4577_56392C.1
atggcctgctggacagcaaataaaactacccgctttgtgcttgcaaatataatagggttcaaacaacaggttatttttacacacaggttacaacataacccggccataaagcttgggttaagaaatcataattttcatgagctaaaaatgggtttagactttaaacatcttgaaaatttaactttcagaaagttatatggcaattactctttaccaaatggtcccgacattttttattgataaattgacaaaggactttctttgagctttat

SEQ ID NO: 136969 - DNA, 447 bp, Zea mays
  unsure (1)..(447): unsure at all n locations
  Clone ID: MRT4577_56393C.1
ccggccgggaatccttctgcttcttttcttcagtcgcatcgaggtgcaagctttgccttctcagccctcgccgacggacaacatgatgcacatgagccttctactcgtggcaatgtccgccacgantctattgcactggctggcgcacctgcacgtgggtcggttaccttgtttggctggtgggcctgcttctcgccggcgtcttttaccatgacctcgaggtcttgcgggatcgcgtgaagctcattgctgaaggatccgccaagccagcctcctccantccttcacccgccagctccgacccgagggcgccgttaatcgcgcccgacttcgcctggcgctggtcgtctcgtgtgggcggggcctcgatgctctgggcctaacttcgggctaggatacctcctaaagctctccatcatggctgttaacggcggggcgttcatcacc

SEQ ID NO: 136970 - DNA, 289 bp, Zea mays
  unsure (1)..(289): unsure at all n locations
  Clone ID: MRT4577_56394C.1
ggcgaataancttggcccttcttgcaatgcggccttaaancatcaagataagaaaagctcaaccggnatccagaaatggccnggtacgntcttgaatccccgcnntgttggaagcaacggcccaaagtcatcacattgcagtncaaagtcccggctgataagaagaagaagatggacgcaagaaagaagatctgctcgaacaaactgtccgtgcaagtggaaccgcaattatgcattcgtttgttttggaagaatcttgccttctttttttttccctgctgattcccac

SEQ ID NO: 136971 - DNA, 223 bp, Zea mays
  Clone ID: MRT4577_56395C.1
acgcggacgcgtgggcggacgcgtgggtatttgtgcaaaaaaaaaacaatgcaacttatttaatcaaatgtgacattttgttcatttgcctcaattgtcttacatcaataactagagggggaaaagaacaaaatgtcacatttgattaaataagttgcattgtctatttgtgcaaaaaaaaaacaaacaaaaaaaaaagcaacaaaaaaaccaataacaaaaa

SEQ ID NO: 136972 - DNA, 1993 bp, Zea mays
  Clone ID: MRT4577_56396C.1
gatgttaacaactgaacacaaccaaatttggaccatgatatgcccaccactcttcttcgattagcccaaagcaaacaattttacctacagtagaagaaagataatatgagcccacaggggatcaaccggccactctacatttttgtcgagcagatgtgcacgatatgccatctcaatggatcgggacttcaggtttcctctatcaccttcacttttgcgcctctgaattatcatgcttgactactggtgcaccaacacctgcattatttggagaaactgtagtctgaccgacagtgggagcttgattgttttctccagctggagctggctcagtgggttcatttttcacaggtccagcagaaggcttctccgatggtttcacaggctcgtcgttcacaggtccagctgaaggcttctctgatggtttcacaagctcatccttcacagacccagctgaaggtttctcaagtggtttcacaggctcagaagtagcaccaagcttgagcctcattttcttggatagatccatgaccacatttatttctaaaacacatgacaaaaatatgtgtataagatcaagccatgtcaacagagtaacagaccaaatgtacatagtacatattgaactgaacatgagacttcaggttgcttattttcacaatgaactacaaagtttgacaaacatcattactaaattgagtgacaaagaaattacttactgaaaatataggtaacggggatctatcgtatgcttagcagttctgtggagaatttatttaaaacaatgctgaccatttaaaaggataaaacacataattgatttttcaagtgacaccactacaaatttctattttatttttttactagtaaaaaactagggaagaaggatgtacaatgtgtgcaattcatgtgtttgcatgcaagattttgcatgtcatacgagaagttatgaaagccaagtcataagaagatacgtgaatggattatatcatttgatgcacaatgctgctaggcagaggctacataaaacatagaatgggatagcaacaaatcaacagcagaaagtgcctcacgacacaattgattaacaaacatttcctaagacaccattgtgtatacaactaggcaaatggaacgcaaactgcaacgcatcgactgtttacacattataaaacactaagattacaagtatccgcattggtgcatctccctcttcaactagttcattgcctagcagtgattctagaaaaaaaaaaatggtttcaaactttgccagtgtgtggcctcaataacaagcagtaccagtacaaagaaccaaatctgatactccctacgtaaaattatagcttcaaaaacttttctttcagcactggctacatctttattttacctatagttttttttttctcgaacacacaggagagttgtgcatcattatattaaggagagaagttcaaaaatggtccaaagtacaaaagcccaggagggcaagaacacacacactagcaaacacccattacagaaagaaaaagggaccccacactaacctgaccagattgcagcaagtcccttagcaccagccctgcaccagatttcagcctcatcctttatgttttgaacaacatcaagaaccctaggagaggcttcatcaaagatgcagccattcctagctttgcaaatacaccaagctacaagaataactaaggccttgttcgtttgtgtcggattgtacccggaatcgttccagctaatcaaagtttatataaattagagaaataatccggttagaaatcgttccgacccactaatccggcacaaacgaacaagacctaatagagaaacctgagagttgcaaaccggctgtctcaggccggcctactggaccgttgctcacgtgtaatctccggcgaaacaatccgttcccgttgaacggcacgctcgattgggtaattcgaattcccttttttttttcaaaaaaaaaaaaaaaaaaata

SEQ ID NO: 136973 - DNA, 322 bp, Zea mays
  Clone ID: MRT4577_56397C.1
ggcgcttcgggagccgcggcttatggtgcagacatggccaagtccaagaaccacaccacacacaaccagtcccgaaaatggcacagaaatggtatcaagaaaccccgatcacaaagatacgaatctcttaagggggtggaccccaagttcctgaggaacatgcgctttgccaagaagcacaacaaaaagggcctaaagaagatgcaggccaacaatgccaaggccatgagtgcacgtgccgaggctatcaaggccctcgtaaagcccaaggaggttaagcccaagatcccaaagggtgtcagccgcaagctcgatcgacttg

SEQ ID NO: 136974 - DNA, 218 bp, Zea mays
  Clone ID: MRT4577_56398C.1
tccgaaaacaatcacgctttgaacaaactggtttactcgatcttcatgatgtcgcagcgggggcggggtgactgcttcttgagagacccacggcgcctacaaaatcatcagccataaaaataagcgacaggatacgtacatttccccagtgaattaagtttctagattctataactataatgcctgctatatatcttacacatggatacattctacgt

SEQ ID NO: 136975 - DNA, 492 bp, Zea mays
  Clone ID: MRT4577_56399C.1
acccggggcctttatttttttttttttggggggccccaaatttttttaaggggggggggccgcccccctgttaaaaacaaacttgaaaatccgggggtagtccttggggggcccaatttttttttggggggaaacaggggggaaaactcgatcgatggatgggttgttttttcgcccttttccggaaggggttgaaactggggttgaagaactgcaaaccaaaaggttgtagggaaccccccgttgttgacagtggacccaaagtttttgtctttggcaggggtcactttccttgaaggcccaaaactggtttggaccctactcccccgggttttgaagaatttttccctgccaatttaagggaaacctcgggggggtttgttgccccaggggttgtcccaggggaaaaaaaagccccgggtccggccttagacgtccttgccgaggaaaaccttgggggcctggttgccctggcccagggagcgggttttg

SEQ ID NO: 136976 - DNA, 3079 bp, Zea mays
  Clone ID: MRT4577_5639C.1
aattcggcacgagggtcttctccgcgctctccatcctcggcgggcgggtgggaggggcgagtcgacgaccagcacgcgcgcgcgtccagcgcaaccgcgtcacggaaccctagcgtcgcctcgttcgctgcccaactctcctccagactccagtgcacagattatcagaatgcctcgaggacaaggctcttctgtgtcaacccgtgagaatcccaaagttgatcgggcaactgattcaaatgatgacagccgcaagaataggaggggtgcttatttgctactgggattgctgatagtgttccttcatggatcatggtctgtttatcagatccagtttggaagccttcctttgccccttgatgctgagcaggctggaaagaggggtttctcggaagcttcggcgctgaagcatgtaaagtatttgacaggcttgggtcctcacccagtcggttcagatcccctcgatcatgctattcagatataggcgcaaatcgtctatctggtggtcttttcaagggaaaaactctcttgtattcagacttaaagcatgtgctattgagagttactcccaaatatttaccagaagctgaggaaaacttgattctggtttcttctcatattgacactgtttcgacaacggaaggagctggagattgcagttcatgtgtgggagtcatgttagagcttgcacggggagtggcccagtgggcacatgggtttaagagtggtatcttgtttttatttaatactggagaagaagagggtcttgatggcgcccatagttttataactcagcaccactggagaaattcagtaatatttgcggttgatctggaagctatgggtatcagtgggaaatccacactcttccagggtactgaccattgggcattggaaagctttgcagctgtagccaaatacccatctgctcagatagcttcacaggatgtttttagttctggcgcaataaaatctgctactgattttcaaatatatgaggaagttggccgtcttcctggacttgattttgcatataccgatacaacatctgtgtatcatacgaagaatgacaagatggcgcttctgaaaccagggtctcttcagcatattggagataacatgcttgctttcctactccattctgcagcatctccaaaatttttgaaagatgcacaacaaaggaagcaaggaaagacagagcaggatagagctgtttacttcgatatcctgggaaagtacatggtggtctatccgctgcgacttgctaccatgtttcacaactcaatcatattgcagtcacttctaatatggggaacatcattgcttatgggtggacaccctgcactggtgtcctttgcaatatcatgtttgagcatcattctaatgtggatattttctatctgcttaccagttgtggtagcatttgctctgccctatatgtgtccgtttcctattccatatgttgcaaatccatggttaactattggcttatttggttcacctgcactgcttggagcatttattggtcagcatattggatttattctcctgaagaggcatcttcgacgcgtgcattccaaagcaaaaactgggataactcctagcatgatagaaaatgttactgacctggaagctgagaggtggatttttaaatctggttttgtccagtggttaatagctctgatactaggaacatatttcaaggttggatcatcgtatatagcactcatctggcttgtttctcctgcttttgcatatggttttttggaagctactctctcccctgttcggctacctaaacagcttaaggttgtcacgttggttgtgggtttggttgcaccagttgtgtcttctgctggtttggctgttcgtatggcggatgtaattgttggaagtatagtacgtattgacaggaatcctggcggactaccagactggcttggaaatgtaatagtttcggttgccattgctgttgtcgtttgttccacgtttgtgtatctgctttcatacattcatatctcaggtgataaaagaattctgggtttgctattatccttatcctttggtctttcaattgctttggcatcaagtggcattgtgccagcatttacggaggatgtcgctcgatctgtaaacgttgtacatgtcgtcgataccacaggagtacatggcgggcatatagaaccagtatcctatatctctttgttttccaatacacctggaaagctgacgaatgaattagtggaccttggaggcgaagaattttcttgcggaaggaacatgactactgacttggtaacatttacagtgaagtatggctgttggagttacaaagagagcagtaccggatggagcaggtctgaggttcctgtgctccttgtagaaagtgattcggttataggtggtgctcgacagacagtagtatcagtggataccaagtcatcgacgcgttggacgcttggaatcaacaaagatggaatcgatgacttcacagttcaagtggattcggagaagatagtcctacctggtgataagagcgagatagatgggtggcatacaatccagtttgcagggggcaagaactcgccgacgaagttccagctgacgctatactggtcgtctagcaaaccatctgagagagaagctaaacaagcagcggacgctcctttgctggtgaaactaagaacagatgtgaatagagtcacaccgcaggtggcaagggtggtggagaagctgccacggtggtgcacgcccttcggcaagtccacctctccgtacacgctagctttcttgacggccctccgtgtcgatatttagtcagtcagcagcatttgtttcccatacataggcgtccagtccagcacctttcgttttgaactgtattttagtttgatagtagcaagttataggcccatagaattgtacacaaaagctgccaagggcggtctggtgtaaacgtgctttgcacttgctctaatttgtcctgtatcaaagtttcagattagtttgtggtaattaaaaaaaccaaaaaaaaaaaaaaaaaaaaaaaaaaaaaaaaaaaaaaaaaaaaaaactcgag

SEQ ID NO: 136977 - DNA, 832 bp, Zea mays
  Clone ID: MRT4577_563C.1
ccgtaccgcccccaagtgcttcagagaagccggccggccggcaaagaagttaatttagctgatcgagctctcgacctctcgtgccgtgtgtgcagtgtattcttcttcctcctcctgtcgtcgcctagagctagctctttatcaaattaaacactttttgtcaaatcagttcgttctggaatccgttatagttgcctgctgccgtcctcttcaagtagtgcaacaagaaacagggagctttctttatcttttctagcagttggatagggttagggttttccgttctggccttatagatcatcggtcccgattgatctgggtaagtgatcgagtagtagtagtatggaagcgtcagtaggagcagctggtggtggaggggggaagtctaagaaggaggaggagagcctgccgccgggcttcaggttccacccgacggacgaggagctcatcacgtactacctgcggcagaagatcgccgacgccagcttcacggcgagggccatcgccgaggtcgacctcaacaagtgcgagccatgggatctcccgggtaaggatcggaggaaaccaactgtatatatatgtacacgcacatgcatgcatacagcatactcagttcgtcagttattcacgatcaaatctcaattaataaactccaccaatgattcatcgccaatttttataacggggggcaagacctttgacttaaattatattacaagaggtaaaaagagaaattagaggaaccacaattcatcatcaaattaaaagctatggtttttttcttaacaataacatccgcgttttatccacttcaaaaaaaaaaaaaaaaaaa

SEQ ID NO: 136978 - DNA, 722 bp, Zea mays
  Clone ID: MRT4577_56400C.1
gggcgaaaatcttattactaaattttacaagttgcaacaaatttacattatatttatcggagtggttacaaaagtggttcaaagaataaactttgaaatgttataaattatttataagtttgaaatatatgctagctcagtgacaatcctcaatagaaagtatagaggaaatacttagacttttaagaaggtcgtgcccaccggcgcttaacaccaatcacaatcaaagtgactcgtgacctgaataacactaggttagtgtttggtaggcgacgtccacttgacgatcatcctcgtcctagcacttgatcaggcaggttcgtccatcagcatcaccatgcggagtagcccgcgcttggggtcgacttgggtcgtcttccgcatcacgtggttaattcacgtacttgaatgaaatgcattatgcacatgaacgcatatagacgggaatattacaaacctaaatagtgctacgcgatagcgaatttaacacctagcggtgaggcgttgtacaattgtgtacgcaaacactagttatcgacgtacgactaagagtaatggttacgcttttctagattacccgaatctaacgcaaacatcacgaaacaacaaactatacacatgaaatacaattagcctaatccccccccatcagttaattaattaaattatgaaataaaacccccacgcgtccgcccacgcgtccgcccacgcgtccgcggacg

SEQ ID NO: 136979 - DNA, 395 bp, Zea mays
  Clone ID: MRT4577_56401C.1
tacgccttcgctcgcgccgccgccgacgacaacgcatacgcgatgcacctatgttgatttctggacctcgagatgacgaagcgcactaagactgccgagaattggtggcatatatgagagaccaactataggagctaacgtgcgaagaccaagaaagacaatggaggcttctcagtattgcaaggacttctgcgaggtttgaggggaggttgctgtaaagaggaaagcaattagtaatatgcggtttcgaggactgggggaaagtgaaagctgctggtgcttacaccatgaacactgctagtgcggacaccgcgaggggcaccatccgtcgccctggggagcagactggagcatgagatagctctttatatgattggggggctctgtagccgctc

SEQ ID NO: 136980 - DNA, 1095 bp, Zea mays
  Clone ID: MRT4577_56402C.1
attaccaaattttacaagttacaacaagtttacattgtatttatcggagtggttacaaaagtggttcaaaggaataacattgaaatgttataaattatttgtaagtttgaaatatatgctagctcaagtgaccatcctcaataagaagtgtagaagagttacttagacttataagaaggccgagcccaccggcacttaacaccatcagcagcagcacaaaactataacctgaataacactaggttagtgtttgttaggcgatgtccacttgacgatcatccttgtcctagcacttgatcaggtaggttcatccatcagcatcaccatgcagagtagcccgcgcttggggtcgacttggctcgtctcccgtatcacgtggttaattcacgtaccctcattaaatctgacttgaaaccacgaaatcgacgacgcctttcagctcagcatttcaccgaaaatagggtgagtcctgcgtcgaatcacgcttcatctttatccacttcaagaattcttcggccgcgtactgatttattttcttctgcgcctaatcttctcggatcttggcgcagacgaggatgacgatcgacgacttgttcgagctttttgtcgagtgcttggtaaatatcaggatgctagcttcgtcttcacccgactcttgggattagcgcgggacgacgtacggaacgacgacgagatcgagtctggagcgagcttgcgaggtgtggtcaagcaggttagcgcgggctcgggtgaggacccgaatctagggagggctctgacgacagcgaggttatgagcaagggaggacggttttaacagctcgacgtcaaacgtgagcacacagcgaggcacgcagcagcgacgacaatcgactcgacaacaaaacgttggcgaactcgatgaacacgaccacggtcgcgtgctgacgcgaataggacaacggcggctggcgaaatctgagataggaaaatggcgcgcgcaggaaaactccggtcgggcgagctggaaacaccgacgagcacgcgcacagcagcaggaacagagcagagaatgagctgggcgactgcgcgcgaccacgggcaagcacggccagca

SEQ ID NO: 136981 - DNA, 1675 bp, Zea mays
  Clone ID: MRT4577_56403C.1
ggccgcttttttttttttttttttaataactacaccaagttgcaggggatacccacaccttgatgacaatcgttacaaagatccaacatcattacatgttcatcactacaagcatcaaacatatgataagcaaactaactctaactaagactgaccaggactaagacactgaattaagcattattacagactccgactccgtcgatatatggatccaaatctatccggatcctgcagtcagggctaccatagtcgaagcgaccacggggcggtgaatggtaagggtgctgaatcccgacaggggcgggagaatcaccatcaagatagtggcatgctacgcactcagcacgcaattccacaccctccgcccgaaccgttcccaactagtcaagggcgtggtccagctcggcgttgagcacggtggccaggttgaccatgctattcagcctgggattgccctcaccaacgggtgaaacaatcacaccttcagcactgccggtcgaacgacgagggtagtctttaggtcaaggccattagctaccccgttgaccaatgagcaatactgagagagtgcacgtcatgctgcatcttgcatggctacctcggtagtatccctctcagtaatagaatagtgctttgagaaggcctctgcaccccggagatcactcgtctggacggcgcaccaagcaagtagcctcccactggtccgggtataacccgcgacgatgctggtagactacacaatggtactcgatggatcaagtgtgtcagtcgatggcccgacgcagcagcatgttgagagcgtcgtggaagtgacacttaggagcagcgtcgcgagtgatgggtctagcgatccatccctccggctctggctcctcctagagcttcgtgtcatggctcgaactgccaccaacgtcgtcgtcgtctccgtcagtagctgggatgccctatggtagtgcaggggcatctctggctgaggtgcaggggaaggcagcctcctagtctccacctcctgctgaggcgagggggaagagtcttgctgctcctggtcctgctcctgctcgtggtgtcagcgctcctgctcctcgtgcaggcgacgatgcagtctctccaggtgactagctgacctggcaccgtgcgacgcagtggatgctccgccaggtgagaaggcaaaaagggatcactgacttacgtgcagtgcacctgggtaacactaggttagtgttgttagacgatcatccttgtcctagcacatgatcaggcaggttcgtccatcagcatcaccatgcggagtagcccgcgcttggggtcgacttggctcgtcttccgcatcacgtggttaattcacgtaccgtcaattaaatccgacttgaaatcacgaaatcgacgacgcctttcagctcagcatttcaccgaaaatagggtgactgctgtgtcgaatcgcgcttcatcttcatccacatcgagaattctccgactgcgtactgatttattttcttctgtgcctaatcttctcggatctttggcgtagacgaggatgacgatcgacgatttgttcgagctttttgtcgagcacttggtggctattacgctgctagcttcgtcttcacccatgctttgtatttcttgatgctgcacggaacaacgacgagatcgatatgcccacgcgtgatga

SEQ ID NO: 136982 - DNA, 314 bp, Zea mays
  Clone ID: MRT4577_56404C.1
ctcagaagtctggttcgccgaagattctcgagtccccgattcaatgccgctgctgcgtctcgtcctcttcaccaccgatgattttattctatgggacgggagcgcaatctatgcacaggaacttttacactatccgcaagcagctcgatcatctcatggcggataaacgcaactgcgatgtgcgtgaggtcattcgctcgtactatcatcgcgacgtctaccgcctctagttcaccagactctgcacctactaccacttccaacttactaagattgacatggacccgtgcacgaaactgaactcgctgtaactg

SEQ ID NO: 136983 - DNA, 556 bp, Zea mays
  Clone ID: MRT4577_56405C.1
caagtaatacttgcctacttccacgttgtggcgtcccaatggacgagggttgcactcaacccctttcaagtgatccaatgatcaacttgaataccacggtttttcctttctttgactttctcccgtttgttatttttttttctcaacttggagcctctcgcccttacaatgatgatcacaaaagaagcacggaggtaagggaggggagagcaacacacaagactcaaatcacagcacaatcacgcacacaagtcacaacttgagctcaaaacacaacccacggagttcacaactcaaatggagctcaagtcactatctcaaagaatcaaatgcgcgaagttggagtcttggaggcttagaatgattcttgaatgcttttgttgactcctccatgcgcctaggagtcccttttatagccccaaggcagctaggagtcgctggaggccaacaaggaaggttatccttgccttctgtcgggtggcgcaccggacagcctggtgcaccaccggacagccactgttcatgtctggtgcgcgatctccttcctattttggcg

SEQ ID NO: 136984 - DNA, 338 bp, Zea mays
  Clone ID: MRT4577_56406C.1
gctgtgtacgaagggttgggttaccttatcaagcattacagatcattttcctgactacatacaaaacctcactttttttctatacaggaatatgtgttctaatttttatactacacagctgttactgaaaatcaaaaaaatacttttacttattatttgacaccttcctaaacggataaatttatttgataatacatacctcgcggccctaaaaatctctcttccttgaacttcctatccctcgtatgtttgctacataaacactcaacgaggtgctcgaacattctctagttgaaaaccaaccctttagggccctacctaacgtgaatctaaatatg

SEQ ID NO: 136985 - DNA, 528 bp, Zea mays
  Clone ID: MRT4577_56407C.1
cgtacggcggtgacggtcgaggcgtcggaggcacgtacggtagggtgtgcacggcgggcacttgctcggcttgcacatggtgtaggtggcaccatacgtccccgtccccccgacgcctcggccgtcaccgccgtacgttcccccgacgccacggccgccgactccgccctacgtcccaccgacgacgtcctacgtctcagctacgactcggccatcatcgccgtatgtgccattctacgtcccccctacgcctcgggcatcaccacgctacgagtcaccgatatgcttcgtcgacgccgacggaggagaggacatgctcgatcgacacggttaatattgaacgcgtgcgtgaacgtactgaacgccctgatccacctggtgatcgggcaggatgtcaggtacacgtgctgcccgctggtgcaggagctggaggacatggacgtggagttgcgcctctgcacctctatccgtgtgcgcctgctctacattatgatctacatccccatcatggttaacctgatcattagc

SEQ ID NO: 136986 - DNA, 477 bp, Zea mays
  Clone ID: MRT4577_56408C.1
agaaatgtgcttttttatttgtgggaagcgccaaacatcaggcaaaaaactttatttttgaactttaactcataagaaatctaaaagagggcaccatcaatggttggctgttcggggtaacgctggtgggttagacaaagctagttggttgaattggatgcattgttgcagttgtaagaaggcaaccagttaagggctcaatagtggttgtagaaactgaacaactgtggtgtggttacgcaggttagagggtctcaaccagcttgttggctggaaggaactggtggaagctggcagcaggtttcgccacagttcgatgcttcagagctggtacattgtgataaatccttgggggttgcaggtttttaagtgcgttaacggcatcgggagggctggcacaaaagcagcaggggctaatgcctgtaggcggttgggttcaacatggtttttttactgagcgctggcaaaaagtgttgc

SEQ ID NO: 136987 - DNA, 419 bp, Zea mays
  Clone ID: MRT4577_56409C.1
ttcccgggcttgaagaatcttatgacttatagcacaatacttacgtcgttagtacgacggctgctgcgtgccagatacgagggactacatttctaacctacacaccgacgacggcctcaagtcccatcgaggctcacctcgccggcaaaacctatgtgcctggcgactccattactaaggatgacattatagtcttcgcacgcggtgccgtcaaatcctgtcgctgagcttcctaatgccgcccgctggtacgagaccccctgtgcggctgcagcctcaacattccgtggtacggctgctgttgtacatctgcctgcatgatcagctgctgcggcagctgctccttcgccagaagctgagcatcatgaatgaccttgatctttgctcccatgaaactgacgaagacacgacggcagctg

SEQ ID NO: 136988 - DNA, 437 bp, Zea mays
  Clone ID: MRT4577_5640C.1
tccttagcagtggtaacaacgcagagtacttttttttttttttttttttttttttttttttttttttttttttttttttttttttttttttttttttttttttttttttcggagaacccccgaggctataaaaagcatacccaaaaattcaatccttgtttatccccccccgggggggggggggacccccaccaaattatttcccccggccggcctaatagactatgcaataaacaacccccccggccccccaaaagctggaggggcccccgccttttatccccaaaaacggcgccaaagacggagccccctactcgcgccccaccggaagggcccccccgcgcacccggggttgtccccccggcttaagggcgaattgggccaaaccccatccccttgggggccgttgggccccctgtctggggggcccacgcccc

SEQ ID NO: 136989 - DNA, 182 bp, Zea mays
  Clone ID: MRT4577_56410C.1
acgacgacgaggacgtgcccatcctctacagcggcgacagcgacaaagggctacactgtgtaactacgtagcgacgcctggggtatataagtagcggccatcatgctgctgagcgacccactttagttctaatggattattgcaactacatcaaaaactaccgtgcctcgctgctcctcatg

SEQ ID NO: 136990 - DNA, 261 bp, Zea mays
  Clone ID: MRT4577_56411C.1
ggtcgaccaccgtcgtttgttgtattgtgcgagttgagtagccaagagatcccgggttaacaggtgaactcctgaccagacctcgttaaaggtgtcaaaaagattcttcctcattaaaccttccaatttgttttaggtggggtttccaatcaagtttgttgcgcccaggaaataatatttaagctcggttatataaaacaattatctttgtaagacatccgctatgtgataattacatttattatgacatttatctctctt

SEQ ID NO: 136991 - DNA, 976 bp, Zea mays
  unsure (1)..(976): unsure at all n locations
  Clone ID: MRT4577_56412C.1
ngaagagcagtacggagcaggntaggtcgccgttgccgttgccgttgcctcgctcgccctcgccccctcccacttaatgccgcacggcccgtaatccggagtcttctccctcccctaacgccccctcctctccttccccacctgcgtgctgccgctgctgacaccttctcctccccagtccccacaaatctcgcctctgccgccgactccggccgcgaatccaccgcagatcggcgcgggggctccgcttgatgcccgatctgtgagagcggctcaccaccgggccgcaagttcctcaggctccacttctacccggccaactacaccgaccgcgacgccgccgacggcctcttctccgtctccgtcgccgccccggggggcaagctcacgctcctctccaacttcaggtcctaccagacggctgccgcgatcacctactcgtacctcattcgggagttctccgtcaacgtctcgtccccgacgctcgacctcaccttcaccccggagaaggcccacctcaacgcctacgcgttcgtcaacggcatcgaggtcgtgtcctcccccgacacgggcggttaccggtcctggacctcttcgacatctccacccccaacatgcttgccggcgacggcaacctccagccgttcccgatcgatgctggcactgcgatgcagaccatgtaccggctcaacgtcggaggccaggcgatttcgccctccaagggacgacgactcagcgtacatctttggcgctagcttcggggttagctacccgaaggatagcaaggtcaccatcacatatccaagcaatgtgccggagtatgtggcgccagaggatgtctacggcacggcgcgatccatggggccagataagaatgtgaacatgaactacaatctcacatggatgttggaggtggatgctggattcatgtaccttatcaggatgcatttctgtgagatccagtaccccatcacaa

SEQ ID NO: 136992 - DNA, 1270 bp, Zea mays
  unsure (1)..(1270): unsure at all n locations
  Clone ID: MRT4577_56413C.1
gccgcgatctagaactagcgggagtgaaaccagcgagcaaagagcagagcggagcagggtaggtcgccgttgccgttgccgttgcctcgctcgccctcgccccctcccacttaatgccgcacggcccgtaatccggagtcttctccctcccctaacgcccctcctctccttccccacctgcgtgctgccgctgctgacaccttctcctccccacaaatctcgcctctgccgccgactccggctgcgaatccaccgcagatcggcgcgggggctccgcttgatgcccgatctgtgagagcggctcaccaccatgagggccgtgctgctgctggcgctgctcctgtctgcttgcgccgcggcggcggcgcaaggggccaactccacggcgttcgtgccgcgggacgacatccgcctggactgcggcgccaaggggcagggtaacgacactgacggccgggtgtggaccggggacgcgggctccaagtacgccccgccggacaacctcgcctcggtggcctccgcctccggccaggatccctcggtcccgcaggtgccgtacctcaccgcgcgggtctcggcctcgcctttcacctactccttcccgcttggcccgggccgcaagttcctcaggctccacttctacccggccaactataccgaccgcgacgccgccgacggcctcttctccgtctccgtcgccgccccggggggcaagctcacgctcctctccaacttcagcgcctaccagacggctgccgcgatcacctactcgtacctcattcgggagttctccgtcaacgtctcgtccccgacgctcgacctcaccttcaccccggagaaggcccaccccaacgcctacgcgttcgtcaacggcatcgaggtcgtgtcctcccccgacctcttcgacatctccacccccaacatgcttgccggcgacggcaatctccagccgttcccgatcgatgctggcactgcgatgcagaccatgtaccgcctcaacgtcggaggccaggcaatttcgccctccaaggacacgggcggttaccggtcctgggacgacgactcatcgtacatctttggcgctagcttcggngtcagctacccgaaggatagcaaggtcaccatcacatatccnagcaatgtgccggagtatgtggcgccagaggatgtctacggcacggcgcgatccatggggccagataagaatggtgacatgaactacatcctccatggnatgnntgnnagtggatgctggattcatgtaccttat

SEQ ID NO: 136993 - DNA, 558 bp, Zea mays
  Clone ID: MRT4577_56414C.1
gcatagcgggcaagaaccaacattaaagtacatattaatataccacagaaaattcatccttgaatttccttatcagtttcttgaacgacaaatttcaaacctcggtgggattgcatctgaagcacagagccagcgattaacagaacttggaggcaaggcgatccaagcaaagctacaaaaacacgcttgatagcaatttcttcgcacatggaagaagacgaatcaagaatgaataagacgatgccaggaaatggaaacagttgtttgatcatgtgtgtcgatgctctgcatttctcgattgccacagcggatgttggcactgatgttgtggattcagctttccaagctccatacattgcaggatagcttttctggcctgaggtagaatttcggttccatgggaactgtagcaggttttgtggaccttttggggatgaatgggcggtcaaagtatggcatgggctgagctttaggaatcagctcggttctcctcagttgccttatcctttcttcttcgtctaattcctgttgcctttcccattctaatctttgttgctc

SEQ ID NO: 136994 - DNA, 292 bp, Zea mays
  Clone ID: MRT4577_56415C.1
gacctggttagtcttggggcagagagtatctacttgggcactctcttccaagaaagaccttgtctccattttcattagacaatgcttcttgtgtgtgttctggaagatcttctaaatggaatgcttgttgcactgttcccaggcgagtggctgccatgagacctgaggaccacacttgggggaccaatcatgtccttcaccactgtgccttagaatcgcccctggacagagttcctgggcagaggggaaagcagctcccaggccttactcaggcctcaggtccatgggttgg

SEQ ID NO: 136995 - DNA, 396 bp, Zea mays
  Clone ID: MRT4577_56416C.1
cccacgcagtccgcactcaggtactaacatgttcggtgcatgctacaaagaatcgggatgttaatactgacaacagaacacaaggccacgctctatctatcacccatctgcgcgatcgcctgtgcacagaaaaaaaagaccgtgaagatgggtggtcaagcgagtgagccgccgaactaaacatttacgcatactcccgataccgcacggcgatgcctcagtggcgcacactatatgaagcgagctcgaacatgcgccagacctgaacccaagcacaggacagacgattatgaataggagaacgtgcgagctaatccgcaagaatcactactatcagttcaaccgtataagcggatatgtgcatacatgctaggggaacgagataaagaccgtgat

SEQ ID NO: 136996 - DNA, 409 bp, Zea mays
  Clone ID: MRT4577_56417C.1
gatcccccgagcagcaggaattcggcacgaggagaatggctatgttaaaggatggtctagtgagccgggataatgagattagggaattaaagatagtcgtatccgatgccgagatgaagattttgggggaaaaagcgcagatcggagctaaggtatcgaaattgttggagaattggaggagaggctgcacgatgaaatcgaggcgttgaaaacagagattgctaagagaggtgattccattaaaattctaaatgaaaacctcgagaccttgaaatccgagagagatgagctcaagatgaaaatcgatttacttggaagaagaaagttgggttactaacagggtggaaattttcaaattgttgaaatggataagcaactgcaccgattacgtgtggaacacggggaatta

SEQ ID NO: 136997 - DNA, 820 bp, Zea mays
  Clone ID: MRT4577_56418C.1
cggcacgagggcgtctgacggcgtgaggctgagaccaaaggagaacagagacggagaggagcgcggcggcccgggcgccggagcctggagggtaggggaagagaagagaagaggcgatggcgtcaatcgggtcttccaacatcggattccagctgctgaagaagtctggttggaaggagggcactggccttggagcgcaggagcagggaaggctggaacctgtagagactcgtgttaagaataacaagcgtggtataggttctaaagaaccaaaaccacaacctaaggttggggatgacattgaaacacatcctcaaaagcccaagcaggaaatgcaatcaaagaaaagggcaaaattagctgcaaagaggataagaaaactgcaagaagaggagaagcgcttgaaagagaaggaattcgagatggcttttttcagggaattttggcctgataatgtgtaaggcagaaacttcaacacttgacaatgtagctgctgactttgcctgatatagtggatgtataggcttgcaaaacgcttggcctacaaaatgttaccccattcattccgtggatgatttcacacatgatttgtggctagggttggcacaaagctgttcatccatgtagtggacaaatctagtgtagaattgcccatgctatgtgatcttgtaatttttatacattataaatcttgtttttttttgttcatataactgtgctcaataaaaaaaaaaaaaaaaaaaaaaaaaaaaaaaaaaaaaagggcggacgcgtggagttcactaaaaaaaaaaaaaaaaagaaaaaaaaaaaaaaaaaa

SEQ ID NO: 136998 - DNA, 205 bp, Zea mays
  Clone ID: MRT4577_56419C.1
tgcctcaaatactgatctcactgatccagggtggctttttcaaaggcaggggcgcgccttgatcttctcggtccaacttttgactttcataccatcactcctctgccatcattgcggctcccctgtttcttcttcttctttctcttgctttttttacaaacttaaaccccccctttttcttttgccttaaaaactttccccccca

SEQ ID NO: 136999 - DNA, 980 bp, Zea mays
  Clone ID: MRT4577_5641C.1
ggggcggtcaggggcggagttctgctgattgctctctctcttatcttctcgcctcccctcccctcccgttctcacaattccacctgctgctcgcggtcgcggtggccattgcctcgctcgcgtctccttggccgcgggcggatccggccgcatcctgctgctgttccccattcgtcggtcgttgccagtccatggattcttaaccaattcttccccaagcttcttccttgcctgggagcagctagctgcatcctgttaaataatagctctagcgtgcggggggaggccgcgatctgggagacgcgaggagtccatcgtcaacctctgataataatacaaatcaaaacaacatgcttcctccgacgactaaagcagccgagaagccactaaacggcactgcgacagagcagccgcagccgcagactcgcctgcggacgcttgggtccctgacgacgcggacgagcagtaccggcgacatcaggaagctcatgatggaggacatgccgatggtgtcgtccaaggtagaggggcctaacgccaggaggatcgacggcttcctgtacaggtacaagaagggcgaggacgtgaggatagtgtgcgtctgccatggcagcttcctcacccccgcggagttcgttaagcacgctggcggcggtgacgtgtcgaacccgcttcgacatatcgtcgtcaaccctgcgccgttctcgtgaagagagagggttacgctgttgctgctggtatcgatcgtgctgtaacatgttgtagtaggctccttgtttccgggagttcaatggaaggtctctatatttgacatggattgagtgtgacagcaaatccaagagaaacatcatctacaaatgttagacttgtctacaaattgacaaggattcaggttgctggcttacagcatttgcctgttctttgacattaaaaaaaactccaaatcactttaattttcacaaagataatgtacccttttt

SEQ ID NO: 137000 - DNA, 250 bp, Zea mays
  Clone ID: MRT4577_56420C.1
attcccggctcgatcgcacgctccacaccttgcctactcttccatcccaccttatagtctctctataccatcacctaaatccggttcggtggattttacacgacaccgtggctactgttaaaaccctgctattaccaaactcaatcgccttaactatcatccccctcccaacatcttgcctattaacgaacaaaaccgcatcgatcgacgttacctacagtttcgcaaactcaatgtctaacttgacccc

SEQ ID NO: 137001 - DNA, 474 bp, Zea mays
  Clone ID: MRT4577_56421C.1
caaacgggaagcacttaacaggacaaaagccaataattaaaaaaacgggggctatcaaacaggcctaaagttgataaataaaaaacccaaactaaacaccgagggctcgccacagggcttgccaaaaacaagacagtgcaaacgaacaaaaacatttgaaaaccaaaaagagaaccgggcagggaacaaaaacattcaagggagccgatggcaacaggaaaaaaaacccccgaagcctcaaaacccaatttaccaagctgatgcaaccaaggtaaaatttctgccaaggaagggcaacacattaatagctgggcccagagaattaggcaaacggggtgcgagaacaacccccgacggaaacttaatccaaaacgggggcaagcccccttccaaacaaaacacatacacaaggaggcccggatggtttttcattgggaaaaaaataaaaaggctaggaaaaattggaattgcccc

SEQ ID NO: 137002 - DNA, 1293 bp, Zea mays
  Clone ID: MRT4577_56422C.1
gtgccgcatgggtccgggatcggctttgtgaggggaaagagttgtttcagcgtcaccaatatgcatgtgatgcgtggcgcgtcagaccttagggacacactcgctgatcaggcagtgtatgaagcacaagttgacggattggaccaggacaaggatgttgctgatcagcgtatcgaagcaccaaaggataaactaagacctatacctgcaggcgtgtcagcagacctactggttggacagaaagtatatgccatgggaaacccatttggcctggaccacactattacaacaggtgatatcaggggattgcgccgagaaatcaggacagctgccacaggacgccctatacaagatgggatacagactgatgctgctatcaaccctggtaacagtgggggaccactccttgatagttctggagacttgataggtgtaaacacagctatatactcgccctcgggagcatcatctggtgttgggttttccattccggtcgatacagttgggggcattgtggaccaacttataaggtttggcaaggtgacaaggcctattttgggagtaaaatttgcccccgatcaatctgtggagcagcttggattaagtggagtgcttgtcctggatgctcctccaaacggaccagccggcaaagcgggtctgcagccaaccaaacgagatccctatggtcggcttatcctgggtgacataattacctctgtgaatggcacaaaggtgacaaacggaagcgacctgtaccggatactggatcagtgtaaagtcggggaaacggtgaccgtggaagtcctgcgtggcgatcataaggagaagatccccgtggtcctcgagccgaaggccgacgaatcatagtactagtgaacccagcttcttctgtaccatagcctgatcagtttgtcactttgggacaagacaagaggcgggcgtcttaagcattttcgcctggtgtattttctgcagcagacgcgcaaatacacaagggcgcgtgtcctagcattttcgccttcgttcgctgtacataattcctgctggtctgctggagaagaaggggggtactatccaggtcgccgcccgtaatgccgtctcagcattttctgtgtgtgtgcgtgtgtgctgtagcatgtcggcatcctacagtgctttagagtttatagatagatggcctacccttattaatacgagatgttgatcagatgaccatccatccagggaagggaaactgcgggtagaggaccaatgagcttactgatatcacggatcacctaaacctttttgacc

SEQ ID NO: 137003 - DNA, 615 bp, Zea mays
  Clone ID: MRT4577_56423C.1
cggtccgccattcccgggtcttctccctctttctgtccggttgctcgctcctgctgcgggtcggtgcgctgtctctcgcctggtgccttcgggcgctcaccgtcttcttctgctcccgctcgtatcttgatccgccccatggccggggtcgtctccttgttgggctcgtccgtgtggctgctgcgcgcctgcgtcgtcatgctctggggggggggggtgccgtctgcaggtgatcggcgtcgccgcgaagatgcctgcctctctgcggggcgcatcggcgcttgcctacgaggcctcttggcacgtctcgcagctgcgcgtgatgctggccctctgtttccgcgggcgttgcgacatggtccaggcttgccgggagctggcccggtttggcgcttcgtgccggctcagtccggactacctcgtctagtcgatcctcccctgcttgcttcgcgcgtgcgccgccggctatgttctcctgtcccgtcctgctctttagtgacctgggcgagatgaggctcagcttcttcttgctctggcagtcgtgcttctttggtttgttcttgaccggtggcttgtgtcctggctttgggggtgctgttttcctggttgcgttgc

SEQ ID NO: 137004 - DNA, 337 bp, Zea mays
  Clone ID: MRT4577_56424C.1
atagacatcatttatcaacaaccaaatccttcaaaattttcaaaattgtcaccatgtttcatcacaccagcatctagtagtgtgctaaggacactaacaaaaggacatatcaaaattaaaactatcatcatgttttatcaccagcatcaagtagagtgcaaagcagagtacaaataggacagcaaaatcagggcacaatcgaccaactacttattgaggctaaagagacgacgaaggagagcattggtctcatctgctcctttttgcagatcattgatcttttctaactccttagcccttgcttcttctgattcttctaccttcttctctcgtgccg

SEQ ID NO: 137005 - DNA, 632 bp, Zea mays
  unsure (1)..(632): unsure at all n locations
  Clone ID: MRT4577_56425C.1
ccggccgggacccgcccatcgacctccgataccccgccctctgaccagcgctagccgcggagggcatcctcggaggggacggcactctgctcctcttcggacgggaggtccttactgtatatgctctctctctcagaggaacgactagggagccaggaagaggacagaaaagcacggaaggtgcatgctggaccaggacctgatccgcctacacagtgtcagggaccgcagggaaaacccactctctgcccaccccaaagagcctgtcgccgcgcatcaccagagctgatataacgcgcaaggaggaggtagctgccagccccaccagatcattgacgctgtcaaccatgctatccctgaggcctggcgcggagaagctcaacgcctggtgtctggtgatgatgctccatggggcactacaacgaggcgaacgacatgcccgcatgtgggtgcacattgacatacgtcctaacactgttgtctgggagtacgaggacgacaacgggagggacatcgctggagacgatctgtaacgtcccgagtgcctgcaggtgaaggaacatcgtgnggaagaacgccgcaacaacaacgatcatctcgagctggacttacatacatcaaatgcctcatta

SEQ ID NO: 137006 - DNA, 581 bp, Zea mays
  unsure (1)..(581): unsure at all n locations
  Clone ID: MRT4577_56426C.1
ccgcccacgccgnntccgcccacgccccgtccgnaaaaaatttcagataggatgaaaaaatctacaagatcttgtcccgaattctaataaggtacatttctttgggggtttaacttgtttggtgcattttcatattgcaactggagctgcaactgcagttattaaaactgatcatcgagctaattatcaaaactttgctacttatatatgcaacgggaacatgtatttcttagttgtggcttgaaatctgcaagtgacacaatagaattgagtatttattaaatttaaggttcttttttgggggttcacaatttcaagtcttcaactctacaaatacgctggagtgaatgttggatttctttgtgccaacaatagtcattacctgtttagcctttggttcagttcaactgtgatgaagctataaggacatgtttagtgttttttttggattggatgtatttcactggaaagttttggatctagttaaaaattgaactaaatgctaggttcaaacgaaacagcacacattcagttatccaaagccccagtttctgttgattcagagcttgttcaatgtagct

SEQ ID NO: 137007 - DNA, 508 bp, Zea mays
  Clone ID: MRT4577_56427C.1
tcgaggccggccggtattcgcaccaccgccgtgccagccaaccgctaaccgccgccgccgccgacgcctgccatggtcgccgtcaaccgccccctcgtctccgtgaaggacctatagggctgtagatggtaaccgacgcccccggaatcaccttaccgcccgtcttcggggcgtcgatccgctcccgacgtggccaggttcacccacaagctgctgttctgcaacaagtgccagccctactcaggctcccggcgcgccggccagcagacgacggacgagtcctgaggaaccggacgcgccgtagtctcggatcccccgcatccccgtcgtgggaaaccagcgtgccgcacagataacgatcttgattatgtggcgcgacttgtaaataagatgaatgcacaaggtgctgctttacaagggtctggatgggtgtgtctacctctggatagagagggaaaacagctttctggtgaaacaacagctaatcaggatcctctgatgactaaag

SEQ ID NO: 137008 - DNA, 540 bp, Zea mays
  Clone ID: MRT4577_56428C.1
cccacgcgtccgcccacgcgtccgcccacgcgtccgcccacgcgtccggctccagcagctgccacagagacatcagagagcggtcctccttgtgagtctgagctgaagaggaggaggaggaggaggagaagcagcagcgcagccggaggagggagagcgaagatgcgccgcgtcgcgctgttgctcgtcgccgccgtgtgcgcgctggcggcgccggctgccgcggtcgtcactgacggtcttctcccgaacggcaacttcgaggatggcccgcccaagtcggcgctggtgaacggcacggtggtgtcgggcgcccacgccatcccgcggtgggagacgtccggcttcgtggagtacatcgagtcggggcacaagcagggggacatgctgctggtggtgccgcagggcgcgcacgcggtgcggctgggcaacgaggcgcgcgcgccgtcgagctggtgggcggccgggagagcgcgctcgtgcaggaggtccgcaccgtgcctgggtggacctaccgtcttgtcttcgttgtgggagact

SEQ ID NO: 137009 - DNA, 587 bp, Zea mays
  unsure (1)..(587): unsure at all n locations
  Clone ID: MRT4577_56429C.1
gctagnagcttctttgatgaatcatcagaacgatctgtcacaacaacttgataggatttcagatatgcagaagaactactgaaaacctggagctggcaaattctaacctgcataatgagattgtaaaagtacaaggacaaaagaatgaagctgttgcttctatagttaatctcgagagcatgttagaacagcaagtacaagagattgcaaatcttcaggaggccaacaaagaactcaaagcagcaaagactgatctacataatgaggttatgttacttcaacaggagaaaattgtagcactgactcagttacaagaatatgaggctcaaatcaagaatcttcgaattgacttggaacagcagtgcaaccaaatttcagttatgcagcaagcaaatgaagaaacacaggataaaaattctagcttgcacaagcaactggaagaaactaggattcatctgcaagaggagatcattgcattacaaggagagaaggaagaggccatcagtagcttacagcagtcaaatgattcactcaagaccctagaagtccagttagagcagcaaagagaacaaatttctgttctgcag

SEQ ID NO: 137010 - DNA, 502 bp, Zea mays
  Clone ID: MRT4577_5642C.1
tctagaacgagcatgacgatgccgccgcgtacgctggatggatcctatcggccgccgcccttttttttttttttttttttttttttttttttttttttttttttttttttttttttttttttttttttttcccaggcccaacggggtaagatgcacaaattttggggggcaaaaacatttccagttttttgggccaaaaattttggacccagaaaactttcagttaaaatcctggaatttaaaacaaaacctacaattcacacaggtttccggaaaaaaaaaaaggccgcatccaaacccctatggcagttaatggacggaaaaattttggaaaaaccacatatccattaacttgggcgcaactgggggagagcctccatagcttaaaagaagaggggacccattttttttttgggggtttggactgcccatttaacaccaggaacgccacccgaagttgaaacctttataaaaagggggattccggggggcattttcgggg

SEQ ID NO: 137011 - DNA, 931 bp, Zea mays
  Clone ID: MRT4577_56430C.1
cagagacatcagagagcggtcctccttgtgagtctgagctgaagaggaggaggaggaggaggagaagcagcagcgcagccggaggagggagagcgaagatgcgccgcgtcgcgctgttgctcgtcgccgccgtgtgcgcgctggcggcgccggctgccgcggtcgtctcgtccaaggccgtcaagtacgtggacgccgcgcacttcgccgtgccccagggcgcgcgcgccgtcgagctggtgggcggccgggagagcgcgctcgtgcaggaggtccgcaccgtgcctgggtggacctaccgcctcgccttcgccgtgggagactcgggcgacggctgcgcgggctccatggccgccgaggcctacgcggcgcgcgccacggtcaaggtgccctaccagtccaggggcaccggaggatacaagcgcgccgtgctggacttcacggccatcgccaaccgcacccgcgtcgtcttccagagcaccttctaccacatgaagcccgacggcacgctctgcggcccgctcgtcgacgacgcctcgctcgtcggcctgcgcaagaagaagcccgcgcgccgcctcatgcagctccctgtaagcgctgcttccacgtgcactacgcccggacggaccgcgcaagcgatggtgtaatacggctggtatgtgttttttggtttggtgtgtgcgtgcgtggtatacgcgtgccgtgcgcgccctgtggctgtggctgcagtggcgtcgcgttgggtgttttcttgttgtgacgaagaaaaaagggtatgggttggggtggtccgctggccggcgcaccggggttttaatcaacttatattaacctgatgaaggtgaaggtgaaggtgacacgggattaatggcaaaaatgctcctagtacaaaaaaaaaaaaaaaaaaaaaaaaaaaaaaactcgaggaggg

SEQ ID NO: 137012 - DNA, 567 bp, Zea mays
  Clone ID: MRT4577_56431C.1
tcgccgtgggagactcgggcgacggctgcgcgggctccatggccgccgaggcttacgcggcgcgcgccacggtcaaggtgccctaccagtccaggggcaccggaggatacaagcgcgccgtgctggacttcacggccatcgccaaccgcacccgggtcgtcttccagagcaccttctaccacatgaagcccgacggcacgctctgcggcccgctcgtcgacgacgcctcgctcgtcggcctgcgcaagaagaagcccgcgcgccgcctcatgcagctcctgtaataaagctgcttccacgtgcacgcccggacggaccgcgcaagcgatgatggtgtaatacggctggtatgtgtttttggtttggtgtgtgcgtgcgtggtatacgcgtgccgtgcgcgccctgtggctgtggctgcagtggcgtcgcgttgggtgttttcttgttgtgagttgtgacgaagaaaaaagggtgtgggttggggtggtccggcgcaccgggaaatgacaggttttaatcaacttatattaacctgatgaggtgccaaaaaaaaaaatcaaaacctat

SEQ ID NO: 137013 - DNA, 2015 bp, Zea mays
  Clone ID: MRT4577_56432C.1
tgggtagcgtacctcggcagctgccacagagacatcagagagcggtcctccttgtgagtccgacattgggtaccgcgggggcggcggggatcgtcctccgctccagcagctgccacagagacatcagagagcggtcctccttgtgagtctgagctgaagaggaggaggaggaggaggagaagcagcagcgcagccggaggagggagagcgaagatgcgccgcgtcgcgctgttgctcgtcgccgccgtgtgcgcgctggcggcgccggctgccgcggtcgtcactgacggtcttctcccgaacggcaacttcgaggatggcccgcccaagtcggcgctggtgaacggcacggtggtgtcgggcgcccacgccatcccgcgttgggagacgtccggcttcgtggagtacatcgagtcggggcacaagcagggggacatgctgctggtggtgccgcagggcgcgcacgcggtgcgtctgggcaacgaggcgtccatccggcagcgcctggccgtggcgcgcggcgcctactacgccgtcacgttcagcgcggcgcggacgtgcgcgcaggcggagcggctgaacgtgtcggtgagccccgagtggggcgtgctgccgatgcagaccatctacggcagcaacggctgggactcgtacgcctgggcattcaaggcgaagatggacgcggtgacgctggtcatccacaacccgggcgtggaggaggacccggtctgcggcgcgctcatcgacggcgtcgccatccgtgcgctgtacccgcccgcgctcgccaggcgggcggggggaaaccctgctcaagaacggcgggttcgaggagggcccctacttcctgcccggcgcgtcctggggcgtgctcgtcccgcccaacatcgaggacgaccactcgccgctccccgcctggatgatcgtctcgtccaaggccgtcaagtacgtggacgccgcgcacttcgccgtgccccagggcgcgcgcgccgtcgagctggtgggcggccgggagagcgcgctcgtgcaggaggtccgcaccgtgcctgggtggacctaccgcctcgccttcgccgtgggagactcgggcgacggctgcgcgggctccatggccgccgaggcctacgcggcgcgcgccacggtcaaggtgccctaccagtccaggggcaccggaggatacaagcgcgccgtgctggacttcacggccatcgccaaccgcacccgcgtcgtcttccagagcaccttctaccacatgaagcccgacggcacgctctgcggcccgctcgtcgacgacgcctcgctcgtcggcctgcgcaagaagaagcccgcgcgccgcctcatgcagctcctgtaagcgctgcttccacgtgcactacgcccggacggaccgcgcaagcgatggtgtaatacggctggtatgtgttttttggtttggtgtgtgcgtgcgtggtatacgcgtgccgtgcgcgccctgtggctgtggctgcagtggcgtcgcgttgggtgttttcttgttgtgacgaagaaaaaagggtatgggttggggtggtccgctggccggcgcaccggggttttaatcaacttatattaacctgatgaaggtgaaggtgaaggtgacacgggattaatggcaaaaatgctcctagtactatttttgtaataaaaaaaaaaaaaaaaaagcggccaaaaaaaaaaaaaaaaaaaaaaaaaagatggcggggggggggggggaactttttcgccggggacgaagaagccaaccgctcatatatactcgaactggactctattgtaatccggacaggacgatcaagcatctcctagcgttttacggctccttgtaggggcaggtttggtttggcgctttgagtccaggatcagttcagatttgatgttttccatactcagaagccgccagcacttttttttttgcaatatgaccctgaattagcctttcaagtttgggctagtactatttttgtaaaaaaaaaaaaaaaaaaaaaaaaaaaaaaaaaaaa

SEQ ID NO: 137014 - DNA, 227 bp, Zea mays
  Clone ID: MRT4577_56433C.1
cccggggctggaagttttcggcacgagggctcccctcccgcccgtggcctggaggagctcacagcgaggggagcggaggcgagggattcggccgagcgcgtggcgacgcctctctgaccgaggctgcgtcacccacttgggcaggcgcgcagacctctgctctgccctctattatcctatcgctacaaagtggcggggatggtggatccttcgattggaatcgggaa

SEQ ID NO: 137015 - DNA, 591 bp, Zea mays
  Clone ID: MRT4577_56434C.1
aaaaaaaaaaaaaaaaaaaaaaaaaaaaaaaaaaaaaaaaaaaaaaaaaaaaaaaaaaaaaaaaaaaaaaaaaaaaaaaaaccacccaggcggtacctttaatcacccattttactacttttagttcctcccggcggttggtttaaacagtaaaagagagcgagccggggttggggtcaccgaacccttggtggggggccttgttcttcttgggggggggggccgtgctggcgttggcgcgcgcggccctgacccacaaaaactgggtaaaaaacaaaagggggacggggcaaaacctgtgcagccacaacgtgacgttgaccctggacccgttggccaacagcccgccgttgttcgggggcacctacacgttgaacccgggcagccacgccgagttccccgtgtgttgggggacggggcgcttgcccgcccccgacgccgccaagggggagttccacgtgggggtcgacgggggttctttttacttggccccaaacgcgcagccgggccagcgggtccgggtttcggtaaccccgaacggttggccgttgaagggccgttgccccgccgtgggttgccccattcagggcc

SEQ ID NO: 137016 - DNA, 2172 bp, Zea mays
  Clone ID: MRT4577_56435C.1
gaacgaaaccaaaataatgattaatgaaacaatgtatgccgcgcgtcatcatatagtcatcggttagatggttcctgagccagacaagacacacaatgcaaaggttttttgcaaaggaaaggaaattggcagtgagccagtaattattcacacggaacgttataatttggtctcagcgctgacttttaatcatactaactagcaaattgagacctcactgcaggttcctgagaagcaaagcagcccagccaatgtactcaggcggcgaagtttgcacacagattagtatgtgcggttcaggaacatctgctctaccttgctacctaagagacccagaaaccaaacctgcatcgtaccaaactatgacaagaaaaacattgaaccaaagtgtgttcagactcgtggaaaccctggacgccctttcctctgtaggaactccgggatctgcaatgcatgaccttcctcctgggaagtgggagaaaaccagcccgagcgaccgcggttgctgtcttctccagcctgtgaagaccggctctcactttcctcctggcgtttgaaaccagttgcaattagagttatgctcacttgaccagtgtatgacggatctataacagagccaaaaatcagatttgcaccagggtcaacaagatcatagattacttcagctgcagcattcacctctgtcaaggttagatcgttccctccagtgatattccatacaattccagttgctctttcaataccaatatcaagtagaggagactgtatggcattgagtgcggcatctcttgctcgtgtcttgcctgttgctgttccaatgcccattaatgatgagccagcatctgacataactgatcgaacatcagcaaagtccacattcaccagacctggcacagtgattatatctgatatcccacgaacaccttgccgaagaatatcatctgctaaattgaatgcttctgtcacaggagtatttggggacacagcagtcagtaacttgtcatttggaattacaatcagtgtatcaacattgcttctcaacgatgcaattccttcttgtgcctgaagagcccgccttcttccctcaaatgaaaatggggttgtgacaattccaacagtcaatatacccatggactttgcaatccctgcaataataggtgctccaccagtgcctgtcccacctcccattccagccgtcacaaaaaccatatcggcaccagcaactgcctgttctaccaactcctggctttccttggctgcattcatgccaatttctgggttcccaccagcaccaagaccacgtgtcaattcctggccaatctgtaacctattttctggttcaatgggtgacatccgcatagcctgaaaatcagtgttcacaatccagaattccacacccttcatggagctttcaatcatcctgttcacagcattggagccaccacctccaacccctatgactttaatcctgggctcattatagcggtaagagggagaagtgtccaccaatctttcagctgtagtgtcaataccctgctctttgctggatacggtagctgcaccattatcttctccataaagcaaggagatctcagggtgaaggtcatataaagtatccttggtgcgccttggtccagctcggcgggagttcgcagagcaatcaaatcgagaaaagcgataggaaccaccagaaaacgacttctttctctgaaaacttgcactttcaccaagaagtgtcttcccaacgtttatccttgaaatgcctaatgggcagtggcaactggaaggattggagaaaagtagttgtgctgccatccttatctctgaaattctcttgcactggcaaatgcaatctgtgatgcctcaacaatcaattccaggagagtctttgcctgaactgtttcactggaagaagagtgggggatggtgcggcgcagacgcaggacaccggagagacgccgcctatggacggcaaagtcggcagatcctcccggcgcttttatagaggagaccagatggattctgaaggtgggagatccggccgccaaggtttagcgaacagaccaagggtttccgcgcccaccgcccagggaggcagggactcggcgaggttttcggcgagtagacgatcccggcccggcctgcctcgagtgggaccaataaggaattccg

SEQ ID NO: 137017 - DNA, 270 bp, Zea mays
  Clone ID: MRT4577_56436C.1
cacggaaaggcacaggctgatgctggataatcactcatcatgaagaccagtgtttcacttctggatgcgttgactgcacatgtcgaagcctatgtggatcaccagggcccggacaatattgcttgtggggaaactggcggtacaccaagtctttggaatggatcaacaacagcaccctggtcaagagagctcctttctatgggagcgcgacataactgcgacgatcgaagtgcccatggctcctccgctgttccaggggcctgcacacaa

SEQ ID NO: 137018 - DNA, 409 bp, Zea mays
  Clone ID: MRT4577_56437C.1
gcgaaccatggccggaggcgtcaccccgtcaccgaatcctcagatcaggaggcgagcacaaaccacaccactctactgacgcccgactagcagagatacattttccttcacctcatgggtgatgagaagactgacatcaacattgcggtcatggctcatgtcgcttctgacacggcaaccactactggccacctagactacaggcttggaggtcttgacaagcgagtgatcgagagtggtccagacagaagttgccgaacatgaacaagcggccattcaagtgtgcgtaggtgcttgacaagctcaaagctgaccatgcgagaggtattacacctgatatagccctgtggaagtgcgagaccaccaagtgctcttgcactggtactgatgcccggggacaccgtgactt

SEQ ID NO: 137019 - DNA, 324 bp, Zea mays
  Clone ID: MRT4577_56438C.1
ttttgggttttttttttttttttttggggttttttttttttttttttttttttttttttttttaaaggtaaaaatcaactgctcattgaaaaaccagggggggcatcaatcttggtttcataaatgggagccccatgcccatttggggcccgtcccaaattacataatacccgggggtgggtttttcttttttgggaatcaagggggtttcccaatgttaaatcatcccccccaggaattccccgggtcaatacatttgggacctcgctttaagcttttcaaaaacctggtcaaaaataaagggtccatttccatttggccggt

SEQ ID NO: 137020 - DNA, 458 bp, Zea mays
  Clone ID: MRT4577_56439C.1
attcggctcgagcacagactgaggccttgtttcgacggaccctacacttggctaaggggggggaaatactcgctggaaggccggctgcgaaaggtgtgtcacatgcggacatgacaaagcgggatcggttagatagacggaaggcggagatgctggaacctccaaaattacatgtgtcaagaacaaggcttatcatctacaattggcctaacactatgaccattaacgacgtaaagaagctgaggagagaatcagtgatatgtcgtgctacaaaacaaaaccgtgacatacggacggaggatatcctgaacaaagaaatgaaaggcatacataatcattcacgcggtgtagccatggatgacttacaagaacatgaacacgctcttgtcgctcaaaaggttttaaacaacaacccgcgaacttttgcctcataacgtcccccaatcgtaaagtacgcg

SEQ ID NO: 137021 - DNA, 1488 bp, Zea mays
  Clone ID: MRT4577_5643C.1
ggggcatgcaccacacgccccacccgaccccatccaggcacaccaagaaacgcaggccttcccttttgctacctgccccctcctcggatcgagcgggggcaattcggcacgaggttcgcggcacgaggccgcgtcccccgccgagcctcaccaatcgccctctgcaggcagggaaggacggggcggggcggggcggagatctgctgattgctctctttcttatcttctcgcctcccctcccctcccgttctcccaattccaacctgctgctcgcggtcgcggtggccattgcctcgctcgcgtctccttggccgccggcggatccggccgcatcctgctgctgttccccattcgtcggtcgttgccagtccatggattcttaaccaattcttccccaagcttcttccttgcctgggagcagctagctgcatcctgttaaataatagctctagcgtgcggggggaggccgcgatggcgtccagggacttcctgcgcgtcttcggggcaggggcgggccaccaggacgacgccgccgccgccgccggccggacagacgacgtcgagctcagcctcggtctctccctgggcggccgcttcggcaccaccgacgccaagcgcccgcgcctggcgcgctcctcctccatcgcctccgtctgctccgtctcctccctccacgccgacgccgacgccgcgccgctgccgctgctgcgcaccacctcgctgcccaccgagaccgaggaggagcgctggcgccgccgcgagacgcagagccgccgccgcctcgaggcccggcagaagcgcgtcgagcgccgcaactccatggcctccctggcgcccgctgtcgtcggcgggaccgggaggaggtccaacgcctcgcaggggagcaactctgccagcaccacggagcaaggtattggtgggagcgcgagtaaccaatccacagacgcgaggagtccatcgtcaatctctgataataatacaaatcaaaacaacatgcttcctccgacgactaaagcagccgagaagccactaaacggcactgcgacagagcagccgcagccctcgcctgcggacgcttgggtccctgacgacgcggacgagcagtaccggcgacatcaggaagctcatgatggaggacatgccgatggtctcgtccaaggtagaagggcctaacgccaggaggatcgacggcttcctgtacaggtacaagaaaggcgaggatgtgaggatagtgtgcgtctgccatggtagcttcctcactcccgcggagtttgttaagcacgcggggggcggtgatgtgccgaatccgcttcggcatattgtcgtcaaccctgcgcccttctcgtgaagagagagggttacgctggtgctgctatctgctgtgctgtaacatgtaggctcctttgtttctgggagttcaacggaaggtctctgttttttacataaatcgagtgtgacagcaaattcaagagaaaaaaaaacatctgc

SEQ ID NO: 137022 - DNA, 416 bp, Zea mays
  Clone ID: MRT4577_56440C.1
cgcctgcgcgtgcaggctcaccccgacgtgccccctcccctgccctccgcgcgcgatgcccccatggccctacaccgacgcagagctcgcccatgccaccgtgcacgtgccccggcggcgtcgcgatgcccgtgtatccccgccgtcgcgcgcctacgtcagcatgtacctggagcagaagcgatttcgacagcattgccgaggagctcaccgctgtgaaagtgtgttagtcccgtcccctccaggtcctgactctacaattcacttgtgtattcccccgaagcattacgagacagtctgcacggctcctatcaagcaatgaagacaacatcatggtttgctttttcaggagcttgaagtatggtgatagaaagactactgctcagtatttaaagtgtggatgtataggtgaaaaa

SEQ ID NO: 137023 - DNA, 511 bp, Zea mays
  Clone ID: MRT4577_56441C.1
agcaataacacgttattatacaatatttatctttaacaagcattccattcttggtacagacatgcctcaaaaaaaaccagattcagggcaagcagggcagctttggttgtggctataacaatagcacatatttagcccccaacatgggtaactaatctaggacttgatctccttaagaccatgagagaaatagacgactgccaggttaagggcaccgtccttggaacaggggaataccacggacgctacgcccttaatgccctaaccaacaaaaaattgaaggtcacttcagctagctaaggagaaacttggttgcaccctcaacaccctttttgaactcatacgctttgtctggctacaacacaccacagagtattcttgacgtattgttttatggaagatacaaatgatccattgtcaaaagaggtggctgctgtaccaagaatgtgtcaaccatatcaaccacctttacgggtgactcatcaacgctataatactcaccaccctaggg

SEQ ID NO: 137024 - DNA, 516 bp, Zea mays
  unsure (1)..(516): unsure at all n locations
  Clone ID: MRT4577_56442C.1
gccggccgggccgggnctcgaaaacagcggccgccgccgccgcctttcgctctcaactacccttgcccctcgccagttctccacagcttttgtttccagcatttgaatttggatcggcggtgtctttgttctttgtatctttcttttttggtcgaggttttgattcggatggggatttgagttgcgcatctggctgaggacgatgaagattgtatctattggtctcgttcgtcgtaacaggcatttgattgcctttgccgaccatcctgatatatcaccacccatattccgagtccgttcccaacggtcgtcagtttctatcaactttttcattcctttttagattttgatgtttgatttattattatgtttcctggcctatgattaaattttcaaaaaaaagacaagcatatgtccgaatccttgtatgtggataagcataatcttctctatgaggtcgatcacgtattatacactttattattttgttaacttgtgtttatttccattcctttg

SEQ ID NO: 137025 - DNA, 255 bp, Zea mays
  unsure (1)..(255): unsure at all n locations
  Clone ID: MRT4577_56443C.1
cagggccacccttttccatnccactaccgacggcggggggggacgcgaacgcacacgcacccacacgacacatccagatgatgcttagggtttccccgtccccggccgccgcggtgccaacccagctctccggtgcgcccgcgacccctgctcccgtcgtcagggtggcggcgccgcgcggagtcgtggggggggggggtggcgccgtgtgcagggccgcgggcgtggcgactgtggctctccccggggtctggt

SEQ ID NO: 137026 - DNA, 463 bp, Zea mays
  unsure (1)..(463): unsure at all n locations
  Clone ID: MRT4577_56444C.1
gccggccgggctgtggtgagaaatggatgagacttttgtgatgtnaaaaaaaaaaaaaaaaaaaaaaaaaaaaaaaaaaaaaaaaaaaaaaaaaaaaaaaaaaaaaaaaaaaaaaaggcgttggaaaataggggggagtatctcccataatattttcaggattcaaaaacacaccaagggaaggggactaacaacgacctaacaacaatgggtaccaagaaattaaccctccttgggcttcttggccttttaggggggggaacaaatgggttcattattccacaggggtcacttggtcctaggggcattattccacaggtcctcccaccagttacttcaagggggttcgaacatccagccggggaagcctatagggtacaactaggggttggggggagcgccttacaacaaccaattggccaattggaacaacaatccttgggacatctaaccctacaaacca

SEQ ID NO: 137027 - DNA, 343 bp, Zea mays
  unsure (1)..(343): unsure at all n locations
  Clone ID: MRT4577_56445C.1
ctgtcaatcatgtttttccatattactgcaggtgggtctgattaattatttaaatgtagtttatcttagatattgtttgaacgtatgggatgttggaggacagaagacaatcatgtcttactggagaaattactttgagcagactaatgggttagtttggtttgctgatagttcagacataaggaggcttgatgattgccgtgctgaactccacaatctcttgaaagaagaggataaaggtttacctatctaggcagtgttctattgttgatttttgcaaataagcaagacatgcaaggagctctaanaccaactggaatcgcgaagatttacttagttcgat

SEQ ID NO: 137028 - DNA, 533 bp, Zea mays
  unsure (1)..(533): unsure at all n locations
  Clone ID: MRT4577_56446C.1
ttgacctcccggtaaccactacttgcttttgtgtccaatttcaatttacttttatttttttgcaacttattctgaactatctgctataatgaaaacttgtagttgtaataaagcaccatacccagtgatggatcaatatcatcgttattcgtacaaaagatgatggataaccagaatattgggttataaactctctcttttttgggcgctattgttgtttggaaattgtgtattgtatatgtaatatttcactgttaaaaagctaccaatttttcctgcctacttttaggtgtacctcatcagttttactattttgataattcgagcactgctgcaccacaaagtcgaagttctgttaattgacaagtatagttcaatctcccacttttagtttggagattgctactctccactatgtcgaattgctgattnttatgttgtttttttcagtaatgcaattntatcttctcatcattatcctacctttgttgntcccctatgtagctaacaagcaaggagcatcatggggtcat

SEQ ID NO: 137029 - DNA, 366 bp, Zea mays
  Clone ID: MRT4577_56447C.1
cattctttcgttagaaggctgcgctgacgacgaaattgccggaccccacggaggcccctcggatcttgtccagttaaacatctgcagtgaaaaggagccttcccaactttacaaaggcgcctgatgcttatcggactgacatggaggaaaaattgaaggccaagttgtatgaatctaaggtgatgcttccccttaaggccttaattaaggccagagtaaaatcattgaacgcgaagctgttcgcttcaattaccgacacgaggtaactccaggctgatgctatggctgctaccaagaatcacacctttactgccgcaacggttaaaactatcaggatggaatcatccacgttgctggcttacaatc

SEQ ID NO: 137030 - DNA, 278 bp, Zea mays
  Clone ID: MRT4577_56448C.1
agccggaggattgggatcgcagatttctatacggggaagaacattctcatcacaggtggaactgggttcgtggccaaagttcttgtggagaagattttaaggacgagtcctaccatcggtaagatatacatgatggtgaaagccaaggacgcacaaacggctctcgagaggttgcaaaaggaggtgttagacacagaactgttcaaatccttggaagaaatccatgggaaagactacgagagctttgttgcgagtaagttgattcctgtggtcggcaa

SEQ ID NO: 137031 - DNA, 575 bp, Zea mays
  unsure (1)..(575): unsure at all n locations
  Clone ID: MRT4577_56449C.1
atcacaggtatatacaccgagagatgtaccttaatgagaaactgagagtctgtaggtgtagctctgccagctgccttggtttatacatacttatcgagcacccctggngacgagatgctagctcccgactaattgcttatcggaaagaactatgtctataatgcatgcgctccatcagatgatacgatatgagtgcattctatggcacatggctggcgcattagaggttatgaataacttacatggctcttggtctagatagtttaatatctagacaacgatgatgatgatcgatataatgatgttcttgacgtagatgaacaccataacgtgttgactactttgataccagcatcagtgtatataaagtttcatgatgttgaatgctatataactccatgatctataccatagctgtatattgaaatagtgcctgacaaatgtactgcataggtgaaaccaaccataggtgtgcttactttcttaaacatgtctaaaagcaactgactagacttgcgctgctgggaagacaagttcaagccaaacatggacaaggaaaaagatccgatgtcagg

SEQ ID NO: 137032 - DNA, 418 bp, Zea mays
  Clone ID: MRT4577_5644C.1
cccacgcgtccgcccacgcgtccgcccacgcgtccgcccacgcgtccgtgaaaatggggatcagaagactgataaaagctgtccatcacaatctaccaaggcggcaacaagtgcaaacaaaactgaaaatcaagaccaaaagaagaccaagaaaatttcggcaaaacagtcgaccagagcagcaacaccagcaaagaaaaaacagcgaaatacagatgcacaagtttcaagtaagccatcttccgaaaatagaaagaacagcaagacagcggacaaagatgggctccgtaaatcttcaaaagtacctaggtcaactcccaaaatccatgccgtcaatgaagagcaaataaaagagaaagagggtgaaccccctacaaggaaaggagaagcagacaacaaagtggttattcctgggaca

SEQ ID NO: 137033 - DNA, 200 bp, Zea mays
  Clone ID: MRT4577_56450C.1
tccagcggccgccccggacgggcactttcttttcataggctcattctcgctgaggagccacggctaagaaggtgattcagggttgccttgaatgctacataccctgaggcctttcaatatttggtgccaagacggacctgcactagttgcacccctcttatgagttccagaatctaggctattgacctgggctggcacct

SEQ ID NO: 137034 - DNA, 491 bp, Zea mays
  Clone ID: MRT4577_56451C.1
gccggccgggctcgcgaaatgtatcacagacacccacgacccccgtcgactcgcgatcaagctcctcatctcacccgatgggggccacctgaaatacaaacacaatgataaaagcacttgctgccctcaccaggcactgaagtacaaagcgaccatcttattttcacaggaaagaaatgcctgccaccactcgagactgctaagtatctctaggcctcaagacaagaatccatggaatccatgtgcacgagcttggagacccccaacgtatgctgccgactgtgcacacttcgacctgagtcaggatcatgcccaccgaaagatgacgagcgccatgtcgtcgatcatgtcaatgagacagtcgcagaagatggcgctgatattgtccatattactgacaagcacatacctcttgctggagacaactcgatcattgggcgacttgttgttgcacatgatgatcccgatgaccttggctaaggtggaaatga

SEQ ID NO: 137035 - DNA, 1164 bp, Zea mays
  Clone ID: MRT4577_56452C.1
ccgcagccgccgccactgtcgccgctggcgtctcctcctcctccgccactgaaaccgctatcgcctcccaccacctcctccagcgttcccgagggatggagaacggtggaatcgaggaggccgacgacgcaccgccagtgcccgcgccgcccaatgggcggcggtaccggccggtcgggtccagcgaccgcgctgtgatccagatgacttccatggagccgggatcctcctctgccacaatcgatgccgtcgtgactccccagccgccaaggaatctgaagcctgatgctaatctaactattgacccatctatgcgggaaggttctcctgatgatcatgctacatccagtggatcgcaaggggattcaaagctagagctctttggttttgattctcttgtaaatatattgggccttaagagcatgacaggagagcagattcaggccccttcaagtcccagggatggcgaggatgttgcaattaccattgggcgccccaaggaaagtggacctaagttcggcaccatgatgggtgtctttgttccatgcttgcagaacatcttgggaatcatttattatatccgttttacctggattgtaggtatggcaggtgtatggcagtcacttgtgttagtttcattttgtggtgcatgcacatttttaacctcaatatcattaagtgccattgcaacgaatggagctatgaagggtggtgggccatactatcttataggccgtgcacttggtcctgaagttggagttagtataggattatgcttcttccttgggaatgcagtggctggatccatgtatgtgcttggggctgtagaaacctttcttgacgctgttccttctgctggactgttccaaaagagtgtaacagctgtcaacaatacattagtgaatggtacagaaactactggcacgtcaactatatctacacccagcttgcatgatcttcaagtgtatggtgttattgtgactatactgctgtgttttattgtgtttggtggtgtcaaaatcatcaacaaggttgcacctgcttttcttataccagtcctgttctctttgctgtgcatttatcttgggtgtcttcattgcaccaaggcataatgctccagggggaatcactgggttgagtattaccacatttgaaagacaattg

SEQ ID NO: 137036 - DNA, 338 bp, Zea mays
  Clone ID: MRT4577_56453C.1
ggtgctgacccgccgcggctctcgcttcgttccgccacgaggaggaggaggagcagcatcaggacgccgccgaggaggtgaccacgtgacgatgtccactttggcagcggggacggccgggccacggcggcgccggccagaggaagctgtgccccaggggccactggcgcgcccgcgaggactgcaagctcaaggaggctcgtcgcgcagttcgggccccagaactggaacctcatccgcgagaggctggaccgcagatcagggaagagctgccccctgcggggttcaaccagctgcacccgcggatccgccgtccccccttctcggaggtggaggac

SEQ ID NO: 137037 - DNA, 413 bp, Zea mays
  Clone ID: MRT4577_56454C.1
agataatttacccgcgacggaaccagccgaacggggggattattggaggcctgttaggctacgcgacatgggcaagatcaggatgcccgtgccgtccctgttccgacgacgctactccaagccggcgtcgccgcagccgaagcaacaggcgcctgccgctggcgacggccacggcagcgggtccccagagcgggcgactgaggacgaggagatggctcgcgtgttccgcaagttcgacacgaacaggcacgggcagatctggcggtcgcagctggcggcgctgttagagagcctgggccacggcgcgtctgacgacaaggtggctcgcatgatagccgaggcggacgcggacggcgacggctgcatcagcctgaccgagttcgcagccctcaacgccacagtggccggggact

SEQ ID NO: 137038 - DNA, 285 bp, Zea mays
  Clone ID: MRT4577_56455C.1
ggccaaatcaaatgatgcataatttttaataatgtagagcaagttaggaacatgtgcgcgtgtacagatacgatgggcaaaatcaataatcgaaattcggagatccgtagaacccatcgaatatcacatagataagaacgtttcacataaagaactgcatatagaggggaaaaagcagtgcaaattgcaaaaaatgcaagatatggattctactgcactaaatactattggtggagggctggaggctacaaaggttgagaggatatctattaaagattacaacat

SEQ ID NO: 137039 - DNA, 572 bp, Zea mays
  unsure (1)..(572): unsure at all n locations
  Clone ID: MRT4577_56456C.1
ccgctgctcgcacaccacnacccccgggccagcgccttgctcgggcttcaagtgaaggccttggacctccagcgcccccgctccacatttgcactatccctgtccgttttccccaccctaagcaccagcagcgccgccaccgtcggaaggccattccgctatcgtcgttgagcctctaatgggggctttgtcatgtcccggagccgtcgccatcgttccaagccaccaccctcttgttgccgcttccaagggatcctgagtcttgccttgagacaatgagcagtctgcgtttcctgagggagttgcaggagaagtccccgagcaggagcttggtgaaggttatccacattgtaaccactgcccaggagaagatgatggcaatgcggaggacttttaggagtttcacgacttcgaggagttctagactagattagtggcaacccctagtcagcttcctgtgaaggccttatctttacagcgttttgctttatcactttgattactcgttaagttgatgattgtggatgtctctgacatcatgatgtaataaattaatacttctttatgttatt

SEQ ID NO: 137040 - DNA, 499 bp, Zea mays
  Clone ID: MRT4577_56457C.1
gggcaaaaggggcatcgatggggttgggggaacagggggaaaccaacccaacttgggaattaggttcaaaaagttcaggctagctagcccattttttaaaccccccgaaaaaaaaacgggaccaacccctgggggggtccccccggccttttaacaagcaggaaggggatttttccctgctttatttttaggaggggggaaggattaaaaacacaagcttgtcccccggccggggggacaagttccaaatcggggaccccccaacctgggggggggggggaacattaccgaaaaggggccccggaagcctgggctcccgaacgggaaaaaggggaaccttcctgggcggggaaagcccaaaaagctcctccatgctaaaatcccccggggccataccggccgggagccgccccccaaacccgggccccaggttccccaccccaggggccaccattttaatggggaggccgggcggggggaaaatcccccccccggcccc

SEQ ID NO: 137041 - DNA, 1104 bp, Zea mays
  Clone ID: MRT4577_56458C.1
gaacgcttgcagttcatgaagaaagctgcttcccgcggaccgtgggcccaacgtgaagcaatggaggtcgggggcggcgagaagcacttcgtgctggtgcacggcctctgcctcggcgcgtggagctggtacaaggttgccacggcgctggaatccgccgggcaccgcgtcacggcgctggacctggcggcgtcgggcgcgcacccggcgcgcctgcaggaggtgcgctcgttcgaggagtactcgcgcccgctgctggacgcggtcgccgcggcgcccgacggcgacaggctggtcctcgtcggccacagccatggcggtgccagcctcgcgctcgccatggagaggttcccgcgcaaggtcgccgccgccgtgttcgtggacgccgcgatgccgtgggtcggcaagcacatcggcgtcaccaccgaggggttcatgaagaaagctgcatccaaagggctgctcatggactgccaaatcgtggccatcaccgacggcaccggcagcgaagaaggcgccgggcagcgagggacagcgatcgtgatgggtccagagttcttgaagaagtgctacaaggagagccccgcggaggacctgaccctggcgacgctgctggtgaggcccggcaaccagttcatggacgacccggtgatgaaggacgaggcgctgctcacggccgccaactacgggtccgttaagaaggtgttcgtggtcgccaaggccgcccatggatccagcgccagcgccgaggaggtgcagagctggttagcggccacgaaccccggcacggagatgcaggagatcgccggcgccgaccacgctgtcatgaactccaagccgagggaactttgtgacgtccttgtcgggatagccagcagatacgactaataagaatgtcgaacactattattgccgccgcgcaactaggcgtgcatgatcggttgatgatgtgtaatttgtgctatctttaaaatagttattatgcttaaattttacctatcaacatcttccatttcaaattccatactataaatattgcagactataatgtaaaaaatattttgcataattatatatgcgattggttggctatagccttacaat

SEQ ID NO: 137042 - DNA, 1764 bp, Zea mays
  unsure (1)..(1764): unsure at all n locations
  Clone ID: MRT4577_56459C.1
tacactatcaccatnnccattttttgaccccggcggcacgcggggccggcaccgctcgtggttttccaaagctggcgcccccgccggcccactcccacccccacggcctcactccgctctatttatccttggccatcagatcagatcatcacagcaacagcactacagcactgcgcccaaaccggaggcgatcacaagtcacaacacagcccacttttgagctgtctcctagcgaatccttgcgggggaaaggaatgggcgtcagcgctcgagctcaccatccgaagcaccggtgccaccaggagacgtgcgtgcccgacggcgcgtcgctcgcggcgatgtacctctacggcgacgtgctcgagtccgtggtggagcgggtgccggtggccgacctcgccgccgcggcgcgggtctcgcgggagtggctccgcgcggtgcgcgccgcgctgcgccgccgcccgctgcggctgccctggctcgtcgtgcacctccagggccgcgggggcctccggtgcgccgcggcgtacgacccgtgctcgggcgcctggctcgccgtgccggcgccgcgccacgccacgccgtcgcacgtccgcctcctgcgcggcgcgcgcggggaccgcgtctgcgcgctctcgctctcggggctcgccgtcgcggccgatccgctcggcacggccggatgcgtcgcgttggatgcccccggcgtgtggcgcatcgacccggtgttggccgcggtgggcgaccgcgtcgtcgcgctcggcggcgcgtgccggctggcgctggccgagggcggcaacgccgccgcggtcgaggtccacgaggatggcgggtggaccgcctgcgatccgatgccggacgcgctcagggactcagccgccgcgacgtggctctccacggccgccacggaccagcgggtgtacctcgtggagaggaccaccgggtgggcgagctggttcgacccggcgaaccggcggtggggccccacccgtcgtctcggccccgacgccgccgttaccacgtggggcgtcgcgcccggccgcgccggcgccgaggaccgcctccttctgttcggggctaagcgggcagacaaggaggcagagtgcacggtcgtcgtccaggcatgggaggtggacggcgacactctggaacagagcccctccgcatccagcgatgcgatgccgccggagctgtccgagaggctgtttcgtcgtgacgacactgatgacgacgacgacgaagaggaactggacgacatgacgttgtcgatcggggtgtgcggcaacgccgcgggcgggtacgtgtacaatgcggccgagccggcgaacggcgcggtgctctacgagctgtgggaggaggggaacgccatcgccgtggcccggtgggactgggtgccctgcgcaccagctgtgcaggcccagccgctgggccgtgccatcctgggctgctcgccggtggggctggatgagctggcgttggccgttgctgcaaggggcccacgctgaactcacggcggcgacacaccaaatcaagtggagcaaccgctgtttgccacttgcaagtcaagtcgtgaaagacaaaaagatattcttgtatggtgtgccactcttgctgtttggttagctttaatccgaaacgtttctattccagtagcattttatctttataaattacagcttcagcggtcgcaacagctagattttgtaaatcatcatttgatagcgaggaccgctctttcctcaaagttgcatcgtttgcgtgtac

SEQ ID NO: 137043 - DNA, 473 bp, Zea mays
  Clone ID: MRT4577_5645C.1
gagctcactagtctgcggccgccctgtgcttgtttagtctgtgcctgtgctcttgtaggcattacatttttctcgcccaagggccgcggagggcgctcgcagacggagctcggtcagaccatgaactgccccgcacatgacactgcccctatcaggacccggcatgtttttaacagtgcccgagctttagggtccagttacaccactgggatatgaaaattggccatgaggccaccgggaagggcgctaccgggaaggacaaaatcagcagcgctaaaaagcgcctgtcgccacaactaaggaaggtctctttccggggatgaatcacagtgtcggcgtctggggacggcctgccgattcaaccacagatatgtctctacagcgagatccagcaaacagcggactacacccgcatcatcttgcgcggacccaacctgaagatggcgcacatcggcggcgactgtatcctggag

SEQ ID NO: 137044 - DNA, 1842 bp, Zea mays
  Clone ID: MRT4577_56460C.1
gaaatatgttggtgataatggggatctgataattgcaaatcccacacgccatggaaaagaggggagcaagtcgttcaaattcaacaaagtttttggccccactacttctcaagatgacgtattcaaggacattgaaccacttattagatcagttcttgatggttataatgtttgcatttttgcgtatggtcaaactggatcagggaaaacatacacaatgactggacctgaaaatgcaacagagaatgaatggggtgtcaattacagagctctgaatgatctgttccatatttcacataatcgtggggataccatcatgtatgaaataaatgttcaaatgattgagatatacaatgaacaaatccgtgatcttctttgcagcaatggttcagagaaggagttagagattatgaatgccagccaacccaatgggcttgtcgttcctgatgcaacggtgcatcctgttaattcaacatccgatgttattgagtttaatgagaataggacatgccaaacagagcaagtgggttcgacaatgttgaatgaaagaagcagcagatctcacagtattgttacgcatacacattccgaggtgttagattttgaaaacagggagctactctgtgtgggtgcactacatcttgttgatcttgctgggagtgagagagtggaccgatcttctgttacaggcaatagacttaaagaagcacaacacataaacaaatctttgtccgctcttggagacgtcatattttctctaccgcagaagaatgctcatgtaccctaccggaacagcaaacttacacaagtcctacagagttctttgggcggccatgcaaaaaccttgatgtttgtgcagatcaacccagatgtctcatcttattcggagactttaagtactttgaagtttgctgaaagggtttctggagtggagctaggtgcctcaaaggcgaataaagaaggcaaagatattagagaatttatggaacagctctcactgctcaaacataaaatggcaaagaaagatgacgaaattaacagattacaacaactcaagacgcaaactccaagggtcaggactgcaaaacgtgcagattccccattgaaacattcgtcgtcgtccccaggcatatctaatttaggaagcaaaatccaacatagaaggacagtatcaagtggaaaggcaatgagcattgccagtagggctgggtctgataccttctctgacaccagtgacaggcactctgaatctggttctatgcagtctgttgatgatatcctaccacgtagggggattatgggtcttccgaagctctctattggtgaaatgggtcagaattctgctgaccctgagcttgtttgctttgactatgctgattcagaagagagattaagtgatatatcagatagtggtctttccatgggtacagagacggatgtttcagtaagcagtatagttgagttgacacgttttcaggagcaggaaaacatacctagcactctgaaagaacaagagagtgcacgaaaaattccaaatgatcagttgtccaaggtggccacccgagttcagaagacaacagtacccaaactagctcaaacttccttgtggcctaaactaagagatcctccagcccttagatccccagggagaatcacaacacaaacaatatctgtaccaaggacgtccatgacttcgaagagatggacataagtcaagtttgatcaacatgttctaacactagtttatggttttgtacagcacaatcgaaaagtaattcattccaattgatgaactttgtacagcacttgattctttcaggaaaaaatggcagttagttttat

SEQ ID NO: 137045 - DNA, 435 bp, Zea mays
  Clone ID: MRT4577_56461C.1
gagagagtgaaccgatcttctgttacaggcaatagacttaaagaagcacaacacataaacaaatctttgtccgctcttggagacgtcatattttctctatcgcagaagaatgctcatgtaccctaccggaacagcaaacttacacaagtcctacagagttctttgggtgcttactattgctgattgttctatatactatttacatgttatcagttatctaatatttttcatctgcaggcggccatgcaaaaaccttgatgtttgtgcagatcaacccagatgtctcatcttattcggagactttaagtactttgaagtttgctgaaagggtttctggagtggagctaggtgccaaggcgaataaagaaagcaaaaatattagagaatttatggaacaggtgataaattattgttttccttttgcccgacccttat

SEQ ID NO: 137046 - DNA, 532 bp, Zea mays
  Clone ID: MRT4577_56462C.1
ttaataattttttcatttttttttttttttttttggggggttttttttggtattcttctgcgatttttttcctcctggcaaaaggaaccccccgaatccagccaaataatttaaagccgaaaccaaggaaaaattttgggggaattttccaaaacccaggcaaaaaaagcccctgttttctctggagagaaaaaaggggataggaaaacttccggcccttgtcgaaaaccggggcaaaaaacaaacaagcaatttttgcccaaaaaaagaaccgggcccccctcctcggggggggattccccccccctctggttgaaaagggttaccccgcatttaaaagggcaattccccccccaaaaaaagtcgccccccccatggcacccccgccctcataagacccccttttcaaagggcccccaaaaaaacccccctaaaaaaaatcccaatcttggggccctgggaaagggcaaggggtctcaaaaaaaaaaaaaaagagggggtgttttccaggaaagggggggaactgggcccc

SEQ ID NO: 137047 - DNA, 581 bp, Zea mays
  unsure (1)..(581): unsure at all n locations
  Clone ID: MRT4577_56463C.1
gctacagctggttggagctcgggcaccatagctggatcaatggtgacgcgcgncgtgcatggccaggcgggtaacggggtagtcatagatgtccagctgaagcgccaagtgcgattgacgcgtcgcggtagactgcgtatctggctcgggagctgccgtgaggcgtgcccagctctggggtggaaggagccataccagtattcaggccgtggccatccaccacgcactccaagggcaaggacgctgttcgctatagcgcagacggcgtgctggaagacgggcagcctccctgctgcccatcctgaagagctgctcagaaccggctacctgcacagtgtctgttacattgggcgctgtcctaaacaagagagcttgcgatttatatcgtagattagttggaggcgctggcatcatttctcggttagctctgatcagtgctctctgtatgaggggatcaggtacagctagagtgatccatcaccaaacgtacacatattgtagtgataactcacggacgggtttatgaccatgatacacagactaaaggccttagacttaagaaaatcacagttttaatattg

SEQ ID NO: 137048 - DNA, 287 bp, Zea mays
  unsure (1)..(287): unsure at all n locations
  Clone ID: MRT4577_56464C.1
gtggacctaagactaacaatatgctcatcaactcgagaaaggagaactcgacaccgtgcaggtgctgatcgttgctcttgctgtgctggctctcagtgccagctccagctcaagtacaagctgtggctgtcactgacaaacaccacatttacatctaccgccttatatgtatatgccgncttatctgtatctgccgccgcagcagcagccatagccatagcaatatcaaactcaaccactgaagctaagcccgtaccagcaattctgatcctgcggcatcggcagca

SEQ ID NO: 137049 - DNA, 660 bp, Zea mays
  Clone ID: MRT4577_56465C.1
ctagaactagggatcgcaaatgatgttaaggtggtcattttcaactttggaggacagcctgccggatgggaactgaagaaagagtggttgcctgacggttggctatgtttggtatgtggtgcatctgatactcaagagctccctactaaatttacattaagcttgcacaaggatgcctacacacctgatttgatggcggcatctgactgcatgcttgggaaaatcggatatggcactgtgagtgaggctttggcttacaatctgccatttgtatttgttcgaagagattatttcccacgcgtccgatttttgcggaatatgcttgagcattatcaatgtggcattgagatgatacggagggatttacttactggccattggaaaccttatcttcaacgtgctatcacacttcaaccctgctatgatggtcccataaatggtggcaaggtagctgcacatatcctccaagatactgctgttgggaagaagtatatttctggaaagttgagcggagcaagacggttgcgtgatgccattgtgcttggctatcagcttcaaagggctcctgggagagatgtaggaattccttactggtattctcactctcagaaagaaactaccgctggcccaacgcccacacctcatgatatgaatggaagt

SEQ ID NO: 137050 - DNA, 279 bp, Zea mays
  Clone ID: MRT4577_56466C.1
atttacgagcacagagtcgatacctgcaggtgatatcttcttctcccgtgattgcagggctccacttgagaaaacgtcaacaaagcttaacaatattgaccaatcatttacctctgactcaaatgtccatactgagaatgatggcactgttactcaaagtaatttgggccagccatcacaatttgtttcagctcggacaggtctttcgcgcacaactacgaaatccagttatgctactggtcgccattgccagatgagcaccaccaccactttgagtag

SEQ ID NO: 137051 - DNA, 476 bp, Zea mays
  Clone ID: MRT4577_56467C.1
aaccgggaggaaacaaaaaccaccgcttttgcacaaacatgggtcattttaggggacaacgccaactcatcatttcgacttggctatgcaaggcgacgggaaacaaaagacacacatgcgtttggcaggatcaatcaatccacgtgcgtacaccctttccgatccgaaagacaatgaaggtgcatagcatagccggtgagcttaattgccggggaccaagttgggggcggaggcccatgcgttgttggtgactgggtcaacgatggggacagcgaggttcttgagcgggcccttgccggggacgatggcctggacaaaaaaaccgaacatggaaaacatggggagggggccggtcttgagctccttcaccttgagctcggggaaggcctcgggggcttcggccaggccgagggggtccaagctgccgccaggggacagcgggtcgacaacctctccgagcggcccgccgggaatac

SEQ ID NO: 137052 - DNA, 179 bp, Zea mays
  Clone ID: MRT4577_56468C.1
aacaaactcatctttaccagtacaggaactcataccgtaacccacagcccacagcccacagccataggatagaacctgacagtaaagatgctaacagacaacgaattccaggtatccctaaacaactccatatcgatatcagaactgaaggcacagatcacccagaagatcggcgtaca

SEQ ID NO: 137053 - DNA, 705 bp, Zea mays
  Clone ID: MRT4577_56469C.1
agtaatgttcgtgtagtttgatggtgatcggttctgtatgttatcaggtggtgctgggttcgattccttggcccaccattttaaagaaaaaaaaaaaaaaaaaattcgcattggcaaccaaaccaagctgcttgcattgttgcccgtcccttcgttgttcagagatcgaacatccaagtcgttaggaaatggaggcggcggcggcggggagcggcgggagtggtgcggcgaccaagctgcagaaggtgtaccgcagctaccggaccaggcggaggctcgccgactccgccgtcgtcgtcgaggagctctggtggcaagcactggacttcgcaagacttaactacaacactatctccttctttgacgaacccaagcctaaggctgctgcctcacattggaatcgtattggccaaaatgcgttgaaggtgggtcacggtctctccagggagcccaaggctctcaagttggcttttgagcactggatcgaggctattgactcgcgacatcgctccgggcacaacctgcatttctactataatttatggtgccaaagccaagctggtcagcccttcttctattggcttgacgtcggggatggaaaagaagtggaccttcctgagtgtccaagaactttgctgaagaagcaatgcataagatatcttggtcctaaagaacgtgagctctatgaatacattattaacgagg

SEQ ID NO: 137054 - DNA, 377 bp, Zea mays
  Clone ID: MRT4577_5646C.1
cgcccgcggacgcgtgggcggacgcgtgggcgcgcccttagcctttattctcttctcacatccacccagaagcacttgggtgcgggttcatacgaacctcacaccgccccagaccctgaatcaatgttcacgtcgattgaggaggtgagcaagccgatctgactaggtgctgcatgcgagaccgtgccatgatcgaggtgggcactcttgggttgcgagcgctctttactatcacgtcttcttctggtgacgcactgttcaagagaactagatctagtgagaaaccgttcagaattgggatcgtgctcatgaagcgcttcttcttacattcgatagcggaccgggcgagggggaggaatcagtgtatcgatggaaac

SEQ ID NO: 137055 - DNA, 777 bp, Zea mays
  Clone ID: MRT4577_56470C.1
gaggccggccgggcctcagattaccaagcaatccttcttctaaatgtaagtacctcaaaattagaagccaagacaacattaaccgtaatatctttatcataagccaagtcaaatagaacaggaaactgaacagacaagggcagattaccaatccagttactcttccaaaagctagtcttcaaaccgtttcccaccccagatttgcaaaatttgtaaaaattatcacgcagccttagaatttttttccagaagtgtgaatcaccttgtttttgccggatcaaaataaggggttttcccttaatatatttactggtaataattttttgccataagccattcgaagtttcaatattccaaagccatttagtcattaaggaatcattcataaaatcgagattcagaacacccagacctccctgactttttgggagagcacaccgacaaccagtcaactaaatgacatttttttggactgacgacccccttgccaaagaagacgcctcctaagaatatcaatctttcagataatcgacttaggggtaggataaatcgaaagcatatataacgggacattggataagcagctgtttaaaagagttagtctaccacctagactccaaaaactaccctggcacccaacgagcctttttttcaattttttcaatcatgggcacccagaagactttaattatcctcttaatatcaattggcaccccaatttgatggctccttttaatggttggtcactcaattttggagtggaaagaaatttggcct

SEQ ID NO: 137056 - DNA, 225 bp, Zea mays
  unsure (1)..(225): unsure at all n locations
  Clone ID: MRT4577_56471C.1
ctaacgaccgcgtagcgaanaacctncccaacccagcngcggntgtgtcanctgctcaancagcagggngtcncgcangtgangctgtacgacgccgaccccaccgtacntnncgccctcncnaacaccngcatcaangtggtgnnaacgctgccntncgagcagatcgcganngcggcgtcgcgcgcntcctacgcgctgctgtgggtncnccggaacatngcg

SEQ ID NO: 137057 - DNA, 643 bp, Zea mays
  Clone ID: MRT4577_56472C.1
aattcggcacgagggttttttccattttgcggttagaccattagaggattcctgcactatgtccttttgtttaaccgaatttgttcggcaattgaggtagtgcatttcgcctctctttctaatgttcaggaagactgcttcttgatagaccaagatctatgcctcttagctgttgggatttccgtgtgttccgttagctgttcattggctgagtttctgtttagaaaaattggttttgggttgctttattgttcttctaggaatgactatgatctcgcccggcttgttcagtaataatttggttgccagcaaaactcacgccttctccttttccataggaatatggagaatacaggtgtgccccagtggaagcagctgctggcttcctttgggccaattgcgtaaccttggcatttgggaatagagataagcgaagcagcagcatgaatgtatgctccatcaggtgctgttttgaccttcccgtgttatggtctcccctgatgcctctatggagcggatccacaagtccatatagtgtgtattttgactgtatactgaatattcatgcaaaagaaagccttggtttctttgaaaagcaatgaattctagcacaaatgaatcaacatattctagtgaaaatcat

SEQ ID NO: 137058 - DNA, 434 bp, Zea mays
  Clone ID: MRT4577_56473C.1
gcattttacaatgttttatggtcctttactgttgtgtttttacttttgaaaaagtgccatgctaacgaaaactatgagcttcgtggcgctgctccaggactcggtgaacgcgcgtcccggcgcccccccggccaggaggctggcacctggccaccctgcggctcggcggggcggcgcaagctcggctcgtgcagggaggaccactgcgcgctcatggtgcctcgcttgagctctgacctccgtctctggcgcgagcatcacccacctgctgccaggagccgacatcatgagggcgagcgtgcctctcacacgctgctgctcgcctatggctctcacgatggcatggaaagccgagttggcaggatgtgacaaccctattgtccaaagctctacatggactgtcgccgtcctgctagcagctcaatctgtcacgc

SEQ ID NO: 137059 - DNA, 253 bp, Zea mays
  Clone ID: MRT4577_56474C.1
ttaccacacgtgttttgacagacacacagttttgtatttagtatggtgattaagcccgaccgcgcgcacatgcgctcatggtaagtgagagagagagagagcagggtgagaagcgtggggcctatgggcctttttagatgggacatgatggggatcgtttgtttttgactcacaagttttttggagcggagcccaacagtttctttggagcctattccatagggggccttattaatagggtgatttcccggga

SEQ ID NO: 137060 - DNA, 238 bp, Zea mays
  Clone ID: MRT4577_56475C.1
cctggtttttgtgttgttggttttttttgtacgacaagcactggattacctcccttctcaatacttgacgaccgctggctcattttttaactaacgggacaaatataaaagaacgagcgatcggtcattgctaaactgaaccacttcaaattaaaaagcatgggaggcggtcttaatttgaaaaacatgttctaccaacctaatttaaaaaccctgggccaccaacctaaggtcttcc

SEQ ID NO: 137061 - DNA, 137 bp, Zea mays
  Clone ID: MRT4577_56476C.1
ttgctcctcaccccaccgggtcgaatctgactgggtccagcgcttctttctctgtaattcatggcgggttgtgatctgccgcagctcagcagctctcatggtgagcctcctgtgtcggtatggctgcccactcggcg

SEQ ID NO: 137062 - DNA, 340 bp, Zea mays
  Clone ID: MRT4577_56477C.1
cggacgcgtggagcactagagtgcgggaagtccgccatctagtccatgctgatgcaggtggtgggcgcgggcggccacgtggaggcgtcgcggtgcctgtacggagggacccacgcgctgctggcccgattactgccgcgcgcctactgggagcgcgccaccttcgaggtcgccgacaacaagggcgacgggcgcgccaaggaggcccccgacgaaacgcgggtggagtacgcggagtccatgtgcaacccgacgctgggcgtcggcaacatccccatactatcgcgggtggcgctcgaaggcggcaccaagctataggaggacaacaccttcacccccg

SEQ ID NO: 137063 - DNA, 485 bp, Zea mays
  Clone ID: MRT4577_56478C.1
ggagccggcccatagccatctggattattatatatttttattgggcccatggccgggggggttaacagggcccagaaataaacgcaaccagcagcccccccggggggccccaaggtttttttttaaaaaaaacccaaacccggccgggaacacaaaattgaggccctccgggggggcgtttggaaaccccgggggaaaaaagaaaaaaagaaaatggccttgcgcggaaaacacaggctgtccctgagggaaaaacccccctgggggtcacagggccaggacggagccggcccggaccttgccgcccctttgggggccttccgtttccctggggggaagaagggccccacgggacacccccctggccttggccttggccttggccttcgccgccgccgccttgtccgccgccatttgggcgctcctgcacttgtcgttgaaaaacgccgggtcccccctgtacaaaaaaatgtcccgggttgccg

SEQ ID NO: 137064 - DNA, 360 bp, Zea mays
  Clone ID: MRT4577_56479C.1
accccttcaagtacccttccctaattcccttttcgacccactcctcctggatttcaaagactggacaaattggctggtttattgaaataggatgggcggtaaaaaacctcaacgtttccaaatttacttacaacaataacttcatcattttttcattttttcccactatatacctcaattcttttttttccttactcttctcatacttcaaatctcattcattctcctcatttattatataatattctgtttccttttatattttcaactattactcgtttatttttatccctatttttcttttatattatttttaataataatttttttttaattatctttattttttcatatttataa

SEQ ID NO: 137065 - DNA, 769 bp, Zea mays
  Clone ID: MRT4577_5647C.1
ttttttttttttttttttttttttttgagaacaaatttccgtttgataaatggaaataagatcagcctcagccagcagccttagtgcagtctacaaacagtcacgatctgttggccagagcctcatgccgacaaaaatccatcaggagtagcgaatgagggcagcgcggcaggccaaacctgactcggaagccgcctaggcggctccgcatggtcgaggccaagcaatgtaacggctgtgaggcggcaccgtatggatggacacctgacgcgacggctgctccggagaatggaccgcgcagtgccctcgattcgatctagggtttgggttcagggaatgtgcgaacacacacacatacatacatacatactgctacatccaactgctacatccagcatgctactgcatccgtccaccgtcctggagagattgcaatctagcatccaaaagaacggcgacggcgacggcgacggcaaggcaaggaagagtcagagagcataccaaaaccactcattcgcaacagaaggctcgaaaaaggtccatcaaaggcggctcagatcccgcgctgcccgaccacggccccgaccagcggacggcatggaccccgccgccacggtccccaaccccaacccctaccgccgcagaactgtcgcccgccacagggtctgcaatcaggtgcggcgcaccggggcggggaccagagtggccccggggaggcgcggatccgccaacgagcgccggtcggaaaccggcccggcgccaagctgcg

SEQ ID NO: 137066 - DNA, 1383 bp, Zea mays
  Clone ID: MRT4577_56480C.1
ccggccgggcaaccaaccggctccctgcgtcctgctctgcagctgctgaccccttctcccgcctccgaaggaaaacgggcgggcaaccttctcgtcccttccaaaatcccgagtttccccccgatttcgaccctccgtttcccctccgcttccttctctgctccaccgcctcaggaatatagatagtcgtagaaaaaaactgagagagagagagagagagagagagggaggaggcaggggagtggaggggaggggaagcatcgcaattccgaacccccacctcgccgctcccaccaccgcggccgggttgcgtccgtttcgattgcccaggatgagcaccgagtccggggagctgctcgggatcgaccccgtcgagctccggttcccattcgaattaaataagcagatctcctgcacgctgcagctgacgaacaagacagacaagcaggtcgcgttcaaggtgaagacgacaagcccgaaaaagtactgtgttcgcccaaacaacggcatggtggcgccccggtccaaggctgacgttgttgttacgatgcaagcgcagcgggacgtgccaccggacatgcaatgcaaggacaagttccttgtgcagagcgccaccgtcgccaaggaggtcgtgccaaaggaggtcactggagacatgtttaccaaagattcaggcaatgtagtggaagaagtgaagttgaaggtagtttatgtagcaccatcgtcctctcaaagcgaaagatttgaggatggtaatctcggcagtttgagttatcaagaggaaacaaaggaacctaaagaatcagaaaaaataatcactgagccatttgctttgatttcgaaactgatggaggagaagaattctgctattgaactgaacaacaaggttcgacaagaattggattttctgaggcgagacatcagcaggcggcatggtggtttctcattagttttagtactggtggttgctattctgggaatactgctagggttcctcatgaagagatgagcgcatgtaatgacttatcttgtctggcttttctgaactaaacaaaattgtatgtgctctgtgtgcgcttgttgttgtacaagtcagtggtctgtttatcataggatctgatgcctattgtaattttctgattcatattataaactttagccaatcaataagtcatagttaccaacaccagctgttatcatcttgcaagcgacttgaggtcttgaactgtagccgttcggtttgtgattgtgagagatttttttgactaattgttggcatcattttgcacatatgaacagaatgaaactgtggtttgtgatatatgttggatgctttgtggattgcgtggaaaaaaaaaaaaaaaaaaaaaaaaaaaaaaaaaa

SEQ ID NO: 137067 - DNA, 780 bp, Zea mays
  Clone ID: MRT4577_56481C.1
gggtcgaggccgcgtccgcgtacacgtagtggactgagcttgtgcgacaccgcccgactgtaggtcaagacaacgagccccaaaaagtactgtgttcggccaaacaacggcatggtggcgccccggtccaaagctgacgttgttgtcacaatgcaagcgcagcgggacgcgccaccggacatgcattgcaaggacaaattccttgtgcagagcgccatcgtggccaaggagaccatgccgaaggaagtcactggagacatgtttaccaaagattcaggcaatatagtggatgaagtgaagttgaaggtagtttatacagcgccatcgtcctctcaaagcgagggatttgctgatggtaatctcggcagtttgagtcatcaagaggaaacaaaaatacccacagaatctgaaattataatctctgtttcagggtttccatttcgaaaaaaaaaaaaaaagggcggcccccccttttttttttttttttcttgttttttttttcttttcttttttttttttttttcctttggttttttgacaacagcaggcagcatggtggtttactcattagttttagtactggtggttgctattctgggaatactgctagggttcctcatgaacagatgagcgcatgtaatgacttgtctggcttttctgaactaaacaaaattgtatgtgctctgtgtgcgcttgttgttgcacaagtcagtggtctgtttatccataggatctgatgcctattgtaattttactgattcaatattataaactttagcc

SEQ ID NO: 137068 - DNA, 1231 bp, Zea mays
  Clone ID: MRT4577_56482C.1
agcttttgcatttctgtacatatcactttcagattgtatcatggtttcttttgttacacgccgggctgcttctcgccccttccaaaatcccgagcttttccccggtttcgacccttcgttttcctccgcttcctcctctgctccactgcttcaggaataggtgcctcaggaatataggtagtcggagaaaaaaacgcacacatagagagagagagaggagaaggggaggggaggcatcgaaactccgaatccctacctcgccgctcccaccaccatcgcggattgcgtcccgttcgattgcgcaggagtttctgttccaggatgagcaccgagtcaggggagctgctcgggatcgaccccgtcgagctccggttcccattcgagttaaataagcagatctcctgcacgctgcagctgacgaacaagacagacaagcaggtcgcgttcaaggtcaagacaacgagccccaaaaagtactgtgttcggccaaacaacggcatggtggcgccccggtccaaagctgacgttgttgtcacaatgcaagcgcagcgggacgcgccaccggacatgcattgcaaggacaaattccttgtgcagagcgccatcgtggccaaggagaccatgccgaaggaagtcactggagacatgtttaccaaagattcaggcaatatagtggatgaagtgaagttgaaggtagtttatacagcgccatcgtcctctcaaagcgagggatttgaggatggtaatctcggcagtttgagttatcaagaggaaacaaaagaacccaaagaatcagaaaaaataatctctgagccatttgctttgatttcgaaactgatggaggagaagaattctgctgttgagctgaacaacaagcttcgacaagaattggaccttctgaggcgagacatcagcaggcagcatggtggtttctcattagttttagtactggtggttgctattctgggaatactgctagggttcctcatgaagagatgagtgtatgtaatgatttatcttgtttggcttttctgaactaaacaaaattgtatgtgctctgtgtgcttgctgttgtacaactcagtgatctgttaatcataggatctgatgcctattgtaattttctgattcatattataaactttagccaatcaataagtcatagttaccaacgccagctgttatcaaaaaaaaaaaaaaaaaaaaggccgcccgcccccccctttttttt

SEQ ID NO: 137069 - DNA, 2585 bp, Zea mays
  Clone ID: MRT4577_56483C.1
gaaaagctcctagtcctaggttggagcggttgcgttgtgctagctacactagattctagctagagagctagtagctacttgcattaggctactagccggccatgggttgctgccgcaccggcgtccactgcggtgctggaccgagaagaaaccaactgcggcgatgttggggtggtgggggctcgctcgtgctgctattgctgctgctggtggcggtggcggtgccggcgcgagggcagcggtcggacggcgtggtgatcgcgcaggcggacctgcaggggctgcaggccatccgccaggcgctggtggacccgcgcgggttcctggccggctggaacggcacgggcctcgacgcctgctccggcggctggacggggatcaagtgcgcgcggggcaaggtcgtggccatccagctccctttcaagggccttgccggtgcgctctccgacaaggttggccagctcgccgcgctccggaggctcagcttccacgacaacatcatcggcggccaggtgcccgccgcgctcggcttcctccgggagctccgcggcgtctacctccacaacaaccgcttcgccggtgccgtgcctccggcgctcggcgcctgcgcgctcctgcagacgctcgacctcagcggcaactctctctcggggagtatcccttccgccctggccaatgccactcgcctctatagggtcaacctcgcgtacaacaacctctccggtgtggtgccgcccagcctcacttccctcccgttcctcgaatcccttcagctcaacaacaacaatctcagcggcgtaattccgctcaccgttggtagtctcagattgctccacgatctttctctcgctagcaatttgatcggtggaagcatcccggatgggattggcaacgccacaaagctcagaaaccttgatctctctgacaaccttttaggtggtagcctccctgagtcactctgcaacctcactttgttagtggagctcgatctcgacgggaacgacattggtggacacatcccggcatgctttgacgggctcaggaatctgaccaagctgtccatgaggaggaatgtcctcgacggcgaaatcccggcgaccgtcgggaacctctcggcactgtcactgttcgacgtgtctgagaacaacctcaccggagatattccgacctccttgagtggccttgtcaatctcggttctttcaatgtgtcctacaacaatctctcgggacctgtgcctgcagctctctccaacaagttcaattctagctcgttcgttggaaaccttcagctctgtggcttcaatggctctgccatttgcacttctgtttcatctccgctcgtggcgccgtcccctccactgcctttgtcagagcggcgaacccggaagctcaacaaaaaggagctaatctttgcggtagctggcatcctcctgctcttctttctactgttctgctgcgtcttcatcttctggaggaaagacaagaaggaaagctcgccccccaagaagggcgccaaggacgtgaccaccaagactgtcgggaagaccggcactggcgcaggcaaaggcaccgacaccggcggggacggcggcggcaagctggtgcacttcgacgggccgctctcgttcacggcggacgatctgctgtgcgcgaccgcggagatcctcgggaagagcacgtacgggacggtgtacaaggcaaccatggaggacggcagctacgtcgcggtgaagcggctccgggagaagatcgccaagagccagaaggagttcgagccggaggtgaacgcactcggcaagctccggcaccccaacctcctcgcgctcagggcctattacttgggacccaagggcgagaagcttctggtgttcgactacatgcccaaaggcaaccttgcttctttcctccatgctcgtgcaccggacagcagcccggcggactggccgacgaggatgaacatcgcgatgggccttgcgcggggactgcaccacctacacaccgacgccaacatggtgcacggcaacatcaccagcaacaacatcctcctggacgagggaaacgacgccaagatcgccgactgcggcctgtcgcgcctcatgagcgcggcagccaacaccagcgtgatcgccgccgcgggcgcgctcggctaccgcgcgcccgagctctccaagctgaagaaggccaacaccaaaaccgacatctacagcctcggggtggtcatgctcgagctcctgaccggcaagtcgcccggggacacgaccaacggcctcgacctgccgcagtgggtggcctcggtcgtcgaggaggagtggaccaacgaggtgttcgacctggagctcatgaaggacgcggccgcgggctcagacaccggcgaggagctggtgaagacgctgaaactggcactgcactgcgtcgacccttcgccaccagcgaggcccgaggcgcagcaggtgctgaggcagctcgagcagatcaagccctcgatcgctgtctctgccgcttcgtccttcgccggcgagccgagccatactaccgcgaccgccaccagtgtcacggacgagacgaaatctacagttacagagtag

SEQ ID NO: 137070 - DNA, 301 bp, Zea mays
  unsure (1)..(301): unsure at all n locations
  Clone ID: MRT4577_56484C.1
gggaccctcgaggccggccgggccggngaatcggttcagttcacctcctcgtccacgagtgaggaaccctagcgaccgaccatggcgttgctcccgcgcaccgcgcggctggccctcctttccaccccgcgggcgtactccgctgccgctgctgcgggcgcctccccgacgtccccagcgccatacgggggcgcccccccaccggcgatgtcgaagacggccgagntcgnggnctctaaggnggacgaccngangaacagggcgcgaaagggcacgaacagccccatgaccttcgggctca

SEQ ID NO: 137071 - DNA, 324 bp, Zea mays
  Clone ID: MRT4577_56485C.1
gcgggtaacacatgataaggggcttatgtcccttcccaaaatttgagtgtgttttataagtcaccaccctctctaattcccctttacttgccaagggagccagaaacataatgtgaatggatggtttttttttacaaaagttgacatgagggcaaacataatcacacgcgagaacgctgcaccaaacgaccctgcccataactaccatgatagcggataagccgaaagcacccccacactgacgggagaatgccacgttcacgagggcaacaatatcaaccctaggttgaaggcttcacataacttggagaggggtgctttcat

SEQ ID NO: 137072 - DNA, 168 bp, Zea mays
  unsure (1)..(168): unsure at all n locations
  Clone ID: MRT4577_56486C.1
cctcgaggccggccggggcaaaccttaacctattctagacgttaattaccagggattttccgcacgtctccgctttctctgcaacccagtttctccttgtgcggcctgaggcctcgtctggggtcgcgggcagccnccgcctctctcccccccggtcgactatcgatc

SEQ ID NO: 137073 - DNA, 382 bp, Zea mays
  Clone ID: MRT4577_56487C.1
gggagaggtggcattattatgggtctgggccagagatctgttattgttagaggtccttgctggtttggagggccgcatatgagttagaacacgagggtggctgcgtatggcgcctacagcaaagaaaagcggatgcggcagtgatagtgtgtaggcggacgaaagacgacgtgcaccgaagagctctaggagataaagggcgacggaggtagataatggcggatccatagtgacgcggcagtcaatatagagcttagacatcataaccaaccctacaacatagctgcctctagagcggtacccgccaaagcagatccaaaggctaccctgtgaaagggagatggacttaaacatttcctataatcgatgctggcagcgtgac

SEQ ID NO: 137074 - DNA, 235 bp, Zea mays
  Clone ID: MRT4577_56488C.1
ttgacaatccaagcacatactgggggggggggggggggccgaatataaaaacacaaattataccccttactctttctgcatcatgttgccaacgcgacacttttccctacaatggtcacaaacacctttaacttcccttattcccccattccttctctcaatcatcccctcacttttttagaaggggggggtcagccctataaagctccaaaagccattgcccccggcaacataa

SEQ ID NO: 137075 - DNA, 330 bp, Zea mays
  Clone ID: MRT4577_56489C.1
gcctgcagctgccggcgcatatttgcggggacgccccacgcgtgcgattttttattatccggctgcgtacgtggtcgtcaaacgtgtctggtaccgtgaactcgcccctggtgcccactctgaacatggtccgcgcttcctttagctcagccaggcgggacatttttccgtactgagctcgtgcaagtcactgctgccaaatcatcggagacgctcaactcgccagtcggatcttggccgattgtcaattttcctctatacgtcatggtaccacaccggtgttaaatccggcctccaacccgatatggcggtcgtcgcccgcttgtccca

SEQ ID NO: 137076 - DNA, 700 bp, Zea mays
  unsure (1)..(700): unsure at all n locations
  Clone ID: MRT4577_5648C.1
ttgggacctcgagccggccgggaaaaaccctaatcgcatctgcttccagagccccccgccgccgctgcgccctcctctcggtcctgccgtccgtcgaggttagtctccacgttcctttccctccacccataaactgtatcagtatcagatccgcttttgttggtttcgcgatgagctggtagagcggggcaggtgctgcggatgggtctagcggtggaggacgacggtgtcgtcgcgcgcacctcgtcggcttcatgatttatcccctctgcctcatgcgtgctcaaactaggaactaggcttcacattcttctccccacaaatcgtggtagctgcgtccttgcaggatttgtgggaattgcggttgcttttcatgcgccttctgctttgacgtgattgcttgtattgattcccgatgctcctgtgcgaggctgttactctgtattgttttctgtgtgttctgtttttgcatgatccgtgaagcgtctcttgtaatagtgtgttctgcttgtgcattatccgtgaagcttgtcttgcagtactgatatgctgtccagggaggctatatacttagttagcgaacaagtacatcatgatgtaggtgtttgatgctgacagataccgtactttggntgtcggtctgccttaggcaccggttgggtgcttgctgggcagctgttttgtaggtcagattacaccc

SEQ ID NO: 137077 - DNA, 351 bp, Zea mays
  Clone ID: MRT4577_56490C.1
gggggaataaaaccccaatttttttgtttactggccaaatgggcacaagaaaaaatccccgagaactttggattttacaaacgggaagggcccaaaacattatttgagtcagtcgacggcccgggtttttaaaaatgcacaaccctcctaaagtttgggggttttttttagtttaaaaagaaggcatttatcagagaactttttgggcagggggggtccccaaccctcccaaattttgccctgccaccatttttttacaaacccagatttttccttttttgctcccgcctccttcccaataaagggagccccccttgtttcaaaaggcggtgggattttttatggacaggg

SEQ ID NO: 137078 - DNA, 1080 bp, Zea mays
  unsure (1)..(1080): unsure at all n locations
  Clone ID: MRT4577_56491C.1
aatanngggccgacggcgcgtncggcacacactcgtctcatcggagaaaagttgtgccttgttagggttttagacggcgatgggggcggggggcgacgagaaggctgcgatggctgcgtccgctgcagccgcgggggccggtgccgccgagggcgagggcgcggtggactccaaggaccttcagcagcagagcaaggcgctcgacaagctcactgatcatgtcgaggaccggcagctcgattcatcccgtgtccaatccgccatggcggcacttgcttcatccaaggaggctgactggaacgcgatgaggctgagggagaaagaattggctgctgtcaagatcaacccctcaggaagctaagcattacacctagctagctagctagctgaacaccaccagatactgaattccactcagcaaaggagagccggcaaccaaccatgatcaatgccaagagacttacgcagatggcaaccaagtggcaaagaataatggccgctcttacgagctaggacgaggggtcaagcccatctcggcgacagctagaaagcgatggaccgtgcagcacttcgacgacgccggtggccggcaaaaaagggcactgcgttgtgtactcggccggccgacggggggcagcggttcgaggtcccgctggcgtacctcgatcggcacggcgcggtcttctgcgagctgctaacgctgtcgcaggaagagtttgggttcgcgagcggcgacggcagggatcatcctgccctgtgacgcggcggcggtggatggagtacgtgatgggtttgcttagaggagacgcatccgaagaagtcgtgagagcgttcttgaggtccatggtcaggccacaccatgccacactgcagtcagcgtcgtggcaccatgcagccagcggctagctgtttgtgtatgactttgatagctctggtgatgtatgtagtttttcttttgttaaggttctataccagaaaatcataaagaatggtgtgaaatgaactacatggactattcgttgcaaacactatgatatacgattcttctttcaggaaaaaaaaaaaaaaaaaaggccccta

SEQ ID NO: 137079 - DNA, 562 bp, Zea mays
  Clone ID: MRT4577_56492C.1
tcgaaggcggccgggacgtacgctagcagagcagcacctcaaagtcctagggtttgctttgctaggctctcagttttcgtcttgagttgcttttaatctggcacaggtttctaaattataataatgaatacttttttgtcaaaaaaaaaaaaaaaaaaaaaaaaaaaaaaaaaaaaaaaaaaaaaaaaaaaaaaaaaaaaaaaaaaaaaaaaaaaaaaaaaaaaaaaaacccaaagattccgttccccaagccccctccccaagcccaaaatttcgttaactcgaactcgggaaaccccggggccccgcgcaaaagggaatcctggggccccggaaaccccgcttaagcgaacccaagggccaaaatccccaacgtaatcttcaaaaggaacggccttccccccaaaacggagggtttcaacacggaggggcaggaaaaaatccaagcgaggaacaaaaaggggttcaactggcccctcaaaacaaaaataaggggaaaaaagggggccaattttgcccgaattttcttaaacaaggggggcctaaagggcctcctcacccc

SEQ ID NO: 137080 - DNA, 452 bp, Zea mays
  Clone ID: MRT4577_56493C.1
gaccctcgaggcctgccgggttcccatcccccaggcaagttttatcttgtggattcgggatatccaacaggcagggttatctggcgccgtatagaggtacaaagtaccatcttcctgagtttcagcaaggtcctatgccaagaggaccatctacgcagggaacaaatgagttgacaaccacaacagttgatgaagacataaatatgaaccattttagagattcgatagctgatgggttgtttgctagacaatagttttttctttaagttgttgtaagagaaatagtttgtttgctgtgctcgacaattggatctgttccaggcaattgtttgttcccattagattgtgatgagaaatcagtttgcgttgtaatacaaactttgattgttgagaaaacaatttgaaataatataaaactgtttttttggaaaaaaaaaaaaaaaaaagcggcc

SEQ ID NO: 137081 - DNA, 288 bp, Zea mays
  Clone ID: MRT4577_56494C.1
atgatgtgggcttagcaaattgtggttgagatcctgattttgtgcctactatcccaatttcccaaatagatacaataaataactgaataatcagtgtcaccacatgcctcagatcaatccacttctaaatcaagttttactacaatggatgcatttcgtgatagtatagcaacgactctcacttgtgtggaattagcaccaaatatttatgctatattttgcaacatctatttgtagtgacttgtgtgaagagtgaagacaatgattatgtaatatgttactagttta

SEQ ID NO: 137082 - DNA, 299 bp, Zea mays
  Clone ID: MRT4577_56495C.1
tttgagcttcttgccctttgtgcaagcgcaacaaaagcctaaaatatgccacaacgctcactggctgctaccaccattatgccacagttactacatacaactagttgaatgggctgaaaacacccagctgtgcaaacgtacaggctacaagaagcgctcccgatgagcgtttaacaaacaccagttgcccaagtacaacaacaatccttgtctcatctaaccatacaaaccaattgaaacgcgatcatgaacaacaatttctaccagcactaaaccaaacatgtgcagtgaaccctgaa

SEQ ID NO: 137083 - DNA, 374 bp, Zea mays
  Clone ID: MRT4577_56496C.1
aaaccgaatacaatttgaaccagttgggttttgtggtttaccggggactaaattcattttggggattggggcatatgcaaatatgcttgtttggtagagaccaccccctagctctcattacattgattcaaccaatcaaactaaagactcacgaggcgcgcgggcagcaaaaattaaaatatagccgaggtggtatgtatggggaatctgaataaaccacctttttatgctgatgtccaaacaactatagcgctggtgagaatggttcatccccaggcatccttttttttttttgacacaggccccccgcgcggaaagcgaaacaacttgggcgcgccttttcctttagctaaccttttgggggtgaacccctt

SEQ ID NO: 137084 - DNA, 676 bp, Zea mays
  Clone ID: MRT4577_56497C.1
aaactaagaactgacatcaactaaaagtttcctgccaaaagtaagtgctggcatggatagtttaatctcaacatttatatgagtgagtgaaagaaagaagttagcttacatagcatttggtttaaaaacaaatgaccttaaattctaattagtattcttcatatttcagataattcataaaaagattctagaatctacaaaataaaaaggagcttcctcagaatttatttcatcaagtatcacttacaaatccctaacaagttccatggaactatcggctcccctaccaagaaggttcggaccaaatcttcttcctagacaatcgaatgctgagttacgtattgcctcaaaccagcagcagtaatatttcattttaagactttatatttttacttaagtatatagctgaaattctgcacatcaaggtgtaccaatctcactacgattaaggcttctgtaagcaaacacagctggttccactggtcacatgatggatggaagctggaggagaacataaaaaggacagtctctgagatctgccgtgggcatttccatcatttcttttttagtataatcacaagcatgtggaaggaaggtccgctgtagtgatagtcaccagatcgtgggttggaaacagtctctccacatttgcaccacatttgcagggaaaaactta

SEQ ID NO: 137085 - DNA, 1103 bp, Zea mays
  Clone ID: MRT4577_56498C.1
agcgcgcaatgcgcatcatcgatccgtgttaagcttgagcagtggagtaatcttttacataccgaatgatgggtggcttttttttttttttttttggtggtgactgatcgtagtttaacatatcaatactattgcttcgacgcagagatgtacttacactgcataagctcttaacacatacagttgcacatctttattgctagctaacgcaaggctactttaccctacgttaaggcacacaagtcacttcaggctaattaaggacgcacgacgatcttggtgttcttcgtcatgtcggtggtggcgaggccgccgcccttgccggcgagcgggaagtagaaggggtagatctcgtagcgcaccctgcagctgctgtagttgatctggcagccctgctgcgcgccgcagtagtcgccgaacctggacagcgccgtggacaggcactgcgcgcaggtcagcggcgcgaggtcccgcgtgcactgcgccagcccgtagatggacacgaacggcgtgtactgctccttgtcccgcccgagccccgcgctgcccgccgccgacgcctgcgccgtcgccttgcccatcaccttccccaccgccttctcgaacgccttcgggttgtccatggcctgcacgttcaccaggatcacgcccgcgtccgtgtccgcctgcccgaagaagttggcgttctcgtaccgcatgaagcagtagtcgtaccatatcctcgcgtcggaactgtagctgcaggtgctggggagctgcttggcggcgtcggcaaggcaggacgcgcagtcgctggcggagacgtcgccgcggcattgcgcgaggccgtagatgatgctgttgcccttgccggcggtggacgtggcgtagcccccggtggaggaggccgaggcgacgaggtcggcgaggacggagttgatgttggccacggccttgctgctgccagcgtagctgcttcctgagcagtagctgccgatggagtccgcggccatgcccagcgggagcagcagagccaaggaaacaacaagcagcatgcagcagcgcatcctgctggactccatggcagtgtagggtatgattgaatcaagctctagagttcccgg

SEQ ID NO: 137086 - DNA, 415 bp, Zea mays
  Clone ID: MRT4577_56499C.1
ggggggaaaaaaggcccccctttttttctaaccctggggggggaaaaacaccacccaggggggccatccttacagccgaagggggggggggggggaaaaaaaaaaaaagggtcgcctttggaaaaaaaacccccccggggaaaaaaaaggtagggctacaaacgggggagctttccctatatatttagaaataaccacccggaaaccgggttttgaacctgggggggggggaaaagggggcccaggctatgttgcttggggaaaccccgggttccaggggcgggccccggggacagcctaaaaagctcacggggggggaaaaaaaagggcaaaaacgccaggccgccgtccacaaattttgacatgttcggggccgggggggatctcctaataattgggcccgcgcttttgccgg

SEQ ID NO: 137087 - DNA, 650 bp, Zea mays
  Clone ID: MRT4577_5649C.1
gccggccgggcctggaacgattcaacttaaatcatctttctcttctcttcttctgcaccaacgaatatcacgacaacgattgtaacctctcaaccatggacgcatctgtgctccgatggtgacggtgtccccgaggcggtcgacttttggaacagaattgctaaggggtaccctgagcatgggtggatgagctgcctctaccacgctcagtggatgaagtgcgtctacgccgctctgcgcctgaacgctctcatggagtctgtggtacacactgtagactttcaacagcacagtccttcaactacgacacatgcaccgatgacagccagtggccatgagcctgctcacggcgacgtccgtgaaccatcgacaaggcccacacctcatgtgttcgcatgctctggtccgccgactatgtcttattaagattcacggtaattacaaaaacatgactaaagctgtgttctcatgcacacatactgccatgtgcttgaccagtagtgacagtgtcaactcctctctgcttctttctgatagcctgcagcgccgaagccattagaacacatgacgcttttgtcttcctgacttctttgtaatttccatgtcagcatcaagccaacagatagaatatagctatagagatgtttttc

SEQ ID NO: 137088 - DNA, 326 bp, Zea mays
  Clone ID: MRT4577_564C.1
gtcattgatgagaatgtagatgaatcggccatgatgccatatgagatggctctgtaaggtctcttcaacaaaacgctttattggctcgccgatctgaatgctactaatcaatgctcagaacgccattgaactaaatgttacctgtgaagaagctccccagatggaggaccatgatctcactgcacaagctaatgacgtgaggattgccgactatgaatatgatgattatgatgaacactctctatatgaacacaaatgagtcaataccatccgtgctggacgtgctcaggaacaccggctgcattgtgacgactgctgacaatgtc

SEQ ID NO: 137089 - DNA, 135 bp, Zea mays
  Clone ID: MRT4577_56500C.1
ttcccgggccgaccagctcactatttgactccctttctattatatccaaccttatttttttctttcattctacgtcaaatcttttggggagtttcacctaaattcaaggcactgtccatcttcttacaacattta

SEQ ID NO: 137090 - DNA, 371 bp, Zea mays
  Clone ID: MRT4577_56501C.1
ggcaacgtcaaatcggtttggttttacctcggcaaataacatacaacccttgaggtatattctgtcaacttacaaagaaagaatgtggtatcggcagctatgtatgtaattgatcatttcaatctaagtgcatcactgtcctttgctttgacctcgcaatatgtctccaaatccgctcctcattatgcgaccaaacctcgtgctctctggctgagcctgcaggttttgctgacagatgatgcaatcccaagatgcgcccccattaccttgctaatgctttccagcgtaccccctgacctttcccggcttatgatttctaaagcctccttgtgcgcagggtctagagcatccagatcttttaacagattttg

SEQ ID NO: 137091 - DNA, 592 bp, Zea mays
  Clone ID: MRT4577_56502C.1
ccggccgggggtgcccaaccccaactgggttttccatcatggccgccaccggcgaccaactcgccgcggtgcgcgtacgcggccgagcctccgtccgcgtcaacccctcctttttctctcccaataccgcctcatccacctcatctccctcttcggcgcatccaatgttcggcgtcttctgtaagggacagcaaatgttgatcgccgacgagatggtaggccttgccgacggagaccccggaacgccggtgctagcggtggccgtgtgcgggccgcagggagatgttgtggtcggggggcacaaacccgcgtcagtcatttgtgagcgggcacgacggcggcggcggcgatgtcggacaggtgctgctggaggcgatggcgctcgtggagggcctccgtaccgcgatcaggatgggcatcaccagcgtcaaggccttcaccgatcacaggctgctgtacaactgtgtacgtcactgtttgttttaaacgaaatgcaggatcgatcgaagatcactgcgcacttgtagagagcctgatattgatcgtattttattttgttttcgtaaaaaaaaaaaaaaaaaaatttgcggcc

SEQ ID NO: 137092 - DNA, 335 bp, Zea mays
  Clone ID: MRT4577_56503C.1
cggcagttcgacccagagcctccgcgagcaaccaaactcttaggtcgctacatcctgtgcacggggtagccaagcccagctttggcgatcgtgctcgcttagcttgcgtccgttaatacccgccgtagcacagcgagagctacctgctcctctcatgtgcgagaagcggtttcaactgctcgagcctaattagagcgaggtctctgatacaaggtcggcagaacagatcgatggtgagaggactactacgatagcccacgcgaccgtgaccaggggaggatgtgaagcatggctagccccatagcggacccggccaagagcagcggttgggccta

SEQ ID NO: 137093 - DNA, 3546 bp, Zea mays
  unsure (1)..(3546): unsure at all n locations
  Clone ID: MRT4577_56504C.1
aattcggcacgaggcaaaaacaaaaagaatcatctcctgatgattcaaatgggctccttttgggtgcttctatacgcgaaggatatactaggcaacaagaaaattgggatgtgaaaatttcagcattaggccctctaaaggataatgaacgaaaagatcttaattgcgctgtaaaagaatacttgcttttggcagggtatcgacttgctgttatgacattcattgaggaggttcctgatcaagaccttgatgtttggccaaacagttcagcttgtgttcctgatgcccttcgtcgttattactatcagtatctttcttctactgcagaggctgcagaggaaaaaatatccatacttcaggaaaatgaaacattactcaaggacaatgaacgactcaatgctgaaaatgattccttgatgaagagcagggaaggagctaatagtcaggttgccgctttaaggaagtctttggaagctgcacacaaggatataaaagacaaggaaaaaatgattcaagacttgaggcagtcactggatgtccagaggaaggagctgaatgactgcagagctgaaatcacagccctgaagatgtacatcgaagggactcaatcaatcaaacaattgtttgttggaactagtgatggtgtaaagtcgcattcctttgctaattctgtgggagcatcatcattgaataatgaagatgaagattcaaaaggatctgaagccataacaaataagctagcatcagcagtaaatattactgatgatacgcagaaagatcgccaagttctagaaagtagcgctgaaggttcctcagtttcagaaactccagtgtctttcacagctgttgagaatgacagctatggtacatcaaaagaagataaatctgtgtcaaatatctcatcgaataatgtatgttttcagagtaatctgcatggagcttccatgactggtaaaagccaggggagttcagatggcatatccatgtatttatctattgagaaactagagagcccaagtaaacaaaaatcttcagataagattgctttggagactataaagatagtttcagatgcacttccaaagattgttccttatgtgctcataaaccatcgtgaggaacttcttccattgatcatatgtgctatagaaaagcatccagatagcgatgtacgggattccttgactcatacattgtttaacctgataaaacggcctgatggagaacagagacgcatcataatggatgcttgtgtagaattagcaaagagcgttggtgagatgaggacagaaactgagttacttccacaatgttgggagcagataaaccaccaatatgaggagcgcagattgcttgttgctcagtcgtgcggtgaacttgccgtttatgtccgtccagagatacgagattccctcattttatccattgtgcaacaacttgtcgaagatgctgcaacagttgtaagggaagctgcaacacataacctggcattgcttcttcctatgtttccaaatctggacaaatattataaggttgaggagctaatgttccaattggtctgtgacccgtctggggcggttgtggaagttgcactcaaggaacttgttcctgctgtagtaagatggggagataaattggatcagatatcaagagtactattggctcatatcctggcatctgctcagcgatgtccacctatttcaggtgttgaaggtacaatagactctcatcttcgtgttttaggagaacaagagcgctggaatattggtgtccttcttcggatgttgactgagttgcttccatttattcatcagaaagctatacaaacttgcccctttgcatcagctgatccaacaagctctacaccagagaacttctcagcatcctgcctaaaatcatatgcaacaggtgactctgagtggtcagcatttgagtggatgcacactgattgcctgccagatttgatcaagcttgcctgcttgttgcctgtgaaagaagataacttaagaaccatcatcacaaagtacctcttggaagtatctggactctacggtaaagattatctggagcacattatgctacctgtatttcttgtagctgctggtgacattgatagtggcgattttacctattttcctctatcaatccagccaaaagtccgtggcttgcgtccgaaaacttcaactgctgaaaaacttgccatcatgtgtgtcttcccattattgttatctggtattttgggttctccttccagtcgtcaacagttggaagagtatctgagaaaagtacttatccaaaacaccaaggatggttcattttctatgcatcatactactgagatcattaacgcagttcggtttctttgcttatttgtggagcaccatagtgtcatctttaacattttgtgggagatggttgcgagctcggataccagcctgaaaataaatgctgcggctctactgagagcacttgtaccctacacggatgtgaaaatagcatcaactcatattttgccagcacttgttacccttggctctgatcaaaacttgaaagtaaaatatgccagtatagatgcatttggagctgttgctcagcatttcaaaaatgacatggttgttgacaaaatacgcattcaaatggatgcttttcttgaagatggatcacatgaagcttctgtttctgttattcgtgcacttgcagtagctgtacctcattcaacagataggctacgtgaatatcttttaaccaagatatttaagatgacatgcatcacacctgtcggcaatgatattgaacggcgtcgtgaaagagcaaatgtactctgtgaagcgctccgggctctggatgctacagattcttccttgctatgggtatacgtgatttgcttctgccatcaatacaaaatcttgttaaaagatctggatgcttctagaccctgcgcacaaggaggctttagaaatcataagccgggaaaggtcagggggtacgctggaaagcattagcaaggtaatgggggcgcatcttgggattgcatcatctgtcagcagtttctttggtgagaacagtctcctcacaaagaaagaaggtggcgaggaacatgatcctgctggccccaccgctcctgagcaaaacctgcaggctcagccagagagcacgaggtttggtcgcataatgaggagcggatttggagacatattgcgaggtcaaagcaaaggacagtgatgcacttagattgaaatgatcaattacatacatagctgccgataccacattctttctttgtaagttgacagaatatacctcaagggttgtatgttatttgccgaggtaaaaaaaaaacgatttgacgttgccaatctagcatcaaacttcctgtatgtaagttgcctgtagttagctgcccatttataagatgctaataattgtgtctttgtttcatttgtttttataaataaaatatataactagatatgagacactttgcccgaaaaaaaaaaaaaaaaaaaaaaaaaaaaaaaaaaagnactctgcgntgntaccactgct

SEQ ID NO: 137094 - DNA, 546 bp, Zea mays
  Clone ID: MRT4577_56506C.1
ggggggtgttgttttttttttatttttttttttttttttttttttttttttttttttttttttttttttttttttttttttttttttatcccgggacaaagccgattaagggataccctaagggggtacaaattaaaccaaaagggggggggggggggggggccaaaagcaggggggagagtatgaaatggaaagctaaaaaaaacagtttgggggggggacacaaacacagacacattcataaaaacaatgcatgcaactgatgcaaaagaaacctcaacaacaagggcgtttgttttatttttacagaaccaagcaagcattctctctcgttttggttttggggggaagaaacctcaacaagggctcaattaaagagttgttgttgtcaacggcgtgcactgggtaagacgggtccggctcccaaacgacggggggggggggcacaaccccaacgggatccactttgccgtcgttcttggggaaaaagaggccctatcccccttccttcctgggggaaaggatgttcacctgccccggggcctc

SEQ ID NO: 137095 - DNA, 333 bp, Zea mays
  unsure (1)..(333): unsure at all n locations
  Clone ID: MRT4577_56507C.1
gccgttaatttttgcagttcaacctttaattaatcctaaggctctaacctgggggggttacttagccggccaattcctccnntaacccataacccttttaatcgcacccaatggcaattgccaaggtcaaaaccccacccgtcttgccgcccaagaaaccccccttgttgaaaaccccgccgccgcccgtcttccccaagaattttgccccccccaagcccaagcccaagcccaagcttaagccttttgttcttgttaaccccaagaagtttcccccggccaacaagaaggaaccccccaaccccaaggcccttgttcttgttgtgcccaaga

SEQ ID NO: 137096 - DNA, 442 bp, Zea mays
  Clone ID: MRT4577_56508C.1
atacaaggggattaaatcaccattgaacacaagtttatcacaagcatcagatcaatccgattatacaaggcatatgtttccattttgtaaattaagacgcataaaatacaggtcgatggtgctaaccacaatcgaccataaccatacttaaaactgacttaactagttttctaagccatttcatcggattaacttgtacaacgtatgagttaaatacgatatttaatcgttcgctctagcaggtgtacctcacacctatattttaccacacctcgcgactatttcataattatgacggtaaccaagcaccacgcaattacgacctttatccatatcaactagcaatccgaataaacgacgatgatccttgttcaggcctttcgccgagcacttgggggcatcgacctggagcttgtttcttcacatactcttggaatctttc

SEQ ID NO: 137097 - DNA, 445 bp, Zea mays
  Clone ID: MRT4577_56509C.1
atgtggggttttttttttttttggggtttttttttttctttttttttttcttttttgggaaaacaaaaagggttaaacccaggaaggttaccttcaagccgggggaacaaaagttttccgggtttttattaaaggaaacccctcccccaaagaaaatcccttaataaccccaaagggggtttagggaaacacaccaaccgggggggcctcttccaacaaatttagggaaaaccggcccttgcagatctagccgcccaagttggtgggacaattttggaaagccttaaaaggggtgcgggaagcctcagctttccccactgggggggccggggcaaaaacaaaaatttttggggcaccaggtctaagcctaaagggccgggggcccaaaacccttataacaagcctggttgccaatggatttcccgggccaaaaccccttccttgg

SEQ ID NO: 137098 - DNA, 309 bp, Zea mays
  Clone ID: MRT4577_5650C.1
agcagatcaaacaagtagcgtcagctcgacatttatttgtgagagtgatccggcccttagaggagatggttaaaatcgccgcagccgaccaggcggtggtctgtctatgctcagaggccctggtggccgcggccttttgccaaggcgaggtcgagcggcacaggctcagggacctgcattgcttgcaggaggtccaggaaagcccgctcgacgcgtgcttccaggtccttgaccggcaaataaccggcggcggcgtcgtcagaccgttccggtgggacaccggtctccggatgcggtgctgccagcagt

SEQ ID NO: 137099 - DNA, 197 bp, Zea mays
  Clone ID: MRT4577_56510C.1
gcgggaacgattttattactccgcccgcgtagatgtgagcttcgacgaagcccggccgcgcccatggcggcaaggggctgagcaaaggccgcgccaacctgcagcgcaaggtgcttcacgacttcatgcaggggatgacgaaaccggcgacccgtaggctgtccaagtagggcggtagaaagcgcatttataatctc

SEQ ID NO: 137100 - DNA, 746 bp, Zea mays
  Clone ID: MRT4577_56511C.1
gcaggttatcgtctccccgatgaccgaaacggttactccccctagtcgcaccagtcaccaccaccaccagtccaccaccagcgccgagcagttagccagttgccactactccccgcatcgctaattgctctaggacgtgtctcgttaatcctccccattcctcataccgcccgatcctacctccccaaccgccaatcgcagccatgtcctcttcctccacctcctcctgccacggcagcgggaaccctagcccccccgcagcggcgggggccgtgtcggtggcggcggcggcggcgggccccgcggcgtggcccaggcggcagtgccgggacgtgttctggctggtggtcttcctcctccacctgctcgtcttcggcgccgcgctcgcgctcttcggcctcaaccgcttccaccaggccgaccgcttcaacatcggccgctacgccaacctcaccgcggagccctggggcacccccgcaggcccgccggaccccgcgcccgcgccgccgccgccctccgtctaccgctccgaggacccctccgtgccgccgtccgagctcaccgagacgtactggaagtactacggcgctgcgggggccgtcggggccgcgctcgcgtgcgcgtggctggcggcggcggcctggaggaaggatggcggcaaggtggccatgcggaccgccgtgcactgcctcacggggtacctcgcggtcgtcagcgtcctgtgcttctgggggaagcacttcttc

SEQ ID NO: 137101 - DNA, 257 bp, Zea mays
  Clone ID: MRT4577_56512C.1
tggtctcgtgcgtgtgcgagcaagaggccatgtggcacatgtgagggagaaaacggcagctcccaacgatgaccacagcatggtgagcaggagctacacaagcagaatagggtcaccagaaccgaaccgtaccagacagatctattgttggcggaaatgaccgcaaacgctacaaaggctgactccagggcggataatgagcaagatctggtcataactgacgtggttacagaggaagaaaacaaaccacagagacc

SEQ ID NO: 137102 - DNA, 1224 bp, Zea mays
  Clone ID: MRT4577_56513C.1
attgggacctcgagccggccgggaatctgtgcagagaaatgggccgtaccgtacgtgccttgcgcccttgcccatccaagtccaacctccctaaactactcctgcgtgctgcctgagcgagtgagcggcgatggaatccttgggtgtgctgctcctgcacccgctcgacacatacctggagcaagaactggatcgccgctgccgcctcctgcgcctctgggaggtgccgcatgaccgccgtggagaattcctccgtgcccacgcatcatcgatccgcgccgtggtcattggcggcggctcgggcttcggcggcaacccggctctcatcgacgacctcccgcggctcgagatcatcgcgtgctacgccgtcggctacgactgcgtggaccttaccagatgccgcgagcgcggggtccgggtcaccaacacccccgacgtgctcaccgacgacgtcgcggaccttgccgtgggactcgccatcgccgctctccgcaggatcccgcacgccgacagctacgtccgcgccgggctgtggaaggccaatgatggccactacggtctcaccactcggttcagtggcaaaagggtcggcatcattgggctgggcaggatagggctttccattgccaagcgagtggaaggcttcggttgcccggtctgctactaccagagaacaaggcaggatgcgtaccccaactacatctatctcccgacggtgctccagctcgcagcaaacagcgatgtcctcgtggtggcctgctcgctgaacgagcagagccgcggcatcgtgagccgcgaggtgatcgaggcgctcggccccacgggcgtgctcgtcaacgttgggcgcggcgcgcacgtcgacgagcccgagctcgtcgcggcgctcgccgatggccgcctcggcggcgcggggctggacgtgttccaggccgagccggacgtgccgcaggcgctcatggcgctcgacaacgtcgtcctggcaccgcacatgggcagcgggacgcatgagacccgcaaggccatggcggacctggtgctcgccaatctggaggcgcacgctctcaacatgccgctgctcactccggttgtctgacactgacaataattacttttaagccgagcttccgcggcatgtatggaatttggtcacttgttttcaaatgctgtgaattaataacaaagcaacacaattgttaagtatcaagaaactttgccttccaaagc

SEQ ID NO: 137103 - DNA, 174 bp, Zea mays
  unsure (1)..(174): unsure at all n locations
  Clone ID: MRT4577_56514C.1
aaaaaaaaggtcgaacccaacaanaacagaaaggggaagccaacatatcaaagctcttattcgcgtccgcggagctattttttctgagacatatcacaacaggacctaaagacaatgcagctttcagtctttgaattactatccccaacaaaactcgatttttgcattcattca

SEQ ID NO: 137104 - DNA, 322 bp, Zea mays
  Clone ID: MRT4577_56515C.1
cctgaaacacatgaacattggttcttatttatagccaatttttgtacaactttaagcgttcctttttcaaaagtcccccaagggcctgggccacccaaaaaaacccaaagaaagaatttccccttggggataaattggccccccccgttttaaaaataatccacatacaccgttttttgtttgaaaaggcccccaaacagggctttcacttttggtttgggatccgggttttttcccttttgggctgttgggttaaaaaaaaaaatcccgggggccaccttttttttttttttctggccccccacaaggggttttttggcct

SEQ ID NO: 137105 - DNA, 288 bp, Zea mays
  unsure (1)..(288): unsure at all n locations
  Clone ID: MRT4577_56516C.1
agccggagagaaacaggcgaggcagaaaccacccagggacgaacccggggacggcagcaccggngangaaggcagacgcgggcgaggacaccgaggccgacanccgagggccaaagcaggcgaaggngacccgagagaagcggccngggcacgaacacaacaagaaggccggagcgaggaangcacggcgcccggcaaccgcngccaaggcaaacggcccccncaaccccaaccccgacggggaccacnaagncgacaacccgcaagcnngccgcgaagggaggagcg

SEQ ID NO: 137106 - DNA, 564 bp, Zea mays
  Clone ID: MRT4577_56517C.1
gagcatgccactgtggattctgaggttcagcaagtagaagtagctgagcaggagctcattgaaggcaagttgtgcccttgataacttactttttccagccatgttcttattaattttaatgatctgcataggttaattttgatgggaccctttaggttaccccagttttggttatctttataccttgttcacccctgaaatatttttgggtagtacttgctattgctttatgtggattgggtatggagatacactattcatgattattctgttattatcttgttattattactgttcatgttaagatcattaaattaatgggaacatggagcgaccacccgggaaaatagtgctaccacaagggtttaatgggacgcccttggctgattaactaggaaagctagtggaggtcttccttacccgaaaggggcaagggcagtaggggagtggtcagtgtagggaggtccttgggttgattttgctgcgatggcggtcaggcaagaagcctgcactggagcttcctataaactgtagcgggatttctgaagctagtggaactttgta

SEQ ID NO: 137107 - DNA, 263 bp, Zea mays
  Clone ID: MRT4577_56518C.1
aggaaacctttgctagcccccccttaaaaatttgctttggggctatataaaacaccccctaaatggggggggcaaaccaattttgggcaagcttaaacaaagaagattatgcttatctactggggggttctattcccccccttttcttggggggggggcaaacggatcaacccatgttttgtttttccttgaaacccgggcccaacgcttttggaaaacacaaaactcccatcgggattttctccggatctttgttcgcaaat

SEQ ID NO: 137108 - DNA, 438 bp, Zea mays
  Clone ID: MRT4577_56519C.1
gcacgcctacgtcggctcggaattcggctcgagccagcacagctctacccattttaactttttcttcaacacacacaaccttcacagggatcgggtcgatttgagagaaagccatcccctcttccaacattcggggcagctgcagggcatcccgctgttgaccatggacctgaccatggaccggatcctgctcacataatgtgccgatgcggaccgcgaagcgtttaagtccttacctgtgaccgaatcattgactctctacggcgtgccgaaagcacattcttagatctggaggctaatcattgcccactgcacataagggtggttgacgaccgaccattccgtggcgtacagcggggtccacgccagtgagctcggagcgctacagacatgcccgcacggatccaagcttgtctatccggcgctggcctgcctgat

SEQ ID NO: 137109 - DNA, 652 bp, Zea mays
  unsure (1)..(652): unsure at all n locations
  Clone ID: MRT4577_5651C.1
cacacgaatacctccttctaaaaaaacaccagccatatattcctgggtcttgggcggccgctctccgtcgcgctaactccgccgccgccgcagtgctgccagtcatcttcccttcgcaggactgattctggcgcgccggtgtgacggagaggcgaggcggcacagggcagggtgtggattgaatctggcgccatcgtccgtccccgattcgccctcaccgcaggcagggcagggcggcaggaccatcatataataaattcaaggctcgatctttctgccgaaactcatcaaggacgcttgattggtgaacacagaggccgagctgcagcaggaggaggattagatagattactctgttattactattaggtcttctgtcaaatcgcagtggggatgtctaataagcgccggggatatgccggcgacggcggtgaaaagaggtcgcggcggttcaagcatctacctcgtgttggatgactggaccaaggggtacagcatccacaagatccaagccgacagcttcgactctgactctgactctggctctgatgaccagcacagcggcgctgcccggcacctcccggagcctccgacccagcggntagagtgcccggttggcactgtaccccatcccggcatgtcgttctctgcc

SEQ ID NO: 137110 - DNA, 613 bp, Zea mays
  Clone ID: MRT4577_56520C.1
ggccgctttttttttttttttttttttttttttttttttttttttttttttttttttttttttttttttttttttttttttttttttttcaacgaaaaaaaacacaaaaaatatattgaattttttgagaaaacccacgccggtttgggggccccataagacaggccatataaaagggaactaaaaaaagggcccccccaacggggggtggtggcccccaaagggcagggtttaaaaaaaagaaaggggtttaaggaacaaatggtggtgttggaggaaaggcacccaccaaggggtaaccccccggttgggggtaaaaaaacggtggacgttggtggagggccccaccaaaactcgccaaaacagagtgggtaaaaggaaatgcttcttgcaaggaggcaggagggtttgcccaaagtccacaaaaaaaagccggaacaaatggtggcaaaaacggtggtggaaaaaaccggggttcaccatatctaggtgccttgcccatagcgggggctgtaaaaaaaaaaatttgttcttgttttcaactaccaataggcttacccatggttttgatacaaacccctgccaaaaactgtagaaactggggttgaccatg

SEQ ID NO: 137111 - DNA, 345 bp, Zea mays
  Clone ID: MRT4577_56521C.1
gccggccggtccgggagtttcttccttccttcctcggtctaaagaagcaagcagccatggacggcgacgccgcgccgcctccgcctccgcctccgcctccgccgccggcggccgcaccgcgcggatcaaccgcgcggcgctccgcgtcgggatcctcgcgtccgccgtggggtccgtcgccggatgcggcttcctgatgatggccctcgtcaacgtggtgcaggtgaagctcgggcgactcgggtgcggcgccggcggggccgccgactgggccgccgtcgtgtcgctcgtcaccctcgtcccttccggcatgctcatgtacatcgccaccgtcttctacgcctt

SEQ ID NO: 137112 - DNA, 336 bp, Zea mays
  Clone ID: MRT4577_56522C.1
ggagaaaacgttttttttcccaaagtcatactcattaccattaaaatcctgggattttaggacacagtttttttacagcctaaaaaacaaaaggggggcgaatcgacccaaaacacttgcatttgcaaacgggccgggaatataaagcttccattcagggcctccatataaaccccaacattggggcccaaaagcagcgctaacaggaagcaatttacacattttggggggggagtacaaacattacatttacgggtaacatacaggtttaccggacctcccccttacttgcacaggaaaaaagggaatacctttggcagctaaccggacccgggg

SEQ ID NO: 137113 - DNA, 398 bp, Zea mays
  Clone ID: MRT4577_56523C.1
cctttgctttgattaccaagggaaagatagagcctagggtccacctttgtgccaatctgggacatgccagttttacctcaaagccaccgcgtgccaaaatcacgcaggataggctcccacatgacggatcaccagtacaaaaaattgtttacaggcttgtttaaagggacaccgtgcaacccaaatatggcaaggcacaacaaaattctgcagcaagccctgtgcttgaacagttcgttggctggctgccgcttgtggacaacagtctcttgcatagcaaggaatctgccagctcttgaggaaggctccctctggtggggccttatgaacaaccattgctatctcggccagctggctgggagccgtgttaggagcactcttaagactgtcctttgcgt

SEQ ID NO: 137114 - DNA, 740 bp, Zea mays
  unsure (1)..(740): unsure at all n locations
  Clone ID: MRT4577_56524C.1
ttgggtacctcgaggccggccggagtttacctccttatcctcgacacatacgtcctactttacttgctctctgttgactttgtttgataccccaattcgttcaagatggctcccaagatcgcgattgtgtactactccatgtacggccacatcaagaagatggccgatgctgagttgaagggtatccaagaggctggcggtgatgccaagctcttccaagtcgccgagaccctccctcaagaagtcctcgacaagatgtacgcgcccgccaaggactcgtcggtccccgtcctcgaggacccagccgtcctcgaagaattcgacggcatcctcttcggtatccccacccgttacggcaacttccccgcacaattcaagaccttctgggacaagacgggcaagcaatggcaacaaggcgccttctggggaaagtacgccggtgtcttcgtttcgacgggcaccctgggcggtggccaggagacgactgccattaccagcatgagcacgcttgtgcaccacggtttcatctacgttcccctcggctacaagactgcgtttagcatgttggccaacttggacgaggtccacggtggaagcccatggggtgctggtaccttctctgctgncgatgngtcgaggcagcccagtgagcttgagctgaacattgcgcaggctcagggtaaggcttttctacgagctgnntgccaggcgcatcagtgactagatgatggaaagactgc

SEQ ID NO: 137115 - DNA, 133 bp, Zea mays
  Clone ID: MRT4577_56525C.1
ccaaaaccgccattcttttctatccttgatatacccgctctccagagctcgctcgtatctccactctgcacgaacagaacggtaaccaacggcgacaggagctaaaactcccacaggaggaccaaaaccgacg

SEQ ID NO: 137116 - DNA, 533 bp, Zea mays
  Clone ID: MRT4577_56526C.1
ggggtgtgggggtttttttttttttttttttttttttttttttttttttttttttttttttttttttttttttttttttttttttcaaaaaaggcctttcttatttcggggaacccccaaccctcaaacaaaaaactttattatggggcggggggggggggaattttaaaaggggccccccccaatgaggggttgggggaaaaaccctgctgggtttgccaaaccaagggggttgaagggcaccaattgttccagttgaaaaaggggcccaccgttaggcccaccggcctggaaaaacggcaacaactggggttgtataaaaaagggagcagggcccaccccacctagctggctaaagggaaaaagttgttgctgctgaaaaaaaccaggaaagtccaatgcccccagttggttaaagggaaaaaattgcggggggtaggcaccaggaacctgcctaaagggaagttgttgttgttccaaaaaaaaaccaaagttcaatgcacctagttggttaaagggaaaaaactgctgtt

SEQ ID NO: 137117 - DNA, 512 bp, Zea mays
  Clone ID: MRT4577_56527C.1
caaaaaaggcccttttttatttcggggaacccccaaccttcaaacaaaaaactttattatggacctatacctcaaaaaaaatctaaaaggggccccccccaaggaggggttgtgggaaaaaccctgcggggtttgccaaaccaggtgggttgaagggcaccaattgttgcagttgaaaaaggggcccaccgttaggcccaccgggctggaaaaacggcaccaccgggggttgtatcaaaaaggtaccagggcccaccccacctacctggctgaagggaaaaagttgttgctgctgaaaaaaaccgggaaagtccaaggctcccagttggttaaaggaaaaaaattgctgggggtaggcaccaggaacctggctaaagggaaattgttgttgttgcaaaaaaaaaccaaagttcaaggcccctagttggttgaagggaaaaaactgctgttgctaaaagtagccaccagggtttgctaccacaagttgttgaagttgttgccccctgatgttt

SEQ ID NO: 137118 - DNA, 253 bp, Zea mays
  Clone ID: MRT4577_56528C.1
cccatggtcaggccggacgcgccgccgctcgacctgggcttcgtcgccaccaggggcttgcacgccgccgtcgccgcgaggccctggctcaactcgctcctcgccgcgctcaacacgcttctccatggtccccggctcagcacagactgacgctgacgctgacactgacagccaccccacccgctcgtacgcacgcgcaggtcttcgtcgcgatgcaggcggcgtacatcctgtgggccatcctcggcgagca

SEQ ID NO: 137119 - DNA, 465 bp, Zea mays
  Clone ID: MRT4577_56529C.1
ggaaaaccataacgttaactcaatatatcaaaagccaaaaacaaagggcttccagtaaaacatcggtctacaaactcccatcacctcacatgaatgagaattaagaaaaccaaaaaaaaaaaaaggttccaagttttaaaaaattttattcgaaaacgacaaattcaaaccataaaaggggatgaacagatgattttccactccctatcattcgaaatctgctttttaacttaggcctttgacatgtggacgatcaagtcgaccacacgggaactgtaaccccattcgttgtcgtaccatgacaccaatttcacaaacttgtcgctcaatgcaattccagccttggcgtcaaaaatgctcgacctgtttgcgccaacaaagtcagttgagacaccatcatcctcggggtatccaaggattcccttgagtttgcctctcgaatcctccttgatagcccttttgatt

SEQ ID NO: 137120 - DNA, 716 bp, Zea mays
  unsure (1)..(716): unsure at all n locations
  Clone ID: MRT4577_5652C.1
gaggctgnccgggaaaaaaaaaaaaaaaaaaaaaaaaaaaaaaaaaaaaaaaaaaaaaaaaaattcattaccggaagagaaaagaaggagacgccgaaaattcgaaagggaggggaaagcaaagctgatggcggaggcccaggggaaagcaaagcaaatggcggaggccccgagcaagatcgaatccatgaggaggtgggtcgtcgagcacaagctccgagccgtaggttgcctctggctaggtgggatcagcagttcgatcgcctacaactggtcgcggcccaatatgaagcctagcgtcaagatcatccacgcaaggtttgtttgatttcccatttagtttcacgaagtttatgagccttaatcgttatagtgtaggcagtcttgtttactgtagtcaagataccacattcgatttttttcttgatgaagatgcagttaactagctggtttgacgaaaatgcaattaactagctggttttgaccattttagcaaattattgattctaaatgctacaactacaacagaaaaagtttttttttcatgtgtgagtgtgaatggtgtttccttaaaagcctaggagctaaatgtgcattacgaataaatccagccaacttatattttatctatatctatatgaagcctgggcagacttcccttatggccttattcgagtntatgggaatttatgtaaggcaataacttagtatgataa

SEQ ID NO: 137121 - DNA, 540 bp, Zea mays
  Clone ID: MRT4577_56530C.1
gggttgcagaaacttccaacaggtaaaccatgtaagggctgaagaacaccttataaggttgcttgtttttccgtttgggttccacaaaaacccggaggacctggccttccatgaaataaacataagttccccgggtggcaaaggggtaatttgggtcaaaaagggtaatccggtttacttaagttaaacctaaaataaccaattaaaaacctttaacgggggtggttttgccagggggggcaaaaaggcccaaacggaaggattccaaaaaggccccaactccacaaaaaatggttgggggccctcctggttaaaaaaaaaacaaacaaaggccgggttcggcccacctccaaataccagttgtaatttttttaaccgggtcaacttttatgtcccgaaaccataacggaccaaatttaacccccagaaccataaatgggaaaaaaaaccttttccacgtccccgggtaaaagccaaaaaaaatgggtccgtccaaaaaaccacctttaaaatccatgggggttttaaccacccggggcc

SEQ ID NO: 137122 - DNA, 207 bp, Zea mays
  Clone ID: MRT4577_56531C.1
cccacgcgtccgaaaaatataaaaaaaaataatatatatccaaataaaaaaaaaaaaaaaaggaggaatttattaaaaaaaaaagggaaaacaaaaaaaaggacgacctttctgatgcatccttgcttccgaatgcttgcatcctaattcatatcctttcttttgtccaaacttaattcaattgactgcccttttacttccaacttc

SEQ ID NO: 137123 - DNA, 2098 bp, Zea mays
  Clone ID: MRT4577_56532C.1
cggacgcgtgggcgccccacgcgagctataaaaccggaggagaagcagctgccaagttgcatccaatacccccacgaacccactctctctccccacgatggcaaaaatggcgatggcgtcctcccgcctcccggctctcctctgcctcgccgccgtcgccgtcgccgtcgcggcggaggccgccgccgccgccggagaaggcggcctccgcctgccccgcgacgccacgttcccggcggcgcaggcggagcggctcatccgcgcgctcaacctcctgcctaaggagaaggaggcggggccggccgcgggcggcggcgacgggcccagcgtggcgcccggggagctcctagagcgtcgcgtccggctgcccggcgcgcccgccggcgtcggggacctcggccaccacgccggatacttccgcctgccgcacacgcacgacgccagaatgttctacttcttcttcgaatcgaggggcaagaagaaggaggacgaccccgtcgtgatctggctcaccggagggcccggctgcagcagcgagctggccgtcttctacgagaatgggcccttcaccattgccaacaacatgtcgcttgtctggaacaaattcggttgggacacgatctcaaatatcatatttgttgatcagccaaccggaactggctttagctacagctctgatgatcgtgatactcgtcatgatgagattggtgtcagcaatgacctatatgactttctccaggtgttctttaagaagcacccagaatttgcaaagaatgacttctttataactggagaatcttatgctgggcactacattccagcatttgcaagcagagttcaccaaggaaacaaagcaaacgagggcattcatataaacttgaagggatttgctatcggcaacggtctcactgatccagaaatccaatacaaagcctacacagactatgcgctggaaatgaatcttatcacaaaatccgactacgaaaggatcaataggttcattccaccatgtgaatttgcaattaagatgtgtggtactgacgggaaagcatcatgcatggcagcttatatggtctgcaacaacatttttaactccatcatgaagcttgtcgggacaaagaactactatgacgtgaggaaggaatgcgaggggaagctttgctatgacttctcaaacctggagaggttcttcggtgacaaagcggtcaaggaggcgcttggagtcggtgacatcgatttcgtctcttgcagcactacggtttatgaagcgatgctcacggactggatgaggaatctggaagtcggcatcccggcgctgcttgaggatgggattaacgtgcttatatacgctggggagtatgaccttatatgcaattggctgggaaactcgagatgggtgcactcgatggaatggtctggccagaaagacttcgtatcctcctgtgactcaccgtttgtagtagacggtgcagaagctggagtcttgaagagccatggaccactgagcttcctcaaggtccacaatgcggggcacatggttccgatggaccagccgaaagctgccctggagatgctgaggagattcacgcaagggaaactgaagcaggaaccgctccctgagacgatggccttgaaggcggcgatgtgactggcgtggacgtcgtgaagggaagaagggagtctcttaattactaggtggtccgaggtgtcgttcaagcgagcgtgtgtcgatcactgagctgctgaagcttgttgtttccattggctcatggatggatgctgttgataagaagttcaatgctggaaaccctgtctgtctgctgctcttgtaaagcatctcatgtatacaccccctggatccagaaagagaaataatatgtttttttccttagcgaaaaaaaaaaaaaaaaaaaaaaaaaaaaaaaaaaaaaaaaaaaaaaaaaaaaaaaaaaaaaaaaaaaaaaaaaaaaaaaaaaaaaaaaaaaaaaaaaaaaaaaaaaaaaaaaaaaaaaaaagggggggcgcccttttaaaagaatcaaattttactcccccgggtttggcaaggtaaaattttttttttggggcccccaaatta

SEQ ID NO: 137124 - DNA, 756 bp, Zea mays
  Clone ID: MRT4577_56533C.1
ccccccctcgagtttttttttttttttttttttttttttttttttttttttttttttttttttttttttttttttttttttttttttttttttaggggggggggaaaccgccaaactctttcccggaggggcaaaaaataagaccgaaaaccgccccagcctcccaaaaacaattttaaaagggggaaacccccaaaaacggaaaaaggttttacttgtatttccaggcggggcccgggagccccccccaaaaacgggcgattttcgtaaaggcccgttattaaccctggggctttttttaaaacaccccctttttttcctaaatgggggccaaaaaggactggaaacccttgaaaaccccgcccttggcgggggaggcaaggcccttggggaaactgaaccttatttgcccccccggggaatggatccccccaaaaaaaaactgggaaagggcaaagggcccttggaccttttgggtttttttttaaacaaaccctcccccttaaaatccaaagctaaggggggggtaaaaccccccccttttttggggggggacagggccctaaaagggatccccggaaccctgggacccttaaaaaaggggggctttcccgggggggaccttcaaggaccctaaagggcccaccaaatcctttttcctactttaaccccaggagggggggttttttccctcccaagtcccaccctgattccaaacggacccgagggggggggggttccggttcccattggggg

SEQ ID NO: 137125 - DNA, 153 bp, Zea mays
  Clone ID: MRT4577_56534C.1
cgttctcttaggctgacgctttggtggatgccacgctcaactcctccaagcttggtatttaaggggcttcgatcacatggtgcactcactgctagccgttatggccacgtctcccttagtagcctgtagcgacagcagtcatgggccgatatg

SEQ ID NO: 137126 - DNA, 376 bp, Zea mays
  Clone ID: MRT4577_56535C.1
ggctctgcaggtcaccacggccacggggaagacgctcaaggcgttcaccgtcgacaaaggggacacgcctctcgtgctggacatggataccatcgcctgacaattattacatgcacagctcatcactaaccatcgtcaccttattattttattaatatagaaccgatacctataccagctgcagtgattcagttgaatattgatgatgggctagacacatgcaagcccaaacatgaatcgagtgagatgagaatatgagatgaggtgtccgtatatatattatagtaacattaaatgtgaggatgtattgttctggctgagccgaattaattgagccgatattttatactaataaataaaatcggctgtttggact

SEQ ID NO: 137127 - DNA, 233 bp, Zea mays
  unsure (1)..(233): unsure at all n locations
  Clone ID: MRT4577_56536C.1
cccgcggggcgaccccaggncagncgggacgacccgcngagnnnaagcanagaaagaagcggaggagaagaaacnnacgaggannccccnagnaacggcgagcgaaccgggagcagcccagcnggagaaacgggcggccncgccgcccggggggggggcggcacaggnngttaaatcgacggaccgggcccaagnncacagaaaagggaggggggggagggaccccccccccc

SEQ ID NO: 137128 - DNA, 286 bp, Zea mays
  unsure (1)..(286): unsure at all n locations
  Clone ID: MRT4577_56537C.1
atataaaaattgagatcgtataattttatattgattaataaaannaacagacaacacaatggtatcaaccaacatacatgtaaacacacgtacataaacacaaatacttactccatacatacaaaaacagatagcaaactgaacaactctttttatctctctctcacacacacaccacacaatacctatgtataacaatccagatcctcctctcttattattgttcaaccaccaccacaagctaaatagataataatcatatccatggtcgtcgatcgatttgatc

SEQ ID NO: 137129 - DNA, 2141 bp, Zea mays
  unsure (1)..(2141): unsure at all n locations
  Clone ID: MRT4577_56538C.1
ccgggaagctctcctcccctcttcctaccattagcagcagcactgcagcagtagccacagccagcaccagcagacagcagggaggaacacgatgagcggcgccggtccggatctgcagctgccaccggggttccggttccacccgacggacgaggagctggtgatgcactacctctgccgccgctgcgccggcctgcccatcgccgtccccatcatcgccgagatcgacctctacaagttcgacccatggcagctccccaggatggcgctgtacggcgagaaggagtggtacttcttctccccgcgggaccgcaagtacccgaacgggtccaggcccaaccgcgccgccggggctgggtactggaaggccaccggcgctgacaagcccgtgggcacgcccaagccgctggccatcaagaaggcgctcgtcttctacgccggcaaggcgcccaagggcgagaagaccaactggatcatgcacgagtaccgcctcgccgacgtcgaccgctcggcgcgcaagaagaacagcctcagggtaagaacaagcgcgctccgccgccgtccgtccgtccgtccgttggcgtcgtcaccgtccaaatcaaacaaaaagaactcggcgataatgtgtcgctttcgtaatgaacgcggggataagcgtggcccatggttttgggccgctgaattttttttacgtgggccatgctaggtggggtgcgtggggggctgcaccgtgcccaatgattcgaccgcgtcgcagtcctcggcgcgcaagtattcgatgcccatgggtcatggtgtacagatcattttcgcccgtcgcgcccctgcgactgcgacggcgacggagagccagtggggtctgggattagacatcgaaatgacgctttgtgattcttaagctcatccatttcttgtcagctgcacggatgacaaactaagttctctattgtgttgacgggtgcagttggatgactgggtcctgtgccgcatctacaacaagaagggcggcgggctggagaaggcgccggcggccggcggcgaccacaagcctgtgttcgccacggcggcggtgagctccccgccggagcagaagccgttcgtggcggcggcgggcgggctgcccccggcgttcccggagctggcggcgtactacgaccggccgtcggactcgatgccgcggctgcacgcggactactccagctgctcggagcaggtgctgtccccggagcagctggcgtgcgaccgggaggtgcagagccagcccaagatcagcgagtgggagcggaccttcgcctccgaccccgtgaaccccgcgggctccatgctcgaccccgtcgtcggccacgccggcggcgacccgctgctgcaggacatcctcatgtactggggcaagccgttctagacgacgccgcccatcatgtcctgagggcgaggggaggtgggggtggcgaagcatgcatgcaaacacccatcctcggctgcggttggttggttggttgatctgtcttgggcagcgcaatgcaatgcaaccgcgcggtgtgggctttgactcaggcgagccgccattgttgacttgcaaggaggatataatatgaaaatatagctggattacatggagaggcggcaatgagacccnctcccccccnccggaagggagacggagacggatggtgcagtgcatcgggtgtggtggntcgngcgcggcatgtgtgtgtggctgtacatatacatactgtacatgattggttcagtgcagggtttctgttccttcattgattagttattatactaataagtactagtaattttgtaagggcttgtagttgcagtctccgtactggtggtaggtagtgcaggccatattcgtcatcgccaagcttcgagtgtacttactcctacaatatatattttacagtatatattgtagctgtgttggctcttcggaagaaaaaaaatggaaggggaaaataacataatccctattttccccaaaaacactgggcttgatttggacgttaatgtgtgcattgtaactggtgtgccctatctgctgacagtgttgcacatcacatgtttggtgttaataaggacagactatgtatcatctgccagattgttgtacatatacattgtggtgatat

SEQ ID NO: 137130 - DNA, 387 bp, Zea mays
  Clone ID: MRT4577_56539C.1
gtctgatcggaacgctttccgtcgaaatgttgaatatgcatgcactgcagaagaagtgcagcatcattttcaagtctggaggaactgtcaacagagcgacaatgctgaactgacaggtggggcaaccaaagagggtggctcatattgaattagttagaatcggagcctttcaggaaactattcattctggaagaatcataactgcatgggcgccatctaaaggccgcacctcagtagatttacgttcctgggctgagaaagctcttcagatccaggtataaagcttgcctgttttgttggttgatggatactcgatattggttctgtacttagcagaaagtcttggtatggcaacggcctagaaactagtggttgtgttataagaat

SEQ ID NO: 137131 - DNA, 556 bp, Zea mays
  unsure (1)..(556): unsure at all n locations
  Clone ID: MRT4577_5653C.1
ctctgtgaattcatccatgccatttcctctgcctgaactgtcctcccaacaaaatcctgctcaccctttaaaacatacctctgacagctccttctctgggcaagtcgcatgagcctctcctctcaaggtgtggctctgtgcttcatgatttacatgcaccgtcattaagtcctactacagcttattgtctcaccaggaatttaagagtaattcccaaattgcttctgggccttgactttctgtcatctattcaaatgtcaaaaccttttcctggaagaatgtgctacacctgctgcaggagaaaggcaattagtaaatgtagaagaagaaatggaatttgaaaatcactatttggccaccatcatggtaataattgcttgagtcaagaatcatcagtggatcattctaatgggtggaagtttaaccactaacaggatatttcatggtctcaaagcctcttcccacaagatgtttataataaaaaataaaaagcagaaacttcagagcanagaagtctgacagacactgccaaaatcagtcaagccaatatcatgtg

SEQ ID NO: 137132 - DNA, 1554 bp, Zea mays
  Clone ID: MRT4577_56540C.1
ccggccgggaagctctcctcccctcttcctaccattagcagcagcactgcagcagtagccacagccagcaccagcagacagcagggaggaacacgatgagcggcgccggtccggatctgcagctgccaccggggttccggttccacccgacggacgaggagctggtgatgcactacctctgccgccgctgcgccggcctgcccatcgccgtccccatcatcgccgagatcgacctctacaagttcgacccatggcagctccccaggatggcgctgtacggcgagaaggagtggtacttcttctccccgcgggaccgcaagtacccgaacgggtccaggcccaaccgcgccgccggggctgggtactggaaggccaccggcgctgacaagcccgtgggcacgcccaagccgctggccatcaagaaggcgctcgtcttctacgccggcaaggcgcccaagggcgagaagaccaactggatcatgcacgagtaccgcctcgccgacgtcgaccgctcggcgcgcaagaagaacagcctcaggttggatgactgggtcctgtgccgcatctacaacaagaagggcggcgggctggagaaggcgccggcggctggcggcgaccacaagcctgtgttcgccacggcggcggtgagctccccgccggagcagaagccgttcgtggcggcggcgggcgggctgcccccggcgttcccggagctggcggcgtactacgaccggccgtcggactcgatgccgcggctgcacgcggactactccagctgctcggagcaggtgctgtccccggagcagctggcgtgcgaccgggaggtgcagagccagcccaagatcagcgagtgggagcggaccttcgcctccgaccccgtgaaccccgcgggctccatgctcgaccccgtcgtcggccacgccggcggcgacccgctgctgcaggacatcctcatgtactggggcaagccgttctagacgacgccgcccatcatgtcctgagggcgaggggaggtgggggtggcgaagcatgcatgcaaacacccatcctcggctgcggttggttggttgattgatctgtcttgggcagcgcaatgcaatgcaaccgcacggtgtgggctttgactcaggcgagccgccattgttgacttgcaaggaggatataatatgaaactatagctggattacatggagaggcggcaatgagaccgtctggccccgccggaagggagacggagacggagacggagacggatggcgcagtgcatcgggtgtggtggatcgtgcgcggcatgtgtgtgtgtggctgtacatatacatactgtacatgattggttcagtgcagggtttctgttccttcattgattagttattatactaataagtactagtaattttgtaagggcttgtagttgcagtctccgtactggtggtaggtagtgcaggccatattcgtcaccgccaagcttcgagtgtacttactcctacaatatatattttacagtatatattgtagctgttggctcttcggaaaaaaatggaagttattttgatt

SEQ ID NO: 137133 - DNA, 2128 bp, Zea mays
  unsure (1)..(2128): unsure at all n locations
  Clone ID: MRT4577_56541C.1
tcggcacagctctcctcccctcttcctaccttagcagtagccacagccagaacaccagcagacagcagcatcagcagggaggaacacgatgagcggcgccggtccggatctgcagctgccaccggggttccggttccacccgacggacgaggagctggtgatgcactacctctgccgccgctgcgccggcctgcccatcgccgtccccatcatcgccgagatcgacctctacaagttcgacccatggcagctcccaagtacgtcccgtcgtcctcggtcttcttgcagcagcagtagcagccgtgaaccaatttcctgtgcggccgtgacgatggcgagctaatcgatcgattgctaactctctgtgtgcagggatggcgctgtacggcgagaaggagtggtacttcttctccccgcgggaccgcaagtacccgaacgggtccaggcccaaccgcgccgccggggctgggtactggaaggccaccggcgctgacaagcccgtgggcacgcccaagccgctggccatcaagaaggcgctcgtcttctacgccggcaaggcgcccaagggcgagaagaccaactggatcatgcacgagtaccgcctggnncgacgtcgaccgctcggcgcgcaagaagaacagcctcagggtaagaacaagcgctccgccgccgtccgtccgtccgttggcgtcgtcaccgtccaaatcaaacaaaaagaacttggcgataatgtgtcgctttcgtaatgaacgcggggataagcgtggcccatggttttgggccgctgaattttttttacgtgggccatgctaggtggggtggggggctgcaccgtgcccaatgattcgaccgcgtcgcagtcctccgcgcgcaagtattcgatgcccatgggtcatagcgaacagatcattttcgcccgtcgcgccctgcgacggcgacggcgacggagagccagtggggtctcactgggattagacatcgaaatgacgctttgtgattctttagctcatccatttctcgtcagctgcacggacgacaaactaagttctctattgtgttgacgggtgcagttggatgactgggtcctgtgccgcatctacaacaagaagggcggcgggctggagaaggcggcggcgccggcggccggcggcgaccacaagcctgtgttcgccacggcggcggtgagctccccgccggagcagaagccgttcgtggcggcggcgggcgggctgcccccggcgttcccggagctggcggcgtactacgaccggccgtcggactcgatgccgcggctgcacgcggactactccagctgctcggagcaggtgctgtccccggagcagctggcgtgcgaccgggaggtgcagagccagcccaagatcagcgagtgggagcggaccttcgcctccgaccccgtgaaccccgcgggctccatgctcgaccccgtcgtcggccacgccggcggcgacccgctgctgcaggacatcctcatgtactggggcaagccgttctagacgacaccgcccatcatgtcctgaggggaggtgggggtggcgaagcatcctcggctgcggttggttggttgattgatctgtcttgggcagcgcaatgcaatgcaaccgcacggtgtgggctttgactcaggcgagccgccattgttgacttgcaaggaggatataatatgaaactatagctggattacatggagaggcggcaatgagaccgtctggccccgccggaagggagacggagacggagacggatggcgcagtgcatcgggtgtggtggatcgtgcgcggcatgtgtgtgtgtggctgtacatatacatactgtacatgattggttcagtgcagggtttctgttccttcattgattagttattatactaataagtactagtaattttgtaagggcttgtagttgcagtctccgtactggtggtaggtagtgcaggccatattcgtcatcgccaagcttcgagtgtacttactcctacaatatatattttacagtatatattgtagctgtgttggctcttcggaaaaaaaaaaatggaaggggaaaatagggattatgttattttgattaaaaaaaaaaaaaaaaaaaactcgagggggggcccggtacc

SEQ ID NO: 137134 - DNA, 179 bp, Zea mays
  Clone ID: MRT4577_56542C.1
ctcaatcattccatcgcgccatccatagcttcataccaattcttgatcgtgcagctgctggtggcagcctgagaccagacacgaggatgctgaccgagttcagcggctatgagttggaggtatccagaggagctagttgtggctgctagacatacgacttctgccaagactaacgctta

SEQ ID NO: 137135 - DNA, 2909 bp, Zea mays
  Clone ID: MRT4577_56543C.1
ccacgcgtctggttcttaccagtcctacagttgcacaagtttcaggctatggcccacttggattgggtcctagatggattgcatattctgggaatccagttccggttccagatactggacgtgttagcccacagcttcttagtctatctccctctgttccacctcctggttcaaatggtagtgtggtggcatattatgcaaaagaatcaagcaagcaactggcagctggcattgcaacacttggtgaggttggatataataagctgtccaagtactatgcagatgtcatttcaaatgttaaaggtaccatatagcaaagaagttggttacaaagcaaatgtagaacaagtccacaccctcatcatagaaaatatgccgaaacgtttcagacctcttgtacatactttcatcacttatacttttatactggcgaggttgaacgctcctgataacagcaggtgcgggctgctgcagcgacagaaatatgggatttcagaagatggtagactctctctcagaagcagctgtagttctttggactgcatgtctgaagggcccaaaagctctgatgacggtgctttcagtaaatatgtagtagatgataacagttctgctgtaattaacaacccaagtgttaaatttcatgccgagcttgtaaataatactgggagccttaagtcagaggcccagctcggatttgtaaatagcgaggaggatggtggaggtggagagcaactcccagacttgtgatgttgactatgtcaagatggtcgatgatgatggaggagcctctttaatcgctgaagtcttcattgtgcgtgtgtagctgaattctttcatttctccatcctgagttctttacctctcttctatctatagttctattcataggcattcatgaaaattttaccgagagaaaagataggaagggaggtttaattctggcccttttggtgtggaatctttggtgatgataggtcgatatcttaccaggtgataatctctaagttattgatagttcagttcagggcacacactagtcccatttctgcactttgctttgatccaagtggaactttgctggtgacagcatctgttcatggtcaaaacatgaatgttttccgcattatacctccacatgggacatcagaagctggtcaaattggaacctatgttcatctgtacaaactgcaaagaggcataaccaatgcgatcataaaagacatcagctttagtgatgatagtgactggataatgattagctcttcaagaggaactagccatttgttttcaatctctccatatagtggatcaacaagattccgttacagtgataacaaccctgtagaaaatgattacacagtggattcatcagttaatcatactgctcattggtcccaaaattcagcaacctctttgagtctgagtcagaagactctcttcgtatctggaccccctgtcacattgtctgttgttagtaggataagaaatgggagtaacgtgtttaagggtgctgtacatggtgctgctgcatttgcaactggtgcttccactccaatttctggtgcgattgcttcaacttttcacaaccgcatggctggtgacatcgattcagatggcagtttgcgcatgaagtattatttactagtattttctccatcaggaagcatcatacagtatgctctccatctctcagctgaacaggattctggattggatttccggacaagccccatttcttatgggccagagagagaaactgatacaaaatttgttattgaagctcttcagaagtgggatgtttgttataaaagaaatagaagagacagtgctgagagttttgcatatagtgattttgagaatggagaaaataataaacttttgctgaaagctatgtggaaagggactagtatctacccatttgactgttctgttgaaaggcaaaagctcagtgctgatgaaaaccgtaatctctattctcagagtgagttgcagactcatgttgtgcaaactccactctggtctaaatccagggtattttcttgcaccattttctgtttcaatgctgcatttatattttatgtttgattgacatgctgggactcataaagtgcaatgcctgcttattgactgatgccagatacactttcaagttatggagggtgaaactttagaagcagacaatgctgatgtaatttcaggggaagttgaagtagaaaaagtccagacccacaacatagagtcaaggtcaaagaatctcataccagtcttcgactccctccatacatcaaggtttcaacagacaaggttgaacgctcctgataacagcaggtgcgggctgctgcagcgacagaaatctgggatttcagaagatggtagactctctcgcagaagcagctgtagttctttggactgcatgtctgaagggcccaaaagctctgatgacggtgctttcagtaaatatgtagtagatgataacagttctgctgtaattaacaacccaagtgttaaatttcatgccgagcttgtaaataatactgggagccttaagtcagaggcccagctcggatttgtaaatagcgaggaggatggtggaggtggagagcaactcccagacttgtgatgttgactatgtcaagatggtcgatggtgatggaggagcctctttaatcgctgaagtcttcattgtgcgtgtgtagctgaattctttcatttctccatcctgagttctttacctctcttctatctatagttctattcataggcattcatgaaaattttaccgagagaaaagataggaagggaggtttaattctggccctatgggtgtggaagctttggtgatgttagttcgatatcttacaagttgtaaataacatgcaataatagcacgtaatttgtgaatattt

SEQ ID NO: 137136 - DNA, 303 bp, Zea mays
  unsure (1)..(303): unsure at all n locations
  Clone ID: MRT4577_56544C.1
cgttgtgcgtgcgtggcgccattggcccatgcacctggcatgccgtgtcagtctggtgcgtgcaagggcccctgnngtcaccgnctcgtcacccaaggtacccgcgtccacnnctcccttctacactggcgtcctgctcaagggacccggccacccgctgcggggggggggggtgggggngctcggtcattctcgctggccacgtngcgccggtctcctccgnggaccatcaacggctcgcgtcaccggctccgctgtctcgccggctgcctccgtcggcgcgggtctccgttgtgtcccggt

SEQ ID NO: 137137 - DNA, 286 bp, Zea mays
  Clone ID: MRT4577_56545C.1
gctccccccgcaaaaaccctagctttacctccccacaagcgcctccaagatgaagctcgtcaggttcttgatgaagctgaacaacgaaactgtgaccatcgagcttaagaacggcaccgtcgtacacggaaccattaccggtatgacgtcatgcgaactttaccactgtgggaattagaggtgcggggcacctttaggtgtgcgggcttagaaagtagcttaatactgtgtttctggctgtaacctaggaacatgtgaccaacagagctactatatgatcttttat

SEQ ID NO: 137138 - DNA, 1047 bp, Zea mays
  unsure (1)..(1047): unsure at all n locations
  Clone ID: MRT4577_56546C.1
gagttttgcatatagtgattttgagaatggggggaataataaacttttgctgggagctatgtggaaagggactagtatctacccatttgactgttctgttgaaaggcaaaagctcagtgctgatgaaaaccgtaatctctatatttctcagagtgagttgcagactcatgttgtgcaaactccactctggtctaaatccaggatacactttcaagttatggagggtgaaactttagaagcagacaatgctgatgtaatttcaggggaagttgaagtagaaaaagtcagacccacaacataacaaggtcaaagaatctataccagcttgactccctcatacataaggtatttcatctatgtggttgataaaggcgctgggtatattgctggataattcaggccttcatcctgattttggaaattgctgctattgttttgtctgattagatttctcctgtggtgacttttatannncaaccctccaggttgaacgctcctgataacagcaggtgcgggctgctgcagcgacagaaatctgggatttcagaagatggtagacnnnnnnnnnnnnnnnnnnnnnnnnnnnnnnnnnnnnnnnnnnnnnnnnnnnnnnnnnnnnnnnncggtgctttcagtaaatatgtagtagatgataacagttctgctgtaattaacaacccaagtgttaaatttcatgccgagcttgtaaataatactgggagcctcaagtcagaggcccagctcggatttgtaaatagnnnnnnnnnnnnnnnnnnnnnnnnnnaactcccagacttgtgatgttgactatgtcaagatggtcgatggtgatggaggagcctctttaatcgctgaagtcttcattgtgcgtgtgtagctgaattctttcatttctccatcctgagnnnnnnnnnnnnnnnnnnnnnntagttctattcataggcattcatgaaaattttannnnnnnnnnnnnnnnnnnnnnnnnnnnaattctggccctatgggtgtggaagctttggtgatgttagttcgatatcttacaagttg

SEQ ID NO: 137139 - DNA, 563 bp, Zea mays
  Clone ID: MRT4577_56547C.1
cagaagcagctgtagttctttggactgcatgtctgaagggcccaaaagctctgatgccggtgctttcagtaaatatgtagtagatgataacagttctgctgtaattaacaacccaagtgttaaatttcatgccgagcttgtaaataatactgggagcctcaagtcagaggcccagctcggatttgtaaatagcgaggaggatggtggaggtggagagcaactcccagacttgtgatgttgactatgtcaagatggtcgatggtgatggaggagcctctttaatcgctgaagtcttcattgtgcgtgtgtagctgaattctttcatttctccatcctgagttctttacctctcttctatctatagttctattcataggcattcatgaaaattttaccgagagaaaagataggaagggaggtttaattctggccctatgggtgtggaagctttggtgatgttagttcgatatcttacaagttgtaaataacatgcaataatagcacgtaatttgtgaatatttaaatcataatgtgtccaactgaggtacgagacatcttccacc

SEQ ID NO: 137140 - DNA, 282 bp, Zea mays
  Clone ID: MRT4577_56548C.1
tgactttaacaaaaggaggatgcatttctggaaaattcaggactggttacaatctcattagaacagagtcaagctgatacgtgcgtggcttctggcacgcatggactgaaaccatgaagaccgggggaggagtgggggttgggagcccaggacccctttgacacttcgtgggccgatccaattgggccggccggctagcgggttgcacggaacaaagtatgccgacgggtcatgttgctggaggccaaacggatgttatgcaaccctactgcctacagtctt

SEQ ID NO: 137141 - DNA, 269 bp, Zea mays
  Clone ID: MRT4577_56549C.1
aaaaataaaataacgggttttggttttctaaaaaaaacaaaaaaaaaacggcgagggtttactctaaaagggaaccaatcttacctcccctttcttacaactaaataaatcttttatacccttacctaaatccaattcactttctcttcatttaactcttatttaataataaaacactcttctaacccatattaatttcataaaaacaaaacttactatctccatctactctaataaaaaaaatcccataaccaatctgcctatctaac

SEQ ID NO: 137142 - DNA, 935 bp, Zea mays
  Clone ID: MRT4577_5654C.1
cccacgcgtcctgccacgcgtccggatgaagagtgccgatttgctagggaacctaagaatagtgtaccaggaaagaacgtgtcttggttactgctcttcgcagaagttggaagaataatggtaaaaggaaaatgtatcttctctcaactccagcagtttacaggcgggaaaaaagagaaagaaaagaagaggcaggaaaaagcacaatcgtcgcaagaaagctaatttacaggattctccagcatcaactgctgctgataattctggtttggtgacgttttctgagaactgtacttcagcccttaaactagaggaacagaggaagaagcaagatcagaacaagacatccatgactaacttacttttaatcaacaatgcaaagagatcagaaccatttgatgtgaatttggaaggcgctattgaaaagagctgtgaactggcaaagaatagttttgacaacacattagaaaataggtatgaactggcaaagaatagttttgacaacaccttagaaaataggtatgaactggcaaagagtaattctgactacataaatatggtaagaaatggattacaagagcaagacttagcatgcttgtcaaacagtcacaatgttaactacctgaagccttcccatttggctgaggaatatacagaaaaactcaaacatgtcttttcactgggaaagtccttagggcctccgaagaaaaagcttctcatcttagatcttaatggtttacttgtggatatcaacgaagactaccacaacgctcacatggctgatgccaaggttcgaagaaaattagtattccgaaggccttactgcgatgattttctcaacttttgtgctctgaattttgagctaggcatatggtcctcaagagaaaacaaacaaactaaaacaaacatatactataaaaggagtaaaccataaa

SEQ ID NO: 137143 - DNA, 410 bp, Zea mays
  Clone ID: MRT4577_56550C.1
aaactaacaagcaagcgtgcccaggcgcaccacccgagcacgcacgcacgcacgcacgcatcactctcctctcaggagcaacggcggccgtgcctgccacgcgcgcgcgagcatacacatgggagaggtcgcctccaccgcagcggcggcgtcgctctcgtcgtcgtcctcgctgctgatggctgcgacggccgtcaagggggacgaggagcggtacgtcatggtggcgtcgaggttcttccgggtgaagccgggcgctgctgcccgccaccacttcctcgactcgtgcttcctctgcaagaggagcatctcccgcgaccgcgacatcttcatgtacaagggtgacgcggcgttctgcggcgaggagtgcaggcaggaccagatggccatggacgaggcgctccacgcgg

SEQ ID NO: 137144 - DNA, 156 bp, Zea mays
  unsure (1)..(156): unsure at all n locations
  Clone ID: MRT4577_56551C.1
gaattcccgggtcgacccacgngtccggttcttttccctgattatgggangggtttcctttcnncttgtctggaagccnacaacctgaaccctgaggaagttatccaaaggntattagaagnaacacntnaccaagatcttctagctttggatacn

SEQ ID NO: 137145 - DNA, 453 bp, Zea mays
  Clone ID: MRT4577_56552C.1
gcggggatctaccataatattttcagcgttcatgaagcacaccaagcgaagcgcactatcaacgacctaacgacattggctaccaagatattagccctccttgcgtttcttgcgccttttagagagcgcaacagaatgcgatcattattccacagggctcacttgctcctatgcgccattatttcacagcttctcccaccagttactctgatgggcatttgagcatccagccgtgcaagcctataggctacaactagcgcttgcggagagcgcccttcaacaaccaagtgcccaattgcgacaacgatccttggcacatctaaccctacaaaccatcgcaacgcagcagctgctacagtttctgacaccactgatgcagctatcagtggtgaaccctgtggactacttgcagcagcagctgcttgcattcaacccacttgctctggcgaacgt

SEQ ID NO: 137146 - DNA, 621 bp, Zea mays
  Clone ID: MRT4577_56553C.1
ttttttttttttttttttttttcttttttttcgctttgggctttgccacaatatatattgttagcgcatcaaaactggtacctttccggccctttctgcaggagatgacaacaaaacaagaacagaagaagaagattatcgatatgctactatagctcgctactcgcagtctgagagctatgctatgcaggagggaactttggcagacatacagccgcatgcatgctgacgatcgatcgactaagctctagtacctagcctactctctctctctctctctctctctctctctgcacaaattaaaggggatcggtgtggaacaatagtctgtctgtccgaacagctagcgccacacgggaagaaggccacatggcatgcatgacggagaacgaagcattgcccctcagatcaatggtgcctcggttcatggacgctggcgccatagtagtcctcatggaacccaggcagtttgtgcgccgttaacgttgccttgacgacctcctgcccatcgacagagacgcttctcttcgctggcgaagaaaaggcagcagggggcccgcttactacattaatggcaacgttcgcttgctgctgcggcttgacggcttccaggggcctgat

SEQ ID NO: 137147 - DNA, 2379 bp, Zea mays
  Clone ID: MRT4577_56554C.1
aggctatatacccaggcggatggcacaacaaacaggcagcaaggtttggaggtcatcggccaatcctactggaacggtttcagctatagcaatgctcagtctttttttcgcctcaggaatacacacgagcgcgcgcgcctttatcacacaaaatcatccttcgcataaatatacggccccaagaaaaccaactggaaaaaaatcgctatggctaacatatcgattcaacaatgtacagatactgtcacgacgacgacgaccgacactggtgcttgtggagtttgcatgcccgaccaaccaaccaaccaaccatatccagcttctttatcaggcacaaactcaagcgcaaccaccgttttcctggtggctagccaagctagtcctcttagtttctccacttgaaaggttctccattcggtgcgtcctttggagtgttgtttccgctgctatcgccaggttcgcttgcaggtggcgtttccaccgatcttgcttgggctggagctttgccaccccggcgctcatctctgtacgggaaatcgtcaacctcaagcatgtgaatgacatgcccaatctttggcctcttgcgagcttcagggtctacgcaccgcagagccactagcaaagccttcttcaatgccctagaagtaggcttctcagtcatctttggatccaaaaccccctcagaatttctgttgctgaccatcgtcttcagccactcaactagattaatctcccctggcggcctgttgtaatcaacaggtacacggccagatattatttccatgataagaattccgaaactatagacatcgctagtttcattcaacatgccagtgcccgcatactctggtgcaacatacccaaacgtccccatgaccctggttgtgacataactcctttctgaacccaaaagtttcgctagcccaaaatcagaaagctttgcattccaatgcttgtcaagaagaatattgctcgacttgacatcacggtgaacaacctttggctcaagtccctcgtgcaaatacattaaaccttttgctgttcccagaataatcttcattctgatatcccatgtaagagggctcacagggccaacatccccatggagccattgctccaagtttccattattaacgtactcatacacaagcatcctttggttgccttcagcgcagtatcctaacaaccgaacaaggttcttgtgtcgcactcgcccgatagcttccacctcaaccttgaattcccgttctgcctgccccctgttgttgagcaagtttttgacggcgacctgcactccgccctcgagcatgccgtggtacactatgccgtagccgccctcgccgatcaccttctcgtcggcgaacatgcacgtggcgtcctccagctccttgagtgtgtaccagtggccccaccccaggtgcgatacctccgggacccccggttccccaccaccgccacggctctccccgctggcgccccgagacgacggccccccgctccgctggtggtgcgggggcggcggctgctccgggaacgtgatacggtgctccttccccgtctcgatctggatggagtcccggcggcggcgcctgcagcacctgggcgagcggcgccttggccggggcggcgggggccgcggtgccgcgggagggcacctcttggatgtccttggggggcttggtggggtgcttgggctgggcattgggcacgacggcggggaggtggaggacgggggcagcacggcggcgtcggcggcggcgggaggcgaggaggcagagcagggagaggaggacgaggaggagcacgaatgcggcaccgacaccgatgccgacgagctcccagaggtggaggccgaacactagcgtgccctgggacagctcggagtccgacatgggcgccgcgctgctcagctccccggctgctcaagccgaaacgaaatggtggatctccctcccaagaacccccctcccagcagaattgggcgccactaaagaatgaagaaatcttccaagaaaaaaatcgccagagactggggctttgcagggaattgggcgcgcggagccggattcatgcagcggacaatcgaagtggcgaagaatctatggatttctgcaggggggcgcagtgggaaaggtatgactttgggggggagggaggggatttaggacaggatggagtgacgaaaaaggtagatttggaggttgattgagcccaaaaaggttggatttgcgggcagtgtgggggctgagactggattattttggaggtgggaggagcgcccacgcgtccgcccacacgtccgcccacaaagccggaattctggcgtgaaggtgaagaagggtggtcccgtctgccgtggtaaggtgtgtgcctgaccga

SEQ ID NO: 137148 - DNA, 357 bp, Zea mays
  Clone ID: MRT4577_56555C.1
gggggggggggaaaaaaaaacttggttggggttaaaccccccccctttaaaacaacgtggggttccccacctttcggtgttttccccccttttcagggcttgcccttttgccccaaattacaggtttttcaagccttgtggtttgaataacccacttttcagccccttaaagttttacaaccgaaacgttccgttccaatttttgggcgggggaaaaggaaaaaagaaaccccaaagaaccctttcccttgcccaataaagctcaactgtttaaatttttggttttaccagcttttggctgctccctgctggtatggaaaaggccttaatcttttttggggccttggcaaacccccc

SEQ ID NO: 137149 - DNA, 206 bp, Zea mays
  Clone ID: MRT4577_56556C.1
caccatgagggagtgcgttttgatccacattggccagaccggtgtccaggtcacgctacgccacccgggagctgctctgcctagagcaaggcataaaagctgactgtcataaacgccgcgacaacaccattgggggaggtgatgatgctaacaacacctacgttactggaactggtgcttggaagcaaaagccccatgcttttttt

SEQ ID NO: 137150 - DNA, 204 bp, Zea mays
  unsure (1)..(204): unsure at all n locations
  Clone ID: MRT4577_56557C.1
ctacccacatnccatnnatatnntttcctcctgactcacggctatctggtcagagctaggttatagcctccataatgcagccagccatctcttcgtatggccaggctagatacacccagccgcctacaaatcctccatgttatgaacagtctgcgacaccagcaacaacccatagcgtctatgctgcgcccccagcaaatccac

SEQ ID NO: 137151 - DNA, 380 bp, Zea mays
  Clone ID: MRT4577_56558C.1
ctcacacctgaacaacaagcatcttttaaagcggaacccagccacaacaatggggcgacattggccaccaacatatttcccctccttatgctcctcgctctatctgcatgtgttgctaacgcgacattctactctcaatgctcacaagctcctatagtttcccttcttacccaattccttacatcaatgattgcttcagtctttcaaaacccacctctgcaaccctataggctccaacaagcaatcgcagcaagcacacatacctttatcacccttgtttcaacaaatctccagccctatcttttgtgcagtcattggtacaaaccattaggtcacatcagctgcagcaactcttgctacctgtgatcaaccaagtagct

SEQ ID NO: 137152 - DNA, 639 bp, Zea mays
  Clone ID: MRT4577_56559C.1
attattcctccaccctcgccccctccccatcccccaccccgttcccgctcaaaaccctaaccctagcggcgcccctcgccatggccgccgactaccgcacacccgacaggctcctccccgccgccgccgccgaggggccggcccaggacccgcccacgccgtctacttctccgtctacgagttcgccaagtcgcgcctctcggaccgtttcggccccaacaaccccgcggcccacgcctcctcgggggtgctcgccaccatcgccagcgatgcggtcttcacccccatggacaccgtcaagcagcggctgcagctcacgagcagcccctacaccggcgtcgcgcactgcgtccgcaccgtgttccgcgacgagggcctaagggccctcttcgtgtcgtaccggaccacggtgctcatgaacgcgccatacaccgccgtccacttctccacctacgaggcggccaagcgtgtgctcggggacatggcagttgacgaggagtcccttgccgtgcacgccactgcgggtgctgccgccggtgctctagcagccgcgttgaccacaccgctcgacgatgtcaagactcagctgcagtgccagggtgaatgcgactgtgaacgctttgctagtagctctatagg

SEQ ID NO: 137153 - DNA, 391 bp, Zea mays
  Clone ID: MRT4577_5655C.1
gcccaacatacaacgttgcgttcacttttatcaccgacacaacagggggagccgggagactttgcgtgcttatgccccacgctcttgacgcatgtggtgctaacgcgacaatatgccatcaatgctcacaagctcatatagcttcccttcatccgccatacctggcatcaaagatagctacagtatgtgaaaacccaactgttaaaccctataggctccaacaagaactcgcagcaagcagcatacctttatcaccctagactcaacaatacccagccctatagttggggcacacatagatgcaaaccaacgaggcacagcacatgaaggaactggtgctacgtgtgatcaaccaaaaaggtgtggcaaacatctctcagtactatcaaca

SEQ ID NO: 137154 - DNA, 279 bp, Zea mays
  unsure (1)..(279): unsure at all n locations
  Clone ID: MRT4577_56560C.1
ccaatctagaagctcccctctccctccctccctctctctctctctcttcgccgtccgaagctccgcacccaatctaatcgacacctcaccgagatgggccgcaagttcttcgtcggtggcaactggaaatgcaatggaaccacagatcaggtcgagaagattggcaaaaccctgaacgaaggacagggtcccccgtcagaagtcgtcgagggcgntggcagcccnccctaaggcnttcctcccgnggacaagagccagcatcgccaagagttccatgtt

SEQ ID NO: 137155 - DNA, 436 bp, Zea mays
  Clone ID: MRT4577_56561C.1
tcctactctcctccaacacacagcaggtcgagcagtcgtcgtccggccgtcagtactcagcagcatacatgccgccggtgatggagccgaacacaatgtcttccagatcgaacgtgtcgtcgtaccccaagtgcgccacgcccgagaggccgtctggatggtgagggatatggcgtgcaagatccggtccacgaggcggctggcctcgggcgactcccggagcagcgccttcagctgcgtggcgtactcccggcccttgaccatgtcctccatcacccgcgcgtacggcgacggcgccggcgccatggccacagcagccgagccccagaaagcgagaacggatgatcgcaattcacgtccacagctcagtgatggctcacttgcgcgcgcgcgcactcctccaatcctggcggcagcaaccagctcagagctcggg

SEQ ID NO: 137156 - DNA, 372 bp, Zea mays
  Clone ID: MRT4577_56562C.1
actcctaagggcgattgggtctctcgaggccggccgggatcaacgacattgctatcacatcatctgttctgctcggcctgtctgaggacaataataggtgcctttcccgccgcgtatgctgctctaatgcgtcacaaaggggctccataggcagaagaatgacagcccctcgactgcgacaacccaactggaccagcgtcaaagctgaggtcgatgcggacaacgacccgaaggccacctactacagcatcggggagcggccaactgacaccgcggacatgggcgcgagggggtacaaggacgacctggggaaagactacgggaccctgacgacgggcagtgtgcaccctcgatgaacaccaacgagcaccg

SEQ ID NO: 137157 - DNA, 622 bp, Zea mays
  Clone ID: MRT4577_56563C.1
gccggccgggctcgtgaataaaaaagacagacacgcacccggctccgtggaccggagaatgtgcggatagatatatccatggcggccgcgcacatcccaagcgatgaggagccggacacacagagtacactatcaaccgtccacaagacgcgctccacgagatcgcactcgtattaagaagaaggcactcgaaatgccatacaaggagatcaggaagttcgctcaaaaggccatgttcactactgatgaccacattgacgtgaatctcaacaaacacatctgaaacagcgctatccgcagtgtgccgaggcgtgtcaccgtcagaatgaccgcatcgaaacgatgaataacagacaaggatgaactctactctctggacactgatgctgagatcccaccacagggactcacacgattgcaaactaatgatgctcaggatgaggatgaaacctggataccatgatacatatctgagaacgacgcttgagattattgatatcgactgccactgactcatgacatataagcttctatacttggctcctttctaacaatacatatatcgcacatgtctacagagcaactagatggtaaatcagaagtgtttggtaatgatcaacta

SEQ ID NO: 137158 - DNA, 819 bp, Zea mays
  unsure (1)..(819): unsure at all n locations
  Clone ID: MRT4577_56564C.1
ttatcctgcgagggcttccaggtagtggaaagagctaccttgcgaaggcattgcgtgatcttgaagttgagagtggtggaagtgcacccagaattcactcgatggatgactatttcatgattgaggttgagaagaaggtcgaagacaacgaagggtctaaatcttctactgcatccaaaggacggaaacagttgaccaagaaagtgattgaatattgttatgagcctgaaatggaggagacctacagatcaagcatgttaaacgcgtttaagaagacccttgatgaagggaatttcacatttgtgatcgatctggctatgaggtctacttgctcgaggcaccatacaaggatccaacaggctgtgctgctaggaatgtgcatgggtttacattggatgatataaaaaagatggcaggtgactgggaggaggctccaccactatatgtgcgactagatacccgttctttattccatggtgacaatcttcatgagcattctatacaagaggttgatatggacacagaggataacgatgatgctgatgatacagcagttaacacccagtctggaagctcaaagaaggctatacttgaatcagcagatgatatacctgatcaaggggacaagtgggattcatcagatgaagaagacttagatgacattaaggagctaggacagagcaaatggtcaaaagattttgacgaggatactgacaagtccaagcatggcagatggaagtancacatactctttctgggctggccaagacatatgacactcataaaaaacactttactttggggtgatcggctggaaaa

SEQ ID NO: 137159 - DNA, 477 bp, Zea mays
  Clone ID: MRT4577_56565C.1
cccacgcgtccgcgccacaccggagcccatggagctcgccggagctacgccatccgccatccaaagccgagccctgctcttctccacccggccgaacccccgtcgaacccttcctgtcacacgtacaaactcaaggttgaagacgacccaaaatattttatgtatttttgaaatttcttttgattcaatttgtgaattgtatatttattatgttgtaataagagcatgttgcgattcgaaattcacgtgtatgcgcgctatggaatttctggtagatatatgcggttagtagtgcaccgtgattattcttgttattcgatgcgatgacttttagaatgttggattagagagaaatatgacgaaaatttagtagtcacacgttggtgataaaaacactagatatgaaattttatagttaattttggtcacattgaactttggaaaaaaaaaaataaaaaaaaaaaaaaaagggcggcc

SEQ ID NO: 137160 - DNA, 115 bp, Zea mays
  Clone ID: MRT4577_56566C.1
acaaaaaccaatgtgtggctaattccatgagttccaaggggatgtttaaattgatccaacgtcttggatcctcaagaaagctcatggccatcattaatgtcgacggttctgttta

SEQ ID NO: 137161 - DNA, 745 bp, Zea mays
  Clone ID: MRT4577_56567C.1
cccacggggtccctcgagcccggccgggcttgtgggcgcgcgcattttctttccgaccagccgagcgccgccgccctccggcaggtcttcttcccggccacgaccacccacgccaggtcttcccggccccgaacgcgagcacccagccctcctccaggtcttccccggcgacgagcgcgtagaagaggggatccttagcacaatggaagaaggagcaccagggccgtcgcaagccatcccggattctggagacacgtaccgcaacagctccaccgcgcccgtgggcagcagctcaccgtctgtcgcgaagctccggaagctgctgttccggcggatgctcatcggcgtcaacgacggccgctacttccacggcctgttccactgcatcgacaagcagggcaacatcatcctccaggacgccgtagagtaccgcagcgcccgccactgctcgcctccgacggagcagcggtgcctggggctcatcctgatcccggccgcctgccggtcgtcgtgccaggtcgattgctccgttgaagagaagatgtcgctcctgtgttttgagtgaatcgtgcttcaaagggaatacactacgcatgtactaagttactggggctcatctctgctatctgaaactgagaggcatgattggtgtttcctatttttgaaggattgtttattagaaaacttcagagttcatacataagcttttctattttctactaaaaaaaaaaaaaaaaaagcggcc

SEQ ID NO: 137162 - DNA, 298 bp, Zea mays
  Clone ID: MRT4577_56568C.1
aaaaaaaaaaaaaaaaaaaaaaaaaaaaaaaaaaaaaaaaaaaaaaaaaaaaaaggggggacaggataaaggatcacagacgcatacctccggcatgctacgtcttatttgttgttttgtggagccaaattactgttcattggtgcgcgttgtacaacgtggtgacggctgagaaacccccccgtctcccacctttttggccttgtagcacttcccccttttgccggctggtggaatagggaagaggcggtcgccgttcgcccttcttaacaattgtgcagcctgattggggaatggc

SEQ ID NO: 137163 - DNA, 558 bp, Zea mays
  Clone ID: MRT4577_56569C.1
ggaaagcaacctactccgcgctcgctcctcctccacttgctcccctcctcttccgtgctcgtcccgtccaccgccccctccccctccgcttacgccacacccagcccaatcaactcgccgcggaccgcgcccatgccctcatccccctgctcctcccaaaattgaccacccaatcaatcggctcctagccctcacccccgacccgttcccatggatcgcaccacctccaacaacagcagcagtgccagtagcaccacctccgccggcagccagaacccgcacctcggcgtcaacaagctcggccgctccatccgcaaggccacgccgccgccgcccccgcagccacagcccgccgcaaaccgccctccccagccccagccgcaggtctacaacatcagcaagaaccagttccgcgacatcgtccagcagctcaccgccggtaccccgtccccaccgccgccgcagccccaccaccagctcgcccaccgcccgccgcagccgcagcccaagacaccctccatgcgcctccagagggatccgcccgccccccatacgaac

SEQ ID NO: 137164 - DNA, 432 bp, Zea mays
  Clone ID: MRT4577_5656C.1
aacaagaacattctcatggagcgcgaccgtcgaagcacgcgcaacgtgaggtggtgctcgctagcacacagtcttgctctatactacagagctggacaacgtttctaccacaacggccgcgaacgggaccatactacacctgcaaggggtagagcggcgggcgctgaatgcgccattcgttaaatgtgggggcgactgttcacacaacagggacacaattttgaggctcgcgagagacgacctttttgcccaaccgttgttcttcacatgaacctggtgggcctggcttttagaaaagcggcccaccgacgtctgggcgccacaatttgtggctgacagttggatggactgtgcctctctggggccaccgggcccaagaccagactcctccgaagacaggggcttgttgcttattattcggcagatgtctga

SEQ ID NO: 137165 - DNA, 571 bp, Zea mays
  Clone ID: MRT4577_56570C.1
ccggccgggcttcccggccccgaacgcgagcacccagccctcctccaggtcttccccggcgacgagcgcgtagaaggtacgccgatccttctcctcccttcctacttctcgaaacagagcacccaaaaccatagctaagctatctgtattcggatctgacccagttacctaccagtttcgaaattttctgcgaaaattatccacccctgccatcgagatccttaagtaccaggcataaaatcttgcctagtaattctgcgtaccagaacccatatccaaattttctttaaccctgttacatgcccatgcccatgctcatctaccactaccagaggggatccttagcacaatggaagaaggagcaccagggccgtcgcaagccatcccggattctggagacacgtaccgcaacagctccaccgcgcccgtgggcagcagctcaccgtctgtcgcgaagctccggaagctgctgttccggcggatgctcatcggcgtcaacgacgggccgctacttcccacggcctgtttcacctgcatcgaccaagaagggccaacatcatccctccaggga

SEQ ID NO: 137166 - DNA, 265 bp, Zea mays
  Clone ID: MRT4577_56571C.1
tcgtttctcctcgcggggcgcgacaccgtgtgctgggcgctaaccacgctgttcaggctcctgtccaagaacccggccgttgtggccggcatgcgcgccgaggaccgagacggagacggacacggtgactcagcgacggtcagctacgagcacctaatgcgactgcactacagccacgcggcgctgtaccagaccatgcgaatgttgccgcctgtgcagtccgactacaagatctgttaacggcccaacgggctggcggacggca

SEQ ID NO: 137167 - DNA, 410 bp, Zea mays
  unsure (1)..(410): unsure at all n locations
  Clone ID: MRT4577_56572C.1
catctttggngagacaagcgcacctatttgtcggggagcgggtcctccatccgacaggaaaaaaacctaatcttttcaattctaaaacccttgcctgggcaatccccaccccttgaaagggtgcccaaaccacccttttgaggggtgtccccaaagacttggggaaaacaattactttttccttccctcttaaaaagggagagggaggtttgctttttgtaccccgccaaaaagatgttgcaactcccccccccccacccggtttacctcctaaaaaaacccctggggttggggggggaaaaaaaaaaacttcaccttggggagccccttgaattatgcttttcatattactccccaagtttccttaggcgggcccggacctgggtttttcattttttggtaaaaccccc

SEQ ID NO: 137168 - DNA, 294 bp, Zea mays
  Clone ID: MRT4577_56573C.1
gagctcactagttggcggccgccctttcttttttttttttctgtgggtttttttctggtgctcaaccggttattacctactgaaagagttctcggtgcttttttgatccatttcaggaatttactccggtttcgcgacccaaggggacaacccagcaggaccgggcaatggatgggcccccgtaaaaaggggaggggcccccccctgcacgattcaaaggctcccacaacagaagtccgaaacccagccaaacctggggcgcccgaaaggggcaacaaaatcacagccccacgc

SEQ ID NO: 137169 - DNA, 941 bp, Zea mays
  Clone ID: MRT4577_56574C.1
attccctgttgatgataaaggaacaagagagactgtagtgcagtacttcttggacaaatatgactacagattgaagtatgtctcttggccttgccttcaggctggcagtgattcacgacctgtatatttgcctatggaggtttgcaagattgtagaagggcagagatactctaagaagcttaatgacagacaagtgacgaacatacttagagcaacttgtaaacgtccccaggagagagagaagagcatacgtgatatggttctgcataacaagtatgcagatgataagtttgctcaggagtttggcatcgaagttagcagtgatctagtgactgttccagcccgtgtgctgcctccacccctgttgaaatatcatgactctggtagggagaaaacttgtgcaccaagtgttggacaatggaacatgatcaataagaaaatgatcaatggtggaactattgataactggacttgtttgaacttttcacgcatgcgccctgatgaggtacaaaggttctgtatggatctgactcatatgtgcaatgccactggaatggttgtcaatccacgcccgtttattgaagtccggtctgctgctcctaaccatatagagaatgctttgagagatgtacacaagagagccacccaaatacttgcccaacaagcagtgggaaatcagctccagcttttgattgtaattcttcctgaagttagtggttcttatggtaaaattaaaagagtctgtgagactgacattggaattgtatctcaatgttgcttgccaaagcatgctagcaggccaaacaagcaatatttggaaaatgttgcactcaaaatcaatgtcaaggttggtgggcgtaacacggttcttgagcgagccttttcacacgatggtataccctttgtctctgaagtcccaacaatcatctttggcgcagatg

SEQ ID NO: 137170 - DNA, 432 bp, Zea mays
  Clone ID: MRT4577_56575C.1
accacgcgtacggtcttatgataccattgacaatgtcaaggccaagatccaggacaaggagggcatccctccggaccataaacggctaatttttgccgtaaagcatctagagtacgggcgcacgcttgccgactacattttttataaggagagcaccctccacttagtgctgtgtctcacggatgacatgcacatcttctgtgagacacttactgtcaacacaatcacccttgaggtggagtactcggacaccatcagactgtgtgaaggccaagatccacgacacggatggcatttcaccagaccagcacaggctgatatttgatggcaagcagctctaggatggccgttcacttgcagattacaacatgcataacgagagcaccctccacttggtgctgcgtctcatgagtggcatgcatatctttttga

SEQ ID NO: 137171 - DNA, 484 bp, Zea mays
  Clone ID: MRT4577_56576C.1
agcgtggaggatggccgtaccctgtgcggattacaacatcccagaaggagagcaccctccacttggtgctgcgtctcaggggcggcatgcagatcttcgtgaagacacttactggcaagacaatcacccttgaggtggagtcctcggacaccattgacaacgtcaaggccaagatccaggacaaggagggcatcccaccggaccaacagcgcctgatcttcgccggcaagcagctggaggatggtcgcactcttgcggattacaacatccagaaggagagcaccctccacctggtgctccgcctcaagggtggcatgcagatctttgtgaagacattgactggcaagaccatcaccttggaggtggagtcgtctgacacaatcgatcatgtcaaagccaagatccaggaccaggatggcattccaccggatcagcagcgtcttgatcttcgctcgcaagcagctggatgatcgccgcaccctag

SEQ ID NO: 137172 - DNA, 299 bp, Zea mays
  unsure (1)..(299): unsure at all n locations
  Clone ID: MRT4577_56577C.1
tccctttttttgncaaggggggggggggggggggggggccgttgagaggaatgagggagaccatatgtacgacacaacattaaatatgatatccatcggttcgtctgcccttagtgagagtatttgataccatgctggattctggatacccatgaaaagctttccnaatggatctgatgccggaaaagattaaatcccaataagcctggcgtgatggatgacttgtaaccgttcgaaatgcccncatatagtattggagggattatgtcgcagccgcccacacacatgaaaagtaatag

SEQ ID NO: 137173 - DNA, 1885 bp, Zea mays
  Clone ID: MRT4577_56578C.1
acaaattcggccctgccctgccctctcatctcgcttcgcttccattccatcgcgccagtcgccagactcaccagggagacagggagagtagggggaaatatcaattagaaacaacgaggaactagcaaagaaagaaggataactcccataagaaaaatcgccaaatacgccattcatcttctccgcccgggtttcagaacgtgcggcagtttagccaggatggtggcgatcgagaaccagaaccagagccaggccgcggtggcggtggcggcggaggcggtgccggcgccggcgtcgcggatccccagggaggcgcggcgcctgctgcacgagctggcggcggcgtgggcggacgtggccgactgccgcgcgctggaggtcgtgccgctcaagggggccatgaccaacgaggtctaccaggcgcgctggctcactgcaggccctgccggccagaaggaggagcccagggcggagagggaggtgaggaaggtgctcgtgcggatttacggcgacggcgtcgacctcttcttcgaccgcgaggacgaggtgcgcaccttcgagtgcatgtcacgccatggccagggtccccgcctcctcggccgctttccgaacggccgcgtcgaggagttcatccacgcaaggacattgtcagctgccgaccttcgtgatcctgaaatttcagctctggtggcttccaaactgagggagttccacaaccttgacatgcctggtcccaaatctgtgctcatttgggacagacttaggaactggctcagaactgccaagagcttgtgtccacctgaagaagccaaggaatttcggttggacggtctggagaaccaggttactgcattggagaacgagtgttcaggtgattaccagtggattggtttctgtcacaatgatcttcagtatggcaatatcatgattgatgaagagaccaacgtgctgaccatcattgattacgagtatgcaagcttcaacccagttgcatatgacattgctaaccatttctgtgagatggcagcagactatcattcatcaaagcctcatatactggactacagcagatatccagatgttgacgagcagaagcgttttgttaagacctacctgaacatttctggtgaggaacctgatgcggaagttgtggagaacctgctccaaagcattgagaagcacacgctcgccagccatctagtatggggcctctggggaataatttcggaccatgttaacgacattgacttcgactacaaggagtatgcgaggcagagattcgagcagtactggcacaagtctgcgatcttaacatcttgaacatgtgtataaacacccgtacgtggtctcaggaactccctgagggcctgtggctgcacacacgaaattgtgcagtgccactgacacatagataagctgtgaaagaagaaatactgacgacgacgacgaataatcccgttttgggctcgggaggttatttttccgcaactcgatgagcttcaggcttcagcttcaggaaggaaggaaggagctatggggatttggctgcccgcttatgctgtaccaatgcaattaaaagataaagatccggtccggtgttgcgtgtgctatgtttagttttggctagcaccgccgagagccgtggtcctgttgtggtgtttctagtttctgtatgcttgatgttgttagtgtgctggataatttggttttgtgcttggggagtccttagctttgggacaacgcatacattgtatactgggtagatgtataaacataaaacagctatgggaatttggttctctaccaaaaaaaaaaaaaaaaaaaaaaaaaaaaaaaaaaaaaaaaaaaaaaaaaaaaaattaaaaaaaaaaaaaaaaaagcggcc

SEQ ID NO: 137174 - DNA, 294 bp, Zea mays
  Clone ID: MRT4577_56579C.1
tcggttggcaccaccccgatcctggttcagcttttcgagcccctgaggcatcagggcggcctgtcgaccactccctactgctcgcctcactcccagactacgcgaccatagtgtttccagcatctcaggcatgtatagccgcagcacctgcaccatacgattttctgcttggtccttcagtccatcctgaagcagtattctcaaatctgtcatttcaagaatgctgatggcaccgcatatagcccattaactgacgtctatgttccacctgcatcagacgaccttattctccta

SEQ ID NO: 137175 - DNA, 668 bp, Zea mays
  unsure (1)..(668): unsure at all n locations
  Clone ID: MRT4577_5657C.1
aaaaaaaacaaaaaaaaaaaaaaaaaaaaaaaaaaaaaaaaaaaaaaaaaaaaaaaaaaaaaaaaaaaaaacttggcaagggacactacgtttttgtccgtggggagattattggaaggatttggggttggcgtaatttcctatgtggggccagtatactttgcaaagatatttcctaataacatgagaggagcctttggcgctgtaaacccgttgtttgaaacctttggtgtcctgttttcctatgtgcttggtttgtttttcctttggaggttttttgcattaataggaaccctgccttgtttactgtggggggttggtttatttttaattcgggaatttccaagatggttggcgaggatgaatatgatggatgattgcgagatttttttacaagttttgaggggatttgatgctgacatcactgaaaaagtgaatgatttaaagatagttgtagcatcagcaaacaaaagtggtacagtaagctttaaagagttgaaccaaaagaaataccgaacgcctttaattttaggaatgggcctacttgggttgaaacagttaaggggaataaattgtataatnttttatttaggtagtattttaaaagctgcagggttaaacaacagaaacctgaacacgtgtttcattggagctatttgggtttttgc

SEQ ID NO: 137176 - DNA, 410 bp, Zea mays
  Clone ID: MRT4577_56580C.1
ttataacattaggtttccataacacatgttcctatcaccaaactataaaatttactttccttacctcaaatcccaatctaacaataacaacttttttctcattctcaaacttaaacaaaaatccttcttgcacaactacacttaaccctatattcttttcacaccttcattttaccaaatattttttcccttctttattatcccaaacctttactcttaccccaattattgttttttcccccccctctacaatttattttttccaattttttttattcccgtccctctctttctccttattattgttctcgaactccaccacacattttaacaattttctttcctttttttttttatccaataaacaaacttctttttatattttttaacccctattcccccataatttt

SEQ ID NO: 137177 - DNA, 274 bp, Zea mays
  Clone ID: MRT4577_56581C.1
gtgtaaagaagcacggtgactggcgcttgcatgcatctgtcaaactcgtctcatgtgccacgtatccaaagttcaatgctctaaatctgacacatttaccactgataaaacggtggaaactcatatctcaaagagcctgtaccacgccctcgtatggaggggtaacagaatattataaaggtgatgcccgtgtgaaatgcccaccagagcaccatcttccttggataaggagacgatgcatgtccccagcatataagcaggggctcatgcttta

SEQ ID NO: 137178 - DNA, 1236 bp, Zea mays
  unsure (1)..(1236): unsure at all n locations
  Clone ID: MRT4577_56582C.1
cagaaactgaacataactttcttcgtgttgagattttaaaattactacaacccaatgtcatgggaattgatttcatgaaaatcaatcttgccaatatgggtgacctaagggctggcacaaaatcatggagtcaggaacatgatttccaacttaggctgatatttttgagattctttgcacagatcctgagtggttaccgtaacttcattgatactacttcagcgactggtttcaattctcaagcttttcttaaaaagcgttctcgagcaactaaccagcctgtcgactccatgtcaatgattatgcagtttttggagactcaagggttcttggattatctggagagatgcaacactgcagaagaaaatgcccacaaccttctcgataagttgcaggatgcaaccggaagaggacaaaaccctctaaccatatttccttctcaagtttctgatcctgagattataacaatagccaatcctgagattgaaggactagacaatagacactgctataagaggtttccagcaaatgcaagaacagaagaacaagaagaaaaacgtaagtcaattctagcgttagctagtggggctagtaagcaagtaccgagttctccttctatccgagtaaatgggggcccaaaggcagaaagtctgagcccaagagagagggcggctgagagagaaaggatggttctggacataaaagtgaagctccagggactctggcttcgtcttctgagactaggggcaactgaggatcctctctcatcttttgaatatggcaccatcctagctttgattgagtctgacgcagaaggcatcgggggaagtggttttgttgaatgcatcagagagcatattcattcgggctggcaatgtcgcttgactgatgaacaattcattgctgtaaaagaattgcttaagatggctataactcttgcgaactctcgcaacgacctggcgaccattagagatgctcttgaagtttctgctgaaatgtacagaaaagacccaaacaatgttcaagattatgttcagcgccatctattatcattgtcagtatgggaggagcttcggtatgtcatacttagtgtgaaaacgatcatttccgtattaaattgagcttaattcccaaattcatgtaaatcaatttgctccaacaatgttgatcttgccatttaccttggaacttttcagtagtaagaaagtttatacaaaagataatctattnnnaana

SEQ ID NO: 137179 - DNA, 331 bp, Zea mays
  Clone ID: MRT4577_56583C.1
ggaatttcttaatagacccactcgttcgcgggtgggtgaggtactcccgagtgggggtccatgggtttgcggatcgagatggcgacctttgatgctgagtaccgatgcttggtctgcaacctctcctgggccacggaggaccactccctccacaacaccttcaacacctacagcaaggttctcaagctcaagagcattctggatctgtatactcataggtcccgcgggttcagcttcgtcaccttcttcacagatgaggcgatgcggaacgccttccaaggcatcaacggcaaggagctggacggtctgaacattaccgtctacgaggccc

SEQ ID NO: 137180 - DNA, 359 bp, Zea mays
  Clone ID: MRT4577_56584C.1
gaatcacagtcagtcccatcttaccttgattctagaccaagaacctgaactcatctgacctgcttcaccaactggccatgcagcactcccggcataccatcaccaggaggatgagctaggatagcctacattaccacatgcatccattcgtacataatcaagcataatcacgtttcttgcattcaactatataaaggaagtctaattatatatctacagctggctgtaaaaatgctgttatgtaccgcaccacttcgattttttttgacactccacttgtgaatgatgtaaatctgattgaattgaattatttgcaatttggaaaaaaaaaaatatttatttaataattaatattccaa

SEQ ID NO: 137181 - DNA, 442 bp, Zea mays
  unsure (1)..(442): unsure at all n locations
  Clone ID: MRT4577_56585C.1
ctttgctatcgagctgacaagagctatgcaatcgagctgacaagagctaagcaatcgggggagttcactgatgtcttgcttcagcgccatgaccactacgactgtcggcagaggcacctactactactcgtcctcgccggggcggtcccgcggcggcggcggcggcaagaggccgtggcggcgttggctcgccaagtgcgccggcatcgccgcagccgtcgggtccaggctccggagatctgtcgtcagggccgtcgacggaggccgctcggcgcacgccgccgtcttcgtgctcatccgatcccgcgggntggtgccaccaccaccaccacggtcgacgaagcttcggcccgtctacgtttgacgacctctacagtcacagactacagccggtagccaaggcccccgcggcgtcgtcttgcgagaggagcaggtgcatgag

SEQ ID NO: 137182 - DNA, 667 bp, Zea mays
  Clone ID: MRT4577_56586C.1
ttgggtaccccgggccttccctcgagttttttttttttttttttttttttttttttttttttttttttttttttttttttttttttttttttttttttttttttttttttttaaaaaccaggggggggcccttaaaaaatgggccccaaaaagtttgttaaattgtccccaaccaaacccttccggggaaaaaaaatggttttgctcctttcctggaatttggggcctcaattcctaaacgggggaaatccttgatttaaaaaaaccgtcgggtttgggggcgggggggtaaatttttcgggttcaattttttggggggggcggggcccttttttccgggggttccctgaccctgggcaaaaaaaccccccagttgggttaaaatgttgggaaaacccgcccggccaaaggggtttttttcccaaattttttgaataaagcccaatcctttggggggcgtttttttgggggggccgggggccattccttttttaacacctacagccttttgggggggggttttttttttttccgggtttttaaactttttccccccccaaaggacattggcaaggttgaaaacttttgtttttttattaagggggggggggtttataccctggggggccctccttttgtatgtcccattttaaggtgtcaggacccc

SEQ ID NO: 137183 - DNA, 337 bp, Zea mays
  unsure (1)..(337): unsure at all n locations
  Clone ID: MRT4577_56587C.1
agtgatgatggtagtaagtnggaattggatgagttcatgatggaagtaaggtaggtggaagagctgcaggttctaaaggagggactgtacccatgggaagataggctcaaggtgatctagttaacatatccaacattaggtttcagacggttcggtgtggatggcatatgaatatgatccggtgtttgtgcaatccgacatctgaaggacacagcacatggcatcgttaagttcgttcagtaactttcggagccggaaccggacagcaaagaggggcagagccgcagagggctcgatccctcaagtgacccgcaggattcttgtgtcttgaatcatc

SEQ ID NO: 137184 - DNA, 345 bp, Zea mays
  Clone ID: MRT4577_56588C.1
ggggaaaatcaaataaaataaatgaaccgttttttactggtgggttctaacacccaacacaggggaaaccactgttagggttcaaaaaacacggggggatggtgagggaattttaaaaatgatgcccaaattttgccaacatttcattaaacagcccacttaggtgaaacccccggggggggcaaaaaaccccggttggtggccaattaattggaaaaatgccccaattttgggggcattttttaagcatttttttttaacttttttgtgcccaatttggtggtgggggccctccaaattaaaactggtgggcctggggccacaaataaaaattgaccctttgtt

SEQ ID NO: 137185 - DNA, 256 bp, Zea mays
  Clone ID: MRT4577_56589C.1
gtttgtgtttgtgttggcaaatgaggtagcggcgattgtgtcaaacagtctcgccgaagaccatgcaagcgccgatcgatccatagcagggccaacccagcctcatacataatctgagaattcttcagcgcacgacgctcaccagttaggctggactggaacacacctgctactactccctgctgcacgccagtgaatcagtgatgagacattcagagatgcacacctagtaatgcgtttctctctctcttcctct

SEQ ID NO: 137186 - DNA, 361 bp, Zea mays
  Clone ID: MRT4577_5658C.1
acgatcctaatccatggtcatagctcctaattctattctacatttaccaacaactaagcacacgcgaccgctgagtatatttcaagctctcaccggatcctgctcaatgaatcctaactcccttgacgtgaaagcctcagctgatgccactatatccacacccaagcatgcaccttataccacttccatccacattgacgttgcggccaaacagtctgacattgacaagacagaggaagacaagtatgatgcactaacatcgacggcaaatcaagacccagcatccaccactgatcctaaacatattgctggtcatttcaccacatatgaattcgcggacatcactgcatagcctaatatc

SEQ ID NO: 137187 - DNA, 358 bp, Zea mays
  Clone ID: MRT4577_56590C.1
aacccgccccgggccccggtggaaaggggaaatgccaaaaaaccggcccccggggccgggggggggagaggggggaccaaacttgggggttgcatgggtaaaggccctaccgggaaaaaaagggaaaccgcaaaccggtccaaacaacaaacgggggggaaacctaaagcgtaaaccccggggcccccaaggggggaccaaacaaaaaattttgggggggggccccccgcccactgcccaaatggaaaaccgggggggccggcggcaaaaaggaatagccaaacccccagggggggggggggggggttttgggccctcccccccccccccggtaaaagaccactggaaaggggggctt

SEQ ID NO: 137188 - DNA, 410 bp, Zea mays
  Clone ID: MRT4577_56591C.1
ggggtaccggcgccctttctcgagtttttttttttttttttttttttttttcgcggcaaacggataataccttaatttctcgccgatggaaagaaaaaaaataacatgcacagctgcggttcaggcattacacaagagtttcttggttaaggttagacagaacgagggcaatttgtgaccaccacgccgtgaacagactacgatttaggtagacggcagtacaaactaggtggtgggcatgacactcaagacatgtgcatggaagactgcccgtgtctgtcggactgtgcatgtcttcggacacggccacggtcacgcttaaccacctcgctctctgaagcgggatgaggtctcgaagatcaccatggtggtagtatggcagcgcagggtcaccatccatatcgaagggg

SEQ ID NO: 137189 - DNA, 319 bp, Zea mays
  Clone ID: MRT4577_56592C.1
cttcttcatgtttcaaatgggacttcatacttttatgtttttccatcaagctatgggatgggctttcttgttctttatacttgtgtgcttctttcaactgctccaaatatttaaatagcttacatgtgctcttgttacattcagattgttaaggagaaccaaatgcttcacaaaggctctgttgagattgaagatgattttgctactcttgctgataagagtatttttcctggggattttctctgggtcagagactctgaaatatatgagaaccgtgacattgcagatgagatttcagaacaaaaggatgatatgctac

SEQ ID NO: 137190 - DNA, 499 bp, Zea mays
  Clone ID: MRT4577_56593C.1
gagaagccaactcagactcagccaacagagattgttgatttgcctcttaagcaagagattcattgcagctcagcatggctcagaccagctcatacttcatgctgatctcctgcctgatgtttctgtctcagagccaaggccaagaggcccagacagagttgccccaggcccggatcagctgcccagaaggcaccaatgcctatcgctcctactgctactactttaatgaagaccgtgagacctgggttgatgcagatctctattgccagaacatgaattcgggcaacctggtgtctgtgctcacccaggccgaaggtgcctttgtggcctcactgattaaggagagtggcactgatgacttcaatgtctggattggcctccatgaccccaaaaagaaccgccgctggcactggagcagtgggtccctggtctcctacaagtcctggggcattggagccccaagcagtgttaatcctggctactgtgtgagcctgacctc

SEQ ID NO: 137191 - DNA, 320 bp, Zea mays
  Clone ID: MRT4577_56594C.1
ctcgaaacatgaatgaagctttactgcaaaaaactttgggggcgggtgaaaaaccaaggatgaacctttttttctaacgatcattacttttcaattgtcttggaagccaaataattatataacacatttacaactggcacacactcccttaccactttgttatcctttatctccaccacccccttgatgctttaatcgggcgaagcattgggatccaaaaaaagggtcacttaaacacggccaatgaatcaatgtataatgaggggaacaaattctttttacaagcccaacctccaaaggacgcaaatttttttttcccc

SEQ ID NO: 137192 - DNA, 797 bp, Zea mays
  unsure (1)..(797): unsure at all n locations
  Clone ID: MRT4577_56595C.1
ttgggaccctcgaggccggccgggagagccttattcgttgactcccgattgtctcctcagaggttgatagccaagtgcggctgtgtctggcgagagagcagcgtgaggccgtgggcatacatcgcggtgcaagattaatgagaccgatgtctcccatcaaatgctgcacatggtggggttcatcccccagagaggtccacgagaaggtcaacgacatctccgggtcccgccgaggacgaattacgcattgacaggttgcatcttgctcaagctgagacaaaaaagatcaggccacagtacgaacgaacagagaagcaggctgcaccacgctagaggagttactactctatgcaggtgaatgcttctcgcatcatagttcttcaaggtcaggatgcatctaattatccaaatgacaggtgatgccatgaacgaacttctccttgtcagccacaaccaccatgaacacgataaccttttgaaagaccataatcattcaacggtttgctccgttggaaagagccagcagtattgctccgttgccccaaggaagatctctcatcgtgaggaatcagtactgcattgctggaagcacgagtatgcgtcaaaagcagatggtcatggaccggagacatgtgcagatcgtgatggatacctgccaaccggctgaaggcagtcatgatgctcatggacagtatcgctctgggggtatcgtattgtcttctcgagatggaaagattgtgtctgagactcacttgacgaagactngaaagagttttccgcaagaaattgccagagat

SEQ ID NO: 137193 - DNA, 122 bp, Zea mays
  Clone ID: MRT4577_56596C.1
tcgacgggagtgtgcactactgtgacaatttggagaaaattaaatcaaggggcgagctctacaaatgtcgacaccttgtctgcaagggttttccgctgtcttattccttcggacacgcttcc

SEQ ID NO: 137194 - DNA, 338 bp, Zea mays
  unsure (1)..(338): unsure at all n locations
  Clone ID: MRT4577_56597C.1
agagcaaccgcatcgaactctacctgcctttctctcgtccctggcggcggcggcaggatggcggcttctactgcgaagacnngtgaagatgtaaacccccacaattttgtcaaggctaatccggccaacctaaaagctccgggaagaatgaacctcccgaattggtttaccattgtgagaactgcaaggttcaaggacctccctccttaagaccctgagtggtaatacatcagggctgcatctgtaccagggaatatctatttgacaaagcacttgggtttggggcgtccacaaaatttatagtgggcgccacaggaaaaggtcacacccaaatcaca

SEQ ID NO: 137195 - DNA, 361 bp, Zea mays
  Clone ID: MRT4577_56598C.1
gcaaaaggggatattgattttgtgggtggtttcattcattggaatgctcttcaacttccttgcgctcatgtacattggtgagtttgttagctatgtcttcatggatgtttggatatactgtttttaaaaaggtatataatgttcttttatgataactcgatgtgcatagggcatacgacatactaaacttgtcaatttttctaggtgtaatgctctctctgttggttccaccactctatgagaagtaccaggatgagattgatgagaaagttggtgtagcttacagtgtactatcgaggcacatagataccatcattaccaggactcgacaatcagccaagtagaagaagactgagtaaaa

SEQ ID NO: 137196 - DNA, 180 bp, Zea mays
  Clone ID: MRT4577_56599C.1
gtgggacctgagcgtaattggaacccgtagcccttttcggcctccttcccggccgaacagcctcgacagcccgaaaccttggccgccgatcggtttcggagaagagaaccaaatcaggatgtttctcggttcgttcccgcggggcccgaccaaggaggctgcttacaagcagctgcggtc

SEQ ID NO: 137197 - DNA, 1485 bp, Zea mays
  Clone ID: MRT4577_5659C.1
ctcgcaaaccctatccccgaccccgattcccctctcgcctctcgatctctggcggcggcgccgtcgttttcccccatcggctcagcgactctcgagtcccgacctcgacgctaccggctcagcggctctggtgctccgtcctccactcctcctcctccttcatccattcctccggtgcaaggtccgtctctggtgtaccgcgccgtcctgttcggcggcctcagcaacgacgtcatctcggccggagccctggggatcacgaccgcacagctggtgcgcatcaacgacctccacagccggacggtgcaccaggagaacgccctgtcgaaccgactcgccaccctgcaggaagacatcgccaaccgcccgctcctgcccatcgtgcggcagcgcgagctcgccaccgcgacacgactgggagctgctgcgagcggaagctgcgacggcgcggcacgacggtggcttagggcggcacggctaggagaaccagagccggtattgtcgaggcggtggacaacctgacgctgcgtcggttcctgcgcgcgcgcgaccacgacgtggacaaggcctccgccatgttcctcaagttcctcaagtggcggagggaggcggcgcccggcggctccgtgccggaggagcaggtgaggagggagctgtcgcaggacaagctgtgcatgggcggcgtcgacagggccggtcgccccatcctcgtcgccttcgcggccaggcacttctccgccggccgtgacatggcagagttcaagagttttgttgtctacttcttcgacaagatctgtgccagaatccccagagggcaggagaaattcctctgcatcgttgatctcaagggctgggggtactcaaactgtgacgtccgggcatacattgccgctatagagatcttgcagtatttctacaggttaacaaggtacatacaaagaaggcggctgctcccaagattgctaaacaagagtccagtgatgatgacactagcgacgagacctttgaatctgatgagttttcagagtttttagatgccaattcatcttctcattaaggaacctacaaagaagcctgctgctaaacccttggctgcagttgcaaaaaatggttcgaagacggtcaagcaagagagcagcagcgatgaggacagttctgaagatgagtcggatgacgacagtgatgatgtgagttgaagtttcctcggcgtccctgcatcgcttccaccagccctccccacacgcggcgacagggtcgtcgtcgtcccggctccgcgtcggccacacccgaacgaccgtctccatgtcgtgccgtctccagttatgcgagcgaggctggataaggtcgtggggttccaacaaggtggtgcagctccattcgtccctccacctcacccgccggccatctctcgatttctttttgtgtgctcagttttttctttgtgtgtcatgagtttcagaacttgattgggatggtttttgtgcc

SEQ ID NO: 137198 - DNA, 342 bp, Zea mays
  Clone ID: MRT4577_565C.1
ccggccggggcccttcacccacgatcctcacaccggcgccgctccttcgtccgcctccgccctccgccgccgctcctcagtccgtctccaccctctgtcgtacttccgccgccacagcgccgccctccctcccccgcctactgcagcggagatctacaggtgaagttatttcttcgtccacaccttgcttggatgattcccttcatttttgctctcgatcaagtccgaatatttatctttccctgctcggatcgttactgtttttctctagcgctcaagttccatatttaattggcactgcagtattcttgttaccgaattaaagtgcgcgtatcatctata

SEQ ID NO: 137199 - DNA, 549 bp, Zea mays
  Clone ID: MRT4577_56600C.1
acctcccacctccccccaaaatattccatccatcttcagcccgggcagacgcggggggcgtgccggtgatcccgcccgcctgtacgacaccgcatgctgagtgccgctgcggtgtactgcgacaccgccatggcgcaatacccgaacggtggtgctgaggtacgcgcgaccccacttgctgactaggctgggcaattctgaagatggtgagggggggatgggcctcaactccatggctgggatcccgatgcaccctcaccgtccggacctcagcggtctgccaatggacaatgtaatgcaacatatggacctggacatgtcttcgcttgacggcacagacggccagagcagcgctttcgcttttgccgagccacaaatgcagcagtcggccgttccaccaaacaacaccatggccaccgacatgcaaatgacgggcgccggcgcaggcccgctgcctacgggctttggcgctcccaatatgaatccctctggcagcaccctcaccgagttcacaaagcgccgaaactggacccagcgcgtgctgaaaga

SEQ ID NO: 137200 - DNA, 310 bp, Zea mays
  Clone ID: MRT4577_56601C.1
aaagagaactggcccatttttcttttttttccaggtaaaaattaagggcccaaaaatttgggtaaaaattaatacgggggtgggtcaggtaccccaaacccaaacctgggtagaaaccagatccctgaagattggccaagggtttgcccaacaaaaggggggacttaaccttccgggggggccaatgttttgacagggcttgttccctagtccaagagataaaaaaaaagttgttttaaagacccggggggtttttaacccaatttggcaatgaccgcatttgggacttcctggggggggctggggcccc

SEQ ID NO: 137201 - DNA, 346 bp, Zea mays
  Clone ID: MRT4577_56602C.1
aacctactctaattttccccaactctcttggggtgtgatcccaacgatggggcagctacataaaaatccttagctcatccgtattataaccgcctcccacaactgcagagataaccatcatgccaaccaataccaaaaatggaattccattcacaccgataaaaaacgaccaactaggaattcaaataacttatattcacggacataacttactataaatctcaacttcttaatgataacattaatagcacttaaaaaaccaacactgtatatcctacaacaccataccatttcacgagggcatttactaacatctatgaaaacggaggaacaagtggcgcatact

SEQ ID NO: 137202 - DNA, 344 bp, Zea mays
  unsure (1)..(344): unsure at all n locations
  Clone ID: MRT4577_56603C.1
nnaacgcggggttggggttttttgtaatgcaaacatcacttcgggtggggggggcatatggagagggggttaggtggcagcatgttcaaaatattctttgacatcgagcatttgatgccacacaatacattggagtttttaggataagcgtcagtcccctgtgtgtctaatgagacccatcaccaccatacgaatgacatctgaatgggaattatacaggggaaaaggaaatgaatgctggctagggaactggttgtgaagttgcagcactcgttcaactccccatatggttctccttgatagcatttcctgagatttgggggacacattgccttacctttttt

SEQ ID NO: 137203 - DNA, 637 bp, Zea mays
  Clone ID: MRT4577_56604C.1
ccagtcccgaaggcactactggccagtcctacaaccagtattctcagagatgccatcagagaacaaacactaatgttaattgcccaattgagtgcttaatgcctttagatgtacaggctgacagagaagattcccgagagtaaatcatctttccaatccagaggaacaagcatgtctctctgccaagatccatctaaactggagtgatgttagcagacccagcttagagttcttctttctttcttaagccctttgctctggaggaagttctccagcttcagctcaactcacagcttatccaagcatcaccctgggagtttcctgagggttttctcataaatgagggctgcacattgcgctgttctgcttcgaagtattcaataccgctcagtattttaaatgaagtgattctaagatttggtttgggatcaataggaaagcatatgcagccaaccaagatgcaaatgttttgaaatgatatgaccaaaattttaagtaggaaagtcacccaaacacttctgctttcacttaagtgtctggcccgcaatactgtaggaacaagcatgatcttgttactgtgatattttaaatatccacagtactcactttttccatatgatcctagtaattgcctaga

SEQ ID NO: 137204 - DNA, 230 bp, Zea mays
  Clone ID: MRT4577_56605C.1
acgcattaactgagcccagcgctagctgctgtcggggcgcgccgtcttcgtcgagccggtcggtctggtgtggtctgggctggctgtctgccaagttacgcagcctggctccaccgattgcacaccatacattgagcgttgggtcttggtcgtacgtgccgttgtactgtggaagaggccgtggctctacaacagtgtttatatgcacaattacacatatcaccaccctg

SEQ ID NO: 137205 - DNA, 357 bp, Zea mays
  Clone ID: MRT4577_56606C.1
cacacgcgtacgtccacgctggcatattttgttttttatatagcgaaattcacgagcaacatattatcactaatgatgcccaatacttttgccgtatgtgctgttaacgctacatcagtaagcgctggttcataagcttctatagcacattgtttacaacaatacctttcttcaatgatagccgcaggatgtgaatacccagctattcaatcctatacggtacaagaggccatcttagcaagcattatacggttattagctttgtctcaacaacaaccagtcgctcttttgtagcagcattgctttcaaacctatgtgtcaccaaagtatcattgtacaacttctacacagacttaa

SEQ ID NO: 137206 - DNA, 977 bp, Zea mays
  Clone ID: MRT4577_56607C.1
cttgcattgttcgtttgctcgatcgttgcaggtaatggagaaccctgctccgagtatcgtagtgccccccatcgccgcacctgtatcagcgaacttcagcagactcgccttccgcaacctgtacatccgacggacgggtccagacagcagggagatggtgactgtggagggaagaagaggctctagtgatcagacaggcgacatgaggctaaagggctccacgctccttaccgaaggagtggtgacggatggatccgatgaatgggcaatctacggcgggaccggagagtttgctatggcgagaggtgtcgtcaaaagaaggtaccttgccgatagggacggcgccgggaacactgacgagctcagcatgcaggttttctgcccggtgtttggctcatcacagcaaccaaacaagcaggactccaccatctctgtcaccaagattgggttatggggtggcgaaggagggtcggcgcaggacatcacgacgacggagccaccgcagcgcctgcacagcctcaccgttcgtgccagtgccgccgtcgactccatcgagttcacgtatactgacagaggtggccagaggcgcgccgctgggcgatggggtggacttggcggcaaccttcgaacgatcgatcttggcgacgccgaggatgtcagggaggtctcaggaacgtacggcacatttgaaggagccaccacgctgacctcgttcagaattctcaccagcagcaggacatgggggccatggggcgtcgagaacgggacgcgtttctgcatcaccgcgccggtcggcagcagcatcgtggggttctatggacgcgcgaccagcaggctcgtcgctgcgcttggtgtttacctgcgccgactttgatttgatctgaacagagcaggctacctactagcaattgcctgctcgatcaattatctttcgcaccctttattattaatataatctcgatcggtcatcgtactcc

SEQ ID NO: 137207 - DNA, 1566 bp, Zea mays
  Clone ID: MRT4577_56608C.1
ccgaaaaaaaaaaaaaaaaaaaaaaaaaaaaaaaaaaaaaaaaaaaaaaaaaaaccacaaccccgtgcccaacggtcacgcttgctgtagtttgttggcccgatcctttgtagatgatggagaaccgcacgccaagtatcgtcgtgccccccgttccgtcagctgtatcagtgcacatcaccagaccagccaaccgcagcgaacacagctcccagagccagccagccgacagggtgcgtcgcaacgtcgaggaatgtgcttgcattgttcgttgctcgatcgttgcagtaatggagaaccctgctccgagtatcgtagtgccccccatcgccgcacctgtatcagcgaacttcagcagactcgccttccgcaacctgtacatccgacggacgggtccagacagcagggagatggtgactgtggagggaagaagaggctctagtgatcagacaggcgacatgaggtacgtgagtgacttccccgtctacgatggccgtggctccgacgccgtcctggtggctcgcgtgcagggcgtcacaaccacgttcgggaactccaaccagttcttcaccgtcgccttcgaggccggcagcaggctcaagggctccacgctccttaccgaaggagtggtgacggatggatcagatgaatgggcaatctacggcgggaccggagagtttgctatggcgagaggtgtcgtcaaaagaaggtaccttgccgatagggacggcgccgggaacactgacgagctcagcatgcaggttttctgcccggtgtttggctcatcacagcaaccaaacaagcagctgcatgtattatgtaggactccagcatctctgtcaccaagattgggttatggggtggcgaaggagggtcggcgcaggacatcacgacgacggagccaccgcagcgcctgcacagcctcaccgttcgtgccggtggcgccgtcgactccatcgagttcacgtatactgacagaggtggccagaggcgcgccgctgggcgatggggtggacttggcggcaaccttcgaacgatcgatcttggcgacgccgaggatgtcagggaggtctcaggaacgtacggcacatttgaaggcgccaccacgctgacctcgttcagaattctcaccagcagcaggacatgggggccatggggcgtcgagaacgggacgcgtttctgcatcaccgcgccggtcggcagcagcatcgtggggttctatggacgcgcgaccagcaggctcgtcgctgcgcttggtgtttacctgcgccgactttgatttgatctgaacagcaggctacctactagcaattgcctgctcgatcaattatctttcgtaccctttattattaatataatctcgatcggtcatcgtcctcctatgtcaatgtcaaataaaggtcatgtagtcagataaagttggatttatctagctatcatcgtaatccggtgctgttgtatgtgtgttcatgtcaaataaataaaagtggtcttgtgtatacggctgccatcgccatgtgccaaaaaaatgccatccatgcatcgcacctatccaaggtaagagca

SEQ ID NO: 137208 - DNA, 212 bp, Zea mays
  Clone ID: MRT4577_56609C.1
ctttctttgatgcttaaaaaaaagcaagacgcttcctcttgttcccatgaaacttccatcgggacccatcaccaaacaccactagagctaggaattaaactacaacttaagtgaatcgtagcccattttattttaaactacgcattggtacccacactttccaaattgtaaaatgcgttcacgaacacaaacacaaacttatctcataaccg

SEQ ID NO: 137209 - DNA, 366 bp, Zea mays
  Clone ID: MRT4577_5660C.1
cggtaacgctggtggtgagcaccaccacagaatcaacatggacaagtaccaccctggatacttcggcaaactcggtatgaggaattaccacgagaggaagaacaagctgttcaaccccgtattgaacctggacaagctgtggaccctggtgtccgagcagtccaggctcaagtatgcctcagccaccgacggcaaggtcccagtcatcaacattgttaaggctggttactacaagttactaggcaaaggcaagctccccaagcagcccgtcatagttaaggccaaattcttctcaaagacagctgagaggaagatcaaagccgtaggtggtgcctgcgttttgtctgcgtaatttaagtatacatt

SEQ ID NO: 137210 - DNA, 1498 bp, Zea mays
  Clone ID: MRT4577_56610C.1
cattgggtacctcgagtccggccgggattcaccattgcccgtattgtttaacactatcccgcacggttgcgatactctccataaattgacgccaccgtcgtcgccatcgccgacgaccttgatgactccgactgccgccgccccctgctcgcccagaacgaagagatccacctctacacagagccccctaaccgtcagcactcctcctctggatgctgcggcgaacgcagctcgaggagcagcggaagccggagagagtggcctctctggacgtgttccgcggcttcaccgttgccatgatgatactcgtggacgaacgccggcggggcgtggccgggcatcaaccacgcgccgtggttcggggttacggtggcggacttcgtcatgcctgccttcctcttcatcatcggcgtctccgccgcactcgtattcaagaaaatggcaaacaagacagctgcaactaagaaggctgcaattcgggcttcaaaacttttcatattgggtgtgattttgcaagggggatacattcatggacgacacaaattaacttatggtgttgatttggatcatattcgatggctaggtgtgttgcagaggatagctattggatactttgtagcagcaatgtcagagatttggcttgtcaacaataatttggtttgttgacttgttccatttgttagcagatccaatgtggagtcagaggtagtcttggaccaccttgcaatgcagttggcttggtagatcgagttttgcttggtgaaaatcacctatataagaacccagtctacaaaaggacaaaggtcttcatccaagaaattgaatgatgtttactttttactcttcttcagtcttcatcaaaagtcgttaattttttataggacagaaattttataataccatatcctaagcataagataacttcttttttcttttaatttcatcccataggaatgcagtattaattctcctgattatggaccacttcctccgaatgcaccagattggtgcctggctccatttgatcctgagggtttattaagtacgctgatggctgtggttacttgttttgttggtttgttctttggacatgttttaattcattgcaagaatcattcacagcgaatgctaatatggctgctagcttctgtggtgctgacaatctctgcgtatttagtgctattattaggcatgccttttagcaagcctttgtatacagtgaactacatgctactcactggaggagtatctgggttcttgttgctgctgttgtactacatagtaagttttattttctttgggcctcatatcccaattttgtttgttacattccgagtgccgaaccatttctggttattattacttaaagagtattatgttattcttgatatgatttttttgtattgcttggtttggtatgaccattcttgtgcttaggctgcctctggcagattcgctaccccacttactatcccacctcctatttcaactacactct

SEQ ID NO: 137211 - DNA, 2047 bp, Zea mays
  Clone ID: MRT4577_56611C.1
tctcgagagcagcttgaccaccctgccataccttctttcccgccttgcgggccgctcgcgctgtagtctccggcaggcaccaacaaggctcgtcactcccctacctccctcggtactcgctccgtctctcgtctctcgctcgcgcatcggctgggggcacggagaacgggaggcgcggtatgtcagaagcggcggccggcggcgcatcggcctcgcccaggcctagtcccgcacggtgctcggtccttctcaaagaataccaccagcttgccccctctcccctgcgcaccttcgcccctgcgcgaccaccgccccaaccccagcggcttgcgggactgatccacagtccacgggcacggactccggccgggcgaggatccgcagaccgcgcagcctccaacgccgcatggagatcgtgcgctcccataggcaggtcgccgccgcagccagcggcggcgtcaacagctgcgcgggggccctgccgacctacaaagcggcgccgcagctcgaggtgcggctggaggagttcgagctcttcgccatcgaccgcctccgagttctcaaggggatttcggatggactctcacgggggaagaggccggaggaggtggagaaactggtcaatgaattgtggaagacacacatggggcaccaggatccagcagagactttgaataaggatataatatcacactttgtgctccgtcttgtctactgcagaacggaagaattgcggaagtggtttctctccatggagactacactttttcggtatcgctttcggcttgagaaccctgaatcacagaggatgcttatgactgagtttcaactgccatacaaagcattgccacactcagaattcgaggctgtgaaagacaagttgagccaagttgcacgttccatcggtcaatctgccaatgttgatcatgtgttcttcaaggtacctttcgaacaagttcctgatcttgttgctggccgtcgggtatttctttcaaaaggctatgcttatgtggccatgagccaggtggtttctctagtggttactcaattccgctgcaatatctcaaaggcacttgctttaacaaacagaaaatggacagcaactattaaagaacaagaaaaggacaggttgactcctattgttgaagcattaagcaatgcgtattttggacctgattactctcagccaaaggatgctgttgacatatctctaaaggatattgaccaactggctaaaagttctttccctctttgtatgcggcatatgcttgataagttgagagaaaaccatcatctgaagcatggcggcagattgcagtttggtctttttcttaagggtgctggactaaagttggaagatgctcttgcattttggagggcggaattttctcaaaagattggttctgagcggttcgacaaggaatatgcctatagcatccgtccgacataattatggaaaagaaggaaaacggacagattacactccatattcatgccaaaatatcatatctgcaacacctggtgttggagatcaccatggatgcccgtttcgacattttggcgaagaaaatttgcgggcagcactcaacaaaatgggcgttggtgggcatgcattggaagagataatagataaagtgaagaacaggcattaccagctagcttgcacattaacatttgagaccacacacggtgtctcctgtgattctggaatcaaccatccaaaccaatatttcagtgaaagccagaaagttctgcgggccaaaaaccagaaaatggagagccaatcagcaacctaaattgtattgcagctggagaaactatgcatcttcaaaaatcttaccagctgctggcttggcctaaaaagaccaggctccagctgttagctgccatgccctacccaagtgatggcaccacactgtacactagaagtagaagtgttatctagtgctgcgaacagcagcaggtcaaatgcgtgtgtacatgtaattctccgaagaaccaagagtgaacattctgaatttgatgggatcagctgtgctgttatgtt

SEQ ID NO: 137212 - DNA, 659 bp, Zea mays
  unsure (1)..(659): unsure at all n locations
  Clone ID: MRT4577_56612C.1
ttggtggatattgttatattcattaattcacttatttattcggcacgtgagaaaaaatgctgtgctcttnnngtttagccaagtgatggtnngaaatctagaaaaatattannccttacctgaactagcaataagcaccagtttngannnttttgcgatagctgttaattggttgggatggngaatctcaagttagtcatttgttaggttcactggattaaaaatttgcatagactaatatgagctcatcctctagatttagtattcatgttaccacnataatggagacatcagattttttttgccttacttacaggctgcatgcctgcatgtgccatactatttgaacagaaagtatcttcatatatgtgtatgtatatcatacaactaatcatcttcctagagtggtgctttcttttgaatagcttggatgagctgtggtgtttgataataaactgcaatttaggttgaaacttttttaaccaagatgtgtctatagtatcagttactgcatgatattttgatgtgtgtgctgattggaccacagaaaaagctgttctaggccgctagggatatgaattttgttgtacttgtaagggttctttagtacaactattttgccaatttttgtctgtgggtatatcatagggggctttttt

SEQ ID NO: 137213 - DNA, 939 bp, Zea mays
  Clone ID: MRT4577_56613C.1
ccccgcgtccgctgagcggttcgacaaggatatgcctatagcatcaattcggcttaagggaaaagaaggaaaacggacagattacactccatattcatgccaaaatatcatatctgcaacacctggtgttggagatcaccatggatgcccgtttcgacattttggcgaagaaaatttgcgggcagcactcaacaaaatgggcgttggtgggcatgcattggaagagataatagataaagtgaagaacaggcattaccagctagcttgcacattaacatttgagaccacacacggtgtctcctgtgattctggaatcaaccatccaaaccaatatttcagtgaaagccagaaagttctgcgggccaaaaaccagaaaatggagagccaatcagcaacctaaattgtattgcagctggagaaactatgcatcttcaaaaatcttaccagcaggtaagcactgaagcaatattcatccttgaagccaattatgttatcattactgattgttgaccattggcgtctacctggaatattgttgcttcctgctgttaccaaattccagctgctggcttggcctaaaaagaccaggctccagctgttagctgtcatgccctacccaagtgatggcaccacactgtacactagaagtagaagtgttacctagtgctgcgaacagcagcaggtcaaatgcgtctgtacatgtaattctcgaaagaaccaagacttctgcatttaatgggatcagctgtgctgtgctcttagacctcatccaccagtttatctataaatttatccaaaatactgtctttcattgttgtatattgtaaaccgcgttgttcgcgtagtagggtttgaaatggggatgataatggataaactgttggagatagtattatgttattgttaaactctttgagtagaagagaattctttggtttt

SEQ ID NO: 137214 - DNA, 843 bp, Zea mays
  Clone ID: MRT4577_56614C.1
ggatcccccgggctgcaggtcgacattttggtgaagaaaatttgcgggcagcactcaacaaaatgggcgttggtgggcatgcattggaagaggtaatggataaagtgaagaacaggcattaccaggtagcttgcacattaacctttgaggccacacacggtgtctcctgtgattctggaatcaaccatccaaatcaatatttcagtgaaagccagaaagttctgcgagccaaaaaccaaacaatggagagccaatcgcaatcagcaacctaaattgtgtcagcagctggagaaactatacattttcaaaaaacttaccagcaggtaagcactgaagcaaaattcatccttgatgccaattatgttatcgtcactggctgtacctttggcgcttacctggaatattgttgctccctggtgtttccaaatcccagctgctggcttggccagttggcctaaacgaaaacctccaggctccagctgctagctgtcatagtcatacccaacaagtgatggcactggcaccacactctatactagaattgttacctagtgctgcgaacatcagcaggtcaaggcgtctgtagactctctacatgtaattctcgaaagaacccagactattctgcatttaatgtaggatcagctgtgcttgctcttagaccgcgtccagcagtttatccataaagttattcaaaataatgttttgcattgttctaacttgtaagccgtgttgttcgcatagtggggtttgaaatggggatgatgatggataaaatgctgtagatagtcttatgttattgtcaaactctttgagtagaagagaattctttgattttgattc

SEQ ID NO: 137215 - DNA, 192 bp, Zea mays
  Clone ID: MRT4577_56615C.1
gacgctgggttcgtgcgcgcggaccagatcgacctcaagagcctggacgatcagctctagcgccacctcggacgccgggcggacgtgggagtcggcttaccctccgggacggggagccgctgctgcgagtccgcgatgctgggcccggatgagctgacgccgctgcggcggtgccgtgaagactgggagatt

SEQ ID NO: 137216 - DNA, 395 bp, Zea mays
  Clone ID: MRT4577_56616C.1
cgcccctcctctcttttccttgcagccaccctccctctttcccctttgctggtcatcctccctctcccctctctgctggccgccctccctctccctcctatggtgctgttacccaaaatcaggagcccggtgggcccttccatggtggcttggtgagaggaagaaggaaggggaggaaggaaaagtgaggagatcaagagggatttcgttttcctttaggtggtagtgctccggatcgtgcctagcgccattttgattcccggcgaaggtacttgatgcttgttgagggagtaggaagtagcgacatgtccaccttcacaccaaaataatattatttatccacagttaataatttaattggaacatctaatttttgaggatgttatttaataaac

SEQ ID NO: 137217 - DNA, 327 bp, Zea mays
  Clone ID: MRT4577_56617C.1
gtggggaagccacaaacattaggaaaaaaactttattattgaactataactcataagcaatataaaagagggcacccccaatgatgggttgttggtaaaaccctgttgggtttgtcaaaacatgttggttgaatggcaacaattgttgccgatgtaaaagggtgccaaccttaggggcaacgtgcaaggataaccggcacaacctttgttgtgctaaaaaagcaactgggctcacaacacctagcttgctgaatggggacagtgtgcggtgcacacaagcaggaaagtgacatgctgccactggggtcgatggaaaaaattgctggg

SEQ ID NO: 137218 - DNA, 533 bp, Zea mays
  unsure (1)..(533): unsure at all n locations
  Clone ID: MRT4577_56618C.1
tttttnnnnnnnnnnnnttttggcggccgcgtcgactttttttttttttttttttttttgctctctgctattataccatctatatctataatttcagagtttcagctttgtccaataacacctagtctcatcaccttggtgtacttaattgtgttggagagaacaaaccaacacaattaagtacgccacccataaaatatactaccactgttatagagcaatcgatcctccccttccatctcttcttcgtgactaattaaggcagccgtctatgactgactagctacgtacacactaatacctgcatcatgctgctctggactctggtgcggccatgaagggcttgaacgtgaggacaagtccaaggagctcgatggcattgagaagaaagaacaccatctggtcacctggaaagaagaaagcatgctgccgttcttgtgcccaagagaacacagtgcctgcagctgctggagcgattgacttgaacagggacatcactgtcaccgacagtccgttcgcgtcgacgcggccgc

SEQ ID NO: 137219 - DNA, 417 bp, Zea mays
  Clone ID: MRT4577_56619C.1
agatgtaccgacaccggtattaaaagtaaccatgatcggacaaggggttttgaacaaaattgctggcgttttagaccctggttggatagcacaatccattttcgtgtcagcacattgagttcgttaactaacgaaacacaggacctcactgacgatcggggtgaggatagaccgaacacacccctagtggtcgcataggctggtccctggcatgatcaaaatggtgacgcacagggtctcgacgttaacgttcgggctcaccaaagcgcagatgtactatctgcacgggtggcgctttggcatgttctactgttcagtccagatgctagtccatgggagcagtggactgtattccaccgagtatgcgcccccgttggggccgtcattggcggaagcgcatgaggatgcgtcttggtc

SEQ ID NO: 137220 - DNA, 340 bp, Zea mays
  Clone ID: MRT4577_56620C.1
ttttacgcgtccggccaatttagtcgcagttgggatgacgcaaatctgctgttttggcattttagaaattcccctgcaaagcaagatggggcataaagttatcgctaaggaatttgtcctgccctagattgttcctgatgcaccaactttggtgcataaagttgctaatgtcactgctttatggtcatgatgtgtctatattttgttggcttgcagtcccttgatgcgttcgcccttattaattttggtcaggtcacgatctacaatgttggattagatgcacctcacctgcatgctgaaggatgtagtacccaattactaaattatttcgtgtggatgc

SEQ ID NO: 137221 - DNA, 307 bp, Zea mays
  Clone ID: MRT4577_56621C.1
gattcaacccacgcgttcctcatacgttctacaacgccatcataatcgtaaacgatttttttatcgtctgggcctttacccataggtgggcatgaactgtgaagagctccttgcgatctggcacgtagcgctacctaattggttcgacgtggttactgatgaataaccgatgcacgggcctcgtcattgcactggggcatactaaacactcaacggacgatgggattgttaacccacgggcaaaaccctgacttggcctatcatgcgtacattttacatttttctctgatgcactttcgagtgctgt

SEQ ID NO: 137222 - DNA, 434 bp, Zea mays
  Clone ID: MRT4577_56622C.1
atattcaaaaataatcaaacctgaccctgtttatacacattaaccctgacaaaatatagcctcatctcaagaaggacctctgcacacaaataatagcacactccaacgtcttaaactgagatagaccatcgcaccctgtaataatgcaagaggttcatgatcggcagttgcgatcgattgaaacaccttgagcacaactacgcctgaagacctaatttccctgcgaggcggacatatctaggggcgacacgacaggtgatcatctcctactattcccataaaacactcattgctaactgcttgaccaatctcataaaacgttggagaccaaactagaacttctccttgcccatacactcaatatggaagtccatgcttaagaaggggactgtcttattgttgacgtggttcttgcacccatacaaacattaggg

SEQ ID NO: 137223 - DNA, 704 bp, Zea mays
  unsure (1)..(704): unsure at all n locations
  Clone ID: MRT4577_56623C.1
gccggccggtccggaatacgagccgcctatccctaccgccgccgcgaatcccgatcgacctctccatgaccgtgctgaggcggcctaccccgggcacggcccagtgcttcgggcggaagaagaccgccgtcgcgcccgcgcacgcgaaggcggtgcgcgtactgatcaaggtgaacggcgtcccgattgagctgatccgaccggagatgctccgcctcaagggcttcgagcccatcctgctggtggcgaggacccggttcaaggacatcgacatgcggatccgcgtccgcgacggcgtgaagacgtcgcagatctacgccatccgccagggcgtcgccaaggggctcgtcgcctactaccaaaagtacttcgacgaggccggctagaaggagatccaggacatctttacccgctactatcgcaccctcctcatcattgacccccggagctgcgagccataagaagactcggaggaagcgttgcccgactccagggtccagagaacaaatatgatgagctgtgtgactgctccctctcgagttttcatcatcgtctgngccaggtcttctgtctatttgctatccatggatctgcttatctgggtctatatctaactgctgctctaccataatgaatatagtttgatgcgtacactgaaaccttggttgcgatgagagattaatgcgagagagtatgaaaactat

SEQ ID NO: 137224 - DNA, 170 bp, Zea mays
  Clone ID: MRT4577_56624C.1
attacaacagaaagcacgatagattctcgaccttttggtaaggaacccttgcccatctgctgagggtatgggatatatgatacaagagcatgcaaaacaatcatggggtggaacttccatacgatcacactaaaacagtactccaaagaacaagatcttgatacctgcta

SEQ ID NO: 137225 - DNA, 473 bp, Zea mays
  Clone ID: MRT4577_56625C.1
gcgagaaaacaaggaggaactcctcatcctcctcgcttctgccctttccaaaaggttcctccttgtcctggatgacttggagagcccgagcatatgggacaatctgctcaaagattcattgggagagatcatgctgacgtgtacgtacgtgggcggagatgcgattcaaatgcatgctttgattgtacagagagtggctcgtttggcatatagctccgctacatgattctctaatagggtaattccgtgtgattctctaacaaaagtgaatctgctatttgatgaaaaaaaaaaaaaaaaaaataaaaaataaaaaaaataaaatgataacaactgaaattaaaataaaaaaaagctatcaaatggatattgaataagaaaaaaaaaaaaggggggggccgttttaagggatccagtttttcgatcgcgtgcttggaacataaaagttttttttttggggcccctaaattcaa

SEQ ID NO: 137226 - DNA, 2394 bp, Zea mays
  Clone ID: MRT4577_56626C.1
tcggtttaaagctatgctttatgtccactccggatggtgaaaactgtggacttgtaaaaaatctagctgttactgctattgttagctcaagggtgatgcagcccttgattgagagcttcatttcttgtggaatgagtaagctgaatgacattcctactgaacacattcaaagaatggataagatctttttgaatggcaattgggtgggatcttgtgaaaattcagcttcatttgtatttcgattgaggtgcatgagacgcagcagtctgattgatcctcagccggccgggtctggtatggccacatgtttcttttccttgtaaccagaaaacagaagggcaatgcgccccagaagggcagaaaaacagaaaacagaagatcatgagaataaccaccataatactagatgttgaaattaaaagggacaagcaccacaatgaggttcgcgtgtttactgatgcagggcgaatcctcagaccccttcttgtggttgagaatctgaataaaatcagaaaaacctaaggggcgctcattctctttccatgaattaatgcaacaagaaataattgagttcattggtgttgaagaggaggaagatatacaatgtgcgtggggaatcaggcatttgtttgagagtgaaggtgcgatatctagttatactcactgtgaactggatccttcctttcttctgggattaagctgtggtatcattccttttgcaaaccacaattttgctcggagggtattgtaccaatctgaaaaacactcgcaacaagctattgggtactcaacgacaaatccacacatcagagttgatactctttctcatcaactatattatcctcagaggcctcttttcaaaacagttatagccgactgtcttggcagatcagattatgcttcttttggaagaaaaaatgatttcgcgagaccagaatattttaatggacaaaatgcaattgtagcagtcaatgttcatcaggggtttaaccaagaggattccctggttatgaatagggcttctcttgaacgaggtatgtttaggactgaacacctcaggagctataaggcagatgtagaaaacaaggatggaaccaaacgactgaaattgaaggaaaaaatagactttggaaaaacagaaagcaaaagaggacgtgttgacaatcttgatgatgatggcttaccttacgttggtgcaagtcttcagaccaatgacattgttattggcaaagtctcagaatctggagaagaccacagtattaagctgaagcatacagaaaagggaatggttcagaaagtattgctttcagcaaatgatgaagggaagaattttgctgtggttactctaagacaggttcggacaccttgccttggagataagttttccagcatgcatggccaaaaaggtgttgttggttttctagaatctcaagagaacttcccatttactcacgaaggtatagtcccggatattgtgataaatccacatgccttcccaacacgtcaaactcccggacagctgcttgaagctgctctggggaagggaatagcctgcaaaggtacaatgagatatgcaacaccattcaccacagcatcagttgacgttattgcagaacagttgcacagggctggttattcacgatggggatctgagaacgttctaaatgggcgaacaggtgaaagagtgcaatccttggttttcatgggccctaccttttaccagaggctgattcatatgtccgaagataaggtgaaattccgtaacactgggccggtgcaccccctcacgaggcagcctgttgccgacaggaaaaggtttggtggagttaagtttggagaaatggagcgtgactgcctcctcgcccatgggtcagctgccaacctgcatgaacgcctcttcctgcttagtgacttctcccagatgcacatctgccagacatgcgagcgcgtggctaatgttgtcatgaggtctgtccccggaggcaagaagatccgtggcccctactgcggcttctgcaagtcttcggagaacatagtgagaatcaatgtgccctatggcgcgaagctgctctaccaggaactcttcagcatggggatctgcctcaagtttgagacccaagtctgctagaacttgtagacctgcttgcatccagttattacatatgtacatacagctagcctatgaggatctccaagctggtgtgccggtgtgtgatgctggcatagtaaggatgggcgagctagaaaccctgttgtgttttatgtgctgttttctccctgctcatgtggtaaactatgctaaagtgaatgaacactcgtttcctgttccctctttgaatgcgctgtgttagcatgcccttttgttttaaaaaaaaaaaaaaaaaaaaagaattt

SEQ ID NO: 137227 - DNA, 258 bp, Zea mays
  Clone ID: MRT4577_56627C.1
tgtttgacacgcgccggacacaatggcgggagcgggagatagcacccaacgccggcagaagccagagccgacagagaccaggaggccaggaacagcaaccaccgcggagaccagcgcactcaaagcgcccatgaaggccgcccagactccttcggaaacaccacgacacggacgagaacggggacccggccaccacgaccgccgcaggaagaccaaagcgcgggaacacagcaagaaccgccacccgcaccaagcacc

SEQ ID NO: 137228 - DNA, 271 bp, Zea mays
  Clone ID: MRT4577_56628C.1
gctagacttctgcaacttattttctttttctcatggcctggaaatttctgtcttggaccgatggttgacgttggcctaaaccggccagcgttagtggttgtgccagacaccgagccagttatcatgcatacagtgtattatgcaaagaatgctggtttgatcggcagcggcagccatgggctgtttgttcctataactgataaacgctctctctcgacttaaaacagaatgaaaaagtcgtcttgaatgcaagtacggagcagatcaagat

SEQ ID NO: 137229 - DNA, 846 bp, Zea mays
  unsure (1)..(846): unsure at all n locations
  Clone ID: MRT4577_56629C.1
acctcgaggccggccgggacttgttctctcgcaccggcactgctccctccaccttactctgtcggttacacctctgcctctccctctccccttgccggccggttttctccgtccgtgcccatggccatggccatggcagagtggtgggctgcggcgacggaggccgtcgcggtgtacactgggttgactcctgcggcgttcttcacggccgtggctgtggccgcggcgctgtacgtcgcggtttcaggactgcttgcgcggccggcgcagacgtcatcgaggaggcaggaggaggcggcggaggagagggccttcgagccactgccgccgccggtgcagctcggcgaggtgacagagcaggagctccgaacttacgatgggtccgaccccaagaaaccgctgctcatggccatcaagggccaaatctacgacgtcacgcagagcaggatattttatggacctggtggcccgtacgcatcgttcgctggcagagatgcgagtagggctttggcaaagatgtcatttgaagcaagtgacttaactggtgacatttcagggttaggtccattggaggttgaggccttgcaagaatgggagtacaaattcaagagtaagtatgttacagttggaataatcaagaagactgttccattctcagagggagatgctgcaaggagcgatgtgacaactgaaagagacatagttgcaggcattgttgaaagcaacagtgtgccagaaccagaggaaactggaatgacanaccaagggagtgtagtagagaagatacagaatcaccagacatcgatgntaacacaagcagccatgaagatgcaaagaaggcaaagg

SEQ ID NO: 137230 - DNA, 150 bp, Zea mays
  Clone ID: MRT4577_5662C.1
cgacggccgggcgggcgggccccaccgtaacgtgtggctgagggccgagcaccgataaagagcggcacttgcatacgaggatccaaccagagctagaggcgccacactcccaagctggaccacgaaaaagagatagatacctctacaaat

SEQ ID NO: 137231 - DNA, 706 bp, Zea mays
  Clone ID: MRT4577_56630C.1
attgggtacctcgaggccggccggggatgccaattcataataatggatgcggcgggggtaatgcggaggcgagcgagaagtaacttatgggggctacggcggggctcacatgctattgatgccgagcggctccttaggacatctggacccccactcttcgcgcacgcacttcgcctggcttgatcgcagcacgggctgatctctccgatctctagggaccgcggtgcccgccgggtctgccgaccaaactgactacttcaaccatctcttcggagattaccccgtcgttcgccgctccaacatgtgactattgacgctggacaactcatgagttctaagaaatgagcagcgaattgctctgtgtgggcaagtcctgcatccggtacgtgcacatcattgggcccatctgatgataacaaccctgcgagtgtcaatcttgatgatcaacgattaagagtgatctcctgagtacatcgccaatgcttcagggttgctacgtccttggatcctgggctcttgctcacagctggccatatgctctcttgtcaggctatttataactggtatgttgagtaggtcaatggagtacctgagtcgactggagtatctctgcggcgacatcataaacggagaggttgaaattccagattctgtcattgaacatgataatgtcttgagcaccagctactcactgattatggcatag

SEQ ID NO: 137232 - DNA, 394 bp, Zea mays
  Clone ID: MRT4577_56631C.1
ataagaagaactgtgaaccgggccgccacccctacgcgaactctaaattcggctctagatgagtactctgtctcttttaacaggccaagggttagtctctgcggcacccatacatttaaaggaattatactatctcacttatcgacattggccccataccaaacgacttatgcactgcaccgcagtgtttttttttgcttctacatatgctgatgaggataccctttacagaaaagggacaacaccagctttgtttgaccctctaataaccaaaatttgctaatgcggaatgctaaagattcttacattgtcatgctatacaacaacgaatgaagaaatccattatgactatattatttggcaatccatcacttgttgttcaggaggatcaaat

SEQ ID NO: 137233 - DNA, 304 bp, Zea mays
  unsure (1)..(304): unsure at all n locations
  Clone ID: MRT4577_56633C.1
ggacgtggccttgggcttataaatctggtttccaagtgtgggatgtggaacatnctgatgatgtaagacagctagaatccagacacgatggtgctgtttcgtttattcaagtgctgaaggatccaattttcacaacagaatctggagacagatttgcagacacacgaccattgctagctcttgcctgtgaaggaactcacacaggaagtggaaagaaccatgatactaatgttcctgtttttgatggaaccaatggtgctttccatagtataggcggtgaaaaccttcctactgtcttactatt

SEQ ID NO: 137234 - DNA, 323 bp, Zea mays
  Clone ID: MRT4577_56634C.1
atgggcagctgcttagttacagcatcgactagtgcgccccggacacaatataccagatcgtgcacttggtgactcgcatgacaaaggggaacattccggtgggggggcggacctctatttggggacttggattcaaaaaccgggggaattgtgttacaccaaaacggatggactgcacggtattcccggggataagagtttatcgggctttttcagtctcaagaataactgacccctggcccaatctcgagcgattggctggggaactgatttggaacgaaagttaaaccatacagatttgtgaccgtgttagaaaaatgcat

SEQ ID NO: 137235 - DNA, 111 bp, Zea mays
  unsure (1)..(111): unsure at all n locations
  Clone ID: MRT4577_56635C.1
ccacgcatacgcggacgcgtgggcagtcgcttgggctcgacatcggtgggggcaaagctttgtccttatatcattctctanccgtatgacatgaggtacatgctatgaatt

SEQ ID NO: 137236 - DNA, 558 bp, Zea mays
  Clone ID: MRT4577_56636C.1
gtcaaccgccatcgccgccgcagaagctgcctcctcggccaaggccgacgccctcgccgccttccccagcctcacgctcaacgcaaaggaggagttcgaatggttaaagaaggagtacacggttcacgagcaggtggtgttcggcaagatcaaagagggtgccatcatggccatcgagcatccgggaattgctgcaggctccacagcaattgctggaattgtgctcttcaaaaggccaaggagctacctgatccaacgggtgcgacgcatatttgtaagcaaggagaccctactttctggcatccaagctggcgtgaatcacatgagacaaactgtcaatcttgtgtccaatgaaagccaaaagttgctggatagagcagcaactgctgaaaaaagatttcagaaaggatggaacacactcagggaagaagggcgtgccattcaaagtgagctgaaccaaataagtgatattgagaagcaagcagtaggtctcaagagcattctcaatcagcttcccagagcacatgcatctgagtttcaatcagagatatctggcct

SEQ ID NO: 137237 - DNA, 631 bp, Zea mays
  Clone ID: MRT4577_56637C.1
cctcgcgtccgggaacgaggaacattacttagttcctcgttcccgatttctaagtacaggactacatggattatttgaatttttgtgtgttggggcagattcaccacattgtaagggactgcccttttgaaccaatgtgatgaaatagaagacagatcatttctttgactcatttgaacaatttaagtagaagcataatcctgtacatagtgcttttctctaacttcaattgatggtgtgtttgtcaggcgaggggctatcatcacaaccttcattgtgtgctatgctcttacatcgtttatttctggatatgttagtggtggtctttactcaaggagcggtggtatggttctgcacacttttctttaattttcatgtttgtttgcgcaattcagtttctttgcaatatctctttccatgacgtaccttcatgttcttctatttcaaaaatagtctgcagtttaacttgtcatgtatggaatcctcacctcacaaaatatggctcttatcgattgcttcttgaattcatggcaggcaaaaactggattaaagcgatggttcttacagcatccctctttccgttcttgtgtttttcaattggtttcatgctgaatacaattgccattttcta

SEQ ID NO: 137238 - DNA, 273 bp, Zea mays
  Clone ID: MRT4577_56638C.1
cgttccgtgcctgttgttttggttttacattaatctgtaactgttgacgtggttaattcgatacaaataagaaaaatagataaaataacaataaaaacatagtaaataaaaaaataaacaaaaaaatactaataaaattaaaaaataaaatagtgaaatggccgccccttgttttaggatccaaagcttactttccctttcattcaacttaataatttttttttggtgtcccctaatttcaattctttgtccgctatttctcaacttgtggat

SEQ ID NO: 137239 - DNA, 349 bp, Zea mays
  Clone ID: MRT4577_56639C.1
agcttgacaacattaaaaaataaagagcccaatagaaacttataaaggatcggcaacaagcataaaacgaagccaaaatgaactacgctgaactgatacggagaaacccgttgattaatatcaacaattctggctccttcaatgttaataaaatgttagacgacaactatctattcaataatcaaacactaagatagaccaatacacctaaactgttcatcaacgacaccatcaagagtgatttccaccgtaaatttcttcagaagtacattaagtgactctctcctctttcacaattcatcctttaaccccttaatcttatcatgtttgtcttataactaaaaatcat

SEQ ID NO: 137240 - DNA, 247 bp, Zea mays
  Clone ID: MRT4577_5663C.1
gcctgtgtttgttttttgttttgtttcgattttattttttttcagattggtgcgttgtttgttgactaaggaacggaatttgttgttttagatagatggtggcgggagcaaaaaatatttctagttggagcaagggaccacaaggcttatcaaagaataaatttttggggtgacgcgcttgaaccatttgaaggtacaggtgggtgctatagaaagatggtatccgcacctcccaaggaagctttgg

SEQ ID NO: 137241 - DNA, 637 bp, Zea mays
  Clone ID: MRT4577_56640C.1
aattcggcacgagggacgacccgtgcaaccttcttgcatcaggcatgtatactagcgtgaggtgtcagccatatgcggagccgtggagagccaactggctgggagtcctcccaaacggaacggccactcaatacttccatttgtaaggggaaacaaagaaaagggatttaccctagatcgtgcggcaaaccagtccctcttcgatccgcgtagaaatcccatccgatgtatagggatcgatccgcgtagaaatccaagttccccagcttcgtcctcatcttcaccgagccctacccaacgccaacctcgctgctcgtggcgtccccaatctgacgccccggccccgcgcgcccctcccaaatcgcttctcctcccacggccggccgccccggcgtgcagggcgtcggcgcactccgccgcctccgacccaccaccggcgtgaggccaaggaaccatggacgagaacggccactacgtcgtcgtcgccctgccctccgcgcgctgcggcggcggcgttggcggcgacgatgacgagcctacagtcaaggaggaggaggaggaggaggaggcggaggagcaggagcaggagcagtcgccgaccgaggcgccagcgccagcgccgcccgccgcccgcgcc

SEQ ID NO: 137242 - DNA, 1562 bp, Zea mays
  Clone ID: MRT4577_56641C.1
gggtacctcgaggccggccgggagagcatagtgccagagtgtgcgctaggaagtatactcgagaaatggatgctcatgccgtggatatcccttccctagccgaggagctgaggaaggagctagctaccgcggacgctctggcggcgcggtccgccagtctctaccccgtcgtcatcgccgaggtcggcccgcgcactcgcaacgtctgcccggaggactacgacccgtcccacgtctccattggcccgtaccaccacatcaagaacccaaagctcgtcaggaagcaggacaagatccggagcctcagcaccgttatgtcggcggcggcgagagtcgacgttaagtcctacatcgatgtggtcgcgggcatcgaggccaaagccaggagctgctacgccaacacgttcgataaccacatagatagcaacgactttgtgcgcatgctgctgctcgacgcatgctacgtgcttgtcaatttcggcggcatcggcggcggcgggcaccgcggcagcgacatgatggaggacgtcggggtggtgcgcgacgtgatctacctcgcggagaaccagataccgttcttcgtcgtcgacgagatccgcaagctcaccattccggacggcggcggcggttctgcgcctgacgcgattacggtctacgtccggaatctcctgcgggagctgcagtactcagtggcgatgccggcggtggctgagcctccggggccagacaaccttctgcatctgctgcacatgcacctgatgcccaccgtcgcactcccgtcgtcacgatcgaccgtaggcaccggcaagccgcgtcggttcggccggtggcgctcggcgacggagtactactgtgccggcgttggattcaggagccggcctctcggcggcaaaggggctcgctcaatcctcgaggtgaagctcgactactacggccgcacactggagatcccccacctgaagatcgacgccgagacgtcgcggctcctgcgcaatctgatggcgctggagcagagcaacccggaagaggtgggcagccacgtgacggcgtactgcgtcttcctgtcgcagctggcgggaacggtgcaggacgtggagctgctgtccaggcgagggatcatcgcgcacggcctcggcagccacaacgaggtcgccacctccctggcgaacctctgcaagggcatcgcgttcgggggcgacgaccccgacagcaactaccttcgtgcgacatgggaggggctggaggagagcttccggagccggccgcgccggtgggcggcatggctgatgctcaagtacttcaggaacccgtggctcgccgtggggctggcggcggccggcgtggggctggtttgtaccgtggtgcaagcagtgtacgctgttttggcttacacatcaaatccttagcaggaattcgtagtcaaacactgtgcggctatgctgtgcttgtgaaaagtagtcaatattggtgtgcctagtacgtccagcaatgatttcgttactattatctaatcgatgcatcaacaaaaaatttagtataaaaaaaaaaaaaaaaaagcggcc

SEQ ID NO: 137243 - DNA, 377 bp, Zea mays
  Clone ID: MRT4577_56643C.1
aagtcaaccacgctttccgggagatcaccgggtgaattggggaaaacgcacccaaaaacgaaaacaacacgccccccctccccgatgtgaaaaattcacactatgaaaggagagagagaaaagaaaccccctggaaagacgggttcccaaccataccatcatatggcaggaacctgggggaatatagaggtttacagactggaaaattttgatccggaaacagatgggtcccaacaggcagaaaaggtgttgagctcgaccttgcaagccaggggctctcacaccacctatttctggtggagggcgcggatgaacaggcccttgagcttgaccaccgacttcactgggcccttgagggggttgagcaccctcaacct

SEQ ID NO: 137244 - DNA, 805 bp, Zea mays
  unsure (1)..(805): unsure at all n locations
  Clone ID: MRT4577_56644C.1
gcaaacagtttcccctccatcccaacaccaaactccgacgaccatggcctgcagtcctcaccgggtggtatgcaagtccatgtggcagctagtaggggccagcctgctgcgtcgtctgacgtgtataattacgaacaaagatggtatgaaatatgatacatacaggtagcggcgctttaatttctctccgctggccgcgcgctgccacgctgcccacttgtgttgcactacagtacagtgcagttgcggaaaagaagtgcatgcatactgtccgtctcatgatctccgttgcagggtgacgtggtgttcgaggcgaacgccatcggctgggctccctcgggcgcgcgcacggcgctgtcgctgcgccacgagcgggacccggccaggctccccgctgccgccgtcgggggcgagcgcacgcccagcagcggccggtacgtcctggcggcgggccgcggcggcgaggaggacgggctgcgccaggcgatcccgccgggcgcgctcaggccccgggtcacgtaccgcgtcgcgggctgggccagcgtggccgtagcggcggaggaggaggaggaggaggagggagcccgccagcagtaccgcctcaccccgtgcccgtcagcatccgcgtcgacgacggcgtggtcgtcgagtgcggcgctgtcgcctgctcggccgccttcgactccgacttcggggcgggggcggnagggtgcancaggtgggcggagatcaagggcgcgttccggctcagggagagcccccgcagcgcgggggggcacgtggatggcgcgccggccggcgtcca

SEQ ID NO: 137245 - DNA, 421 bp, Zea mays
  Clone ID: MRT4577_56645C.1
cacaagtgcggtgccataagtgacagccacctcagtctctgtctgtggagctctctctcgcgcgcgttgccatctcgcaggttcttcatctcgtcgctctgttcaggcggcgacaggagatggacggggagcaggcggcgcggtgggcggcggcgcaggagggggttcccgtcggggcggaccttgtcgcggcggcgctgcggcagctgcgcttcctcgcggcggtggaccgccgccggtggctctacgacgagggcccgctgctcgaccgggccatacgcaggtacaaagcatgctggcttccgcttcttgacaagcacactaagggtgtggttgtagatggtccattggttgtccctcttgattgtgagtggatatggcactgccatcggcttaacccggttcagtacataagggactg

SEQ ID NO: 137246 - DNA, 402 bp, Zea mays
  Clone ID: MRT4577_56646C.1
aatgctagtacaattcagtttagtaggaatggcaatgggtcgggtggagaaaaaacctgctaaatccgcccgtgatcacacgcgtgggtgcaattccaaacccacacgcgaacccgttaggtttcgggtgggtttcgagtcacctgtgtgttttaaaccataattcagctataaacaattaagtaccaataataatgaagttatatctacggattttaaacgttgagcagcgataaaacatttcatgaaccattagccaagttacttattcagaataactactattgtatcttaatcattttttaacataataaggatgaatcaaatttcggatcacattgggccctactataatctggagcagtttttaatgcaagtcacattcgtgctcaaaagaaagaa

SEQ ID NO: 137247 - DNA, 534 bp, Zea mays
  unsure (1)..(534): unsure at all n locations
  Clone ID: MRT4577_56647C.1
ccgggnncgnctctttttcgtccggtggcgcgccaaccaccaccgtgggggggggcgctttagcaccaacagtggcgcggggggggcgccgcacttttccgcccttctgcttctcggtgtttgttcgtgcggtgttccttccgcgcgcatgctcccatgctcctatccttctccttcttccccccttcctccctccgggctttgattgggggtgcgacaactccgttacccaccccttcatgaaccaactagggcatcaacgagtggcatgcttgcctcaatcacccttggtcctcctcgttgcttcaccctcttacagcactttccttggggccattgttggtnccaaccattgcgggcccaccgcctccgccacctttgcctcctataccctgctgactactttcagcaacacctgcttcctcctttcaaccacatcgcttgcttgcactccaccttcttgattgcatcaacagctgctgctattctgccccctccctttttgactaccccccccacttgcttccgtctacc

SEQ ID NO: 137248 - DNA, 720 bp, Zea mays
  Clone ID: MRT4577_56648C.1
cattgggtacctcgaggccggccgagttgcctgcttagccttcctcccataagaactgtgccacattctgtcatgttcctcggcatcctccctccagcgccggcctctggcacctctcgatacattacatgtccatgctcgagcctacctcaagatgcctctggggaatgaggtgccgctagcgccacggtggtatgctcgctatcaccagctcagcggctccagggacctaaggcacgacactgaccttgaagatttggatgtctgtaaaatacagaacctactcctacagactatgagaaaatcacagtgattacgatcgtgaagaacaatctgatgagggaacgcgtagggctttctctcttacgatcaatgatggctagtattctcgagtgcaaggataagctactcgctcctccttaggaatctggatcgttgtatgatgcggatgatattgaagtctctgacgatgacatggttagtgagaagctggataagtttcctgatatactacctagtgcgattgatcttttcaagtatatgcgatgcagcaagaaggagttatctaaactgtccaccaaggtttatatgtaatcgatggcggcagcctcaggtgaatatggacagcgtattcgtcaatacaagaggcttcccaagcgctgactagatcaacttgattccatcataatgaaagcctagccgtcaccaacagaagctctt

SEQ ID NO: 137249 - DNA, 289 bp, Zea mays
  Clone ID: MRT4577_56649C.1
gtcaccacgcgtgcgcgaccatcacacaagtgcgcgggccttctggcagtcaagcctttggtgcgcaccttcgtgatgatcaagccgggcggcgtccagaggggcctcattggggagatcatgagccgcttcgagaagaagggcttctacctgagggcctctgtgcttgtgaacttggataggtcagttgctgagaaacactacaccgatctggccttcaagcccttcttccagggcctcctgggctacctcatctctggccctgtggcggccatggactgggagggca

SEQ ID NO: 137250 - DNA, 465 bp, Zea mays
  Clone ID: MRT4577_5664C.1
gagaaacacacccagcctattctgtcccattggagggtgctgatggaagcagggtcaaagcagttgcagtgtgccatactgacacatcaaagtggaatcccaagcatttggcgtttcaagtgcttaaggttcagccaggaactgttcctgtctgccacttcctgcctcaggatcatgttgtctttgttcccaagtagaaacacacacgagtcccatttctgatgttggtgaataatttggcagttttaatagcatgaaatgagcttttaaaactgaatgcgtagtatttgcattatgttatcctacgttgtcagcatgtttgcttttacaggtttactgttatctcaatatatgtatatgtactagtgatgtattaaatgtgctaatatgtgatatatatatatatatagctttttcattcacatgaaaaaaaaaaaaaagaaaaaaaaaaaaaaaaaagcggcc

SEQ ID NO: 137251 - DNA, 277 bp, Zea mays
  Clone ID: MRT4577_56650C.1
ggggccgggccggcaacagcaagcgtgctcttacccggataactgtaagccacgaccgctaacagtccgaatgaacctagaaaagagaatacaggcccagtagcaaattacctatttttcgcatagcctgttagaagtatctatccatatgtgttctgatcggccaattcatattatatagactaaatacagtagcggacaaatgaaactgataggatagagctaaacgagggttacttaactatatgagatgctgacatagccttcagtggatagt

SEQ ID NO: 137252 - DNA, 475 bp, Zea mays
  Clone ID: MRT4577_56651C.1
cctcgaggccggccggggcatagccgtcgacaactctctctaccgtccgattcccaagacgagcgcggcggcaggagaccatggcgtgtcgtgaaagaacaagaggatctccaagggaaagaagggaggcaagaaaaagaccgtcgaccctttctctaagaaggattggtatgacatcaaggcaccgtcggtgttcagcgtgcgcaacatcgcggaagattctcgtatccaggacacaggataccatgattgcttctgagggtatgaagcacacagtctttgaggtttgcctacctgatcttcatggcgacgaggatcacgcttactgggaaatcatgctccgagctgaagatgtgcagggtacgaatgtgctcacaaacttttgtagtatgaattttaccactgactaactgacatccctattggagaagtggtatacattaatcgaacgccatgttgatgtcgagacaaccga

SEQ ID NO: 137253 - DNA, 289 bp, Zea mays
  Clone ID: MRT4577_56652C.1
ctcactcgatagtctaacagtatccagatcaaatccacttgtgtcttttattccaacatgctgggccaacccctaaaccaccatatattacattcgatactttggtgcaagtctttcaccctaatactgacgagttaccttagctattttctatcatatttcattctctctaagacatatattctacaaatacttgtgaaagccaattttgctatactatgtaaagctagtatttccctacaatgcttatgcctataaaaaagcttctttttcatccaaacgctttttt

SEQ ID NO: 137254 - DNA, 336 bp, Zea mays
  Clone ID: MRT4577_56653C.1
ggcaacaagagccaattcccagtcaaaaacatattcattagtccacaagacaatgcctcttaccgctgcagcggagggacactgaccacacatggcaacaccaaaatggactctgagaccctcatttccatcttggcggtggcataccagcaacacattgcatgaaatccaaaggggtcaacacccacagaacatacccgatgttctctgtctacaactccataagaataacacctatttattacgacctcctccatacttgctctccacagccctatgctccatagggggcatgtgggtgtcaccctccaaagcctgcactgtcctcatgatgct

SEQ ID NO: 137255 - DNA, 555 bp, Zea mays
  Clone ID: MRT4577_56654C.1
ttaacaaaaaacaaaaaaaaagaaacaagcaaaaaaaaaaaaaaaaaaaaaaaaaaaacaaaaaaaaaaaaaataaaaattttaaaaaaaataaatataaaatttgttttttcttttgccgttcccccctttggggggtttttttaaattttccttccctttggcggccgtttggccctccttttggggggcccttttggcctttttttgccgttgttttccatttccatttggcccttttttttgccccctttttgcctttttaaacccctttttttccccttcttggcccctttgtaaccctcccccttttggccaactcgtgttttttccccaatttgtcccgccctttgtcgccctttccccctttttttgccccttcctttttggcgattgggcccccccttttgcggctttttaaccgcgggggttgtggtggttacccacggccggcccttttcctttgcctttccccttgggcccgttgttttcctttttttcccttcctttttcgccccgtgcgccggttttccccgtcattttttttttttgggg

SEQ ID NO: 137256 - DNA, 546 bp, Zea mays
  Clone ID: MRT4577_56655C.1
aattcggcacgaggctcttcctccattgacttgccgatgcagatcgaggggcgaggctgccgtcgtcgtcccgggctctctgtgcgcgtacgcggaagagtgaggaagctctagtccactcatacagcctttacggttcaggcaagcaaccacccatagcattcctatcactgtgctgggttgcgcatggattaccaaggggacaatcttagagatttctttcaaactaatgggcgtaaggtgcttcagagagcggaaaacaactatagcttgaaatattttacagaaaatgagatacgaaacataactgatgggtataagtctgttctgggaagaggggcatttggtgaggtctacaaaggaacgctagaagaccaatcctcagttgcagtaaagagatatatacatgggacccacaaagaggtgtttgccaaggaagtcatagtgcactctcaaataaaccacaagaatgttgtcagactcttgggctgctgcacagaagaaaatgctctaatgattgtcatggagtttatctccaatgggaac

SEQ ID NO: 137257 - DNA, 325 bp, Zea mays
  Clone ID: MRT4577_56656C.1
ccggaaaaaaaaaatttcaaatcttaaaaaaaaatgatgtacatgggtcgttttcctttttaacgcccccttatttgcccaacccccaggccaacctttaactcccaattgcccccccttggctgttgcccatgcccatgataacgggccctgagaaagatgttcccgaccgcaaaaaacttcgagggccaaaaaagcccaagcaagttttatttggtgatcaccatttgatgggggcctaacatttccaggtggcgccttccacattattttgggggtgaagtcactgtccatgggagtttttttttacaaatgacatggattt

SEQ ID NO: 137258 - DNA, 774 bp, Zea mays
  Clone ID: MRT4577_56657C.1
cggccgggatctctttccacatgcagcgattccatataatccgtagcctgtaccccaaacccccacccagcgagatgcgatgaccaggaaacatcctcaacacttctactgttcctcagggacataatatcgtaaataaccagaccgacgatcccttctctattaacgactgttatgccatccatgtcctcctccggcttccgtgacgctacaatattgagattactcgccggtccacgaccctatggacaagaattgccccagatgggctaacaaccagaaccactgagggatgtgtagctgatcttcaaggagagcaggatcctgcttacaagaaaatcaggctccgtgtttgttatgtgcagacgctgaatgtgctcacctccttctgcggaatggaatttaccaccaagagcttcagatcgctatgactgacgtggccgacatcgatggcggcccctgccgatgtgacgacgaactacaactacgtgtctgcccgtggtctgcattggctctacgaagaggcccccaaaccaggtcaagagaatctgctatgctcacgcataccagattcgggagattcgccgcatgatgggtgagattatgatcaaccaggcttctacatgtgaccttagagaacttgtttataagttcattccggaaggtattggcaaagagattgagaatgctacctccagcatcttcccacttcaaacgtcttcatccgcaaggtgaagatactcaaggcccccaagtttgatctcgggaagttga

SEQ ID NO: 137259 - DNA, 695 bp, Zea mays
  Clone ID: MRT4577_56658C.1
cattgggaccctcgaggccggccgggagcctgtcattcctccgctcttccttattcctcattgcctgccacacgccggcatactgcatgcgaggccatgcatatgtttgccccacttcttcgatgctctcactcactggtaccgcccaccctcggcggaataggagacccgccgcggatccccctccagctcgccatactctagtcggtcccggccgggaggaacctgaccgagacgagatcgttgccgacgaccagggccgccgtacaacggcataatatgtcaagtgcaccgattcgcacaggctcgacgacgaacccgactctaattatcacctcatgatccccatcaacactggcgtcaatcgcgaactcatgtcatacatgcgactcttcgctgacacgtccatgaaaaaagaggtcatgttatgcacattccaggtgatcccgaactccgatgaccattcaatgatctgggagctttgcgtgcataaggacaaacttgtctcgtccgaagaaatcatctccatgatcctgatcctatggatcgacacgagcgaagttgacctcgaagtcaccatcaagaacactgtcgtcaccgcttctggctaattcaataactcccaccgacaggccacgaccagaatccgacttcatgtccgtactgcatggacatgcgaatcatgcacaagccca

SEQ ID NO: 137260 - DNA, 333 bp, Zea mays
  unsure (1)..(333): unsure at all n locations
  Clone ID: MRT4577_56659C.1
ggtgggctggcttctactcaccctcttaccaactactattcggattacggttagttaaggtgtttgtggaggggagatggcggccgatgatgaggcctaccgtcgctcaatccgctggcttgcctaagccacaaacaactcatcgctggacaataccttcacctcctacggcgagatccctcactccaacgacattacctaccgggagactctgatgttatcccnagttccgaccttcattacctatctacaccggacaactcactacatcgacactatcgagaacatcacaccgaaaggatctccaacgcagtaacatcaccgttaaccact

SEQ ID NO: 137261 - DNA, 249 bp, Zea mays
  unsure (1)..(249): unsure at all n locations
  Clone ID: MRT4577_5665C.1
gtccggtgctaattccggggggcggacacgtccgagcccgcggtgggcgatcctgccgctgatgagtccgagaaggcgcnanctctcccgtttagtatgggctataaggcgcggggggtgactccttgctccttgctctcactgctgcggcggacagcgggtctggagatctatgggtcatcgcgcgcgcgcctacatgggacgggcttgctgttcagtacaactcgaacgtgacggtgtctttccatt

SEQ ID NO: 137262 - DNA, 455 bp, Zea mays
  Clone ID: MRT4577_56660C.1
acgggcacataccatcaggacacagtatacgatgcaactagagcgacctgtgatcaaccaagaaacatgggcaaaccttcttacctactctcagccacaacaatccctattgattcaaccaactgtatagactgaaccctgctgcttatttgcagagcaactactatcacattcaggcacgctagctacttgcctactctcagcaccaacaacttcgtccattgaaccaattggccgcactgaaccccgatgcttatttgcaggagctaatactactaccatttagccagctagctgtaagcgaaccgggcttacttcttgcacacagcatcaggtgctgcctttctaccagcagtttgcggctaaccgcgcaaccatcttacaactactacagatgcagccctttggccaactagcttagacagacccagcggacttctaccaacaacacatga

SEQ ID NO: 137263 - DNA, 411 bp, Zea mays
  Clone ID: MRT4577_56661C.1
gttggattataatcacaactacggttaaaaatggcattcaagatgttattctggggaaaactcacacctgcctggggaggctattgtaaagaaagcatggttgagtaccggaggtacaacagaaggctaatctgggccaagcactaacactctcttcacacaacctttatcacctacggggagggccctaccatccttaacatacttgaactggagactcagaggctccaccttttaatcttcatcaccttctccacggaggaggcgatgcggaacgccatcgagggcatgaacggcaaggagctggacggccgctacataaccgccaacgatgcccactcccgcatcggacgtggaagctgttgtattgggtaccgagatggacttcgatgccgcggctacaacaacggc

SEQ ID NO: 137264 - DNA, 1182 bp, Zea mays
  Clone ID: MRT4577_56662C.1
ggacccccgggcccgcctggtccgcgaaaatcggccgccaccttcacctccaccgccccggcgcacctgtgcgtctccatcgtcgccgcctctcctccttcggacacgactgaccttccactggcgccaacgaagaaaacacataggaagaagctcaccgccaaacctcatccagatccagtcgctgccctccgaaggccgcatacggaacgtctcgtctcttcctttggatccggcggtcaactccatcacccccagcttcacctcccttagtccccctccgtccgctctcacccaccgcttctatatcgccacctctctcgttgtagaagaagacactgaggatctggctttctggaatcacatttcttgagaactatctgttggagagctaaactaggctcttgttcatattatggatcagcaagctaagattgatgctgattttcttgaaccaactgtactcttagatgagacacattaccaggaggggtacagaaatggctataatgatggtttggcatctggaaaggaagaggggaggcaggttggtttaaagatgggtttccaggtcggtgaagaactgggtttctttcagggctgtctggatgtgtggacgtctgcaattctcattgatcagaatgccttcacagctcgggtcaggaagaatatcgagcaactggctgcactggtgggcagctatccgctgtctgatccggagaatgaacaaattcaagacgtgatggagaagataaggctgaaatttagggtcatcactgcaagcttaggggtgaagttagagtatgaagggcaccccaaatcatctaaacaggatgctgaggatctatgagcagtgattgaaattacattttagtttctccgcccttgctgtttaaagctcttcaactcattggcatcacgaggaactgccgtgagacatcaatggccagagtccgaccaaaaccacatatatagttttaacaatgtctcaagttttgtgttattacctgctgtctgctgtctgccatatgtaatagtttcctttcaaaaggcaaatgcacttccttcccattttctttgaagtacttgtatcaaacactctgcgatgagaatcctgaatttcgttcttttctgaagaatatatgtactcctttctcataaagaaaaaaaaaaaaaaaaaag

SEQ ID NO: 137265 - DNA, 434 bp, Zea mays
  Clone ID: MRT4577_56663C.1
acgcactcgacctctcaattttctcccacgtctctcttctgtttacttgcctccgtctcttcctgcccctccgctcccttcccacggacatccggctccatcctcaccccctcaccccaactcccctcgtccttcactgtctcgatggtggtgtccatggcgtctccttatggtctatctatctatgataaagtgctggatcacgtgtcgtcataccaccagcaacaacttatgcagaatctactcaagatcctcacctacaccgtctgctagctctcgttcgctgttcggagccatggggactacctctcctccacgtccgtctgtgcatataatgacgacatgcctcttgaacacgtcttcaaaatcattatatcctatggcaaaagtgtgtgtctatgattccctgagtcaaattatctttcttcaatatt

SEQ ID NO: 137266 - DNA, 479 bp, Zea mays
  Clone ID: MRT4577_56664C.1
aaaaaaaaggggggggggttggcaaaaccacacaaactaatggggttccttgggaccccccttttaacctggttttttataacccacagttttaacaaaagaacaagttttccttggaaaaaaaaatctaagaaaaaggaagagccgggggggggggtttgcccaaaaccctcccctggtgttggtgggggaaccagaaggcctgccctagaagaacccggtttaaaattttttggggaaccgggtgccctttcggtgggggggggaatatgctcgcagggaaaaccagggttttccatttgtccttggggccaacggaggcccggggatttatttgggcgagggcgagggtttaaaagggtttcccctttccagcccaaaggtggtggaccgttcccaccagcgcttaaacctcgcggaaggggaaggcgctcctaaggcgccttggcccggtttaaaacccttgggatttacaaggg

SEQ ID NO: 137267 - DNA, 360 bp, Zea mays
  Clone ID: MRT4577_56665C.1
aaacgttttcgtgctcaaacaaccaaaccttaatccccattaaggcccaagggctccagaataaatccatggcacagtccaacggctggcaacccaggctctccgttaaggaaaaaaaggttgaaaaggacccaacaatcccaaaaaggcccccaaccccttcctcctcctcaagggagaatttaaggaaggattccaaggaaaaccaccccaagttaaagcaagtctccctgattggcaaggctggttgtgacaagtgaagtcctgtccgattccgagaacgctcactacgtgtctaaggcagagaagctcaaggctgagtacaccaagaagatcgacgcttacaacaacaagcagtct

SEQ ID NO: 137268 - DNA, 262 bp, Zea mays
  Clone ID: MRT4577_56666C.1
cccacgcgttcgaaaaaaaaaaaaaaatataaaaaaataaaggaaataaataaaataaagaaagaatataaaacataaaaaaaaaaatggctgccatttttcaggatccaagtttaactacccttgattgcaaagtactaactcttcataatcgtaccctaaattaacttcactgcccgtcatttaacaacttcgggactgagaaaaccttggcgtttccaaaattaatctccttgcagtaaatccccctttctccatatgg

SEQ ID NO: 137269 - DNA, 286 bp, Zea mays
  Clone ID: MRT4577_56667C.1
agctgcgtgactacgtgtctttgagtagcgactggatttgttatgccatgattgacgatattgttgacagttttggtccaatcatgcgtgatgttgagattgagtccgaagcgattgaagatcatgtgtttgttgctcgcgtggaagattttggtactttcttgccacgcattggcgaccttcgcaagaaagtcatgactctgatgcgactcctaggcggcaaggccgacgttatcaggggcttttccaagcgatgcaatgagcagtattctgtcacaccgcgtgg

SEQ ID NO: 137270 - DNA, 351 bp, Zea mays
  Clone ID: MRT4577_56668C.1
tctttctttcaaaccctatccccctcctccacgttggagatctcaggagtgtgcgccggggcgactgacacagacaccttcccatttcacgctgacatcaaccaactgctctcactcatcatcaacaccttctactccaacaaggagatcttcctccgccagcttatctccaactcttcctatgcgctgtacaagatcaggttccagagtctcactgacaagagcactctcgatgcgcatcctgagcttttcatccaccttgtcccagacaaggccacgagacacgctctccatcatctacagcgtcatctgcatgaccaaatcctaccttgtcaacaacctcagtaccat

SEQ ID NO: 137271 - DNA, 226 bp, Zea mays
  Clone ID: MRT4577_56669C.1
agaccgagaaactgttgtgattttatggacaagcaaaagcccaccgcgaatgagacttcaagagcgacaatttttttgaaaatctatctatacaaggatacacttcttttaaggcccaactgaaagaaaagccaaccgggtgggggtgaccagccaaaagggaggaggcgatcatgactcccctacggatgggcagtccggctctatacccttggtagggaagtta

SEQ ID NO: 137272 - DNA, 371 bp, Zea mays
  unsure (1)..(371): unsure at all n locations
  Clone ID: MRT4577_5666C.1
aggatgtaaataccctcgcattattnnatangtgacanncctaagaccnaaactactgccgggggtggttcctgtctgatattattttgtagtttagcagtttaaggtcgaccgcacccggtgtcttcctgacatnatttcaatcgccacacgcggcattggaaccgcatgctctcgacggtgaagcatcgtctctctgtcgacgaccgaagtgaaggcgaggtgggtgnngaatggatgtgtcgccanntggtgcgtcttggttgccgacccccgatgtgtgaagaagtgcggcccgccatctctctgcgcgtaagaagcacgaagtctctccgggcccatcatcctgggtgacccacccctgacgttct

SEQ ID NO: 137273 - DNA, 316 bp, Zea mays
  unsure (1)..(316): unsure at all n locations
  Clone ID: MRT4577_56670C.1
ttaaaaaatcgggaaagaatagagatatttttttttgaagtagatatgttttgtatctaanncaactaattattccagatggcacagatatattaacgtttttaatatgagaatagtaattatttaatttagttaaatattacatcacgttaacgtaggccgaatcgtagaaaccgtcaccggcggcgaactcgttctccaggtcgttcattagcttggacccttctacgtcgaaccgctggatcctggccccttttttgagcaccttctcgactttgttgtctaagccgacccatcattgcgcgcttaaacttcc

SEQ ID NO: 137274 - DNA, 332 bp, Zea mays
  Clone ID: MRT4577_56671C.1
gggatgtaaccaaaaccgctccattggcaaggagacagcactggggggtgaccagaacttcacctacacttagggggaaaaatgttgacagtcgttttcactcaagactcgaaatggactatacaacctaaatgctggagggattttcgcgacctttgccgccttgacaggtggaggggaagaggacttcccgacgttcatgacccttgttgttttggcgggtacaaccgcccgctgaatgcgcattcagcaggggtctgacccccttgaacacactggttcatttgctccgcgagtgcttttcttcttgaacacactagggggtgacaggg

SEQ ID NO: 137275 - DNA, 589 bp, Zea mays
  unsure (1)..(589): unsure at all n locations
  Clone ID: MRT4577_56672C.1
accggagacgtagcggaccagcagccggacggccgtataaaacatacaaggccgcctcgctcgctcagcatacggaggcagccgccggtaagccgcgcgcgcgtgcagtcacccatccgtccgtccgtccgtccgtcgtccgccgtccaccgccagcgcgcgctcgccaccgcacccagctagcagcacaagaaaagtctggtggcgtcggcggcggcggcggcggccggcttgccacagtccaatccttggaccggccaaaaagcagttgaaggcgcgagcgagcaagctagcgcgcccctacgcctacgcgcgatcgagccgcgcattgctgacctcgagttaagttgggcgaggagaggtggttcattccagcagggatccttctcgtgagcccagtcgatctgaccgtccttggtatctggggngggttgnnntctgtactctctctttaatttggacctccaaagtagtgctgggatgtatcgcctttgggattttttgggtgatgggcgtcttccccaccgtcccgttcatgcctgtttggcggacgggtgggtccctccttggtgctatgctaatggtcctg

SEQ ID NO: 137276 - DNA, 642 bp, Zea mays
  Clone ID: MRT4577_56673C.1
caggcatgaacggccgggtggggaagacgcccatcacccagaaaatcccaaagccgatacatcccagcactactttggaggtccctgccaacgccatattagcaaatccttctcttcctctacaactaaaactcttaacaattgcacttcaagaacctgtcacgactcacaaattaaagagagagtacagaacaacccccccagataccaaggacggtcagatcgactgggctcacgagaaggatccctgctggaatgaaccacctctcctcgcccaacttaactcgaggtcagcaatgcccggctcgatcgcgcgtaggcgtagtagcgacgaaggggcgcgctagcttgctcgctctcgctcgcgccttcaactgcttttggccggtccaaggattggactgtggcaagccggccgccgccgccgccgccgacgccaccagacttttcttgtgctgctagctgggtgcggtggcgagcgcgcgctggcggtggacgacggacggatggatggatggatgcacgcgcgcgcggcctaccggcgtccgtatatgctgagcgagcgaggcggccttagctagcttgttatgtttgatacgcccgtccggctgctggtccggtacggtctccggtcccggccgg

SEQ ID NO: 137277 - DNA, 943 bp, Zea mays
  unsure (1)..(943): unsure at all n locations
  Clone ID: MRT4577_56674C.1
cagtttcccgaggtacttaaacatgtcagccctctcaaggaagatgctgacgaccattgtcccgaagagcaggccgatgatcgggaggtcaatcgcggcgtacgcgtcctccggggagatgacgcggaacaggaccattagcatagcaccaaggagggacccagccgtccgcccaacaggcatgaacgggacggtggggaagacggccatcacccagaaaatcccaaaggcgatacatcccagcactactttggaggtccctgccaacgccatattagcaaatccttctcttcctctacaactaaaactcttaacaattgcacttcaagaacctgtcacgactcacaaattaaagagagagtacagaacaacccccccagataccaaggacggtcagatcgactgggctcacgagaaggatccctgctggaatgaaccacctctcctcgcccaacttaactcgaggtcggtgtatcagcaatgcgcggctcgatcgcgcgtaggcgtaggggcgcgctagcttgctcgctcgcgccttcaactgctttttggccggtccaaggattggactgtggcaagccggccgccgccgccgccgccgacgccaccagacttttcttgtgctgctagctgggtgcggtggcgagcgcgcgctagcggtggacggcggacgacggacggacggacggacggatgggtgactgcacgcgcgcgcggcttaccggcggctgcctccgtatgctgagcgagcgaggcggccttggtatgttttatacggccgtccggctgctggtccgctacgtctccggtcacgtgcgcgagtgggacgggggccggcttaaataagcggggccggtgcgacgtgtgcggccaccagagagctcagggctcgccttttttttttttttttttttttttnccccggccggcccctncgagggta

SEQ ID NO: 137278 - DNA, 478 bp, Zea mays
  Clone ID: MRT4577_56675C.1
ccggccggggtacatcactccgtcagaaatcaagctacccgagcgactcctagcgacgacaccacgccgcccgcgaacacgatcccgggggccttgctgagagtgacctagagggcttgctcctctgtcagcctccccacccccgcgctcgcgaccactcatcaaacacattgcacggtcatgcggacagcgtcgacggctccatcgatggcaccaaacacgagtccgatcgcctctccccgaacaagatcatgaagctgatcgataaggaatccgatgaggagtggacggagctccacgtcgccgtcaagctcaactgagaaaagtgggagcacaaaagcaacgtggtcccctccgacacgaagtacggcatcgattgtgtgtgcaactactaatgttcttgccataagtatataacatcacgcacagtgtggacaaccctatccacatgcatgccaatgtatgcctcagaatacat

SEQ ID NO: 137279 - DNA, 2684 bp, Zea mays
  unsure (1)..(2684): unsure at all n locations
  Clone ID: MRT4577_56676C.1
cattgggtacctcgaggccggccgggcttcgtcagcacggtggacccgctcaaggagccgcccatcatcaccgccaacaccgtgctgtccatcctcgccgtcgactaccccgtggaccgcgtcagctgctacgtctccgacgacggcgcgtccatgctgctcttcgacgcgctgtccgagaccgccgagttcgcgcgccgctgggtgcccttctgcaagaagttcgccgtggagccgcgcgccccggagttctacttctcgcaaaagatcgactacctcaaggacaaggtgcagccgacgttcgtcaaggagcgccgcgccatgaagagggagtacgaggagttcaaggtgcgcatcaacgcgctggtggccaaggcgcagaagaagcccgaggaggggtgggtcatgcaggacggcacgccgtggcccgggaacaacacgcgcgaccacccgggcatgatccaggtctacctcggcagccagggcgcgctggacgtggagggccacgagctgccgcgcctcgtctacgtgtcccgtgagaagcgccccgggtacaaccaccacaagaaggcgggcgccatgaacgcgctggtgcgcgtctccgccgtgctcaccaacgcgcccttcatcctcaacctcgactgcgaccactacgtcaacaacagcaaggccgtgcgcgaggccatgtgcttcctcatggacccgcagctggggaagaagctctgctacgtccagttcccgcagcgcttcgatggcatcgatcgccacgaccgatacgccaaccgcaacgtcgtcttcttcgacatcaacatgaaggggctggacggcatccagggcccggtgtacgtcggcacggggtgcgtgttcaaccgccaggcgctgtacggctacgacccgccgcggcccgagaagcggcccaagatgacgtgcgactgctggccgtcgtggtgctgctgctgctgctgcttcggcggcggcaagcgcggcaaggcgcgcaaggacaagaagggcgacggcggcgaggagccgcgccggggcctgctcggcttctacaggaagcggagcaagaaggacaagctcggcggcgggtcggtggccggcagcaagaagggcggcgggctgtacaagaagcaccagcgcgcgttcgagctggaggagatcgaggaggggctggaggggtacgacgagctggagcgctcctcgctcatgtcgcagaagagcttcgagaagcggttcggccagtcgcccgtgttcatcgcctccacgctcgtcgaggacggcggcctgccgcagggcgccgccgccgaccccgccgcgctcatcaaggaggccatccacgtcatcagctgcggatacgaggagaagaccgagtggggcaaggagattgggtggatctatgggtcggtgacagaggatatcctgacggggttcaagatgcactgccgggggtggaagtccgtgtactgcacgccgacacggccggcgttcaaggggtcggcgcccatcaacttgtctgatcgtctccaccaggtgctgcgttgggcgctggggtccgtggagatcttcatgagccgccactgcccgctctggtacgcctacggcggccggctcaagtggctggagcgcttcgcctacaccaacaccatcgtgtaccccttcacctccatcccgctcctcgcctactgcaccatccccgccgtctgcctgctcaccggcaagttcatcattcccacgctgaacaacctcgccagcatctggttcatcgcgctcttcctgtccatcatcgcgacgagcgtcctggagctgcggtggagcggggtgagcatcgaggactggtggcgcaacgagcagttctgggtcatcggcggcgtgtccgcgcatctcttcgccgtgttccagggcttcctcaaggtgctgggcggcgtggacaccagcttcaccgtcacctccaaggcggccggcgacgaggccgacgccttcggggacctctacctcttcaagtggaccaccctgctggtgccccccaccacgctcatcatcatcaacatggtgggcatcgtggccggcgtgtccgacgccgtcaacaacggctacggctcctggggcccgctcttcggcaagctcttcttctccttctgggtcatcgtccacctctacccgttcctcaaggggctcatggggaggcagaaccggacgcccaccatcgtcgtgctctggtccatcctcctcgcctccatcttctcgctcgtctgggtcaggatcgacccgtttatcccgaaggccaagggccccatcctcaagccatgcggagtcgagtgctgagctcacctagctaccttctttgttgcatgtacggacgccgccgtgcgtttggacatacaggcacttttgggccaggctactcatgttcgacttttttttttttaattttgtacaagatttgtgatcgagtgactgagtgagacagagtgttgggtgtaagaactgtgatggaattcactcaaattaatggacattttttttcttcaactgcaaccggtgtcacaaatctgtctatacctatagggtcaattttgatcattttcataaaatattatgccatttttttttgtccacgcctaanaaaaaaaaaaaaaaaaaaaaaaaaaaaaaaaaaaaggaaaaaaaaaaaaaaaaaagcggcc

SEQ ID NO: 137280 - DNA, 239 bp, Zea mays
  Clone ID: MRT4577_56677C.1
acgtcatgacaacactctggactttatagaggttttcacggcagacaatagaaacatctacgggtggtataagaagatacctgacatataatcaaagactgttaacaccgttttctgtccatatcgataaaactaggctgatgagaaactgacaccacgctattataacatcgatgtggacaccaaattcgactacttctaacacaaacggtaattgcactggacatgtatctactact

SEQ ID NO: 137281 - DNA, 342 bp, Zea mays
  Clone ID: MRT4577_56678C.1
agcacatacattgggggtggacttagacgaggcatacatactaatggaagactgcaacataaattacactctataccctcacattactagacactggcttattatgagacactatgctctagtctctaggcaagcacacataccatacacgttggtcgcagccccactctttaggccacatctttgtctgctgataccaccatgttttgttcatgtatttgggcttataaagcttccactgagactggctcccgacatggaggtacgcgcccttttaacccatgtcatttcgctgttccagatatacccctgccttcttgagctcatggttcatcatatctt

SEQ ID NO: 137282 - DNA, 418 bp, Zea mays
  Clone ID: MRT4577_56679C.1
aaacaaggctgggtagggcccgggaaacccgagggggaccgacacgaactcacaaggggcagccaggaggagcagaggagaggacggaaaaaaggggaacaaacgcgccggatcgccggaggggaaacagccaaacaagtcacggaacaaaaagaaaaaaggaacaacaagcggggaaaacggaggggccaaaagaacaagccagccaacaaaaagaaggccgggcaaaaagagggaacagcgggaaagaaaaccggggaaaaaaaccacacaacaaacgagccaaaagcataaaaagggaagccaggggagccgaccgagggagctaactcaattaaccacgaagaggggacagaccggattccagtcaacaaaggggcccagccagaggcacaaaagaaggggccaacgcgggggg

SEQ ID NO: 137283 - DNA, 588 bp, Zea mays
  Clone ID: MRT4577_5667C.1
ccggccgggatccctaatccccggccgcctaacggtgttgttcagtcttgagctggttgctgcaacgaacgaaggaacggacgatggttgttgagtgacgtgcgtcaatggcgggcgccacaccgggcctaaagccggagccccgtccgttcatccatgctcgatctggacgactctggtctggtagtggtggtggagcgacggaggcgggcggatgcatgggccttgccggcaatgattggtgtactcattgagtgctagcgccaagcgcctctcagaactttcgtgtgctcatcatggttggatggccagggcaacatgcacgcatgacgcattcggagggccacaggccagcgactctgctcgcggcggcccccctcctctctcaccttcctgccttcccgtgttgcagtcccagttgcagttgcaggcttgcagcacaaaagggaagggaaatatggaacgtacagcgccaatttctactccctccgtttctttttatttgtcgctggatagtgtaaaattgcaaaaaaaaaaaaaaaaaaccgcggccctcgagctccgctttttgttcctttatcgaggctt

SEQ ID NO: 137284 - DNA, 490 bp, Zea mays
  Clone ID: MRT4577_56680C.1
aggccggccgggaacatatccgaattgtcagattgagtcgaactcgcaaggaaataaagatagaggagagcaggagacaacgccagaaccgcgtctcgccatgggccgactgcctcccgccagtgcgattcaattgctggagtacgtggactcacgcctcctcctcggacggcctttcgccgctgcagcaaggcgcagagccctcgccagatgactacgacgacaaaactccccgtgtgatataccagggcatccctgtgaagaacgctaccatcttcactcatgagcgaaggcattgataacggacaccaacatgtgatggtgaaatgaatcctcaagaatacgtggatctagaacctttagggcttccaccgtataactctggaccaagagactaatgctgatacaaaagaggaatgcatctgtcatatatgttgcaacatgatttgctaggaaccgttacaatgacggcattgaagactaatgtcta

SEQ ID NO: 137285 - DNA, 266 bp, Zea mays
  Clone ID: MRT4577_56681C.1
ggccgcttttttttttttttttttgcgcttgtgtttcgcctctgttgccgccgtggtgggctctcgccggctggtttgtgtggctggcgtgcggccgggcgcggtgttttctcccgccgtctgttgtctgtgggggtggggtgcgatgcgatgcttgccgtgccggggcccctcgcggtccgggttcggcgccctgggtgttgtcccgggctcgcctgtcggcttgtgggcttgtggcctgctggctgtgggtctgcttgggcggg

SEQ ID NO: 137286 - DNA, 411 bp, Zea mays
  Clone ID: MRT4577_56682C.1
ttaattcggcacgaggctcaagttctacccgtcggccgcctggcatcaccacacacgcggtacgccgagctcgtcagacatgggcaacgctctaccttcagccctgctaggcgggggaattgccagatgagtatcatgtccaccgcaattataagtcggttgactaaccatgtactgcccacgctcaacatactccgtattatcaacagttgatgctatcacaccaccaccgacagcagctagttgtataatgtcctcaaaatcatcacgctcaattacgaggatgtcagaatgagagaaaagcacttcaggcaagatatagagtaactgactgtagacaaaatagctgatgccatacgctataatgtgctgcacgcacacgctgagtattatgatcgaagcacactggac

SEQ ID NO: 137287 - DNA, 282 bp, Zea mays
  Clone ID: MRT4577_56683C.1
ttttaacatcggagcagatacaggagaaggttcgcatggtctagtagcgtggacgcgggccgaaggcggcgacaggccatttgaatgtgaccggacgggggcagcgagggacaactaactaccaggtgtagactgtgagagctgatgaacacgaggacagcgaacggcacacgcgtggactgcatcatttactgagtgctctgacagagagctgatagtcgctatagacggtactgagatgtgctggggccactcatctggacaggcgagggtgattctgta

SEQ ID NO: 137288 - DNA, 131 bp, Zea mays
  Clone ID: MRT4577_56684C.1
caagtagttgcctgctgttttagaagtttctccccgttgcgtatcgatctgtagtcctgtctacgtgggcattgccatcatctgatatctgtagttgtacactgtcttttgtacctctagactggaggggt

SEQ ID NO: 137289 - DNA, 245 bp, Zea mays
  Clone ID: MRT4577_56685C.1
ctgtgtctgttcgtttttttgtattcagtttttggacaaccacacataacccataacttcgcgatttattaaaccatattgccaaggactgaaaggtatgtgttattctccacggcctgctaacctcggattacacgcacggtcatcaggcttttttttacgggcgtgctgagaacctggtctcggccaccacctttagcggtgatttccccctggcctggggtttttaggactctttcatgctc

SEQ ID NO: 137290 - DNA, 390 bp, Zea mays
  Clone ID: MRT4577_56686C.1
gcgcccacgcgttctcttgattacacaaatatacactttttaactctttaatacaacataaaaactttcgtgcaatattgtttgatatataaaatgcaaaatgcaccctcatcccccaaaattataaaaaatcacaattttttttctaccccttgtccgcccctctttaaaacaattcaaactttacatacccattctatactaacatcatacgctcttttataatcgttacctaaattcaataaacttgtcctatctcctttacaacatcctttacttataaaaacctctctctttacccaactttaataaccctttctacacatcccccctttctctcatctttcaataataaacaaaaaaatccctcaccaatttttccttcccaac

SEQ ID NO: 137291 - DNA, 282 bp, Zea mays
  Clone ID: MRT4577_56687C.1
tagctaattattataagctaataaatatagcggcgtctctgtgtgtgtttagagatacacagtcagttatgtgcgtgcacatggcatgctctgagactgagatgactgatgatgcctgatggcggcgtcttgtcctgtagtcctcccctgccccctcgggcgcttctggcagcaagcagtgtgttgtgttgagttgtgtgggtgcataacggtagcacgctatccatgtgccctgctgtgatgtgtcaccatccatctataataatcttatatctatacccc

SEQ ID NO: 137292 - DNA, 445 bp, Zea mays
  Clone ID: MRT4577_56688C.1
gccgccatgtgatggatatttgcagaatcgcccttgaccgggccgccggccaggtgaccatagctcttttttttttatctgtttgactgtttcgaccatacgtgggtgccaggatagactagctcctgacccatatctagaagacatgccgcgcctgcgcctgcgtctgcgtctgcctaaaggagatcagatcagtcttggggggggggggggttttctcgtatggctgaaaatgttttctttatgaggtctcgctctcacgctcgggggcgatttgctactagatctgtgccaggagctatcccttcctggcgccctccttggccgcgaccgtcttgccgttcttgacaaagtggaaggtcacctcgggcgggacccccctggagggagttttctgcatatattcatcacactggggggcgcgcgcgccttcctgagggggccc

SEQ ID NO: 137293 - DNA, 1815 bp, Zea mays
  Clone ID: MRT4577_56689C.1
cattgggtacctcgaggccggccgagtaattattactttccccgaaaaaaaagccccccaccgcctcgacctcgattcctccgcccccatcgccgtcgtctcctcctccgcctccctgtctgtccgctccgcacctcccctaaaaaacccctccggccattgccgcaccgagctccccttcctcaaatgccccaggcccggacgcctcgacgcccagctccgtgctcgaatggctagcggcgtcctccatcgctccgcctccctatgtctccgcccggccgccggctcctccgccgactccggccggggccacggcgcggttatgatcggtgattcgaggacgcgcgttgctgctctgcggctgggaggatctagccggagagagttattatctgtcacaatggcctccagagatcacactggcttgacccgacaacttcttgattttcaacatgatacaatagatgaggtaggcgcaggacatgatccattcatggatttgaaagcgagattcatggactttaaacagagaaactatgtggaaaaattttcaaattaccaaaccctggctgagcagcaaacaccaaagttcatggtggttgcttgtgctgactccagggtctgccctaccgctgttttggggtttcagcctggggaagcatttacattcggcacgagccagagtctgccctaccgctgttttggggtttcagcctggcgaagcatttacggttcgtaatgtggcgaatttggtaccaccatatgagcatgagggatcagagactagtgcagcactagagtttgctatcaatacactcgaggtagagaatgtgctggtggtaggccacagtaggtgtgggggcatccaggcactaatgagcatgaaagatgattcaacatcaggaagcttcattaaaaactgggtttcaattgggaagagcgcaaggttaagcacaagagctgcagctggaaatttgagttttgacatgcagtgcaaacattgtgaaaaggaatcaataaatagctctctgttgaacttgttaacatacccatggatagagaagagggtgaatgaaggtactttgaatctccacggaggctactacaacttcgttgattgcacatttgagaaatggacattattgtaccgtgaagggttggaaggtggaagcaagtacgctataaagaataggtccacctggtcttgaccaatgaaggcctcatttacttgggtaaatttcactctgcgcccctgcagttcagcatggttttgctttgccactacgctgtgcatttccgtcgcacctttgctccattgtggtattgatgttctgcagaagcgagtccctgtatcaaataactgtgtccattgcgatgcatggcactatggcactagcatgtcagcttgctgtagtattgcatactcacgggcaggtgcatcggcattgtagttgtagcagctattgtttgatacgtacaggaactctccactgtggaagcacaaagccacaatggagtgaggtgcgacgcaatgaacaatatggtggcaaagtgaaagtctgtggaactaccggggggcaaagtggattttgtgcaactatttgtgtgtcgttttccggttgataccattgagaaaatacgaataagttacaggatcagtcatagtgcatgtaattgtcgccacatttggcgttaccttgttattgtaattgtaacatttgtaccatttgttgtatcattataactgtgagatacaatacaaatattatacggtctcggcaaatttgcttgaaaaaaaaaaaaaaaaaagcggcc

SEQ ID NO: 137294 - DNA, 367 bp, Zea mays
  Clone ID: MRT4577_5668C.1
atgacgcatccgggatctgtatcctatcctatacgatagcaaccgctgattcactactatggtgctcggacttgggagaaaatccattgtccagaagctaccgtatgcagaattatgactgatgatctataagtcagattccaatctcgatggcagcatctattctcctcagtcgctgagactgatggtaaggagtacgagcgacacggactcgtaccatgagctcaaggaggcctttcgagtctccgagaaggaccagatcgaatctatcttgccagccgagctcgtgcttattattactgagatgacttagaacctgaccgaccattatatgtaccagatgatccttgatgccgacatccactga

SEQ ID NO: 137295 - DNA, 139 bp, Zea mays
  Clone ID: MRT4577_56690C.1
gttatttgtaccaacggtatacgacatcgcgaggggggtgcgtgaggaccagggggggaaatccattcgattagcgctgagcgctgggggactggagaacgctttttggaacagcaacggattaaccagcaataaggaa

SEQ ID NO: 137296 - DNA, 692 bp, Zea mays
  unsure (1)..(692): unsure at all n locations
  Clone ID: MRT4577_56691C.1
tctcccccgctccgtctccctcccaaatacctaaangatangattcctccgccgacagaccccgccgagcccccccgaggccccgcgtctgatatgagggacagcatctcgagcacatcagccactacgcgccccaggtcatcgacccaggctgcgaactgctacggcctggagcacgggatccatgaaggaggggcagacgcacggngaccacaccatcgcaccgtggtgatgacgccctgctcaccttcttcgacgacaatggagccggccaggacgggccccgcgcgcgcttcgccgatctcaaggccaccgtgattgacgctgtccgcaccatggcctagcgccatttcttccacccacgagcccccagcagcggataagacgacgcgccccacaagtgcgccctggcgctctacacaatcgccccggagatcccggccccccgcctgtgacgcatccgccccctgcccaaccactgatctgccctgccggcctccccggacctcaactcgattgccggacgcacctctgtcccggttcccggccccccccctcctccgcggcctgttctttacactatggtaaaggatgcccccgctcccgccccccctttggccccatccgcaccgccatcccccccccggtgccccagccccacccctttttgcccgccccccccttcctgcggc

SEQ ID NO: 137297 - DNA, 376 bp, Zea mays
  unsure (1)..(376): unsure at all n locations
  Clone ID: MRT4577_56692C.1
ataatggattggccattttgtttatttgtattgtttcatatcctatatgagaggtatgcgtttgtggttttttcacatgtgacgcttacacaaggaagggaaggacgtagaactntgagcacacatgtgggtggaggatgccatggttggtgcatcgcccgcacacctgccagcagcacaaggaacgatgcggtgcaggccaaaatgaaaccttgagaggacgggcacaagaaggggggggagtgatggaggtacacattctgcgtgtgacccgttcaacttgtagaaggatagccaaggcgtgttctaggcctagtcttttctcggtgccggggggctcggttgcgatgaagatgatgcactgggtgtgcctgac

SEQ ID NO: 137298 - DNA, 648 bp, Zea mays
  unsure (1)..(648): unsure at all n locations
  Clone ID: MRT4577_56693C.1
gtctcggtcttcccgaaaanaaaagaagacaaaccatcgacggctccgagctctcgcggggatagggtttgagccgccgcccctccggcctgcccgccggcggcgcgctgctcttccggccgccgctcttctccctcttcgttcgccgccccttttctccctcgccgttcgccgcccctgagcaccacgcggctcgctggatcattcgccgcccctgagcagcgcgcagctcaccggaccgattcgtgccagccccgccgacctgagctccgcctctacaggtagaaagatgcagatccagcgaggggatgttcaacctggaagctcgaatagaagacgcaaaaaaatgcgcataagtagcgaaaatatgattcgagtcaatcctctcgaagaggaattcggcacctcaagtgattctggtgaaggtgtctggaggctactcagtgaagaagtcgcagcacacatagatgacagtgttgtgtcgcttgcttcattccataaagataacgcaaagtcggtttattttgcgtgcacgggcataattattgagagcaattcaactattacaagtttcttgacttcgttaagtttgcttagatctattgatgatgatagcaagatctttcaagacatgatgattgaagtgcg

SEQ ID NO: 137299 - DNA, 532 bp, Zea mays
  Clone ID: MRT4577_56694C.1
aaaaaaaacccacataaaaattatttgggctgggatcctacttaatcggaggaaaaaaaaacctcatttacaactcagtcccgaaaattggggctaaaaaaataaacccggggggccccttgagattcatgcggccgggaaagcaaaaaccatgctactagtcccattaccagccggccgggagccgaagttcctgcagccgggccggggacggccaactccaagaacagacctacaggaaacgctgggggactaatcttttttggccgcccgtatagggggcccgaattgggaccgtatgtcccccgtttttatagatccttcacggggaaaaaagaatcggggtcgggtttgcccgcccgccccctgccctaagttggttttttttcccagaaaattattcacatcctgggggggggggggaggccctcccctttccattcctgatcacgccgtccgggtcaccagtttcaccccgggcaggtcgccgccaaactcctggagcaaaaccaaaaggttgccgctggggttg

SEQ ID NO: 137300 - DNA, 335 bp, Zea mays
  Clone ID: MRT4577_56695C.1
gaagcagagtaaaaacgcaaatggcgttataaatagtgaagatgtggttgtctacactctaccgctagatagagtagctgattgcataagcaacatacagttggatccatttacacaaaagtcaacaaccagaacatctaatgtgtccagcaattccttgtcacgccaaagttcctaatagatgactcagaacgatagcaacgtgaggaaattcaacaatgtcgatgtgctttcgttttcagagctgttcatgattcgaagagttgcatatatctattgccttaaccacaagcctaactatgtacaagtacaaaggcgaaaaataccggtttatc

SEQ ID NO: 137301 - DNA, 248 bp, Zea mays
  Clone ID: MRT4577_56696C.1
tccggccatgtaaatatacgtaagcagagcatagtaggatacagagcaaaggtctactctcaactgagcgcctgcgggcaaagaacattctcgagctcagtgatgagaggcagggcctaactgcaagatactctgcaagtggcgatggggccactggcatcggaggggaccctaacaagcacatggcggaactatgggagggctgatggcgcgtatgctggactggggtgaccagcgctggccattaa

SEQ ID NO: 137302 - DNA, 370 bp, Zea mays
  Clone ID: MRT4577_56697C.1
cgatctatcgctcgctgctacagagggcacagggcgacttacaccatgtggcggcggcacctggacatggtgctcgcgtagctcttcgccctgatagaagacgtcgccggatcggctgactggtcgctatacgacaaggataacacggacagcacctctcgcacccaatactagccgtacgagcgtgaagagatcatggtcaacctgcaccgaaactgcggcacacccttgaacttcaaggagcacgacttcgaccgcgacgtcagcgatcagatgaagatcatccacggcaactaccccagcaaccagctcgtgcttgtacctctgtgtcaacgaaggagaccgacacgacgacgatcgacatgagaga

SEQ ID NO: 137303 - DNA, 632 bp, Zea mays
  Clone ID: MRT4577_56698C.1
gcgcatcccacaaccaccgaccaacctacgtcctaatcctccgctgctcgggtataaaaatgatgatgcctctgaaggaaagccataccaggttcttgcattcctgtcagatcccactgaaacaggtctgaagagaagcgctcgacgtggtgcaggtctgtcatattctgtggtgtagttcaagcataagccattacagggaggctcgtcttcaggatgcaagccttttcattatgatgaaggcatacgagatgaaggtgtaatctaaggatgacatgaataaacgccgaagctaccgccagatcgatagcttcggctcatgatgaagatgaagtatgatggtgatgctgaccgaaggggaaaaaagactatttagtccttaataatttgtattttgatcataagtaaatattggggatataaatgtacttttacctgggcttgggctgcgtcccgtgcctataaataggtgaacggtagcaccatactgttcacactgatttgtaatctcccttgcgtcaacatcttcgaacaagccgaaggtatcaatgtaataataattctattgatatttatgcatgtattaaagaatgcaaatactaatgaatcaatgagttgtacttgttgttttc

SEQ ID NO: 137304 - DNA, 250 bp, Zea mays
  Clone ID: MRT4577_56699C.1
cccacgcgtccggtgatgcacacgctatgttgaagcctctaacatgcccctctcacggaggaccctgtgcacaacttccatgtccacaaaaataaccaacacgagcagattgctaaccggtctataccacctctgttataaccctactgacacattgccgtcaagagcacgttgctgcacaacaatatcgatatgcaggctctcatagaccttgtcatacatcacgtattcctgctcaatgacgaagctc

SEQ ID NO: 137305 - DNA, 636 bp, Zea mays
  Clone ID: MRT4577_5669C.1
gcgacggtggatcgccaccaggcctagcggcagcggaccgcgacgagacggcgcccggtgcgccgacgacgacggccgtgtcgcccgcggcgacgtgggacgccgccgagcgcgccaagcacatggccaggtatcggcgcgaggagatgaaaatacaggcctgggaaaaccggcgacggcaaaaggcggagctgcaaatgaaggtggccgaggccaaggcggagaggatgaagctacgggcgcaggagaagacggcgagcaagctggcctcggcgcaggcggctgcgagggagaagcgcgcgcaggcggaggccaagctgaaccggcgcgccgcgcgggtcgacagggcggacgcgctcaggcggaccggccacctgccgtcctcctcctccgtgttctcgctcaagctgccgctgatgtgcagatgagagccgaccgaggggggtgtggcacagcagttcacacggatgctgttcagagtttcagtcaactgtcctgttagaattggtcgggacgctgctcgcgtccttgtgtttcagccgagcggtttgcgatgcacacaggcacatggcacttagaattgtagacatttgtttttttatctgcacaaatcagtgaagaacaaaaatattttat

SEQ ID NO: 137306 - DNA, 160 bp, Zea mays
  unsure (1)..(160): unsure at all n locations
  Clone ID: MRT4577_566C.1
tttagtnanatttttttttaatagncanggggggccccaggggctatttaggggggggctatataaaaaaaacatcttttaccatatgcccagggtgctttccgggccccgtaacggacgtgaaattgagcatcctctgtgctataacaaaattaaaaac

SEQ ID NO: 137307 - DNA, 655 bp, Zea mays
  Clone ID: MRT4577_56700C.1
cggggtctcactactcgctctcgctcactcaacccgcgcccggctcgctgcgccgccgccggtccatccccgtcctcggccaaccactgtcgcggccagccattgagcgcggccactggccccttgcgccgcccgttccccgacactgccgccttttcccggcgacgccccttcccggcagttccccggcaaccgccaccgacctcgacccggctcccccgtgcgtgacgccgctcctcctcctctgcgccgcagtccctccccggcgccgccgcacgctctggccaccttcttgacgccaccacgcgcgtacactattttttggtaacttgttgataactgctagttggttgattgattgatggtggcagtgaaaactagaagagttaaatagaagatacaataaactagtttggtaaactagtttggctgattgattgattgatgttgggagtgagttgtaattttgggatgacgataatgttcgactggtagtagggtatagtcatatggtataactttatcaatatttgataatatttttgggtttatagaaaaagcagaaacacaaagcggtcctggtgctggaggttgtgcgccgtttttcgtgggtcgctttgtgcgctgggcgtttcggctgttcgctcggtggcct

SEQ ID NO: 137308 - DNA, 813 bp, Zea mays
  Clone ID: MRT4577_56701C.1
cttacgtcttcgcattcatgttcccaatggggctcggtgctgcagcaagcatacgcgtgtccaacgagcttggtgcaggacggccacgcgaggcccgcctggcgactcgggtggtcatgctcctggccttctccctgggcgtctcggaaggccttgtcatggtgctggcgcgcagcctgctcggctacgcctacgccaacgacaagcaagtcgccttgtacacctctaggttgatgccgatcctcgccgcctccaccctgtttgactgcctccagtgcgtcctatcaggtgttgtcaggggctgtggccgacaaaagatgggcgcctttatcaacgttgcggcattctacatcgtcggcatccctgtagcgtccgttttcgccttcgttcgtcacctcggtggaatgggtctttggtttgggatcttgtgcggagtagcagtgcagatgatcctgcttctttgcatcaccttgtacactaactggaacaaagaagtatcgaaggcaaatgacaggcttttcagctgttctcttcctgtcaacgacaccataacatcgggtgttagcgagcagggaaatggatgtagttttgttgggaacaaggatgctgctaatggagacattgagctgacaagtggtctcaacaaaggttgatggctacaatgctacttttctactcatctatttagcttaattgtaggctggtaaatagcatctagtggaatgtacgtactcactgcttagccttcagttgaaagcagcaaaccatggtggtcatatggacctctttttttttaaaaaaaaaaaaaaaaaa

SEQ ID NO: 137309 - DNA, 264 bp, Zea mays
  Clone ID: MRT4577_56702C.1
tccgcacctcgccacatcgtgccccttgctcccactctcccctccctcggccctcctcccggcccgcgcacgccgccgcccgacgcccccggtctcgcgttgcccgaagccccagatccgtcgcatggcccccgtcctcccagttgcccagggttgcggcaagcacatcgtgctcgtccacggcgggtgcctaggcggctggtcctggttcaaggtggccacggcgctccgcgcagcggtgtaccgcacggacaatgccgacct

SEQ ID NO: 137310 - DNA, 472 bp, Zea mays
  Clone ID: MRT4577_56703C.1
cctcgaggccggccgggattctatatttcatcataccatttgccaccgtacgtctcatctgctaatatatctccccgttcaagctagtcttagccgctctacaacaacttgatcaacgacgacgtgctacaacacttcacctactggaaaggatatcgctccacatgaatacacaaacactctcccgatctcattatgtgacgcaagcaagctgggatcctgattggtctaccttgccataaacgtcaaggtcatcgccacgcttgtgattctgaacatcacccatgtaaccttgatcgggtactagaccagagcaatatgtctccgtccagcgacgacgcgtgatctgtggaggagtccgtatctgcacactctcatctactcgttcggagtgatgaccttcggacaaggatactgcaccgccgcccctatatcgtgaatacttcaaccccgcacgacaccttctcttcta

SEQ ID NO: 137311 - DNA, 306 bp, Zea mays
  Clone ID: MRT4577_56704C.1
tttcttgtacacatactaactccatttatctttatggcgacaaccaacttggggctgatacatttcctgtcattcatccatcaagttctcgtttcacagaaccatttttaatgtaccctgtgtactctgtagaggtctacagcaaggaaagccaagaatctgcatgggatgcctttttaacttgctctttcctggataccgcacacaatatcgttaaatacattcgagatcatatcataaagttatcaaggatgggggggtctaggttaactagggtccccttctgtatcactttgctgattcata

SEQ ID NO: 137312 - DNA, 331 bp, Zea mays
  Clone ID: MRT4577_56705C.1
aattagtttatacttatatgaacgtttttataaatgaggacgcttaccaaacaaataaatttaattcaatctctcacttctttttctaccaaactattataacacttccttcaaatttttatttctattattcctaccttttgtttcatttattctaccacatcatatcttccctatttaacttttacattactaccttcacaaatcttaataatccaatcaacaaatctctatacttctccactcctattttctctatgatcactcttaaaccattatctcattacccttcatccacccaaattttaaaacccactgttcacataaatat

SEQ ID NO: 137313 - DNA, 810 bp, Zea mays
  Clone ID: MRT4577_56706C.1
ttgggtacctcgaggccggccggggatcgtctccatcccgcatccggcacaaaccaactgcatcaagctccaccagagaagacagcccgccgaggcgccgacggccgcagccgcgggcggactcgtgagtcgcgagtacgccgctgcagttcccaactcagggtgcctgcccgtaacctacccaagagcggtcccgccatgcgcgcggaggtcacccagatcagcgccctaaccgccgtggccgcgcacgtgctctgctctgcgggccttgctgccgcccacgccctcgctggccgcggcgcgctcgtctccgaccccgcgctcgcccttcgccttctcatggtctgtgaagcgcccatagtcatcgcagtgttcagctacctccggcgtgatgctaaaagttgctcgggctgttgcaagaggattgatcggcttgcccgtgggtttgttctatatcttgactttgattgcaggcttacttttttttgagagagtacaaggatgccgcgaactcacaccactacacaccacacatgtgtgcgcgtccatcacacacactaggcctagacctatagtgcgtggaaacacgcaataccgaatgtgcacgcgtgtgtataccctatatctagacccagacacaacctgggaggcaaccagagataaactccaatgtgaggatcgaacccacgccttagctaccaacttagctaagactcatgcttactttgattcattgctctaagagtatgaagccccaaaagaacagctccatgctgcagatctgatctgtagttagtgttggggttaatt

SEQ ID NO: 137314 - DNA, 473 bp, Zea mays
  Clone ID: MRT4577_56707C.1
accagttcgatggtggggagaagcgagccgggctgcggcctctgccccgccctcatcttcaagtatgttcatcatcctcgctggggcggagagcgaggcgagccggagctctacctcccgcacgggtcggctggccacctcttcttccagcttctgggggtggaaaccatccccagctctgcggaggaggcaccctccagccatgtcggggaaggcgaggaacattccgtcctctgtcctcgttttcgtggcgaggacgggagtgaggacctgccggtgcgctttggggcggtcggcgctcgctggtgcggtgttggtggacgccgccgtcggtgctgacgtggtggcagctggagaaagcttctccgccgacaagcccgtcagcgctacccgcggaccgacctcctgggaccgtcgctgctgctgcagaggtcgctggcgagtcaccgggagtttgtcgtcccgcaggctct

SEQ ID NO: 137315 - DNA, 302 bp, Zea mays
  Clone ID: MRT4577_56708C.1
cacaggctgaccccaccaacagcaagcgaaaatctcccgatcccctctagtctccgcggcgaagatgtcggggcgcggcaagggcgggaagggcctgggcaagggcggagcgaagcgccaccggaaggtgctccgcgacaccatccaggggatcacgaagccggcaatccggcggttggcgcgcaggggcggtggaagcacattccgcctatattacaaagaacccgggtgctctaaatttctctaagaacgtatcgagccctgcatatacacagagcacgcgcgcaggagaccacacacat

SEQ ID NO: 137316 - DNA, 1278 bp, Zea mays
  Clone ID: MRT4577_56709C.1
ctctcatgtctttaaaccctcgctctccccccccacttcttttatcccttcatcgtctatcagccagctccattctatctactgctactctcagtactatatatctatccgcagttccatagttcttccagctgctctacacatacacatacacggtagctctagctctcacatcgatgtgagatcatcagagaggtggaagaagaagaagctaagataccagatcgaggaagagaggcggcgcggtggttggtagatgatggagagggtcgaggacttagggctcagcctcagactcagctcgtccctcgcgtttcctcgcactcagcatgtcgccaccatgctgctacgcgctccagagaagaggttcctggagatgccactgctgctgcccgcgaagcggacgaccgaggtcaccggcgaggatggcctgcgaggcggcagcgatgaggaggacggcggctgcggcatcgacggctccaggaagaagctccggctggccaaggaccagtccgcggtgctcgaggatagcttccgggagcacccaactctcaatcagaagcagaaggcggcgctggcgaagcagctgaacctgaagccgcgtcaggtggaggtgtggttccagaaccgcagagccaggtgaacaaagcagcgcccttgaagcagcacacgcatgccatttatactgactcatcctccgtggctaatactagtctaataataatattatcgttcaggacgaagctgaagcagacggaggtggactgcgagttcctgaagcgctgctgcgagacgctgacggaggagaaccggcggctgcagcgggaggtggcggagctgcgcgtgctcaagctcgtggcgccgcaccactacgcgcgcatgccgccgcccaccacgctcaccatgtgcccctcctgcgagcgcctcgcctccgcgtccgcgtccgccgaccaggcgggccgtgcagggccctgctggggccctctccccgtgttcgtcgacggcccagcccggaggccgtgatccacgaccacgatatggcatgagatggatgcgcttgctaatcgctaccgctagctaagtagctagtgctaattagggctggatcttctttttttctttgtttggttcttattatactcgcaggctattacagcttagtagtgtttattagtccgatatgataaaaatcttcgttgtttggcagtgttttatttgctgaaaaatagataacgatgtcttatgtctttgtactcataagtgatgcaaaattgtctt

SEQ ID NO: 137317 - DNA, 278 bp, Zea mays
  unsure (1)..(278): unsure at all n locations
  Clone ID: MRT4577_5670C.1
ttttttttttttttttttttttttttttttgggttgggttttttttgggggggggtttttttttttnnnnnnttttttttgggagcccaaggtgtccccaatttttaattacagttgccctaaaaaatacatgcccattttttttttttttggtttcacaattccaaatttaataactggggcccaataaaaaaagctcccaattttggtaaacaattttttataccacaactttttgttacccatttccgttttttccattttaaacaatccacatt

SEQ ID NO: 137318 - DNA, 1172 bp, Zea mays
  Clone ID: MRT4577_56710C.1
cagccagctccattctatctactgctactctcagtactatatatctatccgcagttccatagttcttccagctgctctacacatacacatacacgctagctctagctctcacatcgattgagatcatcagagaggtggaagaagaagaagctaagataccagatcgaggaagagaggcggtgcggtggttggtagatgatggagagggtcgaggacttagggctcagcctcagcctcagctcgtccctcgcgtctcctcgcactcaccatgtcgccaccatgctgctacgcgctccaggtaaatatataatgcaatttgtctatatatatctctgtactaagtagctatgcttggatctatcagagagtaactgtgaatgaccatatcaattaagctgtagctagctctagtgtacatgtgtgagtcttatgtctgtctgactatatgtaagattagtagtcagcaactaaataccgtacgtgtatgagtatggctgtcactcggatgcatcacatataatgtatcagagaagaggttcctggagatgccactgctgctgcccgcgaagcggacgaccgaggtcaccggcgaggatggcctgcgaggcggcagcgatgaggaggacggcggctgcggcatcgacggctccaggaagaagctccggctgtccaaggaccagtccgcggtgctcgaggatagcttccgggagcacccaactctcaaccctcggcagaaggcagccttggcgcagcagctaggcctgcggccccgccaggtggaggtgtggttccagaacaggcgcgccaggtacgtacgtagcgcacatgcgatatgtcgccgcgcgctagctcgtgtgtgctgatgatcagcaagcatgcactgcatggccgggatttctctctcttttctgcccctcgctcgatcgcttcattcggtcgtgcaggacgaagctgaagcagacggaggtggactgcgagtacctgaagcgctgctgcgagacgctgacggaggagaaccggcggctgcagaaggaggtgcaggagctccgcgcgctcaagctcgtgtcgccgcacctctacatgcacatgtccccgcccaccaccctcaccatgtgcccctcctgcgagcgcgtctcctcgtccaacggcaactccgcagctgccacggcggc

SEQ ID NO: 137319 - DNA, 800 bp, Zea mays
  unsure (1)..(800): unsure at all n locations
  Clone ID: MRT4577_56711C.1
ggccgcttttttttttnttttttggatcaaaaagttggcattagcagaaattgtcttccagacggtattgttgctgatatgttaagcagatttgttgagcagaacactgccaaatttaaatagatgcataatcaatgtagagggaaacacgcattttaactgcagactgcagtggtgcttaccgcttggagcctacactgagggttcttacagtaaaaaaatatctagatgttatattagcagcataatatggaggagcgcccggctttagtaccacctcgctagccggagggggccgtggtgagcttataagtgagattttccctcctctcacagcccgggttttgagagcgagtgaaggggctcgcttgtgttagcccacgagcgccgggaaacgcccaaaggtgtagcgttgagtgggctaggccgggaaggtcgctgacaattggtatcagaggcagacagtcgccataccgcccgaaaagggggatgggatgtcaggagcctagccgttagcgcccggctttagtaccacctcgctagccggagggggccgtggtgagcttataagtgagatttcccctcctctcacagcccgggttttgagagcgagtgaaggggctcgcttgtgttagcccacgagcgccgggaaacgcccaaaggtgggcacgataggggccctcttgttgagctcgctctgccgccgtggctctctagtccgtagcaagcggaagctcgggatccaccccgaagtcccaacgcttgggcgtaggggttctccggccggcccgagggtccca

SEQ ID NO: 137320 - DNA, 125 bp, Zea mays
  unsure (1)..(125): unsure at all n locations
  Clone ID: MRT4577_56712C.1
ggccaaaataccgccctaatcagctacctnacttacttcccttctgccggaagagggctgacttacctgcataccttccaatgagctgaccccacacgacatgcaaagccctggacctgttcacc

SEQ ID NO: 137321 - DNA, 669 bp, Zea mays
  Clone ID: MRT4577_56713C.1
ccggccgagattcattgaccgcagaaaaaagttcaaatatcattgcgcttcccttttcatccagatagcttcattttcccttcacgcttgctcattcactaaatacacctgcgattcatatatacaattacccccgaggtgatcgacaaaaaaatggccttcaaccttcctcctttcctggcgcgtcttgcccgcccctttacacagtccagccgactctctattgctcctgatcaatccgccgcatcagtcattcccgagggcgctcagcgctgcaccgtggccgcaggctgcttctggggcaccgagcacctctaccgcaggcactttgctgacaagggtcttatcgacgcaaaggtcggctacattggtggtgatcttgagaaccctagctatcgcgccgtctgcggcggcaagactggacacgctgaagccgcgcaaatcattttcgacccgacaaaggtcacatacgcgcagctcctcgaattcttttacaagacgcatgaccccacgacactcaaccagcagggccccgataccggcccccagtaccgctccgctatctacttccacaaccccgagcaggagaagattgcgcgcgaagtgacagagaaggccaacaagcagtggtggaagggcggcatcgggactgagattgcgcctgctggc

SEQ ID NO: 137322 - DNA, 384 bp, Zea mays
  Clone ID: MRT4577_56714C.1
aaggaaccaggatttatagggggcctttaacaaccgtcaggaccccatgtagaacaaggatttacaggggcctttggttgggaaccatttaagccggggaccgatttttccgagttggtttttcctacccaaaacgcttattcgggtgggttgtttttttctctggccggagaagggatcaccaaaccccaccctggtttgattttaataccacggtttttttgcttttttcatttttcctactattggggaaggtgcggatgatacccataccctgggcattgtttcctttaccaggagaagtggggtctccttgtgccccctatgtagtttaaaacattccaagggtggcgtgattctggaaccacttgaagaactcctgct

SEQ ID NO: 137323 - DNA, 1025 bp, Zea mays
  Clone ID: MRT4577_56715C.1
gtcgacccagcgtcctttcgaggtagcgggctagcgggatggcgtcgccggttgtagtggccgcggcgctgctggtggcggcgctagcgccattctgcggcacgaaccagctccggacgggcagcatggtggacttcccggggttcgagtcccacctcgtcgacctccccaatcccaccgagatgccgacgcacgcggacgaacgggagcggctccgcggagccgaggtgcagttccacggcgaggtgcaggggcccgagagcgtcgccttcgacccgcagggccgtacacgggcgtcgccgatggtcgggtcgtcttctgggacggcgagcggtgggtcccattcgcgacggcctctccgcgctggacgcaggagctctgcggcgggcccaaggcctcgctgctggagtatctccccacgcccggcgatggcgccctgcaactcacgcccgtgctccgcgccccacgcccagcaggcagccacggatcccgcagggcggggatctcgcagatcacgccgggcagggatctcgcccaagcctgatcagaagtttggggaccgatcaaagcgattcccagaagtggaggtcgggctatcgaagcggaggtggtggagatgacggaggcgctgaagtctgtccggaatccggtgacacagaaaaagatcagagtttctccttctacttcgtcgggtgaagtcccggtggtggacagcgcctcgacgctgatccctctggaagctgcgtcaggcattgctggttcactttgcaattcaccggattccggacggactgtccactttacaattcactaaacactaaacatcttcgtctggtgaacttcttctatcatagactcttcactttgcaattcacttttgcttctttccctgaagtcctatgtgttgcggctatacttgtactcaagatgtttagtgtttaccttgtatatatgtgtgtctaggtttgcgagtctttcttgtatggcttctttcttctgttaaggcaatgataagcgtttctccc

SEQ ID NO: 137324 - DNA, 388 bp, Zea mays
  Clone ID: MRT4577_56716C.1
ccaacatgcaacgtggaatgcggtatccactatcaacaatcaatcaccaccggggaccgagatattcttattctttatgctccttgctcttgctgcatgagctgctcacgcgacaattattgctcacagcttacaagctcctatagctttccttcatacctcatacctatgatcaatgatagctgtaaaatccgaaaactcaaatcttatacgctataagctgcaacaagcaatcgcagcatgcaacatacatttatgaccctagaatcaacaatcgtctgtcctatgtttggagcagtcctagccacaaaccatcagggcacagcagctgtagcgcttcgtgctatctgtgatcaaccatatagctatggcaaaccttactctctac

SEQ ID NO: 137325 - DNA, 367 bp, Zea mays
  Clone ID: MRT4577_56717C.1
tcgcccactgcgttcggcagacgcgttgggaccacagctttcagattacgacttccgacagtatccattggctgtgaatcagaccggatccactgccatgaattttataattcaggacgtcaagggagtcatccaaaaacttaccaaaggtcaaggtggaccttggaagtgaccataaatacgctggccggagctccaaaaatggctacgaaggcaagtttattgcaaccctgagcgttgattcatccattgaatgtttcgacgttgcctacattcaactgactattggaggagactcttaacatggacctcccagggctgtcatacaacacattttatgatcacacacatggcatgaatgatccgg

SEQ ID NO: 137326 - DNA, 560 bp, Zea mays
  unsure (1)..(560): unsure at all n locations
  Clone ID: MRT4577_56718C.1
tcgcgatctagaactagcggacgcgtttgtacttttggcagaaagccgcggaggcgcggctgttcgagcaggagaaggaggcggaggcacgccgggcgtcagctgaagcggccttcttcgcgcggcagcgcgaggccgaggcggagctgttcgcgaagcagaaagaggccgaggggctagcggccatgggcgaggcccagagcgcctacctctccgccatgctcggcgcgctgggaggcagctacggcgctctgcgggactacctcatgatcagctcgggtgtgtaccaggagatggcccgcatcaacgccgacgccatcaaggggctggagcccaagatcagcgtatggagcagtggtacggacggagaggctggcaatgcgagcggcggcngngcnatgaangagatggntggtgtgtataagatgctgccgncgctgctgaccacggtgcacgagcagactgggatgctgccgcctgcgtggatgggcactctgacggaccgcctgtcgacgtctacctgacaagagctagacgtgatgctttgcgtttggtagacg

SEQ ID NO: 137327 - DNA, 540 bp, Zea mays
  Clone ID: MRT4577_56719C.1
cgagtgtacaagcttttttttttttttttttttttctttttttgctttttttttttttttttttattttttttttttttttttttttttttttttttttttttttttttttttttttttttttttttttttttaaaaaacttttttttggggacctgacagggcggccctcccaagggggagttccaaggggcggggggccggtcctggggggcccgggctcggggccccgggtgggggacccatgggggtggctccccccgggggggtgtttttggggggtaatttttccccccgcacactttccccgaagttcaaaggcaaagcccgaggggccaaaagaggggggcaaaagaggttaactgggtaaaattaaatggccgcttttcaggggccaaacctaaagggccaaatctattaaaaaaacccccttcgcccaaagaaaaacgccccgcgaaaagggggctgttaaagggccccccttactgaatcggggaaaccggttgggcggcctcggtaaacgggatccgccaaccccaag

SEQ ID NO: 137328 - DNA, 626 bp, Zea mays
  unsure (1)..(626): unsure at all n locations
  Clone ID: MRT4577_5671C.1
ggctgctcccttccctcacatgagtacacgatgtcgcaacctaaccctggctgctccgtgtccgtgctccctcaatcaatcccggcggcgggaggcgcctagcgcaagctaccccggatggtggtggtggtgaatccttcacttgcctgtggccttcacgcttcacggatccgacgcggcataccgcagtctgcacggatccgcgttgtgtcgtcgtccacctctcgccgactcgtcgagcaccgacggttccacttccacaccttcacggtggtgccacagtgactccagtgctcgatcgcccctgcacggctgctcgtgatcaatcgaccacgtgtctggcaccttcagcactccaacgcccatcggccactgcggacaacaatgacaactgccagagaaaaaaacatgataatatacccgatacgaatacgaccatgttacagataccttaatagcttgtccgttttctggcattctctggtttagcgtgcggtatgtggtctctcttttgttcatttattttctctttctcttttgtgctttttttgtttcagctggagcgaggctgncgactacatttcagtgctaatacaacatcagtaggactggttgctgcttctctc

SEQ ID NO: 137329 - DNA, 489 bp, Zea mays
  Clone ID: MRT4577_56720C.1
acaaataatacatctactcacagtactacttgaactgtcactaagtgttcgatgcgcaacagatagcacagggatacaggaaaaaaaaacaggcgggtgtacaagcaaaatatgagtttatttttgaaaacaaggaacatcaagtggttaattacctacacgaattaacggggatgacacacacccaaagtgggccctatctccaacactacaccttttttgctaacatcaagctatgctactcccaaactcccacttagacccacacattgtgagtattaattactagcatatcttcaaagcttgagcatatctatcattcatccataacgcagaaacatgctccttaatatacggcggggggatccactaaccatctgctcccaggctccttatcacatctgaaaacaccgcgactcttgcgaacattctcccgacatggggctgaagaccaaacataacctcatggggatcatcacccaataccac

SEQ ID NO: 137330 - DNA, 681 bp, Zea mays
  Clone ID: MRT4577_56721C.1
gccggccgggtccgggactttacacacgccaatcgtcgatatcacgtcaaattaactagacattcaaccaaccacaacaaagtccaaatctatccggcactgttaactctgtcatacctcatcaccccatcacgtttacctcgtggacccccatatcacctctcaatatggactcttttaccggaaacggctcagaccaagccacatccaacaacaacaaccagcaaaaagaagattacctcgacaagggacttgacgctgtagagaagaagtacggaggggcatcaactgaagacacacaaaggtatcggggtgtgaatgagaagattaccgatggcgcacgcaacatgtttgaaaaggcgactggcaaggatgtccccgacaagttctccaactgaggaggacacaccaccatcaccgaccaccgcatcaacgcctaacaagaacgggtgctggaaggatagaatgcataagctggacgatgagtggtctaaggtccgaccgtacgttgagaggctgaacggaacaattgttccgttgcgctcagcagaagagcaagaccgagaacaacagcgagcaatggagcgtcatgctgcgacgcgtgtggaccaccagacacaaggaaacctagataatgatacctgtatgaatagagaatgaatgacgatgaaatatatcccc

SEQ ID NO: 137331 - DNA, 671 bp, Zea mays
  unsure (1)..(671): unsure at all n locations
  Clone ID: MRT4577_56722C.1
attgggtacctcgaggccggccggngaccaatgtactagagctccggcttgagtgatctcatgacgtgctgatacacagctggctcataagagctccctgggcctgctcctgcttgcagcttgtgaggctgcaaggacggcatggagggcacgactcaacaacgcagatctgctcgagagaagcaccaccagcacgcagcaccgactccgctcagaatcagcacagaaaacaatgtcctccgcgaactcgagtagaacgcctgacaagacggacaggactgccacggctgcggctgcgaagcaaaataagaccgccaccccggacaacgaccacgaggtagctgctgcgaccacaacgtatagatgtacttactctactatacccatgcgcagcagagggcgcagcccacctacaaccccaaccgcccggcaaacataggcctcgccggcgaagagaccgacacgaggatcccgaacaccctcgactactatctctataaggacgtgtacacgcagctctggtacagaagcatcgacgagtgcgtacctgaatgcgaggtaacgctcccggatccgacctcagcatcttcatcgttcccgcccgatgtgagcagcgctgtctagacgagctgagctggcgacatctgctcgaccttctgcgcaagcaacca

SEQ ID NO: 137332 - DNA, 752 bp, Zea mays
  Clone ID: MRT4577_56723C.1
cctgccggactttaacacgccatcgtcgatatcacgtcaaattaactagacattcaaccaaccacaacaaagtccaaatctatccggcacttttaactcgtgagaacgcccgccaattcaccaagccacgcacgcacaaacaagaacgcttaccataataggtagtgtcatacctcatcaccccatcacatttacctcgtggaccccccatatcacctctcaatatggactcttttaccggaaacggctcaaaccaagccacatccaacaacaacaacaaccagcaaaaagaagattacctcgacaagggccttgacgctgtagagaagaagtacggcggtgcatcaactgaagacacacaaaggtatcggggtgtgaatgagaagattaccgatggtgcacgcaacatgtttgaaaaggcgactggcaaggatgtccccgacaagttctccaactgaggaggacacaccaccatcaccgaccaccgcatcaacgcctaacaagaacgggtgctggaaggatagaatgcataagctggacgacaagtggtccaaggtccgaccgtacgttgagaggctgaacggaacaattgttccgttgcgctcagcagaagagcaagaccgagaacaacagcgagcaatggagcgtcatgctgcgacgcgtgtggaccaccagacacaaggaaacctagataatgatacctgtatgaatggagaatgaatgacgatgaaaaaaaaaaaaaaaaagcggcc

SEQ ID NO: 137333 - DNA, 706 bp, Zea mays
  Clone ID: MRT4577_56724C.1
cattgggtacctcgaggccggccggagaaactcttaggcattccacattctcaaccccgaaccctaagagcagagcgaaaatgacaaccaccttcgcgaccgtcgcaggactcggtggcgcattactgtcatccacctcatctcgtctcacctcagggtttgtgaaatccccagtgattgctaggaatccctggaggcaagctgtggcaatgggaaatgggaggattacatgctttgagaggaattggctgcgggcagattacagtgtgattgggtttgggttgattggttggctagcaccctcaagcataccggctatcaacggtaaaagtctgactggcctcttctttgagagcattggtgctgagcttgctcactttcccagccctcctgcccttacttcgtccttttggttatggctggttacgtggcaccttggcttgttcattgtcctcacttttgggcaaattggattcaagggaaggactgaagactacttttgaattctaaacctatggtctctgtttttactttttttttttctcttccttgtgtgcccccactgccccagtgccttgcaatctatgatgactctatgctacctttttccttcttactaggagaaatctatgtaatatcgccttcataatgttgtatattattattgttgtacttgctcctcaaaaaaaaaaaaaaaaaagcggcc

SEQ ID NO: 137334 - DNA, 259 bp, Zea mays
  Clone ID: MRT4577_56725C.1
tttcctcaacccaaataggcgttttttcacacactgttctggtaagagatgcaagccatagtaggtttccttggagcctcgtgtttctggattcgacaggacggctacaaaaatacacgcagggagggggttatatgtggtatgtccaataggaggaacgcgctgggacgccactatgcttgcttgctgtacacagtgagaaccatatgctcgacctacaattttatatataataaactacccctgcatgcacggttgg

SEQ ID NO: 137335 - DNA, 373 bp, Zea mays
  Clone ID: MRT4577_56726C.1
ggtgtaaaacaccccgccatgaacaagttaaattatacgggaaaaccgggggaaacagccccccccgagaggggggaccaaaggaaggacccaggggccccccggggcccccggcggccacgacacccaccaaaaaagccggaacccaaaaaccaccccggacccaaacagggaaccagaaacccagccggggacccggccccagaaggggcccaaaaagccgagagggaccgccaaagccacacccgaaccaaaaccccaaccacccccgaaaatggcacagccaagccgaaaccacgagcaaagagaccgaccaatcgtacgggccaacccccccggggcaaagaaaacaaaagcccggcccccccggggg

SEQ ID NO: 137336 - DNA, 410 bp, Zea mays
  Clone ID: MRT4577_56727C.1
cggacgcgtgggccaaaattggcggttactggcggaggtacaagtgccacccatacaaaggaaaggattcaacaccctggtttctcttgtggcttggatgttgtggaaacatcggaatacatgtgtctttgataaggctccaccaagcattgctaggatcatccaggaagtcagagatgaggcttctctttggtgtttggctggagcagcagggttgcgtggtctttggccatatagctgttatgtaatgtggtataggtcgtctattgttttgtatcttagatgagttcctttaggtttctttgtttttggcctgcataaagagtacttgctttctttgggtctattacagacccttactcttcttaatataatgaaacacaactcttctgcgttttcaagattttttt

SEQ ID NO: 137337 - DNA, 832 bp, Zea mays
  unsure (1)..(832): unsure at all n locations
  Clone ID: MRT4577_56728C.1
actgcatacagtgtgcaggtcccccctcctgcttcacgcctcaccgccgctgcctcccatcccactagtccactcctacttcactcccgccttctagaagtagaggctccatcccccactcggaatggcgctcctctagcagtagcaccgcaaaagctccccaagaacaccccaccggcaccaaacaatggcggcgtgcaacggcctgttcgtgtaccacatcctcggcctggcctccctggtggccgtgttctacttctccctcctcggcgaggtggacctccgcttccccggcctcctcccgtcccccggcgcgtcccagtcccacgacgcgtccctgccgttcgtggagcggcgcggcgcgcagctcttcctggagggccgcccattctacatcaacgggtggaactcgtactggctcatggaccaggcggtggagccggccagccgccaccgtgtgtcggacatgttccgcgccgccaccgggatggggctcacggtgtgccgcacctgggccttcaacgacggcgcctacaacgcgctccagctttccccgggacacttcgacgagcgcgtcttcaaggcgctggaccgggtggtcgtggaggcccggcggcacggcgtgcggctcgtccttagcctggccaacaacctggaggcgtacggcgggaagaccagtacgtgcggtgggcgtgggacgaaagcgtcggcctcaccgcctccaacgactcattcttcttcgaccccgncatccgcgactacttcanagtctactcaaggcattgttgacgaggacgaacacttgggacggggtgcagtacaagacgaccta

SEQ ID NO: 137338 - DNA, 349 bp, Zea mays
  Clone ID: MRT4577_56729C.1
ataacattaaacgggaattcattgatggtgagcttggttcgacaccgaacatcacgcaggccttacatacatgtggaggcaaaaacatgattctcagcctcactcagggggcagtcaagaaccaacctgactgatgatcaaagcaacgaagcaacagataaaacaaatacaatcatctgttgaccaatgctctgataaaaggcacactgttggaacaaaaagctttctgtgttttgatttgcattttccggtcaggaattttgggtgcaattggttttatactgagaggttgtattttatttatttttttgtttttttgggggttttggattttacttttttttttttt

SEQ ID NO: 137339 - DNA, 413 bp, Zea mays
  Clone ID: MRT4577_5672C.1
ctcccgtctccatgggtctcctctcaaacaggattgggagggagagcctcaaggcgggggatcatatctactcctggagggcggcgtgggtctacgcgcatcacggtgaggtgattcgtattgtattgcttttgcatatgcttactccgttgtatttaaacttcgattggacgattggatcacattaaattgccaaggttttggcctcatgaattggcgaaatgggacttggtttaaattttatgctacgaatttgctaaatggggacttggatcacattttataagctcaatgctaaaaacaagcatacggatttgcatatcagattctatattctatttatttgcaatcaaagataaaagaccaaaaaattgatatccaaataagtatatgctttcatccctattcttatc

SEQ ID NO: 137340 - DNA, 369 bp, Zea mays
  Clone ID: MRT4577_56730C.1
ggacctttgggctgatttatgtgcttgacgtcatctcactcgcatacactcgtcactaagaatcggagatcgtatgtaccgacgggtcgtccgggaatacggacgtagatatcggcgacttctaagccggtcgggatatggactagtctacgatagataccgtataagtcatcgcggccacgctaatcgcggccaagaacggcggatcagtattcgatgcgtcctaatcccgatgttgaacagttgagggaaagtatcgacgccgaggatctgacatccgtctacactcttggaacggatatttcggtttgcggttcttgtaatgttgatgagtcgactgaggaccggcttgcagacgtctctacatgt

SEQ ID NO: 137341 - DNA, 268 bp, Zea mays
  unsure (1)..(268): unsure at all n locations
  Clone ID: MRT4577_56731C.1
gggtaccctnccgggcctggccgggnctgctcacagacacacaggcacacgccgccgtcggcagggagcgtctctcctctcccggcatcgcgccaaggaagagagagagatcgtcgctccccttctgggcgtcaggggtgtgacccccctccctccttgagcgagctctgtttgctcccagatctatctgacccagtgctgaggatctgttccctcagacctgtctctgttcatggcccaacgatggccgacagtggcctgacgcgcc

SEQ ID NO: 137342 - DNA, 482 bp, Zea mays
  Clone ID: MRT4577_56732C.1
ggtctcggcggcctccggttcccgctcgtcgccaagcccgtggaggtggacgggagcgcggcgtcgcacgacctctgcctggtgtaccgccgcgagggcctgcgcggcctgcgcggccgcccgccgctcgtgctgcaggagttcgccaaccacggcggcgtgctcttcaaggtgtacgtggtgggcgaccgcgccacgtgcgtggtgcggagcagcctgccggacgtgccgccggagcgcctccgggaccccgccgccgccgacgaggcccccttcgccaacatctccctcctcgcccccagcggcggcgacgagggctccgagaaggtggtaccgccgccccaggacttcgtcgacagggtcgcccgcgagatccggcgggcagtgggcctgcacctcatcaacttcgacctcatccggacgagggacgacgctgcaagcggcgacgccaataagtacctcgttctcgacatcaactactg

SEQ ID NO: 137343 - DNA, 312 bp, Zea mays
  Clone ID: MRT4577_56733C.1
ctcaactatgtcccacggtccccggactccgactgctgccgtatctctccttttgcgcggcctcgtgctcttcagctgcggcccctccacgggcccggcggcagcagcgacggatgcccaaaggaagggggagggagaggaaaccgcagaagctagggacagcgaagccgacgccgaagcggggaaggaggacgagcatgaggacgacaggggcgcgcacgtgaacaaggacaccggccacgtcggcggaccgcagggagcccgagcccaccaggtacggtgactgggatcgcgctcgacgctgctacgatt

SEQ ID NO: 137344 - DNA, 213 bp, Zea mays
  Clone ID: MRT4577_56734C.1
gcatactgactgatccgatagtcggttacggcttcaaaaacgacgaggtcgtttctgtcaaggtcgtatccaatatctacagggactgcagaattgactacctggataacccgaacctgatccacgcgcataccatcctgtccatctaggcgtgccatacgacactcatgaccgccatcgaagagcaccgcatcgctcgtcgcccgctctaaa

SEQ ID NO: 137345 - DNA, 524 bp, Zea mays
  Clone ID: MRT4577_56735C.1
ttttgaaccaatttaaacttttttatttcttctttttgcatagaattcatgcaaccatccttttttggaaagtcacaattataaattacctgtgtcgacaaggtgtggtgatcagctcaaagcagatgtgcaggcaaattgagcaagagccgatccatgcacgccatgatttgcatgagttagtttctaatatacaatcaatagattaaactgggatcgagaacaaattaaacacaccatttaataacagagataggatttcctcaatgatactctgtgacgcctgcctgtgtccttccttgcgttagaggcattgttgtgtataccatgttgttgtttttgcaccacaccattggtggaaggtggctccttggtgggttgctttttttcaaaaataaaataattcacactcaggccacaacaaagattagtatgcaatgtattcttacatggcatgtgtcactgaacctgaactgaaagaaaaaagatgtcattctatactgactgaaaagggttctcatttg

SEQ ID NO: 137346 - DNA, 672 bp, Zea mays
  Clone ID: MRT4577_56736C.1
aaataatcaatttcccgagagagagaccgacagcggtgcccgagcggaggaagaggcggggagagagagggagagagggagagagatggacgtggagaaggtgacggaggtggcgccggaggtggacgacgacggccgcgtaagaacagggacggtatggacggcgacgacgcacgccatcacggccgtgatagggtccggcgtgctggcgctgccgtggagcgtggcgcagatggggtgggtcctcggccccattgccctcatcggctgtgcctacatcacctacttcaccgcctgcctcctctccgactgctaccgctcgccggaccccgtccacggcaagcgcaactacacctacatggacgccgtccgctcctgcctcgggcctagagaagtggtggtgtgcggcattacgcagtacacgatcctctgcggtgcagtcgtgggctacaccatcacagccgccacgggcatcatgtccgtggtgcgcagcaactgccggcattacaagggccacggagcggactgcagccaggaggggaccatgtacctggtcatgttcggcgtcatcgaggtcgtcctctcgcagctgcccagcctcgagaaggtcaccttcgtctccatcgtcgccgccgtcatgtccttcacctactccttcgtcgcgctcttcct

SEQ ID NO: 137347 - DNA, 430 bp, Zea mays
  unsure (1)..(430): unsure at all n locations
  Clone ID: MRT4577_56737C.1
cctatttttttgatattttcncggagagcatactatatttttttgggttttttttccaaaaatatatgtggtgcaaatttttattgggcacccaagaagatgctatgacaacagagggacttttcttttttacgaaacactatcctaattaattaacctttcaaatcgggaagaaaaagaattaccgtttgttcatcacagaaaaaaggtgcatacaataaaatgggggcgaacggacagatccattcaagtccaaaagctaggctatataaaaaggttatattattaaaataatcctgggtacaaaaaaactaaaaaccatgccatgtggggaggcatagggtaaaaataatacataaaacccaacgaatagttaaacacgttatttttttggacgggacactaactgctccgattaaaaagttttttt

SEQ ID NO: 137348 - DNA, 176 bp, Zea mays
  unsure (1)..(176): unsure at all n locations
  Clone ID: MRT4577_56738C.1
aaaaccgggccgaccgcacgcgtacgattcttttgaaaaccttgtcactgagttcttttcatcgacgatggaanncntatccccgcacatgtatacttttgttcgtgggtcaaaacaaacttgnntgcccatcgnattgtcatgcntgctgagatggactgctgtcatgcaactga

SEQ ID NO: 137349 - DNA, 325 bp, Zea mays
  unsure (1)..(325): unsure at all n locations
  Clone ID: MRT4577_56739C.1
accnactttttttcttttcaacgaatgcaacttacgcggaatcagggaaaggtgggggcaggaacaagaaaaacacaaagccctctcataatataatcacaccattaaacaagcaaactgagcacaaaaccgtgaaggaacaatactgcaacccccgagagccgacccaacacctcatacacgacaaaagggccaaaagtccacaaaacgccgacgccagccaacgggtgataatcctacgaggctgcataccaagcgctatcgtcatcaccacccgcggcgctccacaatctcgaactcaccaaggaaatcgctcaacgagacc

SEQ ID NO: 137350 - DNA, 684 bp, Zea mays
  unsure (1)..(684): unsure at all n locations
  Clone ID: MRT4577_5673C.1
ngtncgacnccacnngcgtccgcnaggaagaaatnncgacttaccagaaaaccaaccggttataagggggagcttgagaaggttgcaacagaaccagttccagtttcttgggataaattggctggtactaactggagcatagtaactacaagtgatggaaagaaatttattatgataacaaacaaaggttagcagctggcaacttccgccagaggtgtgtgagatcctcaagaatgcggaatctggttccttaaaagaaggttcaacttcactgcaggatgctgcaactatagagaataagggagtaataagcattgacgcaagtactcctgccatacagacaggatgctggtgcttccagtgcgccttcagctctggctacttcatctgctacctctgaattgaatggatccaaaccagctgatgctgcacttaaggggcaactagtggcgaataatggtgagaaattaaaagataacaatggtgatgtgaatatctcagattcttcttcagattcagatgatgaggaacatggaccaagtaaagaggactgcattcgtcagtttaaggtgatgctaaaggaacgaggagttgcaccattttcgaagtgggagaaggaacttccaaaaatagtttnttgacccacgctttaaggctattcctagtcactcaacaaggcgggct

SEQ ID NO: 137351 - DNA, 368 bp, Zea mays
  Clone ID: MRT4577_56740C.1
tgtccatatctaatccaagggccgaaatcagcccataccccttcgccgcggccattttctaaaagagcccctggaacctttataaatatacccacggcccttccacctttaagattcataaaagcggttcctgtaatctttcacttcagaccctattttctttactaattataaccgcagtccattttaattcataataaatgaataaaaccctggaaactgatttttggaataaaaataattcctagaactttgaaaatccataacttgctcattttaagtccgtttcaacccattccagttgcgttagcttcataataatattaactacatagtaatattatcattggtaccatatcacttacttt

SEQ ID NO: 137352 - DNA, 1619 bp, Zea mays
  Clone ID: MRT4577_56741C.1
tttttctttttttttttggtaaaacaaagaccacttttttatacagaataactcttccagaacacaatggtaggttcttacacaaggtctcaaactcgcaataacatgtgcacttgtcaaatagacacgtctcaacttttctctacaaggagtcaaaaagaaaaacgattggaaatgaggcacaaaataaaaaagtccaccgtgctggacgatgctagaaaaatgtctgtcctaacaattactttattattggtaccggatccaacctctgtctcaatccatttatgcaagggatggtgatttctagttcccaggtatcattatccttcgatgctgaggggttggagacttggaggacatacatcatcaagccttgtttacttgtcagacgccttggcgcctatcggatagcttgtggagatggagtttaacagatataattgttgcacaaaagaaccagcctgccttgtatttacgagagctgcaattctacagcaactgtacctgcgtggtacttgtttcaatctcagcaaggcaccttggcctctacagttcaaatcaaacgtttgctgagacttctgcctcgggttccatactttcctccagcagttctgtcaggggtacatcgctgtctggttggtcgttctcttctggttcatcactgtctgattggtctttctcttctctcacagcaccctttttgttcaattcatcctgttctttctgtatagctatcttattgggaacaagaaccagatatatattcctctccgcgaaattcttactttcttctgtcgccagctcgccaacatcattttggaatcttctaaggagttcgatagcttcttttttatacaagttttcccgtcctttcaggttcacaattatcttaaccttgtcgccagctttaagaaacttttttgcagctttaagcctcacgctgtaatcatggatgtcaatgttgtatcccattttcagctccttcaagcccatgcgtttcgcgacagatcttttctgctgaatctttttcttcttctgttgttcatacctatgttttttgtaatctctctcctcaaagagtcgaagtactggggggtccccatccattgataatattgccagtataagatcattatcgtctgcaatctgaactgcctcgctgacagatactacaccaaccattcttttctgttcgtccaatagccttacggtcgaggactcgatgcgttcgatgtcaagggccgggtcgtagtcggggtcgggcccgcggtccctcctcccccagcctccgccgcccccgagcccttcctcatcttcctcctcctcctcgccctcgacctcgtacgaggacgagtaccgcgcgacaaccacgagcctctccggcggcgcccgcgcccgcggcctggccgggagccgcgccgaagaggaggggcgcgaggcgtggaaggaagcgccgggaaggcaaggcacgcgggacactgccggcgcgagggcgacgccgaccatggccggcggtggtcgagcgcgggcaccggcacgggcacggcggcagccggtaggccttatctgcttcgagggctttccggacgcgtgggcggacgcgtgggcggacgcgtggg

SEQ ID NO: 137353 - DNA, 360 bp, Zea mays
  Clone ID: MRT4577_56742C.1
ctgtatagaagggctttatggatctaaaaagggttatatgtctacgtaacgcccgcgcgtatgaattatccaaaaaataagactcctgatactccttctcgttgccgtcaattgacagttgacgctgtcatctacaaacctgtcttgcgaagcaaatttactccagctcgatggtgccaagaagcttggaggtcaagtcgtaagtcacacgcgagacgccggccacgctgttgacaatcgtgcgggcaatcttctgcagcagagcccaaggaaattcgaacgcctcggcgctcataaagtcgctcgtcgtcacggcgcggaggatgatgatatagccgtagacgcgagtatcgcccatga

SEQ ID NO: 137354 - DNA, 206 bp, Zea mays
  Clone ID: MRT4577_56743C.1
aatactatttttttttttctatttttttttgagggataaaaaataggcgtgtcataggggcaaaatacaaacagggggggcttcacggaattattgccacatccctaatgggtgactgatttcgaggcttattaatagacatcacccctggttgtaccggacttgcggaatgatgccctccccctgagaccccctaggcccaaggg

SEQ ID NO: 137355 - DNA, 556 bp, Zea mays
  Clone ID: MRT4577_56744C.1
aattattgcctttttttcaggtgttaactattgcctactctcaaatcgcaatccatttacttcagcgaaccaatagggcattcacataacatgtccagctgaacacagatcaaggcaagactcctgaaggcactggagcccaagcgtcaagaaggccatggaccccagccgataaacagcccacggtcactatcgcataatgtgacgccttgaactaagctcggaaggcaacatcggaccaaggaccacgccgtatcattgcgggttttggcaaccgttatcgttgcgggtccggggcaccgagaccagatggaccacgactctgacaccggaggtttaccatcactggcacccccaggggatcccaactgctgctgctgctgctgatcgcgactgctgtttttggtaccgttttgcattgcctcctgcaggaccgcattgagcttcctccggccagacgtaaaagggttcgctgattccaaactgagaatgctccggtgaaagataacggtcattacccggtggaatataggctggtatacccgtgtgctgtctc

SEQ ID NO: 137356 - DNA, 223 bp, Zea mays
  Clone ID: MRT4577_56745C.1
ctctacctactcctgggagcatctggaggcgtagcaaagcaatggacaaccgcggcacaagcagcgtactgcctcttgttaccagaggccgacaaccacacgttagaggacctacagtgaaaacgctgtcgcacgccatgtataacgctctcgtccatttagagatagagccctcgccgtagactaggattgcaacatcaagagtggagaggatgagcatgct

SEQ ID NO: 137357 - DNA, 253 bp, Zea mays
  Clone ID: MRT4577_56746C.1
cggacgctggggcactagctcttgtattgaatgtaatctctgaaaaacttggatgccaaaagttgtggtggttgggggtatttatagcccccaaccactttggtagccgttggggtgcgccaatcttcagcacactcaagtctttttgctccaataaaattgtgtccctagcttggttcttttcttggtttgtgttgaacattatgcacctgtaatagatgatttctagaacaaactagttagtccatgtgat

SEQ ID NO: 137358 - DNA, 409 bp, Zea mays
  Clone ID: MRT4577_56747C.1
actcgtggttttacccggtatttccggacgcgggcgtggaggcggaacatccgaacctataccggggggcttcccagcttgccctattggttgtcatatcagatctcggagaaagaatgggcaccgtttttttctggaggaagaggaaaagcggtaaccattccacataacatacgagctggcaacagaaagtgtaaagtccgaggaaccgaatgactgacattacccccattaataggcgtaagcctggtgccccctttccatttaggaatccggaaacgcgcggtgaattattggattgggaaacgcgcggagagaggcggttcgcgtcttgggcgccagggggattttttttttcacctgtaacacgggccactgttaaaggcccttcaccctgtgccccctggat

SEQ ID NO: 137359 - DNA, 144 bp, Zea mays
  Clone ID: MRT4577_56748C.1
cgagccgccgggccgagcctccggatcctttccttcagtgctccccttacttctcgccgccgcccactgccgctcccccaccaatccacagcgagacacgcccgagtgagtgatccccgacccaggcgatgccatgaggtcgtt

SEQ ID NO: 137360 - DNA, 279 bp, Zea mays
  Clone ID: MRT4577_56749C.1
gctagccattctatgcattattatgacaaagggtttcctacttatccttacaatatacaaatacattcggcgaagttttttttatcataacaaagctagtgattttccagagttattgcttctgtgcattattattacaaagctattgatttcctaatctaccgcctctgtggatctcaactgaactggtagtttatactaacattcaggaaccactaaggttccttattgtttatagaagaagggctatgttttcttaacctacctttgttctggatt

SEQ ID NO: 137361 - DNA, 3151 bp, Zea mays
  Clone ID: MRT4577_5674C.1
tgctcttctccggctcttatggttgctcctatacccgcgtcagctcttcagccaccagccccagggcaatattttgggaacagaccttctttctcatataacgtagtttcgcatgctaatgctagattgcctactggtcagcagtttcaaccggtcactggagcaaatcttgctggtccaatttctagatttgttccaccaggttccttgcagcctcccacccctgggcacataactcgccctagtacagcgttcccaggatctatggcaccaaatcctcctggatctattcagttgccgttttcagtgccaagaccatccaatattccttttggtgctattgcacaacagggcagctcagacattaataatttgaaatcggactccccaagggcaccagaggttacaccccaagccatgcagttatctactggcatgccatcaaaatctccttcaacaatcgcaagtgcttctggaagtccttcaatccccatccagacactaacaaattcatcggtgccacctcgccctgaggtatttggagccactagaccatctgtacctgcacaaccttctgcaactgtctctaatccaacaggtttccttgggaggcctatagttccacctgctgctcctttgccccaaacaccaccaccaattgcaacccaaggtggcacaccacagaattctcaacgaccgttttacccgtcctatccttcaggacctggtattgtcccacctcaacctttatggccacaccctcatcctccacaacctactggatttcagcagcctcccttccagtactatccagctggtcctgtaggctctcttggcaggccaataactggggcttctgctgcaactatggcctttgccaatgtgcaaccacctggcgtgtcaactggtggggataggaaagtacaagcatcaacaaatgcaggatctgaacagtccactcatgctgcagctgagccagattctacaggacatggaggtcaagtcactgagcagctggaggacaatagaaatactggagttcaggattcagatgcatggtctgctcacaaaactgaaactggtgttgtatattattacaatgctttgacaggagagtcgacttaccagaaaccaaccggttataagggggagcttgagaaggttgcaacagaaccagttccagtttcttgggataaattggctggtactaactggagcatagtaactacaagtgatggaaagaaatattattatgataacaaacaaaaggttagcagctggcaacttccgccagaggtgtgtgagatcctcaagaatgcggaatctggttccttaaaagaaggttcaacttcactgcaggatgctgcaactatagagaataagggagtaataagcattgacgcaagtactcctgccatacagacaggtggccgtgattcgttgccacttcggcaaacagttgcccctgcatcgccatctccattggatttaataaagaagaaattgcaggatgctggtgcttccagtgcgccttcagctctggctacttcatctgctacctctgaattgaatggatccaaaccagctgatgctgcacttaaggggcaactagtggcgaataatggtgagaaattaaaagataacaatggtgatgtgaatatctcagattcttcttcagattcagatgatgaggaacatggaccaagtaaagaggactgcattcgtcagtttaaggtgatgctaaaggaacgaggagttgcaccattttcgaagtgggagaaggaacttccaaaaatagtttttgacccacgctttaaggctattcctagtcactcaacaaggcgggctatatttgaccactatgttcgcacacgtgctgaagaggagcggaaagagaaaagagctgccctgaaggctgcagtagaggcgtataaagaattacttgaagaagcatccgaggacatcaaccagaaaacagactaccaagaattcaaaagaaaatggggtgctgatacaaggtttgaagccttggatcgaaaggaaagggagattctttttagtgagaaagtcaaggctgttcaagaaaaagtccaatcaatgcgcaaagctgtcatagctaatttcaaatcaatgcttcgagaaagtaaagatataacttcaactagccgatgggcaaaagttaaagaaaatttccgtagtgatccaaggtacaaagccatgaagcatgaagaaagggagactatatttaatgaatacatagtggaactaaaatctgctgaacaggaagcagagcaagctgccaaggccaaagtggatgagcaagccaagttaaaggagagggaacgtgaaacacgtaaaaggaaagaaagagaggagcaggagatggaaagagtaaaaatgaagatacgtagaaaagaggctgtgtcatcataccaagctttacttgttgaaatgattaaggatcccaaggcatcgtggactgaatccaaaccaaaacttgaaaaagatccacaaggtcgtgctcgaaatcctgacttaggccaaggtgatgcagaaaagttgtttcgtgaccatgtcaaggacctatatgagcggtgtgtacgtgatttccgggcacttctatctgaggttatcactccagaggtagcagcacggacaacagctgaggggaagacggcaatcaactcctggagtgaggcaaaaggtcatctaagatctgatctaaggtacaataagctaccgagtaaagacaaagagtctatttggcggcgctatgctgatgacttgacgaggaaactcagacaatcagacacgaaggagaaggacaaatcggatacagatgggaaacaacctaggtcctctgatccacctaggcggaggtagcttgtagtaacagtcacttgtacttcctaggtgctgctccttatatttcttactgttgatagttaagggtctgctcgcactcgtctgcaacatttgaatagtcactggctcactgccacttttgatactgagagtttgtgttgtaggaggttttgccttgcaaatgtttttcccgttctggatcagatgatatatttttgcagtattgagtctgacattgcagtaaaaaaaaaaaaaaaaaaaaaaaaaaaaaaaaaaaaggtaccac

SEQ ID NO: 137362 - DNA, 312 bp, Zea mays
  unsure (1)..(312): unsure at all n locations
  Clone ID: MRT4577_56750C.1
gtggggaaaaaaaaccaacccttggttgttggaggggcccttgtaaacaagggttggcccccagggtaacaagcttccccccgggggggggcttttttttttaatagaaggaacccccaggggggttcttagccctttttgaataacaaagccaaaaaaatttcccccccttcaaattttttttttattaaaagccctttattgcagggttgttttaatttggacccgggggttgttaaaaaaccataaatttgaggnggttcttttttaaaaaggccgccttgaacaaaaaaattaaaaaatttttttttt

SEQ ID NO: 137363 - DNA, 594 bp, Zea mays
  unsure (1)..(594): unsure at all n locations
  Clone ID: MRT4577_56751C.1
tctatccctgcccctccccccgccccacctcaatacaatcctctgctcgcgttctctcgtcccggcggcggcgtaggcgcgcgcaccaggtgttcgacgggagttttcgccaccgcggaagatgtacgtggtcaagcgggacggccgccaggagacagtgcacttcgacaagatcacggcgcgcctcaagaagctcagctacggccttagccaggaccactgcgacccggtgctcgtcgcgcagaaggtctgcgcgggggtctacaagggcgtcaccaccagccagctcgacgagctcgccgccgagaccgcggcggccatgactgtgttctccttgactacgcctccctgggggngaggattgctgtgtctaacctgcacaagaacacaaagaagtccttctcggagacgattaaggacatgtacaggcactttaacgagaggtctgggctgatggcccctctggtcgctgaagaagtttatgaaatcatcctgaataatgctgctcccttggacagggaaataatttatgatagggattttccactatgactaactttggcttcaaaactctggagagggcttaccctcttg

SEQ ID NO: 137364 - DNA, 334 bp, Zea mays
  Clone ID: MRT4577_56752C.1
gggatccccgttggggatttatccccgcggggaacggggatggggaagaaatgttccccgcgagcgtttgtggggatccccgcggggaaattttttcgtctcggagaccggtatggagagctatttcccgcggcggattacccgttgccatacgttatgccccctgggagtggaagctcgatgtgtgaagtcgattgtgctgcgatctgatgctctagaggatgatgacgaactctcatcgaagcaaagttatgccactaacgtttttttcttattgaactcatgaaacctgtgtctgaagctttgtgcatcggatacccacgttaagaagttc

SEQ ID NO: 137365 - DNA, 282 bp, Zea mays
  Clone ID: MRT4577_56753C.1
cctttgttttttttctttttcatgcatctattcatgacttggtattgtgcgaccttaccactaaccattcctcgtggatggccacctggccccatttttttaactcctgacagcggcccacatagaccgcagggaccccccccacaaccggaacggtggcttgacatagacggggccatacgagcatggcctgacccacggcggccagggctacagagcccagggcccacgccacctttgggcacaccatcggcgagctcgcagtggactttcacgacagac

SEQ ID NO: 137366 - DNA, 1069 bp, Zea mays
  unsure (1)..(1069): unsure at all n locations
  Clone ID: MRT4577_56754C.1
ctgggnattgaactattttntgccccacttgnatcagnntttgtagtcttggnattnngccttatttgttatgtgaaggataaagttangaatattntctcaatggtagnngaatgggaaaggtgngactnntactggttggaatattntcttcaagtatgntgatctgttttcccttgatactgtgnccctggtaggtgtgacactgccttgctattgaatcaggaaaacctgtaggtgaaacctaggatcaggagaacccagtccaaaggtcaacaaagtcagtgttcacgacaggttcaacatctgggtcctacgttatccttcagtttgagaaacctgactctgatgaggattcggaggagaaacctgactctgatctgatctgatgacaatttgaaggaacaatcaggctcaactcagagaatgcacaccccctgcattacatttattgttcttcatgtaccgtcccttatgaatgagtgaacgtacagaatgggaagtcgctgcaactggacaatcgatttaattgtagctggaacatttctaaaggtattagtaggtgacttgctgcagcaaacttgaacacacaagcaacaaacatatgcttcaggtccttgatgctaccaacagatgatataccacaaatgttttcgacctaacaaagagggcatagaaagtagaagttggttgctcctttaaagcatcagtttcaagtagccatcagctgaaatctaccattgctgaaacaaggtgaaaaaaatgcagaatggactacttagagatagctacactatcgatgcatctacatcattttggactatatgggacaccatcagtaatgaaattcagtttctgactgaactaaacggtggtggtttgaatcatcgtggttcactggttttcacaatattgggattcttggcaaccatgaggacattatgagattcttggctaccatgaggacaagttgattgttcaattacattttctacgtctatttcgaagcgtcgatggcggatgtccgcacacaaaatgccttgaaaggtctggaggaaagtgcaagttt

SEQ ID NO: 137367 - DNA, 633 bp, Zea mays
  unsure (1)..(633): unsure at all n locations
  Clone ID: MRT4577_56755C.1
gcaacaaactatgcttcaggtccttgntgctaccaacagatgatataccacaaagttttcgacctaacaaagaggcatagaaagtagaagttggttgctcctttaaagcatcagtttcaagtagccatcagcntgaaatctaccattgctgaaacaaggtgaaaaaaagcagaatggactacttagagatagctacactatcgatgcatctacatcattttggactatatgggacaccatcagtaatggttgatcttgtctactgtgctttggagttcctttcaactttgcttggagcctttcatgccactgatggagtcatatgcctctgcccagaaattcagtttctgactgaactaaacggtggtggtttgaatcatcgtggttcactggttttcacaatattgggattcttggcaaccatgaggacattatgagattcttggctaccatgaggacaagttgattgttcaattacattttctacgtctatttcgaagcgtcgatggcggatgtccgcacacaaaatgccttgaagggtctggaggaagttgcaagtttcctgcgtgtccttggctactatccgtgcaacacaataacgatatgagctgttgcgtcacactgtctatcttg

SEQ ID NO: 137368 - DNA, 798 bp, Zea mays
  Clone ID: MRT4577_56756C.1
cattgggtacctcgaggccggccggggcgtcgctttcctcctccaggcctccaccctcgctctcgctcgctcgtcgtcaccaccacaccagcgaggcgcggcgcggcgggcttcgctcgtcgagagaggcgcgccgtccatggaggcgatggaggaggccaacaggacggcagtggagagctgccaccgggtgctggctctcctctccaacccgcacggccagctcgtccccagcagggagctcgtggccaccaccggggaggccgtagccaggttcggctccctggcggccaagctctccagctccaacggcaatggcctgcagggccacgctagggtcaggaagaccaagaagcccctgcccatcttctacagcaacctcttcctcgagagcagctctgcggtggccgccgccgcgactgtggccaagacgcccagtccgagcccgaccactggcctccagctgttcccgaggtaccaccagatggagggctcgtcgtgtaaggatcctgtcaggatccctgcgcagttccccaagaggttgctgctggagaacctggctgccggtctggaggggtcgtcgccgcctgcccctccggtccggatggtgcagccggtgtccgttgcgcctcccgcagggatgcccaccccggcattgcccgccgcacacctccatttcatccagcagcagcagagctaccagaggtttcagctcatgcagcagatgaagatccagagcgagatgatgaagaggagcaatcttggtgatcagggtggtagcataagtggcggcggcgg

SEQ ID NO: 137369 - DNA, 1631 bp, Zea mays
  Clone ID: MRT4577_56757C.1
gcacgagggggagcccacttcgaggccgcggcgttggctgtctcggtgtcatcgtctcctctcgtctcgttctcttctcctcacctccttcgtttcgcggagcagagcgagcagccgggaccggacctccagggagcgcaccgcggaggctagcgaagatgcccgggctcacggcaccgtccgactacgcggaggagccgccgcgtcacccggccctcaagatcaactccaaggagccattcaatgctgagcctcaccgatcagagctagtcgcatcttacatcaccccagtggatttcttctacaagaggaatcatggacccatccctaaagtcgaggacctctcaagatacactgtttccatttctggtctcgtcaacaagtccattcagctatcgatggctgacatttggtctcttccaaagtacaatgtcacagcaactttacagtgtgcaggaaacaggaggactgcgatgagtaacgtacggaaagtgagaggtgttgggtgggacatatctgctcttggaactgcaacttggggaggtgccaaactatctgatgtccttgagctagttggaataccaaaactcagttcagtcacgtctctaggagggaaacacgttgagtttgttagcgttgacaagtgtaaagaggaaaaaggtggtccttatacggcatctattccattaaatcaggcaacaaatcctgatgccgatgtattacttgcatatgaaatgaatggagaggtactcaaccgagaccacggatacccgctccgggttgttgtacctggagttattggtgcacgctctgtaaaatggctggacagtatcaacgtaaaagaggaggaatgccaggggttttttatgcaaaaagattacaaaatgtttccgccaaccgtggactgggacaacattaactggtcaactagaaggccacagatggatttccctgtgcagtctgctatctgtacactggaagatgtagatgttatcaaggaaggacaggctaggattgctggatatgcactttcaggtgggggccgtggcattgagagagtggatgtatcagctgatgggggtaagacctgggtcgaggctcgtagataccagaaagacaatgtggcgtatgtgtcagatggacctcaaagtgataagtgggcttgggttctctttgaggccacattagacgtaccagcgaatcctgagatcgtagttaaggcggtggactcagctgcaaacgttcagcccgagaaggtagaagacatatggaatctgaggggaatcctcaacacgtcttggcatcggatcaaaatccagagatcttcgtgcgttgaaagatctaagctgtgaaattaagtacgcagctgaccacttggagaaagcacactcactttaccattgtccctgaataataattagtcacttcaactttatgcgtctgtggagtaaggttgtacgagtgttgtggctgtgtcattatgggatttgagctcacttggtttctgtgtaaatgtcagctgctgcggtttttttttggttggtcaggtttgatatcgagaaatatccattgcattctgcgtttgaaaaaaaaaaaaaaaaaaaaaaaaaaaaaaaaaaaaaaaaaaaaaa

SEQ ID NO: 137370 - DNA, 649 bp, Zea mays
  Clone ID: MRT4577_56758C.1
ttcacccggtccccggcactcatcagtcatcactcctccagcttgctcgagtcacgatccctccctcccccccacacaggcaggcgccaggaaagcaagcaagccgccgggacgcgcgggcgggcggcgcatggcggaaggaggcagctccacggcaccctcggccccgccgtgctgcggcctggcgcggctactgcggcgcctgcggcggcagggcagccgggcgctgtgcgcggccgcggcctcgcgccgccaccgcgcgtcgtgccgccagtacgacccgctcagctacgcgcgcaacttcgacctcggccgcgacgccgccgacgccgaaagacgcgcgcatctactacgcctgctccttctcctcgcgctacgcgctcgtcccgccccccgcctcctcgtccgccgtcggccccgctgctgccctggatagcctgccggtcgccgccaacagatagtgcttgtgctgtcaaatcaaatgattctaggtagtatagggctataggcagcttggctggtgcaccgtcctccttcctgtacattaaccaaggagaagggtacaattttattcccttttccctatttttttaaagtttagacctatggatgaactaataccatttttatagtctaatgacttgtttag

SEQ ID NO: 137371 - DNA, 295 bp, Zea mays
  Clone ID: MRT4577_56759C.1
cgtccagcggctcctacatgcttgtgatctcaacctatattcgtgcctccgctccagtcacccgtcgctcctctcaaccatgtgggggaggaataccattgatcccaatgattataacgtctcccttggacccactgtccatgaatgagagtatgtctttggtgtctctcacatcttttcatccttcaatgacacctacattcatatcactgatttgtctggtatggaaactcttactcttatcaccactctcattaatgttaattgcttaccattaatatttctcaccttactc

SEQ ID NO: 137372 - DNA, 265 bp, Zea mays
  Clone ID: MRT4577_5675C.1
cgcgtccgatccgattcgctcttttggagtatacatcatatcctcactactaaccaagttaatactgcagtgacaacatgccacagagtgaacttgtattgatcgctcatcatttgaagtgtcacctccaactcatatgctgcacaatttgcgtacacccttattcataataactgctagaccaaagtagcttgtgtgccactttcattgtattgctgactcttaaaaaccagtatgttaaacaccagttggattttatacattt

SEQ ID NO: 137373 - DNA, 909 bp, Zea mays
  Clone ID: MRT4577_56760C.1
ttgggtacctcgaggccggccggggttctcttctccctccttcgtttcgcggagcagaacgagcagacggcaccggacctccagggagcgcaccgcggaggccagcgaagatgcccgggctcacggcaccgtccgactacgcggaggagccgccgcgtcacccggccctcaagatcaactccaaggagccattcaatgctgagcctcaccgatcagagctagtcgcatcttacatcaccccagtggatttcttctacaagaggaatcatggacccatccctaaagtcgaggacctctcaagatacactgtttccatttctggtctcgtcaacaagtccattcagctatcgatggctgacatttggtctcttccaaagtacaatgtcacagcaactttacagtgtgcaggaaacaggaggactgcgatgagtaacgtacggaaagtgagaggtgttgggtgggacatatctgctcttggaactgcaacttggggaggtgccaaactatctgatgtccttgagctagttggaataccaaaactcagttcagtcacgtctctaggagggaaacacgttgagtttgttagcgttgacaagtgtaaagtactcaaccgagaccacggatacccgctccgggttgttgtacctggagttattggtgcacgctctgtaaaatggctggacagtatcaacgtaaaagaggaggaatgccaggggttttttatgcaaaaagattacaaaatgtttccgccaaccgtggactgggacaacattaactggtcaactagaaggccacagatggatttccctgtgcagtctgctatctgtacactggaagatgtagatgttatcaaggaaggacaggctaggattgctggatatgcactttcaggtggtggccgtggcattg

SEQ ID NO: 137374 - DNA, 1755 bp, Zea mays
  Clone ID: MRT4577_56761C.1
ctcgaggccggccgggacaccctaacaaagcaggggagcccacttcgaggccgcggcgttggctgtctcggtgtcatcgtctcctctcgtctcgttctcttctcctcacctccttcgtttcgcggagcagagcgagcagccggcaccggacctccaaggagcgcaccgcggaggccagcgaagatgcccgggctcacggcaccgtccgactacgcggaggagccgccgcgtcacccggccctcaagatcaactccaaggagccattcaatgctgagcctcaccgatcagagctagtcgcatcttacatcaccccagtggatttcttctacaagaggaatcatggacccatccctaaagtcgaggacctctcaagatacgctgtttccatttctggtctcgtcaacaagtccattcagctatcgatggctgacatttggtctcttccaaagtacaatgtcacagcaactttacagtgtgcaggaaacaggaggactgcgatgagtaacgtacggaaagtgagaggtgttgggtgggacatatctgctcttggaactgcaacttggggaggtgccaaactatctgatgtccttgagctagttggaataccaaaactcagttcagtcacgtctctaggagggaaacacgttgagtttgttagcgttgacaaatgtaaagaggaaaaaggtggtccttatacagcatctattccattaaatcaggcaacaaatcctgatgctgatgtattacttgcatatgaaatgaatggagaggtactcaaccgggaccacggatacccgctccgggttgttgtacctggcgttattggtgcacgctctgtaaaatggctggacagtatcaacgtaaaagaggaggaatgccaggggttttttatgcaaaaagattacaaaatgtttccgccaaccgtggactgggacaacattaactggtcaactagaaggccacagatggatttccctgtgcagtctgctatctgtacactggaagatgtagatgttatcaaggaaggacaggctaggattgctggatatgcactttcaggtggtggccgtggcattgagagagtggatgtatcagctgatgggggtaagacctgggtcgaggctcgtagataccagaaagacaatgtggcgtatgtgtcagatggacctcaaagtgacaagtgggcttgggttctctttgaggccacattagacgtaccagcgaatcctgagatcgtagttaaggcggtggactcagctgcaaatgttcagcccgagaaggtagaagacatatggaatctgagaggaatcctcaacacgtcttggcatcggatcaaaattcagagatctttgtgcgttgaaagatctaagctgtgaaattaagtacgcagctgatcacttggagcaagcagactcactttaccattgtcccagaataataattagtcacttcaactttctgcgtctgtggagtaaggttgtacgagtgttggggctgtgtcattatgggatttgagctcacttggtttctgtgtaaatgtcagctgctgcggtttttttggtcactggatgactgctgctgttggctggtcaggtttgatatcgagaaatatccattgcattctgcgtttgaaaatactattgcagcataaaacctttctttgggcaaatggcagctctgggaagaggtgagcttcatatcgcagctgagaaataccaatacaagagataaaaagaagcgaccctatatatatc

SEQ ID NO: 137375 - DNA, 305 bp, Zea mays
  Clone ID: MRT4577_56762C.1
attattttcttctaacacacattttgaacggggggatttttaagtgttttgtgggattttcggcatccacccgcaggcacggttcagtgggatttcaagtctgagttcatcgctttttcaacccgcacgaagctaccaacatcagagcggtaggggaggcacatcaacctagggtggcggcctctaagagggaggaaaaaggtctcgccatgggtggcctccttggctcctgtttatgaactcttagaagaccagaccacgggcagggacttggagcccatgaagcgacttgctgactacttcct

SEQ ID NO: 137376 - DNA, 209 bp, Zea mays
  Clone ID: MRT4577_56763C.1
accttgtgtcccgacaacgttgggcgcccattctcgcaccgaacttcgttcggttaggttggatcacatcattcttaggcttgaactaggcttttagtctacacctgccgcctcaattaattcgctctggagggggagactcggaggcattatcataatcaagatccatgctgttacacgccgatctctactcgcttcggaccttatgt

SEQ ID NO: 137377 - DNA, 254 bp, Zea mays
  Clone ID: MRT4577_56764C.1
gttctgatcgggccggcttccctaatcggccactctaaaccaaccagcccgactaatcagtgactaatcgcgattagtcggacgacttgaaaatagagttactgcagcttgagcacaatgtttccttcgtactaggctactggcatatttaacacacttattcttctggatttgacataattgttcagttggctgaatcatttggtcttttttatcaatagttgacatttcttgtacagtattggtagtagtgt

SEQ ID NO: 137378 - DNA, 317 bp, Zea mays
  Clone ID: MRT4577_56765C.1
ccaaagaaaaaggaggttatgtaaaggcgatcaagaacagtgcgtggaaataacctgcaggatcgaagcccacgctcccggatgagtataaagaaagctatttatcttttgatttagttttgttttttttgtgggctgtacaaaggtcaacgggtgaagagagctttgtgttctaacagagtcgaagggttattaccatctgatcttgggtaacttaattatttgggtgtaggtcgattccatctgtaaatgtatatttatgagggagtacgtgctcgcgggcctcttatattataaacaaaaggaggaatttattt

SEQ ID NO: 137379 - DNA, 178 bp, Zea mays
  Clone ID: MRT4577_56766C.1
ggccgcttttttttttttttttttgggggagagactggatgtttagtgtaacttacaggttggtacaaaacataaaacaagcgagtctattattcataaattccaacatgactaatgcagttatgcacgcatgcccatggatttttaattttatgagctaaaatggattctaccccaa

SEQ ID NO: 137380 - DNA, 552 bp, Zea mays
  unsure (1)..(552): unsure at all n locations
  Clone ID: MRT4577_56767C.1
ttaacttctgcatattatgcgggtaaggcttgtttcttttagatacccttcctcagaccccgcacaatgcgctacgacactggataagccctttataataagggggaattccaggcaagcatgaattcaatgctggtgcaacaacatccccattcacggaatctagaatttctgaagtttatgcagcactcaaaaaggaaagagacaagctgccttgccaagtgaatgatccaagacagacacatccttaaattagacattgctaaggcttatatttgtgagcattactacatatggctaaagttaaacaatctgcgttgtttgcttttgccaatgcattgtgctctatgctcaatatttttatgattttgaatgagatttcaatatatggctaatggacacttgcatcacanattcttgaaattcaactgctattttctatatttgaatgtttatatatatgggggggtcttatgatcagtcattttcattcttgaaaaccacatatctttctttttctgagagcaattggctagatgcttgttattctgg

SEQ ID NO: 137381 - DNA, 409 bp, Zea mays
  Clone ID: MRT4577_56768C.1
agcccccttttttttttttttttttttttttcttttcccctttcttttgcttttggtttccacttcaattgttcacccaggttattgtttacactgaccctgccccccaaggggaagggggacacataaggaccgaaccaccgccgccaagggccccaacgaggaggccagccaaaagtcaacccacaaccccccctcaaagaaacggggaacccccccgcccgcagcatagggccaaggaacaggctgccgaggggggaacccccccggcaaaaactgggcgatctgggccgccaacagccccggaaccagaccccttagagggggccgctgtaggagggacagaagaacccacccaaaaaacccctggaaccggggctgggggcccacccgcgagaaccccaggcaa

SEQ ID NO: 137382 - DNA, 1961 bp, Zea mays
  Clone ID: MRT4577_56769C.1
cattgggtacctcgaggccggccgggtgaagaaaataatcaacacaaattcggcacaaggccgaattccactgcgctgcgcttctgctccccccttctctctccctccgtgttcgctccctcggatcccacgcggctgcgggctgcggcgggggcggcgtccgaggcttagggtttagcgtttggaggagtttaggggtttgtgaggaggaggaggaggaggaggaggaggaggaggagcggatggggacagcggggaagggcgcgtgggtggtgccggcgccggcgtacagggaggtggaggggtgggagggcgcgggggacgacgcgccgggcttcaggtgcgcccactcgctcaccgccgtcgcgcctaccaagggccacggcccgcggctcatcctcttcggcggcgccaccgccatcgagaccggcgcatcttcgggcctccccggcatcaggctcgcgggggtgacgaactcggtgcactcgtacgacgtggagacgcgcaggtggacgaggttacatcctgctggagagcctccgtctccgagggccgcgcatgctgcagctgcagtgggcaccatggttgttttccagggtggaattggaccagcagggcactccacagacgatctctatgtccttgacctcacaaacgacaagtttaaatggcacagggttgttgttcaaggggcggggcctggtcctcgctatggtcactgcatggatttggtagctcaacggtatcttgttactgtctcaggaaatgacggaaagcgggccttgtcagatgcttgggcattggacacagcacagaaaccatataggtggcagaaacttaaccctgaagtgatagaccttcagcaagaatgtatgctaccgccagtacacgctctgatggcatgcttttactttgtggtggaagggatgcttctggaatgccactgtctgatgcctatgggctactaatgcatacaaatggccagtgggaatggactctagccccaggggtatctccatctcctagatatcagcatgcagccgtttttgttggtgctcggttgcatgttactggaggtgtccttagaggaggcagagctattgaaggagagggcgcaatagcagtcctggacactgctgctggagtttggttggatagaaatggcattgtgacctctcgtactttgaagtcatccaatgaacatgatgcttcttcggatctacttcggcgctgtcgtcatgctgctgcctcagttggttctcagatttacatttatggtggactcaggggagatatcctcctcgatgatttcctggttgctgagaatgcacccttccaatcagaaatcacttcgtctatgtacaatgttgatagagtccctaggggggaaactcaaaatagaaacaataattttcattcagattcacctgtccatcaatctacaaataacaggcaagaggcagcttctggtttcagtgcggacaagaagtcaattgacatgttgatagaggcctcaactgcggaagctgaagctgtcagcgctgtatggcgagctgctaaggaagcatctgcagcgtcttcggaagacagtctttcggagggaataggatcagaatccccattgagtgaaacttcaccaatgcctgaagatttcgatgatggggggtctctagaaccagatgtgaaactacattctagagcagttgtggttgctaaagaagcagtaggagatttaggatgcttggtcaggcagctctcactggatcagtttgagaatgaaagcagacggatgcatccttcaaacaatgaccaatcttatccaggccggagaacattaaatagacaacgatcaccacaaggtttgcataagaaggttatttcgttcttacttaagccaagaaattggagagctcctgctgatagaacattttttctggattcttacgaagttggcgagctat

SEQ ID NO: 137383 - DNA, 148 bp, Zea mays
  Clone ID: MRT4577_5676C.1
tcccttcgagacgttggagcaggtacgaggcttcatgtggagtatcccgtcaaggaagtaaaccggcccatcgtaatctaagagcttgcatctgaactggggcttaactcggcggtggctcaccacgttatcctccaggacttggtca

SEQ ID NO: 137384 - DNA, 261 bp, Zea mays
  Clone ID: MRT4577_56770C.1
cgctttgcttcaggtctgggctatgttcagaacctaagcaggctgtgagaggtagaggaggcagtattacatgttaggcccagaacaccatgggaaaaggtttatgtcgtgtatcttactgccctgcctagctgcctgtgggccacgctgacttctgatgttcacattagctcgtagctgaaccctgttgctgaatgccatccccgatctcgctgcaactattatatacgcgatgctatgccttgcattgcctgaggtaag

SEQ ID NO: 137385 - DNA, 616 bp, Zea mays
  Clone ID: MRT4577_56771C.1
cctcgaggccggccgggatctcaccaatcaattacaactttcaacccaaccctttttttgttttttgttttttgtttttctaatccccgatcccaagtttaatcacttaatcacctttaatctcaagatgattgctaccttgtttttcgctgcccttgctcttgccgccggtaccattgcttcccccattgaggccaatgccaacgctggggccgctcacgccacctcgacaacggctgccgctccccaagtcggcgcccagacccaaaccagcgccagcgccaagctatttggtccgtggggcggttacccctacggtgggtacccttatggcgcctactcctacggctcctacccctacggcgcttacccctatggcgcctacccctacggcacttactcttacggtggaatagtcgcgtagggcatatgcagcagccgattatcatacgacgggccactgcgtggatcccattagcttcatctctttatattcaccaccatcacctcttaatgttgtaacttaacttacacccttgctcacgcaatcacagtggtgcagccagaaaaaaaaaaaaaaaaaagcgaccaaaaaaaaaaaaaaaaacccgcggcc

SEQ ID NO: 137386 - DNA, 306 bp, Zea mays
  Clone ID: MRT4577_56772C.1
cgaggataccaaagcacttcatattgctatatattgtgtgtattgtggatattatatataccatcaacatatatcatatattatatcttctatccttgctatagaatatcatcatgctcactcgaacaatcggtgggtgggtgacgtgggtggtgttggtgttggtgttggtcgtgggatgccgcgcccaagcccctgaccctgccattctcattaatcaaatgaccactgatgaaaaatactctttacttcgtggcataggttgggcgggctggaaccccaagaacaactactatgtagggaaca

SEQ ID NO: 137387 - DNA, 640 bp, Zea mays
  unsure (1)..(640): unsure at all n locations
  Clone ID: MRT4577_56773C.1
gggaaactaagagacctcggcggaagccctggggagatttctattggccatttatggaggaggcggtggggccanccccactctctccatctanccccctaactgcagccgggcgggcaccacccggaccgggccctccacaacaatgggcaccgtgctggggagcccccgcgcgccgggcttcttcttttcgtgcggctccctccgcgccgggggggggcctaccgcggtggggctgcctgcgggcaaggggggcatcatgggccgtancgccagcancaggcgcaggctgcgcgcgcangccacctacaacgtgaagctgatcacgccagagggggaggtggagctgcangggcccgacgacgggggcatcctggaccangccgaggaggagcggatcgacctgccctactcctgcgcggcggggtgctgctcctcgtgcgcgggcaaggggggctccggctccgtgggccantccgaccagagctacctcgacgacgggcagatcggcggcgggtgggtgctcacctgccacgcctaccccacctgtgacgtggtcatcgagacgcacaagggggaggaactcaccggcgcataatcattcatgcgcatcgatgggtatctctatctctggggggcg

SEQ ID NO: 137388 - DNA, 975 bp, Zea mays
  Clone ID: MRT4577_56774C.1
atgtgtgatgatgtccaactatgtaatcgttgtgtacgtgagtttatggtcctggcacgtacatggttcgcatttggtttaccttctaaaaccgagtgtgacaacacgcaaagagcaaaaagggaggctgacgtgtgggggctacatgtcggcgctgaattgccctattgggctggtgcagcgatttataaattcgaattcacattcaagtttggttttgaatttcaactccaaagtagatgcatcaaacaaaagagctccagcatgatatgcaaaggttctatggatttcgggtgttacaatcctgttgtcataaataaaattgccagggtcactattcttcccaagtgtggggataaaagcaagatcaaatataagttctggaatattattgaccatgtgatgaaaggagaggttgtgaatgtggttctattcatgatgaggcagctccacgaccttaagatggacaagaatcagaacctagcatatgctccttatataatgactctgattaaggctaaaaccagatttgaggggcaatcagatgtagcacgagttccatactcatatggatggaaggttttagggtatatgatgacacatgtggatggcagatttgatgccacgcaaactcactttgatggtcagtactctgccttcaacacaagcttcaatgttgttggtaatcagcttgataggatacactcccagtttgatgatcttcgctctcatattcagtatattgttcattatcccatcatgagtagaatgaacaacatgcaacaaagctttcaagacaatatgggtgctctgtcaagtcaatttgagactctatctaccagtgatagcatccatactcttgatgagaggcaacaacaacttcaaaatgacttcagccaattcaccttcatctttgacacctttagctcacagtattacatcatgtatccacgttctgcaccggttgctcagtga

SEQ ID NO: 137389 - DNA, 516 bp, Zea mays
  Clone ID: MRT4577_56775C.1
ttcaccgagttagagatcggtgacttcgtgatggcatccgacgcctcactccatccgcacgctgtgaacttcttcaacctagatctctacccggacaacgtgcaaggctccatactgcgcctctaccccaatgctgtcaacaaagtccggaccgggagtcgtcttctacgccgacagctccaccttcaagtccgtacagcggatgttggttatccacttctaaccgctcgtcggccgcatggtcgacacgcacaatctccggcgtccccgagctccatctgacctcaaccaggaggcgcatctcgtcgagggataggtcggcgtcgccctggacagcctgcattacagtgtcgccgaggagtacctgaagaagatcgtgatgacgaattctgaagacgcttcgcgtctcgaagcagctgatgaccttcatcgtgcaagtcttctccgtctatgtgagctacaacatgctcctcacggacgagtaagtcatgcccatgagcatcaaagatgtgtgac

SEQ ID NO: 137390 - DNA, 350 bp, Zea mays
  Clone ID: MRT4577_56776C.1
cggaagcgcaacggctttcgcgctcatcccttgcttcaaaacgacaggttctagcgcctccctacgtgagctgtgctgagagacaaagaccactagcttcgccttagcctgcgcccgttccgttcgggcatcggaccagtcctatctttgcctgagagcaactgttttttttgtgcgtgcatcttttatcctggtggatttaacggttaacctgatcgtcactaagcagtacgggggttcgggagtcgcaccctgtgctgcgcacggtgattgggggcgtgttcagcgcaccaggatagggtgcgagattgtttagttggtgcgctgattgtaccttgggtcgggccccc

SEQ ID NO: 137391 - DNA, 419 bp, Zea mays
  Clone ID: MRT4577_56777C.1
atcgctttggagcgttggaggaaatgcactataggggcaggacgctctggggacacagtgaacaggggagtgcggcaccgggttggagtcaccagacgccccatgactagctccctgccgcctgcgcccacacctagtcgtcttgcgtggaggatcgttaggaacaaagaggcatccaccctgtcccttgcggcgtcacgaccaatggctgtagaggtcgttgggatgagaagttgtagaggacacatggcgccagaccattacatgacgcgacatggagaagtctcgtctaggtgcgcgagctcgggccactgggtgctcgactaccgacctcctcgggcacacgtaagaacgatgcccaagcgtgaggcagcgaaagcagcgcgtacgacactggcaaacaaccgcactgtgggatg

SEQ ID NO: 137392 - DNA, 984 bp, Zea mays
  Clone ID: MRT4577_56778C.1
gggcgcccgcgcgtccgaaaccctagccgccaggcgcacgcggtcacgtagcgagtaccgagcgccccagttcacacggtctgaggtcctaatctacgcagtcaatcctccttagcggtttcgttaatttgcttgtttccagcgggcgctgcttcacagattttgcttagctacgattggcacccacgcggccgggcacccgtcctctaggcctagcacagctatatcctgggttacgttcctcgcacggcggaggcaaacaaaccctagccgccaggcgcaggcggtcagggagcgagtaccgagcgccccagttcacacgtgagatgtcagaatacaagaacgtcgttggggggaggctaaagctgaagggtaaggcactggatgtgaaggaaggtggagtcaagaagaaaaaaaagaagcatcagcttgaagagtcgtctcagattgagcacgatgagctccacaaagggggaaactctggcttaccagctgatcacaacaatgagcttattgaagctggcaaggtgggagatgaagaaaggaatctacatccagactacgaccacctcacaccggcggagcgacgctatatagatcagaagcagaagatcgacatgcaaaagctggccaaagttgccaacaagtcacacagggaccgtatccaggacttcaaccagtatctggcgaacctcagcgagcactatgacatccctaaagttggccctggctaacaaacatagccaaactgctgtgtacgcacaaacaattgtatgctcggtgggcttcaagaacattaaaaatatataaatgtatgttgggtgattgggtctatccagctttttgttagcatgttatatatatcctagtattttccacttttcttttaaaaaacataattgatactcttatgtgtattgatttgaattgaattacgtctgcatatgttcaatttgaaagtagcaagactcaatttgccttttg

SEQ ID NO: 137393 - DNA, 362 bp, Zea mays
  unsure (1)..(362): unsure at all n locations
  Clone ID: MRT4577_56779C.1
gcagggggacgcaagngncaagagacgaaacgggcgacatgtctcgcacgcaatcggccgnagcggncgccgnggnggccgcggngctgctgctggcagcggcggcgacgaccncggaggccgccatctcctgcgttcttgtgagcggcgggggggcgccctgcctntcctacgcccgcggcacggggtccggcccctccgcgtcctgctgttgcggcgtcaggaaccccaagagcgccgncagcaccgncgccgacaggcgcgccgnccgcaactgcccaaagaacgccgncagggggcgnnagcggcccnaacgccggcaacgccgccagcaancccnncaagngcggngncagcanccc

SEQ ID NO: 137394 - DNA, 1854 bp, Zea mays
  unsure (1)..(1854): unsure at all n locations
  Clone ID: MRT4577_5677C.1
gattgcgtaagtagtggaatgaggctggaacccatcaatatcacttgtagagaaggggagcaaattttttattggtcaagattcgcacgaggcgagacgttgacaggcacaggcaggataggaagtgtcgcgaacgcgaccggcctcgtcctaccaccggtcgatagggatctcggcctcgtgccccaccgccctctgtctgcccatcaccggatcacccctcgtccccacccagcgcgtcacgggcacgagctcgagccctcgtaccctcgcgtccgcgctctccctccctcgctcgccgcgctccgatcgaactcccgtccccgcgtggaggagagcagggccccacgagggccctctcgcgcggcgaccccgtggcgttcctgcgcggctgcttctcgttcgggtcggcggggcggaggcggcccaaggcctcgcccttgccctccccgccgcgcctgaccgcggctgcggcggcagcggacgacggggccaagatgaagggcctcttcaagtccaagccgcggacgcccgtggacatcgtgcggcagacgcgcgagtgcctcgtctacctcgacctccactcggactccaggagcggcgatgccaagcgcgaggagaagatgacagagctaagcaaaaatatcagggatatgaagtctatcctttacggcaatggtgaatcagagcctgtaactgaagcatgtgtacaattgacccaagaattcttcagggagaacactttacggctattaatcatacatcttccaaaactaaatttggagactaggaaagatgctactcaagttgttgcaaacttgcaaagacagcaagtatcctcaaagatagtagcgtctgagtacctagagtcaaataaagatctcttggacattttaattttagggtatgagaacatggacatcgctttacattatggtgctatgttgagggaatgtattcgccaccaaagcattgcaaggtatgttttagagtctgaacacatgaagaagttctttgactatatacagcttccaaattttgacatagcttctgatgcttcggctacctttaaggaactgttgacaaggcataaagcaaccgtggctgaatttctctccaacaattatgattggttctttgaagaatttaactctaggttgctgtcatcaaccaactacataacaaaaaggcaagctatcaagttgttgggagatatgctgctggatagatcaaatgctgcagtcatgatgcgctatgttagctccaaagacaaccttatgattttgatgaatctcttaagggattcgagtaaaaatattcaaattgaagcatttcacgtgttcaagctgtttgctgcgaataaaaacaaaccgcctgaggtcgtgaacatactggtcaccaatagaagcaagctacttcggttttttgctggattcaagattgacaaagaggatgaacagtttgaagcagacaaggagcaagtcataaaagaaatatcggcactttgagtatgcttgaggttgtaattagtttttgtgatgaattttcttttgctaagaaagtgcatgtgaaataataaacttctgtgtaatattctgttggaccaagaggaacaatgttactcattgactctagtgacttggatactgccagcaaatgtgataatttttaatagattttgtggttgtccatgccctttttatgggcgtgtttcaatgatacaaaatattgaaggatttagagacaaatactgtatgagaccatagtactctgtctagcagnnaaaaaaaaaaaaaaaaaaaaaaaaaaaaaaaaaaaaaaaaaaaaaggaaaaaaaaaaaaaaaagggcggcc

SEQ ID NO: 137395 - DNA, 1218 bp, Zea mays
  unsure (1)..(1218): unsure at all n locations
  Clone ID: MRT4577_56780C.1
atctaggtttagcacagatatatcctgggttacgttcctcgcacggaggaggcaaacaaaccttatccgccaggcgctggcggtcagggagcggagtcgctcgaagccggccgggccgtgcgacggcccagcccatcaaggcgaggccccaagctcaagtctctgaccccgcgaccccgacgcctgcgttgccctacccctacctgacctccactgctccacacctccacctgcctgcgacaaaagcaaaacctagccgccgcggcgccgcccgccgacctgccgtgccgactgctgagtgccgaccgacgtgcgcccgctgtccgctcgacgttgttggcctccctcgacgccgctggcaggtggccgctcgacggagtcgacgcctcacagcctccctcgacgcgacgccgctggccactcgacggagtcggcgcctcacagtcacagtgagatgtcagaatacaagaacgtcgttggggggaggctaaagctgaagggtaaggcactggacgtgaaggaaggtggagtcaagaagaaaaagaagaagcatcaactcgaagagtcgtctcagattgagcacgatgagctccacaaagggggagactctggcttaccaactgatcacaacaatgagcttattgaagctggcaaggtgggagatgaagaagggaatccacatcccgactatgaccatctgacaccggcggagcgacgctatatagaacagaagcggaagatcgacatgcaaaagctggccaaagttgccaacaagtcacacagggaccgcatccaggacttcaaccagtatttggcgaacctcagcgagcactatgacatccctaaagttggccctggctaacatacatagccaaactgttgtgtaggcacaaacaattgtatgctaggtgggcttcaaggacattaaaaataaataaataaatgtatgtttggtctatccagctttttgttagtatgttatgtatgattttatatttgttgtataatgacatggtcgattcatgccgtcaactgtcgcggtatatatatgtggattgatttgaattgattttatatttgttagcatgttnaaaaaaaaaaaaaaaaaaaaaaaaaaaaaaaaaaaaaaaaaaaaaaaaaaaaaaaaaaaaaaaaaaanaaaaaaaaaaaaaaaaaaaaaaaaaaaaaaaaannaaangggggggggccgttttaaag

SEQ ID NO: 137396 - DNA, 727 bp, Zea mays
  unsure (1)..(727): unsure at all n locations
  Clone ID: MRT4577_56781C.1
aacaaaccctatccgtctggcgcaggcggtttgggagcgagtaccgagcgccccaattcacacggggtatatcctaatctacgcagtcatgcctccttagcggtttcgttatttgtttgtttccagcggccgttgctgcggtgattttgcttagctacgctttggaccggcgttccttcgctgctagctagtaccttttggaagtaaggagtgctgtctttcgcctgatctacctagacgccttttcttgaatcagcgacttctattttggttaattagcaccggtagcccccctgctctcttgagtgagatgtcagaatacaagaacgtcgttggggggaggctaaagctgaagggtaaggcactggatgtgaaggaaggtggagtcaagaagaaaaaaaagaagcatcagcttgaagagtcgtctcagattgagcacgatgagctccacaaagggggaaactctggcttaccagctgatcacaacaatgagcttattgaagctggcaaggtgggagatgaagaaaggaatctacatccagactacgaccacctcacaccggcggagcgacgctatatagatcagaagcagaagatcgacatgcaaaagctggccaaagttgctaacaagtcacacagggaccgtatccaggacttcaaccagtatctggcgaacctcagcgagcactatgacatccctaaagttggccctggctaacanacatag

SEQ ID NO: 137397 - DNA, 1183 bp, Zea mays
  unsure (1)..(1183): unsure at all n locations
  Clone ID: MRT4577_56782C.1
tcgggnnnnnnnnnnnnaaaaaaaaaaaaaaaaaaaaaaaaaaaaaaaaaaaaaaaaaaaaatattatctattttctttctagtacgtgtgcttgggaaaaccaagatcttaccatgactgcaattttagagagacgcgaaagcctgtggggtcgctgcctcgaggccggccgggcaatcgaagctcagcacgatcatcgacacacacacacacatatcgatcgatcgtgtcacgccagcagagcacgagcacggtgctccaatccagagccatgtcgaagccagcgtcttcgtcgtcgttcctcctcctgctgctgctgtcggcgacgctgctcgccaccgtctgccgcgccgacccggacccggtgcaggacttctgcgtggccgtggcgccgggcggccacaacaacgcgtcctcctcctccagcacctacccgggcttcccgtgcaagccggcgtcgacggtggtctcggacgacttcttcttcgcggcgcacgcgggcggcgcgagcacggacaacccgatgggcgcgggcgtgacgccgggcaacgtggaggcgttcccggggctcaacacgctgggcctgtccatcaaccgcgtcgacctcgcccccggcggcgtcaacccgctgcacacccacccgcggtccgccgagctggtgcacgtggaggccggcgagatgctggtcggcttcgtcagcacggagggcaggttctactccaaggtggtgcgcgccggggagagcttcgtcatcccgcgcgggatggtccacttccagtacaacgtcggcaaaggcgccgcgcgcgccatgaccgtcttcaacagccagctgcccggcgtcgtgctcgccgcgcagaccctgttcggggccgacccggagatccccgacgacgtcctggccaagagcttccaggtggacaccgacaccatcaagctcctcaagtccaagttccagaaaggatagcgcgcgtagccgacctgctcgctagatttgcagttccttacagttttgtttcatcagtacataactaatgttgtttcgcattattaaataattttatttgatcaataataaagttgtgtgatttagccccaacacgagaaaaaaaaaaaaaaaaaaaaaaaaaaaaaaaaaaaaaaaaaaaaacaaggtcaaaaggcgctcctagttctagatcgcga

SEQ ID NO: 137398 - DNA, 318 bp, Zea mays
  Clone ID: MRT4577_56783C.1
gtcgacccagcgttttgctcctggcaccaaaaagacctagctgccagtacctatttaactattagtttggtgactaaggtcacttgtgagatagggatatgagatttcatttatttatttcatcttagatgactttgtgactaaggtcacttgttgaactatagtttagtgttcatgatggaatgtaataaatattttgatgaatgacttgggaatctgttgatttgtccatgaatgcaatatattgttggccagcatatgttggaaaaaacacatgtgagagtggttgctctaataaataaaaaggacggacgtttt

SEQ ID NO: 137399 - DNA, 268 bp, Zea mays
  Clone ID: MRT4577_56784C.1
tatcattccaagatcgctcatcatctcagagggtctgctagcttggtgcgcgcggttaacaccgtacacgatagctaatctatctcttgaaccatcgtagtagcaaacaaaaaatggttcatcggccgtctgcaaccatcgatcggtcatgcgcttgattgagccgggtggcggaccagccggccacatcggtaggcaccatcggtgggcggaggcggtatcgtcgccatcatcatcattcatcaacaatagctggtgcttcttcggc

SEQ ID NO: 137400 - DNA, 399 bp, Zea mays
  Clone ID: MRT4577_56785C.1
caatgactgcaccaaacatagggctggcgattgccgaaacatgggcgatacaggattcatcgcttgctgcgattgcttgatggaacctatatgagccgtagagctggcttttcacatactgaatctatcattgatggaatgtatggcgtaagaagggacgctatatgagctcgcaaccactgaagcgaaaatgggctagctaacctcacttgctaatagaacaaggagcataaggatggcataatatccttctacgccatatgtgagctctatttgttgcatactgcgatcaacacatcttactatcgcatgccttgtcaggtctcattattactaccgatccccgtgtacctgatccggaccgcctggtagaaagggcaatatccagctcactgacag

SEQ ID NO: 137401 - DNA, 373 bp, Zea mays
  Clone ID: MRT4577_56786C.1
tctgtctaggtgctggtcctgtactacctgaggaacagggagggaggcaacacgatctaccttgacgtggtaaaagacgtggctctggacaaaattgagccctgggatctccaaatgaagtgcacgatcgggactgtagaccaaaacgagtggctcttccttggccacttgggcgaaaagtacctgatggacaccctgaccaaccgggctaccaccgacgtgattctggaaggcaaatgttcgtgacaagcccatttacaccaagaggtgtctagatagcatgagtaagactctcgtcttctacaagggccgcgcgcccaacgtgcccgagtccgactggatcatgcacgagatccacctaaagactaccgat

SEQ ID NO: 137402 - DNA, 702 bp, Zea mays
  Clone ID: MRT4577_56787C.1
attgggtacctcgaggccggccggacccagccatcaacgccctcctccatcaacggaaggtggccgaggatccgccccaccctcctccccacgccgtcgtcgatggaaggtgcgatctcctacccctctgctccaccatcaacgccctcctccatccccttccattgttgccgctccgccaccacaccacgtttcccaaacgcgcagatccgaggatccgccatcaacgccgcgcccaccctcctccccctctgctccgcgacgacaggggtctgaggccgccatcaacgccctcctccccgcgccgtcgatggcgcgcgcagatccagtctccttcaggcaacaccgcgccatcagcggaatctccttccgccatcagcagaaggtgctgaggatcttgggcaagcaggagagggggagaggaggccaaggacacaaccgcgaagccaaactcatccaatccagtcccttctgtcggccgcacctcgacggcttcaccgtgcccccgccacatcgcgaccatggcgaaggagcaggctggctagccctcggtccgcctcagcccgccgccaggagagataagatacgcatagcgaagctggaaggcttgctgtacaacaaagatggtccgagcggtggatccgaggcaacttcctctgccgtgaaggatcttcagccgaagctagaaggggttactgcaga

SEQ ID NO: 137403 - DNA, 533 bp, Zea mays
  Clone ID: MRT4577_56788C.1
gggtacctcgaggccggccgggacgagcgatcctactgtggcgacggaatatgtaggctctcgcatggatgaggactgcagaccgacgccccatccgatgtgcatcgcagaatgctccaaaccatggatcctatgaacaaaaggagcaacagcacaccatactatcaacaacaacgtgtggctggggatgacgaccggcgaggacaccctgagcgacaagaccgagctgaacaccatgcggaactcccacacaaaactgatcgtcatgctctacaactggcctcccctcatcaaatacgagatggcgactacaacctgctgacacacgacggtggatcatatccacggaaagaacagcgatcttgacactgcctgcgacaatgactacagcatgtgctacctcactatgatcaaaccaagagactcgagactcattacaaccgcctctgggacacggtcacccacccgcacgacaaatcggaggtgcttcgcctctcgcacaatgacaagctatcgactgatcccatgctatg

SEQ ID NO: 137404 - DNA, 656 bp, Zea mays
  Clone ID: MRT4577_56789C.1
ggccgcttttttttttttttttttgtgacatgtcgttgggtacaatgcatacagcgaatagtcaagtaaaggtgcatatttcgagcacatcgtcaaatgtctgtgttacgcgagataggggatgaaatgttccctgaggttatcagggatacagcaagggtggtggttgtgtagaaactgtgacgccttagcacttctcgccggtaccaatatccaacaaaaccgagatcggttcagaaatgccaatagtggcgttggttggcttgccttgacatttgtcaaacccttgatgtaaggcggttactgcgtctccaagaaccgcagcgtcaattttgggcttgggtacactgggcttggtaatggccactttgcaagttccgcacgaacgaaaattgctcttgtcgtgccagaagacaacattgctctcgtgaggaaatttgattaaagccttcctgcagtcctcccggatgattggagggctattagagggagcacacaggatggaagaggggagcagctgcgcctggatgactgcagcggtggtaaacacgaataggagatatgcgtagaaggtcatttgcttgatggtttttgtgattagtcttgagcggagatctgtgatgttgaaagatgggggtgaggatcctcccggccgg

SEQ ID NO: 137405 - DNA, 302 bp, Zea mays
  Clone ID: MRT4577_5678C.1
caccaacatggcgtcgccgccgccgggtgccgggcttactgagtatgagcgccgccgcgaggagaacatccgccgcaacgagactatcctcgccgcgctccgtcgcaaggccgccgagctctctgcctccttcatccccacggcttcctctcccaagcaccccaagaagcagcatcccctcgcgagaacgaccagccccgtcgtcctccgccgctccttgcgcacccgcggcatccccgccggcgaatcctccgcttgtgacggcgctaacacctcgctaaatacgccgccgtccccgacga

SEQ ID NO: 137406 - DNA, 475 bp, Zea mays
  Clone ID: MRT4577_56790C.1
attcggctcgagcccggcgtctaggttgtagtggtggagcgggaggtggtcaaaggctacgccgtaggcgtcgggatggcgctctgcaacgcgcaggtcctactactcatgaggggccgccggaccccggctccgggtagaacgtccacaaaccgatggtctggtaccagtcggacgcaacacaagtggccaccagctccatgccgtatcacgtcagtcggggaagcgcatacctagcccacatgtcagtggaacccgacagctcccgctgcatcgtcttgcccacaggagcgagtgggtagctgatcctgtttctgctaggacagaagtatatctatgacccacaagaaaccatatgcccacacccaactgcacgggctcgcaaggggcatcatggtggacgagtgtgtgtaccctgagctagcatcgatgggactggataaaggctgaaaaacatctattctcacatgtggga

SEQ ID NO: 137407 - DNA, 489 bp, Zea mays
  Clone ID: MRT4577_56791C.1
cctcaggcggcgggaatttctttcacataagacaggaccactccccctcctgtaaggtactcactgtgacgagacttggtttttgaataactctaccaccccaaaggcacagcaaggaaaggaatcgcgctgatataggctgcggcacacaaggcaggtggaggcatagctcggctggccacacatcctgtgtcggtgactatacttcccatccgagatggccggtactcggaccctgcaagagatgcgcaagaacctcatgagcaccaaggtgctgatcgggaacaagcacttgcggtggctgaaatcgtgacatcacctagaacttcaagacgtacgtgaggttccagagcatggcgggccatgacgtccagtaagccgtggatacctagctcgacggcatgaatctgggacatcaagctctacgccatccacatcaagcgcgtcggcatactgctcatggtcgactacatcgacagccacatctac

SEQ ID NO: 137408 - DNA, 3881 bp, Zea mays
  unsure (1)..(3881): unsure at all n locations
  Clone ID: MRT4577_56792C.1
actaacacaagccggccactaattcggcacgagcaggttgcactccactctcccacctccactgcgctgcccgcctgcctttataacgcggcgagcccagtgcggagggaagagaacccaaggacgcgcctcgccctcgagatccactcggagggccaccgcgaccgctccggtcggttccggcgaggtgccgcgcggtcgtaacagcatagacagggcagacaaagctgcgattttggggggggctgttggtccagccgtagttgttggtggagataaaccacgtgaaggctggtgctctggtacatgttcgccaggcactgatggcatttggccgaggtggaaagatggacggccgccggccgtcctcatcgtcgtcgtcgtcgttctgcacaaccaccacggtcgtgctctttgtggcgctctgcctagtcggcgcgtggatgatgacctcgtccactgtcttcccgctggagatttcgtccaataagaagccggtggtgaagcaacagcctgcgcctgtcaatttcggggcgtcgcaggaggcatcacctggcattgctggtgaaggttccgagaaatttgaggacaccgacaacaatgatgccacagtcccagaggaaccgaataaacaggatgcttctgagcaagagaatttcaatgagaagcctgaagagaaggagctggaagtgcccgtagagaaagcggagaccaaggatatgtttgatgacgcaaatggaaaatcagaagggctatcagatgaaacgaagaatgatgatggggagaagagtgtggagaagcaacaacaacaaagccttttacagttgaggtaagctacaaaaatattatacaacctcccattttaataagacatccataccaaaattgctgtttcacacaaataccagactataggttctataagtttcgctactctgtactccgcccgatcttgtaagggagttaccaatacgacgaaatccacagcagacagagcacgcactgcaaactggtcgttagggacgccgcggttcttataagtgagctggagagtatggcctagtccctgcagagggaattgcccatgacctaaaccaagggcttcgaggggaacatatgcgccgccgacatacccttttcagccatgtctactttgacaaattcgatgaacgggacgaggatcactcctaccaaggatgggtttactcaacgcgggacttttatatctgagctatgagtacagatggtctgcgtgcagaaaagctctgagaacagcccgccggtggccgtggaagccgaggtcgcccgtgttgcgtggcctctgcgcttgcaagtcgtgagggacaccgcggacacgataaatgagctggagagcatggccaagtccgtgcagtgggaggtgcggatgacctacaccaagggcagcgagggcctgctctgcgtcgagaagtcgatgtggcgtgctagtggctctaaagatgatgaaatcacaaatgagaggagttatgtggtcaaagatgaaaaatgttagggaaaggagaggaagagaagcctgatggcgatgcaacccagaaggagcaaaatgaattagacatgaatgtggaggcgaatggagagaaggatcagatgcccaacaccaacgagctcggtctgtatggcatgtaccatgagtggctcgaggattccaatacccagaacggttcgttccccacacaggctgcagagtcacagaatgaaaaggaagtccaagcgttaccgaagtcttcaggcgatgcagccagctatacctggaaattatgtaatagtagtgcctcaacagattacataccttgccttgacaacgagaaggctatcaagaagcttcgaactaccaaacattatgaacatcgtgagaggcattgccctgaggagcctcctacctgccttgttccactcccagaaggatataaacggccaattgagtggccaaagagcagggacaaggtatggtacagcaatgttcctcacactaggcttgcagagtacaaggggcatcaaaattgggttaaggtctcaggtgactatctcttgttccctgggggtgggactcagttcaagaatggtgccctccactatattgatactattcagcaggcactacctgatattgcatggggcaaacgaagccgtgtcatattggatgttggttgtggagttgccagctttggaggctacatgtttgatagagatgcgcttaccatgtcttttgctccaaaagatgagcatgaagctcaagtacaatttgcattagaaaggggaattccagcaatatcagctgtgatgggcaccaagagacttccgtaccccagcagagtctttgatgtcattcattgcgctcgctgcagggtcccttggcacatcgaaggtggcatgcttttgctggaattgaaccgcttgttacgccctggtggttactttgtctggtctgccactcctgtttaccaaaagctcccagaggatgttgagatttggaatgccatgtctactttgacaaagtccatgtgctggaagatggtcaacaagactaaggataagttaaaccaagttggtatggtcatatatcagaaaccaatggacaatatttgctatgagaaaagatctgaaaacagcccgccattgtgcaaggaatctgatgatgcagatgctgcttggaatgtaccgttggaagcatgcatgcacaaactgcctggtggctcaaaagtccgaggatcaaaatggccagagttatggccgcaaaggcttgagaagacccctttctggattgatggttccaaggttggtgtctatggaaagcctgcaaatgaagattttgaggcagataatgcccactggaaacgggttgtaagtaaatcgtatgtgaatggcatgggaattgactggtccaaagtgagaaatgtcatggacatgagagctgtctatggaggttttgctgcagctctgagggaccaaaaggtctgggtcatgaatatcgtgccgatcgattcaccagacacgctgcccatcatctacgagcgcggtttgtttggcatgtaccatgactggtgcgagtctttcagcacttacccaagaacgtatgaccttctgcacgcggaccatctgttctcaaagctcagaaagagatgcaaactggctgcagttttcgccgaggtcgaccgtgtactgaggccacagggcaagctgatcgtgagggacaccgcggacacgataaatgagctggagagcatggccaagtccgtgcagtgggaggtgcggatgacctacaccaagggcagcgagggcctgctctgcgtcgagaagtcgatgtggcggcccaaagaactcgacgctagcacgtgaactgtgttgaggaggaactgctaccacgtaggggtgaaattagaggaattttgtcttctagatatgcgtatggctcttgttggtgctgaaaggaccagaaaatatttggtgtaactgtagaacaatacatctgttttttctgccgtttgttttcgtttttgttttttcacaacgttgctgtaagttagtgctggaaatcacaggtacattcagttctactgggcacgttgttggcttgtcggatagcagtcgaacgattttgtgctgcatatgttatatttgaactgttgtgcggtaagtaaatggttttcgtagtttcttgggcatgtttatttatttatttatttttggtaattcagatcacactacataactactagttacccaagctggcacatagctaacttaaaacataacactataacaagcaacttgtccaccatatgtcatcaagcatatntctttgaaagattcagtcaacctggagaaattatctttattggtca

SEQ ID NO: 137409 - DNA, 347 bp, Zea mays
  Clone ID: MRT4577_56793C.1
gaccgagaacggcgacagaagaccaaggcagcaccgctcagcgacacccgcaaaagagcatcgggcgtacccaggaacggcgctgggacgaacagctgagccacctgggacgggaccccgagcggggctgtgcagcagggggaagcgcaaggtgacatggatcccgttcactgagccacgtaatattgcctgagatacactgcagcctattagggggcaagggagtcagcgatttgttttttgtgcccaccaccgaagggaaagtgaagcagactgccttgagagacagaaatcttataagcaagcagcaagatcggtttctgaaagaaggggcaagcgcactagga

SEQ ID NO: 137410 - DNA, 1547 bp, Zea mays
  unsure (1)..(1547): unsure at all n locations
  Clone ID: MRT4577_56794C.1
ttgctttctaacacaacaggttgcactccactctggcacctccactgcgctggccggctgcctttataacgcggcgagcccagtgcggggaggcagagaacccaaggacgcgcctcgcctcttctcgcctcgagaaccactcggagggccaccgcgaccgctccggtcggttccggcgaggtgccgcgcggtcgttccagcatatacagggcagacaaagctgcgattttgggggggggggctgttggtccatcagtagttgttggtggagataaaccacgtgaaggctggtgctctggtacatgttcgccaggcactgatggcatttggccgaggtggaaagatggacggccgccggccgtcctcatcgtcgtcgtcgtcgtcgttctgcacaaccaccacggtcgtgctctttgtggcgctctgcctagtcggcgcgtggatgatgacctcgtccactgtcttcccgctggagacttcgtccaataagaagccggtggtgaagcaacagcctgcgcctgtcagtttcggggcgtcgcaggaggcatcacctggcattgctggtgaagggtccgagaaatttgaggacaccgacaacaatgatgccacagtcccagaggaaccgaataaacaggatgcttccgagcaagagaatttcaatgagaagcctgaagagaaggagctggaagtgccagtagagaaagcggagaccaaggatatgtttgatgacgccaatggaaaatcagaagggctgtcagatgaaacgaagaatgatgatggggagaagagtgtggagaagaaagatgatgaaatcacaaatgagagtggtgatgaaaaaactgatggtgagagtaaggacggtcaagaagagaagcctgatggcgatgccacccaggaggagccccctaaaatagaggagaatgtggaagaaaatggagagaaggatcagagctcaaactccaacgaggtatttcctgatggggcccaatcagagcttctgaaggagtcaaatacccagaacggttcattccccacacaggctgcagagtcaaagaatgaaaaggaagtccaagcgttaccgaagtcttcaggtgttgcaaccagctatacctggaaattatgtaatagtagtgcctcgacagattacataccttgccttgacaacgagaaggctatcaagaagcttcgaactaccaaacattatgaacatcgtgagaggcattgccctgaggagcctcctacctgccttgttccactcccagaaggatataaacggccaattgagtggccaaagagcagggacaaggtatggtacagcaatgttcctcacactaggcttgcagagtacaaggggcatcaaaattgggttaaggtctcaggtgactacctcttgttccctgggggtgggactcagttcaagaatggtgccctccactatattgatactattcagcaggcactacctgatattgcatggngcaaacgaagccgtgtcattttggatgntggntgggggagttgccagctttggaggctacatgtttgat

SEQ ID NO: 137411 - DNA, 593 bp, Zea mays
  Clone ID: MRT4577_56795C.1
ctcgagccggccgggtctcttgatctctgtccaagattagttctgctcgatcctcatctccctctctcgattcatgagtagacgaactatttgatcatctcttctttcgttgcgattatggagctcgatgcccatatctgagagatactgagctccggctccctctgcttgtcaccttcatgaggatcatacatgactgcctcaagaagccggctccctcctgcgactccaagatgcgctctgggacgacgagcacccatgacgcgaggtcctcgtcggacctatgtactgggcgcctggagacctcaacttccaccactacaccagcgccgctcccaagtgagaactagacccccatgcacacgcgatgctcgcttttgatgcacctcctggatcgagattccttacattggcgagattgctctaattaacctgtctttatggcttcgaacggccagcaagtgctagagcgacacccggtcgcttttagcactggtacatacaccttccagtgaagccgtggccaaaaagggcgagcacaagcatcagcagggatgcctgtacatgaaagataccatggacggagcaccgta

SEQ ID NO: 137412 - DNA, 807 bp, Zea mays
  Clone ID: MRT4577_56796C.1
tccgtaggctcactcaactcagctgctagccgctactcctcagaggagcatcttcgtctgctcttgcgccttttctgctcgctcgctgcctgcctgcctttggagctaagcttagcctaggtaggcgtagcggctagctagccagggaggggaagctactgcccccagccagcaagcgtggcgtcgtcggggaggcgcttcccatcggtctccgcggcctacgcggactggatcgcgtcggccggcggcgacgacctctcgctcggcttcaatgccgctggcgcgtccgccaacggcctttggggaccagcctcgcgccagtccgccgcgctcaactacgggataacggctgctggtgatgtcggcatggtcgtcctcgcccccgcctcctccttccaccaccagagggccgctgctgctgccgccgcggcggacgccgccgaccaagggttcgccctcctctccgcggggcagtgcgggctcgccgaccctggcgctcccaagtccggcagcgccatccagttctggcagtcgcactcgcagccccacacgacgccgcccgccgctgcccccgccgacaagaagcaggtcgtctccgcggtggactacggcggcgtctcctccggatccggcggctccaccacgtgcaacgactgcggcaaccaggcgaagaaagactgcccccaccagcgctgccggacgtgctgcaagagccgcggcttcgactgcacgacgcacgtcaggagcacctggatcccggccgcccggcggcgcgagaacacccgctcgggggcgacctttcccctc

SEQ ID NO: 137413 - DNA, 472 bp, Zea mays
  Clone ID: MRT4577_56797C.1
gtcacagcaagaggacggacactgactttgtgtggctgttgctttgccgatcaattacttatgcttacgggaacctgtcacgtatactggtactggccgggtcagggtcaggataaagccccatacccttacccttcaaaggggatagggcgggctaggggctggtgcacatcaggatccggattgatattgctaacggctacctttactttaattaacttaaatgtacatgaactacaacctcaaatttaccaccaccaagctgaatctagatctacatgttcaagcttaaatgtacaagactgctcaaggccaaggactaaaacttcagggtcaaggtgcacttgccattgccattgaactatcacaatcactggaagtttaagctggctcttgaatccaaaggcctgggctgatgataatgatgctaatggcataggtgtacttcaaatcaagatcaagcttgagcttg

SEQ ID NO: 137414 - DNA, 182 bp, Zea mays
  unsure (1)..(182): unsure at all n locations
  Clone ID: MRT4577_56798C.1
caatctcnctagcagcagatcctcgtgcaacgcaaagcgctagcttcctactgtccgatggccgcacgaagcagacggcaggagtcactgcgcaagcgcatgagcactgcacaagcgcccagctcctgcacgcgatagaccacgttcgccgacgcggtcgaacgaacaaacagcttacgact

SEQ ID NO: 137415 - DNA, 271 bp, Zea mays
  Clone ID: MRT4577_56799C.1
cgcacgcaacgcgctcgccggctcaacacgctctcaccacgccaagagcggcaagaacagctcctcgcacagtctgcagaagccgaaccttaaagcggaaccggagcatcaccaagcctcggaggcggtccccagctacgccaccaccgcgaccgcagccacaaccacaagcaccaccaccacagcgaccacaagcaccaccagcaacagtactcctccggagacggtggctgcagtgaaagaggaggcgatggttgggtcggaagtggag

SEQ ID NO: 137416 - DNA, 539 bp, Zea mays
  Clone ID: MRT4577_5679C.1
ggccgcttttttttttttttttttctttgtttttttttttttttttttttttttttcttttttttttttttttttttttttttttttttctttttttttttttttttttttcattaaaaaaaaaaacagattttttttggggggggcgggcaacagtcaaagcccaacaacaaccacaaaaccctgtgaggtgccgggggaaaaactatctccccctcccccaccccaaaaaggggcaccagccagcgacggccacccaaaccccaggaggacaaaaattttttcccaaccacccccgccacccccaaggtccggggtcaaaaatcgaaaactccttcattcatcccaaccggataagcggcccacatgctccccgcacccgcagcccccccccgattaccggaaggggattaactagggggcaccttattcaaccaacccgccgggggcccaagtgtgggagggagaaaaaaaaaccgggcccccaaagggaaggccttgggcgagaacaccccttcacaaccccctgggcgcgggcc

SEQ ID NO: 137417 - DNA, 435 bp, Zea mays
  Clone ID: MRT4577_567C.1
ttgatagctactcgctttacctccctcttgggcggtggtaacccattggtagtttagacagctgaaggcacagccagtgtgcgcatgcctagctgccataaaagtaactgtctctaggggaggccaggaatgggtaaaactttcatttggctcatacagggtccgctagcctttcgttcaacctgcaaaagagaataccagggcgtgctccaggacattgacataactcccttgttgcataacggggaactatccaacgatttgggcaccctgcaaaaaagcttcatttaacgctttgaacaggtcaaacaaaagattcgcaagaacaacccacaatttctccttgtagaagaaaccctcaccaacaaagacctacggcagcgagtgctatttacccgactggactcgccggtgaaaaagacaagggcaaggcca

SEQ ID NO: 137418 - DNA, 827 bp, Zea mays
  Clone ID: MRT4577_56800C.1
aggaccggccggaatacccgggtatccacacccccgataacagacgatagaacgaccgatggggcgggcagaaagaggagcgcccaaacacacccagagagcagcccagcaaccagacgacgtgcgagcaagccaaggaggcgggcagcgaatccaaagaaaagaaacacgacgcgcagacaagcaaaaaaaaaaaaaaaaaaaaagggagaacgacaaaaaggaaccaaagcaacgaaagaaagcaagcaaaaaaaaaacaccaaaaaaagagaaacccaaaaacaaaacaaccggccaacagcaaaacaaacacgacaaacagagaaaaacccaggagacaaccaaacacaaaagcacaagaaaaaaaacaacacaaaacaacaaaaacggaacaaaaaacaaaaaggcacgaaaacaaacgaccaaccaacaaaagaaaaaacagaaacagcaaaaaggaaaacccccagaagcaaagaaaaaagaacgaaggagaaagaagaaaacaacaaaaagaaaagaaaaaaaaacaaaaaacaaaacacaaaacaccacaaaaaaaaacaacacaaaacaaccaaaaaagcaaaaaccaaccccaagacaaaacacagaaaaaaccaaaaaacacacaaacaaaacaagaaacaaaacaaaaacaaaaaacaaaaaagacaaaacaaaagacaaaagacaaaaaacacaaaacaaacaaacaaaaaaaaaaaaaaacaaaacgaacaaaacaaacaccaaccaaaagacaaaccaaaaaagaaaacaccaaacaaacaaaaaacaaaaaacaaaaaaccaaaaaccaa

SEQ ID NO: 137419 - DNA, 603 bp, Zea mays
  Clone ID: MRT4577_56801C.1
gcgtccaccaaatgtccgccggaaaccgctatactaatcgttctccgtcgagggcgatggctagaaaggatctgtcttctcgccggcgccggctccccctccggcggccgcgcgatgaggaccgccttaatgccctctccgacgacctgatcctccagatcctgggccgtctcgacacccgcagcgcgcttggcgccgccgcgctctgcaggcgtttggcctacctccctcgcgagctccccgtcctggatctcaaggtcagcgacgcgctcccgccgcgctaccggcggtggctcgacctccttaacgaggcagtcagatcggacgcgctacgcgggtgtagccggaggctacgccccatcgtcgggcggtacgagcgccgcgccatgcgcgccatggtcagctccgtcaggagcctcagggcccgccgccaccggcgtgcgtgcagcaggctgtcgctcgagttcttctccttcagcacctccgccaccatcaaccgcttggtcgtggacgccgtcgatttctggggagacgaggatctgcaggtcgtccccaagcccacggagccgatccctcatctttccccggtccacccgcttcccc

SEQ ID NO: 137420 - DNA, 770 bp, Zea mays
  Clone ID: MRT4577_56802C.1
ccgggcttatatagttaggttactgaatttcttgctatatctctagttgaattgtcgatgggaaaaagaattcaaactaaatcaaaagtcgatagattgttaacaactttggttgcatttggatctgctgctgcttacatctaggttttcatattattttaattttttgaagatattttaacatctttttcgtctaataaaagataaaagtatcaaaaaaagtttggatgtctttaacatgccattggttaaatgatatcttgatgatggcctctagattttcctactttttggtagtttttatctgatttggtatgtgattaattaagacatcttagatcggtgaaaataattaatatgtagaaattcaataaatatagtctacaaatattaacatgaacaaggtgtacacaataggtggacgtcggagcatcagttcaggtttcgatgagggacgaggaggaaatgcatgcagcgcatctcaaccttcaccaggatcataatcttcaccgcaatcaatttggcaaccaagagcacaggcgccgcatggctgcaactgctgcagcattccacatcaacacaccagtagagcctatcaccacgatgatcacctcctcgccggtggttcacggttctgccatacttcaacatccagaggcatatggccatggcagctcgacttattgtcatcatcagcagcagatggaggaggatgagcagctacaccaacaacctcaaaattttgatgggcgacggtcgacttctgggct

SEQ ID NO: 137421 - DNA, 250 bp, Zea mays
  Clone ID: MRT4577_56803C.1
tctttttaaccattcttactatcctggccacgaactatttaaggctttatgggatacatcacaagccctcgtaaacatatatcctatttaggatcgtcatattcccatccctaaaccttttacacataccaatttccacattactcctgctaaaacaattcaaccaatatactttcccatcataaacggcatatctctaaagtttaatatacctaaatacaagtcttcttttcttatatctatgtttaca

SEQ ID NO: 137422 - DNA, 507 bp, Zea mays
  Clone ID: MRT4577_56804C.1
attatgaagcatgaatggaaggatgacgtataccttagcattacccacaacgagagggatgtattaaagcagaagatgatgctgtactgagacggcactgatcaccatgactctgtaactgagcgctgctttaaactgcttcaattgacgtgggttatggtatacatttaccattgcctcatcttgcgtgcgaggatgcaacaacattgttgtgcatgcaagcgaaggtttaccacatctagttgaatcaccgttggcaggaactgatgattgtgatgagatagtatggcttgaataggtagatgcgccctggatagctgaagcacctggctaattggtcgctggaaaaggctagtcgcaagacattgttgtacgctgctagcttatacaagtatgtgtccaaagtcgattgaattaactgcatagatgaactgtgggataaagggacttgcagcaacagatcattgcagaataataaacgcatgcgttgcgcttacaaactgggca

SEQ ID NO: 137423 - DNA, 566 bp, Zea mays
  unsure (1)..(566): unsure at all n locations
  Clone ID: MRT4577_56805C.1
aattcggcacgaggggcatgcccatctacttgaattgcgatgcgtacatacatcgctgtctccatctagctgcacacatatatacatacatgcatacagagtgagagagaaacagatcgatctcacttagctgctgctgctgctgctgcttgctggtggcctgggcctggctgctgtgtctgtatcgatgtgtccgtattttctccatctcgtctgcatacgctgcaattggaggagaaggaggagcagcagcagcagccaggcgcggccggcggccggagtagtatccgaatccgctcaacacccaccggctggtctctagctttcctatcgatcaatggctttcaaaggactcccgcgtgattcccgagggtccctcgaagtcttcaatccagacgcccctgtttcagatcgagcaaccacctccccgtttctcctccctcctgcggccgcgtcccatcccagcctcctcgccgccggagatggcggcatgctacgggggntcccggccgaccccaaagggccgncgagtggggcctcgtcctccagaccgacgagcacaccgg

SEQ ID NO: 137424 - DNA, 852 bp, Zea mays
  Clone ID: MRT4577_56808C.1
aagcagcaataactgtggtttatttcggtgccctagagcagagaatacagggtattactagaaaggaagaaacgggccccactgatgatcccgatggagatattatataactgcttctctcggtcttgagctaagcagcgcgcacgtcgtggtcattggcctccaccagatccgatgccttctttttcgctcttgctctgctctcatgggcagggcagggcatgcccatctacttgaattgcgatgcgtacatacatcgctgtctccatctagctgcacacatatatacatacatgcatacagagtgagagagagaaacagtagcaagcgcatcatctcgatcgatctcacttagctgctgctgctgctgctgcttgctggtggcctgggcctggctgctgtgtctgtatcgatgtgtccgtattttctccatctcgtctgcatacgctgcaattggtaaggagctagctggcctttcatgtcttccatgctgccatagccatacggccggccggcaggcaggcaggataccccatcgctcgctgcacatgcatgtatgcatggggatacatgttcatcatcagcagcacagtggctctgtatcccccatcccaatctgatcctatataggaggagaaggaggagcagcagcagcagccaggcgcggccggcggccggagtagtatccgaatccgctcaacacccaccggctggtctctagctttcctatcgatcaatggctttcaaaggactcccgcgtgattcccgagggtccctcgaagtcttcaatccagacgcccctgtttcagatcgagcaaccacctccccgtttctcctccctcctgcggccgc

SEQ ID NO: 137425 - DNA, 365 bp, Zea mays
  Clone ID: MRT4577_56809C.1
tcccgggtacagacaccacacgataccggactgcttctagcggactcgcggaacatcagaatccagggccgccgattctggcggatccaaactgaggcaaggtgacctccaacctgatgattgacgcgtaggccacgctcctgctaatacctctgggcgctccatcgcttggaccccaccggcgaagacattcttatcaccgaacttcacgtcatactataccattccaatatcgacctctaccagtgtagccaaaaggacctcacggggtcgctttttgacgttagaggaactttaatgcccaattgcacttcatcgtgatgaaccgattcacactgataatctggtggatgatctcttaagtg

SEQ ID NO: 137426 - DNA, 222 bp, Zea mays
  unsure (1)..(222): unsure at all n locations
  Clone ID: MRT4577_5680C.1
gggggggggggnnnnnannnaaacgaaaccccaggcagggggananacaganganacngancaaacgancncnacccnnaaaanccccnncagcnaaagnacaaaccagncacnccncagcccncgcncccnncagaccaaacangcagggcaagcngcccgaancngnacccnccaganagaaaaacaacacacacaaacnganccagaaaggaaccnaag

SEQ ID NO: 137427 - DNA, 307 bp, Zea mays
  Clone ID: MRT4577_56810C.1
atttttattttttatatttcaaccaatataaaatcagcagggttaaaaataataccaaactatacttatttatccatttttcttggtaaaggcatcaacacacaaattgtgaattctacaaaatatattaataatataggcaagcaacaaaagcacggtgcgaagaaaaagtattgcaaataattgacaaaataagacggtgaatactttgcacatggggacgtacagggtctaataagggtgatccaaaaccgactatgaggctgtataatataacgttttttcctagataagaccaagagggtaa

SEQ ID NO: 137428 - DNA, 268 bp, Zea mays
  Clone ID: MRT4577_56811C.1
tgcgaggcccgtactcactcgaattcgcctcagccattggagcagttcttcaattgcacttgtgctggctgccgcctctggtccattgcagactcggatggccttgactgtcaacagtgacttctgctagtgcttagctgcatgcatcaagcactcctggatgtctggttctgaactagctgctatctagatgtgacactgtcagaatttgagatgaattcaactcctagatggggcatgacacaactactaccagacttcatctact

SEQ ID NO: 137429 - DNA, 152 bp, Zea mays
  Clone ID: MRT4577_56812C.1
aaacccaccggtttttggttattttaattattaaaaaacttgcccctgcctttgaatgcttatgaacatacgggtgactgggggggacaaccctaataattcctgaaccctcaattgggttcaataaaagatacccaacagtgtaaaaacca

SEQ ID NO: 137430 - DNA, 420 bp, Zea mays
  Clone ID: MRT4577_56813C.1
gggggggggggttttttttttttttttttttttttttttttttttttttttttttttttttttttttttttttttttttttttttttttctaaaaaggagccggggaaggggggttaatggggattaacgggcttcaacagggaacaaacggggggggggggggaccccgcaggcccagttacaaagaaaaccccaaacctgagggggaaaagcacaaccctgggagaaacattaagtattaaaaggtaaaaggggcaaaaacaaaccccccacattttattaccccaaaaacaagctttactacatccaaaaaaaaaaccggggtatcccgggccttaaggggggtccctgggggaagggggggttgtaaaccaaaaccactttccacccatttggatcggccccgggggcggccccgg

SEQ ID NO: 137431 - DNA, 497 bp, Zea mays
  unsure (1)..(497): unsure at all n locations
  Clone ID: MRT4577_56814C.1
ccaagcgccggacggccaggaggcgcgagacacacggcgacgacgacgcacgccggcccgacggaggggaacgacagcgaggagacagcaagcgaggccgagcggacccgagccgcggcaggacnaccaaccgagggaggagggggcgcacaacaagcgaaaagcgcagcccggagagcgcgaggcacgcgcgcggggccagaggcaaaggcgcccgcgagcgcacccacgacgcgacgacgaagaccagcgccaaacaagcagcgcgcgcccggcgcgcgcacgccacgaaccgcgcgcacaaagagcgaaacccacgagcccgagngaccgaagacgagccgagacccgcgcgggagcgcacggaacaccaacacccgcgaggaacaagggggccagcagggcaaaagaaacgcccaaagcgcgaccagagacggcaacaaggaccgcgacgnganccacgcgcncgagcacagcccgagggcccacgngcagga

SEQ ID NO: 137432 - DNA, 583 bp, Zea mays
  unsure (1)..(583): unsure at all n locations
  Clone ID: MRT4577_56815C.1
gcggcacgaggncgaaggggggggggggggnagnagaggacggcagcaagcgggagagcgagaggncgagaagangaagagcagcactcngnnggcganccnagnncnccaggcccnncnggncncngcggccgnggccaaaggacctgcagggccgacgacnaanaagcgggncggggncggcgagtttttttttttnncnggcgngnggaccngcgacgaccnccncaccaagggcgccgccacccgcaccaacngcgnccccgngnccacggacaagggcaccaccaagnacaggngccgcgacaaacaccccgaaaaccgcggcngcaagaaccacnagacncanccacagcggcacagccgangganccccccangcnccnccgnccgnccgccnngcnanaagcaggcaggcagcccaccaaaagcnagcncnngcngnnggnnngcangnnnganngggngncccnncccagncgagaaggaannaaaaaaanggcaggcgcaaanaaaaaaaaaaaaagaaaagagaaaaagaaggaaaaaaaaaaaaaaaaaaaaaccccgagggggggcccgg

SEQ ID NO: 137433 - DNA, 166 bp, Zea mays
  Clone ID: MRT4577_56817C.1
tttcttttctccaaagatgactccaataggggtggtcatcttactaacatgggggggtacaaatctctcatttctcacattgtccgtcacgttttgaagccagtattcttattacatatataagtaagcttacgatttttttactatcattgaataccttatcttt

SEQ ID NO: 137434 - DNA, 993 bp, Zea mays
  Clone ID: MRT4577_56818C.1
ccggccggggttcttccaatctccttcctattcctctgttagggtagccagtagctaacagctaggtcctgctctgctggtacgctgtcatcctggatctaccgcgcgtcatcctccttgcctaggcgtagcgctcgggcggaaccgagctgcggccttaagcatcgacaccgtcctcgacttccccaccagtacctacagtgaaggccgaccagattgaagtgaagcgccaacgccgacctgtagatctcgcctccaccgccgctagtgccctccatcccctgtccgcgagtctcggcaaccaaatctgagttttgaagctttgaaccccagggcggttactgttgtcgtagaccccatatagagtgtgaaggggaaagtagttattgatgtattccgcctaattaatcctcagaccatgatgcttggccaggagccacggcagacgacatcaaaggtcgggcacctaaataactcatcgattcaggctcttatccatgggctgaacagacactactaatttgcaatcaattaccgcaaaaatgagctcgagaagaaaatgttgttgaacttgcacaaaaagaaatggatagatgggctaattttgaagaggtttgacactcactcaaaaaaccaacgagcaaactgtccaggttccatccgtcttgtatgggaatgaccattgagcaagccaaaaaattacatgtgctcggattgtgctaaagaaaatggtgcaaagagaccctcaaactcatacccagtttcaccaaactctgattctaagatatggacctcggtggtttttccacgttaggaaaccgctggaagagtcttttctactcagttttatgataacagtggtgttatggtcaaacaaagtcttgcgtgtatgtaccaacagctaaactgtaaacacgacattaccatagttgattacatgaataatcatcttttatatccgattgtaaaaaaaaccgcggttgtcctctaaaa

SEQ ID NO: 137435 - DNA, 705 bp, Zea mays
  Clone ID: MRT4577_56819C.1
tttgtgcttcagttgcacaaggtaccaccccagggaggacagctaaagggcccttaccttcttaagttagctcttaaggaagctattgatgaagggatggatgtgatttatcaaaagttcagtgtttatgttggtcgaggcgtggaccttctcgtcagggacctcgcattgatcaaggagcagaccaagggtactgattttgttcaggcttggtgttcccgccttgcccatcagtggcttaacaaaggtttcataaattttgtggataaatcgtggacgattctcccgtatgttgccggcgtgtacctgttcgtcctctttgtgaagacccttgttgagagtggcataccaccctgggaataccctgattttctcaacttctaccgcgtttatgggctcacctcggccatcgccttctaccaggatgaaaagaagaaaaaggaggaggcggcggctgctggcgagaagtagagttctccatctgtctgtactgctcgaaccaagttgaagtccgatgtcagttttcggttggtgccttgcgcagaacctttttgctgaatgtttggtgccttgggcaaagtcttctttagtgggaacttggttgatagcttttggctgaatgtttggtgcctagcagtaactaatctagattgcgagctcggttgctggagtgtttttgataaaaaaaaaaaaaaaaaaggcccc

SEQ ID NO: 137436 - DNA, 1341 bp, Zea mays
  Clone ID: MRT4577_5681C.1
tggtgggctctcttggctgggccggcacccctcgtcccgtcccttcgaccacgtattcacgggcacgagctcgagccctcgtaccctccttcccttcctcgcgcgcggtcctccgatcgaactgccggacccgagcggaggagagcagggccctcccgagggccctcccgcgcggcgaccccgtggcgttcctgcgaggctgctgctcgttcgggtcggcggggcggaagcggcccaaggcctcgcccttgccctccccaccgcgcctgtccgccgctgcagcggcagcggacgacggggccaagatgaagggcctcttcaagaccaagccgcggacgcccgtcgacatcgtgcggcagacgcgtgagtgcctcgtccacctcgacctccactcgggctcccggagcggcgacgccaagcgcgacgagaagatgacggagctaagcaaaaatatcagggatatgaagtctatcctttacggcaatggtgaatcagagcctgtaactgaagcatgtgtgcaactgacccaagaattcttcagggagaacactttacggctattaatcatacatcttccaaaactaaatttggagactaggaaagatgctactcaagttgttgcaaacttgcaaagacaacaagtatcctcaaagatagttgcatctgagtacctagagtcaaataaagatctcttggacattttaattttagggtatgagaatatggacattgctttacattatggtgctatgttgagggaatgtattcgccaccaaagcattgcaaggtatgttttagagtccgaacatatgaagatgttcttcgactatatacagcttccaaattttgacatagcttctgatgcttctgctacctttaaggaactattgacaagacataaagcaaccgttgctgaatttctctccaacaattatgattggttttttgaagaattcaactctaggttgctgtcatcaaccaacttgatagcttgcctttttgcgccgctcctcagccatcctctccatctcggtgtcacacactccgcatacgcacctacgagagtcgagtgacagcgagcgagcgagcgagcgaagccatggctctccgcaccctggcatcgaagaacgccctatccttcgcgctcggcggcgcggcccggccgtcggcggcgtccgcgaggggggtgacgacggtcgcgctccccgacctctcctacgacttcggcgcgctggagccggccatctcgggggagatcatgcgcctgcaccaccagaagcaccacgccacctacgtcgccaactacaacaaggcgctgagcagctcaacgctgccgtcgcc

SEQ ID NO: 137437 - DNA, 339 bp, Zea mays
  Clone ID: MRT4577_56820C.1
cctattttttcgacgatgcttatgaccaagttttgcgggtatggcgcatgaatgaaatgtacatgcatcaaataacctgttcgagggttaacttggaacattgggaatgtgataatcagcagaagttaatttggatgagtcaaggcctacaagttgagctggtactagatagagcacatcctttagatcaagagttctttaattggggtggggataaaaagcatgaaccgtgggggacaaacgctgcctagcatggtgcaggtgaccaacctttaatggcatcggcttcatatgagggaggtggattagacgcttgatgatcgcctttatggaagtgaa

SEQ ID NO: 137438 - DNA, 400 bp, Zea mays
  Clone ID: MRT4577_56821C.1
gagggcaaccaaattttcatttcgtcctcgacagggaataccaattcaaccggaaaggaactacataacacttagcagttcatactacaagcacgcccatcacaagacacgaggcgtccaaagcaaaacaatgcaacaccccatcgaccgacccatctaatccaagtcgagacaaattaacacatgacatggccgcagcaggccaacacatccttattgctcttcttcttcttcatgatcttcttcttcttcattaccaccgaccttcaggcgccgagcttgaatcagcagcagcccgcctcgccaaatcccaattcggagagcttgaggtgtgcctcagcgtagtcagcaaagaacgcatcctcatccgcagcatatttgtccacaagtgggcggaagg

SEQ ID NO: 137439 - DNA, 119 bp, Zea mays
  Clone ID: MRT4577_56822C.1
gcacggacccggacggaccggccggaccgacccacgcgtccttgcggacccccaaacacgcacctcaaacgggcacacacggagccgagcggcgagcacacactgcgcggacacgaaaa

SEQ ID NO: 137440 - DNA, 341 bp, Zea mays
  Clone ID: MRT4577_56823C.1
tccatagggcgattgggtttctacaaggcggcgggataaaaagaattaccccgattagccgtgatgctttgctaccgccgccagatacaggcggagagagaacactcgaggtagtggctgatgaaggcagggccggcagcggacatcgaattcgcctgcgtggtcgacaacgctcctctgagaacttctcgtgaccacgaatggcgagaactagaaacactaccgccacaatccccgtgaacccaaggctcgcaaatgtctgcccagcacgcgtggcaagaagtgcatgccccacatagattgagcaaagagcgaactgagcaacttcaagatgcatcctg

SEQ ID NO: 137441 - DNA, 395 bp, Zea mays
  unsure (1)..(395): unsure at all n locations
  Clone ID: MRT4577_56824C.1
acgggtgtctgatatcacaagaatttatcaactctcatgagactgttaatttacaaagcagcagataacatagaggcattgagcaccaaaaaaacgcgaaacgtacccgcttgttttttttctttttttttttaacagagcaaacaacacaaactcttttctgggtgtggatctctagcccccagngccctttttctacaaaacattttcaatatttggaacaccccttatcttctcatatttaaatataaaaaagggcaatggaaagcctcatttgactacatccagaaccaggctacgggacttcaagactgaccacctcaggcggcggtagcacgcggcgcgacaaagcgctagtgatagtacaaagatccatgacagtcctatcaaatttc

SEQ ID NO: 137442 - DNA, 471 bp, Zea mays
  unsure (1)..(471): unsure at all n locations
  Clone ID: MRT4577_56825C.1
ggccaataaacacattatgggggatttcaagcaataaacaaatgcccataaaacgggtcattattgtcactgggggtttttccaaggaataggggcgngtccccaaactttgtacaggtgttgccgagagagaacagcatcaacttttggtcttcaaagattgggggggccgggatccaaaggggggggcaaaacttggtttgcccataaacccggggagaacccacttcaaattgcacagcatgtcctttaaagccttgggcccgttttcatttttattgaaactaagggcgagcggggggctcccttctttggcaccctcaatcttggggggaagcttcagggatttttcagggggaacattgttctgcttatccaaacttntgggaaactcaacaaacttttgcgggccagtaaaaaaccatggcctggctttggcaaatcgggtggccccaaacaaattcccgggac

SEQ ID NO: 137443 - DNA, 478 bp, Zea mays
  Clone ID: MRT4577_56826C.1
gcgctgtaatcagccacgtgtagttgctgatcgtgccagcggatgaggaggaggaggcgactacacctgcgtgggtggccgtggtggctccttcttcggcagcggctatggccctgctggctctgacgtcctcactggtgactggtactgctcatgccgcgcacacaacttcgccagccgatgcagctgctttaagtgctccgcctacaaagaggaggccgctgcgaacagaggcgctggcggttttgacggctacataacacgctcacggagctacagcttacgcaacggtgctgctggagcttgagctggcagtgaccgtactaccaagcgcaccggttggaagtaccgaaactggatctgcaccagattccggatgtagcgagcacaatattttacagcatgatggagtggttcatgtgccaacgcaccggggactttggtagcgctgtcattacctaggaaaactacttgcact

SEQ ID NO: 137444 - DNA, 422 bp, Zea mays
  Clone ID: MRT4577_56827C.1
gtttgagattggatccacctgatgcatgccgatgcatctatccattactagggtggcatcctgatactactttggcggagactcacagggccgtccctaaatagcatccattctgctttagcgcagggtgcacggcaactcgttctatagaaggcaaaggcttcgcacgttgctacgcatagtgctatcgctgagatacacatcgattttattgtatgcgaatctacccatggtgtgaaagttagttatcttaagacacgcggagacacaatacatgtccatatccgtccaccagggtggtgcttacctagcattatgggatggtaacttgctagtcagttttctcgtagatatatgtaatactacttaaataatccttatttctttaatttcttagctctatagctaggaacatgttttta

SEQ ID NO: 137445 - DNA, 438 bp, Zea mays
  unsure (1)..(438): unsure at all n locations
  Clone ID: MRT4577_56828C.1
actggatgtgccaatagaaggttgtgacctgtttgtttaaaccgaaaattaggccatgggcttatttagtgaaccatgccccaaatttgaatttaccattatccctctacgactaaactcatgtaaatgaatgtttagataatttctttgttggacataaaatgtacccaagcttaaaccaagaatctcaaaccatgtctccttctagaaccattcccttgttcagttgatgcaggttgaggtctctattgtatttggcctctccttgcggattgcattgttgctttatcaacccaacctgngaaagtcatgcctgatcattttccttaatttggtgtcattgatttcttcatatctattgaaggcataccaacttcatcttgtgattgttttcctctgtatctaatcggatactaatccttgaccttgtaatctctg

SEQ ID NO: 137446 - DNA, 2540 bp, Zea mays
  Clone ID: MRT4577_56829C.1
aattcggcacgccgctcgcgtcggtcacgccaggcctgacgcgagcacatcgcaatcctagccaccaaaacatgcccggcggcaagcgccgccgcgcacgcaaccccaccgccggcgggcctcagcgtagcgccggcgcaggtcgtcgtcgtcccgtccccgagctcccgtcttttgtctcccccgcttctgtcgccgccgccttctcccccgcctcgggcggccgcagccgcgggcggtgcgcccggcgttgcggcgcctactccgatggcgagtcctcccacgccgtcccctttagctatccttccctccgctcctgctccgcttatccggagcgtgatcaggcgcaggcactggaggtgaccatcgacaccgcaccctgcgccgacccagccgcttccgtcccgatgtactcgtacggccccgccgtgctcggtgagaccgggcttgtgctgagtgcggacgaggaggaggcctgtgatagagggctgcatctcgggttaggattccgggatggaggacacgatgagatggagctcaaattgaaagagctgacagaggaagatgtctccttcaagacgcccaagcggaagcaggagcagagggcgaaggccaacccaggatttttgttgattgggggagtcaggatttacacggaggacatctcatcatcagaatcggatcggatgagcagctctgatgtggatttagagcccaactcaggtgatggggagagatttgagaatgatgatggtgacagtgacgaggaagataggcaaggcgaggagagagattcaatatctgatagcgagtcattaggatcggaatcagatgaagatttgagcaccggggattcttcttcagttgacaatgaggttgttgctgattacatggagggtattggtgggagtgacgagctgttgagcagtaagtggatcactagtatgaatttgggtgatgcagatactatagagcagatgtatacaaatgacaatgatgggtttgtgaagaaggggaaggaaaagcttgagggttatgcactaatgactgcatccgagcagtatgggatgaagaggcggaactcccttgagcagcggaagggaaaaggaatggtttgtgacagggatttgtcaagcatgcaagtgatggaccaggaagatatgttcatggtgaacaatgtctggatgccaaacaggtcaagaaaggggatgaagacaggatcatcatcctctcagctctcacagtcgtggcctaaagatgataggaaaagcaaaaactatcagagcaggccaggtgaaaagaagcagcataggaaggaactcattgcaaagaagcgtcaacaacgagctctaagcagaggagttgacttagggcaaattaatagtaaattgaggaaaatggttgtggatcaggttgacatgttatgttttcatccaatgcactctcgagactgttctcaggtacaacgccttgcatctatttatcaattgaagagcgggtgtcaaggttctggcaagaagagatttgtaactgtgacattgactgggcactcttccttgccatctgcagatggccaagttcgacttgaaaagcttttggggactgaatctgagaactctgtctcgagctctaaaggcccagcacgactgaagggccattctgctccaggaaagtgtgtaaaacactgggaatccagtggaaataaatctaccaagaaacaggtctccttcgcagagcgtccagtatcttttgtcaagtgtggaaccattgtggactcccttactgaggcaatagctggcccaagtggtggtgatacctcgtgtgttaaacctgttgaaagtaactccacccatctaggctcctttgaggtgcacaccaagggctttggttcaaagatgatggccaaaatgggattcatcgagggcactggccttggtaaagatggccaaggtatagtgcagccgatacaagccgtgcatcgtcccaaatctcttggactaggtgtagaatttgacagtgtggctgaggcgatcaaagcaagggcagaacccatcaaattaatttcagagctgaggcggaatgtgtgggcaccagagacgagtggcgttggctcctttgagaaacacaccaagggttttggctccaaaatgatggtgaatatggggtttgtcccagggtccggactggggaaggatggccagggcattgccacccccttgaccggagtaaggcgaccgaaatcacggggactgggagccgaggacaaatattagcttacaccattttcgcatttgatgtatctttcttgtcgtgttccttgttacatgcggattacatagtttgctgggagggcgaacctttgagcaccctgaatggtgaaacaatgggttttcacttgtttctttcaacttctcaatgaagttttatatatttgttctatcaagggttatatttgtttcatttttctatggccccttgattcgttattcgcttcggggcattttttttttgtcctaaaataataattaaaaaataggggg

SEQ ID NO: 137447 - DNA, 1644 bp, Zea mays
  Clone ID: MRT4577_5682C.1
cattgggtacctcgagccggccgggaaaaaaatacccaattgcttgcttccatcgtcctcgtcgcctcgtcggcgtaaccccattccttgttacgtcgctcgtcatcgtcggctcatcgccgtgccgatggcggacgccgccgacaacagcatggcgctggtgcactcaagcctggcagactccgtgctgacgtcgccgcggacgttgaggcaggggcagaagtgggaggtggagtatgcgcgctacttcggtacgccgcggcgggaccccaccgcggctccaccatcagggctccgctacatcatgcggggcgtccaccgccaccagggaacctggatccccgcctcatgccccgcttccctttgcgtctgccaccctagcctcccctccgcggtccccgtcctcaccatctccatcggcgacgtcgtcttcgaggagcactttgtgtcgattctcaacttctcttggcctcaggttacttgtgtgacgcagtgccccatcagaggtagcagggtggtattcgtgagcttctgtgataagtttaaacagatccagaagtttgctgtacgtttcccacagccctgtgacgcagattcgttcttaagttgtgtggaatgctcatgcggaagcagcggaaccatggacatcataccatttggaaatgattatgtgtgtgaagattcatcagcatctgaatatattgcttctaatggacttcatcacaggctggatgatgcttcaaaccttgaggagcaatgttctgatcacacaatagatgaaccaccaatgaactaccacgaggaaacagaccagcctgttcttgaacctctcagtgctagcaacactagtaacaactctgctttccctcctagtttcaaccaaatgctgaaaaattgttcaattgattatgaccaagaggaaccctgtccattggctgcatcaaaccatgtccttcaagaggtgtatgtgctgatacttctcatgctgttgccaatgaagaaaggactgctggtaaaggaatggatgctgctgaaggagttgatgccagtatattaacatatgacctaatggcacggataaagacatatatggctgatgaatcctttaatgatatgttgctcaagcttgataaagccattgatgaacttggtggtgacatgtcgctgtagatagcaaaacctcttctgcggtgaaggaatgcaggcgtgcttcgtggcaccctacagcacatttctcaaaagttcagattgtgaagcaacagtatagttacatatggttatacatagtagatagatagtgtctatatagattacgtgcaaagataaaaattcagtactatccactgctttttgccaataatttacaatacatgcaaagttcaaaatacagacattttgcaaccatgctcatgtttatctagatgattaaacagtagcaggttctttcattgctaaatgcttggcaacaggtgatcacacatcgaaagaactgcctcaaagagtactcccaactatatccaagctgctgtaagtacccttgttgatgcacatgcacctttatgtaacggaaaagtatggtccttacagctacggtggatggaaaatcggaaagtgggtaaattcctttgctatagtgttaataat

SEQ ID NO: 137448 - DNA, 313 bp, Zea mays
  unsure (1)..(313): unsure at all n locations
  Clone ID: MRT4577_56830C.1
aattacaaacgaggcatacgattgcattgcgagccagacaaaaaacgactgcgtggcgcggtcgccgaccataatgatcccattgcgcttcttgagagctctgccgacgagttctattcttcccctctatctccggatatacccctgggggcaccactgacacaaattctccagatatggcaaggacaaggattcagaaggaactcatggatctgcaaaaggacccaccgacatcatgcagtgcagggtctgctggagaggatctattccactggcaggccacaatcatggggtctagtgacagnccctatgc

SEQ ID NO: 137449 - DNA, 188 bp, Zea mays
  Clone ID: MRT4577_56831C.1
ttcgcaatgttgaagtgagaaactcaattgttttttttttgtcccgaatctcccatgctaccaggggggaaaagacaaaaaccaaaagaccatgatggcataacaatccacacgggaaatctgtaatttaagcgggagaagcctgcacggacgacactaagaataactgtgaacagaatagcctctca

SEQ ID NO: 137450 - DNA, 292 bp, Zea mays
  Clone ID: MRT4577_56832C.1
ggtaccactcgagctcgtccggggatcgtgacgtcacccccggatcccaacacccctctcgttggcgaacgactccgggctccactgtcgctctcgctcccttccctcccacgcaatggtggccgatcgcctcgcgcctcgcgctgctagctctccgcgtgcctctgctccgcagtgggcgcacccacgcctcgagccgaccatccgcctgccgtccgagcgcgcggcggccgacgaaacggatgacgacgccgtcaggacccggtgggccgtgctcatcgccggctccaac

SEQ ID NO: 137451 - DNA, 543 bp, Zea mays
  Clone ID: MRT4577_56833C.1
gcccgcctacgggggaagttgagcgctgcggtatggccaccgttcctctggtgacccccacaacacggtgtgagttctcatctacaccaacatgcttactggaagtgcatggcgaagcacaggtataccgggacgaaaggaacacgtaaacatttacctattactaaggcactactgtgcaaagaagaaatccacactgatagacatgactcagagaagtacactggaagagactaatactacaataagaagtggagtccatgatcttattggagaactacgcctacatcatgcgcgacagagcaaacagagaatacgagaacaacctggctgaaatacgacgactagaacattgaggacgccatatacacagacatcaactggctggacaactacctgctcgacaaaaatgcacaaggttgattacaatataatcgaggtggaagagcctttgatacccaattatcttcgagagtaccaacgagtcgggtgctcagtctggggaagctacatacctgttgactaagacgcttcctattgaaa

SEQ ID NO: 137452 - DNA, 211 bp, Zea mays
  Clone ID: MRT4577_56834C.1
aagactcagcatccttagcacacactttcattttgagatggcaatgctatggtcacaggtgcggacttaccttatcaggatcaggagtctgtgcaattctaccctacagacatccatggttctgaaatcctgagcactgaacgttctggtggtgaaagtggtatcctcagaaatagcgaatgtgaacagaacacggaacgatcctgctttt

SEQ ID NO: 137453 - DNA, 517 bp, Zea mays
  Clone ID: MRT4577_56835C.1
gaataacgaaaacatacgcgtcacatgcttagggagaagtcacactttcataattccaaaagccccacctatgactttgaaattatattgcccccaagtgcccgtggcaaggaaaggtactagcccctaacgccatacactaatcagaccgggaggcgctgatggggccccatgctaatgtaaccagcagcacacggctagggcgaagctctctaatcaccacaaagccaccgggccggacgcccaacccggccagctaatggcactagcggatcacctgcttaagggtctagccgctcagccctaccacctagggccaccacgtcgttccggcccaaggcccaactaccagccttctaactgctacaactgaaatatacccgtctgaccactggactacctgagctaggtgcaccaaacttgccctccaatgactgctgcggacgggagggacaacgcactcattccaatcaccagacactaacgcgcccagcattgccatttattggcacccaca

SEQ ID NO: 137454 - DNA, 246 bp, Zea mays
  Clone ID: MRT4577_56836C.1
tgctcttataccaacctttgacgttgatcactcgcacccgccacggggacaagccatggtcgttgtgctgtgcctgtcaaaggctaaccgaaagcgagctgtctcgaaacgcaaagcctgaaatacagaatgggtcaggacagaacataaaccgttccaagaggcatttgatggcttgagaagtatcgaggcggtctttagttcaaatcagaattaccgtagtagagatggggtgctcaaccacgt

SEQ ID NO: 137455 - DNA, 584 bp, Zea mays
  unsure (1)..(584): unsure at all n locations
  Clone ID: MRT4577_56837C.1
attgggtacctcgaggccggccgggggattnatgcgcccccgcccctcgtcgctgacctgtgtggacactgcacccctgcttccccgcccgggtgctgctcgcctgcgcgaacgctaattttattaagtgtttgctgctactaagagcgtccacaaaccgactagngaaatgagaatgaaagctcatatctgtggatgcggcctaaaccgatggtgacacctgccgcagacaagccggattatgtagacactcctagaggtttgggcggacctcctctatacagagatttgcgtgatccctcacgtcgacgacgactatccgtatgtggctatggacactgagtttgcggtatatgtgcgtccatgggtctggacttacgagtgcgcgggacgaggtcaactacgcctctcttagagctaacgtgagaatgctgatactgattccgctcaggttcaccttgtccctcaagtgtggagcattgccgcagctaggcccccatcttcctccctgcgatctgaaggatatctgtcgaggatctgctgctcacactgatgcgggtgtagcggactccatctatcttcta

SEQ ID NO: 137456 - DNA, 237 bp, Zea mays
  Clone ID: MRT4577_56838C.1
cccactcgtacgagcacatttcgcagcaactgaatgctatgtgcggcctgcattaggcgactgcatgccattactctgctgccggcggtgtacaccaccgcacaaactatgggcatgattatagccgttgactagctagcttgtctagtaaaagaacggcgaagattgagtaataatgtgtcacgcatcaccatgggtggcagtgttagtgtgagcaatgacctctttgatcaattg

SEQ ID NO: 137457 - DNA, 1071 bp, Zea mays
  Clone ID: MRT4577_56839C.1
tgggtacctcgaggccggccgggccggaataagccttcgttaccacgcgggtgctatcgagtcttgggtaatttttcttcgcttgcggcctctcgaatctgacccatttccacggttcgcgtgcgccgttgccgcggatctgcgtgcttgtggcatcgggttccgtggatctagttgcgcggagatggggctcacgttcacgaagctgttcaggcggctattcgccaagaaggagatgaggattctcatggtcggtctcgatgcagctggtaagaccaccatcctctacaagctcaagctcggcgagatcgtcaccaccatccccaccattggatttaacgttgaaactgtcgagtacaagaacattagtttcactgtttgggatgtcggtggtcaggacaagatccggcccctgtggaggcactacttccagaacacccagggcctcatttttgttgtagacagcaacgacagagagcgtgttgttgaggccagagatgagctccaccggatgctgaatgaggacgagctccgtgatgctgtgcttttggtgtttgcaaacaagcaagatctgcctaatgccatgaacgctgctgaaatcaccgataagcttggcctgcactccctgcgccagcggcactggtacatccagagcacatgtgctacctctggtgagggtttgtatgaggggcttgactggctttcgaacaacatcgctaacaaggctcgaagcatctaggcaaggcttcaatcagtggaagcaaactgcctctaccattacagctatgaagtatatagtcgtgattgtgtcagacgtggtgtgtttttgggagataaaaggctcttttggtcgaggagctaggtatcagatgttttttatggtacctgtaattttccgtgcttctgttttggttttgtgcaaggtataccatgtctgactgtgtgctcgccactgtctgagtcgttgtactatcccgggccggcctgtccggcttttttttggcatagcagatgctttcagttttgaactgctagaaagtcggttttaaaaaaaaatgttttttaatcccc

SEQ ID NO: 137458 - DNA, 197 bp, Zea mays
  Clone ID: MRT4577_5683C.1
ataccaaatcgctagcctacactttatattttattaagcccactcgcccccacaagggaggtgttggttttcctatagggcctgccaataccaactcactccccatccattcatacaaacggcactggaaacacactgccatttcctatcttaaatccatcgacacacatgcatttttcaccttctgatgaaataac

SEQ ID NO: 137459 - DNA, 1703 bp, Zea mays
  Clone ID: MRT4577_56840C.1
cttcgttaccacgcgggtgctatcgaatcttgggtagtttttcttcgcttgcggcctctcgaatctgacccatttccacggttcgcgtgcgccgttgccgcggatctgcgtgcttgtggcatcgggttccgtggatctagttgcgcctcccccctccacgcggcctcgcgcggatgcctcggcctctctacttccgtccgcaccgcactatccaagtccgcaccgcacccacattcttaaaaacttgttaaattcatatttaaggacctttacataactgctctaagttccattgatacgtttcatcgattttcggaggaatttattcgaggaatctagtgtttgaccggctccgctcgattctgcttcgttaccacgcgggtgctatcgaatcttggcggagatggggctcacgttcacgaagctgttcaggcggctattcgccaagaaggagatgaggattctcatggtcggtctcgatgcagctggtaagaccaccatcctctacaagctcaagctcggcgagatcgtcaccaccatccccaccattggatttaacgttgaaactgtcgagtacaagaacattagtttcactgtttgggatgtcggtggtcaggacaagatccggcccctgtggaggcactacttccagaacacccagggcctcatttttgttgtagacagcaacgacagagagcgtgttgttgaggccagagatgagctccaccggatgctgaatgaggacgagctccgtgatgctgtgcttttggtgtttgcaaacaagcaagatctgcctaatgccatgaacgctgctgaaatcaccgataagcttggcctgcactccctgcgccagcggcactggtacatccagagcacatgtgctacctctggtgagggtttgtatgaggggcttgactggctttcgaacaacatcgctaacaaggctcgaagcatctaggcaaggcttcaatcagtggaagcaaactgcctctaccattacagctatgaagtatatagtcgtgattgtgtcagacgtggtgtgtttttgggagataaaaggctcttttggtcgaggagctaggtatcagatgttttttatggtacctgtaattttccgtgcttctgttttggttttgtgcaaggtataccatgtctgactgtgtgctcgccactgtctgagtcgttgtactatcccgggccggcctgtccggctgtctcttggcatagcaaaatgatcgcctaatttgttagcacatgctaagtaatataaagagggcttcggtggtcttattgctcacgctgaattctcaactttgctcttcttttctgcggttgaggttgcatcttgtattgttggctgatttcgagcaatcagaggattgtgctacgtcgtcggaggcatcatgggatagcagctagctttcgtctttgaactgggcttcggttctaaattcgacttcacttttatccttcattaaactttttaactttgatatcgctatataaactggttgtacctttaacactatattttatctttgtaattgatggttagtgattcaagagagcattgttttttttttttgttgatcacacatgttgcgtgtgcgacgtcagctatgaactccacaaataatgtaatttttagctttggaaatcatacattttttatttatattctataaagtatacagtttttattt

SEQ ID NO: 137460 - DNA, 421 bp, Zea mays
  Clone ID: MRT4577_56841C.1
gggaggggccccggggggcggccggggccgaaaattcaccaaacaaaaaacgggatccccggaaggggggggacaactacaaccgggcggggggtaaaaaaacgggggggaaaaaaaagaaaccaaatgggggccacgggcttttttttcattttgggggagggggggtcatcccccccggggggctgaccaaagggggggtcccggcccgggaaaaaaggggggtcccctccgggtggtggcagcttcccacgttaacttcacaggttggtggttaatgaccacccaaaagggatgggtcccgggatctggtggggcccagctcgggtcaatggcccatgaaaaaaacatcccttttttgactttagaagaaaaaccctggccgggttccagaaactccaccaaggccttttgttttacc

SEQ ID NO: 137461 - DNA, 243 bp, Zea mays
  Clone ID: MRT4577_56842C.1
ttcaatctctgcgggatccggaacaatgatctttgtaaattcttctgatcctttactaaccattctattcttcgtgccattcgggtaccacctaacccatcctacttgctctcggcgtgataccaaagctgtttaccccaaaacaatctttaaggaatgaaagcaactactctaataactattcaatatttacaattcctcaggagcatatcaagtatctagacctctattatatcataacac

SEQ ID NO: 137462 - DNA, 337 bp, Zea mays
  Clone ID: MRT4577_56843C.1
atcgtcaactgtcaactattgttttaaaagaaagaccgggacattgttcgagggccaaataaaaaaaactgttgttggcgggggctaccaggaacacccctatcattgagaaactggagcgggagccgtactggttgaacaactgggcaagggccataaagaatgcctttttgatcacctgccttttgagcttgagggcatacgtgaccaggcctgactaaagcgtccatggcttcggtttaagctttattttggcagggatcttaaactcctccaaccgtgcttgcttaccaggctttaccaaagattggaggacttatttgactgccccttggtt

SEQ ID NO: 137463 - DNA, 621 bp, Zea mays
  Clone ID: MRT4577_56844C.1
tactttcttggacttatctgatgctaaccaactctccacaattctctcatctcaatcttattctctagccttatcccagctaatcttaatcttattctctagccttatcccagcttggctgttgcctctcgctccctatgatgcccatgacagaagccaatctgacatcgagccctgggcgtattcccttggcgtttgtgggtccaacgtcaggctaggagcagtattatatggcgcaacaccaaaatctttggttggaaaagctacagttgcattgctcacatgagcattaatcgcttcaagtttcatggacaaaaactctacttgacgctgtaaagactggatgtaatttattatctcatcaaggactgatgctttcccgataaccttgttgcatccagggacaatatcttgaagaactttcatccgttcacttatcttctctcgtcgtgctctttctgcgaggctatggctgtccgttgcttgacctcttctagccctcacatggatgtagtcttttggtggctctttaggtgcaggctttttatcagcagacttgctagcgttccctgaatttgtttcagcttctgtccttctgtcatttttttcactaggtgtaga

SEQ ID NO: 137464 - DNA, 516 bp, Zea mays
  Clone ID: MRT4577_56845C.1
gatcgtgttaagtgcgacaatcacatctgatgtgaagatattatgaaatcccgagtgactattgaagatagatagacgatgtgcaacatattcgaagaaagaggtgcacctattagatgtccatcgcatatcactcttagaagatcatgtacaatattcacgacgagtcattacatctctttcatctttttgatagagggggtgacgtttcggtgcttagatcgcttatcatatagcatagagcctcatacatgttcctccttaattactatcaccatagtggctacttaggtccccatactagtcaatcctcatataggatattactgcatgcaaagaactgcacgctgaggcaaccctgagtggatccacttaccggtaagagatcaccgagcactgccaggagagcttgctgcacggcctgaacgcgtggatgagctgttccgtgtttacaaactatctacactcaggatggacttaaatacgggagcattctaccagacaacttataaccct

SEQ ID NO: 137465 - DNA, 454 bp, Zea mays
  Clone ID: MRT4577_56846C.1
aaacctcggaattcggctcgagaagaccaatgacaaatcaaccccatttttttttcgtcactgccaagaaacccaagtgcgaggtcaaaaactaccaaacccacctcccaccctctctagctacgataccaccataccacacgtctcttaaacaagaataggaataacacccacaagacaccgacggcctcatgccacccagcacaagatcccccttcctcgccaagaagtacgaatcgggcgccaccactcaagccgtcgcgcccaggccgcccaacgacaacatgcacgtccccaccttcgcctacaccaatgacctcctgaaaaccaccaaaaccatcgcgccgccggaccagtgcatactgcccaacaacaagaccaacgcgacgagctgtaaaccggtggcgcccatcacactggagaacaccaaagccaaccggaaagcgcaccccac

SEQ ID NO: 137466 - DNA, 1237 bp, Zea mays
  Clone ID: MRT4577_56847C.1
ggccaagggcgacacgctgtacaccggctcggacagcaagaacatccgcgtctggcgcaagcagaaggactcgggagggttcaagtcctcgagcggcctcgtgaaggcgatcgtcatgtccggcgagcgcatcttcacgggccaccaggacggcaagatcagggtgtggaaggtgtcggccaagaacggcatgcacaagcgcgtcggcagcctgccccgcctgcgcgacttcctgcgcggctcgctgaacccgtccaactacgtggaggtgcgcaagaaccggtcggcgctgtggatccggcacagcgacgccgtgtcgtgcctgagcccgacggacccggcgcaggggctgctctactccggctcgtgggaccgcaccttcaaggtgtggcgcatcagcgactccaagtgcctcgagtcggtggtggcgcacgacgacaacgtcaactccgtcgtggcggcgttcgacgggctggtgttcacgggctcggccgacggcacggtcaaggtgtggcggcgcgagcagcaggggaagggcaccaagcacacggccgtgcagacgctgctgaagcaggagcacgcggtgaacgcgctcgccgtgagcgccgtcgcgcccgtgctctactgcggctcctccgacggcctggtcaacttctgggagggcgaccgccacctcgtccacggcggcgtcatgcgcggccacaagaaggccgtgttctgcctcgccgcggccggcgcgctactgcttagcggctccgccgacaacaccatcttcgtgtggcgccgcgactgcggggtgcactcgtgcctctcggtcctcacgggccacaccgagcccatcaggtgcatcgccgtcgtcgaggacaacggcgagaacagcagcgagtccaacgccggtgactccgctgccggaggggggtcgtcggcgtcgcggtggatcgtgtacaccggcagcctcgacaagtcgatcaaggtgtggcgcgtgaccgacgaggcgccggacccgctgttccacggctccggcgatgcgccccagatattcgaccggtatcccggcgacgccttcgggaccagtggctcgacgacgtcgttccgctaagacgatttgtctgatcgatcacatgcagcgaaattacacgtcgtctcacttcacaagaaaacgtcttgggaggactaaattatactctaaatacatatacatataccacgtccatatatacactgttggaaatggctg

SEQ ID NO: 137467 - DNA, 353 bp, Zea mays
  Clone ID: MRT4577_56848C.1
aaatatatttcttctttaacaaaaaacaaataaaatataaaaaaaaaaactaaaacaaaaaagagggggaaataactaaaaaaggggggggaaaataatatttatctcctactatactaatcacttatatgctttcttcatcatcacttctgtataccatcaagatcctgaacttcatcaactttcacctcatcaacccttttcattgtcactgtcattaaggaacacctcctcgtttctatattcatacccaacatttatatccacattgtcagtcttttacacccttcactttctttttgcagctttttgctatgtctagttttctcccatttgctttacctttaaacata

SEQ ID NO: 137468 - DNA, 321 bp, Zea mays
  Clone ID: MRT4577_56849C.1
ttttgagtttaccctactattttatgcagttaaggggattggggttctttatggactgcaaaaactagaaacaatgggcgcgaaaggccatgaatacgcctgttgtacgggcaccgaactcattttggttaacaagtagcatcaaaggggctcattgaaaaggggagatgtgatccgcgggttaaccggaggaaaagatgattttcaggtgacgggcataggcattaatgggatacacgctgtgcgtccgcttgccggagggggttaagcctagggacggcatgtaaacatggtgaaagcggcagcgtgtgacaaattgtt

SEQ ID NO: 137469 - DNA, 372 bp, Zea mays
  Clone ID: MRT4577_5684C.1
tccccgaaagacccactacccctggattcgacgacagaccttaccagcgacttatggtaccatacctcggccctcacatatgacccgtacaagctgctgtagaacaccctctgctacctgccgcactgccagtaggacctgctctgccccaaggcacatcttcatcccgaacaagcgctcgacgcgagccatttcctcatcacgcccttctggtacaccgccggccagtagaaggtcctctccaagaccaccaccgtcttccccatcgagatcatacctcatgagctgctacgagatgcaccgctgcgctgatcccatgagactacggaaagaccgataccgactacttcttccccatcaagaagctctcgg

SEQ ID NO: 137470 - DNA, 543 bp, Zea mays
  Clone ID: MRT4577_56850C.1
ccttctgacttccttcacagtcgccgtctactttcaacgattcacgtgaccccatccttttccgattcaaagctcgtgctctcgttccatactctcgataatctagatccttcgcccgaagctgcagacagagatcaccgatcgacatatggaccccaacaacaagtcgtcggaccccgtcgccgataaactcgcgacggcgcctctgaggaacgcgtacttgaggaccgccttctacgccgcgaatgcttaacacgtgagtgacgacttccctgaggattagcatatgatggtgacatcaggacatttctctaggtcaaaatgcaatggatgcacaaatctccacagccgcgcctacttactgggtagatattcttgatcattcgagtgacccatcagaatactcgctgtactctgtctcgtacgtgatctatcggcgatgtggtatatctacagcagcaaatttacggaaggaagcagacgatgagctatgtacggatctagccggaacgacaacgcggactgatcatgactaccatgagg

SEQ ID NO: 137471 - DNA, 558 bp, Zea mays
  Clone ID: MRT4577_56851C.1
tcggagcccggtaccgacgcccaccacgtcgtggtcgggttgcgcactttgtagcacgccggcgggtggaggtcaggaggctcgtgcccccgggcgcgggctaggaggacgagaccgtcgcagtcgtccaagatcacgttgtgtagccccttggcgtcggggtgcagctccgccatcccggagacgttgacgaaccgccgcatggtctccttccgctccaggaccatggcgttggggcgtgtgagacgcgagctctcggtgtcgccgtcgccgtccacgcggcagaggaaccccgccacggtctgtgcgaacagctggcggtggagcgggtctgtgacgaggccgcaccagaccttggagacgcacttgaagcggtggagggagttggcggggaggatgctgaacatctcgatgagctgagatgtcatgttcgagatcagtttgttcttgcagctgcagacaacttgtcgattcgttgcttgaggagcagccatggacagaagaaaccgaccagctctgttgataattttggttttcttgggactctctttatgaagt

SEQ ID NO: 137472 - DNA, 571 bp, Zea mays
  unsure (1)..(571): unsure at all n locations
  Clone ID: MRT4577_56852C.1
aactctgctaccgcantctctgctgccgttgccgctgcccttcagctcgcntaaagccagcccaatcccctcccccctcccctcccctcccctctctcccccacgcccacaccaaacggcagcagcagaggcagagagatttgacaagaatcggggagggacctccgaggagcagagcggagccaagaaagaagctcggagggagccggaggaggaggaggaaggagaagatgcacggcggcgggtcgaagatgctgggggtggtgaacttcatcacgttcctggcgtcgatcccggtgctggggggcggcatctggctggcgtcgcgggccaactccacggactgcatccgcttcatgcagtggcccggcatcatcatcggcctcgccgtcatggtcgtctccctcatgggcttcgccggcgcctgctaccggcagacctggctgctccgcatctacctcttcgacatgttcttcatcgtcgtgggcctgctctccttcatcgtcttcgccttcaccgccaccgtaccgcggggagggccaggcggtcatgaaccggcgcttcctcgagt

SEQ ID NO: 137473 - DNA, 196 bp, Zea mays
  Clone ID: MRT4577_56853C.1
ctctctttggattggctgatgagtggtgggagcagggggttgatagaaaacatccagacacacatataagcaagtggccgtgctacctttttagagaataaagaaacagactaatgagtttatatgcaatgccttcattaggtaccaccggcacttacaaaatgtgcggactgaatccagagaacactggcagatt

SEQ ID NO: 137474 - DNA, 192 bp, Zea mays
  Clone ID: MRT4577_56854C.1
ccggcccggaattaatctcccggcttcacaacctcacaatacggcccccgccctcttactttttcattcggggttctttaaaaaaatttggcgggccaaaactcaattcactgtccataagcatacaactcctcagactgggaaaacaacacacaaaacccaaccacattcaccccttcaacacaaaccccc

SEQ ID NO: 137475 - DNA, 285 bp, Zea mays
  unsure (1)..(285): unsure at all n locations
  Clone ID: MRT4577_56855C.1
ccggccgggaaaagactcctgtgagccgcgagcgcgacacgagcgcacacgtccactcttctacgccgcgagagtgctatggatgagtcccggcgccggtactgccaagaagcgtctcggcgttggcgccggcggggggttcgcgctcgggtgcggctgcagggacgcaaggccggtggcggtggcggtggcatcgtcgtccgtatcaccctactctgccgccaccagcgccacggagacgacgacatcgacggcgacgaccgcgacgtggcgcagggncgagga

SEQ ID NO: 137476 - DNA, 438 bp, Zea mays
  unsure (1)..(438): unsure at all n locations
  Clone ID: MRT4577_56856C.1
gccggccgggttcggtatcagttgtganacacctcccttatagatgactggaataattggtcttgtagttgtaggtctatgtgagtccttcagaccttgcccttgggttcaagacagtaggctgtaggcagcagctccaagcttgacgccctgccctggatctggtaggaaaggatgaactatcatcctaaaagcagggcacttgccgtacatgtgtcttggagtacgtttctttgtggttttctgcagctcaatgatgacaccgtgaaagccgacgaagaagcaacacaagtttggtaactctggaagtggacctgtggaaggtgtcgtggacgctggctgtttccatatctaagtactcgtgcctgggtgaatcattctcgtatgaaagatatttactagtacttccttcaaaaaaaaaaaaaaaaaaggccccta

SEQ ID NO: 137477 - DNA, 2101 bp, Zea mays
  Clone ID: MRT4577_56857C.1
atgcagccgcaggtggccgccgtgttcttcgtgtccgcggcgtgcacggtagcgctggccgccctgctggccgtgctgcgcatgcggccgccgtggtggtgcgcgtgccccgtgtgcgaggcgtacctgacggcgtcgtgggccggcgacttcgacaacctctgcgactggtacgcccacctgctgcggacctcgccggcgcagaccgtccacgtgcacgtgctccggaacgtgctcacggccaacccggccaccgtcgaccacatgctgcgcgcccgcttcgacaactaccccaagggcgccccgttctcggccatcctcgccgacttcctcggccgcgggatcttcaacgtggacggggacgcctggctgttccagcgcaagctcgcggcggccgagctggcgtcgccggcgctgcgcgccttcgcggtgcgcgtggtggcgtccgagctgcggggccggctcatccccctgctccgctctgctgcctgtgcctccggccgcgagggtggaggaggaggaggaggaggcagggtcctggacctgcaggacgtgttccgccgcttcgccttcgactgcatctgcaagatctccttcggcctcgaccctggctgcctgcagctgtcgatgccggtgtcctcgttcgaggacgccttcgacacggcctccacgctctccgccaggcgcgccaccgcgcccatgcacgtcgtctggaagctgaagcgcctgctcaacttgggggacgagaggaggctccgggacgcggtgcacctcgtggacgcgctcgccgcggaggtgatccggcagcggcgcaagctcgggggcgccgccagctcgggcagcgacctcctgtcgcgcttcatggggtccatcgacgacgacaagtacctccgcgacatcgtggtcagcttcatgctggccggccgcgacaccgtggcctcggcgctgaccgccttcttcctgctcctctccgaccacccggaggtcgcggccgccatccgggacgaggccgcccgcgtcgccggcgacgacgacgacggcgacggcgacgacgggcggctcacggactccgccttcggcaagctcaagggcatgcactacgtgcacgcggcgctgtacgagagcatgcggctgttcccgccggtgcagttcgactccaagttcgcggcgggcgacgacacgctcccggacggcacggcggtggcgaagggcacgcgggtgacctaccacgcctacgccatggggcggatggagtccgtgtggggccccgactgcggcgagttccggcccgagcggtggctccgggacgggcgcttcgtgcccgagagcccgtacaggtaccccgtgttccaggccggcgcgcgcgtgtgcgtgggcaaggagctggccctggtggagatgaaggccgtcatcgtctccgtcgtgcagggcttcgacatcgaggcggtcagccgtagctcccaccggccaaagttcgcgccagggctcaccgccacgttcgccgggggcgtgcccgtcagagtgcgacggcgagctcgtgccagcgacgagctccgaccgccaagttaacgtcaccggccacggcacgcacgtcgtattgttcccattcgaaacagagcaagcgtccgttggactagacgcgtgacgccgcgatctatgcgttagagtattcgcgaatcgcgacgacggcacagtttggcgagtgcggtgggttcttggcctccactggagtctgaagattcctccgataaggtcagatggcccagcggacgggattagtctaatccgatgcccgacggtactagttctcgcacatgcataattacaaggggaagggggcggctcaaagtcgcctctgcatgtcagcatgtgtgctattctttccaactttcaaagcagaactgtcgaaaagaaaacttggcagattcaaagttgcagaatgcaggctcgtctagatgttctagcttcctctcttgggcattttctatgagagaacttcaattattgcaacaagatggtcgtgcagccaattagaaaaatgaaattcatattctttattccaaaaaaaaaaaaaaaaaactcgagaaggggccgcggtacc

SEQ ID NO: 137478 - DNA, 256 bp, Zea mays
  Clone ID: MRT4577_56858C.1
tccactcttacttacacctacactgttctagttctctctcacattctaagcacctgagtgtaatgagaatattctaaatgtaccatctttctactaaaccatggcaattgctcttaaacatacatatagttttatgcactagcagacgatttacatacaactaaacaaattacataattttaactaaaccaaaaacggtgcccctgtttatactatccaaacttactctcactaccttacaaacatcataccaatt

SEQ ID NO: 137479 - DNA, 645 bp, Zea mays
  unsure (1)..(645): unsure at all n locations
  Clone ID: MRT4577_56859C.1
cactttttttttttttttttttttttggtgggttttttttttttttttttatccttttttttttgtttttccttcctccttcccttagcaccaccatttccttccctcaacccagcggctaccctttttccctccggttagttgcagggggggggggggcacttattttttttttcaccgcctactctcagcaacaaaaacttctgccacttaaccaaatggccgcccccccaccccgntgcnttatttgcagcaagcaaaaacctactacccatttagcccagntagctcgaagcaaaaccgtgcttccccttctttgaaacaagcaacaggttggctgcccttttctaaccagccaagtttgcgggctaaaaaccccgcaaacccttcgttacaaactaacaaacaaanttggttggcccctttgtgcncccaaacttnggcgtttctgaacaggaacccaagccgggccttccttaaccaaccaaccacattcaatttgggtggggtggccccttcctttttaagaattggctttaaattaagcttggtaaatttcgaaataactaaaaggttttttttgggaatggaaggtaatggtgggcccaaaccccagaaaaaaaagaaaggttaccaagttttccc

SEQ ID NO: 137480 - DNA, 784 bp, Zea mays
  Clone ID: MRT4577_5685C.1
attgggtacctcgaggccggccgggatccttatctgccgcacccctttcggccttcttcctcccccacctcttgctcgcgtcccagctcccaacaccagtacaccacgcgccggctgcgagcgatgcccgcgatcccaacggcccccgccccctgccccgtgcgcttcctcctcgcccgccgccacagcctccacgtctcctacccgtcgccttgctctaaccaccagcggcaaaccccgccgcgcttcacgccgccatgtccccgcgaagcccgcccctgcgcccgcctcatccccacgatttggcagcgccaccggcacgtaccgacgtacgcccccctgccctgcctgtgatgcctgatgccctcccccactccgagagcgccgcccaggaaccaccccaccgccgcggtgacaccagatcaaggaccaggttgtcgcgtgatcccgtggagccctctggcagaccacgcgcaaagtaggaaggaaggggaggaccaactcagatctagcgctgcaggctactcgtgtccatggatctgcgccctctgatactgttggccgtcgtggagctgttgtggcacaatgggagcgtcgtagcagccccaggcgctccacaggccggcgtcgccctccgaccgcgaccacccgggcaccagcggcctcactgctgaggagaccgccgcgtggttcccggacaccctcgacgacccgcgggggcgtcggagggcatgctgatggcgcgcgaccagaggagtctcgtcgtgcgccccctccaacccgc

SEQ ID NO: 137481 - DNA, 464 bp, Zea mays
  Clone ID: MRT4577_56860C.1
ggccaaaaacaatgccctcaacaataaacctttgccaaggggaaaaacaaacaaattttttggcgcagcaaccaaccccttctttaaacaaaggcttttttttcaaaaaaaattgccccgctgaaaaacaaaggggaaactttatgccccaaaaatttttgggggcccccgtccccccccctttcggatatttcccagggtttggagatctaaatctccatccaaaaaaaattgtgggaaaaatcccccccttccacagaaaattaaatttttcccaaagaaagggaaaaattctccccaatcccctttggaaaggcccgggaaccccccctggttttggtggcaaaaaaatttttccatttaaaccccccccggacccgccttttttcccaaaaaaaaggactggggcttggtaaagccaaaagcccccccccccccttttggccaaaaaatttccccccccc

SEQ ID NO: 137482 - DNA, 1031 bp, Zea mays
  unsure (1)..(1031): unsure at all n locations
  Clone ID: MRT4577_56861C.1
aattcggcacgagtgataaggttcgtgggtgcgtcgccactcgccaccctcacgtctcccgagtggactcccgcctccttccttccgtcccttcccggctcaccgcccttcgcctcaccccgcgcctcctccctgtcccccctccagaactgtcccccaccgcctcgagatgctcgcggcccccgccgcgctccacctcctcctcccggcgccgccgctgccgcccccgcactaccaccaccaccacgtcgccttccccgcgccgccgctccacgcctcgctcccgtgctcacgccgcccgcggaggaggccgcccaggcatggggtcgccagggcctccgccgcagtggcggaggaggccagcagctccggaccggccaagttctccgtgaggatccccgtcggcgaccgcgagatattggtggaaacgggccacattgggaggcaagcgagcgcttctgtaatggtcactgatggcgaaacgattctctactgttctgtctgtctgtcggatactccaaacgacccttctgactttttccctttatcggttcactatcaagagcgcctttcagctgctggaagaactagtggcggtttcttcaaacgagaaggcaagacaaaagaccatgaggttttggtttgcagattgatagacaggcccctacgacctactatgcctaagggtttctactttgaaactcagattctatcctgggtcttcagttatgatggcattcactccccagactgcttggctatcacagctgctggtatagccgtggccctctctgaaattccaaataaacaaacaattgctggagtaagaattggcctaattaacaaccagtttattgttaacccaactactgaacagatggagaattcagagttagatttgatgatggctgggactgatagtgccattttgatgattganggctactgtgattttctgactgangagaagctgcttgaagctgtcgaagctgggcaggtggcaattagagaaatctgcanagcaattgatg

SEQ ID NO: 137483 - DNA, 834 bp, Zea mays
  Clone ID: MRT4577_56862C.1
atccccagatttgtgagcaggaaatcgaagtactccagctcgaagtctaggcgaagaagcagagcaagcaatcatcaatggagaagggcacgcctgcgctcggttgggccgcgagagacgagtccggtctcctctccccttacagcttctcgcgaagggtccagaaggacgacgatgtgacgatcaaggtgctcttctgcgggatctgccacactgacctccacatcgccaagaacgagtggggcaacgccctctaccccatcgttccagggcatgagatcgttggcgtcgtcaccgacgtcggccctggcgtcgagagcttcaaggccggggacacggtgggcgtgggctacttcatcgactcctgccgctcgtgcgacacctgcagcaaggggtacgagaactactgctccaccctcgtgctcacctccaacggcgtggactacgacggcgctaccacccaggggggtttctccgacgtgctcgtcgtcaatcaggactacgtcctccgcgtcccggagagcctgtctctcgccggggcggcgccgctgctctgcgccggcgtcacggtgtacagcccgatgatgcagtacggcctcaacgcgccggggaagcacctcggcgtcgtcggcctcgggggcctcggccacatggccgtcaagttcggcaaggcgttcaggatgaccgtcaccgtaatcagctcgtcgccgaggaagcgcgaggaggcgctcgagcgcctcggcgccgacgcgttcttggtcagccaggacgccgagcaaatgaaggctgcggcggccacgatggacgaatcatcgacacggtgtcggcggggca

SEQ ID NO: 137484 - DNA, 184 bp, Zea mays
  Clone ID: MRT4577_56863C.1
gccattgacaccaggtcaggtgtcgaagagtaggatttttaaaatgggccggcctcacggaaagacttctatcaaacctgtggtcacaactgacagatattattcttgacagtacccatctttgccaaacacaaaccataatcttaaacaatctagaaacatggttccccccacaaaactttac

SEQ ID NO: 137485 - DNA, 266 bp, Zea mays
  Clone ID: MRT4577_56864C.1
taggctccaaaaatccaaagccgtcccttaccaaccctcccttcgatccctggggcggcggccgggaccatgacgaccggatccaacggcgacggaggcggcgcggggtcctggtacccgcagcgccgcccgaactacgggtacggcggagggtacgcctactttcacggctgctgctcgtgcctcttccagctgctcaccttcctggcgctactcgctctggccgaagcgcttagctacgcgctcctggcgaagacccgcaaacc

SEQ ID NO: 137486 - DNA, 329 bp, Zea mays
  unsure (1)..(329): unsure at all n locations
  Clone ID: MRT4577_56865C.1
acaaaaaaaacatcttacaccaaaaagaataggcattccatacattatactttgctctctttaataccacagatgcttccccctcgataccacataataacatacctatgtccatcaaaatctaccnacaattgcgggggggacacaccctatnactatcatacacaaancttacaaaacccnacacttaaccaatcaatctcatcccactatannctcactnaattatctcatattttccaanacctnnatttacaaaanataaaccantccaaactttantattcccacttcttaacctccataccatcannnncnctcccttctac

SEQ ID NO: 137487 - DNA, 443 bp, Zea mays
  Clone ID: MRT4577_56866C.1
aaaacaagcccccttttttaaccaaaggggcctttttgttcttttcccccaattgtcttacctcaaaacctagggggggaaaacctttttttttcccggaaaaaatcctcgcctctttcccaaaaaacaagggggggcccgttttttcaccttaaaatacccccccccttttagggggggggggtttttaaaaccaaactttttccttgttttgggttttgcccaaaagaaaaaaacaaactggtcaggggcttttactaaccccaaccttttttttgagggcatggaaaaaggccttaaatttaaacacccaatttttattttgtcccttggaaaagtttcagggccttttccttaaaaaaaatattttcaaaaatatcatgtcatcatgccagcgggcccggatgaacaaaaaccttggccctttgccctaaaagcttttt

SEQ ID NO: 137488 - DNA, 544 bp, Zea mays
  Clone ID: MRT4577_56867C.1
aaaaaaaaaaggcccaaagggccaaaaaatccggggggaaaaaacaacccccacccaaatgccctttgtttgggggaaaaaaaatcgaccccctttgcacaaaattaaagggggcccctcccctcaaaaggggccccgggggagggcccaaaaaaaagttcaaaagggaaaagcggggaaaattttttttttcccccccccccccttaaaaacgggcaaaaggactccttcactttcccctaaaaaaaaattactgggcccagttgtccaaaagggggttaatttttacagcgaccaaaattggggggcttcccctgccccttttcccctttttgggccttaaggtaaacaagcccataatttttggggaacaaaccggccccccccttttgaatatagtttccccccaaaaaaaaaatttttggaaaaccctaattttttggggcccccctttttgcaggttaaaaaatccagagggggggggcttaacaaacaaaattaaattgggaaggggggggctaaaactaaaaataggtctccaaaa

SEQ ID NO: 137489 - DNA, 383 bp, Zea mays
  Clone ID: MRT4577_56868C.1
ctgagaaaaagaaagtgttgattctaggagtatcagcctcaacaatgacgtcaccgctgaagcctggaacttatacagaggaccactcgaccgagaatttatgcctcagctaccagtgctacatacttcatcagctcaatgctgctccccgcaacacaatggcactcagcacagcttgtcagaacactacattgacctcctaccataacttcaattgatccccgaaaacgacgacctctccttgttgttcgaacatacttggtgtaattggactcgctccttcaggttcagaaagctctgaccccgagtcctgatgtccgcccggataatattgcatgcttgggtaccgggtcctcctacagcccagatttcgccgcaagagg

SEQ ID NO: 137490 - DNA, 555 bp, Zea mays
  Clone ID: MRT4577_56869C.1
cccaaacctctgcagaaaacggacagtctttacctaaatgtggcatagtttcctatgataagttgcaaagtcagcaaattggactgcaaggccatccccgtttttgtaggttgttcgcagtcagaattctgttatgcaacatggtccatgcgaaaaaacgacattttggctcaatgctcgccttccctataggagaaaatttgattttacaaaaattcattatgaactgaattttgtatgcactacttgaactgtaactctcatctgttgtccacctctataaaatagtatcgtcgagatcattaaattcatgagtactattgataccttgccagagggagatggattcttttatttcttcctcttgtgtgtaaagagatcaaaagtgcatccaacattgtttgtaagggcttggtacacattggcgagaatgatgaagcgatctgtgcggccagccgccagccctccacgggcgcgagaacggcgtcaggatcaggcaggcaggtgtcgccctcttcagtccggcagtaaaagagagaagactctccctttcca

SEQ ID NO: 137491 - DNA, 618 bp, Zea mays
  Clone ID: MRT4577_5686C.1
cacagcatagtggttcagggaccaattcgagctggagctgcgcgcgccatgggcgatagccgggagagctcgagcaactccagaaatggatacacccaccacatgctgtccgtgcacgagcaagctgcggcgggcagaggccatcgccatgagcgagcagggcgcgcgacgcgcggcggccatggcgagccgacagagggtgtcgcgagctggagagagagatggagggagggagagaggaaaccgcgaccatggactaggaaataggagggcgccgagcaccagagagatgggacgcgccggccatggaacaggggcaacgccggcgagctgaagagggcgtggtccgtgcgggaatcgggcgcgcaggagcaagcttggttgggctggagcacgacgaccagacgctgtgagaaggagaccgagctcggcgttgaggactggggcgagctggagggagctccggccggcgtgggagctggaggctgagcagagcagcgacaacacgaaaaatcagaggaagacgaacccacccgcgactggagatggaggttgcggctaggagcgcggcatggggaagccgccatggaaagggacctcgctgggctggatggatgc

SEQ ID NO: 137492 - DNA, 322 bp, Zea mays
  unsure (1)..(322): unsure at all n locations
  Clone ID: MRT4577_56870C.1
ggagactggggcgagcgagcgtcctgagcgcaaagtagcgtgagtgagtgtcnntgcaagcgagagaggagnagcaccgaatggggttcatcgctgctttctaattactgggttttatggagatatgtgattaattagggttccatgggacgtactatgctgtgttctgggatacagactatgttccatatagtgaacttggggtagtgttgggagactntattttttccaaaagatttctattttccccaaggagaaaaagactaattttctttggaaaaatgagaaaaacttagaaaaatggggggnggaaactaggcct

SEQ ID NO: 137493 - DNA, 576 bp, Zea mays
  Clone ID: MRT4577_56871C.1
atgagcaaatattctaaaagtgtactgagcaggtaaacatgactggacataaaatccaaccggttgagcagctaggccgagacgattaccattccaggtcgaaattgttccatctcatctcgttacgtgttcattcatcatactagtcaaacgtcaaaggttcaatcttttattgttgcagcaatgtagtactctgctccttacacagagcacccctgatgacagattttttcagaatatggattctgactgcacatcagcatggcaggatctacccatctaatcagaaacggaacacgactttaagcaaattcatggtcatggagacggaagcacagcatcactcgacctatgcttcgatccgcatgttccaggtcatggtgaagctcttcccgagcggcaatgccagcccgccgatctccaccatgacgccgttcttactatcctcgacgccttcttccccctgcagcttcgcgttgccacctgctgcgaagtaagggctcgacgtcgcgacggcggtggcgtccgtgccgtccacctggatggcaaggtccttgccggtaccctccagaccca

SEQ ID NO: 137494 - DNA, 2507 bp, Zea mays
  unsure (1)..(2507): unsure at all n locations
  Clone ID: MRT4577_56872C.1
gcggcgtcgcgcacgccgtgctgctgctcaacagcaatggcatggatgtgttctacaggggcacgtcgctgacctacaaggtcatcggaggtcttctcgacttctacttcttctcgggcccgacgccgttggccatagtggatcagtacacgtcgatgatcggccgtcccgcgcccatgccttactgggcattcgggttccaccaatgtaggtgggggtacaagaacctttcagtggtagagagcgttgtggaaggttaccgtaatgcccagataccgctggacgtgatctggaacgatgacgaccacatggatgccgctaaggacttcacacttgacccggtcaactacccacgccccaaactgctggcgttccttgacaagatccatgcgcaaggcatgaagtacatcgtcctcatcgaccctggcattgccgtgaacagctcctatggcgtctaccagcgtggcatggaacgtgacatctttatcaagctggacgggcagccatacctcgcccaggtgtggcctggccccgtctacttcccggacttcctcaacccgaacggtgtgtcgtggtggatcgatgaggtgcggaggtttcatgatctggtcccggtggatggcctctggattgacatgaacgaggcctccaacttctgcacgggcaagtgcacgattccgaagacgcaccagtgccctattcctgacaccaagacaccatggctctgttgcttggattgcaagaaccttacaaacacgaggtgggatgagccgccgtacaagatcaacgcctccgggcagactgcccgtctcggcttcaacaccatcgcaaccagcgctacacactacaacggcatcctggagtacaatgcgcacagtctgtatggcttctcgcaggccattgccacgcatacggcgctgcaagggctgcaggggaagaggccgttcatcctgacccgctccacgttcgtcgggtcgggggcgtatgccgcgcactggaccggagacaacaagggcacgtgggaaaatctccgttactcgatctcaaccatgctcaactttggcatcttcggcatgcccatggttggctctgacatctgcggtttctacccgtcgccgactgaggagctctgcaacaggtggattgagctcggggccttctaccccttctccagggaccatgccaacttcgcgtcaccgaggcaggagctgtatgtctgggactccgtggcgaagtctgctcggaacgcgctcggcatgcggtacaagctgctcccctacctgtacacgctcaactaccaggcgcacctgaccggggcccccgtggcgcggccggtgttcttctccttccccgacttcacgccgtgctacgggctgagcacgcagttcctgctcggtcccggcgtcatggtgtccccggtcctcgagcagggcgccacttcggtgagcgccatgttcccgccgggcacctggtacaacctgttcgacatgagtaaggtggtggtgtccaggagcggggccccagtgaagctggacgcgccgctgaacgagatcaacgtgcacgtgtaccagaacacgatcctgccgatgcagcgcggcgggttcgtctccaaggacgcccgggcgacgccgttcacgctcgtggtcgcgttcccgttcggggcgacgcaggccgacgcggagggcgcggtgtacgtggacgacgacgagcgcccggagatggtgctcgcggaagggcaggcgtcgtacgtgcgcttccacgcgagcgtgcgcggtaaggccgtgacggtgcggtcggaggtgctgatgggaagctacagcctgcacaaggggctggtcgtcgagaagctctcggtgctgggtctggagggtaccggcaaggaccttgccatccaggtggacggcacggacgccaccgccgtcgcgacgtcgagcccttacttcgcagcaggtggcaacgcgaagctgcagggggaagaaggcgtcgaggatagtaagaacggcgtcatggtggagatcggcgggctggcattgccgctcgggaagagcttcaccatgacatggaacatgcggatcgaagcataggtcgagtgatgctgtgcttccgtctccatgaatttgcttaaagtcgtgttccgtttctgatttagatgggtagatcctgccatgctgatgtgcagtcagaatccatattctgaaaaatctgtcatcagggggtgctctgtgcaaggagcagagtacaacattgctgcaacaataaaagattgaatctttgacgtttgactagtgcaaaaaaaaaaattgctgcaaaaaaaaaaaaaaaaaaaaaaaaaaaaaaaaaaaaaaaaaaaaaaaaaaaaaagaaccaaaaaaaaaaaaaaaaaaaaaaaaaaaaaaaanaaaaannnccccagggggggcccccggcccaaaacggccctaatggaaagaaatttacccgccccccattggccggtttttaaaaagggggatatgggaaaaaccggg

SEQ ID NO: 137495 - DNA, 344 bp, Zea mays
  Clone ID: MRT4577_56873C.1
gggggaaaaacagggcggggttttttttaaaaaaattaacccccccaaatttcccttccaaagggccccaaaaggccaaaccccctttggccccgccaaggttatgccggggccccccgcccctttttggtcaggggtccccgggaaagccaaaaaccccctcacattttcccggggggggaccaagggctgggtctaggtttccccccaaaagggccttagggggggtttagggcccaagggggcccccaaaaaccggggccaattggaagaaaccgggggaaaaagaaccaatttgggtctcaaaccctttaaaaccccgggagacaagggccaaattgggg

SEQ ID NO: 137496 - DNA, 261 bp, Zea mays
  Clone ID: MRT4577_56874C.1
cgtcttattatatccggtcagcctttcaggcgctcaccccgcgtgggaccccgacccgcccccgctgtctgttggtcccctttgccgcgtgtgcgttggccggtggttccgatgagggggttgctgcgtggagccgtgccggcgtctctcgctcgccttggctaacggggccgggactggtgccgcataacagttctccttggcaggaccgatttcacacctccctgctttactgattttccccgtgcgctgtcaattatc

SEQ ID NO: 137497 - DNA, 392 bp, Zea mays
  Clone ID: MRT4577_56875C.1
ggctgcaaaagtctctttatataacaatctcctacatcacatttgcttatggtttacatgtatggttacagtgaacaatgaactgctacatataaaaccagtatcaatttgtgaaccttaaaatatgtaaaggaacatataaaaatcttgatactgtaataactatctaaccagcgacgtcccctcagaaggattgctgctctttcatggatctggacaccgagcggtaccgcccactcccaatcgcgcggggccgtttcctcccagaccgctgcggcgtcgaagccgcagcagcagcagccttcttctcctcggacttcacggcagccgcgacgaccaccgtcgccttcatttggccgcgtgctcggccgccttcacggttccatggggga

SEQ ID NO: 137498 - DNA, 545 bp, Zea mays
  unsure (1)..(545): unsure at all n locations
  Clone ID: MRT4577_56876C.1
ggccgcttttttttttttttttttggctgcaaaagtctctttatattaacaatctcctancatcacatttgcttatggtttacatgtatggttacagtgaacaatgaactgctacatataaaaccagtatcaatttgtgaaccttaaaatatgtaaaggaacatataaaaatcttgatactgtaataactatctaaccagcgacgtcccctcagaaggattgctgctctttcatggatcttaataatctgatcctttgaggcagtctgcacccagttcccattttgattccacttcacactaccattcttttttggtttgtgtaaccaggctgcctatgctatgcctggccggagcagtggccaccactgtcgtcggatgaggagaagagggttccagttgcggtgtgggtctcttggccgaggagaagagggtcctcgggcggttctggctcccacctgtccccgtcaatccgcagtcaagtcggcaatcccagtccatgcaaacaccgcttctttctcttgcgtgcgcggtctgcggtgtggc

SEQ ID NO: 137499 - DNA, 867 bp, Zea mays
  unsure (1)..(867): unsure at all n locations
  Clone ID: MRT4577_56877C.1
atatgagccgatgttctcaagttcatggagggctnnccaattgatgcttctacagggatgttgactgagaaaggcgtaatgnatggcacnaatcattcnnttctcgaagccctgtgcatcccccccaaccccaagcagnaacacagnatgcgaagagagtgaggagnntaaaggctaacatttggctttcagaaaagatctgcgaggagtgcccttcatgtgataccaaacctagcanatatcccaaacaantcaaaatttcagtgtcattttagctgttagntccagctacaagggtcacagctggtcacaccggtttgtcatgacaacagtatgagcctcaccactttgtgaggtttaatcaaattcaaccaggatcacatggttttgtgcaggggaaaccaaagattccaggagtccagggttaggaactaatgatcaaacaagaatacttgacaatgggagagtcaagaaatcaggataaacagaaggtgacgtatctacaaatcagatttgctccaactccaagtatgttttgtttctttgagtgctgatgtgcaacaatcattgatggcttctttctgataattgatcagctacaattgtcccttaagatcacagcattccttcatcgcctgagtgatcagcatgctctgttcaatgcacatgaaattctgcttctgaaattgtaattttctgcagcaaccttacatacacaataggatgataggatacttagtttgttcaatatgtttgtcctttgcaaaaaaatttaaaaaatgaatggtacactgaattatgggcctctttgaaagaacgtctgctgctgtagacattatagattgttttcctttaaaaaaacacacc

SEQ ID NO: 137500 - DNA, 1426 bp, Zea mays
  Clone ID: MRT4577_56878C.1
ggcaattgggttcctcgaggccggccggggcccgctgtccacttccctctcatcctctcgacctcgcttcctccctcccaccgtgccctgccttttcctcacgacctcgccgccacgctcgcgtctcgccgctgattgcggtcccccatggaaccgtcgtcctctcaatccgtccgccgctccatcgtcttcctgtatttgtgctgctgatatgtgtaacttgtgtttctccaggtgaaggcggccgagcacgcggccgagatggaggcgacggtggtcgtcgcggctgccgtggaggccgaggaggaggaggctgctgctgctgcggcttcgacgccgcagcggtctgggaggaaacggccccgcgcgattgggagtgggcggtaccgctcggtgtccaggtgtttctcccaatctcccctgctttcctcatcctgctgccgcttttgcttttaatcgctgtgacagcatagcacccgcctcgtctcgctgccggctgccgctggtgatcctgctccctgtggcattggccctagccagcaggcaggcagtcggccagggacggatggacggagacgacggatggaagccgcagccactagccagccacaccgcagaccgcgcacgcaagagaaagaagcggtgtttgcatggactgggattgccgacttgactgcggattgacggggacaggtgggagccagaaccgcccgaggaccctcttctcctcggccaagagacccacaccgcaactggaaccctcttctcctcatccgacgacagtggtggccactgctccggccaggcatagcataggcagcctggttacacaaaccaaaaaaggtatcccatacccacgctactgcctacacctacgaaacctgcttatcctgctgcaatttctgctaaattcgtggctaaattcaaagaatggtagtgtgaagtggaatcaaaatgggaactgggtgcagactgcctcaaaggatcagattattaaggtccgtggcttgtgctttttatttttctatcttcttcaaagaattttcggattacagtgtgcactctataaccagaattctatactatctatggagatggcctaatccatcctataaccaggatcgataagtttgttttttgatgccagtaaattattgattttggtccatttgctaattcattttgcaactgtatgacattagatccatgaaagagcagcaatccttctgaggggacgtcgctggttagatagttattacagtatcaagatttttatatgttcctttacatattttaaggttcacaaattgatactggttttatatgtagcagttcattgttcactgtaaccatacatgtaaaccataagcaaatgtgatgtaggagattgttatataaagagacttttgcagccactttgatgttt

SEQ ID NO: 137501 - DNA, 418 bp, Zea mays
  Clone ID: MRT4577_56879C.1
gaaggacgctacacccagcacgggttttgcactgagagccagacactggccggctcaccttttaggggctggggtttaatcatcacgtacatgacgggcatctataccgtagcgtatctaaagaactgtaacctcgtcctggaacacacgcagatgcactgtctaaccacgtgaaggatttgtaataaacgcatgttgccccagacagaactcatctgctaatgaatgaataccgtataccctagtttttcgaaatcttaatcgaaatgcttgcactctatgttacacaggtaatggagcaagaggcagatggatggttccaggcatcgactaatatgtaagcacccattaggtgccatcttgtaagcggtaaacaggtcttttgttctgttaaatctagatctaactgtattgttat

SEQ ID NO: 137502 - DNA, 348 bp, Zea mays
  unsure (1)..(348): unsure at all n locations
  Clone ID: MRT4577_5687C.1
aagcgnggaannnggctcgagcagcactccaacncaggggatacgattgccanggccgccacaacaaccggcgccnagaggctgtacccgccgaccgcggccgcgccccaccaggcgccgacacccggacgggcgcgcgagaagaaccgcgcggcgccggcgccggcgcggcggaccaaggcggagcgcgcggagcngagcacggcgccggggaacagcccgagcacgggcgcgacgcacaccccgagccgcaccgacaacacaacaaacagcgggagaacgaggcaaaacaagagcccgagcagaacggcaagacgcacaacaacacccacaacgagcgcgccaagg

SEQ ID NO: 137503 - DNA, 1004 bp, Zea mays
  Clone ID: MRT4577_56880C.1
gtcacggtgtagctaccacatcaccaaaggactaggcaggacaacaagtgataggactcgtcatcgaggatcgaccttcgcgcatacgagtataacatagacaatagctagctaattatgtttatcgtttggggcatcaaaatgtgtgcttataattatactatacatatatatataggtattatatataccttggtttatagggcctctatataagctttcatccaggatccccaaaatcttaggcacgaccctgctcaacgccgtcggtagggctgaatatcgagccagcttggcttactcgtttgagttcgatttggctcggctcgacttgttaagctaacgagtcacgaagtcaactcgaatgagctagagcaaaaaaatatgtatataataatcaatttctagttaattctaaattaatttaacaatagaaaatagtaattatacttatagtttcacaatccacatcaatgttactcatcactcatcaattcacacacatattcattagtttaatccacaattatattcgcatagactaatctaatacatagacatagtttatcaatcattagtttaactcataaacatagacaacatgcatacctataacatgtttattaattgttacttaaatgatatgtatatagttttgttttgttttattaaaatatgatagctcgcggattagctcatcattaaattgaccacaaatcgaatgacaagctacgaatatttcgttcagccgccctgccaccggttgcccgttgtggcggttctggcggcgctgggacggtgcgcgcaggtggcagtggcagtgcggggcggcaccgcacttgagacttggctgcaccacgctgccgccgccgccgctagcgccggctgcccgactccgtctccgagtgagcgagcggtggtgggcaccgaaaggtgggctcttctcgtggacacgggtacgccacttggtgcagtgcgtgattggttggctccactgctattac

SEQ ID NO: 137504 - DNA, 207 bp, Zea mays
  Clone ID: MRT4577_56881C.1
gccggccgggccgggacttacctggacggggtctacgagcgatcaacaaggctcgtttcctaggcctatattgcacctggtgggtgcgctggcttaccatctccccaagtgggagagtggacgtcataatttatggtagagggggtacgcgttcgcgcggcccctgcttaaacacatgccaaaaaaaaaaaaaaaaaaaggccccta

SEQ ID NO: 137505 - DNA, 583 bp, Zea mays
  Clone ID: MRT4577_56882C.1
cgccccacccgcctccgcgccgtctcgccgtccccgtccccgccctcgccctcccccgtgggctcgttcggcttcgacgcgctcaaggagaccttctccgtggacgtggcggcggccggcgcgcgcccgctccgcgtcccgctcgccgggcggttgaccatcgcgtcctcgcgcctcgccgcgctctccaacgtcgccgtgcgcgtcgagctccgcagcggcgccgtcggctggggcgaggcgcccgtgctgccctccgtcaccgccgaggaccagccggcggcgctcggcgccgcggcccgggcgtgcgccgcgctcgccgccgcccccgcggcgcccctcggcgccctgctgcaggacgttgccggtgtgctccctggacacgccttcgcctcggccagagcaggagtggagatggcgctgattgacgcggttgctaatagcattcgcatacctctgtggagattatttggaggagcatcagatagtgtgacaactgacatcacgctgctcaattggctgcaaaataccgcggacaagggtttcaaactctgaagctcaaagtcgggaagaacttgaattc

SEQ ID NO: 137506 - DNA, 389 bp, Zea mays
  unsure (1)..(389): unsure at all n locations
  Clone ID: MRT4577_56883C.1
ctcatccttaatcctctatactctaccacccttcgnccttttttttttttttttttttttggtacaggccccatcaaacgagtcttgtgttattatatatgtgacaatgaatcaaccacttcatttatattacaaacccttcctgccaaacatgactaaaaaacaatcctacacctaataataatattaaaccaataaaagagagagactttcacgctacaaaacctctgttttctcaatattacccgggtaaggcaagcaaaatggtagtgaccttattctgtttgccactaggaatgacaaaaaaaccaaaaccaagtccactggcccaaccaaccaatacacatggtggggttaccaagacatcctactctcactttgtaaatgct

SEQ ID NO: 137507 - DNA, 330 bp, Zea mays
  Clone ID: MRT4577_56884C.1
cataacacatacacacgtacaaatattataaatttaaaaaaaatctaaacataacaatagctatgttcaatataaccaaaagcatatacctttgcataatctatgctaaataacttaccatattcatcgaatcatatatagacttatacttatttcttagaaaataatgatccctcgactcaatagatatatattactcacatcattacccatatctatcagcttacacttcaaaaatagactgatctgaccattaacatatcagaacatagatcatatatctgacccatacatacttcgctgaaacaacttgtatttatgcttcatgct

SEQ ID NO: 137508 - DNA, 1786 bp, Zea mays
  unsure (1)..(1786): unsure at all n locations
  Clone ID: MRT4577_56885C.1
tcccgggnaaactgtttacaatacagtctacctgctgtcccttctgttgaggggggcacactccctagagaaacctgaacagctcctcctgcgtgaagagttggtgtgggataaagttgaaaaatagaatcggctctttgttaagcatggaaggttctttagacacatggtcgtggagtctcaatgttcctgtgcttaatagcctttcggaagacaatgaggtagaacgattctcccaggaacatcaagatgctgtagaatgctacaagcaacagaggaggaaggtttcacatttaaagaaaacaataaaggctactaggggtttcaaagaattccaaaagatcatcgacatgagaaattttacaaaagagaagattgagcgcttagaagctagatcccgtcgcttgactcgacgaataagacaaattgaaccgaccggttggaaagaatttctccagattagcaaagtcatacaagaggctagagcattggatatcaatactcaggtaatctatcctttgggtgagacggcagcggctatacgaggggaaaatgagctatggcttgctatggttcttaggaacaaggtcctcttggatctaaagccatctcaactggcagcagtttgtggaagtttagtttccgaagggatcaaacttcgtccttggaaaaatagcagctatgtatatgaaccttcttctgttgttactggtgttataagttatttagaagagcagagaaattcgctaatcgatctccaagagagacatagtgttaagataccttgcgaaatagatgcccagtttgctgggatggttgaagcctgggcttcaggactgacttggagggagataatgatggactctgcaatggacgatggagatttagcccgtctactcaggcgctctatagatttactagctcagattcccaaactgccagacattgatccggttctccaaaagaatgcacaaattgcttgcagcgtcatggaccgagtaccgattagtgagcttgccggttgaaaactcaacctgtaagtactactaacagagggtttacctggctgcttattttccaattgttatagacttatagcaggcaattctttgttgtaccatgaaaaatagttaacagttgtcacagtgaaattcaagagcagctcatatcccactgactaaacatgcttttcaaggagatcagcaactacagtgattggttcaaggaatcaacattcagaatgatgaacaagacaaatgatcacatcaaaggttcataggattattcatccaaaaaaattctatcactaccaattccagaattttcaaccacgtgaccaatcaaatggatatggagatcaaagcgcagcaacaatctctaggttttctcacggcttctagatgcctgaacaccagaaatactcagaatcagagctgcagtgtcaatggatatgactattaagggcatgttcgtttcacccccaatccatatggattgaaggagattgagtgagtttcaatccctgataaggcattgttcggttattcccatctcacatgggttggaagggattgaaaaattttaagaaggattttgacttgctatggatttaaacccacccaatctcgcccaatccacatggattgacactaaaacgaacaagtcttaagtcaaaatctctcccaatctatacaaatcccctccaattcaggtcttgttcggttattccaattacacatggattgaatgagattggaaaaaattaagaagaagtttgacttgcttg

SEQ ID NO: 137509 - DNA, 192 bp, Zea mays
  Clone ID: MRT4577_56886C.1
gatagtcgtcgtaatgccgcgacgtagctcgaattcgctcgagcggaccgaccaccatctcccatggcgcccagctcggactgcccctgctccttgatcctccagctcgctcctgtcaggttgcttgatgcgcgcgttggccgtcgacctcacttaaccctgcgtcgtcgggccagtctcgccgcactcgcc

SEQ ID NO: 137510 - DNA, 393 bp, Zea mays
  Clone ID: MRT4577_56887C.1
agcgcgaaacagtgttcgtctacacacacgattttgtattatactttaaacccttgctgcattcattgcactcggaaagttcaagcgctctgcatgcgtacacgctgaagttgaaacaacatgcatgtcgcaggtgcgtgattattcaggtcgaagtcgacacaaacaggctcaggtagccatggggttctattgccaattttgctcggattccagcgcgagggtactatgcgacgcccatcacaatggctgaaggcacccggcgttcgtctatgctccctagactaacatgtgaagatgggcccatggtcaacaaccagctggctgcagtactgcctgtacatagccgacgcgcgcgttcatatgggactggatgctcccgccgcactctag

SEQ ID NO: 137511 - DNA, 965 bp, Zea mays
  unsure (1)..(965): unsure at all n locations
  Clone ID: MRT4577_56888C.1
cccacgcgtccggagaaaagaaaaccgctccaatccggaagctgaaaatagcagaagaatccagaggcgactccaggtttgttggcgatgctgcgagcgggaggcaggcggctcctcgccccggggctccgtcggctcggcctgggcacaggcgcctccggcgaggcgggtcctgccgcggcggcggcgggcgtgagggcgtaccacgagcgggtggtggaccactacaacaacccgcggaacgtaggttccttcgacaaggacgaccccaacgtcggcactgggttggtcggcgcgccggcctgcggcgacgtcatgaagctgcagatccgcgtcgacgagaactccggcaagatcgtcgacgcctgcttcaagacttttggctgcggctccgccatagcgtcctcgtccgtcgctactgaatgggtgaagggaaaaccaatggatgaagttttgacaatcaagaacacggagatcgcgaagcacttgtcccttccaccagtaaagctccattgcagcatgcttgccgaggatgcgattaaagctgctgtaaaagactacgaagccaagaagtcaaagatggggcagaagggtgaagacagcccttcacagaaggctgctgaagcatgaaaggttctgccgtgaagtatattgtgctgatacgtttctcagtccatgactccccgccgcatattgccaaagataaatgcttctgtttgtgaggcgagggattgtgtgtaatgttcacgaactgtggtagtgcggcatgtgactcaactgttttaaggatggtgatgaccaatttcaaataaatttgctgccatcgtagaattagaagtactatgtggatttacaggagctgtttctggaatttgtagtatcatgttactttttttttcaagaatgttactgttggtattggcagacctgnggcggcaaccgacaatatagattgaagattgacg

SEQ ID NO: 137512 - DNA, 859 bp, Zea mays
  Clone ID: MRT4577_5688C.1
cggccgctcaaggcggccggccggggtatttcccgtgctgcccccctcgccgcccgccgccgtcgccgcctcctatgcccttccgcccctccctaccttgccgctgtccctttgaccgcaagctcacgtccttcctgtcggcggtcgcctccctcgccgactcccgctcccgctcgcccttcccccctgccggcgctgtgcctgcaactctcactcccactgcctacaacgcccttatgtccgcctactcccgcgccggccgccacgacgaggttcttcgtctcttcttctcccttcctttcgcgcctactgcgccactcttcaccaccctgatttcctctctcgccgcctccggcagcaaaagcgccgcattggacgccttctccctccttgcttccggcatcggacccaccacctccgccttcaccgcgctgcttaagtccatcgacgctgcctcttccgagtcggtgtatcgtgccttcttcgcaaccatggccgctatggagtgcgcccctgacgctgccacgtacaactgcctcatttggatactctgcgattcccagcggctggacgaggcatggggcgtccttgacagcatgctagaggtaggcgtgtgccccaccgtccgctcctacaccgcgatcctgcacgggtactgtaagcagggcagggtcctcgaggcggagaggttacttgataccatgattcaagtcggatgcgcaccggatgtcatctcatacagtgtgctcatccaggggctttgtcgtgtaggggaattcggcaaggtggaaagaattttaggggagagtgaagcgaaggggtggacgccgaatgctgtcaccctacatatttacatgtc

SEQ ID NO: 137513 - DNA, 580 bp, Zea mays
  Clone ID: MRT4577_56890C.1
cgccaagcggtgaagcagcatcggccatggaggagaccaagccagcgccagaggccatgctccgctgcgccagggccgcgctcctcctcgcctccctccgccggccacgcgcgccgacgccgacacaggatcgccgccggacctcctactctccctcctcggccgccgcagcggagctcgcgcggctccggtccgaggggctcctccgcagcgccgagatcgcagcggcgcggcgcgaggccgctgcccacgcgcgggtcgccggctccgagctgctcctcgtcctcgccgtggcgcccgccgtcctcctgctcctcctcctcgggcttctctaagccagcggcggcgtgggtagcgcgggggctggagtctggggccgcctctcctctccgtgagttcagttttggagtgcactaggtgttcgatgaaatgcatgtttgagtgtggcggcgagtatataagcatcagatttgtcccccttttgttttggctgcattgccctgtggacaaatgtggtctgggtttctgtgcggtttgggcattcgacgaaaagcctgttcgtgtttggtgatttcatttc

SEQ ID NO: 137514 - DNA, 317 bp, Zea mays
  Clone ID: MRT4577_56891C.1
cgacccacgacgtacgcgtacgctctcactaaactatccatgtcgattactcttacatacgtacatcatcaacatccgcctgagtcctattcgctatctacgcacaatgcacccacataccttctacaacaaccagttctaaccatagcctacccagaggacacctaacctgctgtggcaaaccctgtcggctacttataacagatgcttccattctactaagcctctctgtccaaccctggtgcgcacctaccacaggcacaacagttacttaattcactggtattacataaaaaattccctgccaacactactac

SEQ ID NO: 137515 - DNA, 407 bp, Zea mays
  Clone ID: MRT4577_56892C.1
cccggcggttcatccgttgcgcccttttaccaaaccagttgcaaaacacgttgttcacacctccatagtgactttcgagcaacttcttgagagggatgctcataggttttatcacggtggacggcttgatgaaaggatctgacatgattgccagtatggtttactgagttgatcacgagagcaaaggttagtacacatgctggactacagggctcgcaatggttgtggaactggatatgataggctcagaggcatagttaatctgaagcgttgaggaaatgctcatgctttaagaggtctctaataaaatcgaaggggcataatataatgtgctcatatggacgctgtggcgtgctctgtggcagggacttatgaggcactttatgccgtaatttggtgaggaggat

SEQ ID NO: 137516 - DNA, 570 bp, Zea mays
  Clone ID: MRT4577_56893C.1
aaaaaaaaagggggggggggtggcatccgggccaactggtaaaaaagacctgggcccttttttttacccaaaaagtggcccccttgtttcaaaaccccaaaagggaacccggccccaaaggctcccaaaccccaaggggggggggatttttccaaacgagggggaaacgggacctgtttccccccggccggagtttccccctgggaaaccccacttttattcccaagggggaggagccaaaggcgtaaaaataaaaaccccccccctttttttttctaaagggccggggggtgcattgttggcaaccttaaaaaaggaaaaccctttttcccgggggccccaatccaaaaaaaaaaaaaaaccgggccccccattaatgggcagttttttgggggggaaaacctttcaccaaaacccccaccaaaggttcccatagggcttctttgttttttgggggacgggctggccaaacccccttttttttttttggggggggggggcaagttttcaaaaaccacgaattttgggcccaggggaatgggcaaccacccttcctgatatccaaacaaa

SEQ ID NO: 137517 - DNA, 546 bp, Zea mays
  Clone ID: MRT4577_56894C.1
ggtcgacccatcgcgtccggccactcgcgcggtgtctctccatacggtgttaatgctttctcctgcccagaatgctgacgccacacctgcctcaggagctggctcatatgatgcatccaggatttagaaacaccaggatcgctctgcatgcggtgctaacacaccttcgcgtagagatgcagatgcgggctatgctcctgatgaggacagggctctggagaaggcgaagccagcctgctgcagcctctcttcagacggtgacacttaccaccgcagattttgaagcattggatgctcaagtgattcatgtaaggacgtttgcgaagagggtcgtctgtctttcaatgctctgttcagttgggaaaagcttacacatagctttcctgcagcacacgcactagactctaaggatgctgccatggaggaggaagatgacgcgaccactgaggcagctgatcctaacatgactgccacttgcattgatcttgatgacctggacacattggctgatcccagagcttcctttgccatgaatatgcacacctg

SEQ ID NO: 137518 - DNA, 523 bp, Zea mays
  Clone ID: MRT4577_56895C.1
aaaactacataccaaaaaaatcccaccaaagggggcacttttttataccaattaccatcacaaaagcccttgttttctaaaagagggaggggaggcgcccttttatttaggcgaatactacattacgggatcactgatctaccaggccctgtgtagttaaagcttccttgctagcttttcctttggtgccccaaccaccctttccttaacgtccccctccctcaaaaaaaagaaagttggcatggcctctaccctaaattgctcaaaaaagggcttcatttcatccacaaaaactttcaaaaaaaaacatttggggactttttggccatattaacaaaaattggagccctggcgccgcacggaagacaccatgttgcagtgaaataaaacaccaccagctttttggggcttttggccccctcaatctggatgccccactcctccaagctggggaacggaatcaccggcccctttgtaggggtaacccgtgttccccccccccttgcccccttcaaaaccccca

SEQ ID NO: 137519 - DNA, 846 bp, Zea mays
  Clone ID: MRT4577_56896C.1
tttgtgcttcttctttctcctttctctctcctcttgccgtttctcgctctcttcttccttgcagtgcactgcaaaccaaccataaacttgccctcttctctgcttgaaccgcggagcaagaccgctcttgttctcttctctgcttgaactgcggagaaagaccgaatccgaagggacgttgggactttctggctgggaagactacataccatttctctaattcgggcgtggtttgtgctgggagggaaggaatccatggggctgcagctcgatccgcgctgagggttgaaggaaccggccttgttgtgtgctccacccaatcgaggaaaaggggcaaggattgctgctttgttgtctttggatccgttacgccattggggattcaaccatcagcagggcgaagtgacggttctgcaccacttttccccttatcctaattcgattttatttgaacactggatgtgattataatctcggttgctgttctgtgcggctctatctgagggtttcctccgtcctggatcgggaaggaaggcgcccttggatttccgtctccatggcgcccgccttgtaacccacggagtctaacttttaaatttagtgtaaatattagtggtagcagctgttaaggaagccccggtctccttagtagccaccgtgtgaatatgtcgtcagctggtgtgatcgtcttggggccagtcccaaaagaccctgctttcctgcctatctgcttcaacggcagccggtcgccacactgctcgtctgggtcacagctgcaggattccattcttattttccttgctgtgcctggtatgtcacccatgcccatgagcgtgctggaatctg

SEQ ID NO: 137520 - DNA, 224 bp, Zea mays
  Clone ID: MRT4577_56897C.1
cccaggagtgattagtcgcgtgatccagacgcggtgcttggtgggtgggcacagacgtgagctaccggggttccaacgcataggcgagcacactggatctggagtgacacctaagcggtgagatgggttgtcaaacacgactagggtcgttagtggtgggtctaagagcccaatgctatatatcgagtatcggactgagccgattgtatgtcaattaaaaacca

SEQ ID NO: 137521 - DNA, 721 bp, Zea mays
  Clone ID: MRT4577_56898C.1
ccggccgggcttcttccttgcagtgcactgcaaaccaaccataaacttgccctcttctctgcttgaaccgcggagcaagaccgctcttgttctcttctctgcttgaactgcggagaaagaccgaatccgaagggacgttgggactttctggctgggaagactacataccatttctctaattcgggcgtggtgagttacttttcgtcctccgctcccttgatcgcacgagtcaatcctgccattttcgctgtaacttctgttgaatttagtttttctgcagagtttgaatcgattaggatgatcggatctgagatgtggtactgcaggtttgtgctgggagggaaggaatccatggggctgcagctcgatccgcgctgagggttgaaggaaccggccttgttgtgtgctccacccaatcgaggaaaaggggcaaggattgctgctttgttgtctttggatccgttacgccattggggattcaaccatcagcagggcgaagtgacggttctgcaccacttttccccttatcctaattcgattttatttgaacactggatgtgattataatctcggttgctgttctgtgcggctctatctgagggtttcctccgtcctggatcgggaaggaaggcgcccttggatttccgtcttcatggcgcccgccttgtaacccacggagtctaacttttaaatttagtgtaaatattaatggtagcagctg

SEQ ID NO: 137522 - DNA, 229 bp, Zea mays
  Clone ID: MRT4577_56899C.1
actccatagggcgattgggactctcgaggccggccggggagcaatggcgctcaccgccgtcctaccttcatatacctagcagtgtctctgcatagaaagataaaaggtaggaggaggcgcagtgcgtggtgggattatttgtgaggcatgtacatatacattttactagtgtactcctataatcctcatgtatcgttataggtacaaaaaaaaaaaaaaaaaagcggcc

SEQ ID NO: 137523 - DNA, 251 bp, Zea mays
  Clone ID: MRT4577_5689C.1
aaaaccccaaagaagtttttttaaatcctaaatcccaaagaagtttttttaaatcctaaatcccgccaaattttatttaggtattttcttgccgggcactaggggttctttaaaaaatataggtctttttttctagaggaagacttccatgatggaacacaggggtcggaacaaagaggggaaaatgtttttgttcttatatcagcctttcctctttttttctttggatgatgaataactgaagcaaagat

SEQ ID NO: 137524 - DNA, 415 bp, Zea mays
  Clone ID: MRT4577_568C.1
cgaacgcttggttcttttcacttttccgtttcgcatataggacatagtgtgttggggcccactaacaaccgaacctccgcctgcgctgagatgcgggcccatcaacaccggccatggatgcacatagcgcctgactgaatgaccctcttacaaagagctcgagaactgctccctgggataggaggagggtaagcatgccgccctaggccctgtccatttatacattgggaccaacccatccaccgagggaggatacgatgacaaccattaagacacagtcgcctctggggtggattttggagacccattgcgcctaagagagcaacctccttgagccaagaaaaaatgtagctgttacataatcaaaatacatgaatcaatctcactgattgagatggcagccagagaaagcaga

SEQ ID NO: 137525 - DNA, 655 bp, Zea mays
  Clone ID: MRT4577_56900C.1
ccggccggctataaccccgccgccaggcctcactcctctccatttcataaaccctacagatacccctgcacccaagcaacgttatggccctaaagctccagacgcccgaggtgaccgactccttcgtcctcacgacccacgattcaccaaccgtcgacgcctccccatggagcctgatatcggccacatgctgatctcccccaacaacatcctcgagaacattaccaacgagacggccacggactgcatatggctctcgctttgcaaacctgaagttactgcctataaccatctccccaaaggctccgtcgatccgtccgcggccgcgctcggaataaaaggactcaacgacgcacagactgacaggacgaaagatccgcaacacatctgacagcatgatgatcacgctcacacgcactactgaacagatcgctaggtaccatgaaaaacacttccatgtgccaagcagtactccgggaccgccaagaagatccgctccacctgatccactctctggtgcaccgccgacgggaagaaccccgaggacctcgcacacacatagatctgactgattcccaggactagatcgcatccggtttgacactacacacgaaggcgacttgcatcatgctagtcagcgttattgctctgcatg

SEQ ID NO: 137526 - DNA, 343 bp, Zea mays
  Clone ID: MRT4577_56901C.1
ggaaaacaccccgggaaagggtttttttcaaaaacccctggttcacaacaaaataacccccactcaacccttcccccataaaatttcaggaacaaacttggtttcacgaaccctcccaaatttccaatcacaacaaactacttggatcaccacctaaatgatttgggggaaaaaaatcaaaaccctatggggggcctacaaaagggcaatggaaaaattttgccctgggcgaaatccgaaaggggtggccacctcgcctatagcacccttatacaaagcccctttacgggcggggctttatgggaccatggggggatgcaattgcgtgaacttggctttttga

SEQ ID NO: 137527 - DNA, 707 bp, Zea mays
  unsure (1)..(707): unsure at all n locations
  Clone ID: MRT4577_56902C.1
cgggaataaaaacttatattaaatgtttntctctctctacctattctctaaagtaatatcctgatagatacacattgtagtatctgtttagtaattattgacctatatctactttcatctatatccatagtgctcgcctatggccatagagctaacggatattactaccaatgatgttcatagtccaccgatttgatggacaaccttttctaatttttataagaatttgtgcgtagatgacctcgaagctacaaaggaccaaatattccccctgaaactttagttttttcttgtttatgtacatcctgctcagttttaatcttgttcattttgaagagtaatcagtgattaacaatgctactgttatatgtgttctatatggaaacaaatataaatctgaaacagataatgaagtctgaaacagataatgaaatctgaaacaaatttgtataggaggggattaaatctcctccaactccctcaatccactcctaaccgaacaagcccttgtattccctaattttttcttgcatcaaacatttggtttctcacttcataataaaggttatggtttagttgtacaggagctgcaatgctgcatgttgtcattgaacacctttctatccatctacagccactatatcttgctatctgagtagttgtaataagtagtcttgatttataaaagaaaaaaggcagattcatct

SEQ ID NO: 137528 - DNA, 513 bp, Zea mays
  Clone ID: MRT4577_56903C.1
cctcgaagacagaatctcattccttactcggaagcgacatcttggaatatttccatcttcgccagctagccttagaacaattgcgtgttgaagattacgtcaccatgtccagccccttcgatgtcattgcaatcatcactcccaagcccggcaaggcagatagggtcgaagagcttctgacaaccgcagccaaagctgtaaaggcgaacgagcctggtacgctccggtaccatatacatcgtcaaaccaagggcgatgcgccaatattcgtgatgcttgaaacatatgcaaacaaagcggctctggaaacacatggaaagagcgaggacttcaagaaattgggaaagacaatgaagacggaggatctgctcgcggagccgatgaaagtgctcttcactaaagaggcaggcggatatgctagcaaactataaactgtgttacagaaaactctagcatcctgtagcgaaagagtcgaggacgtcacgaagaatttagaacgagaacgttgcatag

SEQ ID NO: 137529 - DNA, 300 bp, Zea mays
  Clone ID: MRT4577_56904C.1
acgtcatgcgtgacgccgttacctacaccgagctcgcccgaggaaagaccgtcaccgtcacggatgtcgtctacgcgctcaagcgacagggccgcaccctctacggcttccgcgggtagggcgcttcctcatctggtggcgaactgcatctgggtcggcggtggtcgtgttgtgcgcctaatctagtgcagtccgggctctatatcgacgctgtgttctggggtgtcttggatcccattctctgcaataccaacttgccattatcaatggactggagaccatcctcagctgccgatgcct

SEQ ID NO: 137530 - DNA, 740 bp, Zea mays
  unsure (1)..(740): unsure at all n locations
  Clone ID: MRT4577_56905C.1
actcctaagggcgattgggatcctcgaggccggccgggacgcaatcaacgctcntggctttcaatcccaactcggaagtgctcgtggctactgcttcggctgacaagacaattggcatctgggatctcagaaatgttaaggagaaggtgcacactctagagggccacaacgatgccgtcacatctctagcatggcaccctactgaagctggtatcctgggaagtgccagttatgaccgaagaatcatcttctgggacctttcaagggttggcgaggagcaattgcccgatgaccaggatgatggcccccctgaattgctattcatgcacggcggccacacaaaccatcttgctgatttcagctggaaccccaatgaaccctggctcgtggcaagtgctgcggaagacaatctgttgcagatctggaaggtggccgagtccattgtgggtaaggacgacggcgacttgcctatcgatgagctcgaccgataggtggaggtgggaagttncgtggctgaagttccnggtcttcatanggatganggagacgcagcagcttctgggagtggtggcaagaaaagcagcgagccaccgactatgagaagcaatatatcctagcgcaagatacatgaatacaggggagatttgagacctaaaaaaagatatagatgtacctcangaacttgctgtcctgaattaanttaaaatggttttcaaaaaaaaaaaaaaaaacccgcggcc

SEQ ID NO: 137531 - DNA, 212 bp, Zea mays
  Clone ID: MRT4577_56906C.1
cccccctcaattgtatttgagccctggcccaaactaaaggggggcaaaaagctcctccaggttttgggctcagggttaaaatgttccccagcccaaaaagaagtccttgcggggtttaggaaacaagaaacacattcccttgttttagggggggtgtaatttatttgggaacattccctccatcccgggcccagggggtggcaaacttaaac

SEQ ID NO: 137532 - DNA, 279 bp, Zea mays
  Clone ID: MRT4577_56907C.1
ggggcctcgctcgctcccgacccggatgcaagtgttgcggtgggagaaagtcgcgtccgcatcggaggggaagcgccgtcatgcctaagtattatgaggacaagccgcagtgcggcacgtgaccgggcctgaaggaggacctgggcgcgagtctgctgcagtcggactgtgtggtccaggaaggaaaatcacctcggcagggtttgaaggaaggatactgcaactctgtgaagtacgcactttttgagtgtaaaagatcagtgttggataacagggcgg

SEQ ID NO: 137533 - DNA, 440 bp, Zea mays
  Clone ID: MRT4577_56908C.1
ggtaagccctttgccttattcatagggggcaaccaaaaccttttccagaagggaacagatagaagagccccaaaaaggaactgcaaacaggcccccaaaaacaaagatcggggggggggggaccagcaaaaatgggacaagggcaaaacctccctgaagcctaaaggccggaaaagtcttgggggccccgaggccccgagcagttgggggacccccgggaccggcaaataacagggggttcccctctggcacaaggagatggaacagctactgggggaaagcaatttaaaagcggcccctcaggatctccgtagaaggtgggcataccctgccacgactaaggtgggtttaaggggcaactcctggtgtcctctcaacggcaaaagtgaaattggcggggcgacccaaaagggaaaatcggggggaaatcgatgggatgg

SEQ ID NO: 137534 - DNA, 701 bp, Zea mays
  unsure (1)..(701): unsure at all n locations
  Clone ID: MRT4577_56909C.1
cctcgaggccggcctggccgacctctngcgtccagcctcaccgcccctcccccgccctcgatttccccccgtcctggcacccgatctcgcgacccgtgatggctgccggttctgcaggcaaggagaacgctgctccttctacttcggacgcaaccgtttcggctgctgcggtgtctcggcggcacgtctgcgctgtcaagagctgcggagtgaagaagcgcccgtcgagggcgcggttgctgggccgggtcccgctccgggacatcaccaacctggttcaaacgagcttggcggtcgcgggacctgaggctcctctcgggcaggaggtttcgccggctctggcgacgtagttggccaagcccgatgtggtgctgcggcggtgttgagactagcagcactgctggatggagtcgctgctgccccggcggctaaagcggacagatactccctccggaagggggtcagctaggcgcccactgtacagtatagaacagttcttgcttcgtggcccaatttctcttcggttttggttgcattcgattggactggattggttggttgatcctctattttctgtactcttcttgatagactgagttgtccccaggggaaaataagataaattgcaaaaaccatagattcacctgttcctcactgatgatggcgtcgtaaaaaaaaaaaaaaaaaaggcccctagggcc

SEQ ID NO: 137535 - DNA, 397 bp, Zea mays
  Clone ID: MRT4577_5690C.1
gccggccgggccggggttccttccgtccatccatccgccatggcgaccgctacgctactgagctcctccttcgccatgcccgccgccgcccgtagggcctcctccccttcctccgcctcattaagctgcgcctttccaccaaggccctcaagaccatcgagaagcacggcctcgacgccgtcgcgcgcaaggccggcatcgacctcaacaagaagtgagcaagaagtgagcccatccgatgagcagccaaactagtgtggggtggcactagcttagcattcacgttcgcagggtcgtctcgtctgtctgtctgcctgcctgcctcctgctgttctttcgcaatcaaatcatatcattatatttcctccccgaaaaaaaaaaaaaaaaaaggccccta

SEQ ID NO: 137536 - DNA, 1473 bp, Zea mays
  Clone ID: MRT4577_56910C.1
cgccgcgagcatgaacagaggccgggttactggaacagtttgccactttgctgtacaagccatcatttcattcctcggactattaaaacaaaaaaaaacatttgaatgagcccatggcgcggccctcgttacattacatcaggacaccaaaagcaagaaccaaactcctttcttcttcttcttctttcccccgtagtaaatcgggacacgcagatggttatgattcaacaaaactagctgtgcaaatgttcctagcaacaatctcacgctcggaaagcattgatctcctcgagtatctattctgcacgctgaagacggcacggcgtaggagttgggggcgtcaatggcatgcaggacagcagcagcaagagtccaggcgccaggtgcacagaaacgcatggcgaaaggagtcacctgctagctaccaaacattccgatttccgaccgatggaacggaaccttgggagaaacgaacccccagtcagtcggtcgtcagaaggcctgccctgccactcatcaggtagcgaggaatgtctgtctgcaactcttggctggctgctggccccgtcctccccgtcgagacgatgaccggtcagtagaagtttatgtccatgtaactgcgtggataagtctggtacggtggtagctcgtccagccccaggagggacgcggaacgagtgatgccgccgaagtgagcagctgactggctcggaatctcaacctccgccgtgaatatgctgtacacaggcctgtgatccgagaaccgagactcgccgcgcacgtagcatagctgggacaggcctcgcccgtaccatagaatccggtcacaccatgctggagtccttcgcttctcgttcgggtgcatgtcgtcgccagcgtatctatcggagttgtatgagtacttgtaggtgggaggaaagtaaatccttccttctttccagcctgcaaagacccgaccaaatctctgctctatgcgaagctggtccttctccagcaactgtttccagctgtgcatctcaactaaagccttcactgagcgatacgaaagagctatccggtagttcaggtccccgagccaaacccacgcgtccggatccagaatcgtctctggtgacttcctgtcgcctgctccatgaacatgcgggaatctggtcttcctcaggatttccaccacatccgcatttcgtctaagttgatctccatccttttggcctgacgttaagtgggtgcaaacgaagcagaagcttgtctgatgcagagacatactgattgatatggatccatgatagtaggggaaaaaagttacagtgcacatgcgaagtttggtgtagacgctactccctccgtttcgttttagttatcgcttgatagtgcaaaattgaactatccagcgacaactaaaaagaaacggagagagtatatattaaacccctggcagaaatgaaaaagctagcaaatgataccttgttccca

SEQ ID NO: 137537 - DNA, 754 bp, Zea mays
  Clone ID: MRT4577_56911C.1
cctcgagtttttttttttttttttttttttttttttttttttcgccgcgagcatgaacagaggccgggttactggaacagtttgccactttgctgtacaagccatcatttcattcctcggacttttaaaacaaaaaaaaacttttgaatgagcccatggcgcggccctcgttacattacatcaggacaccaaaagcaagaaccaaactcctttcttcttcttcttctttcccccgtagtaaatcgggacacgcagatggttatgattcaacaaaactagctgtgcaaatgttcctgtccatccatggtaaagaaaagaaaagcatgcgttagtcgcactgcttgccttgcttcaaatcaaatgcgtacgaatggtcctcgacgtgtttcagcaaaacatacctagcaacaatctcacgctcggaaagcattgatctcctcgagtatctattctgcacgctgaaaacggcacggcgtaggagttgggggcgtcaatggcatgcaggacagcagcagcaagagtccaggcgccaggtgcacaaaaacgcatggcgaaaggagtcacctgctagctaccaaacattccgatttccgaccgatggaacggaaccttgggagaaacgaacccccagtcagtcggtcgtcaaaaggcctgccctgccactcatcaggtagcgaggaatgtctgtctgcaactctgcacagtgagcaacccaccacatgtggggttatgatgagcagaagcagaagggatg

SEQ ID NO: 137538 - DNA, 248 bp, Zea mays
  Clone ID: MRT4577_56912C.1
accggggcaaccggggacgcggacctcttcatctccgttcccgtcgccggcgacgctggtctctaggtgtcaggccgcgcgagccctagcatagcagctgtagtagtgctagactagctagtagtttagcagggcgctccgcgcgtcagttccaccagaaacagaaaggcaaattcggcttcgcttttacgcccgcttgatttgcctcttccaccctcttccaccagaaggcgggcggccgagcgacc

SEQ ID NO: 137539 - DNA, 309 bp, Zea mays
  Clone ID: MRT4577_56913C.1
gagcagaaggatgatttggtcgcattcttgcgctctatagcaccattgtttaatatttcttgttctggattgttgcctcgcgattcacggctcatcgacctctcgcgcggtcgcgcccaagacggaaccgtgcgtcggtgccgcccgtgaccggatgagaccgcgccggaggcgccctcgcccgagccgctgtgcggggccgcgccggacagccgccaggaaccgcgcgcccacgccggtgccggctgcccgtggcgggccgtgtccgtgccgccgtgcggggcctctccggttggccgttccgccgtc

SEQ ID NO: 137540 - DNA, 162 bp, Zea mays
  Clone ID: MRT4577_56914C.1
aacgactctgacgagctaagcaaagccatacggggccgagcgagacaactagaccgccattgctagctagctagttcaggcagcgagcggggggagacagctatgtgatgctgctccgacgtcctgcaccattcgctgggcttcttactaacccagagctcc

SEQ ID NO: 137541 - DNA, 332 bp, Zea mays
  Clone ID: MRT4577_56915C.1
gttgaacaagagtgggttcacatgggatccgaccaagatgatgattcagtgcgagaaacaaacataccttagtaattactttatgtaactagttttagtacatcgttttttatgtaatggtttgcctgtgacatgtgttttatatcgacagttcaatttgcttgtgtaaaaaaaaaaaaaaaaaaaaaaaaaaaaaaaaaaaaaaaaatggaggaagttttaaaaaaataaaagtttatgtacacttggatgcgaaatgtaatgattttttatagtgggacaattattataaatttttttgacatattttttaatggggggggcccttttaa

SEQ ID NO: 137542 - DNA, 197 bp, Zea mays
  Clone ID: MRT4577_56916C.1
tagacaactaattcactcgtttttttgagcgccccgccaattactgaggggaacctgtaggtagaggtgggtggtgatatcttgagcattattaaaggttggatgacaactggtcataccatcactctgacacagaatactattcactgacacttacacaaagaatacaaagcgtacgcatatagcgtcaagaacat

SEQ ID NO: 137543 - DNA, 364 bp, Zea mays
  unsure (1)..(364): unsure at all n locations
  Clone ID: MRT4577_56917C.1
aagcggccgcccttnggcgggggggggggaccatttttttatttaaccaggccccgacacccatgggcagaaccgacgccctttgatctaactgatgactcctccccccaacagcaaccagggtcacttaaaatccatggacaacacatcgacacacaagagagagccccagtcttgcaagacagacatccagtgggctggtaacaccccaaacagatactttaacccagacagaatttctgaagcctaaaagaccccccgatccccacgaagccactgcattccaatcagacgatagcatgagccaaccacatgcgctcagagcttgcccttgagcctcctcttaagcacatccatgacggcg

SEQ ID NO: 137544 - DNA, 529 bp, Zea mays
  Clone ID: MRT4577_56918C.1
tatgggtttcgatattgccatggaagagcatagctggtcacatgttggcttcatcttcttctcaattgtatccttaaaaaagcattgtatagttttaacaaaagaataattactggcttgggcctttcaattattgtcttcattagctgtaaagttaatgtatatttaacaggtttagtgaagttgtgctaagcaaccattctaacatgctccagtagatattcttcttccttagtctttcattaaacagattctgtccagtggtaaccatgacctaaatttaattatgcattaggctgagaagatgtctgattctgaagatgtccatagactgataatgcacagctctttgaattcgtttctgtgcaggaactgggttctgatgttaacttgtatgctttggtgtttggagaatctgttttgaatgatgcgatggcaatttctctttacaggacaatgtcatcagtcagaagtcatgcagcaggcggcgagaacttttttatgatgattctccaatttctcgaaacct

SEQ ID NO: 137545 - DNA, 415 bp, Zea mays
  unsure (1)..(415): unsure at all n locations
  Clone ID: MRT4577_56919C.1
acctacgtcaccgtgacggccgacaaccccatcctcatcaaggtcgatggcgacgagggcttgcagcctggtgacgcgcctactagggtctcctgcggatcactcccggcatggtcacggtacacagcctcgccgggcgaagaaagaagtctgatcttccgtgccagagcgtcagcgcgcacagcctgctcgctcaaacttgactgttaatatagacgccgggctgatcgacgctctcacggagcctacagcgacatcttatngagtacccgggtagtttggattgcgacaggaggcgcgtgctgtacatatagtacaaatacacacacacgcccgcctgtgaagcaatgcaatgcaatgcagtgcaattgctgcactgccaaggatgggtctgtcgtctatgatgaaccaagtg

SEQ ID NO: 137546 - DNA, 698 bp, Zea mays
  Clone ID: MRT4577_5691C.1
gccggccgggctttccccctcattcttatccctcttgctcctcgaggccggccgggccgttccttccgtccatccatccgccatggcgaccgctacgctactgagctcctccttcgccatgcccgccgccgcccgtagggcctcctccccttcctccgcctcattgagcttcgccacgtcgcagctcgccggcctctccctctccgccggcgttgcaactccaaccgccgtcgccctcctccccaagaggcagcagctccagcccattgtcgcgcggcgtgtgtgcccgttcacggacaagaagacgaaccgggcgaacaaggtgtcgttttccaaccacaagacgaagaagcagcagttcgtgaacctgcagtacaagaagctgtggtgggaggccggcaagcgcttcgtcaagctgcgcctttccaccaaggccctcaagaccatcgagaagcacggcctcgacgccgtcgcgcgcaaggccggcatcgacctcaacaagaagtgagcaagaagtgagcccatccgatgagcagccaaactagtgtggggtggcactagcttagcattcacgttcgcagggtcgtctcgtctgtctgtctgcctgcctgcctcctgctgttctttcgcaatcaaaccatatcattatatttccaaaaaaaaaaaaaaaaaaaaagaagaaaaaaaaaaaaaaaaaa

SEQ ID NO: 137547 - DNA, 229 bp, Zea mays
  Clone ID: MRT4577_56920C.1
gtggcagatatgcgcgtagtcagcgccgaacgactgagaagcccggtatacgctctcagagttactgaatgggaaatagccacatgcgcagtggcacatcacccggtcatcaagctctgtggggattggggcactgatgatgtgcagctcagcgatatttctctacaggattacattgccgctgatgacaagtatgccacgtacctgccccacaatgcaggacggtatg

SEQ ID NO: 137548 - DNA, 1834 bp, Zea mays
  Clone ID: MRT4577_56921C.1
cacgaggcaagcttataaagagattcctgcggcttttgacacgttctgctttggaataagcatctactcgctacgtcccaaaataatattcacttagggcgagtcaaaaatacatttggtcatcttccctgcttggagttggagttgagacgccgacgcggcgcccgagaagaatttgcggatggattcgctgcgcagcgtgttggagtcgattcaggcgatgcagatccgccccgtggtcgcccaaatcatcaccctagggatgatcctaacttcggcattgatcctatggaaaggattggtcgtcgtaacagggagtgagtcgccggttgtggtggttctatctggaagcatggagcctgggtttcgaaagggtgatgtcctgtttctgcacatgaataaggaccctgtccgcacaggagacataattgttttcaatgtcgagggccgtgatattccaattgtccatcgtgtgatcaaggttcatgagcgccatgatacggtggactctgacattctcacgaaaggtgacaataatcccggggatgaccgagtcctgtacgcacatgggcagctttggctgcagcgacagcacatcattggacgggctgttggctatctgccttatgctgggtggcttacaatcatcatgacggagaaaccagtcctcaagtatctgctaattggtgcactggggctgctggtggtagcatccaaggagtgacgttaaaaggaagggcatgaggtacgaggccatgtgtgcgcgggactgcatggacaaggaggggatacgagcggacactgtcacatggaaccccttgatccatggcctgttcaaggatgctagggtgaaggaggcggctcagctcttcacggagatggtagcgacacaggtgatgccggacaatgtgacctagaccacactgattgatgggcagcagttcaatcagttcacttacaaggctctcatccatggattctgcaaaacaaggagctagatgaagccaaggaaaccttctttcacatggttgatgaaggtgctttgaatgcatcttatatcttatggttccagttagtaaaaaaagcgacctagtgctggagattcccatatgagtggagtggggtctgtctgatatggttccagttagtaccactagctaattgcaaggaccgcatttggcagttgaaatggcactaagatcattgtgtcgctatcgtaggcaaccagtttgcaatctcactgattatcttgcgagaatatcataaactatatcttctgatgacgtggttgcttttgctgtatgctgggttttcacccaattatatcatattttcatggcttgtcgatggtttctgcaagaagaacaatgcagatgcagtgctagccacccctgatgaacttacggaaagaggccttccaccagataaagcggtatatagatatctgattccaaggctttgcagaaaagggctggttgatcaggcacaataaccatgtgtttggtttcccgatgcagacatgcagccctatccaagcctgcatggtgggatacgggacctcacccacatctccgtggatgcaacccatgtctcctaaggctattcacaatggaggttttatggggtgtttcatgtattaattagactgccacatcagctattttgatgacatatcatatcatttaagaaggaagagtttcatggggatgaaaccatgttaactcgtttccaagatcttggaaactgtgtgaaacctccactgagagtgttttgtttcatcttcatataattgagtaaatcctattggttatttataaaaaaaaaaaaaaagagg

SEQ ID NO: 137549 - DNA, 572 bp, Zea mays
  Clone ID: MRT4577_56922C.1
gtcgccccggcgcccgaaaagaatcgcggatggattcactgcgcagcgtgctggagtctattcaggcgatgcagatccgccccgcggtcgaccaaatcatcaccctaggtgaggctgggggatactcggctaaccccgctgggctctgatctcccccccctcgcaataggtgcggggccggttccttcctggctgaacattcggcacatactctgggtatttcgcagggatgatcctaacttcggcattgatcctatggaaaggattggtcgtcctaacagggagtgagtcgccggctgaggaggatctatctggaagcatggagcctgcgtttcgaaagggtgatgtcctgtttctgcacatgaataaggaccctgtccgcacaggagacatagctggttacaatgtcgagggccgagatattccaattgtacatcgtgtgatcaatgatcatgagcgccatgatacggtggactctgacattctcacgaaaggtgacaataatcccggtgatgaccgagtcctgcacgcacatgtacagctatggctgcagtgacagtacatcattggac

SEQ ID NO: 137550 - DNA, 161 bp, Zea mays
  Clone ID: MRT4577_56923C.1
gaacaacccatcatcggtggtgccctcttttacattgctgatgagttatagttcaatagtcaagttactaagacacgcactcaatgatttctgcaacgcgagagcaatcatgcagacagtcagcacagtacatctctcgagtcggtagtccgaatggtcaa

SEQ ID NO: 137551 - DNA, 243 bp, Zea mays
  Clone ID: MRT4577_56924C.1
cacgaccccgcgggacccggccggaacccggcccgacccgggcgcgcgcgcggcggaggacgaggaagagttgtggcgaggcagatcctgccccgtggccgcggccgtctcgtaggtgaccgggctggtccacaagtgggcatggaccaaagacgacgtgatcctccacgtgctcccgctgcaccacgtccatggtgtggtcaacgcgctgctctgtcctctctgggtgggagccacctgtgt

SEQ ID NO: 137552 - DNA, 155 bp, Zea mays
  Clone ID: MRT4577_56925C.1
ggcgggtagacacaaaagccaaattttatgggaccatttcttcgcccaagatttgccaattacacgggggaaaatcaacttctgaaccaatgggccccaaactaaaacccaaattccaattatttacaatcaccggacacttaaatcctagtttg

SEQ ID NO: 137553 - DNA, 1414 bp, Zea mays
  Clone ID: MRT4577_56926C.1
atgtcgtctgccattgagaaacgcgtggttggttgctcggtgccgtacgccatgaggaactgctgtggctccgctgacgccgacgtgaatccgccgagtcgtcctcctaccgaaggtttacccggcttttcccacacgctgctagctccgagtctccgatcgagttctcggctggttttccgccgccacgccgtcggccgcgggccgctgccgccgccgaagccgagcgacggcgggggagcgaagcaagagaagggaggaggagacggtcctgaccagtgcccgggtctcgggcgggttctggaagcgccgaggctgagggagttcacgctcgccgagctgcgggtggccacgcgcgggttgaagccggagatggtgctcggggagggcggcttcggcccggtctacaagggctgggtcgacgagcgcacgctcaatccagccaagagcaacgccggcgtcatcgtcgccgtcaagaagctcaacccggagagcttccggggcctgcaggagtggcagtcggaggtcaactttctgggtaggctgtcgcatcccaacctggtgaggctgctgggatactgtggcgactggcgaggacagggaactgctcctggtgggggtggaaacttggaggcgctgtcgtggagccggaggctcaagatcgccacgggcgcggcgcgcggcctcgccttcctgcactcgtcggagaaacaggtcatccacagggacttcaaggcgtccaacatcctcctcgactcgacatgccaggatttcaccgcgaagctgtcggacttcgggctcgccaagaacgggccctccgccgggaagtcgcacgtcacgacccggatcatcggcacctacggctacgcggcgccggagtacgtcgccaccgggcacctgtacgtgaagagcgacgtgtacggcttcggcgtggtgctgctggagctgctgacggggatgcgcgcgcacgacccgaaccgccccagccaccagcacaacctggtggagtgggcgcggccctacctctccggcgccggcagcaagctcaagaccctcatggaccagcggatcgacggccagtaccacaccaaggccgcgctccgggccgcaaggctcgccggcaagtgcctcacgggcgaccccaagagccgcccctccatggacgacgtcgtcgccgcgctcgaggacatcgaggccctgcagcagcgggccgccggggggcaccgggacctgccgccgcggcctggagcgcgccggtctgccgccgtaccatgattcttcacgcggtgcccctgttgatgcagtgcagcatggtcgttaattgcttggcttgagcaagcctagctgctgattcagacagaacactagctttgattcttcagcttcgttcaactaatcgccggtgttttcattc

SEQ ID NO: 137554 - DNA, 245 bp, Zea mays
  unsure (1)..(245): unsure at all n locations
  Clone ID: MRT4577_56927C.1
aaaatggaaagaaaggtggctattacctaatatctacactcaacggtcatatgcatnnccaaattacatcccttagagttttacattcttgtattatacaaaacccctttacctaaactacaaaaccactgataaccgctaatatttgcatgatgtttatcaattcaaatttccctctaattttaatatgctccttaaaagttgtttcgagtacaacttttgtgcatgaactacatatcgtatac

SEQ ID NO: 137555 - DNA, 397 bp, Zea mays
  Clone ID: MRT4577_56928C.1
ttggagctcgctagggtgttaccttgacattaagaatacacatgaagttgggtgattgagatgctgagtgggccctcgagagggagacagaaccaatatttgatccgattgcaggagtggctgcaagcaagtgaagactaccaagctgtactcgatggtgcttatattgcacgtgtgtggacaaaatgggggcggagggcagcctcatatggacccagctggataggcggataacagagcttcgggataaatatggtggaaaatggccacttggcatactacacaagtaggcgagttggcgagcttatggaagattcctataataaggattggagtgacacctggaaaacagagtggggctcttgatactgtcaccaagtggggtcaatgatgactg

SEQ ID NO: 137556 - DNA, 533 bp, Zea mays
  Clone ID: MRT4577_56929C.1
ggccgcttttttttttttttttttttttttttttttttttgtgtttttttttttttttggttacagactcactgtgttacatattcgtttcatatctcttagccaggcacagaacagcattcaacagcacaagaacgctataaacaatactcactagcaagaaacactaatgacatgacgaagaggccgggccgacaaccatcagatgaccgttgaagagcctagccgttctcctggagagaggccccgacggcggcgccaccagcggcggaggcagagacggcgtcggcagcaaacttgcccttagtcttgacggaggcgcggccccgcgccttgcggttcaggagcgccttgcgggccttgcccagcttcagcttagtgaccaacaccttggaggggcggctgcccacgttcacggtgaagccgcaaaccttctcgcggatgatccggtggacgaggatgacccaccgggggaggcagaactgcaccatcttggcctcgaggtccttgtaggagccgcgcacgacctgcac

SEQ ID NO: 137557 - DNA, 119 bp, Zea mays
  Clone ID: MRT4577_5692C.1
agctctagaaacatagcgggagtcagtgcacatcagcaacctgggattgcttaatactatgtcataaaggacatagcaggcgccgactcctgcgcttaagcacacaggaggatttgcct

SEQ ID NO: 137558 - DNA, 606 bp, Zea mays
  Clone ID: MRT4577_56930C.1
ccgcgcggcgcgcacccgctgtccctgggcggcgaggccgtgagcgggcggcggcggcggcggacccgggcggcccgcggaccgggcgcgcagacaaagaggcggcggcgcggaggcccgggcgggcgcggggcgatggcggcgcggggcggccgggcgctgctggcgctgtgcggggcgctggccgcctgcgggtggctgctgggcgccggagccctggagcccggggcgcccgcggcgggcgtgaggcggcggcggcggctgcagcaggaggacggcatctcgttcgagtaccaccgctaccccgagctgcgggaggcgctggtggccgtgtggctgcagtgcacggccgtcgcccggatctacacggtggggcgcagcgtcgagggccgggagctgctggtcatcgagctgtccgaccgccccggggtccacgagcctggtgagcctgaatttaaatacattgggaatatgcacgggaacgaggctgtgggacgggaactgctcatcttcctggcccagtacctgtgcaacgagtaccagaagggcaacgagacgatcgttaagctgatccacagcacccggatccacatcatgccttccctc

SEQ ID NO: 137559 - DNA, 661 bp, Zea mays
  Clone ID: MRT4577_56931C.1
ggccgcttttttttttttttttttgaggagaataagaggcaagggtggcccaaataaataccacccattcgggcattccttggtttaaacaaaatacttataaagggaaaggcttaagggccggaggggcttcctttttattctaaaggacccccacaggaggacattaccacaagggctaaggaggttccaaaattccaaaacatgggattaaggggaaaaaatcacaaattggccatggccaccaatttaacataaaaaccccaccggtcttaataaccccttttccaagggattttgacaaaaccaagccttaccagggtccttaccacccttttttggtttggtttttcttggaaatggacacagaagggcaggaacattggcagggaggttcttaattaacaaggtggaaaacttttggatggcaaacaggatacctttggcggcgggggtcacaaaggtgatgggaacaccctttcttccaaaacggccacttcgaccaataccatggagggaggtctttggctgggtgggaagaacattggtggtgaccaaggacacctggtggacattaataccaagagccagccgggcagtggtggagagcacaccggaggaggccgaacggaacttccttaaggaggaggctctaggggtc

SEQ ID NO: 137560 - DNA, 698 bp, Zea mays
  Clone ID: MRT4577_56933C.1
agccgattcggccttccgctctccgtgttgccgagctgcggcgggcgttgcgcctgcctggcctcgccagtcccctcgcctctttctcgtttgcggcggcgtccacagcatctgcggctcctgccaccacgtttcggctgcgaccccttcgcccggaatcgataggatccctcgaggccggccggggttgccgagctgcggcgggcgttgcgcctccctcgcctcgccagtcccctcgcctctttctcgtttgcggcggcgtccacagcatctgcggctcctgccaccacgtttcggctgcgaccccttcgcccgaaatacgaatgatgagagcaggataagataagcaaagcaaattatgcgctgcagaagtcatttgcattgcagctttccactggaaggttgtgatgcaaggtacaaagataaacttgcagacagaaaccataatgcctgaccctgcttactcgatctcaattatggtcaactagagtactcgtcgtggttcaatgtactgtacttgttataagttcatatggtgtaattgttgtaaggggtcactcagcactcagcagcgctgtccaagcttgacgagcaccagcgcctgcacctgatcgacctgctcgatgtacagaccagcggtttaagaattaaaaggcagttgaaagtttgcgaaaaaaaaaaaaaaaaaaggggcggcc

SEQ ID NO: 137561 - DNA, 709 bp, Zea mays
  Clone ID: MRT4577_56934C.1
ggcacgagggctgcggcgggcgttgcgcctccctcgcctcggaactgccgcatgggatgtcttgggggcttctatgagccaagagccgcttcggccttccgctctccgtgttgccgagctgcggcgggcgttgcgcctccctcgcctcgccagtcccctcgcctctttctcgtttgcggcggcgtccacagcatctgcggctcctgccaccacgtttcggctgcgaccccttcgcccgagacgaatggtacggtaccagtgccacgtccgtctccaaccttctctttgccgcaacgcaaccatcttcgtgcatgcctacacggccaaaccctagcttccacctgatgagagcaggataagataagcaaagcaaattatgcgctgcagaagtcatttgcattgcagctttccactggaaggttgtgatgcaaggtacaaagataaacttgcagacagaaaccataatgcctgaccctgcttactcgatctcaattatggtcaactagagtaattgtcgtggttcaatgtactgtacttgttataagttcatatggtgcaattgttgtaagaggttactcagcactcagcagcgctgtccaagcttgacgagcaccagcgcctgcacctgaccgacctgctcgatgtacagaccagcggtttaaaaattaaaaggcagttgaaagtttgcgcaaaaaaaaaaaaaaaaaaa

SEQ ID NO: 137562 - DNA, 760 bp, Zea mays
  Clone ID: MRT4577_56935C.1
accaaaccaatctctcctcctccctccctacaaaccacccgccgccgccgccgccgcccagaggctcccccctgccgtctccaccccgcccctcccctccccttgtattggattggattggattgggttgggccttcttggatcggatcggattcgattgaggtcattggcaagcaaggaagcatgagaccgaccgcacatcttgtcttctagaataataatagtaatgtccatgctcgcgtgtgcgcttcaaaccatgggctcatcctgcagcagacctcactcagtaaatgaggcagacgcagctgacaacacaagatctgcagacatcgaccgccgcattctgcacgagacagaggcggaccagcacatccacaagctcttgcttcttggtgccggagaatcaggaaaggccacgatatttaaacagatcaagcttcttttccgaaccggcttcgacgaggcagaactcaagggctatacgcccgtcatccatgccaacgtgttccagacaatcaaaatactatatgatggagctaaagagcttgcccaagtggaatccgagtcttcaaaatatgtgatgttacccgataatcaggagattggagaaaaactatcagaaatcggaggcaggttggattacccttcgcttaacaagaactcgtacaggatgtgagaaaattatgggaagatcaagccattcaggaaacttactcgtgcggaagtgtgctgctaggccctgactgtgcaccctacttct

SEQ ID NO: 137563 - DNA, 186 bp, Zea mays
  unsure (1)..(186): unsure at all n locations
  Clone ID: MRT4577_56936C.1
gttcctgtacggtggtcgccccgcttacatactgtactcatacttcccccancgnancaacttcangccctnnannctgnataccgacncccannatactgagtactgacntanttntttatagcgtaggcngtcagcttggcagggcganaccatngaggtagaangcggaaggtngtggngggc

SEQ ID NO: 137564 - DNA, 258 bp, Zea mays
  Clone ID: MRT4577_56937C.1
acattactgttcattttttttttttgcgacctggggcggaggggcattgcattttgaagggcttaacatatgcattgcttctcaaattcaagggagtttaactgacacttccaaatacaaaaactcaatacgcgctctacttttggacaatggccgccccaaccgaaacttgttcccctctctaacaaaccaaaactgccccctgtgttaccactatgcaagttgtgctgactaccgaccactcggtagggtttttta

SEQ ID NO: 137565 - DNA, 612 bp, Zea mays
  unsure (1)..(612): unsure at all n locations
  Clone ID: MRT4577_56938C.1
ccccgcgtccgnccatatatcataatttcagnacataacatgaagttaaataccaaaacagagaggctagtggcttaccaaaacttcacccatgaaccagattgaaccccaaagtaactaacagactgggcccaaaagtaactaatggtctaaaacgcatgaaacaccgcgttttacagtttagaatgccaaaacgctaaaacgcggtttcaacttctaattagagttttgacgtataaacgtagttttaaacttttaataacactgagtgttggattataatataagtgaattgaccacctcttcctatcagtttaagcttttgggttgaactggttggtgcgtgcaacttaataaaattgtatgaattaattgttcaaacacttgaaatgattttaaatctttaccatgcattcaaagaattatgttatttgttctatgattctatctctcccaccctgtactataccatgaagtagttatatcccttgtgttttatcagcatcatggcattgtctgtccatccatggactttactgatacagtatttatgttcttgaaggtggaatctgagattttctgccttcatggtggcttatccccatcaattga

SEQ ID NO: 137566 - DNA, 222 bp, Zea mays
  Clone ID: MRT4577_56939C.1
aatgctgacaacatcaccaaaatgcgcaaagccagtgatcattttggcatcagcccaaaatatgtttgctatttgttcctcactatccatctgcaatgcatattggaatgatgcgttatcgccacttttgttttgaaaatacacgagcatgcttcctgcttgaccatatgccatctctcgttggcacttgccctgtaaataattcttggggtcacggagagc

SEQ ID NO: 137567 - DNA, 258 bp, Zea mays
  Clone ID: MRT4577_5693C.1
ttccgggtcgccccgcgtccggtggccccccagccctggctcgccggcgggctggccggctaggaacggcggggcgcggcctccggcctggcgcgacgcgggggcgggtccggccccggcggctcgcggcctcgagccccggcctcggtggcggcgcgggcgcggccccagccaggcgctctggcccagcggaccagacggtacggacacggcagcgctggcagacctggagcgcggttttctgacggctcgagagtg

SEQ ID NO: 137568 - DNA, 319 bp, Zea mays
  unsure (1)..(319): unsure at all n locations
  Clone ID: MRT4577_56940C.1
acattacacctatctccaaacactccttcttctattataaacattattcagaacttaaaaacattcatattcttattattttttcttatatccattccaaaccatctttgggggggggggaacacaaatcatacaaaatatttttcttttctancatccctaacaacttaattccccttcctttattcttttatnatacttacctttattcccttncccttaaccatattaacccacnnnttattacctttnccaatnctcaacaccttacccatacctttttcaaactatattcccatncacttctccccattaatac

SEQ ID NO: 137569 - DNA, 473 bp, Zea mays
  Clone ID: MRT4577_56941C.1
ggcggccccaaaaagccccatttttttccttagggtttaacttaaaaaaaaacccgacgggggtaacggggcgcgggggatccccaacccatgcgggggggtgcctggggctgcgggggcccggggtgaacacagcactaacaacgggcacaggggggcccttaatcaaaaacccagggggggcacaacaaacccggggcgaacgaagataaaccccctgggctgggggaaacaacccgggggcgaacaggataacttgggcgggcgggccccaccggttaattcccccagttcccgggggggttgccggaaccccccccacgggtgccccccccgtagcccccgcccccaccaccggagcccccgccgccaccaccgtagcccccgccacccccggagccccccccgccattacggggccccccacccccggaacccccgccttcacgggcaccaccggacccgccgggggc

SEQ ID NO: 137570 - DNA, 505 bp, Zea mays
  unsure (1)..(505): unsure at all n locations
  Clone ID: MRT4577_56942C.1
ccggccggggtgcgcaggccgaaacaacacatgccaccgtgatccaagttcgccatggtggagagagaaatgatgccgccaccatcgatctcctccgtgggtaactccccgacctcggggggtgttcttagcgcgtcgcgggatgctgccgcgcgtgcgcgtgacctcggcaggcggggatcgcagccgtgaggtcggtgattttccgccggtgtagcagcgccgccgcgatgtggatgtgtgccgtggcaaacctctgccacagcgccagctgaggtcaagaacaggtaccgcaggatgaggcgcatggaggatgctgtgacgagttcatgagaggtctaggccgaccagtcaactttgggttgctggatcgttgtctccttataatgtaattatttattttgtatcgaactcctgttatatataaagatgtgacattcgatccaannnnaaaaaaaaaaaaaaaaaaaaaaaaaacccaaaaaaaaaaaaaaaaggggcggcc

SEQ ID NO: 137571 - DNA, 964 bp, Zea mays
  Clone ID: MRT4577_56943C.1
gcacgggaatccttgttgccacgtttttgaacctttggtgtgctggcactctaggaatcctccttcatcaagcgtggctgagctccactgcacctgcccctatattcagtaccttgggctgccgtattgagtgaagatttcttccttgccctcaaattctagccaaagttcactgcttgagtgtgcagtccttatgtactgctggtataaccccctccctagcccaggtttgcccccttctccccatggactggatgcgctcagtgacccctccccctgcctatttattcagtgtgttccacggctgagttcagaaaagcttttctcccttgttctcgagctgtagtcccagtccactacaaaggtgttggagtcctggtattcttgctggtgtgcatcctctctttcagccaccaagtttgttttactctagagctgaatgccaacctcttgcctgtggtgaccaaacccaaccgtttttcacctccccgtggacaaggtttcccacaagtattcttggtcgtgtactacttgttccatgctcggcaaagaactcctaccagaaggagtgaagattcaagctgaagtggtgactgaagaggaatctactccagtggctgctgatcaagtggaggagccatctaactggggtttaatagagggatcgagtacctcttcactgcaataaggcgaagttttattcccttatctttgggttagttacttcatgtggaagacttcaagcttagaaggtttttatatatctcttatgaaaaggcttcacccttccaattattgtagttaagttatgcccttcgagtactatcaggacttgtaataaatacatctctttctaccatgtaaaacttgtgttctagaatgtaaagtgtactttgtaaaagtcttccgctctatctccaatgtgtgcgtatcaaatgtgatttgtaatatacctgttatgtgg

SEQ ID NO: 137572 - DNA, 489 bp, Zea mays
  Clone ID: MRT4577_56944C.1
gtggccgggcgaaagcgcaccgccacggcggccgtggccggggacggcgtcgtggagaggacggtggagaccactacttcactcgctgctgtgaaagcctggcaggggtttcgcccggttcgccaacgtcagcgacgaccacagcgccacggcgctacacctcgccgccatatgcaaggccgccccgactacgtgcaggttccccggcagcacatcattgcatctggccgctcgcagtggggacctagattgcatccggaaaatgctcgcctagggtgtggatcatctctagagggactcaacaggccactcaccgactcacaggccagtgacgcggagctgtgctgcatctgcttcgagcaagcgtgcacgatcgaggtgcaggactacgggcaccagatgtgtgcggcgtgcacgctggcgctgtgctgccacagtaagtcgtacccagcgacgctgacgccgccgtcactagactgcccgttctaa

SEQ ID NO: 137573 - DNA, 594 bp, Zea mays
  Clone ID: MRT4577_56945C.1
ccacgcgtccggtcttatcatggtagtgcatcgtgtgccgagagatgaccaggctctacttgacagacatgattactcactctgacaccgacgtggtgatgcgagggcgccaggctccgcatacctgtcctgagcgtgccatctgtctaaggacctcaccgggagcgtggacgtggtgtaactccacgggctcgctggagatggagcgtgtctagctgggcatgctgttctagacaatggaggagatcaggccgtctctgctgttgctggaccagctagacgagtactacgactaggacgatgacaccacgatggccaagaacgcctggctgctgacgaacaccgtgatgagccgccttctggcgcgcaccaactgtgattgtgacaacgccgcgcaggaggaggacctgatcgacatgcagtggcacgacaagggtgttgtcaccaactgggcgctcgtgtacatgaaccaagacacggacatgagcgtggacctgaacaccatagaagccaatgatgtggtgaattacgtgcaagcacaacggccccttatgcgcccacggcagacaagaggctccaggacatgaggatgat

SEQ ID NO: 137574 - DNA, 433 bp, Zea mays
  Clone ID: MRT4577_56946C.1
ccggtccggatatttcccgggtgcgagcccactgcgtctcggggtttgtacacggtggctgatgattcgtactgggaggacacacatctctatatatcggtttgtacacggtggctgatgattcgtgctgggggacacagaaaggggatcctaatactcagggcagttgaggaaaaataccaccgccctttcttgatgagctttacactttgtttggtcgaaccacacgcaacaagggcaatttgattagtgctggaggtgtccgtgagcccccgcgaagctatggcagccaggatactcctgatgacggtgtgggttgctccaatattagatcatcgtctaaaaggccaatcagggaagccacaatggatagccatcctaagaaaaagatgagtttggaagagcacattgctaatatttctgagtccatttg

SEQ ID NO: 137575 - DNA, 360 bp, Zea mays
  Clone ID: MRT4577_56947C.1
tttctctttttttttttcttttcattttatacgagggctctttaaatttttttagggtcaaaaacacctatttcattcacttcaccctcagcaccaaggaaataaaaacttatttaactacttatccagcaaaacacaattataatcctatcctcaaaagtccataatttaaaaaatccaccttaaccttgcaattctacaccaaagtcctaaacatgatgacactcaaagctaacaaaaccctaaaaaccataacaacaacacatctaggccttatcataagcaacgacaccccctagaatcttgccttccaaaaaaaaacaaacttcccccatcaaccaatcgaaataaggtttattt

SEQ ID NO: 137576 - DNA, 365 bp, Zea mays
  Clone ID: MRT4577_56948C.1
ggggggattggggcccctcccgggcgggccgggctgcaactctcctccgaggatcttgctcgctgcgccgctcccccgcctccggcagtgaggagaggtcagcgatcggatcttccccagcggcggcgcctaccagcctcagggagcgatggctgtctctgcgacgctacggatttctcttagagtcgagcttctttggggttatggcgctcgtgcttgcagtcatcgccgaagactaaaagcctgcttctgagactcctatcctaggaaaggatgttatcatctgcacgtgagccaagagatccgactatcgccagggggagcctgtccattggggcgcttgaggtagggtgacatcggaagcc

SEQ ID NO: 137577 - DNA, 403 bp, Zea mays
  Clone ID: MRT4577_56949C.1
agaataaagcagaagagataccgggatgtctaagacggctggcgtaggcagactcagaggagccggggcgtcggacgcggggcaataataacatttagcagctgctgtatgctaggagttctacggtcaatacgctgcatccatacactcttacaccatgcgccacatgatctatgatgactgctcatacaactgaatccctgttactaacgttaactccaagatcctatccaatgtaatcgagtactgcaacaagcacgtacatgccgtcgacgtcgccgtcgtcgcctcgaatgccggttccgacgacgtgggtgccttcttcgtcaacagtaccgacggcttcggtgaggaccttaagaactgtgatgcggacttagtcaaggtcgaacaggccacgctt

SEQ ID NO: 137578 - DNA, 400 bp, Zea mays
  Clone ID: MRT4577_5694C.1
gggaacttccaacccttttttattggggacaaacccgttctttttttttacgggacaaaaaaattttaaaaaggggtgggcttttccggggaacattaaatcaaaatatttaaaaactggcccaaaaccgttttttttaaattcccgaaccaatttcccttgtttgttattggcacctaattgggcaaaaaaacaacaaccatgggtttttggggttttcctgaggggttccaaaaaaaaaaattttttttgttcccaggttgaaaatttatttgaacaattgaaattgcccataaaaatttgccaacgggaatggaaatagtttcccaaaccgagcaaaaaaaggggccaaccatacttttttgccgggcccacctaaatatatttttggaaactcggg

SEQ ID NO: 137579 - DNA, 1012 bp, Zea mays
  Clone ID: MRT4577_56950C.1
ccacgcgtccggataaagctaattactcctacaataatgatggagagaagagcaatgttccttcattaaagaaccttcctccaattgttcatcatgaaacattcttcagcaatgttcagaatgactacaatcaaacaggattagtgcctttggagggatgttctgccagtgaggcttcacagcttctcagtgatcgtatgtatctctgcagaactgcacagttattttgaaatttctgtgccagaagttcatactttttgagcagtcttgctgcatgctactactgtgtagtgcctttacactgtattagcattgaggttggatactaagaaattttgagcacaatattgttgcctgtcactcctgtgtaacctaaggggggttgcatatccagtgtccatatactcaaatttgcaatatccaagacaaaaaaaaaaaaaaaaaaaaaaaaaaaaaaaaaaaaaaaaaaaaaaaaaaaaaaaaaaaaaaaaaaaaaaaaaaaaaaaaaaaaaaaaaaaaaaaaaaaaaaaaaaaaaaaaaaggggcgggccgttttagaaggacccaagtttacttccccgggcttgcaacgtaatagtttttttttgggggccccgaatttaatttaatgggccggggtttaacaacgttgggccggggaaaacccttggctttccccaatttaatcgctttgaagaaaatccccttttccccagttgggttaatagcaaaagggccccccccgttcgcctttccaaacatttgcccaccttgattggcaaaggggcccccccttttaccggccctttaaccccggggggtgggggggttccccccagggggacctttacatttgccagccccttagcccccgttcttttcgtttttttcctttcttttttcgcaactttggccgtttttccccgtaaagttttaaatggggggctccttttggggtcccaattaagggttttagggcccctcaccccaaaaaaacttgtttggggggagg

SEQ ID NO: 137580 - DNA, 1424 bp, Zea mays
  Clone ID: MRT4577_56951C.1
attacctgatgcttaatttgcaacttggcaccacgcgtacggtaggtaaaatcacccctgtgcctttgcgtgaagtccgttcaaatgattttggacctcgagcacggataagaatgtacttccctactgaaggctcacagtatacccctccacactgctctgtcaatttcttttggaaggattattgtcctatggttttccggaaccttcgagaaatgttccacattgatgctgcagattacatgatgtccatatggggtgatgacagtctgaaagagctttcttcacctgggaaaagtggcagtattttctatctttcacaggatgaacgttttgtcataaaaaccttgagaaaaactgagttgaagatactgttgaagatgctaccaaaatattacaatcatgtcagagcttatgataatacgctcatcacaaaattttttggcgtgcacaggattactctgaaaggcggaagaaaggttcgctttgttgtgatgggaaatatgttttgcactgagctgcgaattcatcgtaagtatgacttaaagggttctacacaaggccgatcaaccaaaaagcaaaatataaatgagaacacaacactgaaggaccttgacctatcatatgtttttcatgtggataaaccatggcgggacgcacttttcaggcagatatcacttgactgtatgttcctggagtcccagtctatcatcgattatagcatgctcttggggatccattttagagctccccatcacctgaagacatcctcatcacatcagagcagtcttgaaagatgcggaattccagatagtgatctgttgcagtatgaggaaaaaagttcctggaagggatttttgcttgttgctcatgagccaggcgctacagttggtggttcccacataagaggaagtatggttagagcatcggaagctggttatgaagaagttgatcttgttttgccaggcaccggacggttccgtgtgcagttaggggtgaatatgccagctcgagctcggaaagtgcacgaggacacgaacacagaacttgaaaacccagataccattgaggagtacgatgttgttctttaccttggtatcatagacatattacaggaatacaatatgtcaaaaagggtcgagcacgcagtcaaatctctcaagtttgatcccctttcaatatcagctgttgatcctgatttgtattcgaaacgatttgtaaaattcctggagagtgttttccctgaacaggactgagtaggcacaataaagtacatatatagtagtgctgctggcctcatttttcccccttgtataaaatgttaacatgttctcagttattcagcacggcttctgtgcaccaaaaaaaataattaaaataaaaaaaaaaaaaaaaaaaactcgagggggggggtcccggtaccc

SEQ ID NO: 137581 - DNA, 363 bp, Zea mays
  Clone ID: MRT4577_56952C.1
caattgcatattctttatttttttatttttgttagaaaaggaaaaagggcctaaccattccccagggggaacaaaactgaaacaaaggtttttggaaaccacaaattggttggaccgcaaatcgacccaaactagcaacaaatggtttttatttacaaaggcaagcaggagccccaacctatgcggaaaccgccttaaaaaaaacctccagtgatgacaaaaacccatgggcctatgcgagcttcacctcctagcaacctggtcttgaaaccaaagggggaacactcgcctggcaaaggggacgccgaacgttctatttatgcaggagatcaaccccgcttcacagggggagggggggaaaat

SEQ ID NO: 137582 - DNA, 413 bp, Zea mays
  Clone ID: MRT4577_56953C.1
gtctcttttgcttctgcacggtcataccatgctgggggttgccatgctgaccggtgtctttcaatttttggtggaggatctcatgcaacatgtttcaatgacctacatgggcttgttttgcagactatggaatggtcaagatccaaacaacagggcccgactccaagaccatgagctggccatgcaggcggaactgccggctagaactgacacatacttgggggtggcaataataaaagtggtgctactgaaacacttgtgcttaacatgtcaactatgacgaggtcggctgttagcactgtggaatgaccagtcccccttgctagtgtggtcatgactttagtgcatacaagctacgttggatatgattgtgtcatgtgtttcgggggatacagtggacgatacaacaatga

SEQ ID NO: 137583 - DNA, 565 bp, Zea mays
  Clone ID: MRT4577_56954C.1
tgatcaccatgtgtagctcagtagtgtattggttcccttcctccaaaatcataacctggacacgcccaaatccattaatcaaggcactgaacacctgcagatcctccacttcaccgtggccaggtatgcttagaaagtttctcacccgtatggcttgtgttccatgctctggattgatcagtgaagctgatcaagtggtttggtcaagctttaccaccatacgttgagtagaacatggtcgcgccgtcgcagtcgggcgccgaggacagcctcggtgtgaactatattaaccacgccagttcccgagcgattgcatgcgcgcaccgtagactcgagaggtctctaaagctccctggcccgtttgtttgaacactaccgtgcggtgatcggggaattaagttcgtcaaatccagtgctttgtcgtcgctgtcgatagatgggttgtggagttctcacggatcgattgagcccatacccgagttcactgcgattcggggttcacgtgggtaccatcgccgtcgccggtgttgcgccaccatggccaagctggcactgggtcaccgga

SEQ ID NO: 137584 - DNA, 2361 bp, Zea mays
  Clone ID: MRT4577_56955C.1
cccacgcgtccgtgcagaaacttggattgcaaccaacaagttatacatatgacggttttattaaaaccgtgatagctgggaaaggaattgcatatgccagcatagtgattaacgccatggagagaaggggcattgaaccttacagtgatacacttgctgctctctcagagggtcatagcaatagtttacagttggatttggctgaggagtttttggaaagaatttcagagataaaaccaaagcatataggttcctttaatgctttgctttctggatgtgcgattatgaatgaaccagaaagagctgtccgcatactagctaaaatgaaacatgtgaacatgaagccaactctcaggacatatgaacttttgttttctctgtttggaaatgtaaatgttccttatgaacaaggagatgtgctctctcatgtcgatgtttccaaaaggataagtatcattgagatggacatgtttaacaatggaatccaacacagctttgtgtccatgaagaacttgatacgagcttttggagctgaggggatgatagaggaaatgctgaggtacctgaatatagcagaaaatactctgtggaacataaatccttatcagaagagttatctctacagcactgcgttgcatgctctggttgatgtgaaggaaactcacagagcagtaaagatgttcaaaatcatgagatcatgcagtcttccaactaatatttcaatttataataccatgatagagtgctgcaaatggctgccatgcttcaaatcagctagtgctttgctgtctttgatgcttcgagatggtttcaatcctacggttgtgacttttacatcactcctgaaggttgtattagaaaatgataattttgaaggggctctggatctgcttgatatatgcaagattgaaggacttcagcctggcatacagactttcaacacagtactcttacgtgcatatgctagaggtcaaattcatgtccttgaatatattttggagtgtatacatcgatcaaaaatccaacctgatccatcaacactttggtacacgttttgtgcctacgaggagcatgaactgtacaatactgcaattgagtcactgctagtcctcagcatgagaatgatatctgaggatgccggcattcctagtgagaaaagaattgtttttgaagatctaatcctcagtgaagaacctgatgctgaattcaggatcataagggcattccaagcaggcgaagaattccttgcgacagctttactgaacctaagatggtgtgccacaatgggtgccaccgtatcttggtcaccggaggaaagtctttgggcaatgaggctggcagcctcgtatgatgctaacaagagaccacatataaacccctcggatgttcccaaatctaggggaaggaatccacttaaccgcccatattgggaggctaacaggtgattggttgattggttggctacgctccggcccgcggcgttccgttgatcacgcttggcacgtgtttggatggctgcagagcatctctatcgcctgctcccacgcatgcagcgttgttttttttcttcactgggtagcctgcatgcgcggaaacgcaactccccttgtttccagcggcccaggctggcacgatgctggtgcgagatgcccccacaaccaatcatgcgttaactgaggcagacctggagtctagcgtttcacagaatgaaggcaaatctctctgttgagtatgatgacaatgtcgtgttctgttttgctggaagccagtcgatgttttgtttacctaactaacatgattgcagtacgatcgggtggcctccctacctgtcgtgaagcttgttccgcatgattgctccaaattggcctcgtaccgttttcaggcttctaggccaacagcaaaatgttccgattctttacattacttgataggttgctccctttatttacccagttgtaatttctgattatactggctgtcgggagcattagctttgcaaaactgtaggaatatatatgacaacgacgaagatcgagtcgcatggcagtgacagaagaataagaggtgttacgattacaatagctggaaaccaaaacttgctctggttattttgaaggtgtttagattttggaatgacgatgttacaattaccctttattctggcaaaggtagattgtagaaggatggatagtgatgccctgttaccgcgtggtactgggttggtctttgtttgttgtacatcagttgttttttggcaggtcgttttgttgacttcgtagctgcccgaataacagaccaattattccctctcagttagaaaaaaaaaaaaaaaaaaaaaaaaaaaaaaactcgaggaggggc

SEQ ID NO: 137585 - DNA, 393 bp, Zea mays
  unsure (1)..(393): unsure at all n locations
  Clone ID: MRT4577_56956C.1
caaaaaccattacttactacccctcactcccacaccaaccaaccaacctcctctaccttccnattctcctnctncanacccacacttctgcaattactataagaagacatacatttccattactacncctacacaagatcggaggaaccatatttttattcttccatcttccgcgttcccaataaatttcccccatcctacaagaccacgtcctctctcctatccaaatgcctcctaaaaagacccatgacctaccaccccccttttccccctcttcacctaccaagacagaaggcaatcacaccctcattacacatttccttaatattttcatccactacaccaccatatataccaccccatcacccccacactccattattaactacacaa

SEQ ID NO: 137586 - DNA, 269 bp, Zea mays
  Clone ID: MRT4577_56957C.1
accaaacggaaaaaaccacagggggaggggcttgctagagaccaattctgcatcacaccaacagtattcttataattcttcttttattccgtttcatcacattgacggattgtgcgcttgtgcccactcgcacttgctcgccagaataccctcaccggctgggcccaccataacgtggtatgtaagccccggttcgaacctggaccggcggaagctccatacgaacacctggatgtttaaaccccaacggacctctgggtctatcctgt

SEQ ID NO: 137587 - DNA, 530 bp, Zea mays
  unsure (1)..(530): unsure at all n locations
  Clone ID: MRT4577_56958C.1
aacaaaggccatgcctactgacatgaggaaaaaaataatacaggtaccacactgcaatgatcgatactatacacagtggaacaacaccaagcaagagcaaaacagctgagtgaatccaaccatcaccttaccgcaccttactgtgagtgatgggtcccactactaggctagacaagagtatatcctactaacaatactagtgttatgcatggaaggaatcttccactgggtcctataaaggaacgaaactctcaccacgaatccctagcataaggtgaccaacttaaaatgcgtaacaattactaccttggatccaacggcaattcaccacaccttggcattcttggccgaaagggtaggctacaggtgtaaactgaggcagttgaaggtgcacggtgtgaaggagcagacgcccaatggacggctggggatgttgccgatgatggtgtancatcacggcgccgggatgcacatactgtacgggccacctggataggagcacaccgggcacacctggaacagaaccacca

SEQ ID NO: 137588 - DNA, 337 bp, Zea mays
  Clone ID: MRT4577_56959C.1
ggcaaagcttttaaacctgggcgggggggcaaaaacctttgaaacctggttgggaaaacccccattccggttcagtttttccccccaaaacccccggggaacccccggggttgacaattttgggtttcccctggccaacccccttggggagcattttttcccgggccttggttttggcccgggacttggttcccattatgccccccccccacttttttctgaccctattaaacctggggtggaagtttgccctaataacccccacaaactttggtaaaccaaacctttcccctttttttgacagggggggaacccaaaccggggcctttttttttgg

SEQ ID NO: 137589 - DNA, 256 bp, Zea mays
  Clone ID: MRT4577_5695C.1
ctcataccaacgacaaaaaaataaccctattgggtcactcatataaactggtgggtatgggtcacccatcgggtcacccgtacccacaaaaattaaacatctatcaaaatattatattatacaaatgttaagtatatccatctaaataccattacaaaatttctagcatcattacatgttccattacatggtaattaaattgtcgttaagcctatgacattatggcctaaaaggttgttaaatagtaaaaagatgg

SEQ ID NO: 137590 - DNA, 265 bp, Zea mays
  unsure (1)..(265): unsure at all n locations
  Clone ID: MRT4577_56960C.1
ccttccttcctttttgtccgtaacctgggggccatggtggggcgtgaccaatcctaccggcaggctctgcccttgtactccaatctcctcccgcgaccgttccaaattcctgctcacgttcgtattccacgcggcgacgtctacgtcgcggacgtcgttcccatccaccttacttcgcctatacgtaggtagccgttgctgccgcctacccaaaccctaagcctttccctcccacacgcgcttcaccccgcacatngacggcgat

SEQ ID NO: 137591 - DNA, 374 bp, Zea mays
  Clone ID: MRT4577_56961C.1
cccgcccaaagccccgccgcatcggtgcatccgcagctcatgttcgccttcttcggtctcatattggcatccacaagtctcctgtttcatcttgctcttcgctctcaatcccccttcgcccctcccatctttctctgcgctaacttccctaatcccctttgttgagactcacaattagatcgtctttctcctttggtgtttgttgtcggcggccggtgaatcggcaactctagagctcgggctgctcaaggttagcaagttctttccttctcctttgcgatttctagaggagcatcgtcgacggcttacaagtgacatggtggatgtcttatcctacatcaaagactgggagttagcgaactctcacatgcagc

SEQ ID NO: 137592 - DNA, 220 bp, Zea mays
  Clone ID: MRT4577_56962C.1
ggcgcccttgactacaagtccttctctacagccctctatggggagagcgacctgtgaggccctcagccaccctgaacagactcccttggcctcccggagggctgaggagccctgccccaccctgactcagtatctatgcaaagagctctttgtggtccttctagggggtcaggcagggatgggctaggcaggcctcttttctcagtctggtatgggagat

SEQ ID NO: 137593 - DNA, 161 bp, Zea mays
  Clone ID: MRT4577_56963C.1
tcgcgattcggcgtcgtctggccgccgcctgccgccggcctgtgtctcttgctgtcccatggacatcgttgctgctacggtgctaccaccactataatatcgacatgacaatgtgtacaaaagttgcctggctaccgttattatacttgctatttactacc

SEQ ID NO: 137594 - DNA, 269 bp, Zea mays
  Clone ID: MRT4577_56964C.1
gcatcggtcatcttatcaacaaggacatcactttcctcgcacctagcatgatcatgatgaaggtcgttgcaccgactgagaggatgtacatcacctggattggactgtctatcctaaacctgctgagcactttccaacagatggggatatcgtaggacgactaccacgagtctaacccgacgattgtgcaccggaagtgcttctaagttgtcacaagagactatacagtacctactgtgtaagcatgtgccctgcatttctctagatac

SEQ ID NO: 137595 - DNA, 651 bp, Zea mays
  Clone ID: MRT4577_56965C.1
agcgcggctccactcaaagcttgagccttccttttcttttcttgtttttgttttattttcttggtaggggggagtcgtcttctccatctctccttagcctaggagaacgagagatccagaggcaaaagcttcagggtttgtacaaattctagatctaaccggactaaccagaaaacaaaacaaaaaaagacgaaagcatgagccacttcgccgccgccatgaagagcccccttgcggtcgccgtcgcagcgcccgccgccgccgccgacgccaagagcccgctcttctgccccaagccgcggcgccccgcggcgccgctgcggtgccaccagagcggcggcttctccgacgccggcacggatctgctcgacctcctcctctcgaagggcgacgagagcggcctgtcgtcggcgtccccgcagccgccgctgttctgcggctcgccgccgcggcgagcgtcgaacccggtggtccacgacagcaggttcggcgcggactgcccgcccatgcccgtgccgggactgcccgtgcaccggcccagcccgcgcccgtcggcggcggcgccgtccatgtcgccgcgagggtgcgcccgcgcgcggttcgcgttccagcccgccgcggtccgcgtcgagggttttgactgcctcgacc

SEQ ID NO: 137596 - DNA, 592 bp, Zea mays
  Clone ID: MRT4577_56966C.1
ccggactaaccagaaaacaaaacaaaaaaagacgaaagcatgagccacttcgccgccgccatgaagagcccccttgcggtcgccgtcgcagcgcccgccgccgccgccgacgccaagagcccgctcttctgccccaagccgcggcgccccgcggcgccgctgcggtgccaccagagcggcggcttctccgacgccggcacggatctgctcgacctcctcctctcgaaggtgcttggatccttctggcgcgtcgtccccggtatcgtgttttttttgtacgtacagtacatggcgctgacgtttccctgtccgaacgctctttccagggcgacgagagcggcctgtcgtcggcgtccccgcagccgccgctgttctgcggctcgccgccgcggcgagcgtcgaacccggtggtccacgacagcaggttcggcgcggactgcccgcccatgcccgtgccgggactgcccgtgcaccggcccagcccgcgcccgtcggcggcggcgccgtccatgtcgccgcgagggtgcgcccgcgcgcggttcgcgttccagcccgccgcggtccgcgtcgagggttttgactgcctcgaccc

SEQ ID NO: 137597 - DNA, 703 bp, Zea mays
  Clone ID: MRT4577_56967C.1
tcgagtttttttttttttttttttttttttttttttttttttttttaactggttcctggacaaccggatctctttcttgagagggagatagacgtaacaggcatgagagactttattgagaacacagactagatgttcgatgacaaacaatagtcatcacttttaattcagatgaaactttaagaagggtgttaagacaacataagcaaaagcaaggcggcacgatagctaccaatagatgttacagattggtctctaatccttcgagagatcagccacacgacggtcaaaatagaacaagtacaataagcccagggtaccagccgaaagaacaggagccacactttggtatagtgcaaactaaaacttctccctgcgaatgatgtggactgccatggtaagcttactgtctttcttcttcagttcgaatagacagatgtcacccacacgcaggccattgccgcgagcaaaattgggccaacctccattcagaaaccaccttctaccattatgaaacatcaattttgccttccatgtcgtccccccgcactggagcaatatggtttgccctttagttgggagatataccgaaccatatcgtgaactaattccagcatccaacgttgagcgacaccaacattgttgttcttcattactgccacacaaatgggaatttcagatcggatagctcgcactcgctcct

SEQ ID NO: 137598 - DNA, 451 bp, Zea mays
  Clone ID: MRT4577_56968C.1
cccacgcgtccgcccacgcgtccgcccacgcgtccggaaactgctgaagacgctgaagtggatcaaaagaacttggaaaataaagatgatgtaccgaacactgaaaaaggttcctcaatgggggtggattctgacttcacttctgaatgtaaaaccaaaactgtcaataatatgaaccattctgggattactttaaaagaaaagagcagcgatcctcctgtcagtaacaagaaacaggattctgcagttgagcctgcctccaccgcaccaaagagaagaaaggttttgaagacacgcatagatgagaggggaagggaagttactgacgctgtttgggagggtgaaggttctgcagatgacaaggcagagaagaatgtcagcacaactgctgcgagcggtgcgactatcccaagcaaaccgaagccatcaacaagcaccgacaaaatcaaag

SEQ ID NO: 137599 - DNA, 759 bp, Zea mays
  Clone ID: MRT4577_56969C.1
ctctcgatcgctccctccccgtcatccacctctcgtcagaagaaccctccctctccgccctccgccgccgccgccgccgccaatcgcagcgcagccgcctcgcccccgtcgagctcgtccgcggagaagttgacctagcagcggtcgcacgagaagatgctcgacatcaacctcttccgcaaggagaagggcggcgaccctgagctcgtccgccagtcgcagcgcagccgcttcgcccccgtcgagctcgtcgacgaggtcatcgtcctcgacgaggcgtggcgccagaggcagttcgagctcgacaagatccggcaggagctcaacaaaaccagcaaggagatcggcaagctcaaggccaaaaagcaggatgcgacggagctgatacagagcacggaggagattaaaaagaggctggccgccaaggagacggaggtgcaggaggccaagtccaccctcgatgccaagctcgttaccatcggcaacctcgtgcatgaatctgtgcccatcagcaacgacgaggccaacaatgctattgtgaggacatggggagcgaagagactggaggagaaattgaagaatcatgtggatctctgcataatgcttgacatcgtatctttggataagggtgctgatgtagctgggtggaagaggtttctttttgaagggtgacggtgttctcctgaaccagcgttgataaattttgggctatctttcctgggaaaacgagactttacaccaatgcaaactccctttttt

SEQ ID NO: 137600 - DNA, 1617 bp, Zea mays
  Clone ID: MRT4577_5696C.1
agaggtttatccctaccagcctaccactcccccccaacgcggcgacggcggaaatggacgccaagctgctgctccccttccccttcgcgccggccgcggccaccaggtcccccaagtcgctcttccttggcgccccgctcccgccgccgccgcggccgccgccgttcccgctgcgcctccgcccgcggcccgcggcggtggtggcgcaggccgccgtgaagcgccgcaaggaggcccccttcgacaccgtgatccagcgggacaagaagctcaagctggtgctcaagctgcgcaacatcctggtggcgcagcccgaccgcgtgatgagcctccgcgagctcggccgcttccgccgcgacctcggcctcacccgcaagcgccgcctcatcgcgctcctcaggcgcttcccgggcgtcttcgacgtcgtcgaggagggcgtctactccctccgcttccgcctcacgccggccgccgagcgcctctacctcgacgagctccgcctcaggaacgagtccgagggcctcgccgtcgccaagctccgcaagctgctcatgatgtcgcaggagaagcgcatcctcatcgagaaggtcgcgcacctcaagcacgacctcggcctcccgcccgagttccgcgacaccgtctgcctcaggtacccgcagtacttccgcgtcgtccggatggaccggggcccggcgctggagctcacgcactgggaccccgagctcgccgtctccgcggcggagctcgccgaggaggagagccgggcgagggaagctgaggagaggaacctcatcatcgaccgcccactcaagttcaaccgtgtcaggctccccaagggcctcaaattgacgcggggggaggccaggaggattgcgcggttcaaggagatgccctacatttccccatatgccgacttctcgcacctgcgctccggatcagacgagaaggaaaagcacgcttgtggagtggttcatgaaattcttagcttaacggtggagaagcgcacgttggtggaccacctcacgcacttcagggaggagttcaggttctcgcagtccctgcgcggcatgatcattcgtcacccggacatgttttacgtatcgttcaaaggggatagggactcggtcttcctccgtgaggcgtacaaggactcgcagctggtcgagaagaaccagctggtgctacttaaggagaaaatgagggctcttgtggccgtaccacgcttccccagaagggccgcagttgggactggcgaggaggctgagggaatgaatggatcattgcagtcgcgggaccaagtgagtgacgaggaatacgacgatgaagatgaggggctctctgatatggaagatctgattagtgagctttctggtggcaaatcggatgctgactacgagtggggtgatggctggtttggtgagaacgatgactcaccgccagactttggagacgacgaagtcaaggtcgccatgaaaattgctgatggttctgccaacggcagcgcacctgttcctgtatttcctgatggcagaccaagggaacggtggtaaattgaggtgtttttgaacttctgattgatagaatcgttaatctataatcttagttcttttatcagcc

SEQ ID NO: 137601 - DNA, 286 bp, Zea mays
  Clone ID: MRT4577_56970C.1
gcggtggccggccgcggaggcgtcgacgaagcatggggaatgcggggcgctggctgcggagcttcctgtcgggcaagaaggacaggcatgcggcgcctcccaaagacaagcggtggatcttcaagcgccccccgccggcggcgcaagaagggacggcggcggaccagcaccaccatgggcctccgctcggtctgccggcgccgggcgtctacgagctcgacttcgaccaaaagaagcacgccgtgcctcgtctatggcgccgccgccgtcaggaaccatgccaccc

SEQ ID NO: 137602 - DNA, 410 bp, Zea mays
  unsure (1)..(410): unsure at all n locations
  Clone ID: MRT4577_56971C.1
cataaaacataaataaatgtcgggaatgttaatattacagtgatacatttggcttgctcaaaggtgaggatgcaagaaagtgaatacaatccagcgtgaacagtatgatgctactgttcatctatttataggcacaggacgcagnccggttgaaaatacatttatgcccttaacacttatctatgaacataatatgaaatattagggattaagtaggctttgtcccttctcgtccgtcatcgaacttggtcttcgtcatcacttcaaggcgaagctctttggctgtagcttcgtcgtccattttcatcaccttcaaattgtatttccatcttgacataagagaaaaccttcatcccgaagctgaagctcccctctgaaataacccttgtcacactagaaacacatggtta

SEQ ID NO: 137603 - DNA, 583 bp, Zea mays
  Clone ID: MRT4577_56972C.1
ccggccggggtgcgctgcggccgggtcggatctgagacgagacttgttaccatctcatgccaactccggaacgaacaagataccatgctcatcctcaactccgcctcgaccggatctccctcggactcggatccgcccgaacaccccgcgtcgctggcagatcaagagaatatgtgcattgtgtgtgacacattccctcttcacctcaggagtctcgtgaacgagggacacccgtgacgagttgctgtgaccagactatcagatggcgctcttgacgattgtcttgttgaggaccctgaccgcctggttgcttgtgagacctgcagcaagaccaacatgctcatggtctttggagagtatcaccaacaaggccgatgatgtactaccataagattgacagggagagctgccgcagcattgaatttgtgtcagacgatgatgggcttgacaccgaccactgcgaggtgctcgtgaacattgagcacaagtctcctgatatcgctcaggatgagcatggccactacaccaagatccccgagcagattgcagctggtgaccactgacacgtgttaattatatgcga

SEQ ID NO: 137604 - DNA, 1093 bp, Zea mays
  Clone ID: MRT4577_56973C.1
ctcagaacattagaaaatcaacctaaatatccactcccgtcgtcctggactcgcagttcatccacgacgcaccgaaccacaatggccacgttcctgggaagctcaccggcgctcctcgctcgtcccatcgccaagccgcacatctcctgcgcgcagaccccgcgcccggcaattgcccagaaccagacgccgtccagcgagcagccggaaccacagaaacagcggcactccgtgcaagcgcagccacagcaggcggcggcggcgaggccgaagcacgcgggcgtcgcggactccactgactggatagcctcgtcgttgacgcggcggtccggaatcggtgcggggctggcgtgggccggcttcctggccgtcggcgtcgtgtcggagcagctcaagacacgcttcgaggtcgcgcagcagcaggccaacaccaaggacgtggagcaggagcacgaggtcgtgttgcccaacgggatccggtactacgagatgcgcgtcggtggcggggacgtcccgcggccgggcgacctggtggtgaccgacctgcagggccgggtggccggcagcggcggggaggcgtttgtggacacgttcggcgacggcaagcggccgctggcgctggtgatgggctcccggccgtacaccaggggcatgtgcgagggcgtcgagtacgcgctgcgctccatgagggccggcggcaagcggcgggtggtcgtcccgccgggcctcgggttcggcgacgacggcgccgacttcggggaggagcacgtccaggtcccgcccggcgcgacgctcgagtacatcgtgcaggtcgacagggtgtccatcgcgccggcgtgaggcggcagtagatagatcgcagtcctgtggtgttctgatctttattccatggctcggctcggttcttctgtactggcagtctgacactcggtagcgtgaccacaattgttctagacccatgggacaagttcattctcgttttttcaagcaagatctcccaaaagagcagagagtttctgggtctgcagaccatgctcgatacgacaaacatatgatacagtagaaagttgtacaacaagagcatgtttctgtg

SEQ ID NO: 137605 - DNA, 302 bp, Zea mays
  unsure (1)..(302): unsure at all n locations
  Clone ID: MRT4577_56974C.1
gatgctttattaatttattcaaatagcgcccctaatatttacaaaacttaaaaactcctaccaagacgcttttgcgcaccctaaaggcatttttgtaacagaacccttcaagattctgtaaccacataagtatttctggttactagtgattcaccccaaaaccccttactaaccttctccattatcctttgcgggagaccgggccggaggggggacttcccaaaacccccccttattgggggggggggatggagatggaaactgtgaaaatctataattcctcttttttccttnacaacccc

SEQ ID NO: 137606 - DNA, 667 bp, Zea mays
  Clone ID: MRT4577_56975C.1
cattgggtacctcgaggccggccgggacacacgcgaatcctaaatctgcccttgccgcccgatccaggtctgcagactgctcactcctctccgctccgaatggcccgcacgaagcagacggcgcgcaagtcgaccggcggcaaggcgccgcggaagcagctggccaccaaggcggcgcgcaagtcggccccggccacgggcggcgtgaagaagccgcaccgcttccgccccggcaccgtcgcgctccgcgagatccgcaagtaccagaagagcacggagctgctcatccgcaagctccccttccagcgcctcgtccgcgagatcgcgcaggacttcaagacggacctgcggttccagtcctcggccgtggcggcgctgcaggaggccgcggaggcgtacctggtggggctcttcgaggacaccaacctctgcgccatccacgccaagagggtcaccatcatgcccaaggacatccagctcgcccgccgcatcaggggcgagagggcttgagctgtcgcgctgctgctgttcgtcgttgtaatgtctgaagtatatggtggtgggtgctttctatgccgtgcctatttgggtatttcggacgtgttgtcctcactgaatggaaaatggaatgcgattgctcgtctaaaaaaaacaaaaaaaagcggcc

SEQ ID NO: 137607 - DNA, 785 bp, Zea mays
  Clone ID: MRT4577_56976C.1
cattgggacctcgagccggcgggaccgatcctcaatctgcccttgccgccgccgccgccgccgcccgatccaggtctgtagactgctcactcctccggtctgctcggaatggcccgcacgaagcagacggcgcgcaagtcgaccggcggcaaggcgccgcggaagcagctggccaccaaggcggcgcgcaagtcggccccggccacgggcggcgtgaagaagccgcaccgcttccgccccggcaccgtcgcgctccgcgagatccgcaagtaccagaagagcactgagctgctcatccgcaagctccccttccagcgcctggtccgcgagatcgcgcaggacttcaagacggacctgcggttccagtcgtcggcggtggcggcgctgcaggaggccgcggaggcgtacctggtggggctcttcgaggacaccaacctctgcgccatccacgccaagagggtcaccatcatgcccaaggacatccagctcgcccgccgcatcaggggcgagagggcttgagctgtcgcgctgctgttcgtcgttgtaatatttgaagatggcgggttcgtttcatgtcgtgcttatcgtggatgtgttgccctcactgaatggaatgcgactgcccttgtccgaaattaatgaatgcccttgttccttcaaagattttggtgacttgtttaatgggcacagtgtagtcggaggtcgcaggcataccattatgtgacttgtttacatggttcaatggcgtgttgattgcttgcaaaaaaaaaaaaaaaaaagcggcc

SEQ ID NO: 137608 - DNA, 329 bp, Zea mays
  unsure (1)..(329): unsure at all n locations
  Clone ID: MRT4577_56977C.1
ctattgaaacaatggaacccacttagaattagctagaaaattttcactggtataaataacgtatgctagcaggcccaccatggcagagcggatctatatcacagcttatattttgccgagtactgcctacgtacatcttctctacgcttttttttccttcccaagggatatttaaccattaaaaaatccttggattataatccacttgatgtcttgaatcctgaagcatgtggaagggtatttaatccagtgagtgatactgtaattttggatttcgaaatgacgcattgcactgagaagtgagaatagncccggcggatcgagccgat

SEQ ID NO: 137609 - DNA, 716 bp, Zea mays
  Clone ID: MRT4577_56978C.1
ggccggccgggaaaaaaaaaaaaaaaaaaaaacgcgaatcctccaatctgcccttgccgccgccaccgcaaccgcccgatccaggtccgcagactgctccctcctcctctccgctccgaatggcccgcacgaagcagacggcgcgcaagtcgaccggcggcaaggcgccgcggaagcagctggccaccaaggcggcgcgcaagtcggccccggccacgggcggcgtgaagaagccgcaccgcttccgccccggcaccgtcgcgctccgcgagatccgcaagtaccagaagagcacggagctgctcatccgcaagctccccttccagcgcctcgtccgcgagatcgcacaggacttcaagacggacctgcggttccagtcctcggccgtggcggcgctgcaggaggccgcggaggcgtacctggtggggctcttcgaggacaccaacctctgcgccatccacgccaagagggtcaccatcatgcccaaggacatccagctcgcccgccgcatcaggggcgagagggcttgagctgtcgcgctgctgctgttcgtcgttgtaacgtctgaagtagatgatggtgggtgctttctatgccgtgcctatttggctatttcggacgtgttgtcctcactgaatggaaaatggaatgcgattgctcgtctgaaattaacgaatgactttttacctgacaaaaaaaaaaaaaaaaaagcggcc

SEQ ID NO: 137610 - DNA, 760 bp, Zea mays
  Clone ID: MRT4577_56979C.1
cattgggtacctcgaggccggccgggagacacgcgaatcctccaatctgcccttgccgccgccgccgacggatccaggtctgtagactgctcactcctctacgctccgctccgaatggcccgcacgaagcagacggcgcgcaagtcgaccggcggcaaggcgccgcggaagcagctggccaccaaggcggcgcgcaagtcggccccggccacgggcggcgtgaagaagccgcaccgcttccgccccggcaccgtcgcgctccgcgagatccgcaagtaccagaagagcactgagctgctcatccgcaagctccccttccagcgcctggtccgcgagatcgcgcaggacttcaagacggacctgcggttccagtcgtcggcggtggcggcgctgcaggaggccgcggaggcgtacctggtggggctcttcgaggacaccaacctctgcgccatccacgccaagagggtcaccatcatgcccaaggacatccagctcgcccgccgcatcaggggcgagagggcttgagctgtcgcgctgctgttcgtcgttgtaatatttgaagatggcgggttcgtttcatgtcgtgcttatcgtggatgtgttgccctcactgaatggaatgcgactgcccttgtccgaaattaatgaatgcccttgttccttcaaagattttggtgacttgtttaatgggcacagtgagtcggaggtcgcaggcataccattatgtacttgtttacaggttcaaaaaaaaaaaaaaaaa

SEQ ID NO: 137611 - DNA, 573 bp, Zea mays
  Clone ID: MRT4577_56980C.1
cgttaatgggtactcttcagggattcagatagaacatttgtattctgtttccttgattgagtatattccattacagaatgtctagaaaaattttcattttcatatgtatctgacatgatctctaaaaaaatataagtgcttgctggaagaagtttgatggtgaattccaggccgccaccaggcagggatcaatcctcaccatgaggacccaagggtgatgccaacatggtctacgtggaaaaacctttcctagagtgttgacaattcagctctggcaaacctgttcactgagcaaggtgagttattggaagcagtgaccatatataacaggagagtgcaaggtcaaaaggatttggttttttttttgtcatgtatggttctgcagaagaggttgagaatgcattatcgaatctcgatggggctgtaacttctgaatctcttttttcttctccttgctactcgtgtcatagcctttgaaaattgaagcccaatctatcttttaggatatactgaattggtgccccttgcccggaattccaattcagtcgtggaggaaccaatgttgaccttccc

SEQ ID NO: 137612 - DNA, 432 bp, Zea mays
  Clone ID: MRT4577_56981C.1
gggccccaaccccggccaaaaggctttttaagggggcccctaattaaggggggggaaaaaaaaaaaaaaaacccggaccctcccttaaagggaacattggttttgggccgggcatggaaatcttgggatttattattgggcccccaaaaaaggggggaaaaagggggccccaattttccgggggaagaaacccacggtttccgactttgaaaaaccccaaagctccctaggacccaaaaaaaaaaccccctaaaccaggttttaaaaaaaaggggcccggacaaatgggggccccacccggggggggaaggccccaaaccgggaaccccaagggaaaaggatcccttttcaaaattcccccccggggaggaataaaccccgccccccagttggggtttgaagaccccctttaaaacaggccggccccccgaa

SEQ ID NO: 137613 - DNA, 678 bp, Zea mays
  unsure (1)..(678): unsure at all n locations
  Clone ID: MRT4577_56982C.1
actgaacgatctcaatctccctagcaatctctagcggcagatcctcgtgcgaagcaaagcgctagcccccttcgtactgtcccgatggcccgcacgaagcagacggcgaggaagtccactggcggcaaggcgccaaggaagcagctggccaccaaggcggcgcgcaagtctgccccggcgaccggcggagtgaagaagccccaccgtttccgccccggcaccgtcgcgctccgggagatccgcaagtaccagaagagcacggagctgctgatccgcaagctgccgttccagcgcctggtgcgtgagatcgcccaggacttcaagaccgacctccgcttccagtcctcggccgtggcggcgctgcaggaggccgcggaggcgtacctggtggggctcttcgaggacaccaacctctgcgccatccacgccaagagggtcaccatcatgcccaaggacatccagctcgcccgccgcatcaggggcgagagggcttgagctgtcgcgctgctgctgttcgtcgttgtaatgtctgaagtatatggtggtgggtgctttctatgccgtgcctatttggctatttcggacgtgttgtcctcactgaatggaaaatggaatgcgattgctcgtctgaaattaaaaaaaaaaaaaaaaaaaaaaaaaagtaaaaaaaaanaaaaa

SEQ ID NO: 137614 - DNA, 367 bp, Zea mays
  unsure (1)..(367): unsure at all n locations
  Clone ID: MRT4577_56983C.1
agccaagagagacagcgaccgcgcagagccaaaggccggggagcggaacacccgacaaagccagngagagagcggcgagccgccgaggccaaggaggcccgaaaccggcacccacgggggcccccgggcaccagggccgaccaccccacggccgaacagcagcccggccaggaacaanacgacggcgcgggagggggccaagcgcggaaacgccgggcacaccaaacaccccagggagcccacagagcggcaggaccgggcgaacaggaaccccgaggcggacggcggaggaggaccagagacgcagcccgaagcaagccaggaaaagaggaaaaggaaggcgaacaggacaaaccaagaacaagaa

SEQ ID NO: 137615 - DNA, 741 bp, Zea mays
  Clone ID: MRT4577_56984C.1
cattgggacctcgagccggccgggacacacgcgaatcctcaaatctgcccttgccgccgccaccgcccgatccaggtctgcagactgctccctcctcctctccgctccgaatggcccgcacgaagcagacggcgcgcaagtcgaccggcggcaaggcgccgcggaagcagctggccaccaaggcggcgcgcaagtcggccccggccacgggcggcgtgaagaagccgcaccgcttccgccccggcaccgtcgcgctccgcgagatccgcaagtaccagaagagcacggagctgctcatccgcaagctccccttccagcgcctcgtccgcgagatcgcgcaggacttcaagacggacctgcggttccagtcctcggccgtggcggcgctgcaggaggccgcggaggcgtacctggtggggctcttcgaggacaccaacctctgcgccatccacgccaagagggtcaccatcatgcccaaggacatccagctcgcccgccgcatcaggggcgagagggcttgagctgtcgcgctgctgctgttcgtcgttgtaatgtctgaagtatatggtggtgggtgctttctatgccgtgcctatttggctatttcggacgtgttgtcctcactgaatggaaaatggaatgcgattgctcgtctgaaattaacgaatgactttttacctgctaaaaaaaaaaaaaaaaaaaaaaaaaaaaaacccaaaaaaaaaaaaaaaaaggccccta

SEQ ID NO: 137616 - DNA, 427 bp, Zea mays
  Clone ID: MRT4577_56985C.1
ggaaagggaaccaacccaccccaagcaaaaacctggggggggttttatttaatgaaacaacagggcggggggcgttatcctggatggggggccccccgtacaaagccttttttattgatcaagatcggtaacaggacaccaaacttcaaaccctttgggtgctgccatcccccccctgtttgggtactgtaatgggcaacaaacacataatatttcccccacaaacttgggcttaaccagccccaaatcaaagggggggaaagagtgaggagccaacgtgacctgcatttggtccgcggggttgctaaagtgggttttcaccggcccaaccttgttcgggttactgaaggagttcttggccatgaccttgccaaacgtgaggaccgggggggttgatcccaacgcgttaacactggcccccgatccc

SEQ ID NO: 137617 - DNA, 873 bp, Zea mays
  Clone ID: MRT4577_56986C.1
tgggtacctcgaggccggccgggaaaaaaaaaaaaaaaaaaaacgcgaatcctccaatctgcccttgccgccgccgcccgatccaggtctgtagactgctcactcctctccgctccggtccgaatggcccgcacgaagcagacggcgcgcaagtcgaccggcggcaaggcgccgcggaagcagctggccaccaaggcggcgcgcaagtcggccccggccacggggggcgtgaagaagccgcaccgcttccgccccggcaccgtcgcgctccgcgagatccgcaagtaccagaagagcacggagctgctcatccgcaagctccccttccagcgcctggttcgcgagatcgcgcaggacttcaagacggacctgcggttccagtcgtcggcggtggcggcgctgcaggaggccgcggaggcgtacctggtggggctcttcgaggacaccaacctctgcgccatccacgccaagagggtcaccatcatgcccaaggacatccagctcgcccgccgcatcaggggcgagagggcttgagctgtcgcgctgctgttcgtcgttgtaatgtctgaagaagatggtgggctcgtttcatgtcgtgcctatcgtggatgtgtttccctcactgaatggaatgcgactgcccttgtccgaaattaatgaatgcccttgttccttcaaagattttggtgacttgtttaatgggcacagtgtagtcgtaggtcgcaggcataccgttatgtgacttgtttacatggttcaatggcgtgttgattgcttgcaatggtttcaggcataccattatgtgaatgctgaagatgaaaatctgtgtgcactattgattaaaaaaaaaaaaaaaaaactcgagagtcttct

SEQ ID NO: 137618 - DNA, 838 bp, Zea mays
  unsure (1)..(838): unsure at all n locations
  Clone ID: MRT4577_56987C.1
cctcgaggggccggccgggnaaaaaattacaaaaaaaagaaaaaaaaaaaaaaaaaaaataaaaaaaaaaaaaaaaaaaaaaaaaaaaggatcacacccctcattcatgtgtacatgttgttgtgccacacaccttcgctacctagctagctcgtcgcgacttgttctaaccagctagctctgcaaagcgcaagacttctctttccatccatccatccatctcgatctttctctctcatatgagcagcagagcagatgatgagctcctcctccggtattaagcaagaagggcccaagctgttcagctcgaggaggatcctcgcaagggaccgctcgagcgtggccgtggccgacgcgtccttccgggtatactacagtctcggcgccggcaccgtgccgttcctgtgggagtccaagccaggcacgcccaagagctccgtcaccccgccggcctcggcctcggcctcgtcgaccgccggcgccgtgccggtgccgccgatctcgccgccgccgtcctaccagcaggcggtgtcccggtccaaggccaacaagttcgcgaggaagcagaggccagcaagaacctcttggcctcccgcaggttggatcatcggctggctgagcctgaacgtcaggcggcggtcaccgccgtcgtcgtcgccgacggatcaccagcagcgctgcgtcgcccgggacgaacatggtgtcgttgtcgtcgacagcgacgacgagcggcggtcgccgcgttcttccaccnttgtgctctgatcnngatctgatgagctgcccggggcggatcggacgtaccggtggatttactggatattagctgntgcactac

SEQ ID NO: 137619 - DNA, 682 bp, Zea mays
  Clone ID: MRT4577_56988C.1
cattgggtacctcgaggccggccgggacacacgcgaatcctcaaatctgcccttgccgccgccactgcccgatccaggtgtgcagactgctccctcctcctctccgctccgaatggcccgcacgaagcagacggcgcgcaagtcgaccggcggcaaggcgccgcggaagcagctggccaccaaggcggcgcgcaagtcggccccggccacgggcggcgtgaagaagccgcaccgcttccgccccggcaccgtcgcgctccgcgagatccgcaagtaccagaagagcacggagctgctcatccgcaagctccccttccagcgcctcgtccgcgagatcgcgcaggacttcaagacggacctgcggttccagtcctcggccgtggcggcgctgcaggaggccgcggaggcgtacctggtggggctcttcgaggacaccaacctctgcgccatccacgccaagagggtcaccatcatgcccaaggacatccagctcgcccgccgcatcaggggcgagagggcttgagctgtcgcgctgctgctgttcgtcgttgtaatgtctgaagtagatggtggtgggtgctttctatgccgtgcctatttggctatttcggacgtgttggttcactgaatggaaaatggaatgccatttctcgtcagaaattaacgatgactttttacctgc

SEQ ID NO: 137620 - DNA, 932 bp, Zea mays
  Clone ID: MRT4577_56989C.1
gccgggccgggggagagcatcaagcagccatgtggaggagggctttagcgatggtcctgttcatggctggcgccgcgctgctcgccggggctgccggcgccggcgcgcagcagggcgtgtggagcatcatcacccggcccatgttccaaagcatgcttagacaccgcgcattgggtacctcggccgggccgggaattgttgacagtagcgtggacgcatcgtcatcattcgagcagaggggagagagagagagagagagagagagatgaaggagggcacggcgaactgcatcgacatcctcatcgccatcatcctcccgcctctcggcgtcttcctcaagttcggctgcaaggtcgaattctggctctgcctcctgctcaccttcctcgcctatctccccgggatcatctacgcgatatacgttatcaccaaggactagccagctagcgccgtaaaccgggacaaggtgagagagctagctgatcagccagcggaggtaatggagatgaactgctgagatcacttgccctgctgctcaatgtttctggatggagactgaatctcagctgtgctgtgctgtgctgtgctgtgctgtgatgctgctatatactaccgattgatcctgaaatttgtcgcttttcgttcgtgtctgcatagtatgtgatgcatagtctgtaaaatttctctcagactcttgtgctatagtatgtgatgcatgcatgtgtttgcttgatgaaaaaaaaaaaaaaaaaaaaaaaaaaaaaaaaaaaaaaaaaaaagcagcagcagcagcacagtcatccacactaacgaacgaactcttgctccgatcacgagctagctgaggtcgacgatggcggctgtgctgaacagcacgtggctggcggcggcgctgctggcttcgtccgcttcggactgttctctattcacta

SEQ ID NO: 137621 - DNA, 278 bp, Zea mays
  Clone ID: MRT4577_5698C.1
acttcgtcttaattcccggctggacgccactcctccgcagcactctgctcctaacgctggttctctcttacaactgcaacaattgctgtcattcgacctacttgctttgacaaacccattatcattctaccaacaacccatcattgattgtgccctcttttacatctcttatcatttataaatcattactaaacccaaccttactcatctttgagaatatccacatattacaaactacatttataacaaataatcctttacctatcacccttcccaac

SEQ ID NO: 137622 - DNA, 596 bp, Zea mays
  Clone ID: MRT4577_56990C.1
attcgtctgagacgaggccgacgaccatactgcctccccttccccgcctccggtgcccaacgccacgacgaagccttgaggtgagaatggcgcatcaccttaaccaacccactgatctacataagctaggtgacccaggtgccacctgcagctccagcattctctgaacgtgcacgcgtcccgtaacatcatgccactgtcttttctccaccgttatgcaaaggagatttgccacaagagaactacatgacacataggctttgaaggacctgcagtgtctgataatggtggcatcaatggtccagggatgcctactccgactttttgcctatgctccacccgagaaatgtgctataaacttcatgattgattacatgatgggcgctgtgtcagctgctgtttcaaatactgcatgtgctcccattgaaagaatgaagctgcttatgcagaagcaggatgagatgataaaatatgctaggttatcaagaccgtacaatggtattgctgatgtgcttcgaacgtagcatcaaggaggaaggattctcttccttgagaaggggtagcactgctaatgttattcgagacttccctactca

SEQ ID NO: 137623 - DNA, 502 bp, Zea mays
  unsure (1)..(502): unsure at all n locations
  Clone ID: MRT4577_56991C.1
cggccttagcgaaaaaaaaaaacaaagaaacaaaacaaaaaaaaaaaaaaaaaaaaaaaaaaaaaaaataattaaaaaaaaataaaatacataaaaaaaaaaaaaaggtttttaccttttgcggggccccccccttgcggctaattctcctcccgtgggggggggcgggggggcccttttgcctccttttggggggccccctctccccttttggcggggttcttcaatttacctgccgggctgtctcctgcgccgcctcccgtaacacactgctcgatgttcccttttctcactgggcggccatctgcgataaatgcctctttcatcttccacttatctnntcgcggcgtccgtcctccttttctcttcctctccttntttnnncttcttgtccaattgcgtcggcggcatgcctcggggcgccgcgttgaaaggtgtttttgggtcgcttnggtctggcttgttaggctcctctgcgcggtccctgttttgcccgccgaat

SEQ ID NO: 137624 - DNA, 607 bp, Zea mays
  Clone ID: MRT4577_56992C.1
ggccggccgggccggggatccaaaaaaaaaaaaaaaaaaaaaaaaaaaaaaaaaaaaaaaaaaaaaaaaaaaaaaaaaaaaaaaaaaaaaaaaaaaaaaaacctccccgccgccgccaccattggttcgcctttgccccttttgtctcccatcgcccgaagaaaaccagaaacgcccaaggggttagggtctccaaaagggggttgaaaaacgactttgatttactcaatcccccggaaaagtttgaaaagttaaagcacaaaaaaaaggggttagtccagccccccaactcctttttcagggatgtaaagggccagggttgtttcagaataaccacggggttcagccactcccaaactggggttgggggcccaggttgccaaattgttctctgccaaccaacgcgggggaaaggccaggttccaccgaggggggctccttccgccgaaagggcgataaggccctgtttctcttaacgggaaaaaaaaaaaattgggggttttgcaactttctcaggatatgaactgaactcggggaggattttgtaaataataagggcggtaaggggggccccaaaaaaaaaaaaaaaaaaggcccctagggcccc

SEQ ID NO: 137625 - DNA, 660 bp, Zea mays
  Clone ID: MRT4577_56993C.1
cctattcccaggagagcgcatatacgagaatgggcagaattccccacagattgtgctatttgttggcacgctcgtcaaaaaatatgcagatggtctttgtctgagcgtgggcggacgcgtggggtggtacatcaatccatccattcctgaggcagaaacccttatgtccagcgcacgcggtgatcataaaccagtgaagtggaatgcaactgttacttcaagccagcttatatctcctgttgccgaggagcaaaaggtgtcgtatatcaagtatctccatccctttgaaaacaagggaaaggagttcttggttacagtcactataagaaaagttgacagcaagtggtggtataactcgtgcagaaaatgcgcctgcacagctgtcactcacggagactcttacaaatgcacaaaccgtgattgcgctaacattgctatgcccgtccaaaggtataaaatatttgtcactgcaggagacgagacagctgacacagacttcattctctttgggcgcatggctcaaagaattgtcaaaaggccttgcgatatgctcatagcgaacactccatcaggcttcattccagatgcaatcacatagctgcttgaaggacgttcattggaacgttagctttctggcacacattaactctggaacgtctg

SEQ ID NO: 137626 - DNA, 451 bp, Zea mays
  Clone ID: MRT4577_56994C.1
ttcttgcggttactgcacgtctaccgcctccaatataggcctatctcccttgcaagtctaagcttcaccttcaaccatgggtaaggacaagtgccacatcaacattgtggccattggccacctctactctgacaagatgaccaccaccggccacctgatctacaaccttggacgcattgacacgcgtgcaatacataggtttgagaaggaagctgctgatatgaacaagcggaccttcaagtatgctcgggtgctctacaagctcatggctgagctgtgataggagcatcaccatcgatattgctctgtgtaagtcagagaccaccaaacattactgcaccgtgattgatgcctgtggacaccgtgacttcatcaagagcatgatcactggtacattccatgctgactgagctgctcttatgaaagactccaccactgacggttatgaggc

SEQ ID NO: 137627 - DNA, 1329 bp, Zea mays
  Clone ID: MRT4577_56995C.1
cattgggacctcgagccggcccgggccggggatgagtgtgtgttcgtttgtgtgcaaatcctcgacaccgagcaagaagccaggaaccagctcaaagttattcgtccaagaaccccaccccactccccgaaatagaaatttcgtcttggagagccaccaatggcttgttccactgcatctttagcggcgacgctgctggcgttcgcgctgatgttccaggcctgcgtcgcggggaggaggaggctcaccgcgctcgtgcaggagccggccatcaccatgaagtaccacaagggcgcgctcctgtcgggccccatcgccgtcaacttcatctggtacggcgacttcacggcgccacagcgggcggtgatcaccgacttcgtctcgtcgctgtccgcggccccgcgggcggcggcgcagtcgcagccggagccgtccgtgtccacgtggttcaagacggcgcgcaagtactacgacacctccaaggcgcgtttcccggcgctgcgcctcggctcccacgccgtcgaccggaactgctccctcggcaggcggctcacggagcgggacctcctcaggctcgccgccaggggggcaccgagccgcgccatcaacctggtgctcacggccgccgacgtggccgtggacgggttctgcgcgtcccggtgcggcacgcacggcgcggtccccgcggtcccgcgccggccggttcgcgtacgtgtgggtgggcaacccggcgtcgcagtgccccggacagtgcgcgtggccgttccaccagcccgtctacggcccgcaggcgccgccgctcacgccccccaacgccgacgtcggggtcgacggcatggtgatctcgctggcgtccatgatcgtcggcaccgtcaccaacccgttcggcaacgggttctaccaggagggctcggccgacgcgccgctcgaggccgccacggcgtgcgccggcgtgtacggcaagggcgcgtaccccggctacgcgggggcgctgctggtggacccggccagcggcgccagcttcaatgccaacggggcccacgggagaaagtacctggtcccggcgctcgtggatccggacacgtcgtcgtgtgccaccttggggtagatttcgcggatcgtaaattagtgtttgcgatgtggcggtggtggtgctgtggagtgtgttccacgcggctaaaagtttgtgctaaagtagtactgaccaggttgcattatttcatttgttcaatgaaaatgaagtattttcacgcacacacgtcggtcgattttgccaaaaaaaaaaaaaaaaaaaaaaaaaaaagggccggacgcggggcggacgcgggg

SEQ ID NO: 137628 - DNA, 187 bp, Zea mays
  Clone ID: MRT4577_56996C.1
gtcggtaactgagctctcctgcaaacactttgctcctgtcaaaacacttcgtggatacagctgaccatggttcgctcaatccttcccatttaatcacaacagattagaagataataagttcctatgatagatacctcaacaaatgtcgacaccgatgcacagacaactaactatgaagcacacacag

SEQ ID NO: 137629 - DNA, 298 bp, Zea mays
  Clone ID: MRT4577_56997C.1
aaaccttacgcagaaacaaataccgaaaagagaaatcaccgtatcaattaaggtttggcaggaatccatataacatggaaccgaccgactatgacgaggtccaaaataaaagtaaccgccacagatgtgccatcccacacacacataaaggttatgaggacacaccgaaccggccgacgacgatcactaactgcatttactgcgccagcccgcaactgtagcgcgctcaagactgacaacaaactcgttatacacctactggatcttggggtcagggtcgtcgatgtcagggggggcg

SEQ ID NO: 137630 - DNA, 328 bp, Zea mays
  unsure (1)..(328): unsure at all n locations
  Clone ID: MRT4577_56998C.1
ttnatttttttttttttttttttttttttttttggggtttttttaaatttattggcggttaacacctatcccgggacataaatacgacccaccaaatttcaccacccacaaaaccccaacaaaaccccaacccaacaacaggcgtaaaccatcatacggaagcaaacaaaaaattgcggctggaaatgaaacctttcgaaccaaccctaagcggcaaaacccaagctgccggcaacctcaaaaacaaaacggaaaccgacgccgttcttctcaaacccctccaaggcccggttgacccaatccatcttgaagacctcaaccccggccc

SEQ ID NO: 137631 - DNA, 371 bp, Zea mays
  Clone ID: MRT4577_56999C.1
cctgagagatccagcatatttgacagcaacaggggtgggagtagcttttttcctgcaaggggagcagtccaatctgactcatcaacaaaacaagaactggagaaatccaagatatttgcactagtcgagttagccaatctatgcgatggatgccctgcataaatctgttgcggcacatttaatctactgatctggtgtaaaccttcctctgctgcataattctagaagcactctttactgttgccattaccattatcttgagaaaaggatgagtggctccttgaacttgctgaagtttgtggattttctttcaaatcacatgcatattccatgaaccagattttattccaaggaagatcctgaaaaagacc

SEQ ID NO: 137632 - DNA, 294 bp, Zea mays
  unsure (1)..(294): unsure at all n locations
  Clone ID: MRT4577_5699C.1
acttcgatctcttcactgccaccatccctctgctcgtctcgccgtcgactgtgtcctgtctgtgctgcagcgcagggaaagttagctcctgctcctgctacgatgcctcgaccccgcgcctctccacctcctccatcctcctccacgtggttgtgctcctcgagacnccgacacagtctcctcgtcgacggcagcaagctgtcatgtccttcgccaacataaaccgtgcgtcgccgcttctcacgggtacgtcgcacgcagatcggtcaactgcggtcggtggcacgccactcg

SEQ ID NO: 137633 - DNA, 356 bp, Zea mays
  Clone ID: MRT4577_569C.1
gggggagggggttattttttaaactattaaaaactcaaatgggcattcaaacattacgatgatgggacccgggcttatgaaaccaaaccccggaacttaggcaaaaaaaaatgggaaaaatggtcttttcttttggggttcccgataacaagaacaaactggaaaaaaaaggcccattttgtttccggaaactctttgcctggccggcaggaaaacccttaacggggggaaaacctcaaacagggggcaaaatttagcttataatatggaattagggataaacaaaagggatcccaagcttatatgaccccccccattttggttttcccggggttatcctccaaggggggggtttt

SEQ ID NO: 137634 - DNA, 1752 bp, Zea mays
  Clone ID: MRT4577_56C.1
atggcgagggccggcgtactaccgctcatcaccgcccccattgtcgccaatatgcgactacatcacgtgctgatcgatggaggggctggcctcaacgtcatcagccatgcggcgttcaggcagctgcaaatcccggggtcccggctggggccctcctgcccattttccagagtaggcccgcaacccgtgtatcccctcgggagcattgcgctcccagttacatttgggacggaggaaaacttccgcacggagaacgtccagttcgacgtcgcggaggtcaagctcccctttaacgccatcatcaggaggccgactttgtaccggttcatggccattgcccattacgggtacttggtcttcaagatgccatcccccatgggagtcctcagcgtgcggggcgaccgcaccgctgcgctggcggccgttgagaagctacacgccctggcggccgagaccgctcgaccgggcggtggagggagaagcccctcagcctccggtgccaaagcaccgaagccggtgagccagaagccttggaggcagtccgtggagcggcaggacttcatccatgaggaggttcggaagctgttgcacgccggcttcatcgaagaggtccatcaccccatgtggctggccaacccggtcatcgtgccaaaagcgaacaggaagctccggatgtgcatcgactacaccagcctgaataaggcatgccccaaggacccatatccacttccacgtatagatcagatcgtggactctacctcggggtgcgaccttttgtctttcctggatgcctactctggttttcatcaaatccggatgtccagggaggacatgaagcacgccgcttttgtaacggtagatgggctatactgttatgttgtgatgccttatggtctgaaaaacgccctgtcaacatttgttcgggcgatgagtaagaccttcggggatctgatctgggacaaggtggaggtttacgtcaatgacatcgtggtcaagactagaagggggtcgatcgtagtggaggatctgaccctggttttcgacaagctacgggcaacccgcaccaaactgaacccggagaaatgcatcttcggcgtctccacaggaaagctgctgggtttcctagtttcatactggggcattgaagctaacccagaaaagatcaaggctatcgagataatgaggcctcccgcccgtgtcaaggacatccagaagcttgcgggatctctggctgcccttagccgcttcatttcaaggttgactgagagggcactgcctttcttcaagcttctatggaaatctggcccttttacttggaccaaagaggcagagcaagccttccaagaattgaagcaacacctaacttccctgccgatcctggttgctctagagccaggggaaccactgtacctatacattgtggcggctgcagaagcagtgagcatggtgttagtcgccgaaagggcgacaccagaagggcagggacctgagaacttaggaccaacatcgggcacccggattgtccagaagccggtttattacgtcagcgaggtcctccatgaagcaaagaccaggtacctcgagacacacaagctcctctatgttgtcctggttgcgtccaggaaattgcgtcactatttccaggcacacagagttgtggtagtgacctcctttccattgagggccatcctccacaactcaaacgcctctgacaacatcgccaaatgggcagcagagctcgctgagttctag

SEQ ID NO: 137635 - DNA, 324 bp, Zea mays
  Clone ID: MRT4577_57000C.1
actgtgctggaacgataccctggggcctgttcaggttattaagcagggaggcaagaggtacaaggacaactagaacatcgtaatcctagggggactgctcggcgggcaggaacgcggctcggcagttcgcctagacgaaccttgacactaacgagcacgcgctcatactcatggacgctgacagttcctaccagagcgctggcctaaccaaacatcacctgttagcatagagggctcccagacacccctcagtccaagtatgcgtacgaagccgggacatacaagctattcgcctgaactgggactacgaacaaagaccctgac

SEQ ID NO: 137636 - DNA, 523 bp, Zea mays
  Clone ID: MRT4577_57001C.1
gccggccgggttgggaattacttgttcccgtcgtcaatgcagtgctgtacagagaaaaaaaaaaaaaaaaaaaaaaaaaaaaaaaaaaaaaaaaaaaaaaaaaaaaaaaaaaaaaaaaacaaaaaagaccctagaaccaaaggcctcccccgggatgattagaatcccccgcccctgctgtatcgattcccctcaaccttgtagggcggcgcccggccatccaatttgggcgcgatagagcactactcttcacgcgcgggtcctggggtatgcttttaccacgtgtgcgacggttaaaaccctcggcgttggccaaattaatggagttgctgcacttccccctttcggggggtgtccccctttcgcccagtgccgtactggtatccattcccagccgtttgcgccatctgaatggccaatggaaagtgtaagtggaaggattatgttaaaattgcgaattaatttttaatacatcctgtcatttttttgaccaatacgccgattttggccactacccttataa

SEQ ID NO: 137637 - DNA, 450 bp, Zea mays
  Clone ID: MRT4577_57002C.1
atggcgagatatgatgacgaggcagatcaggcggtagctgatgaggtggaggctgaggcgacagcagatgaggcggaggcagatgaggcgacaactgcaagtactggcaacattaggagtcgtcggtcccttccgttgaagcatcggaaggaattcgaacgacggcaaataattaagccgacggggaccatgtctacgaaagaggtgtactgggacggacaagtccaccgtacaccagtcagtaacatgattgggatttgctatcgattcttttacctaaggatggtcattgaggaacaatatcgcttgtccgatgatatgagccttgatgatcaacacatgcgagagaagtacgttgtggggcacaagggtcaagatacagatcactcggaaattctgtgcgacgagaatgtgacacaaaagttgggtcactatattgaaaatttgtga

SEQ ID NO: 137638 - DNA, 315 bp, Zea mays
  unsure (1)..(315): unsure at all n locations
  Clone ID: MRT4577_57003C.1
caacgattgtatggacaaagtccaatcgtttttggatctttcccttctctacatgctgcttggccaattgctattacgatttttgcaccagattacaagatcgtaaagtttgttggtactttgtatgttgcaactgtttggtgggctgcaatgtatcttaatcatcactttttggtggatttgctcggtggagctatttttaccgcttttgcttactttgtttctacacaatttattgctctcatgactanatacctgaaacacaagatatattctcgtggttctttgaaatggattatcatgagtggagagaaa

SEQ ID NO: 137639 - DNA, 631 bp, Zea mays
  unsure (1)..(631): unsure at all n locations
  Clone ID: MRT4577_57004C.1
attcgtcacttagcttcactcggttctgcttctacacatctatatatcgttagtttggcaaagaaaagaggcaacgacgatggctgctgcggcggcgatgatggtctccggaggacgggcggcgctggcggtggcgggcgtgctctgcgcggtggcggccatggcggcggcgcagcaggcgtcgaacgtgcgggcgacgtaccacctgaaccgcgtgggacgccgacaagccgctgtcgtggcggcagaagcacggctggacggccttctgcgggcccgccgggcagaagggccaggccgcctgcggcaagtgcataagggtgaagaaccgtgcgacgggcgcgtccatcgtggcgaggatcgtggaccagtgcagcaacggcggcctggacctggactacgagacggtgttcaagaagatcgacaccaacgggcagggctaccagatgggccacctcaacgtcgactaccagttcgtcgcctgctgagcaacagagctcagccagatccttcctgtgtatgtatgcatccatgcatgcaggcaggcagatgcagagaccgacgtcgttgtaaaacgcgtggccttacttgagatgaataaacgcaactgntagcgtcttgcaactgtcgc

SEQ ID NO: 137640 - DNA, 849 bp, Zea mays
  Clone ID: MRT4577_57005C.1
cattgggtacctcgaggccggccgggacctcatctctcattcttcaattcgtcacttagcttcactcggttctgcttgtacatctatatatcgttagtttggcaaagaaaagaggcaacgacgatggctgctgcggcggcgatgatggtctccggaggacgggcggcgctggcggtggcgggcgtgctctgcgcggtggcggccatggcggcggcgcagcaggcgtcgaacgtgcgggcgacgtaccacctgtacaacccggcgcagaacgggtgggacctgaaccgcgtgagcgcgtactgcgccacgtgggacgccgacaagccgctgtcgtggcggcagaagcacggctggacggccttctgcgggcccgccgggcagaagggccaggccgcctgcggcaagtgcataagggtgaagaaccgtgcgacgggcgcgtccatcgtggcgaggatcgtggaccagtgcagcaacggcggcctggacctggactacgagacggtgttcaagaagatcgacaccaacggccagggctaccagatgggccacctcaacgtcgactaccagttcgtcgcctgctgagcaggagagctcagtcagatccttcctgtgtatgtatgcatccatgcatgcaggcaggcagatgcagagaccgacgtcgttgtaaaacgcgtggccttacttgagatgaataaaacgcaacatgtagcgtcttgcaactgtcgcaagcacagctactactgctactgattaaataaacaggactgcaataatagtaataaactatttaggcctcgttagttttgaaaacaggcatttttttagttctgggccggatggagtgaatca

SEQ ID NO: 137641 - DNA, 392 bp, Zea mays
  Clone ID: MRT4577_57006C.1
ctccattcggttttccaaaaaaaacatggtgggggggcccggccccacttaaaaatttggggctttcacaaacaaaggggggggggtttttcccagcccaaaaatggggcccccccgggcggggggccacacacaaaaaaacaaccggtacagcctaaaagggaaaaacgggtttcccattgagcatggaaacgggcccccttgtttcgccaccattctggcgggtttcccggttcttttcggggccccgggaggggaaaccgaagcccccgaaggggttacccggccaatttacccatttggggggggggaaaccccaaataatcccggggggacccccccacccccatgatgtttgagctttcgagggcgacaacctcctgcaggggggt

SEQ ID NO: 137642 - DNA, 900 bp, Zea mays
  Clone ID: MRT4577_57007C.1
atctctcattcttcaattcgtcacttagcttcactcggtacggttctgcttctacatctatatatcgttagtttggtatgtactaacggctcgatctgcacaaggtaagcacatcgatcgctgcatgcccgatctcgacttgctgagttcggagctggtggcgtacgtgcaggcaaagaaaagaggcaacgacgatggctgctgcggcggcgatgatggtctccggaggacgggcggcgctggtggtggcgggcgtgctctgcgcggtggcggccatggcggcggcgcagcaggcgtcgaacgtgcgggcgacgtaccacctgtacaacccggcgcagaacgggtgggacctgaaccgcgtgagcgcgtactgcgccacgtgggacgccgacaagccgctgtcgtggcggcagaagcacggctggacggccttctgcgggcccgccgggcagaagggccaggccgcctgcggcaagtgcataagggtctgtggctctgtgtctgtgctaccttcacttttcctcctgctggattgtcacaggagattgttggcctgctgcaggtgaagaaccgtgcgacgggcgcgtccatcgtggcgaggatcgtggaccagtgcagcaacggcggcctggacctggactacgagacggtgttcaagaagatcgacaccaacggccagggctaccagatgggccacctcaacgtcgactaccagttcgtcgcctgctgagcaggagagctcagtcagatccttcctgtgtatgtatgcatccatgcatgcaggcaggcagatgcagagaccgacgtcgttgtaaaacgcgtggccttacttgagatgaataaaacgcaacatgtagcgtcttgcaactgtcgcaagcacagctactactgctactgatt

SEQ ID NO: 137643 - DNA, 1835 bp, Zea mays
  Clone ID: MRT4577_57008C.1
gggtaccctccgggttcggccgggtataacaaaacgcgtgggagctattgagatcgtgcgtgctgtacgtgcatcctccatatgtcgcttagaactactgcttggctatcggccaggccagggcaccaccagccggtgcagtgtttgtcggcgccggagaaaccacgccgccggtcggcgaactaccagcccacgtcttgggactacaacgctcttctgtcacttgattctggcagacctggtgatcaggtccatccttctagttattataagatgaagagaaggataagagatatgttgctcaagaaagtagaaccatcttctaaacttcagactattgatgcaatgcaacgacttggaatctcttaccactttgaggatgagattagtaacatcctatactccatctccaatgagagtaccaaagctcagtacacatatgacaacattgctttcacagccttaaaattccggttacttagagaaaatggtttcccaacaatcctaggaccattaggctaccataattatgaaaaattcatcacaaagacaccaagtctggaggacgcaaacacacttctattactatacgaggcctcatatctggcatttggagatgaggaaaaattggatgtagcaaggacattttcagctaaagcacttaagcaacttatgccattcatgctaccacacttaagggagggtgtggcacattctttagaacttccactgcattggagagcttcaagactagaaacaagatggttcattgattactatgctagagacagaaacatgtgccccttgctactccaatttgctgaaattgacttcaaccaggttcaatatgaacatcaaaaagatcttgcagtagtgacacggtggtggaagaaaattgggcttggtgaaaagttgccatttgcaagggatcgtctgatggagtgtttccattatgctaatggcgtccgttgggatccaaagcttggaacatgtcgtcaaatgcttgctaaagtttccaatctaattgtttacttggatgatctttatgatgtatatggaaccatagaagaacttgtactcttcacaaatgcaattgcaaggtgggatgcgataccaaatgagacacttccagagtacatgaaagcactttattctattatatatgacacatcaaatgaagttgctgaacacgctttgaagaaacatggttgtagtatgcattatcttctacaaaaatcgtggtatgacatatgcctggcatttttggtggaggcgaaatggcaccatggaaactatagaccaagcattcaaaagtatctagagaatggatgggtatcatcttcagcaccattgttgttgttacatgccttcgcaatgcttgattcagttgtcaacatgagtacgatatcccctttgcaaaccaaactgagattagttcaacatgtttccttaattttgcgtctctgcaatgactctgcaacacacttagatgagttgggaagaggagatgctccatctttcatagctttacacatgatcgagaatggtggtaatgagaatgattctcgtaaggccatgcaagagcatatcttgaagtcatggaaagtaattaatgaggaggcatttgatagttgccagtattctatgccctttaataaagcttgtattgacttggctcgcatttcacattgtgtttatcaaggtggagatggttttggtacaccaaatggtctaaagaagaaacaaattagagatttgttcttggatcccattgatatatgtaataaacaataatatataaagatttattgagaatacgaagataatagtttgtt

SEQ ID NO: 137644 - DNA, 812 bp, Zea mays
  Clone ID: MRT4577_57009C.1
attcgtcacttagcttcactcggttctgcttctacacatctatatatcgttagtttggtatgtactaacggctcgatctgcacaaggtaagcacatcgatcgctgtgcatgcccgatctctgctgagttcggagctggtggcgtacgtgcaggcaaagaaaagaggcaacgacgatggctgctgcggcggcgatgatggtctccggaggacgggcggcgctggcggtggcgggcgtgctctgcgcggtggcggccatggcggcggcgcagcaggcgtcgaacgtgcgggcgacgtaccacctgtacaacccggcgcagaacgggtgggacctgaaccgcgtgagcgcgtactgcgccacgtgggacgccgacaagccgctgtcgtggcggcagaagcacggctggacggccttctgcgggcccgccgggcagaagggccaggccgcctgcggcaagtgcataagggtgaagaaccgtgcgacgggcgcgtccatcgtggcgaggatcgtggaccagtgcagcaacggcggcctggacctggactacgagacggtgttcaagaagatcgacaccaacggccagggctaccagatgggccacctcaacgtcgactaccagttcgtcgcctgctgagcaacagagctcagtcagatccttcctgtgtatgtatgcatccatgcatgcagatgcagagaccgacgtcgttgtaaaacgcgtggccttacttgagatgaataaaacgcaacatgtagcgtcttgcaactgtcgcaagcacagctactactgctactgattaagggcctgtttgttta

SEQ ID NO: 137645 - DNA, 143 bp, Zea mays
  Clone ID: MRT4577_5700C.1
gtgtattattagttatttttttaacccaacaaaagacagctcacgaagtgattgaccaaagatcattcggagcctaacaaaaaatgagtgaaacattgtagcaaaaaaaacggtgccaccggtacctgaattgggttaaaccg

SEQ ID NO: 137646 - DNA, 969 bp, Zea mays
  Clone ID: MRT4577_57010C.1
cgcgagccgaagcggggcgagggaggagatcattggaaggggagaaaagggaatggagcatgatgaagaggaggagctgccttcaccttcttcctccttgggctacctgatgctgtgtaggatctgccacgaggaagaggacggagggcgtgcgaccatggagtccccttgtggatgttccggctctctcaagtacgctcacaggcgatgtgtgcagagatggtgtgatgagaaggggaccgccatctgtgagatttgccttcagaatttcgagccagggtacacaatgcctccaaagaaaactccggtggttgaaacggcggtcacgatcagtgaacacgaggacatgcaatctttggaatctcgggagggcttgagtgggggtgcaggctacaccaggtgctcctacaccgcagatcaatgcgccacatggtgccggtcgctggcgatcacgttcaccattatgctgctggcatggcatctggttgcagtggtgacggttgaagcagcagctcactgcgcgttcagtctcctggcaatgtacttgcttcgcgctgctggtatcctgctgccgctgtgcgttgtcatgcgactgattcgcatcgtccagagtggtcaggagcagcagtatgggctgcagctgctggagcaccaaagaagaaatgtatcaactatatgaattatatgcgtgtccaggaggaggaccagcgagtaattaatattcattaagccaatgaatctcaatgcaagcttgcacaaatgtgcattaagtattaccgtggaaactttcaaacagaacatcatctgtaaacatttagtatacatacagttggtgcagggaaaaacagccccattttattcctgctttttctgaacgttcattatgctattagggaatgttcaaacagatcattattgcataatctctgttttcaaaactaaagtattacaaatactgcagctcttttg

SEQ ID NO: 137647 - DNA, 887 bp, Zea mays
  Clone ID: MRT4577_57011C.1
cattgggaccctcgaggccggccgggatctctcattcttcaattcgtcacttagcttcactcggttctgcttctacacatctatatatcgttagtttggtatgtactaacggctcgatctgcacaaggcaaagaaaagaggcaacgacgatggctgctgcggcggcgatgatggtctccggaggacgggcggcgctggtggtggcgggcgtgctctgcgcggtggcggccatggcggcggcgcagcaggcgtcgaacgtgcgggcgacgtactacctgtacaacccggcgcagaacgggtgggacctgaaccgcgtgagcgcgtactgcgccacgtgggacgccgacaagccgctgtcgtggcggcagaagcacggctggacggccttctgcgggccccccgggcaaaagggccaggccgcctgcggcaagtgcataagggcgaagaaccgtgcgacgggcgcgtccatcgtggcgaggatcgtggaccagtgcagcaacggcggcctggacctggactacgagacggtgttcaaaaagatcgacaccaccggccaggggtaccagatgggccccctcaacgtcgactaccagttcgtcgcctgctgagcaggagagctcagtcagatccttcctgggtatgtatgcatccatgcatgcaggcaggcagatgcagagaccgacgtcgttgtaaaacgcgtggccttccttgagatgaataaaacgcaacatgtagcgttttgcaactgtcgcaagcccagctactactgctactgattaaataaacatgactgcaataatagtaataaactatttaggcctaaaaaaaaaaaaaaaaaaaaaaaaaaaaaaaaaaaaaaaaaaaaaaaaaaaaaaaaactcgagggg

SEQ ID NO: 137648 - DNA, 1328 bp, Zea mays
  Clone ID: MRT4577_57012C.1
gcaacgagattggaaggggagaaaagggaatggagcatgatgaagaggaggagctgccttcaccttcttcctccttgggctacctgatgctgtgtaggatctgccacgaggaagaggacggagggcgtgcgaccatggagtccccttgtggatgttccggctctctcaagtacgctcacaggcgatgtgtgcagagatggtgtgatgagaaggggaccgccatctgtgagatttgccttcagaatttcgagccagggtacacaatgcctccaaagaaaactccggtggttgaaacggcggtcacgatcagtgaacacgaggacatgcaatctttggaatctcgggagggcttgagtgggggtgcaggctacaccaggtgctcctacaccgcagatcaatgcgccacatggtgccggtcgctggcgatcacgttcaccattatgctgctggcatggcatctggttgcagtggtgacggttgaagcagcagctcactgcgcgttcagtctcctggcagtgagttcattgttggcatggccaagcagaaaaaagcagagttttaataggtaacctgattccatcgactaagagcagaggttatgtttctttgcagatgtacttgcttcgcgctgctggtatcctgctgccgctgtgcgttgtcatgcgactgattcgcatcgtccagagtggtcaggagcagcagtatgggctgcagctgctggagcaccaaagaagaaatgtatcaactatatgaattatatgcgtgtccaggaggaggaccagcgagtaattaatattcattaagccaatgaatctcaatgcaagcttgcacaaatgtgcattaagtattaccgtggaaactttcaaacagaacatcatctgtaaacatttagtatacatacagttggtgcagggaaaaacagcaccattttattaaaaaaaaaaaaacctgctttttctgaacgttcattatgctattagggaatgttcaaacagatcattattgcatatcccaatgaaaatattggcggccaaccagtcacgtactcttcaatgacacattaccataccatcaaaaaggggaaaaaggtaacagctctccttagtaatcaaatttcaagcaccatgacagcatgctacattcctgctggcagcgtagtaatcttagaacattctattgccaatctgattagatacatttctcttgacctgaatcttcattctatctgcccactgataaaacgcattagatacatcgaatttccctgcaaatttcactttctgagccaactcatacaacatatctagtttcccagccttcgataaatc

SEQ ID NO: 137649 - DNA, 1233 bp, Zea mays
  Clone ID: MRT4577_57013C.1
atctctcattcttcaattcgtcacttagcttcactcggttctgcttctacacatctatatatcgttagtttggtatgtactaacggctcgatctgcacaaggtaagcacatcgatcgctgtgcatgcccgatctctcgacttgctgagttcggagctggtggcgtacgtgcaggcaaagaaaagaggcaacgacgatggctgctgcggcggcgatgatggtctccggaggacgggcggcgctggtggtggcgggcgtgctctgcgcggtggcggccatggcggcggcgcagcaggcgtcgaacgtgcgggcgacgtaccacctgtacaacccggcgcagaacgggtgggacctgaaccgcgtgagcgcgtactgcgccacgtgggacgccgacaagccgctgtcgtggcggcagaagcacggctggacggccttctgcgggcccgccgggcagaagggccaggccgcctgcggcaagtgcataagggtctgtgtctgtgctaccttcacttttcctcctgctggattgtcacaggagattgttggcctgctgcaggtgaagaaccgtgcgacgggcgcgtccatcgtggcgaggatcgtggaccagtgcagcaacggcggcctggacctggactacgagacggtgttcaagaagatcgacaccaacggccagggataccagatgggccacctcaacgtcgactaccagttcgtcgcctgctgagcaacagagctcagtcagatccttcctgtgtatgtatgcatccatgcatgcaggcaggcagatgcagagaccgacgtcgttgtaaaacgcgtggccttacttgagatgaataaaacgcaacatgtagcgtcttgcaactgtcgcaagcacagctactactgctactgattaaataaacaggactgcaataatagtaataaactatttaggcctcataaaaaaaaaaaaaaaaaaaagaaaccaaaaactaaaaataaaagaaaaatttaaagaggaaaaaatagaacgctagaagaaaaaaatgaaaataaatgatggctggggggggaccttatccggtgagagttccactcgcctacgggggcgcccccataaaccgttttgcggggggaaaaataacgagttgagctaacttttttggggccccccgggctaaatggcccgtcccccttgcgggaaacctttaggggaaaaaaccttggggagggggcctcctttgggggagaggtg

SEQ ID NO: 137650 - DNA, 1020 bp, Zea mays
  Clone ID: MRT4577_57014C.1
attcttcaattcgtcacttagcttcactcggttctgcttctacacatctatatatcgttagtttggtatgtactaacggctcgatctgcacaaggtaagcacatcgatcgctgtgcatgcccgatctctgctgagttcggagctggtggcgtacgtgcaggcaaagaaaagaggcaacgacgatggctgctgcggcggcgatgatggtctccggaggacgggcggcgctggcggtggcgggcgtgctctgcgcggtggcggccatggcggcggcgcagcaggcgtcgaacgtgcgggcgacgtaccacctgtacaacccggcgcagaacgggtgggacctgaaccgcgtgagcgcgtactgcgccacgtgggacgccgacaagccgctgtcgtggcggcagaagcacggctggacggccttctgcgggcccgccgggcagaagggccaggccgcctgcggcaagtgcataagggtatgtggctctgctaccttcacttttcctcctgctggattgtcacaggcgatcgttggcctgctgcaggtgaagaaccgtgcgacgggcgcgtccatcgtggcgaggatcgtggaccagtgcagcaacggcggcctggacctggactacgagacggtgttcaagaagatcgacaccaacgggcagggctaccagatgggccacctcaacgtcgactaccagttcgtcgcctgctgagcaacagagctcagccagatccttcctgtgtatgtatgcatccatgcatgcaggcaggcagatgcagagaccgacgtcgttgtaaaacgcgtggccttacttgagatgaataaaacgcaacatgtagcgtcttgcaactgtcgcaagcacagctactactgctactgattaaataaacaggactgcaatgatagtaataaactatttaggcctcgttcgttttgaaaacaggcatgtttttagttctgggccggatggagtgaatcctgctggttcactaaaacatgaaaacttttggtttggtttggtt

SEQ ID NO: 137651 - DNA, 724 bp, Zea mays
  Clone ID: MRT4577_57015C.1
ccgggatcgctgttgccagcgtgccgtcggcgtttgcccatggagtcatcaccgctgtccagggcgaaaatggcaacgggggctccggctttgggatggttccatccacacctcgtgatggcacgcgccgaaaccccttccagactgactccggtatcattcgggaccgagacattgccagaggcaaggcctcgggatgtggtcgcaccttggctggtggcccgatcaacatggccgctgccatggccgaagccgagagcgccggcgtgcccagcattggtgctgatggccaggttaagatgacccttcaccaagtcaatggcgatggagccggtccttacacctgtgatattgatgcctcaggcatgggcaccaacttcacacctatgatggtcgtaaccaacatccccggatcgaacagccggtcaagggccaaggcccaagacttccctctcgttgcccaggttcccaatggaatgacttgcactggcggttccgacggtcagacctgtgtggtgcgatgccgcaacgctgccaatgccggccccttcggaggaatgtgtggccgtgacccaggcccaatgagtcatcatttcaaatccacatggtggacatgaagtgggattattatttggttggcagtccgtatgagatgagagttaatcagagtagatcgtaatgtatgatagaatgttttgaattgaaatttatatctgcttaccct

SEQ ID NO: 137652 - DNA, 867 bp, Zea mays
  Clone ID: MRT4577_57016C.1
cgggcttcaattcgtcacttagcttcactcggtacggttctgcttctacatctatatatcgttagtttggtatgtactaacggctcgatctgcacaaggcaaagaaaagaggcaacgacgatggctgctgcggcggcgatgatggtctccggaggacgggcggcgctggtggtggcgggcgtgctctgcgcggtggcggccatggcggcggcgcagcaggcgtcgaacgtgcgggcgacgtaccacctgtacaacccggcgcagaacgggtgggacctgaaccgcgtgagcgcgtactgcgccacgtgggacgccgacaagccgctgtcgtggcggcagaagcacggctggacggccttctgcgggcccgccgggcagaagggccaggccgcctgcggcaagtgcataagggtgaagaaccgtgcgacgggcgcgtccatcgtggcgaggatcgtggaccagtgcagcaacggcggcctggacctggactacgagacggtgttcaagaagatcgacaccaacggccagggctaccagatgggccacctcaacgtcgactaccagttcgtcgcctgctgagcaggagagctcagtcagatccttcctgtgtatgtatgcatccatgcatgcaggcaggcagatgcagagaccgacgtcgttgtaaaacgcgtggccttacttgagatgaataaaacgcaacatgtagcgtcttgcaactgtcgcaagcacagctactactgctactgattaaataaacatgactgcaataatagtaataaactatttaggcctcgttctttgttccgtttgaaaaaaaaaaaaaaaaagggcgccgtatagaggtccaagttacgacgcggcatgcga

SEQ ID NO: 137653 - DNA, 1088 bp, Zea mays
  Clone ID: MRT4577_57017C.1
ccggccgggacctcatctctcattcttcaattcgtcacttagcttcactcggttctgcttctacacatctatatatcgttagtttggtatgtactaacggctcgatctgcacaaggcaaagaaaagaggcaacgacgatggctgctgcggcggcgatgatggtctccggaggacgggcggcgctggcggtggcgggcgtgctctgcgcggtggcggccatggcggcggcgcagcaggcgtcgaacgtgcgggcgacgtaccacctgtacaacccggcgcagaacgggtgggacctgaaccgcgtgagcgcgtactgcgccacgtgggacgccgacaagccgctgtcgtggcggcagaagcacggctggacggccttctgcgggcccgccgggcagaagggccaggccgcctgcggcaagtgcataagggtgaagaaccgtgcgacgggcgcgtccatcgtggcgaggatcgtggaccagtgcagcaacggcggcctggacctggactacgagacggtgttcaagaagatcgacaccaacggccagggataccagatgggccacctcaacgtcgactaccagttcgtcgcctgctgagcaacagagctcagccagatccttcctgtgtatgtatgcatccatgcatgcaggcaggcagatgcagagaccgacgtcgttgtaaaacgcgtggccttacttgagatgaataaaacgcaacatgtagcgtcttgcaactgtcgcaagcacagctactactgctactgattaaataaacaggactgcaataatagtaataaactatttaggcctcgttcgttttgaaaacaggcatgtttttagttctgggccggatggagtgaatcctgctggttcactaaaacatgaaaacttttggttttgtttggtttggttccagttgtttataggtgtagcttcgactcaagccgagaaaaggatgaaaaggtctacaatggcttggttttattcttgattgagcttatcagaacaacactttcgggttggttccggttctaatccggaccaaataattctagatggaatgggctatgttccatgccgttccgggac

SEQ ID NO: 137654 - DNA, 272 bp, Zea mays
  Clone ID: MRT4577_57018C.1
aaattttcaagggaacgactggaatttgtgagagatatcttcaatctcctgtttttgctgccaagtctaatggaccgactacagccaaagtgcaaatcacattcttcaagagctgccgcttacgatttgctagtagagatggtaaaggggtctgttgagaactacaggctaatacacaactgggttatggcacaacacatgcagtcccatgcaccttataaatgggattactggcctcatgaagatgtccgtgctgaatgtagatttgttgc

SEQ ID NO: 137655 - DNA, 328 bp, Zea mays
  unsure (1)..(328): unsure at all n locations
  Clone ID: MRT4577_57019C.1
cggggcgaggccacgcgtcacanccattattgaccgtctcccttatgcgtttgttatttaaagagagcagagaagagcaggtgggggtgtctgttatcatccacaggggcgtggaaaagctccacatggggggcgaccacaagaataaggaggtggagcaccacaagatggccgaggagcaccacaagaaggatgagggggagcaccacaagaaggacggtgggtagcacaaggtatgcatcgtggtaaagatcattgacaagatcaccgtctatgctctgttacaagtccgtctaccacatggaaaagaaatacaagaaatataaga

SEQ ID NO: 137656 - DNA, 512 bp, Zea mays
  Clone ID: MRT4577_5701C.1
tacctcgaggccggccgggatatttatccaagaagcgcatctgacctgcccatctctccacgcgctgatacacccaggcttcttccgtccggcgactcaaacctcaaggtatatccttctcatcttcttatcacggcctccacgggcccgatgggcgaacgcacacaaggtgacgcgatctagtagaaaacactgcacctcagcgatcgccaagagatctacagagagaaaaagaaagacagagaatgacggtggagtgacaggaccgacgctccagtgagcagatccaccacgcatggtatagacgagctccctccgcgctccaagatgctgcatgctgattagtcctgctgccattctgcaaataacatcccgggccgacttcactacaacgcacctcggcacatatagacgtctatgctccactcagatgaatttgtgtggaagataaataacggcaactgtgtgaaactcctgttgacatcaacgacattacaaatagatcgactgtg

SEQ ID NO: 137657 - DNA, 274 bp, Zea mays
  Clone ID: MRT4577_57020C.1
ggaaaaaaaaaaccaaaatttggggcttgacgtaaccttaacctaccggtttcttaaaaaaaattggggctgtaaagcttttttaagccaaagggaataccagtctggcacccttatatggcccttttattgcttacaatttggaaaactggaaccgttctccaattaaacagccggaaaaaacttttggccttaagcaacaggttttaattgctcacccactttttgaaaaactacctttttgaagcggaagctggcctttggggggccccca

SEQ ID NO: 137658 - DNA, 190 bp, Zea mays
  Clone ID: MRT4577_57021C.1
ctcgtcggtccgccgtgcacacacgggtggcaccaccgtggaaccacgtacataccgtcgctcgggatccgattgctcgccctggggcttaccatgttgggagggaggtctggttgctggcgtccagacatcacacgcatggatatcgcgtaagtctcacgcggtatgcgtctagcgtctcacactcgca

SEQ ID NO: 137659 - DNA, 439 bp, Zea mays
  Clone ID: MRT4577_57022C.1
cccacgcgtccgggctggttttgtaccggctggaagccgttgatctgaggacgatgacgaacgaagaaaagatagcgttctgggtgaacgtacacaatgccttgctgatgcatgcttatctggagaacggcgtcccacagaacaaaacatccctgcttgctaagcaggccgcctgcaaaatagctggacgcagcatcaacgcggccgttatccagagcgttgttcttggatgtaccacgcactgccccggacagtggctacgacggacgctgctctaccccaggaccaaaagcaaagtgagcaaagcggggcatgagtggcgagcctttgccgtcgcacaaccggagcctcttttgcgctttgcgctttgctccggcagccattctgatcccgcggtgagggtgtacactccgaagcggctgttccaccagctggaggc

SEQ ID NO: 137660 - DNA, 234 bp, Zea mays
  Clone ID: MRT4577_57023C.1
atacaattgtcgcatcagttaatagcaattagcaaacaaatacaagtgcatttgtctgccaattgctattaactgatggatattgtatcgcaacatatgcacctgtatcgatcttgctatcaagcttacatcatctatgctcacacataatgtgtgactcctacagcgatgctgccatgcttgctttcatcttggcgggctacatcgatgagctcgtctgctgcacgtataggg

SEQ ID NO: 137661 - DNA, 1943 bp, Zea mays
  Clone ID: MRT4577_57024C.1
gggaccctcgaggccggccgggaactactttcgcttgaaggccgtgagtcacccggcccgtagtcgctctaagggtccgttcggttattcaggaatgtactctaggaatgatttcagctggaataattgtataatttgtagtataaattggtaacctggaatagttcttagtcttgttccaggctatccgaacggggcctaaaaaaaaaaaaaaaaaaaaagtcaaatccacgcgaccgcgagtgctctcagaaggcactagcacgcaaaaaccccacgagagagacgaatcttccgaatctctcggtggcgatggcgctctccgaccgctcccgcgagtcgctcctcccgagcttcctctacgcctcctcggcgcgctctttcgctgccacaggagccgccgcgcgcctccctgtctcctccccagcgcctgccacggctggagcaggaggcggcgtgccgttctcgatccaggcgcccaaggagaagatcgagatgtactcgccggccttctatgccgcctgcactgccggaggaatcgccagctgcgggctcacccacatggccgtcacgcctctcgacctcgtcaagtgcaatatgcagattgacccagcgaaatacaagagtatctcatctggatttggtatcctgttaaaggagcaaggggccaggggtttcttcaggggatgggtgcctactttgcttggttacagtgctcagggggcttgcaagtttggcttctatgagttctttaagaagtattactcggacattgcagggcctgagtatgcccaaaagtacaagactctaatctacctcgcaggatctgcatctgctgaggtaattgctgatgtggctctctgcccttttgaagctgtgaaggtacgtgtgcagacacaacctggatttgctcgtggattgagtgatgggctccccaaatttgtccgatctgagggtgttcttgggctctacaagggaattgttcctctctggggtcgtcagattccttataccatgatgaagtttgcttcctttgagaccatcgttgagcttatctacaagcatgctgtgcctgttccgaagtctgagtgcagcaagactacccagttgggtattagctttgctggtggttacattgccggtgtcttctgtgctattgtttctcacccggctgacaaccttgtgtctttcctgaacaatgccaagggagctacagtgggagatgctgttaagaagcttggtctctggggtctcttcactagaggacttcctcttcgtatcgtcatgattggtacccttactggtgctcagtggggaatttacgatgcattcaaagtgatggttggactcccaacaacgggaggtgttacacctgccccagcagcagaggctgaattgaaagccagtgcttgattttttttttctgtgttccctgagatcatatttggtggagtggaattgtatcagccggtcgagagcttagttcccgaatcttttttttaatcttaacggataatttgtccgtcatccttctgatgagaggaactcattaaacaggcgaaataggtctttttttgcgctgggaaaagtttacgcttgatgcataataatttgtaggacggcaacgcttttagagcgcaggttttgttcacctcctgtaccgaggaatgcttaccaagtcacatttcacatgatggtctttatgaaagagtgcacctcggttgatgttcctttaaaaaaaaaaaaaaaaaaaaaaaaaaaaaaaaaaaaaaaaaaaaaaaaaaaaaaaaaaaaaaaaaaaaaaccgttgctggaactatgcgattgctgtaattttgcttttttgtcatcacgatccccgtttgcctgcgaagttaatatgtgctgctgcatgggttgtgattttacctgtgacttacgcgtacacttgggagaatcctact

SEQ ID NO: 137662 - DNA, 236 bp, Zea mays
  Clone ID: MRT4577_57025C.1
tcttgcctatacacgaacactgaccctgggcgaatttttaccacaccggcgggccacaaccttcaaaagccacttttataaccctcctaccatactacccaaactgctccaagcccttttactccatcttctcttactacgcggaggaggatgaccaaaatgacccctcaaatctcttcaacaccacatgcagttctacaaaattcacaactagtacgataaaaacaatcataaaa

SEQ ID NO: 137663 - DNA, 241 bp, Zea mays
  Clone ID: MRT4577_57026C.1
ggccaattttaattgctgcttcaaaaatatgctgcgtctgacacattcattgtttccctttcattagttccaagatttaagattgcttttattacattacttaaaccatttattcccaattgttaccacccttttttttttgtattccaaccattttaccttaaaccttaaacttctttttttctttaattaacttccaaaccaatccataaacagttggttttaacaatttattaaggaa

SEQ ID NO: 137664 - DNA, 263 bp, Zea mays
  unsure (1)..(263): unsure at all n locations
  Clone ID: MRT4577_57027C.1
cgcattaattcccaggggacaccagccccangggggcgagatcaaccgccgccgcggggctacacccaccgcacgggggcaaactccccctggaaccggctcccgagcgagcccgcgaaccgagccgagcgggcccgggaccagcccggagggccagagccgcacgcacagcgctaaactcggccctagtgatcagcctgagcacaggcctagcgctctcactgggccagcatccaatgctgcaactgccaccgggagaacgt

SEQ ID NO: 137665 - DNA, 424 bp, Zea mays
  Clone ID: MRT4577_57028C.1
gtttctacgtggaacacatgcttgcatgatcattaatttaacaggacttggcgcgagcgatttactagtacaacatcagtgcacagactgcacaatatttattagataaaagcaaaacatctatatgttccttaatgaaaaacgaacaatacgacccatagttgtctgttgagtaaccttctaaccatgaatatgcgtgacaaatatcggaacacaacgacgtgtgatgaccaactgtataatctttgtgagcaaaatgaagaatgcatgattgaggtcattatggcaggggcgaacagatgaaatatacctaaaaatctaggttgcaaaataatgcaccgtctctgtgtctacaatgcatcgatcggtttcagtccagaagctagaacgagtgaaatgtgccttaaaaggggccatgctttct

SEQ ID NO: 137666 - DNA, 289 bp, Zea mays
  Clone ID: MRT4577_57029C.1
aaaaacaacaaccactctgcccttactatcacatagcctccttgcgggaagatcttacatactaagagatggtggcccctacctctttgcgatagcatagaacccttacaaacggatcttactaagatcacatgatgctagatcacatggtagctgtgatggactgtccacatgaggcctgccctttctagcctctaagcctccatagcatcgtgctcactcgctcggtcaactaaatatgtaccatggttgtgactaggcctattaaactcttgcataatctactgat

SEQ ID NO: 137667 - DNA, 257 bp, Zea mays
  Clone ID: MRT4577_5702C.1
tcgacgacgcgtacgcgctcctttggagggtgtacccgattactctctagcacctgcgcttgacacgcgcggggtgaatcttgtctgtacccgctgactatggcacgctaaaatatatagaacgcaccacccccgcgaggggcctatttgactatggtacataagagcgagaggaaggtcgtggtcacgacagaaatttttttttccctcgaagaggataaagaactcatggtaacactccctgttatattttcggt

SEQ ID NO: 137668 - DNA, 603 bp, Zea mays
  unsure (1)..(603): unsure at all n locations
  Clone ID: MRT4577_57030C.1
ccggtcgacccagcgttcggtctagttctagnacgcgagcggctgccctttttttttttttttgtcttaaaaacatcagagtatttattacatagcggaagtcttattacaaaataaaagataaatataaaatgaactaaggatcatccttggcgctaatgtcaactgggaaatgccacctagatcagatcaaactccggggtttgtggcttctcctgaaccacttgttctttttccttcaatgagctcctgcttagctacttctatctgctagtcaccaggatcctcagtcacaggttcttctactcgccacaatacaaacaagcacagtatatagagaaaattaacatcacaccaaacatgtaaacaaaatatataataataatctatacattaaaataaaattatgggaacatgaatcattaattttggagttatagattttaatttatgaatttccaaaggttttatgtgcttgaaataggattaagtgagaaattatttttcttattgttttcatgtcaaaacagagattctaagtgatagagaataatatgacaaaaatttcgaaactgaaatgggttattttggagttcatatgaa

SEQ ID NO: 137669 - DNA, 1534 bp, Zea mays
  Clone ID: MRT4577_57031C.1
ggccggccgggaccggtaagcgctctgccctggtctcgtctgctgcactccactgtccactccactctcccaccgcactttcctctctcctcccctgttttcgctcccctcgagacccccaaagcaccgaaagggggaggagcggagggagatagagaaagcggcggggttcaagaacgccgcggccatccggagccaggattctcccgatacaccccctcgttcccagttcttcagtggcgccgatttggagttccagagacggcgatgggctccggatctctgctcaaggtcttcgccaacaacttcgacgtccttgcagggcctttggtggcattggcttatcctttgtatgcttccattaaggcaatagagaccaaatctcctgtggatgatcaacaatggctcacatattgggtcctgtactcactaataacattgtttgaactcacatttgcatcaattattcagtggcttcctttctggccttcaatgaaattgatctttatttgctggcttgtcttgccatacttcaatggcgcagcctatgtgtaccagaattatgtgagacctgccttcataaagaaccagatggtcaacatttggtatgtccctcagaaaaaaggccttcttgggaaatctgatgacttcctcacagcacttgataagttcattgaagaaaatgggactgacgcgctgaagaaattggcgaacaaggctggcaagccatttaaacagtctgggaaatcatctaaggatcagaaagagacaaaatcatcaaaggattccaaagaaccgaagccatcaaaagatgcaaagcaaccaaagccatcaaaagatacaaaggagccaaagccaccaaaggattcaaagtctacccaaggactccaaagaacagaagaaggcaacgctgaaagatccgaagaaagcaccgaaggattctaaaggactgaagaaagcgcttaaggatccgaaagaacaggaatcattggaagacccaaaggaacatacagcaaagaaggccggcaagcgtgtgacgttcgccgaggtggagcctgagaaggagctcaaggcctcgaacagtgactggcacccatcctctgatttccacgcggcgtaccctgagcagaacccatgggctagcggcttcatgatctttgaggatgaaaacagctactggaaccgaggacccctagactgctgagatcaaatgtatcgaggtggacactttttggtccgctagcagtgcaaggtcccaccagttcatcttcagccgaggagatgggtctcactcgcattatggcgacttgcgcctggtgtctgactctcggtcctgtaacatatttgtccgacgaatacctgtaggttgtagtgtagaattatcaattatgcagtgtggatggtgaaccggtgatattgtgtttcaggcggtgaaccttgttagttaggagaattgagatagtagcagtgtggtgctaaaccttatctggtttctggttgtgttgcttgctgtgctccctggtgcgtttccagt

SEQ ID NO: 137670 - DNA, 456 bp, Zea mays
  unsure (1)..(456): unsure at all n locations
  Clone ID: MRT4577_57032C.1
cccaggcaaggggggggcggggaggacaacgcgcaacaagaagaaccgcaagaagcgcggccacgngnccgccgggcacggccgcancggcaagcacaggaagcacccgggagggcgcggnaacgccggnggcangcaccaccaccgnanccncnncgacaagnaccaggcgggctacnncggcagggngggcaggcgngacnnccaaaagcnccgcaacaagggcnacngccccgcggncaacaacgagcgccncnggncganggngcccaccgacaaggcggcggaggccggcggcgacaaggccccgcagaacgacgncacgcagggcggcnacnncaaggggcncgggaagggggngcngccgccaaagcccanngncgncaaggccaagcncaacnccaagggcgccgagaagaagaacaaggcagcaggcggcgccggcgggcccaccgc

SEQ ID NO: 137671 - DNA, 403 bp, Zea mays
  Clone ID: MRT4577_57033C.1
ggccgggacagtaattccttcagagcttggcataaagaagaaagcatagcagcgggcagcggaatgggcaccagccccgtcatccctgcgacgatgctcttcaacgatcttctagtcgctgtctgcttcagtgccaccgccgctaggtccagccacgcccgccacaccgacgccgacaacgagattcgtctccccagcagctttggcactggtgaccgaccctgcaattgctgcgaatccgctatcaaggacgcctccctgcaggcgtggcgctgcaacgcaccggtgcacaagtgatcccccgactgacacaatcgatatgcgacgacggcaagggacgccttaccaccgaccgactttatcttacagcagaccgagcccgctccctgaacaccgagaccgt

SEQ ID NO: 137672 - DNA, 449 bp, Zea mays
  Clone ID: MRT4577_57034C.1
ggggccggcaaaaaaaaactgttgcagcaacatttggtgtttaaatcgttaaccgaaattttttgatacatttggccggacacttgtttccgaaaacataattggggtccgggaaccccaagatttttcaaaatcttccaacggggggtacaaagggggggaaaaaaatgctcaaagtaggcaatgtttgggcggaaaaaaagcttaaggtaaaactccggggcttttttttgactgagagaggggacctcgaaccgatactttttttttgggagggcttgaaaaggttttttcagggggtcaatttggggaaagcaaggggggttttggaacccaagggcctgcccaaatttttggaaatttatcccccaccctccatgaacttgttgggggcaacattggttttaatccccaggccatggggcatgtacccgaaatcctccgggggg

SEQ ID NO: 137673 - DNA, 421 bp, Zea mays
  Clone ID: MRT4577_57035C.1
atgtgaacccttggagcgtaatcattgcgatatcatacttgatacattatgtaaaaaaacaatggaaaaactactacaacccttcacgacatgcagagatgtgttaaaaacaacacacaacacacttgagtccccaaagactatgaacttggagatctttggaattcattctatgaatggagcgcctgtggcgttggtacttcagtgtgcatcgctccgggtgagacagtggttcaatacttagtgccatatctattagcaattcaatttgtacaccaacacgagaaatgctcctgtttcacatagcatgatttatgatggaagattcgatcggaataaccattatagtgtttggatgtacactcatggatttcaagctctattacgcatgcacactattgtagttgaatggaatggggag

SEQ ID NO: 137674 - DNA, 354 bp, Zea mays
  Clone ID: MRT4577_57036C.1
ctcgcgcgatcggaagatcataacatgtacatcaccgtcagcacccttgttgcgccaacatccgctagtcctattacatgagtgagcttttgccgatacgatggcacaacacttctggggagatcatctacatctccttgtgctagcatacctttctgcatactcgtagcaacattgggatcttccatttgaccaactgtatgcattgcactctgctgctgacttgcaacaacaaccaccattcagcttgctagttcctgcctacccccagctatttcttccattcaaccaactagaagtgttggaccatgatgtttatttacagcagcaacaactactaccattcagccagct

SEQ ID NO: 137675 - DNA, 338 bp, Zea mays
  unsure (1)..(338): unsure at all n locations
  Clone ID: MRT4577_57037C.1
aacaaagctgctctgggccccataaatgaagcagctactacaggggcggcgaactactcctcgtcgccaaaaccctactgctgcttgtatgccatggcgagcagtgctagccaggcgagcctcctgctccagaagcagctcaaggatcttgcgaagaaccccgcggatgggttacacgncaggcttgtaaaccacagctacatcttcgagtggcaggttaccatcatcggaccgtctgacaccctatatgatggaagctacttcaatgcaataatgaccttgggccagaactatcccaacagcccgccatcagtcagatgcacttctgagatgtggca

SEQ ID NO: 137676 - DNA, 1144 bp, Zea mays
  Clone ID: MRT4577_57038C.1
gctcctggacgacccgggcaacgcctacttcgcgctgctgtcgcagcactgcgtgccgctccactccttcccgcgcctctacgccgcgctcttcccgacacccacgcgtgcacgcacgcgtccagctacatcgaggtgctggagggcgagccgcagatggcgtcgcgctacgcggcgcgcggcggcgaggagggcatgctcccggaggtgccgtacgagcggttccgcatcgggtcgcagttcttcgcgctggcccggcgccacgccgtgctggtggtccgggagcgccggctgtggcgcaagttccgcgcgccctgcgtccccgagatggcgcaggactcgtgctaccccgaggagcactacttcccgacgctgctggacatggcggaccccggcggcgtggcgcggtacacgctcacgcgcgtcaactggacgggtagcgtcgcgggccacccgcacacgtacgccgcgccggaggtctcgccaaggctcatcgcagacctccgcgcctccaaccacacccaccacccccacatgttcgcgcgcaagttcgcgcccgactgcctcggcccgctcctcgccatcgccgacaccgtcatcttcaaggactgatggcgggcggctccatccaggtactacttactactcggcagcagagggctgggcctggggctagtcaaggccgccgacgacggacggcgcggcaccggaatcagtggcgttcttctcccgtttggaccccccctgcagcgtcatgcatgttcatcagctccagtgtttctgtgtagtagattaggagtgtagagaagaggaggacgacgacgacgacagcacgcggcgacctaatgcgaagcggcaggttgtggttgcgtgcgtgtacgcgtcctcgatcgtcgtgcatccggggaaaaaaaggaagaaaaaatatcgcgcgcgtgtgtggcttttgcctagcgtagccagccaaataaggttctactgcagctgcaagtaataaatcctagtgttgtacagcataggtagccgccactcctgctctgtgggtttcgtgtctcgatgtttttggtactttgcagtgtactacgtacatactaatacgtgcttccagcttccatccagttaagttgagcagtttgtggtctaa

SEQ ID NO: 137677 - DNA, 815 bp, Zea mays
  Clone ID: MRT4577_57039C.1
tcgggaaccgaacagaacagaacagagtgatgaagtcgtagtcttagattttctgagttgacaacgatatcccaaccccccacccccactaataagagatctcgagttctcggctaacaaaaagcatctaacaataatcggtactgggcacaccagttcgcttgatcatatctttgcgtgcggattaggtttcgtctggactggactggactggttaggttggtttcgtcccggtccgtgctcaaatcaatcaaaggcgctcgcaacgtcaactaacaataacaactcccgttcggaccatcctcgcaggtactacttactactcggcagcagagggctgggcctggggctagtcaaggccgccgacgacggacggcgcggcaccggaatcagtggcgttcttctcccgtttggaccccccctgcagcgtcatgcatgttcatcagctccagtgtttctgtgtagtagattaggagtgtagagaagaggaggacgacgacgacgacagcacgcggcgacctaatgcgaagcggcaggttgtggttgcgtgcgtgtacgcgtcctcgatcgtcgtgcatccggggaaaaaaagaagaaaaaatatcgcgcgtgtttgtgtttgtgttttgcctaccgtagccagccaaagaaggttgtacagcagctagtaatgggtatggccactgctagtgcaagtaataaatcctagtattgtacagcttattaggtagccgccactcctgctctgtgggtttcgtgtctcgatgttttttgtactttgcagtgtactacgtacatactcagatgtgcttcca

SEQ ID NO: 137678 - DNA, 494 bp, Zea mays
  unsure (1)..(494): unsure at all n locations
  Clone ID: MRT4577_5703C.1
gaaaaccaccacactaccataaatcatcagattgtctgtcaaaaaaaaccagaggacacctatgatctgcatgtcttacctgcaattatgacctctccatgtgagagaaacagagatcattcctgacaggaggcatgaatttccaactacaggcggacagcgtgattcaccgacattgaagggcaccccgaaacaccgccgggaattggtctctcgaacccctgcctaggtcaagctcgggggcaattcatcagaatggagaagaattgacggtcgctcgaacatgcacaaaagaggccgaattcctgctttatttagcaaatacaagcggttctctgacgactggcaacaccaagttaatactggcatgacccattcatccccccgcgcaaaaggctctcctttttgaaccccggnacctgtgaagaaatacgcaaaaagccccctccccacccccttcccaacctttgtggagaatgaaagcgcactgtacc

SEQ ID NO: 137679 - DNA, 525 bp, Zea mays
  Clone ID: MRT4577_57040C.1
ggccgcttttttttttttttttttcttatggttttttttttttttttttttttttttttttttttttttttttttttttttttttttgggaaggaaacagcggattcccaaggttcgaataaggaagtaaccccttagatccatggggtattccagaaaaagtaatttttatgacaaaattagggggtggggccaaaactttgaggaccttggtttagggcccgcataaaaaagttaaacagactggtttggcccctacccaggggtcccgggtttttgaccgcagggggccgaaaaccaggattcaccccccccggttttaataggctggggacatcaaaagaggaacccttggaaggcagacaaagggcatgggggaaaaatttggctaaaaatggccccgaaaaatttctagtaaacaaataaacaactttgggggagtgggttttgcccccaaccccacccacatatagaggctgaggccttccgaagaccgctttgaccaacaaatccagttttgatggg

SEQ ID NO: 137680 - DNA, 497 bp, Zea mays
  Clone ID: MRT4577_57041C.1
cgagcggccgcccgggcaggcgcttttttttttttttcttttttctttttttatctttatttttgttttttttcttttttcttctttttttgcttcttttgtgttttcggcatataaatagctggcctccctctccgactccttggcaaaggtcttcatgcgacccccctcggggccaccatttccccctttgctctcgggcaggtatctttttctttctgggcgggccccttccatcatccaaaaaacttttttgtggaatacccacctcttctacctctaaaggggggcccccccatcgctgcgtgcgtcgtacggaggccgcccgtgttgtcaaaacaagcaccacaacgggcaccaattgttgcattggtacaaggcctgcggggtcagccgcaaactgcttctagaacaggcctgaactgtacctggttcaaaaaggaaacccaacttgctgctcttagctacatcaatggcattcatttttcctgctgcaa

SEQ ID NO: 137681 - DNA, 683 bp, Zea mays
  Clone ID: MRT4577_57042C.1
agacctatcaaccgattccccctccccactccaccccgcgccgcagcgagagcgaactggtgcctgcctgccactgccggccgcgtcgtcttcgtcccctccctccctccccctgcgctcccgtccgagactgtgaacatgtcagatagtgcattgcaagatctcaatgctgctcaatctgttgtgctggagaaaagcaaagacagttctgtggaaccctgcagttctaagcctgtcttaaacgggaacaaatgtgtcaagaaggaaggaaatgctgtacctgcatgtcctgatgtaaccaatggatgcgatgctgtagttgtagatgttgaatatattgattctgagaatctcacggatcttccagatgttgacacaagcctgagtactttgcttgctacgctggattcaaaggattggatcaagacatgtgaagctcttaataatgttcgtcagttggcaatatatcacaagcaaaggttgcaagagctgctggagcctctagttcctcttattgtgaaatctgttaagaatccaaggagtgctctatgtaaaactgcacttatgacctgcgctgacatctttaaagcatacggcgcacaaatggtcgacttgattgatctgctgctaatgcccctatttctgaaatcttcacaaacaatcgctttgtttgtgaacacctg

SEQ ID NO: 137682 - DNA, 1811 bp, Zea mays
  Clone ID: MRT4577_57043C.1
gccggccgggccgggatgtagtcatgtactgtaaggacgaccatgtatttgtaagcagcttccattcagccatgcatccaaacatattaatacagcggttaaccaagtccgtacatcagcttccattaggccccgtcgtcatgcatgttagcagcaatcaagccctagaaacctcgagctcgtcatagaaaccaagaaagaaccatccaagccatggaggatgatgaggagaagccatcacaaaggatcaccaacaagcatggaagactgcatgcttgttgctagctgcatcaagagcatccagacatatcgatcgagctcctactcctggcggtggcgggaaatataatattgtatactatacgtccacagccacagtttcttggtagaaagatcggcagatcatggtagtcaaggagttcggaagagaagtagtaatgagcatggacaaggtgaagaggggtggagaagcgctcatggccgccggagccggagccggagatgaagagaaagatgacgcggtgctccctgggttccggttccacccgaccgacgaggagctcgtcacgttctacctccgccggaaggtggccaggaagccgctcagcatggagatcatcaaggagatggacatctacaagcatgatccatgggacctccctaaggcgagcacggctgctggtggcgaaaaggagtggtacttcttctgcctgagaggaaggaagtaccggaacagcatcaggcccaacagggtcaccggctccggcttctggaaggccaccggcatcgaccggcatatctaccctgccaccgcgaaccccgtcgagtccgtgtccgtcgggctcaagaagtccctcgtgtactaccgcggcagcgccggcaagggcaccaagaccgactggatgatgcacgagttccgcctcccgccggccgccgcctcgccctcgccaacgccgacgagcatgcaagaagctgaggtgtggaccatctgcaggatcttcaagaggaacatcgcctacaagaggcagccgcagctgccggcgtggaggcagcagcagcagtccagctccaacacggggagcttcgagtccgacggcggcggcggcggggacgagtacatgaaccgctgcctgccggtgccggccacggccacggccaccgctcatcagatcggcggcatgctgaacggaggaggcgtcgtcagtgccactggcagcagcagcagcagtttcttcagggacagggagagcgtgcacggcggccagcaattccacttccacgagcagtggctgagccgcttccccgccgcgccagcagtcgagcagaagccgcagctcctggacccgtcggcgatggccatcgcgttccatcagaacgacgaccagagcgtcgccaccgctgccgctgccgctgcgagcgagtgctgcaaggacgggtactactgggacgagatcgcgaggttcatggaggtcaacgatccaacggtgcttcacgactgtagatacgcttgatcggtagcaagttcaggcagatcgtagacagacacccagacccaggttaggtgaccaagggatgatgcaagcatgagagactggcaattttgcgcacccttttgtgtctattttcctgatcgaatgtattgtatacaggacgttgttgtgcccaaaataaacacatagttcagccatgaagaatcgtgactttagcacctgctctggtctctgttccgaaaattataggcaagatttgagttggcctaaagtcaaacgatgttgatatttggtgtctgaatatcagttctctttttctat

SEQ ID NO: 137683 - DNA, 1463 bp, Zea mays
  Clone ID: MRT4577_57044C.1
ttgagtggaagactgcatgcttgttgctagctgcatcaagagcatccagacatatcgatcgagctcctactcctggcggtggcgggaaatataatattgtatactatacgtccacagccacagtttcttggtagaaagatcggcagatcatggtagtcaaggagttcggaagagaagtagtaatgagcatggacaaggtgaagagagacggagaagtgctcgtcgccgccgccaccggagacagcgaagagcaagacgacttggtgctcccggggttccggttccacccgaccgacgaggagctcgtctcgttctacctccgccggaaggtggcgaggaagcctctcagcatggagatcatcaaggagatggacatctacaagcacgacccgtgggacctccctaaggcgagcacggctgctggtggcgaaaaggagtggtacttcttctgcctgagaggaaggaagtaccggaacagcatcaggcccaacagggtcaccggctccggcttctggaaggccaccggcatcgaccggcatatctaccctgccaccgcgaaccccgtcgagtccgtgtccgtcgggctcaagaagtccctcgtgtactaccgcggcagcgccggcaagggcaccaagaccgactggatgatgcacgagttccgcctcccgccggccgccgccgcctcgccgacgccgacgagcatgcaagaagctgaggtgtggaccatctgcaggatcttcaagaggaacatcgcctacaaagaggcagccgcagctgccggcgtggaggcagcagcagcagtccagctccaacacggggagcttcgagtccgacggcggcggcggcggggacgagtacatgaaccgctgcctgccggtgccggccacggccacggccaccgctcatcagatcggcggcatgctgaacggaggaggcgtcgtcagtgccactcgtagcagcagcagcagtttcttcagggacagggagagcgtgcacggcggccagcagttccacttccacgagcagtggctgagccgcttccccgccgcgccagcagtcgagcagaagccgcagctcctggacccgtcggcgatggccatcgcgttccatcagaacgacgaccagagcgtcgccaccgccaccgctgccgctgcgagcgagtgctgcaaggacgggtactactgggacgagatcgcgaggttcatggaggtcaacgatccaacggtgcttcacgactgtagatacgcttgatcggtagcaagttcaggcagatcgtagacagacacccaggttaggtaaccaaggaacgatgatgcaagcatgagagactggcaatgcaggagccaggaggggctgccccagtgaggctaggttttgcgcacccttctgcgtctattttctacctgatcgaatgtattgtatacaggacgttgttgtgaccaaaataaacacatagttcagcc

SEQ ID NO: 137684 - DNA, 179 bp, Zea mays
  Clone ID: MRT4577_57045C.1
agccgccacctcatgaactcatcctgcagcatcctcaggcctcaccgcctcagctgccagcctcaccctgcatccgagagagagagaggagagttgccgccggagggaggaggtcgccgcggaggggaggggctcgacggtaggggacatcgccggcgcctagagagctcgtggagggg

SEQ ID NO: 137685 - DNA, 321 bp, Zea mays
  Clone ID: MRT4577_57046C.1
aaaactcactataaactaacgggacaagggtgaacttactcaggcgcatgcagcacacagattgatttcatgaccaggacagggctcacgcaaaaaacttggccatcaaggcatgttggattaaaaggactgctaatgatggtaccccaccctcacataagcgcaaccggtcagggtttggagaacactatcaacactagaacaaaacggtgcccgaatagttgaatggaacaagtggtgagggacccgcacaaagaaacattcttggacgcaggagctacatgaagcgtccctgcctccagcgtttggtgctcccgaaga

SEQ ID NO: 137686 - DNA, 410 bp, Zea mays
  Clone ID: MRT4577_57047C.1
gttggggggggcattaggagcccatttcagcccctattggtgggaagggctcaaaaaaagcattcctaaagtttccaaccaaccaccacaatttagggggaggagtgggaaccccaacacaccggggaaaacaacggtgactggggccttttaaaatgttcttctggccacaaggctttccaaaaaactggataaattgcaaaaccggagaataaccctataagtctataaccctttttttaaaaaaaagaacggttctaaatttggaactgagggggtacaaaataaggatcccaaaattgggggccaagattgttggaagtcggggcccccttttataggcgggggaggcactgataattattgggggcacctttgtgaagggggggactatggattgaaattgcata

SEQ ID NO: 137687 - DNA, 691 bp, Zea mays
  Clone ID: MRT4577_57048C.1
cgggttatacctaggaaaaatgtttgcacaggtggtgaagaaacttcattgacagaaagtggctcgagtaactttggggttgactctgtggattctgtcaagaaaccgtcttttgatcccaagagaagcaatagctttaacttttctggtgcatcttcccactccatggagaggcatcaatatttgcagagaggaatatcactattaaagacaagtgttacagccattactacctactattacaactcactgggcttggatgtgccatccaatctttctacttttgaggcgtttgctaagttgctccatatgttgtcgtcatcaaaggcccttcgaactgcttttgaattggacattgcttcaaggtcagagaagcaagcgcagcagctgaacagatcgatttggaaggcaagttctgccatatcatcggacagcagttttatggacagcatgcacacaaccattatgacgagagcctgtacactggtaagctggtgaagcatggtggcgtgccagatagcatattcgacagctgggacatggtagagcgtgaggttctaccaccaccaccctctcgggttgaaggcgtcgctcagtgggaatgggccatgtatgctggcagcacaaaaaagaatgacctctattacaagtcctccctgaagtccaaatgttagacactgcaagagcttca

SEQ ID NO: 137688 - DNA, 1975 bp, Zea mays
  Clone ID: MRT4577_57049C.1
ccctcgaggccggccgggctggttttcttccgcaagctgttatctctcgcacgcaaacgactagcgcagcaaacaccccacctcgctcgcgatcgcggcacggcggcggcaatccaccgcggctcgctgccttcgccagtgatctggcctcttcgagtctcgccatcagataatcatccccagccactcccctcatctcccatcccctcccttccccttccgctgaatcggcgcggagaggatggcgtcccggcggggcagcagcagttgcgcgctctgcgagggatccaacctgccgtcttgttgcgcctcgtgcgtcaacgcgaggctggtcgagtaccacacgaggctgcgcatgatgaggagcctccgcgactccctccacggccgaatcgccgcacgcctcgaagccaagagaaaaacagatgagcagcggatctggagaacaagcaaagaacaggatatcatggagttgaggaatcggctcactgaattgaagagaaaaactgccgtagacaagaccgaggtcgagcaggcatcgagtgatcttaaggcaaaaactgtgccattgaatttggctcttgccacgctaaaaaagagacgagctgatgcagtggccatgcacaccaatgccatgaaagttgctcagatgaatctcatggcaaccacctcagattgtatgaaaatgcaatcaaaatctgtaaagcaactttgcagattgtttccaatgcgacgagtaattaaagagggagaaaagaaagacggctacaatggtccgtatgattcaatatgtggggttcgtcttcctcgtggtcttgatccacattctatttcatcagaagaactgtcggcatctttggggcacatgctacatttcatcaatatagcagttcgtatcttatcagcacctgctcttcatgtatcaggctgtaagggctcatgctcaaatatatggcagcggagttcctactggagcacacgacagtcccagagcaaggtttaccctctttttatacctaggaaaaatgtttgcacaggtggtgaagaaacttcattgacagaaagtggctcgagtaactttggggttgactctgtggattctgtcaagaaaccgtcttttgatcccaagagaagcaatagctttaacttttctggtgcatcttcccactccatggagaggcatcaatatttgcagagaggaatatcactattaaagacaagtgttacagccattactacctactattacaactcactgggcttggatgtgccatccaatctttctacttttgaggcgtttgctaagttgctccatatgttgtcgtcatcaaaggcccttcgaactgcttttgaattggacattgcttcaaggtcagagaagcaagcgcagcagctgaacagatcgatttggaaggcaagttctgccatatcatcggacagcagttttatggacagcatgcacacaaccattatgcccagcactctggacaacctcctcatgaactcagacgagagcctgtacactggtaagctggtgaagcatggtggcgtgccagatagcatattcgacagctgggacatggtagagcgtgaggttctaccaccaccaccctcgcgggttgaagacgtcgctcagtgggaatgggccatgtatgctggcagcacaaaaaagaaatgacctctatttacaagtcctccctgaagtccaaactgttagacactgcaagagcttcagtttagatatgtaagtacttggtcactaggctctaaaccgggaaatgtggaatttggccacgttcctcatttctggaacgtgggaataatctcgttcccgtagttttaaaacctaatttaaatagcgtaccacgtacaatgttcctataacaagaaccaaaaattgattcgatcttgggacctggttacttagatcaggctccggtcccatgtgcaaaaaaaaaaaaaaaaaggcccctat

SEQ ID NO: 137689 - DNA, 501 bp, Zea mays
  Clone ID: MRT4577_5704C.1
cgatttccggctcgacgagctcactatctgtttgccgcccttacgtgggctttttttgtgaacacaaaactggaccaaagtctgatctcaagggcgttcacatatcgtggacctacatctgcatcagaaggtaatactaggggatactccccaacccaacccagcccttttttgagctggcacatcagagatacccttcctcaggggcatacatgcttgaggttgactcactatccatattggctccgaccaggatctttttacaggtctcgtaacacatgaacgagatgcctgatggaggcatcaacctgatgcacatcggtccgggccccttggacaggccgacagcccctttcttgtccattctgcagacgagcgcatggaacacattcttgagaacgtgcctacgtactactgtacctacctgtaatggtttgcgggccaccttaggagggaaggtggcagtcttgccaatggcaccacaggctgaaccaattacga

SEQ ID NO: 137690 - DNA, 160 bp, Zea mays
  Clone ID: MRT4577_57050C.1
tttctatttttttcttggcatttgtttgaatattggggttttttcaaagaagaaaagctgattttccacaaaacctgcttacaccggacggcaacaaattcttacaccaaattttggagctcaaaaagtgcacaagtgtgagaaatggcaactttcagcc

SEQ ID NO: 137691 - DNA, 322 bp, Zea mays
  unsure (1)..(322): unsure at all n locations
  Clone ID: MRT4577_57051C.1
ccaacaaatccttttctctctcaccacgcttgttgaggggggggtctctttcgtttcgccccgcgcccctgcacaggctgccccccggtccccccttgggtccctcccgcccgccgcctcttcccgctccccccccccccgctcccgccaatttcccccatacaatgacaacacattggttgggccgcctctggntcgccttctctcgtctcccccgccggggggcctcttgccgggggggccaaactccctcccgcgggcgcccgggccccccgcggcggcgggctccctctgaggggcgcggcccccccccctccggggg

SEQ ID NO: 137692 - DNA, 421 bp, Zea mays
  Clone ID: MRT4577_57052C.1
tacaaaaaacttaaacaaaaaagacaaaaaacataccaaaaaaaaacaacttaaaaaaaggggcgggtgacaatacacaagacagaagtttaaagccaaaccaacagaagcgtacaaaaaacccgtggtacagacccaaccgaatagctgtacctgagcccactgtccagcaaagcctccgaactacctaacagacgagggggcgcggtctactacggctgggacaccgtggcgctgtttgcagacccatagacttttttcaagaacccctaactggaggtgatccactcccgctttaccatgctgggcgcgctaaactgcgtctttccccaacttattgcccttaacggcattaagtttttcgaggccgtgtggtttaaggaaagatcccagatcttcagctatggcaaactggactacc

SEQ ID NO: 137693 - DNA, 270 bp, Zea mays
  unsure (1)..(270): unsure at all n locations
  Clone ID: MRT4577_57053C.1
cccacgcgtncgcccacgtcgtttctgacgcgtggggtgtttctgttttgtcgaaaggagatcggggtgggcggtatgttatggtcgctatgcctctgacctcctttagcccctgttcgtggccataagtcaacgggacacgcgtagctacaaggggaggtctagatgagcaaaggcctatgtttgtcgacgagtatgttatttttagtcgaagcgctatgtcgcgttcgacaattgtcgtttcaactgctttaacatgcgacttgtttg

SEQ ID NO: 137694 - DNA, 253 bp, Zea mays
  Clone ID: MRT4577_57054C.1
ggattcttataagcactggaattataattttggagcaactttgtttaacctaccgttttcctccacattttgtggtataaatattttgaacttcatcgagctcacctttttacatgactcttgtctcgtcttcgacttatcaaaatactatctgtttgaggttttggaaacaatcattacgacaatttttatcatttccatcttgcttagttagtgatgtaaaatgcaagaaacaaaaaaaaagttaggatat

SEQ ID NO: 137695 - DNA, 332 bp, Zea mays
  Clone ID: MRT4577_57055C.1
gccctttctcacatgcctcatcagtgcgccgtttccccgccaggaggcgcgagcgtgagcttgcttcctacggcgcgatagatcgcatcgattgatctagcgctccgctatcatggcgcgtgctgaggccgcgctgatgtcgacagatagcgcgaacctcgatgtgagatcgtctcctgccgaacgccgggtgtacagccttcacagtgcgcgtgcgccggcggctgccggacttcctgcgattggccgcacctcaactacatgcgccgcgagtactactagctcatcagccacgcggtgtacctgctcaccatccccgtcatcggggggag

SEQ ID NO: 137696 - DNA, 300 bp, Zea mays
  unsure (1)..(300): unsure at all n locations
  Clone ID: MRT4577_57056C.1
gcgggggttgttttttttttttttttttgttttggtcttggtttgtgttgtttcttggggttgttggggcntgtttgcgcccgttgttctttcctttttctctcngggtcnnccttctggggggggggggggctgnctgtttcttggtgttctctcgtcgccgggtcgccgggggtcgccccccttttcgggtttcgggcngtggcgttcttgcctgcgcgctgtgcgtccgcgtccctgccgggcttcttcctgtcgtctcttcgctgtcctggtctttgctgtctcctgtttggtgtt

SEQ ID NO: 137697 - DNA, 537 bp, Zea mays
  Clone ID: MRT4577_57057C.1
tttttttttttttttttttttttttttttttttttttttttttttttttttttttttttttttttttttttttttttttttgtgtttttttttttttttttttttgggaaagttggggggcggccggcaacccccaaagttgaaaaggggggggcatttaaatgaggcccccccgggggggcccaaaaaacccccaagaccataaacaagccaaaaaacagggggggggggcccaaaaaaaaaggggaaaaaacacgggggggggggtggcacccaagggcccacgggagagggaagggaccggggggggggggggaaaggcccccccctcccccaatgaagggggcctgtggggaagggcttttggggaacccttcacgggcggggaaaacccattttaattccttggaaacaaggggggggggggcacgaaccttacaaccaaggccaggggggccacgggggaaaccgggacaaaatcggggggggggggaaaaaaaggggggcggacgaaaaggtccggggcccaactccaag

SEQ ID NO: 137698 - DNA, 871 bp, Zea mays
  Clone ID: MRT4577_57058C.1
gacactatagaagagctatgacgtcgcatgcacgcgtacgtaagctcggaattcggctggcaggcagcaggtttggtaacacatgcacaggtaaagcgcgagcggagagatgggttggttttgatttggagacagggatgaggcagagcatgggatggggctatcaacaaagtggagggactagcttgtgaggcagaaagaaggtgccagtggctccctggagaaacgatgatggcagtgttgttgctccctcccctgcactgcctcttccctggctcctccgatcccccaccgttgcccatccatcatctcccctctcgctctcgtttatgctgttgcctgcattctttttcacagtaggcatgcagtactacttttggttctctttgcaatatatatacctgcaggtttgctaatcaagcctaagaatcttccgcctggagtggactgtactttcaggaaaatcgttctaaaatatccggtctgcatcttcggggaggacgagtgggcggcatcacgtcgcgacgagccgacgatgcctcggtactccaagaaacaggatcccatcgatcggtgctcaagctcgccagcaaccaaagaaaagatgcctccaagaaaaataatttccagctttcccaattcaacacatgtggattagcacaaactctcttgtttagctttgatttagatctagttcctctgaattggtcccacctaattcttgacccttcgggcggtgtatagtcggacggaggactctcgttaattattaccaaaacgctgcaagatgatttctcactgaaatccggtgttgggtgcaaacatgatctgatctagtactagtgcatttctacttattaccttgtaaaaa

SEQ ID NO: 137699 - DNA, 1025 bp, Zea mays
  Clone ID: MRT4577_57059C.1
gcatatagctgagatcgtatttcgcgcgctgtcggtaggcggcattagtggcaggcagcaggtttggtaacacacgcacaggtaaagcgcgagcggagagatgggggttggttttgatttggagacagggatgagacagagcatgggatggggccatcaacaaagtggagggactagcttgcgaggcagaaagaaggtgccagtgccggtgcctccccggtgaaacgatgatgggagtgttgttgctccctcccctgcactgcctcttccctggctccgatcccccaccgttgcccatccatcatctccctctcgctctcgtttatgctcttgcctgcattctttttcacagtaggcatgcagtactacttttggttctctttgcaatatatatactgcaggtttgctaatcgctaagagcctaagaatcttccgcctggagtggactgtactttcaggaaaaatcgttctaaaatatccggtctgcatcttcggggaggacgattgggcgcgacgatgcctcggtaccccaagaaacaggatcccatcgatcggtgctcaagctcgccagcaaccaaagaaaagatgcctccaagaaaaacaatttccagcttccccgattcaacacatgtggattagcacaaactctcttgtttagctttgatttagatctagttcctctgaattggtcccacctaattcttgacccttcgggcggtgtatagtcggacggaggactctcgttaattattaccaaaacgctgcaagatgatttctcactgaaaaaaaaaaaaaaaaaaaaaaaaaaaaaaaaaaaaaaaaaaaaaaaaaaaaaaaaaaaaaaaaaaaaaaagaaaaaaaaaaacaataaagaaaaaggggccggggaatttcctggggtactttatatccgggcgtaaacagggctccgaagcatttgatggtaataagggttacctgtaatgaagttcaaaatcgcttgaggttacaaatggtatacgatatacaatcctaaaaattatacc

SEQ ID NO: 137700 - DNA, 280 bp, Zea mays
  Clone ID: MRT4577_5705C.1
agtgcccgcgcagcagcagcatgacgcctgggctggcaccagcggtggcaggctggccgagcatcccgacgaggattgggacgaaggcggcgagcaagtcctcggagccgatggagcgcatctcgcagagctgcatgagcgactggagctggcgcgactcgtcgccgtgcgcctgcaggccggcgaggaacctgaccggaggtgaagggctgggggaagggaacgtcggcgtcaccaacggacagatcggggtcctttcccttgttgccggcggcgcgtg

SEQ ID NO: 137701 - DNA, 465 bp, Zea mays
  Clone ID: MRT4577_57060C.1
accccaacaagggggggccaaaaaaaaaagggaaacccaaaaaggcaaatccccccagccaccatgcaaagaaaacgggggggggtcacccaagcggggcaaactgacagggaacagggtacaaagaaccccaaaaagggagctgcatgaatctcaaaagaggggggccctgaaggggccttaaaacattggaaagggagccccaaaaacttccggtacaactggggcaaaggcggacttcagtttaaccttcaccccggcactgagcccccccttgtttgggttgggcaaaaccaggacccaacaagggggccctttaaggggtcctgggggcgcaaaaaccttttttgggggaacaaatatggaaggaacattagattccccacaaaggattggaacggggggaatcacatcaatgggagaaaaatttccagcaatcacacacaaccctttgttcccgggggg

SEQ ID NO: 137702 - DNA, 126 bp, Zea mays
  unsure (1)..(126): unsure at all n locations
  Clone ID: MRT4577_57061C.1
gccagnagtnctnctntntanatgctcgtagtcggnaatgcgagaatcaattcgcggcatcngtnttntcagaaacgatncgcttgggctattataagcnaaccggnatgtngccagcngccaagg

SEQ ID NO: 137703 - DNA, 730 bp, Zea mays
  Clone ID: MRT4577_57062C.1
gcgagccagtagtggtcgagccccaccgccggctgctgcagcagcgcatggagccgctgtcgtcgttccgcccgccggcggacagcgacgtggacagggacgacaggcggctgacgcggctgctggtgaacgtgacggtggaccgcagcctgtggcccgtccacctcgtgctgggcgccgacgccaccgtcgccgacctcgtgcgcgccgccgtcgccgcctacgcccgcgagggccgccgcccgccgctcgccggcgcggctgacgacggcttcgagctgcacctcgacaagtactcgctccagagtaggtgcaccgagacgaagcttgaggctggacgacaaggtgctggaccttggctctcgcaacttcttcctctgcgcgcggagacctgcggggctcggcttgacggcctgatgagagcctggttggttggatcaatcggatccgatcgccggtgcacgcatgtgcagcctcgcgtgagaaggggttgcgagtgcagcaggtattcaggccttcaggggttggagatggagatggcgacggcgaacgacgttgaatgttgaagttcctgtcgagccatttctttgtcgcgtcaatctgcgagaaagagatgcaaaccgaaagaggggtaatatggtcagctgagaagatgtagaaaaagaaataaaataaaataataaagaaaagatcagaataagagttgaaaaaaaaaaaaaaaaaccaaccc

SEQ ID NO: 137704 - DNA, 1073 bp, Zea mays
  Clone ID: MRT4577_57063C.1
cattgggtagctcgccggccgggccgtatctatccacccacccccacgccgcgcgcacctgcatcgaccgcccgtgctcacctccacccagcaccacaccacctacaactacaagaacgagccagcctcccgccatgccgatcggcagcggctgcaccacccaggcgctggcggcgatgcacggaggaggcgagccagaggtggtcgagccccaccgccggctgctgcagcagcgcatggagccgctgtcgtcgttccgcccgccggcggacagcgacgtggacagggacgacaggcggctgacgcggctgctggtgaacgtgacggtggaccgcagcctgtggcccgtccacctcgtgctgggcgccgacgccaccgtcgccgacctcgtgcgcgccgccgtcgccgcctacgcccgcgagggccgccgcccgccgctcgccggcgcggcggacgacggcttcgagctgcacctcgacaagtactcgctccagagcttgaggctggacgacaaggtgctggaccttggctctcgcaacttcttcctctgcgcgcggagacctgcggggctcggcttgacggcctgatgagagcctggttggttggatcgatcggatccgatcgacggtgcacgcacgtgcagcctcgcgtcgtcgatcgtggcaagatcacatgcgaaaaaggggttgcgagtgcagcaggtattcaggccttcagggtttggagatggagatggcgatggcgaacgacgttgaatgttggagttcctgtcgagccatttctttgtcgcgtcaatctgcgagaaagagatgcaaaccgaaagaggggtaatatggtcagctgagaagatgtagaaaaagaaataaaataaaataataaagaaaagatcagaataagagttgagagtactgttgttggggacttgttctcaaatgcttcaagaacaagccaacacagaaaatgttaatcggttaaatccttcgtcctacgaagcattatttcccttgggatataatgattttcggacgaaggtcacaaaggccgaaccttaataaatgcattacatattgacg

SEQ ID NO: 137705 - DNA, 438 bp, Zea mays
  Clone ID: MRT4577_57064C.1
cgggtcgaggcaagcgtctagaataaatgaatagaaaatggaattttagtgtaaaaataaaaggctagaacttgtttatttcatagaaaattcatatgaactccaaatcacttcatttcagttcctaaaattttgtaattttattctctatcacttagagtctctggtttgtcatgaaaacagtaataaaatttatttatcacttaattctatttaaaacacacgaaacctttgaaaattcataacttaaaatctataactccaaaaattatgattcatgttcctaggattctattttaatatgtagattattactgtgtattttgtttatatgtttcatgtgatgttcattttgtctataccatgtttgtctgtattgctacgtttagcagtgaggacacgtgtcatctgaagagcaagttggtacctggaatctca

SEQ ID NO: 137706 - DNA, 450 bp, Zea mays
  Clone ID: MRT4577_57065C.1
gaattttggtaactgatttgtaattccagagtttttcacttcatggatttagcaaataaataaatagcagacaattcatagactttggagtagtttgatgtgttacaatgaattccttgtgcaacatggatccagactattcttggtgtgaagcttataccaattaaattctgttttcctggtcatcagtttgagctaaactgttttctctggcacttcaactgtggtctaaacagctttgtggcagccatgtatgttacatattgatgatagcataagtaagtttaggctttcactgtgctcatccttttattttttttcaagttgccctaagttttttgcatcttcattaacttgcagctatgcaatcttctgaaatcaagggttcaatcgcctgaatttctcgagaagctagatactcttcagaagtcagtatatcaacatggtgca

SEQ ID NO: 137707 - DNA, 175 bp, Zea mays
  unsure (1)..(175): unsure at all n locations
  Clone ID: MRT4577_57066C.1
caagacctcctatctnggcgacgagctcctgtcggattcattcactgacaggagctcgagacggcgtctgtgggagtcanggaagtggcaccaggtctgtgtgagcatgtgcatcatcgcgagtgtagatacgtatccacgtagtgtgtatgtgccatcgctcgcactcttgcag

SEQ ID NO: 137708 - DNA, 750 bp, Zea mays
  Clone ID: MRT4577_57067C.1
ggtttctaagctgtggagtcgtgatgagcaactaaagttcgacgcacttgagcaattggttcccgttatggatcaaaagacatattgggctgttgtgtcgaaaaattttgcttcaaagcccaggatagatttgataaagtactatctgaatgtgttcctgatgagaagagtgttgtaccagtgcagactcggtcttctggaaattgatagtgacgaagatgacgtggaggaagaagaggacgaagatcaacctgaaggatccagctctcttcagaggactcaagatgcccaagacttgaagaaggtgccatgattctgctgacaacaatctgacatgcttttttgcatgtgccttttgttcaagtttatgctgagacattgcatcaagtgatgcaccattgctccgagtgattgcaagtctaattttttgcagattttttggttgagggctgcattcactttggttcagccatcttttgtggacagaaaactaaaccgagtgttaaatcatccccgtgcgtctatctagggaagcaaatcaatacttcaacctcaccagatccaaatcattttttgttgtaaggggggagggggttaagcaggtcatcatttcatccgcatttgattggcttgtgctcttggcatgacaaaaccttcgagtctgactagtttggttacctatgttcagcggatacatcagaatcttccagatgttatttccattaaatgtgaaaaaacaaaaaaaaaaaa

SEQ ID NO: 137709 - DNA, 146 bp, Zea mays
  unsure (1)..(146): unsure at all n locations
  Clone ID: MRT4577_57068C.1
ccgggncgacccagcgnccgngcaccttagcaacgaacacgaacccaggcagaacgaagcagaaggagngcaggagagaacccagaacggcaaacgcgccgaggagcccggcccacggacggaaagcgcggaagaccgcaagccga

SEQ ID NO: 137710 - DNA, 297 bp, Zea mays
  Clone ID: MRT4577_57069C.1
ggtttggagaagtattagctgcacattagagttcagataatccaaactggtttcaggatactgtagatgctgtaaggcagtacttgtggttgaatcaggagcataatgttatggaatttctaattatagatggagagcacctgtaccgtatggactatgaatagtttatttaagcacacatagttaacataaacagatgttaccgatgttttttttataatcttactagaaaagggcaacttgaatttgtttttaataaaaaaatttttatgaggggaggataattttgtttttttt

SEQ ID NO: 137711 - DNA, 425 bp, Zea mays
  Clone ID: MRT4577_5706C.1
acttgatcgactcgccgacgcctccggactcgttcctgcggccccgcgagcgaacgataatccggaggccgttgagatgatgggtcatcaggatctcttatctgcctgacagttcctgtcgtgttcctccacctactaggatctcgcagaacggcgtcctgtggtgagggggaggaaaagcgggtcgcctcaaggtcctgttgatgtggacattggatgcctgtccatcagcctggggtgcgtgaggatcacaagcggagatgacacaggtgcgaaagtggctgatattgctgatacattccgagtaccggagcaacgctccttttgcgacagatcttcgacgtacttactatcagagaatagatcccgagtctctgtgatgtgttggagtccgagatcgtggatgagttcgacaagggtgatga

SEQ ID NO: 137712 - DNA, 917 bp, Zea mays
  Clone ID: MRT4577_57070C.1
tggactcctcgcgccggcccagttgcttcggtccgggggggcgggcaacccccgaccccgaagccccaaacccctaccaccatttcccgggagtctcctttcccggagagtggatccgccactccaatctgcaccattctataaggaaaacctagatccggactcctagccgtcggccatggccacgcgccgggccttctcgtccatccttcgctctgcctctcgcattcgctccgcctcaccgtccccatgcccgcgtgcgccgctccaccaccgcccgtcccccgcgggcttcatactcaaccgtgtagccgcctacgcctcctccgccacggcccaggccgcgcccgctccgccacctccttcaaccggcaagaaaaccggtggcggcaagatcaccgatgagttcaccggcgctggcgccatcggccaggtgtgccaggtcatcggcgccgtcgtggacgtgcgcttcgacgaggggctgcccccgatcctgacggcgcttgaggtgctcgacaacaacattcgcctcgtgctcgaggtggcgcagcacctcggggagaacatggtccgcaccatcgccatggacgggacagaggggcttgttcgcggccagcgtgttctcaacaccgggtctcccatcactgttcctgttggtagggcaacgcttggacgcattataaatgttattggtgagcctattgatgagaagggagatataacaacaaaccacttcctccctattcatcgtgaagccccagccttcgtcgagcaagctacagagcagcaaattcttgttactggaatcaaggtcgtggatcttcttgcaccttaccaaagaggtggtaaaattggtctctttggtggtgcaggggtgggaaaactgtccttatcatggagctgattaacacgttgcc

SEQ ID NO: 137713 - DNA, 125 bp, Zea mays
  Clone ID: MRT4577_57071C.1
cagagactagtccaaagcaccataacgagagagatataaaaaaacactcggaaacgatccgcgaactagtccaccggcgatttgttgtgttgttcttcagtgcgtcgccaaccttaactgctacg

SEQ ID NO: 137714 - DNA, 377 bp, Zea mays
  Clone ID: MRT4577_57072C.1
tccaataccaggctgatttggtattggatccaattcaattccaccatctccaattccaacatccaaacggagcattagagatgttcaatgacccggattggggatttgggatcctgagcactctggtgaagctcgaagagagtgaccacatacgccatggtagccacacatcccagtcccccgagctcgtagtagtcgccaccaccgtgacgggctccgctgcgggcgccgaggacgcatggcgatgacggtcgtccttggcagacgcggaagcggaagtcacggaggaagaggagtcccagtcgccgtctccgctgccgcggtcgaggagaccacagaggatggcgaagagcacgaggcagaggagaccacaacgt

SEQ ID NO: 137715 - DNA, 350 bp, Zea mays
  Clone ID: MRT4577_57073C.1
ttgttttttttcttgacaagcggggaatctcaactttttatgttaacttaaacaacgagtgtacaaagaagcaacaacagcaaacctgaaacccacgcacccaaaccgactactacacgggggcctggctacccacctgcgcacgcgctacaacggtccatacgtggggacacgtacgacacctgccacctcaagagccacactccgaagacggtggggcggacgcgaacagtcaaatgccgcctagccccggtgctgggtcaacctccaccttctgggcggactcattattgtcccttcgcctggactcctccaccaagggccgcggcggaagcagacgacactgatct

SEQ ID NO: 137716 - DNA, 526 bp, Zea mays
  Clone ID: MRT4577_57074C.1
ggcctggtgtattggacatgccactcagaagattaagggcgtaatgtcatgagcagacttgcaaggttggtcacagttgtgtgaaggaaattatttctggcaacatatgattttgtgtgatggaaatgacggacactgttcactgctgaatgggatgactagatgtttcatctgtgcaaaaaaaaaaaaaaaaaaaaaaaaaaaaaaaaaaaaaaaaaaaaaaaaaaaaaaaaaaaaaaaaaaaaaaaaaaaaaaaaaaaaaaaaaaaaaaaaaaaaaaaaaaaaaaaaaaaaaaaaaaaaaaaaaaaaaaaagggggggcccttttttaaaaaaccaaattttacacccccgtgttggaaactaaaaattttttttttggggcccctaaattaaattcagtgggcctttttttaaaaaggttggaatggaaaaaccctggggttccccaaattaattgctttgaaaaaaaatcccttttttccaatggggtttaaaacaaaaaggcccccaacaattcccttttc

SEQ ID NO: 137717 - DNA, 924 bp, Zea mays
  Clone ID: MRT4577_57075C.1
aattcggcacgaggctaccgcgccatcaacgtgcctccccgccgcccctgtcctccccatgcccgccgctcccacccgagatggttagcgcccctcctccttccggtcccttcccctgcctcggccggccagccatggattcaccaagcgggctctggtggcggccggcgccgtcgtcgtgtcctccattcccgtcaaccccctcgatgtcgccaagatatgtttaccagacgaattgatatctaggctatttatgtggttactaattttgactcctctaagacatatttacacagggttggtcgttatgggagatatgggcaccttggtttggcagtgaacttgaccacttacaaagattgtttcaacttatatagtattgataaaaaaaacttggaacggaaattaagacaatacccccacaaattgacctgtttgtatactgccaatgatgatagcgacagcttcatgagcgtcagtggaggaggaggagaggcccatgtcggtggagctggaacccatcgccagcgagcagcagcttaactaggtccttggagaggcgtagcagctccagctcctcatcgtcctgctctgcttttctctgcggtaaattgctggcttaaatgcatgctgcttgaaccctataatcagatagaccatcccgaatgcaagtcaaggcctgatagtggtctttctgcaattacagagctggaccctggttatataacaggtcctctctcttcagtatggaaagaatgggtcaaatggtgtgtagagtttggcattgaagctaatgcaattatcgctgttccgtatgattggagactgcccccatcaatgcttgaggagagagatctgtactttcacaaattaaagtttgtaacacttgcctcaacttgttatgaagcaaccaaatgctataca

SEQ ID NO: 137718 - DNA, 180 bp, Zea mays
  Clone ID: MRT4577_57076C.1
cgagccggccgggcccgggagaatcatatctacccatatgtgacctctactcgctttcattacctgcttccctcacctatacgatggactctggaaaagagacagtcatatctagagcccgccacctcccagctataacctcaccagacacccactcgaggcacctagacggcaccggca

SEQ ID NO: 137719 - DNA, 660 bp, Zea mays
  Clone ID: MRT4577_57077C.1
cggccccaaatatcccattatgagtttgctcattcccccatttggcttcttccttggccctagcccaccactcaacaattcttctgttcttgatgactgcgaggctcatttcaagctggcacattgctgccctgctggagctattggagaaagtagagggttactgtgacagtagcatatcaaatcaacagttgtggaaatcataatataaagacgtccaaattgggaaatattattcagggtgttatcatcctactggcaggtggcccctgcccaatatgtcatcttcactatggatggtactttcatcttttttcctcactgttagggagttggtgcactgggagtccaaatcagctagggtagttcatagttggctagatctaggaggtacgttgagtcagagtttggaaaatcagggtagagtacaagttcaggttctctaggacgatgatataatgtagtactatactataagtgttgtggtggctgtttttgaggaaggtaatgcttggtgctgggcttaggggcctgctctcaccacacctatagaatagttcttggtcgtcgtccccagtactgctgccagtgttgttctagtggctggggtggtgttttgctagtcatgactgccctgactgccttggtgggggggggggg

SEQ ID NO: 137720 - DNA, 1011 bp, Zea mays
  Clone ID: MRT4577_57078C.1
aattcggcacgagggatggttagcgcccctcctccttccggtcccttcccctgcctcggccggccagccatggattcaccaagcgggctctggtggcggccggcgccgtcgtcgtgtcctccattcccgtcaaccccctcgatgtcgccaaggtacgtcggtgaccctatcgttgcctctttcgcttcctcgcaactgccgccctcaaccatcgaggctcgcccgcaacggccgccactgcccgctcgccatggcgctcgcctcgcaacagctaccgctggcccagcaccaccaacagcaaccccgcttgttctccaccacccactcgcgaaggccccctcggtctcccttaaaccaccgtctcccaccgacttctgcggttcccctagggatgctgatgcgtgcggtagagcgcgccaggacctctccctcacagatgcacctccgcgtagtcgccggcgaggacgacgtgacacctactgtcgtggttcccccggggacgctgatgcgtgtggtggagcatggttggacctctccctcaccgatgaacgcctgcgcccgacacaccgcgtccccgttgttcacctcggcctgctgctgggcgccacctcgcctccctcgccgcgttgctgcacgtgcctctaccgtggcgacatgcccaagcacgtgaccgaggccaacctgctcgtcttgttctgtgaggtcgccactgtcgaggaggtcaccatcatcaaggacaaggccaccaaggtctcccgaggtgtagatctgcctggccccagatctgggctcgccgccctcccttccccacgcctgctcccgctcggttcgccgcaatgttgtgacctccactgctcgctccagagaagtttttctccgctcggggttgggtttgggagcaatgtcacccgcagaaaccttttgtgcacaggttggtcgttatgggagatatgggcaccttggtttggcagtgaacttgaccacttacaaagattgtttcaacttatatag

SEQ ID NO: 137721 - DNA, 301 bp, Zea mays
  Clone ID: MRT4577_57079C.1
gttggtgggggggggtgggtgtttataaatatttttttttttttttttttttttttttttttttatgggtgagcagggggttttttttctaggaaagaggtggctagcaaagggaaaaagatgggtggggggcaagggaaaaaaaaaaaaatttgggggggtgaccttgggacaaaaagaccaaagttggtgaaattgagtttaaacccccaattaaattttttcccgacccgtggggtgaccccggaatagcgggacgggaccgggggggagtaccaattttgcttatagagagtgagat

SEQ ID NO: 137722 - DNA, 264 bp, Zea mays
  Clone ID: MRT4577_5707C.1
acgccaatgatttttttttttagggtatggctggaagaaaactgtgcgtgtgttctatttacaaaacacgatttctacctaagcattctactataactagaaacactttcttgtaatcaacctcactgcgtcatcttttttgttacacgcactgcaggacaaagatcttctgttaaaaactctctatgtccctcatttcctgaagccaccccatatcattcctgggagctacctaacacaaggatgcctatctttacttggcaa

SEQ ID NO: 137723 - DNA, 763 bp, Zea mays
  Clone ID: MRT4577_57080C.1
caaatgcctctccacacgctgctgctcccaagagaccaattggtacagcgcgggccaaaacagcattatgacgtggtgacacttacatcaaggcttcagattatttttaggcagaaaagaaggaggctgatgcagagaaagaaaggaagaaataggaaaggttcaatcaatcatatgaactagagaaatagaggcttcttgtagaacaagcacgggctgcaaatgaggcaaaaagatttacagataaaagaaaatgaaatgcaagtgaagagaatgtttgaggaagagaggattatgacaacggatattacttcgatggcagaccattcgcagcagtactacaagggcctataaattgagattattgctcgtcgtgcatcaaagtagctctcagtattggttgctgtgttggagatgccctaaatgaagccatccatggtatcagtacagagtgcaacatgatttccttgacaagccttcaagaaaaatgtgtcgtcattagcttgaaataaatgtcatagtcattagggagatttgaactttttatttgagagctatcattgtgagtgggacaactggtattggtgctctgttgcctttcttgtttaatagttttggtcaaaagtagttagagatcatatgtcgtttgaactgatcaaaaactatttggtcgtgtacagcattggtgctttgttgcctttcttgtttaatagttttggtcataagcagttggagaccatctgctgtttgaactgatcaaaag

SEQ ID NO: 137724 - DNA, 380 bp, Zea mays
  Clone ID: MRT4577_57081C.1
ccttgcttccgcttgtagtgggagtgggagtggccgagtgggagaagggaagagatgagcagcagtgaggctagcacgcaagaccatggcgtgccggcgctcgaggcgcaggatagcacggatgaccatggcgtgcccgcgctcgaggcgcccacgcccgaggctacggacaaggtactggccgccatggcgcgactggcgcgacgtcggaggctggagctaaagcggctggggcgcactgcacccgtgggggcggagggagaggtggcgattcgggtgcgtccggtgtcgggcacctccgcggacacgtcccgcgagtcggctaaggtggcgcccgatccgtatgaaggggcttctgcggtggctgggtggtccaagcc

SEQ ID NO: 137725 - DNA, 315 bp, Zea mays
  Clone ID: MRT4577_57082C.1
tcgtttcggactcgcttaaagctcctcatctggcgcattgaggtcacctgaggtatctgcccaccaacaaacaccctaaatccgtatgttctagactctctccgacgttactttcgaatatcacagagacaatggataaggcacttgcttgtgctcgtctgcactcatgtcaagggcacctttttcttttcacattatggacaatgtcacaccaccgagactgttttgtctctgggctcaagccatctctacatgacattccatgtgcacgcgctgggctacaccacctaagatctggtgccaactggtccacac

SEQ ID NO: 137726 - DNA, 147 bp, Zea mays
  Clone ID: MRT4577_57083C.1
ggtgcgttcttttatcgattctttctcttcataatacgctctttcgtttaatttcgagaagatgttctggggctttggtcgccgcccctattcaacacccctgaaaaaagcaccgtcacaaggagcgggacggataaattcactact

SEQ ID NO: 137727 - DNA, 547 bp, Zea mays
  Clone ID: MRT4577_57084C.1
tgggtacccgggctcccccctcgagtttttttttttttttttttttttttttttttttttttttttttttttttttttttttttttttttttttttttttttttttttttttttttttggaaaaaggggcccttaaatttccccctttggaaaaaaaaaaacaacagttcctttacccggaaaaagtcccctttggggtgggccaaccccaagggaagctttttaaccgccccaaaaaaaagggtccaagggggggggcaaaaccccccccccatggccggtttttttgaaaaaaaaaaggggggggacaaccaaaagtttttttggcccccaaaaaacgagggggggcccaaggggcccccaacgggtaagggacaacccggttttttccaatcccccccctttgttgggcccaaaaagggggggggggggttttgccaaaaaaaaaggtccaagccttcggaaaaccgggctaaaacggggccccaggggaggacccccacccccgctgggggggcctaaaaacccaaccccggggggggccccc

SEQ ID NO: 137728 - DNA, 103 bp, Zea mays
  Clone ID: MRT4577_57085C.1
cacaaaccactccacagatgcacttcaacgtcacacggccttctgcactatcaccacaccacgcgtccgcaccactggcttaccaccaggacgtggatcattg

SEQ ID NO: 137729 - DNA, 288 bp, Zea mays
  Clone ID: MRT4577_57086C.1
accaaatcctccaccccggcgcgctgccccatcacccttcccgctgtgctcacgcagcgcagacgccactccgatcctcactgcaatccaccgccccagctctttcgcgcaatggcggccgtcgcggcgccggcgccgccaccgccgcggcagctgagcctggaggacctcaaggcggcgtccgtgctcgggcgcggcgccaagggcgacgtgcaccacgtcgagcacgctcccgaagaaccggacggcgagggcgagggcgccgccgcagacggggccatggagctc

SEQ ID NO: 137730 - DNA, 780 bp, Zea mays
  unsure (1)..(780): unsure at all n locations
  Clone ID: MRT4577_57087C.1
ccggccgggatcccccggcgaaaactgatgctggcctggactggaaaagtgcactgggagagaaccccagatgattaaccaagcccaagtctggtcataaacgcttccctttcaacaatttcacgtactttttaactctcttttcaaagtgcttttcatctttcgatcactctacttgtgcgctatcggtctctggccggtatttagctttagaagacatatacctcccatttagagcagcattcccaaactactcgactcgtcgaaggagatttacagagatttggcatccaaccagacggggctctcaccctctatggcgtcccgttccagggaactcggaaggcaccgcatcaaaatcatcctctacaaattacaactcgggcccgaaagccagatttcaaatttgagctgttgccgcttcactcgccgttactagggncaatccctgttggtttcttttcctccgcttattgatatgcttaagttcagcgggtattcctacctgatccgaggtcaacattcagaagttggggtttaacggcgtggccgcgacgattaccagtaacgatgtgtaaattactacgctatgggaagctcgacgtgaccgcaatgtatntttgggggagtgcagcaggactgcagctcccaacaccaagctggggctttgagggttgaaatgacctccgaacaggcatgcccgccagaatactggcgggcgcaatgtgcgttcaaagattcgatgattcactgaattctgcaattcacattacttatcac

SEQ ID NO: 137731 - DNA, 201 bp, Zea mays
  Clone ID: MRT4577_57088C.1
agaaggttcatgggcaatctcctttttagtagaaacagtatcttgtttggcagcattttcactatacatatgatctttttcaccagtggcatccacggtaggcatgccaacagaaccaacctttgattttttgccctttttttttttttaagtaatttgatttgtgtgcctcttgttagagacatctgtacttctgccacc

SEQ ID NO: 137732 - DNA, 393 bp, Zea mays
  unsure (1)..(393): unsure at all n locations
  Clone ID: MRT4577_57089C.1
cccacgcgtcgcgagtaggaagctaggangaaatcaaagcaacttagttgttggccgagagaagcaaccatgagagctcaggggtcgttactcgtgacactggctgttatcgtcgtcgtccttgcagctctgccactcagcaaagggacagacgaggaaggaggaggaggggaggcaggcctcggtcggaactccgccgcctgaacgagctgcgggccatgctgcaacaagggcgggttctgctacctgtctgacccgccgtagtgccaatgcctggacttctctacagtctgctgccatccagagtgcatgcagttcatcacgtacaccgtcgactgtggcgtacacatcccggccgtgcacgcctaccgctgcgcctacatcctctttaac

SEQ ID NO: 137733 - DNA, 1685 bp, Zea mays
  Clone ID: MRT4577_5708C.1
cattgggtacctcgaggccggccgggtcagtagcccttctagaactctcccatccggttcctaccgagttttccttccccacctccccgccccacccatcgccgaatcggagtcccgctcgcgtccacccttgccagagctcgagagctaccttctggtccggttggacagatcccttcgggcgcagcgtccccccgagattattcaggcaaggtgctgtaacataagatgcaagggggaagaggtgggaggcagggtttgttcggttttggggacccttttgttggtttcggcagctttggacagccagggaacataatgtccggtttctttggtggcgcaaatccctttgatgaccctttcttcacaaacccctttggtggcatgatgcaacctagtttctcaacccctttcagcggcatgatgcaacctagcttcatgaacccctttggtagcatgatgcaacctagcttgcttggatcaagtatgtttgcatcccatggcaatctcaatggaggcacttttggaagccagacacatctcaatcaaggcatgagcaatgccagtggtttcattcagcaagcctctgaatcgagcaggcctaaagggccaattatcaaggagttgtcttcagatgacgaggataaaccagaggatgataaagaagatggcaagaagaatggcaactttaggaagcatccaagggaaagcagagaaccgtgtgtggaggacccagatgaagaagaagaagaagataataaaagacctaaacatagacaatttgggagggagctcagcagatctggtacatcacgtctacagcctcagacatttatgtttcagagttcaactgttacatatggtggtccaaatggagcctgttatacatcttcaacgactaggaagactggtgcaaacggaattacactggaagaaagcaaggaggcagacacaactactggtaaagccacccacaggatctcacgtggcattggcattaagggtcactcgttaacaagaaaccttaactccgatggacgtgtgaacacccttcaaactttacacaacttgaatgaagatgagcttggtgggtttgaagaatcatggcaaagaaatgccaggcagaatatgcctggctgggatactagaatgaacatgcttggcaacggaaatcttcacacgggcttccgagatgcgaatcaaaggccagcacttcctgccccaggacgatcccgtaaagcgaattcctcatggaacttccagaatggctcttccacgggtcgtgcaccccgcacatgagttcttctgtgccatacgcaggatcacagtgctcagtaccggtcgcatccactattttgcagaaaaatgttgcaacccgagcgctcattcgaaagactactgtatagcttatgacagttttttaatattgaagagcttcactggagacaactgaaaatcagaagctttccttagtttgagcagttctatcctagtgctccaatcactgtagtttagtgctgcctaatatgttttgatgggaaggacaatttcttcatgaatgactcgccctagaatcatgtagcctcttgccaacagcttatacatccacatatttaaactctactctgcgaacacttgaaaagttttatatggtggtatatggtggcctgagtatgtatgtttgt

SEQ ID NO: 137734 - DNA, 397 bp, Zea mays
  Clone ID: MRT4577_57090C.1
gcatatacaaatataaatctaaaaactttccatattaaatatattcatgcatcctattttttttgagaaattgctatatcagggtatcaacgtgtcatgtttccatataaccgaatcgtacaatcccttccttaccaagcatgtacatgatacacatgatcctatatcttgtcgatgacaccgcaataagcaaccctccatgctttgtttaacaacaagacacaaaacacacgccaaagacccaaaatctagcccaaacttagtcctacataaaaagacactacctcaaaaccatgtccatggacatgtaggcttgatgaattgcttgctgaaccgatcttcccaatagtatgcccacatagaccactattgccactgtacatataccgatactctg

SEQ ID NO: 137735 - DNA, 281 bp, Zea mays
  Clone ID: MRT4577_57091C.1
atgggctagagccctggagcttggcgattatgtgctacacttggaggatagagtggactgccaggatgtcgacagtgatgctgatcacgatggccgcgggacagaaaacacttggaagatgctactattgattatgcgccaagttgctcagcatcaccaaatccaaaggctccagagtgcgactgttgcatctgacaatgctgaggacatttatgtggtgagcaatgctgccaatggaaccacaccatactcttaccccttggagggggaggactagaatg

SEQ ID NO: 137736 - DNA, 788 bp, Zea mays
  Clone ID: MRT4577_57092C.1
cggacgcgtgggcggacgcgtgggcaaacacaaagcagcatcacactgactccactgctctgcctccataataagcacagaagcgccccaagaagcagcagcgcaggagcgagcgatcgctatggctcagggaagaggcagtgcgacgcgggggcttgccctcggcgccctactcgccgccgctttcctcctcctcctcggcgtcgccgacgcggccacccacagggtcgactggtccttcaacgcggacagctggtccaagggcaagagcttccgtgccggcgacgtcctcgagttcaactacgacccctccgtgcacaacgtggtggccgtggacgccggcggctacaacggctgccggccctccggcacgtcgtacggctccgggagcgaccgcatcacgctcggccccggcaccagctacttcatctgcagcctcaacgggcactgcgggatggggatgaagatggtcgtcaacgccagctgagcacgacgcttatatgttagtactgcaaaaatatatgggctagtggtggtccgatagatcgtgcaagaactcaatcgtgtggcatactcgtaccgtgtgttcgatggacacggttcatgtgttgtgtatgcatgcgactgctggtaggtcaggcatgatgtacgtgtggctgatggcgtgttagtaaagcgtcctgcagctttgttgttactttgttcgatcgaagcagcggcttcttttgtttgttcatcaataacatctttcattaaattttttttattgttaaacaaaaaaaaaaaaa

SEQ ID NO: 137737 - DNA, 103 bp, Zea mays
  unsure (1)..(103): unsure at all n locations
  Clone ID: MRT4577_57093C.1
atggtgaaaatttgctaaacatgctganggttttggatcaactagtgctaggctgaactggttaagggtggcctactttgagcttgtggcccgctttgttggg

SEQ ID NO: 137738 - DNA, 225 bp, Zea mays
  Clone ID: MRT4577_57094C.1
agttggtacacactgaaaacatgatcttgaattgatcagaacttacgcgcgagcaatcgaatagtacaccatcagtaacaacatgcacaatacctattaagtaaaaacacaacatctatattttcataattgatttacaaacacggcgaaaaaaggttggctagcgagtaagctacgaaccatgaatatgcgtctcaaatatgatgacacaacgacatgttatga

SEQ ID NO: 137739 - DNA, 568 bp, Zea mays
  Clone ID: MRT4577_57095C.1
accttctcctgcgacgcatgagcatccgtcgccgtcgattcagagattatcgcctacccggcctcagatgcggactgtgaatctcccaaacatgatcgtcgagagcgttctcgagggaggcaacgggcacggctgcgttgaccccaatgacatacgctgctcctcctggcgctaagtgctgccacaagagtatcaggatatgaagagggacgtgttgatcatacattgatgcatcagaatgctgctctagacgccggaggaggattgtgagcttgatgcatatgtacttcccagatcgctgcatacgggtcatcgctgtgtctcatgcgaggttcatgtccacattgatattgtgcgctctcgggagatagaggggtctgcgggagccgccccaccgctatcgggagcgcaatgatatgcacaaggcacatgtctcgtgccatcgacatcaagggctggtgccacatgagctccacctgctggcgctccatcgtacctaatcctcggaatgcgagtcgagaattacatatctcacctatgttcatatcggacttttcctgatttggaa

SEQ ID NO: 137740 - DNA, 622 bp, Zea mays
  Clone ID: MRT4577_57096C.1
aatacagtcaccgagagagagttcaaatcccacaatcttcttgtaaagctcactgtcttcgtacaactcgccgtcgatgtcagggcgcgactaaggtgccaaggggctgatgaagggcggcgcgatacgccaccgtaaggttctccgcgacaacatccatcgtatcacgaagccgtgaattcggatgctggtgaggaggcgtgctgcgaagcggatctccggggttatctacgaggatacccgcggcgtgctctagatcttccgtacgagaatgtcatccgcgacgcgagcacctacaccgagaacgctcgacggaagaccgttccgccatggatgctgagtacgccctcaagcgccaggggcgcactctgtacggaatcggtgtctgagtgcatctcttccctcgcctgcaggaatgacgccggcgcttcatcatgtccactctgccttgattggattgatggaaatagctatgacattaaaatatctctgatgtgatgctatattgatgggaatcatgcgtcccatgactgatgagaatcaagattatgatgtatctgtatttgctgttaagtgattgaccttgcaagggaactaaggatcgttctttgtatacacctgt

SEQ ID NO: 137741 - DNA, 302 bp, Zea mays
  unsure (1)..(302): unsure at all n locations
  Clone ID: MRT4577_57097C.1
cgcggcgcganccaganccaggngngncagcaggggccnggggaaggaaggcagcgacaggggggagggaacccgcgagancggcagggaggacaggaccgcagcgggggggggggggccncaggncagacgggcagaagcaaggggcccaaaggaccaagaaagggggaacanccgaccgggaggaggcaccaaccgccgggggcaagccccgcagagcgacggcgaaaaagcggcggggcaggagcgcggaggaaccccggggggagacaacaaacacacacccgcgcaggggacaggcg

SEQ ID NO: 137742 - DNA, 218 bp, Zea mays
  Clone ID: MRT4577_57098C.1
cccagcgtcccccatataatatgaccccctggggaggcctaataccaatgttttaatacagctcagggggagtaaagggaaccccaaccgcctttttaatttcttgaatcggaccatccagcccaccaatgtcagcataaaattccaaaggccctttttaaactttaatcacaaatcccataggaccaacttaattttgcaatataccaaccacaaac

SEQ ID NO: 137743 - DNA, 283 bp, Zea mays
  unsure (1)..(283): unsure at all n locations
  Clone ID: MRT4577_57099C.1
cccccggnctgccttaattcggcacgaggccacaggccactcccagagtccaaaaccctacnatccgcgccaccatgccgcgcctcgccgccgccgccgccgccgtctcacgccgcgccgncnangccctgcgccgcggcgcgaaagaaggacagaagactccgctggccctgcaaccgntaaactccgtctgcagcgactatgtgctcgttgaaggaaagacaagtgcncgcgctgggggggtgaaccgccctggctacctcaacgccctcaccaccaccat

SEQ ID NO: 137744 - DNA, 656 bp, Zea mays
  Clone ID: MRT4577_5709C.1
ggcatgagcaatgccagtggtttcattcagcaagcctctgaatcgagcaggcctaaagggccaattatcaaggagttgtcttcagatgacgaggataaaccagaggatgataaagaagatggcaagaagaatggcaactttaggaagcatccaagggaaagcagagaaccgtgtgtggaggacccagatgaagaagaagaagaagataataaaagacctaaacatagacaatttgggagggagctcagcagatctggtacatcacgtctacagcctcagacatttatgtttcagagttcaactgttacatatggtggtccaaatggagcctgttatacatcttcaacgactaggaagactggtgcaaacggaaccccacacgtggaagctttggcactgggtctcccccttttttttgcatatttgtagggtgaagggcaggcctggtgaagtggtgagagttgtctcattgagtactcatattacactggaagaaagcaaggaggcagacacaactactggtaaagccacccacaggatctcacgtggcattggcattaagggtcactcgttaacaagaaaccttaactccgatggacgtgtgaacacccttcaaactttacacaacttgaatgaagagagctttgtgggtttga

SEQ ID NO: 137745 - DNA, 273 bp, Zea mays
  Clone ID: MRT4577_57100C.1
aaacaaaaaaaaagaaaaaaaaaaaataataaataaaaaacatagaattcgttctccctctctttaatgccctgaagcactttctatgcccaccattctgaagaataggtccagtcaactttgactcataaacaaatcggcttggcaagaggttcgaaggccgggccgacaacaatgccgtcgcaattgaaactgatggaggagaagattattttttcttcaagcgcaaagcctaaaaggcagggtggatcggtcctaagaagggctccaagg

SEQ ID NO: 137746 - DNA, 416 bp, Zea mays
  Clone ID: MRT4577_57101C.1
cttatatattatttttccctacctttttttttttttttggtttttttttttttttttttttttacctgggaaaatatattggggcataaatttagtttcaaaccgggttaatccaaaattgggttgggggggtaaaaaaacaagacccgcctggggctcctgaacgctagggactttttagaggtaggtagcgcgcgaacttttttcttcgggcaacccgaacgcgtaaacggggccggccacgttaacaccgtgtcgttgtcaacaccgggtcgtggccattggacgagaaaattaaccttgggcggggttttaacagattgaccgggcccggcgcttggcctcttcttggggatgccccgggcctggggaaacccccgggggggacccccccctgtggccgtgcaatggccccc

SEQ ID NO: 137747 - DNA, 196 bp, Zea mays
  Clone ID: MRT4577_57102C.1
gtcgacgagccgtcaagatggcccgtatcctaggtcagtggcccttattgcactccgagggtgtgctggcttaccatatcccaactggagagttgacttaccaatttgttgtcaaggggttacgcttctccacggaccctgctcaaaaaaactaaactaaacagctatgctatgcaacttaattgtctttaggatc

SEQ ID NO: 137748 - DNA, 189 bp, Zea mays
  Clone ID: MRT4577_57103C.1
aagaaggtgtacataatatgaactgaggagatgcctgcctatgttgctgaccttctttggtcaattgggagtaaacacagaccaaatacgggcggtggtggaatttgacaaggctcggttatgtcgaaataccgtaggagaggacgtcatatagacggtggggcttctttgcgggacccagctcgagag

SEQ ID NO: 137749 - DNA, 110 bp, Zea mays
  Clone ID: MRT4577_57104C.1
tcgccttacatccgaacaacagcactagggggggcccgaacccgatgtggcgcattactacccagcaatggtggcccttgtctaggtgttcgcggagcacgaggcgaagc

SEQ ID NO: 137750 - DNA, 1795 bp, Zea mays
  Clone ID: MRT4577_57105C.1
cgtcagaatgcactggcattgcagaaccatgatgagtactgagtacaaggttatttcaaactccttttacaaaagttatcaacgagcaagtatacacaacacgtttcatgatcccttccctttgtatgtatttgtcaaaacttgcctactactgcataagtctataacatccttgttattatgctttggcaaaaaaaaggggtattacctcaacttaccatatgtattttctatacttatacaggtaataatctacatagactgtgttgtagaaagaattagtttgatcaggtctcaaagaatcaatagaatcgttggttgttgaagactcccttgaaagtacgatctatatgtcaccctgatgtggaagctggtttgccaggacgccagaaactctttgtagccacaagaaattgctgtttcacgacgacaatttcatagtgcagagacttcaggattgggcgtatcttctttatcatctctaacgtgtctttcaacacaaaccatcttccaggtctcagtattctgtcgatttcaaccaccacgtcgatgaggtcacacctgtttgtaagatttccaatgagattactcatgtggagaagatcataggtacgagggtaggtgctgaaagattcgcaccagtcatgatatgccccaatcaaacctctgttgaaaataagtggcaaggtatctggttgaccaattggcacagcattcataacccataaaggttgatcaatgagtgctgcggcaaaccctccaaacccagcattcatgtccattacattgcgaatgcttgaccaattaagtgggaagtcattgaaatatacttctgaaatgagctgtttccaatactttgtatcagcttcaaacttctctttgttagaagcagaatcatcaggtacacttgcatagctaacatcaagtctttcaggccatggaacaggccaattatatctttcatctgaagtggtaatggcagttgtgaaaaggcaactatcaagaggagcataccaaggaaagcgtgatccatctctctcggagcatagagggggctcattggtctttctttcagcatagcaagaattcgatgctggcttttgatatataacaactccaattccattgacatcttgagactttaccactgttctccagcagattgatttagtcagagtaaccattgcattccagtcatcttggtctctttgctcttgacggtagacaggggttgcagaccaaatgaaatatcctccaggcctcagtactctattaagctccaacaatggttttccaccatttgcataccaatggaccctgcaccttgcacagtgtacaacatcgaacacattatcaggaaacggaagcttttgtgttccaattactgctagaaatgctggaattccacgctctagggcaaactgtatctgagcctcatgctcgtcttttggggcaaatgacatagtaatggcattcctgtcaagcaggtatccaccaaagctggcaacaccacatccaacatccaagacagttcttgtgcgccttccccattgtatggttggcataatctgttcaacaaactgaatgtatcttcccacgccatctttgaattgagttccacctccaggaaaaacaagataatcaccagatcttgtaacccagttctgatctttcttatactccaccagctttgggtgagggacgttgttgtaccaaatctggatgtgcagtgaaatgaaacaaaatcagatagtcagccacctaatggcataacaaaaaaaaacaaggaaaataa

SEQ ID NO: 137751 - DNA, 270 bp, Zea mays
  unsure (1)..(270): unsure at all n locations
  Clone ID: MRT4577_57106C.1
ggggaggagggggggaacaacccaaacaacaggcgcggggcacacaaccaagagaaaccaacagaaagaagaanacgggcacacgcacaaaagagacgagggcacaagcaaggacgcancanccccgccgggaccgcacccccgcccaccccgggggggggggggggcnccccanccacgcccgngaggacnccaacagcagccggaggacccagggcacggacagcaaaacgacccagaggaggaaagcgagagaagggcacaaccacc

SEQ ID NO: 137752 - DNA, 495 bp, Zea mays
  unsure (1)..(495): unsure at all n locations
  Clone ID: MRT4577_57107C.1
actacacctggatagggatgcatgcaaccttcatgggcttcttcctccgcccacatccgcgcttcttcctcctcaatttttctaaatcaacccacacccagctgacgcacccacatatggttcaatccccgcttgcaagcagctctcgccgctcgacatcgcctcgaaggtggtgcagcagcccaaggcgccgccggcaagcgctagcccacgaacgtgctccagccggtcagaaggagtgtactgcagctcctgcacgccgtagcgcgccgccgtgtcggagacgtcggggatctcggcgaactcgtggtgcggtaaggcaatccggcgcacaaatcgagcggaatcactgttccctagctcatnnnccactccctcccctccaaacactcgctggccccaccccactgcatctacatcccaacctggcttctccgctagggtttcccaccgctgccgccaccgcctgatccgagcagatgccacccgcagcat

SEQ ID NO: 137753 - DNA, 643 bp, Zea mays
  Clone ID: MRT4577_57108C.1
ggcggacgcgtgggccgtactaatcgaccaggtcgccatccggaacattcattcaaaatgggtcgtcttcacagcaacggaaagggcatatcagcctccgccatcccctactcccgcagcgctcctgcgtggttgaagaccactcccgagcaggttgtcgaccagatctgcaagctcgcgaagaagggtgctacaccatctcagattggtgagatcctccgtgacagccacggtgtcgcccaggtcaaggtcatcactggcaacaagatcctccgaatcctcaagtccaacggccttagccccgatatcccagaggacctctacatgctcatcaagaaggccgttgccgtccgcaagcacctccagaccaaccgcaaggacaaggacagcaagttccgcctcattctcatcgagtcccgtatccaccgtctctcccgttactacaagaccgttggtgccctcccccctacctggaggtacgagagcgccaccgcctctaccctcgtcgcataagcagatgtaggattggcgtgtgtggtagtcttcatgatagacgtttaagtggagtttcacaggcatggatgctttgcggatacctaacaggatcacgatatggaatgaatcaatcaaaagcatcacctcg

SEQ ID NO: 137754 - DNA, 376 bp, Zea mays
  Clone ID: MRT4577_57109C.1
acgtaagctcggaattcggctcgagcgcggacgagctagcctgttggaagctcgtggccggcgacgtgttgcgggagcccttccacccggtgctcctctgcgttctcgtcggcgatggcgtgcgcatcctgggtatgggcgtggtcaccatcgtcttcgccgcgctcgggttcatgtcgcccgcgtgccgcggcgcgctggtcaccggcatgctgtgcttgtacctcgtcctgggcgtggccgccgggtacacgtccgtgggcgtctggaagacggtccggcagggcgaagccgccgggtggaagtccgtggcgtggcgcgcgtcgttcgccttcccgggcgtcgggttcaccgtgttcaccgcggctaactgcgt

SEQ ID NO: 137755 - DNA, 531 bp, Zea mays
  Clone ID: MRT4577_5710C.1
tcgttaggagttgtcttcagatgatgaggagtgggcagaggatgataaagaagatgacaagaagaatggtaactttaggaagcatccaagggaaagcagagaaccgtgtgtggaggacccagatgaagaagaagaagaataataaaagacctaaacatagacaatttgggagggagctcagcagatctggtacataccgtacatcacgtctacagcctcagacatttatgtttcagagttcaactgttacatatggtggtccaaatggagcctgttatacatcttcaacgactaggaagactggtgcaaacggagtaagtatatatcatcatctcatgaatgtttttcttcatctgccgcagtttatcccttccccagaccccacacgtggaagctttggcactgggtctcccccttttttttgcatatttgtagggtgaagggcaggcctggtgaagtggtgagagttgtctcattgagtactcatgtgggagccttccgcactggattacactggaagaaagcaaggag

SEQ ID NO: 137756 - DNA, 127 bp, Zea mays
  Clone ID: MRT4577_57110C.1
actcagagtctagtatgctggtgacggattgcttcaatggcctcaaagacacccggagctttcaactgtggggaagtctactgggacatagaagtccttcggtttcgaaacatttgatcatttcact

SEQ ID NO: 137757 - DNA, 646 bp, Zea mays
  Clone ID: MRT4577_57111C.1
agcagtggtaacaacgcagagtactttttttttttttttttttttttttttttggacaccgatgattctaactcttgagaattcagaaaaaatggacgttgcgctataacgaagaaactcttttttaaatattagaaaaaacatttttagaaaagggattattattaagctataacgaagaaactctttttttatattaggaaaacatttttagaaaaaggaatattattaatattccaacttctgtatcggttgatacatggtggctgtcaaactcacaaacatgaggggttctaccttggaacaaaaatctcgtattctataaaggtttcgtgaatttaagctctcaatctatgataaaagaccatccattatttgaaaagatctccatcatgtgtcgttttaagcacacgacaaccccattttaattaaggtctattctccttctgcaacagtgtccaggactttattcaatgtgttcctctgaaggtgacgtgcaagggagtggaaacttgtgcattatcaaaaatcacatcattacgacttaaccatatagcccaacagagggcacatgatccaacccaaatcaaactcttaagtctataagttaaaccttttagccaagtgccaaacatatgtttggatg

SEQ ID NO: 137758 - DNA, 207 bp, Zea mays
  Clone ID: MRT4577_57112C.1
tgggggcccgcccccctccctccgagtttttttttttttttttttttttattttttttaaggacgtcgctccggcaggaggatatgtgtttcccaggattccaccacactcagcgcagacccggactgggactcgaggaaggggggggggcctgcctcctggcagtcaagggcctattagccactcctgggaccgggaccaccaggg

SEQ ID NO: 137759 - DNA, 160 bp, Zea mays
  Clone ID: MRT4577_57113C.1
ccaaaaaaagagttattttatcgtccctttttaattagctccaaattttttatttgggctgtatacatgcatacatacaggggatgggtttaacaggaacaagaagcctggtcatgtcccccccccccccgatctaaaactagcttgggccgaattccgg

SEQ ID NO: 137760 - DNA, 223 bp, Zea mays
  Clone ID: MRT4577_57114C.1
actttctttttttttgtaagggcccaacctgtgatcagaaactctcttattgaacctcactctcctcgacctctcaacgagggcacccacaataatagccctccttgcgctccctgcccttttagtgagcgcaacttatgcgttcattattcctcggtgctcacttgctactggggcccttgttcgccaggtgctcccgccggttgctagaaatgtgcttggg

SEQ ID NO: 137761 - DNA, 384 bp, Zea mays
  Clone ID: MRT4577_57115C.1
aattcggcacgaggcaccaccgtacacccaaaccccatcccatccccccgaacgcagaagatcccgtgccaaccaacggcggcggcggcgacggtgtgtggactctagactaggagccaatccagggccatccacccgtagccccgccccgccccgctgccggcaatggcgcggctcgtgctctccgagtgctgcggcctcgcgccgctgcgcctgcgcgccggccggggcgccattgcggcgccgtcgccccccgcgctctccgcagcggcggcgccgggccgccccgcgcccgcgggcatccaccgtgactgggcgctccgcgtctccgcgcccacccgcctcacctacgtcgtctaggaggacattaggagctgctggctt

SEQ ID NO: 137762 - DNA, 206 bp, Zea mays
  Clone ID: MRT4577_57116C.1
gggggttgggaaaaccaggccctttttgttcccaaggggggccctttctcagtatttttaattgggacctaaaaaccaaaaccggattttggggcaaaaaaactttaaaaatggggaaaaaaggaaccggaaccattggcaacaaaaaaaaagtttccagggcatatgggcccaagtaacaaatttctttaaacggggggcctttg

SEQ ID NO: 137763 - DNA, 355 bp, Zea mays
  Clone ID: MRT4577_57117C.1
atgttgctggtctggaccttacagacggcgtgaggaaaactgtgactgagagggaatattacttcacaacctatgccgagcgagaaatggagaggggcatcaaggagaagcttgcatatatagggggggagtataattatgatttttagactgccaaaaacagctcctcaggagaaaagagctatgagctgcctgatgcccacccaatcaccatcggcgcatagagattcaaatgcccggaggtcctcttccaccatccatgagagggatggaggctgtggcaaaccatgagacaacatacatttcaatcatgaagagtgaaggggatatcaggaaggaccactacggcaacatt

SEQ ID NO: 137764 - DNA, 197 bp, Zea mays
  Clone ID: MRT4577_57118C.1
gcagacttccaatctcttcccatctgccgcgagttgctacgctctcacaagaactcgctcgacccccaaacccctcttgccctagcgctccccgcccctgcccctgcccctcgccgccggcgagatgatccccgtcagttccgatgtcgctgcggagctgcgccttctgcttgaatgcgctacggactccaacttcg

SEQ ID NO: 137765 - DNA, 491 bp, Zea mays
  unsure (1)..(491): unsure at all n locations
  Clone ID: MRT4577_57119C.1
ctgaagtgatcaggagaactnggaaaagggttggcttttttggattgtgaaacaggggatcacagttttacaggttttcagaacctagcttggcatcacgagactgagaacaggaccaaacgcggctttgaataccactccaccaaagtgggatgagctgaccagctaagactacgtgccaggatgaagagggacagaatgacatatactatatactggtgagagcaagaaggcagggagaactccccttccttgagaagctgaagaagaggggctatgaggttctgtcatggtgatgccattgacgagttgctgtggcagtaggagtttgagggcaagaagctgtctctgcaccaaggagggtctgaagctgtgagatgagacagagagagaagagactgaggagaattgggggtggcaggtcataagaggtctggtgacaatgaaaggggggggttgacggttgggactacggctgcttggatgcgagt

SEQ ID NO: 137766 - DNA, 219 bp, Zea mays
  Clone ID: MRT4577_5711C.1
tgcggccgacggcgcgactcatgccgtccctaaccacacctctcggctctcgccctcctcactgtctcccgctccgtccaggcgccgcgtaaaatccgcggaacgagatgaccttatcagcccgctgatcgaatccggtcacaacggccggtcctctgtcgtcgtcatcagcatcgccggcgaccttgatggcactggaggcgcatagcaacggcggcg

SEQ ID NO: 137767 - DNA, 746 bp, Zea mays
  unsure (1)..(746): unsure at all n locations
  Clone ID: MRT4577_57120C.1
ggtaccctccnagtcctgccatgcttgtctgtctcagataacttgggctgggctcgaatgggtgaaagcctctgtgctggaagtaggaaaaaaaataaaactgaggtttttctgtctactgtttggtaaaaaaataactacaaactaacaaatgctccccacacaaggtatatgtggagcatcatgcttgacataagtctcgggcacaagctaaacatgacaaacttcgatatgtatgtgttaagttcagaatgtgcataacaacatataataaactggatgccaatagagtcttatcttactgtgagcttgacaattgtcatgaacgcgtccatgtagaagaagaaaaaggtaaaaggtttacatgaatgcttgtacagttgagggtcagtttcaacatgctctggctactctgcatataggaccatagattgtatctaatcagctgctcagatttggtgatcaccaagtattgatttgcataacagttgctggtgaagttaccagtcaaatactccctccgttcttttttttatttgtcgcagtttagttcgaaaataaactagtgaacgacaaatattcaagaacaaaggtccacaccatgatttaagagatggactaaatcatgcttatctgctgtggcagccgtgaactcactaaaacttgtttaacgtcactttttccaccatgaattaagaacggaagctacactagtccagcagcaaacagcaagcttgcagtgctga

SEQ ID NO: 137768 - DNA, 442 bp, Zea mays
  Clone ID: MRT4577_57121C.1
ccacgaaagacccctatcccccaattttttccctcccaaacgggttcgccattataaacagccggtttttaataaaaaacaaaaaaggccctctgggcccaaaaatgatgcatgggccgaataaaaaaactgggccggaaggcccgggtttctttatctttgggggggaaaaccccaaaaaaaaatccccattcgaggacccgcccgcaataatttaatcacctaagggcccaattccgaaaaacttaaaaagggggtttgggggccccttccaaaaaaacccggggataaatatgggcaaaatgttgcaagcgatcaggacgtttttaataagggggggcatccccatccattccatggggacggggggccgccgttacccggaaatgtcgcccagcgggtaaattccccaaaaaaagacccccccggccccggcgggggc

SEQ ID NO: 137769 - DNA, 711 bp, Zea mays
  Clone ID: MRT4577_57122C.1
ccgggcggcctcgagccggcctcgatttcgcttcgcacggccggctctccgctccgccagacccggaccggcaccacgccacggctccggccatcacgcgccgcgcacaccatgaccacggttgcgcaccatcaccacctcgccgctgccaccgtgctcttcttcgtcgcattcaccatggcacctctcgccgccggggaccccgtgggccagctctgcggtaccagcggcaactacacgctcaacagcacctaccagggcaacatccgccgcctcgccgccacgctgccgaagaacacctccacctccgcgacgctcttcgccacggacaccttcggcgccgtcccggacatcgtctacgcgctcgcgctctgccgcggcgacaccaacgcctccgcctgcagcggctgcgtcgccgccgcgttcctggacgcgcagcagctgtgcgcctacaacaaggacgccaccatgttctacgacccctgcctcctccgctactccaaccagaacttcctcgccgaccccaacagcgatggccgcgggaccgcgctcatcctcaggaacacgcagaacgtcaccgcgccgttcaaggtgttcgacgcctccgtcgccgcgctcctcctcatgaacacgcagaacgtcaccgcgccgttcaaggtgttcgacgccgccgtcgccgcgctcctcaacgccaccgccgcctacgcggcc

SEQ ID NO: 137770 - DNA, 2173 bp, Zea mays
  Clone ID: MRT4577_57123C.1
gtttgaggctgcctgaaaaagcttgtggaagaaagagaaggatcttcgtgatgcggagaagaaagtctccgtggataggtcaaggttgaaccagacgaagcaggacctcgatcagagggaggaggacatcatcaaagcatactcgaggcaacatgaaatggagaaagcactgatgaaggcgagcagggatttgactctacaagtccgacagatcaataacctgaaggttatgatcgaggaacaagacaaaaaacttgttagttcacaagacgcactttctaagaaggttattgaagtggataagcttaaacaagagatgctgaagaagaatgatgaagtagctttgctgcattcagagatcgagtccaaggaacaagagcttcttgtagctaatcaggccattgcacgtcaagaagcaacaattagggagcttcgaagtgaaactaaaagaaaggaaactgaggttgagagattaaatgaattggcgaaagctaatgaagacaaactgaaatttgcagaacaggaacttgagaagcagaattcaggatggattgcagcacagcaagagttaaaggaattggcacaaatggcattcaaggataaagatgatatcaagaatacaatcaatgacttcaaacgggtgaggtatttgctggatgctgtgcgttctgaactaatagcttcaaaagaggctttaaccttctcacgcaagcaagtagaagatcaagcggcacagttgagtaaccaagtgcaggaactcacagaccaaaaggcactgattatttcttatacccggaatctggaagctgcccagctggagattcaaggaaagtcaaatgagctcagtactgtacaatctcgttgtagtgaacttgaatctcagttacttgaggaaacggagaaggttgagttcctagaggctatgttaaccaaagaaagggagatcttggaacagaaaactaaggaagtggcgttccttcaagaggaggtagttcagaaggagaaggattacttcaattcgcaaaagcttgttgaaacaaaagagactgagctgttagaggctaggcatgaagtcgaagatatgaaattgaaggtggattccatacaatttgctgttcgagagaaggatttggagcttctggaggcacaaagaaaacttgatgaagttaacagcgaagttgttgaacttcagcagctgataaatagcaaggaggatcaactggtccaagttagaactgaattacaggataaagagcaatgcatacaattaatgcaggatgaattggataagatgagattaggacgctcgcaagctgaatctgtggtgcaaaagatagtcgagcttactagcaatctcataggttctgtcaaaggcgaagaattcgacatttataacttgctggatgatgaaattttaagcacgagcacagcccttgagtacagtttgcataagcataaccaactggaggctgacatagacatgttaaaagaatccttgcgacagaaggacatggatctgactgctgcttataaagcgcttgacgccaaagatcgagagttgaaggcagtagttggaaggttagatgttagggataaggaactagaaaacttggaagagctatccatagacccctatggcaccaggaaactgtctagagttgctgatgaggcaaccgaagacaacattgctggtgaagcggagctccaaaagcatgagatggaatctgtggagatggaggcactagctgctagcactatgttgaagaagcttgcggatgtgactaagaaattcttgagaagtggtagaactgattctggtaccaatttagattcaaacgttagtgaaggtgcttctgaattagaaccacaaaggaaacttaatgtgattctcgaggctaaaaaggagattgtcgggctattttctttgacagaagagctcgtcactggtgctcaagtgaaggatgacgaggagcatcataagttcataactgaacatataactgcatcatgaatgttatgcatgtcaactggaatgacgcagctgaaattgttaccatcgtttcctttccttttggggctcaggatttctttatgttcttttggttcatggatggcatcgcaaaatgaaaaaaaaagattgtttagattttggttaaaaggatgatgattgtgc

SEQ ID NO: 137771 - DNA, 820 bp, Zea mays
  unsure (1)..(820): unsure at all n locations
  Clone ID: MRT4577_57124C.1
cctcgaggccggccgggccggcttctttatttcgcttcacacggccggctctccgctccgccagacccggaccggcaccacgccacggctccggccatcacgcgccgcgcacaccatgaccacggttgcgcaccatcaccacctcgccgctgccaccgtgctcttcttcgtcgcattcaccatggcgcctctcgccgccggggaccccgtgggccagctctgcggtaccagcggcaactacacgctcaacagcacctaccagggcaacatccgccgcctcgccgccacgctgccgaagaacacctccacctccgcgacgctcttcgccacggacaccttcggcgccgtcccggacatcgtctacgcgctcgcgctctgccgcggcgacaccaacgcctccgcctgcagcggctgcgtcgccgccgcgttcctggacgcgcagcagctgtgcgcctacaacaaggacgccaccatgttctacgacccctgcctcctccgctactccaaccagaacttcctcgccgaccccagcagcgatggccgcgggaccgcgctcatcctcatgaacacgcagaacgtcaccgcgcggttcaaggtgttcgacgccgccgtcgccgcgctcctcaacgccaccgccgcctacgcggccgccaattcgtccaaaaggttcggcacccggggtcgaggcgttccagaacttcgacagcaaccgcccgaggatctacggggctggcgcagtgcacgccggacatgacgccggncgactgccagagctgcctctcgggtattatccagacggggcccaagtatttcagcggga

SEQ ID NO: 137772 - DNA, 404 bp, Zea mays
  unsure (1)..(404): unsure at all n locations
  Clone ID: MRT4577_57125C.1
cttatatgccttttacaacaccccanngcggaggcaagagaaaaatttttaagttttttagaaaacccaccaccgnnaangctatagcctaaatacttgctgacgcagagacttcagacgagacaaagaatttcttggctgtcccggcggacaataacaagctgaaatatattgaacgcatagcggagagatctgatgatttgactatagaacataagggggagatgaaggttgtggtcacgacagttatctcactcaccaaggaggaggagaaagaactcatggaaaccttgcaggatatccttaatgaaaacaaaactatcttgaccgaacagaaaactgactacatcatcataaaattattagcgattgaattcagacagaaggtgcataatatcttaatc

SEQ ID NO: 137773 - DNA, 1148 bp, Zea mays
  Clone ID: MRT4577_57126C.1
attggtaccactaccagttgcagtagggttttagcttaaccgtccaatcccccatggaagtcgtctccaccccggccggcgccggcgccgccgcttcctcgtcctcttcctcctcctcctctaccccttccccctccaccaggcgccctaccaccacgctccgcttgctctgcccctccagccgcgtcgccacactccgcccctcacgggacctccacgtcgaccatccccccgtgggggatgaggccgtgctcgtcatctccgggccggacacccccgccgcggcggtcagggcatgggagcacgtggtgggccacagagtcgagggggacgaggcgatgggaggggaagaggaggagaggggaggtgacgggcgccgtgggctgccggatgctggccgctggctggcaggtgggatgcgtcctggggaagggcgggaagacggtagagcggatgaggcaggagtgtggcgcccagatcagggtgttccggaatagggagcagctgcccccatgggcgccgccgggggatgagcttatccatataagtgggagcttttctcaagtacggaaagcactgttagcagtttcaacctgcctccaagataatcctaggccagacacacataatattccgattggaagaccatttgggcttccaggtagtggtactggatgtccccctggcatggatcctcattctcaaagaagttatttaccaccacacatacctgattaccacacaaggaattatccaagtaatgctggcccccctggtcctagattcttttttgaacaagagatagtgttcaggatgataattctgaatgagatggtgggaagcataattggaaaaggtggttccactattcgggcattgcaaagtgaaactggtgcttgtataaagatcttagagccagttgctgattcagatgagcgtgttgttgcgataactgcacgtgagaattctgacatgctgcattctccagcgcaagatgcagttgttcgggtgtactctaggatctcagaggcatctattgatagaagttctcatacacctgcaaggcttctcgttccatcacaacatattggatgcctgctaggaaaaggtggatccattatttcagagatgagaaagattacaggagc

SEQ ID NO: 137774 - DNA, 401 bp, Zea mays
  Clone ID: MRT4577_57127C.1
gcattgcgacgccttgagcgtgcacatcgatagctgttacaagatgctacatttctacgtcgtggaacccaatccttgcgtaccttcctttgacactactcgcgcggcctacactggccatcaagttctggaaagatgctgaatgaacttcgcggtaattcttcattctgtcaattaggccatcttcactcgcgtcgctagccgtgccacttgcagcctccagtgattgtacagttcaggtctgggctactcaaacaacagattgcttgcctcttctaaagctccacctcctttgaggggaggagaagcaacgtcaattctgtccatttactttccaaaaatactgctcacattgttgtctgcaataagcacttcatcaaatattcaatcattgactttta

SEQ ID NO: 137775 - DNA, 291 bp, Zea mays
  unsure (1)..(291): unsure at all n locations
  Clone ID: MRT4577_57128C.1
ccagcccgcgggggcggggggggggacccaacaaacacgccgncgcaggcgngccgcgacgcgctggcgggggcggaccccaagngccngngcggctacaagaacncgccgnnggagggcgncaacaacancgaccccaagcgcgccanggagcnnccgggcggggggcggggccacnccncccnacngcnancannnngcnagccaagggaagccaaacangaaggcccccggcaaagcaagcngnacgngncngngngngcancngcagcagggngcaggcaggggccc

SEQ ID NO: 137776 - DNA, 511 bp, Zea mays
  Clone ID: MRT4577_57129C.1
atttcttctgcatgggattcttatatttcagcttcactaagcaattatatttagcataatcgacaacgacaaaattaattccataattcatgctcgtagcatatctatcttttacatcatcagctcgcccaaatatcacataatttaatctacctttcgcattactaactccatcgtacttaacatatatttaacctaccacaacgcgcatgtgctaaacacgaagatcatcacaattaataaatctaccaatccaattatcatacccactatccaaagtaacgagttcgcttaccaatatcaagtcgctccacttccatggacacggcgacaaattctacttcagacttttcgtcgagcactaggtagacgtcacccaggggtcttcttttcttcagtaatcaactactgaagattttcttctagtgagtactggagtggcatttgacgaagcgtgagcgcgagggcgaggatagcaagccgtcgcggaattcctgcgaccaaaggtgat

SEQ ID NO: 137777 - DNA, 642 bp, Zea mays
  Clone ID: MRT4577_5712C.1
ttttaattttttatatttttttttttttttttttttttttttttttttttttttttttttttttttttttttttttttttttttttttttttttttttttttaacaaacatactttatatttccaaaactcaagttttacaacataaaaaaattataaatattacaagtcttgagatactcaaagtgcataacttattacaatagcaggaaggtaagaaccctccaaagcgcatacataaacctagctagtcctcctccagaactggatgcgccctccagccacaggaactagaatactcctcatcacctttgttgcagtgaagaggtctagattcctcttcaatcaccggagtagatttctcttcagtcaccacttcagcttgaatcttcattcctgctgggagttctacgaggagtagggaactggcaccacatgaccgagacaacctccgacgaatgctggccatggtgagggtgagctcgagtgggcgtggtcaccatgacacgcgatgcactagacaacaaacttggtggctgaaagagaggatgcacaccagcaagaataccaggactccaacacctttgtagtggactaggactacagctcgagaagaagggagaaaagcttttctcccggccgg

SEQ ID NO: 137778 - DNA, 429 bp, Zea mays
  Clone ID: MRT4577_57130C.1
gtcatgcgttccttactcgagaggcttttttgatactggggctgacaacccacacgaaggcgcggttgttgtcgcagagcccgcacgcgagctccacgaactcgtgcggctccatggcggacatgctcccgaagctgacgtacagcacggagccctgctgctgcgggtccaaccacgggatgcagccacggtccatgtggaccacccggagcaggctggccgtgaccgcccccaccagcttgctgagcggggcggcggcgaacacctacacggacaaggccatgtggagctcggccagcgtgcatgtctcgatcagcgggaaggcgctgaagatgagccccgaggcacgccatgccgcggtgacggtccggtccaacagcccggccaactcctccaggacggacgtgtcgacccggggcacggctctga

SEQ ID NO: 137779 - DNA, 197 bp, Zea mays
  Clone ID: MRT4577_57131C.1
cggccaaaaacaccggggggttgaaaaataagtcctggctctacatcgtacccacacacaaaaaaccggccgaataaataaacgagcggtgccatcactaacgtcacctatgggagagactattgcagcctgcacgaggggagccacccagaagacatacgcctatgggcggctgaaacgactgacggcttactggc

SEQ ID NO: 137780 - DNA, 379 bp, Zea mays
  Clone ID: MRT4577_57132C.1
cactataacattcacatccacacggacggaaactaatattctatacaccgaacgcccttcttaccttttaatttgtttactcatttatcttttttaaagggaaatgtcaacgtgataaaaaaattcagaatacccggacagatcgtccgcaagttgtttcatcaccccatccgttattcaccaccaccaccacccaaacccaaacccataattacacaatccaccattgttacaaaaaaagacgcctaaattaccatccgaagatggcctaaaactaaaaagaaaggtgaaattttttattctttttttacaaaacctaccctcccttgcttgagtcctgtccctttctccaaaagggaagcgtacctcgttcctacac

SEQ ID NO: 137781 - DNA, 351 bp, Zea mays
  Clone ID: MRT4577_57133C.1
ccggcacaccaggcaacggaaaacgccagggacccggaccggcacaaagaaggaaaccgcaggccaagacgagggggggggcgacaaaaagcgcgcaagaagccacgggagaggacgcacgagaggagaaggaacaaggggggaaccccacaagagccggagagcgaaaggaccgaccgaaccaacagcaagccaaaccaacagggacgcacagaacaggacgggcacgcgaacacgaggagcgggcacagcgaacccacacaaggaaagaagacccgccagagcgccaccagcccaaggacccgcgggacagaagaacggaaagacgcccccaacagaaggcgagccgaa

SEQ ID NO: 137782 - DNA, 557 bp, Zea mays
  unsure (1)..(557): unsure at all n locations
  Clone ID: MRT4577_57134C.1
tcatgcttgttttgtatctattggtagttcataatattatcttatatagaaaatgccaaagtttgtattgcaggtccaccgtttcatgattttcatttaccgacctcctcccaacaaaatgaagatcggttcagtctggcatgatttctctagcagaatgccttgtgcatatatatagcgaccttattttgtgatcgtagcgacgtagcatgctgaagatccaagctccttttcgagaaaaggtctggtctggacatccaagcagagagtcttgtacacatggttgactatttcagaggcacactcaggtgcacccgtgtttgtacatggagcgcctgattggctaattggatgagcgtcgcgtggctttacgctgcagctgctcgtgcagtctctgccttgtgtatataggaaccaaacactgtcatgcgtcataaagattaaagagctgttttgtatgaaatacatgctcagatgtgatacctggtgacgaaatctcagacatcgagttggcattgctaannnaaaaaanaaaaaaaaaaaaaaaaaagggnnna

SEQ ID NO: 137783 - DNA, 655 bp, Zea mays
  Clone ID: MRT4577_57135C.1
cattgggtacctcgaggccggccggggcaaaaaaggtttttctccggccgttaccccgagccgtccgccgccactcgacgaccaccaccgccgccgcggcgccgccgacgccgaccacaaccactcgcggttactaccgcctccgcccccccgctgcttctcgtctccgcgcagccgtacgatggccaagcggctcgccggcgccgacaaagaggtgctcgtcgaggtggtgaggttcacgcagaagagcggcctgaggggctgtgacggcggctggaaggatttcctggcccggaacgacaggaagtttggcgcgtcggtcagcgaccccaggaagcgctccagggacgtgctgctcgccttcctgcagaccttccccaaggatttccagaagtacttcggcaaattagtgaagcgtcataatgaaagaagtgctgttcagcagtatgtggctgatttccccgacgaagtttctccccagcagaaactcgttcaactgacggcagagcacccagagtacagaaaacactactgcttcccatcgtaccaggaggcgtggaaagtattgcagatagatgtctctagtttaacgagctcaagtgctatgttgtcaattgactgtgagatggtcctttgcagtgatggcacagaggct

SEQ ID NO: 137784 - DNA, 167 bp, Zea mays
  Clone ID: MRT4577_57136C.1
agcagcacaagcagctgaagaggctgcgatttgactggttcaagtgtattaagcaatagtgttgcatgctaaatgggatcgactgagcgattatgagggagatgaagggatagcagaggtgatccccaacagtgatcgaggttctgacaagttaatcaggcattagc

SEQ ID NO: 137785 - DNA, 741 bp, Zea mays
  Clone ID: MRT4577_57137C.1
gtcagccacggtgctcctgctgctggtccggaggcagccacgcttgcaagatggatctgccagagttacaggttccatttcggggctgagcttatcaaatccgcagacggtagcggctgtggtgaagcagtgctgaaaactctctggcaccatgccggcgctatactctgctgctctctcaaggccttgccagtgttcacgttcgcgaaccagtccgggctcgacatgctggagacgacgctggtggcgctgcaggacatcgcgctggagagagtgttcgacgaccaagggaggaagaacctgtgcgcggagctccccggcgtcatggagcaggggttcgcgtgcgtccccggcgggatgtgcgtgtcgggcctaggccggccggtgtcgtacgagaaggcgctggcgtggaaggtgctcgacgacgggcagcggcggcgtgcactgcgtctgcttcatgttcgtcaactggtcgtttgtgtgacgcgtctgctaccaggtccgtcgcgctcaggggaaaatcagttgatcggtgacgtgcttgagggtacgtacgtctcaaatcgccctttggttattgggatgtaaaatggtttcggttttttttttgttttttttttgaagaaaaatgtgaaatggtagaaggaaggacctgaatagcagtattgtacacggatggatcgtgtgatgtcaaacaagaatgactttttgtttgatggtgaagctagcatggcccctcct

SEQ ID NO: 137786 - DNA, 486 bp, Zea mays
  Clone ID: MRT4577_57138C.1
cccacgtgtacagcaccctatacagatgaggaagaggaggagggcaggatgtcggagcgcaagttgcagcactccatgcacggcttcctcaggtagctttccaggaagcgctgctgccgggaccggggataggtgaaggaataccctagggatgacggccagaagactggctatcttactgacttggttggctacacggatagcgtgactgacattgaccgggaggttgacaagctaggatccaaagtacataggaaggaaacttgcgaggctgataccattattgaagccattgctgttgtcattgctgggctcgaggcatatgtgaagactcgtagaggcctccgtacactggactatgattggacccaacatcttagcgaagaagtgatgataaaagttctacaagaactggagcaagagcatgacaaaggctgtcacaaagtatgctattgaatctgaaaatgatgctggtcagatggaaat

SEQ ID NO: 137787 - DNA, 767 bp, Zea mays
  Clone ID: MRT4577_57139C.1
gggttgaagaaatcctatatgatgctcttttgccgcaatccctgcttcaactccgatcacattcttattttctgagccaaactctcatgggctccatctatttatgccacgtgaaaatttcttattggttgcgtttggtaatgatgtcatgactaacgactgaaggtgccgcgacgaaaccgagagccaactatggtgcacacatggttgagttgctcggcacgcgctggtatcgtggttaatagttgtgatccattacaagactatactgatgtgctgtcttttgtgaacattctctcagagtgatcgctgcattttgtctcagcatgccgcgatattctatccaaatctgtctcaaatatcttgtcagataccatctcatgaatttgcatcaaccatcagcctgggagttacatgcttctccacccttaaagatcctcattcgaatctcgggacgagattcttttaaggggggaaggtcgtgacaccccaggtgtcaatttcgcgttatgtcgggagatttatcctaatctcggatgctcagtgaaaatttctatttctcgctcgcgtatgtctctgattatccagattatttatccacatttcaccaagtttggaattattcaatctcaagaacaaccaaatttgggagctgttaaaacttttattctcggcgcgaatgtaatctcaatattcattctcgaattataaatctcatctgaagctctttaaatcaaactctcgacgactggtatctgatctgagcc

SEQ ID NO: 137788 - DNA, 561 bp, Zea mays
  unsure (1)..(561): unsure at all n locations
  Clone ID: MRT4577_5713C.1
acaaacatacatactcacgccaccatataaattagactgttttcaaagcagtttacactgttcgtttggcagagtagagtttaaatatgtggatggataagctgttaagagatagcataaggctaagatacacgagctacaggattctagggctgagtcattcttgaagaaatagtccttcccatcaaaacatattaggcagcactaaactacagtgattggagcactaggatagaactgctcaaactaaggaaagcttctgattttcagttgtctttcgaatattaaaaaactgtcataagctatacagtagtctttcgaatgagcgctcgggttgcaacatttttctgcaaaatagtggatgccaccggtactgagcactgtgatcctgcgtatggcacagaagaactcatgtgcggggtgcacgacccgtggaagagccattctggaagttccatgaggaattcgcgccacgggatcgtcctggggcanggaagtgctggcctctgattcgcatctcggaagccagtgtgaaggtttccgttgccaagcatgttcatt

SEQ ID NO: 137789 - DNA, 829 bp, Zea mays
  Clone ID: MRT4577_57140C.1
cctcgaggccggccgggccgggaatcaaaaatccagaatcagtttccaatgagtgaaggatcagaagtcaagaccggtaactttatgctcgatttcgctttgggtggtgtctccgctgctgtctccaagactgccgtcgcccccatcgaaagagttaagctcctcctccaaactcaagatgccaacgccaagctcaccaagaagtacactggtatcgtcgactgcttgaccagagtccccaaggaagaaggtgtcagcgctttctggagaggtaacctcgctaacgtcatcagatacttccccactcaagccttgaacttcgctttcaaggatacctacaagaagattttctgcccatacaaccccaagactgaattctggaagttcttcttcggaaacttagcttccggtggtgccgctggtgctacctctttgatggtcgtctatcctttggatttcgccagaactagacttgctgccgatgtcggtaagactggtgctgaaagacaattcactggtctcgttgattgcctcaccaaggtctacaagtccgatggttacaagggtctctaccaaggtttcggtgtctccgtcctcggtatcatcgcctacagagcctgctacttcggtggttacgataccttgaagagagtcttgttctctgaaggcaagacctccatcctcttcaagttcctcgttgcccaagtcgtcaccgctgcttctggtttggtctcttatcccctcgataccgtcagaagaagactcatgatgcaatctggtggtaagactggtatgtacaacggtaccctcgactgcttcgccaagatct

SEQ ID NO: 137790 - DNA, 300 bp, Zea mays
  Clone ID: MRT4577_57141C.1
cctatgggagccctcgtccgtgtcctaccggcggcgatctcgatcgcgacgttggagaggcggcccacggcgtcgacgcgcacctcgtcagcgtacagcatcgccactcgaacaccgccagcttgggtgcgcgtaagcgaccaatgagtatttggtgaatgcggccatgccgtccccgtcgcacatgaacatgagcggctttgatggcgattcagtatagctacaccgccggcatgacatgcggagagtcctcaggtcatcggcgaccacggtgatggcggctttggtgtcatccgtcgt

SEQ ID NO: 137791 - DNA, 251 bp, Zea mays
  unsure (1)..(251): unsure at all n locations
  Clone ID: MRT4577_57142C.1
ccntcacnnnccgtggtggtntcgcccgcgcncntcggcgccgacntcgtcgtncacagcgtcttccaagttncatnagcngcngnggcgacatcatcnccggcgcgattnctcggnncgganttgcctggtgaacgcggtgatnggacngcaggaagnggcgctgatgcngtngntnccacgatgaacgncaagtggcgttcgagctgtcggagcggctgcngaccntccgttgcggtgangagcaactt

SEQ ID NO: 137792 - DNA, 824 bp, Zea mays
  Clone ID: MRT4577_57143C.1
gcacgacgcgcttcgtgcgccgccccaacgtgctccccgcttcgtgcgccgcaagaacgtgctcctcagcgtcgactccgacaagacggacgaggcggagctgcaggccgccgtggagcgcgcggcgcgcctgctggcgccctacgacgcggccatcgccgagtacacgagccaggcggacgccaccaccatcccgggccactacgtcgtgtactgggagctcatggtgagggagggcggggcgtcgcccgacgccgccgtcttcgagcgctgctgcctggagatggaggaggccctgaacgcggtgtacaggcagggccgcaacggggacgccatcgggccgctggagatccgggtggtgcgcggcggcacgttcgaggaggtgatggactacgccatctcgcgcggcgcctctatcaaccagtacaaggcgccgaggtgcgtgtcgttcggacccatcatcgagctgctcaactccagggtggtgtccagccacttcagcccggcgtgccccacgtacagcccgcacaagaagtgatgacctaatagcattggccgtcggagctcggaggctggggttcacggtcacggcccagactgagctactacacttctgctagtactatatattgctacttgttgctctctacagtgcgtgtctttcggttccttctcgtcatctcgtgtgcaaggcagaggagtgaattagtcacgctcctgccagattctgcctggctctgtgataactcttactccactgctagttgttacatatacttgtgcgtcatgtcatttctcgaggagatgactagtgtttgtacctg

SEQ ID NO: 137793 - DNA, 705 bp, Zea mays
  Clone ID: MRT4577_57144C.1
tcttcctccccctctgtttatctctctctcggtcctcccgtgtccatcgcgtgcgctctgtctccggtggcgccgcctccgccaccctgcaccaggtagccataccttcgccggagacgagcgcccaccagatcagattcgtggatatgtctgataatgagaaattggtgggggagggaaccacccgccgaggggcggactgggaagttgtcgctgggcagcatctgcctatgaagcagcgccagggcctgttggaacggaagtaaagcctgttaacgaagatcaagagcgtagttcatctgatgcactgctcatgtctgaccactttgtgtttccgccgagtgaacacgagaacctgccaatacaaaccagttttgatgagatacatgctgagaaggatgtgcagaaacctagtaccagtgtggaggattatagtatcaagaatgatgttgggtctgagagagttcagtttgacgatgaagggaaacacctctcagatgatgatgtggagatgaaagatgacacccctgggtacggttcctctcacgctgaagatgatgcacatggttttgttgcccatggtgatggcattgagtctggtgaagattttgatgaaaaatcaggccaccccttagagctctcagacagcaagagctgggatactggggcctcttgcaaatggtggtttgaagaagcatatggcat

SEQ ID NO: 137794 - DNA, 228 bp, Zea mays
  Clone ID: MRT4577_57145C.1
gtttttgttcgcgagcggccgccccccttcttttgctggcttttttgacacggggaacaataatggacccactgtactctgtgtgtttacatataccggcctcaggcgcgccgggtcagaccattgttgttgctcgtacaggcatgatactttgagcgattggatacaccctctcaggctaccaaccagggctccaggtggctgctccaagttgagccgatgagaccc

SEQ ID NO: 137795 - DNA, 499 bp, Zea mays
  Clone ID: MRT4577_57146C.1
gaaaaaacagcctatataactcaatggatcaccatgactgaatagcgcacatcaaaaatgccgggtttcttatccgaccctatctctaataaaaggagccatagaccatccttagatgagacctctaagggaaagaggtcacattttgctgagatatcataccatattaacaacaatagatcattccatattctgatacaaccgccactcattacacggggtcacacgccagaaacgaaccctgggggggcggggtctacaagacgaacatggttcgcccaaatccaaacgattcacacaagagacagggcctgatcttgcacaccagatatggtacagaagctgctaatgggtgcaccgatggccacctgcatacactagccaccacctcccgtctttaggatggacccgatactatcagcccaggaagccttatgaaaacaatcactgattagactccatggacatgacaaaccttcgctgtactgtccattacaac

SEQ ID NO: 137796 - DNA, 399 bp, Zea mays
  Clone ID: MRT4577_57147C.1
ggctgcccgctgggctcgccatcgccatcgcctccgcgccgggaaccgcggacgggcgaggtcggactgggcggctggggtgtgggcgatcaatcatgcgctcgcccctcccaccgcgcacatgcgttcgccggggagccggggctactcggcgcggcacgcacgcaggcaactttttggtggcgaccaccacgtcgcgctcgctacctcgaccagtacgtgcccactcttgccctgctgcaccgaccactgcggctttgggagaacaacgaaggggggtcactttggggccggatcagagaccacacaagttcattgtaggcaatgtccacgcgggccatcgagtactacgaactacgtacgtacggtaacggtgcacggcgcgaataactgggagac

SEQ ID NO: 137797 - DNA, 302 bp, Zea mays
  Clone ID: MRT4577_57148C.1
tttctaaccaatatagagatcatattctatgcatgttgcattgtctcactgggtatttaaccttgtgttgaacctttgttcattgatcattatacactattcaagtatgttcatcatactgatttttctgttcaacacttagcaaacttgttagacctttaaatgtgttgttatccaaatcaccaaagctcacaaaagggataaatgcactttcagcttttaaataaacaaagttttcatgatgtggttttaaatttactcttcgtgacatggagtgacttattttaagtaaagttttaaag

SEQ ID NO: 137798 - DNA, 568 bp, Zea mays
  Clone ID: MRT4577_57149C.1
ggccgcttttttttttttttttttatttgtttttttttttttttttttttttttttttttttttttttttttttttttttttttttttttttttttttttttttttttttttttttttttttttttttttttttttttttttttttttttttttatcaacggggggaaaaacaacaaatgggggggggggggggggaagaaagcgacaaacacaaagggagggggggagaaaaaaaaaaaagggaagggaaggggggccaaaaattaaggggggggtgcgaaaaaaagaagaaaaaaaaaaacccgtgagggtggtttggaaccggccccctaacgttatttgcaccaaccgccgcataaaagctgattgaacaaaaaaacccccaaaagggcctgagagaagaacggcgcgcacaccccctaaccgccgtggcccggcacgaaaaaaaggggggaaaaaaaaaaaaaaaaaaaggggggcgttgatcaaaaacacccatgcgggagtgggggtggtgaaaaattttcataacaaaccctggtttttgggcaagggcgcaggagcaac

SEQ ID NO: 137799 - DNA, 208 bp, Zea mays
  unsure (1)..(208): unsure at all n locations
  Clone ID: MRT4577_5714C.1
attattacaaggggttgggggataaatgttacgggtttgatttnaaaaaaaaaaaacaggggccataaaagccgaggggaataatcccttgagagagttacccttgttttctttgcgggggaacgaaaccaaaccaaattttacgcgcgccctcaacgcaggattttttttaacaaaaaaaggggtcccgaaccaaccacccggcccc

SEQ ID NO: 137800 - DNA, 367 bp, Zea mays
  Clone ID: MRT4577_57150C.1
ggaaaaaaaaaaaaaaaaaaaaaaaaaaaaaaaaaaaaaaaaaaaaaaaaaaaaaaaaaaggggaaccgggtgtataaaaggtccaagcttccctcctcatacatccaaaaattataacattttttttatctaaaccccaatattcatttccactggccgccatatttacaaccctcttaactcgaaaaacccttcccttttcccaacttaattccctttgtggaacattccccctttctcctgtattctttttaagggaaaaacccctcccctttttcccttcctaacataaccaccaatcttatttaaaaaattgcccccccccctctttttgacttttacccccccttttttttttccctaccc

SEQ ID NO: 137801 - DNA, 221 bp, Zea mays
  Clone ID: MRT4577_57151C.1
actataaacccttttaggtttgggaattattaattagtttacttattattttgtcagttttttttaaacataatttcaaggtaaccacagactttatggttacatatagcatagcatcattttgtttaggttgattcactacaaaaaaaccacttagagccaacgaagagctgaaactacaggtaactcctgattctcactacaaattcttttcatgctaa

SEQ ID NO: 137802 - DNA, 1176 bp, Zea mays
  Clone ID: MRT4577_57152C.1
attcatttgaataataagctgctgagcgcctccagttccataatctgctgctgctactgcgttgttctctctttttttgtatctgctgctgtttccaagtaacgttcttttgtgcttgtctatgttgtacactggttaatttagggtctgtttggctgagatagcctagggatagtactagttgggctaaagtttagcccagtttggcttggtagatggctaagtagttggaaatttggctaaaaaaatagctcatctattggcccctcttgtttggatgcaccagggccaatttttagctagcttctaatcagctcttgtatccaaaccattccttaataatagttccatttcaaatattttgctggttacatcaatatcatgttaactttgcccaagtgcaagaatgtgttcacattacagtttgtagtttgcttactgctttttgtggctgccatgatggacttctcgttaacctgagacatactatgaggatagcatctatccattcaaaaaccataactgagcagcattgtttgtctgaagatataacaagttgagggcgttacaatcttttgtgccctgcatcccagtttgtgcatgcctattttacaattttttgggttgcaatgatggctttctcgttaacctgatacatctttattccatgaaagacgcctaaattcaatcataactcaaggctgagaacctccaatctcactagtttgctatgttttgcttttcttgttctatctatgttttctggcgtctccaagtttgctatgtttctcttctcttgttctatctatgttttttggtgtctccatttggttctgtcaatctctattcaaattaaacagagctgcatgtgaatattaatatttccaccgaactcctaggttatgatgatatttgtttcattgacctgtgacgtgcttgctatttgttcttgcttcagtgttggatgttgcagcgatgtctttctcgctaacctgcaagattcttttcatcaaagcacttgatcaattcatggctcggactgagaatcggcactatcatttgtatttgatatgttttgcatttacttctgttttcttgtcttcctgctagtttgacttggatcatgtacaaaataaactattattttgagtatatatagtgtttttttagagtttt

SEQ ID NO: 137803 - DNA, 686 bp, Zea mays
  unsure (1)..(686): unsure at all n locations
  Clone ID: MRT4577_57153C.1
accaaaacaaccactgcaatctcaatccagcccatttttacatttaaatccagaccggcccatgttttggctcagccaagttaacggcccaattgggccttccttcgcggcccactatcgtcaccccttcttcccgttcgccaccggtgccggcgccatctcgcagccgccgagcacgggggcagcagagtccacgttggtgaggaggtactcgtagatcttcttcctgagcctctctatcgtctcctccggcacgccgctggccgcgccgccgttggcagtgggtgccgccgcttcgccgtccgcttccggtggcggatgcggcgccatctctgccgacttcccgatctcgctcagccagtcgttgacgcgcttaagctgcgggagcatcctcgcggcgcggtcggggtcccacggcgcggccgccgcaacgtccgcgtccaggaaccgctccacgaacgccaggaaccacgcccgtgcctcgtccccgagccgccgcgcaagctcgccccgctcctccgcgccgnctccccgttcccattcaggcggaggcactgctgccgccgccgcancggcggcggcggcggcggcggccgcggaaccagctttcaacctccccttcgccggggacagccgcgacttcgcgggcgggactgccttcgccgccgccggcttggctgactcgt

SEQ ID NO: 137804 - DNA, 166 bp, Zea mays
  Clone ID: MRT4577_57154C.1
gagagagcccgaacagacgatcttccaacaaaccagcataaggacggccttcatgttcggggcgttgcttgttgtattagctgccactactcaagaagagacagatgtgctactgctggtggatgctaaagttctacggcgtttctgtctgcatgctgacaacgat

SEQ ID NO: 137805 - DNA, 713 bp, Zea mays
  Clone ID: MRT4577_57155C.1
atcgaacccccgccaccaccagtccagcagcaccaggccagataggcctacctcgaagaacaagagctggtcctcctggtaataagcgagactgcgagagaggccaatggcatccaagtggtggttcgtcgcctccctgctgctctgcctcgccgtcgcatcggcggcggcaagggcaataatgccccgcgactgcgacactactgccgcattggcggcgggcgacgacagtgccggcgccgtggacgaggacgacgagcaggccaagaccgccgacgtgttcggcgggcggaccggcggcggcggcctcttcggcggcgtccacggcccgctgggcggcggcgtcgctgggttcggcccgttcggcggggccgtcgccggcgcgggcccgttcggcgggttcggaggtggcggcggcctcggtggcggaggaggaggaggaggaggagcaggagcaggtggcgccggcgtcccgtaaggcgtgagcaacgctgtgcatggccatggatgcatgcgtgcgcgtgtaataaggtgtctgtactgtacgtacgtgccgtgtgcctggctgcctgcccgctcttgtgatgaaggattgggcgtacgtatgtgcatgcatgtgggtcgtcagccatcagcgtgtttgtgtgtgttggacctgttgtacacccttccgtcttcccactgtatgttaatcagcattaattcttcgaacg

SEQ ID NO: 137806 - DNA, 496 bp, Zea mays
  unsure (1)..(496): unsure at all n locations
  Clone ID: MRT4577_57156C.1
ggggtggagntgtattgctgaactccgggacgtgtccttcttgggcgccaccgggggggagatcttcttgggcgcgctccacgggaacctgcgcttcgctccgggagacttcgtcgaggacttgcccgaggtcaacgacctcctgcgccgcatgctctgcaaggacgtcgtggagcaggttctacgccgagcaagtcctgatgcacctgtggattgagactcgcggcggaagtgagaatggcggcagactgctttagatgatccgcgccgcatccgtatgaatctccctccgtagcgacatagaggcgtccttcatgcaatacatgaggggtaaagaaggaccttttgctgatgatctcttcgctatggtgctggaaaatgatcgtcaatttggacactaatggtgtagctgcgtaccagaagcacgcagaaagaagcactcgttaggctaagcaagtatttaggagggctgcctcttcctgtgtgtgctatggtc

SEQ ID NO: 137807 - DNA, 333 bp, Zea mays
  Clone ID: MRT4577_57157C.1
gtgggttcggttgcttacaaattggatttacctgcttcgtctaaaatacatcccattttccatgtttctcaactatagaaggctatctctccgactgttacagtcgctcagctacctcagtccctagaaggtttgcaggtacctgacaaaattttacaacgtcgtctgaactctgcaggttgtctcaattgctcatccagtggtcaggcatgcctactttgttggccacctgggaagatgaactgttattgcgccagaaatttccatatgctcctgcttgggggcaagcacctttcatcgccgggggattgttacagacactacctaagttcg

SEQ ID NO: 137808 - DNA, 269 bp, Zea mays
  unsure (1)..(269): unsure at all n locations
  Clone ID: MRT4577_57158C.1
catgtaacaggattctcgtcactgtgttcgtcaggacggcatttgcttgtgcatgcttctactggcgtggcatcaagcgacaagcgcaggtgantacttgtagctcggcggtctgctatcatcttgcctctccattcttcgccggctgtaagttgctaattcgatcagatgccacaccagcgcgaccttcaagatcaagctctatgaggtctgctatgtctgctgtgatatatggtgtctgagacccatgagatcatcgaaagggcgca

SEQ ID NO: 137809 - DNA, 182 bp, Zea mays
  Clone ID: MRT4577_57159C.1
cccaagccacggacgtccgaactggcacctcatccaccttcactctccttaaaacgcctgcttaagcgcaggcatgacccaatgactaatctttttgacataggctgtttgggtactaactatcctgtgcgcactgagctaatacctgttcagtgccgttgtcgttgtacttcccatcccta

SEQ ID NO: 137810 - DNA, 335 bp, Zea mays
  Clone ID: MRT4577_5715C.1
ccggggtgctttcttagaggtggcttggcttctcctccccctccggttcgtttcgggttcgagaggttctccgtggttcgggttcgtggctgagcgcatcgagacggcggagtcggatgttgagcactgctgcttcgtccgcgggctcggctgagccacggactaccactccctgcacaggaggttgagcagctagccggaggctctggcgtccagaatcatcctgaatagaccgatgctccggtcccgtagactcggcttttccgccttatggagccggtaccggacgcggcccgcactgtatgcaatgagcgcgaggtagacgctgaggccga

SEQ ID NO: 137811 - DNA, 232 bp, Zea mays
  unsure (1)..(232): unsure at all n locations
  Clone ID: MRT4577_57160C.1
gcgggggggggtgtttttttgaacaaacaagtaatggagagtggnantttattttttgtacgaacgcagaagcacttttacaccggagtgtgctatgtatgcatataggaacaacatattttggttgaagtttatgaagagaataaataggtggggggggggggagcaataccgatagtaaattttgaaataagggggggggggttaggattaagcgtgtgggggaaggatt

SEQ ID NO: 137812 - DNA, 576 bp, Zea mays
  Clone ID: MRT4577_57161C.1
aaccgagccaaacagaaaagaaaaagaaaatcttcagaagcagcaatcctgcggcagtccttgcaactgcaacacatgaggacgacggccagcggcagaatgctgctgtccgtcctggtggcgctcgccgtcactgctgctcaccacgccgcggccgtcggcccgccgaagccgagaggccaggagacgcacctgttcgaggccacggtccgcgtcccggacaacggcgcggccggcgacctcgaggagtacaactaccgcctgctcgccaacgtgctcggcagcgtcgaagcagcacggagcgcgatgtatgagagcgagctcgggctgttcagcgccttcatcaccaacaaccaggcccgtagactgtcaaaagtcccaggggtgctcaaagtcacgcggctggaggaccctcctgcgctcccggagacggacggccatctctaagaaatttggtgttacggggaagtgggaacacccacccagtggggggtcgtcgagaataactgtaaccatgttcgttgaagctgcataatgcatgtatttacatggattaatatattgcactgccacagt

SEQ ID NO: 137813 - DNA, 378 bp, Zea mays
  Clone ID: MRT4577_57162C.1
cgtacacttaacgggacccatgcacgcaacactcgcgcgatgtgagcacgtccttctcatccacggtccacgcgcaccagcatctcacgcgggcagcactcaacaaggcggtcgagcgccttcgctgccgccgttgaacatggacgcttctgccgtcgacactgataatcgatgggtcttcctacccaacataccatactatgcgacagaagagcagctcgtgctgatttgccaagaggaagaccaagtcgtatccttcaggatctgagacatgacacatagactgccaagccaaaaggttgtcgctttcgcgattacaagagaccatgaaactgttgtaagtgcaccgcctgaccttctggtttactagatcaatgg

SEQ ID NO: 137814 - DNA, 796 bp, Zea mays
  Clone ID: MRT4577_57163C.1
tccaccatcctccgtatctcggtcttggagaacctgcactggagcgcggggtcggtgacctctcggaagtcgtccgtctccaaggcgttcacgaggagaagccgagcccattcaaccaggctctcttcttccagtggctgagatgcgtctacgggcttccgcccggtgatgagctccaggagcaccaccccgaacgagaacacgtcggacctgtccgtcagcttcccgctctgtgcgtactcgggtgccatgtacccgaacgtgcccattacgcgcgtggagatatgagtcagcgagtcgtttgtcagtttagcgaggccgaaatctgcaaccttggcctcgaaggcgtcgtccaggagtatgttggccgacttgatgtccctgtgtatgatcctaggatggcagtctttgtggaggtacgtcagcccacgcgccgctccgatcgcaatcctcatccgcttcggccaatccatcacgggcagcccttttccgtgcaggtgatgctccagcgtcttgttggccacgaactcgtagacgaggagtcggtggttctcggtgacgcagtagccgacgagcgtgacgaggtggcggtggtagatgcggctgatgatgtccacctcggcgagcaactccttctccccctgcccgctgcccagcttgagctgcttcaccgccacgctccgcccgtcgcccagcgcgcccatgtacacccccccgaaccccccctcgccgatcacgttcgccgccacatacccgcaagtgatgcccgcggacgcgtgggcggacgcgtgggcgg

SEQ ID NO: 137815 - DNA, 575 bp, Zea mays
  Clone ID: MRT4577_57164C.1
cctgccgggccgatgcttgtaccggatggtcatactctgacatggaggagatccagaggagtgcgttccggaggggattgcatgatgcggcaagcatggaggtgctgaacaccggtgacggacatgcactgctggcggggccacgactacctgtacaacacgccgtaggactatctgtaattcgactgcgacatacatgtagccgtgtcggtagaacgaggtggactacgatttaagcgaactggccgacgtcttgacactcaacgacgactacctcaccggcgtgtgggtgatgtaccttaaaccgtgcgtgcttaatcgcaggatccggctcatgctgcggtgagataacgaacctgatgctgacataatcgacgaggagctcagcaaatatgggaatatgggagtgtaacatatatatatctatactgcattgaagtatgacactaaggactcataatttacaatattaactatacttcaatggcgaaagacgctaattaactgtcattgctgtgaggaagatgtgactgaatgaaaaagctatgatacggtatttatgggatcaagctcac

SEQ ID NO: 137816 - DNA, 634 bp, Zea mays
  Clone ID: MRT4577_57165C.1
ctctgtacaaggtttcttcagcgcctcgcctgatcaagctaggaacgagatgcgccaggcctgttttgattacttgagcctcggaggcgtcttctcgaatgggcctattgctttactctcgggtcttaatcctcggccactgagtttagttgcacacttctttgctgtcgctatctacggtgtcggtcgcttgatgctccctcttccttcgcctaaacggatgtggattggagccagactgatttctggtgcatgcggcatcatcctccctatcatcaaagctgaaggcgtgagacagatgttcttccctgccactgtacccgcatattaccgggctgcgcctacgggagaataagtaaagcgcgcgagaaccgattccgggctgctgctcatcccaccatgatctgatggcaactgatgtgtcatggatggcattttttcccctgtgttagtggtcgttaggtggttggttgtgcttctgtcattggaatgaggaacctgtatagtgtgcccctggatagtggtcaaagttgggtcctacccatgtcgattactgccaagttgtatatgattctgttgaactagtgaaacctccccatctttaacgcgtaaaaaaaaaaaaaaaaaagcggcc

SEQ ID NO: 137817 - DNA, 112 bp, Zea mays
  Clone ID: MRT4577_57166C.1
cttctacagaggttgcatcgttgcaatgttaattgagtagaggacgttgtcgacttccatctcctacatccttgtcggtggctgtcgccgaccatcggctcgacgaggtcgt

SEQ ID NO: 137818 - DNA, 539 bp, Zea mays
  Clone ID: MRT4577_57167C.1
attcccgcctgataccatatgatacgcacttttcggcatagtacctgagagaagcctatgcgaaccttcccatctatatccaagagatcgggtatgcaaccacccacgacagcctccatgatactgtcagggccgattacatgaacatcctcatacgcaactacattggctgctcgaacgactgcgactactgccacaggctacttcacgaggtgcttttgcactcctgaagcaccagccttgtctcatgtcgacaataccggctgcaccgtgtggatttcgaagcaccagacgctaccacgggaagcgaggctatctgctcgcttgtattcgtaaattcaccagagaactacgctgtccatgacagaggatcgatgctcgatcgatgcggtatcgccaatagagcaataatctctcgtaccgagacacaatgatctgaacatcctctagggacactattggaactagctggggccggatgcaataagcaacactctatattaaaccaggagaaaaatgcagatcgatgaagcggcgct

SEQ ID NO: 137819 - DNA, 636 bp, Zea mays
  Clone ID: MRT4577_57168C.1
cggcccgagcccgagcccggcgcatcggcagtctcctctcctcgcgcatttctcactcgaccaccacttcggcaccgcagcgtccgaatccctccgaaccccgacccaagcgcgctgtccggcggtcctcatcgaacccgccctgatccctagcgctcgcgggctccactctacctacggagggagcccgcccagccggccgcctctgcgttggacctggccgcggcctcgcacgcagatgatggtggcggagaagccggcgccgggggtgttgggacgtgcacgaggcggcggacgacgagcaggagccggcgtcgccggcgtcgccacggaagatgcactcgctggacttcgagcacatcagcgcgctcgccgccgtggccaaggcgctggcgcccaagagcacgcggcggagagcgctcaccatcgcgcgcttcaaggatcttgcacgccaagaacaacgcgctggtcccgttctgcccggtcatcatcgtgctccactatctctacggaacgcaccaaggatggcggttccttttgagcttaatcggcattaccccgcgacccgagagactgcatatacgccgaacgagcaactagcatactacactggccacaacagacgtggggctactg

SEQ ID NO: 137820 - DNA, 856 bp, Zea mays
  unsure (1)..(856): unsure at all n locations
  Clone ID: MRT4577_57169C.1
gtagctgccctataatctagattggggctttacggttggagcgaaatattttgttggtgctctanattctataaaatttagttatttttaaattataaggcatttttataggtcacgttgttggagatgctctaacatgaatgaccgggtactactaggtactaaccaatgtcttggcncgcttaatcaacgcaaaatgatgtnctgcgtagctaactgagatagaacgacgaagccngagagttgttgactttccttgttcaaaacgacgtacgcccgggcgggcccggccttgccttactattgctgtctacgtactactactgctactctccggctccccctcgagttcgtctcaaatccgtatacttgaccagcagctagcaatactcctgagatgcagtcgtccatcatggagacaagaggcgacgacgaccatcttctaccggtcaggggaggtaagactatttgtcacttgcacattggacctctcagttttaaacccaatctattcaacttccgtttcagttcggacgcccagctagagttgaattgtattaatgtgaacctcgatcgtaaatttcatcctgaaggactggatcttttgaacagaatgtctagccttccaccctctagccaacatgactcatgttgaattttgtacaactttaactaagacatcttttgtgtttaacccgccgtccactctgtatgctcactgagtctagaaaaacatttatatcttgacctctgatctttctggaatttgggacgcagtcggggaaataaagaaaatagggaaaaagagtttagaaaaaaaattaagaatataataaagccaaaggaaatgagatca

SEQ ID NO: 137821 - DNA, 389 bp, Zea mays
  Clone ID: MRT4577_5716C.1
cccaaacccacgaaaccctgctgcctcgcctccgtttcctcatcctcccacccagtggtgggggacccggacgaagggggtggaggacacgaattggactaagggggtaggatgccaccaaagaaagcggcgccatcgaaggcggagctggccaataagcagaatgtcgtggaggacaagaccttccggctgaagaacaagaataagagcaagaacgttcaatagtacgtccagtccctgcaccatgccgtccatcccaagcctgactcgaccaagaccgccgtcaagaataataatgatgatgagaaggcgcgcgagaaggatcttaatgatctgttcaagggtgtcgacaggcattccaaggtccctgttgatgttgatcccaagtc

SEQ ID NO: 137822 - DNA, 411 bp, Zea mays
  Clone ID: MRT4577_57170C.1
cttcaagctccccgatccgacgaccccagcggcggcgatgggcggcaaggacctgacagaggagcaaatcgcctggatgcggaaggccttaaccctgttcgacacggacggggccggccgattcgttccaacggagttggccgtcttaatcccctccttgggcggaacccaaaccaaggcccagttccggaacatcgccgcccaggagaagctaacggcgcctcttaacttccaacgcttcttaggcctaatgcgcgcccacttaaggcccgagcctttggaccgcccgttccgcaacgctttccgggtctctaacaaggacggttccggaaccgtcgccgttgccgacctccgccacgtcctaacgtccatcgaagagaagctggaggtgcacgagttctacaagtggat

SEQ ID NO: 137823 - DNA, 3611 bp, Zea mays
  Clone ID: MRT4577_57171C.1
aatcatatgacattactaatatatcttttttatatcatcatgaatgaacatgaacaatattgaattacatttgtacattcggcttgacagaaggcaaaagtccaagcgtgacgcacgagtgaatacaagtcagcgtgaacagtacgagggtactgttcatctatttataggcacagggcgtagcctgtgtaaaattacattcatgtccttcatgtttactattgacttaaggacaatctatcaaggactagatagccttttcccctttaagtcggctcctttttctgctactgatccgaagcttccttgcgcgtagcttcggagctggttcaaccttcatcctgaccatgcttttcatattgtgtatagctttattccgagtctggaggttcctgtacatatattacacttgggaaacattgttaatcatgtttttgaggaccttcggaagacaaaggcccccaacagtagacctcgacaatgtctcctaatatctcatttaaaatcaaattcatagccctttgataagttgcgctctcatttttagcccaaaagtcatgacaccccactcaaataaaccaataaagcttggatatacaaaggccattttagatgtatcttttttgtcataaagatttgatgatatctgatattagcataagaaagctaatgaccttccaggtgttcgggtcattgttgggattttggtactgagatcaatcgacggctgggcttgactggcccaacaacacagagatggcatgcctaagtctgtatgcaggggcgcacagttcatgttctgatggcgttcgctcggctagactttggtgcgccgcacatttacccgggtgtggcctaaggatggtgtgtcctgtcgtagccgacgtgggccagcagcgtcaggatggggttccttccttgtgggtccactcggtgggaactccgtcgttcgccttgcctcgcggacttgctccgcggggtcttggtcgtccgctccgcctcgtggacttgcttgacggagacttggtcgtccgcctcgcagacttgctcgacaaatgggccggaaagaggttatgggccttaccttgggtaccccattcctaggtatccgacaacagcccccgagccattgggcgaatccttggagttgcacggaggcttatgctcggtgccctatacgcttagttgcatgcaagtgcatctgctagaagtagcccctgagcccccgagtgatccataaggattgttggggtttgctcagtgacggagtagtttggggacagacccctcctgcgattgtcgccatgcgctgatcgtgggtccataatttcttggcttcctcctgtggttgggatcttgggtgcgcgcaagcgctgctgttggatgttgtccccatgcccctgagtaaaccatgtgggtcgcatggggtccactcggcgggagtgcagtttaggagcggacccttcctacgatggtcgacgcgcttagagcactagcctgttgcaattctgtactttgttgttgttcaggacttccggtgcgcgcgagcgcatccgttaaatgcagccccctgagtgatccatgtggatcgtgtggcagaacctcccaagtaattgggcccatatgcacctgcccttgtctcaaagacctcagatggctatgcatgtgcaccagataacttaagaggatatgttcgagtgtcccatggaccccggataaaccacttacaactaggaccacaggattaagtaaacacaaatcacacaccaacaatttgcagcggaaatcttattaccaaattttacaagttacaacaaatttacattatatttatcggagtggttacaaaagtggttcaaagaataaactttgaactgttataaattatttataagtttgaaatatatgctggctcagtgacagtcctcaataagaagtatagaagaagtacttagacttataagaaggtcgtgcccaccagcgcttaacaccaatcacaatcaaagtgactcgtaacctggataacactacgttagtgttgttagacgtcgatcacttgacgattagcttttggtctgacacttgttcgggtcatccatcttcaggatcatcatccgcattaccttgaaattaatccagccgttacatcatcttggggtcgacttgggtcgtcttccgcatcacacgattaattatcgtacctaaaatagtaagaatatagagctcatcacacagcacacctgctaaacacgagaatcatcacgagtaataaatctagctaatccaatcatcgaactaataatagaaatagcgaatcaactcaccatattgcaatttgactcgatcatcacacgaatgatgacgaccttcgattgatgtcttcgaccgagcacttgatgagcgatgcacacgggcctcgcttctttaccaattaacatccttagacttctcccgaactatacccggttcaaatttgcaagaacgccgatgattttttttggttcggggttttcgtcgaacatctgatgagtgacatacggaacttcactgtcttccctatccacagtcccatcttcaagctcatctccacacacatcctaaccactactcaagcaacatcgtttcccttaacagaactacgacgtggagagaaagatggccagtgaactggaacgaagctggcgacgtggaatggcgaggaaatggaagcgccatgggggatggaatccgacgattcgatgacgtgcgcaggctaggatggtccagttaggacaggaggcgcatcaatggggagtccacaacggcatgcccagatcccgcgtcgcacgaccatgcccgcgaccaaaacccaccacgcttccgctgcgcacagcgatgcgacgaccaggggaaaagcagggagaggactcggcgaccagcgcgcaggggagctcgacatgggcgcggcgagcagagcaggcaggacgccgggcatcgtgggcgagcctgaagccaaacgccggccagggagcaagcaaggcggccatggcgcgcaaggagctcggtgagcggcgagatgagggggtgagccaaggagtcggtgagcaccagagaaggagatccggcgcagagagcagccagagagaggggcacagggaggaaaaagatctgggcgcgcgccagggagctgctcgggtgggcgcgcgtcacgtggaggaagatgagcagggactcgacgccggcgagccacagataaatgagaggaagagagcgccggcagaggaagctccacggcgagtagagagggaagtagaggagcggctgggcgcagggagaatgcgcgtgcacggagcttggctgggagatggagcacttcggctggccggacttgggcagtggttggccgagcagtggagcgcggtgtggagaactcggccggacgtagggagatgcgcaaatggaggagcctatgcgcgtgggagaagaagaggagtgagcaggggaggggcgcgcggcatgggagcaggcgcgcgtgcagggaagctctggccagggagatgaagcgcgcagagggtagatagaggagggacggctgagcgctcggccgacctgagctggggagagcaccgcgc

SEQ ID NO: 137824 - DNA, 421 bp, Zea mays
  Clone ID: MRT4577_57172C.1
aaaaaacaaccctcaaacggggacccaacattggattccaattttaaaggcaacaaaagctgaatttcgagaaaaaaaaaaaaacagggggggggggggcggaccccgtttcgctgctacttggggccaagggaacccaaaggaaaaacgaagggtgcctgggaaaaaaagaaacggccctacaaaatttggaggaaaaaaacctgatctttgacatttgcacattggggtaacaacaacagggggggtccccgggccaatgacactaaaaggggatgggcggcaatataaatattgcccggatactggccccgggggggatccaggttcgggagggaaacaaacaaaaccggggggaaaaaaaaaaaaagggtgcaaggcattaaaagaccccggggactcaaagggtcctttaaagaaa

SEQ ID NO: 137825 - DNA, 431 bp, Zea mays
  Clone ID: MRT4577_57173C.1
gggggcccccaaaatagaaaccccattggttatatttttaacaaagggcaaaaggaactaaaacttagggaatttgttacaggggggggggggataagttaaacacaaaaagacaaccgggtccaaaaccaagatggatccaggggccaggggcaccggtaaaatttattttcagcaaaaacaagccgcaaaaatgggttggaaccaaaggccattggggaccacccttgatggggggggaaaaaatttttttttactggggcttgaaaatgggggggaacagggcaacaacccggttgttgtaaccccactcgttggcgaaccaaaaaaaaaacttgataaaaggggcgttaaaggaaaacccggccttggggtcaaaaaactcaacctgttgtcaccggggaaaaacgggggaaaaacaaaacctcctc

SEQ ID NO: 137826 - DNA, 303 bp, Zea mays
  unsure (1)..(303): unsure at all n locations
  Clone ID: MRT4577_57174C.1
gcagcatggccggcatcgcgtcccgccacgtcatcctcgtggagcacctggcggcgacatcgcagctgggcgcgacgcagaaggccgcgccatggtaggtgtcgtctncgtgctctgtcgcgtgtgctgctgacgctgcgtcgtcgacggacgtgtacaatgcgcataaggactatcattgcagcgtgtcccgtcatcggcttcactacacgctctaggacactcagaccaactctcagctgaaggacagcgacaacgggctgaccagcatggcgcccaccaacgccgccttcgacaagatga

SEQ ID NO: 137827 - DNA, 146 bp, Zea mays
  Clone ID: MRT4577_57175C.1
gaaatccagtgaacaatcttatatacaccatgcttagtaccttccgatccgataagaggcgaggctaaaacttgctacctactatgcacatgtagaagatatatacattcaaaatgtctgtttggacctttctgaagatgccctct

SEQ ID NO: 137828 - DNA, 575 bp, Zea mays
  unsure (1)..(575): unsure at all n locations
  Clone ID: MRT4577_57176C.1
ccacgcgtccgagggcggcgcggtcgcgggcaagaagaagggggcgggttccttcacgatcgactgcgccaagccagtggaggacaagatcatggggggcgcctcgctcgagaagttcctgcgggagcgcatcaagggcgccgggggggaggggggggacctcggcgactccgtcaccatctggtcgcgaggaaaaccaagggcaccgtcacctctgacggacccttctccaagagggcctgaggtacttgaccaagaagtacttgaataagcacaacgtgcgggattgggtacgcgtgggtgcggccaacaaggaccgaaacgtgtatgagctccgctacttcaacattgcggagaacgagggggagggaanaagattagattgcgctacgcttatattttaggattgaactcgtggcattttgatacctgtgcccgtgatttcgcaaatgtgccatgtgatggggtgggatgggtaatttgaagaatccttatgtgctgaatctctgcgaaaagcgatggggggggcaggaatgtgacgtgccgggattcttgcgtttcttaaggctattttg

SEQ ID NO: 137829 - DNA, 180 bp, Zea mays
  Clone ID: MRT4577_57177C.1
cccacgcgttcactaatcttctgctatctggagatcatccataagagagcttgggctacttgtctggtttgcacactgcatgaatctactaagaattgatcaatagcatagaaaggaattgcatccacacctaagcacggatgaatcactgtaagaacaatgctagctaccaaacaaaag

SEQ ID NO: 137830 - DNA, 345 bp, Zea mays
  Clone ID: MRT4577_57178C.1
ttttattcttcttctcttcttctttttttccctggggggaatttcgcgggcccccgggctttctccccaaaaggaaaaaccaatttttggggaccttttccgcccaggggggggggctttatgaaaacttttgtaccgaccacccaatggccgcccccgattggaggcccactcggggggcccgggttttccccccacccaatttgggggggtggggtctgaaaaaaccccttccaggccctgaattttcccccttgtctggggccctacccgcgagttaaaaaaccgggtggggcccccgggccacacaacccccccacaaaaccccctggcccccccccgggg

SEQ ID NO: 137831 - DNA, 306 bp, Zea mays
  Clone ID: MRT4577_57179C.1
gggcacgatctaaccaagcagggggagccagagccggaggagttgctgacatgcacagccgaaacggacagcacagggttggaacgcagaggacctcctatattacatggaaccaccgttaccaaaagcccggggacgaggaagatgacactgagattgacaccctctgtggcggctggcttagctgaaggaaccctcttcttattgtcaccaaacgcaaaaaacggacacagatcatccgttgaaattccccccgggagtataccggttcttcaggttgtgaaagatctcatatccacaagcctt

SEQ ID NO: 137832 - DNA, 189 bp, Zea mays
  Clone ID: MRT4577_5717C.1
gtgcgtttgcgcaactgacaaggttaccaacaaaggctggctggcgttcgtagccagacgagggtgatctgcaagccgttagcgacctgctcgtagccaacacgctaggcggtgaccacttccgtaaaagatacaactttgttgccctggacgcaagctgtctcgagagtcggcgataaaacactactt

SEQ ID NO: 137833 - DNA, 123 bp, Zea mays
  Clone ID: MRT4577_57180C.1
ggggccggcccgaggggctcgctcggcttggctctctctcctgctgtcaccctcgatcggagcttaccggccgctctgggctgtgttctggacgagccggctcggtaacggggcctcgtggtg

SEQ ID NO: 137834 - DNA, 791 bp, Zea mays
  Clone ID: MRT4577_57181C.1
gcgctacacaatcgagcaacccagccaaggcacgacacgaccgcctccgccgcccgggaagcccaaaacaaaccctaaagcctccgcgaccggccgccggcgatggcccgctacgaccgcgcgatcaccgtcttctcccccgacggccacctcttccaggtcgagtacgccctcgaggccgtccgcaagggcaacgccgccgtcggcgtccgcggcaccgacaccgtcgtcctcggcgtcgagaagaagtccacccccaagctccaggactccaggtcggtgcgcaagatcgcgagcctggacacgcacgtcgcgctggcgtgcgcggggctcaaggcggacgcgcgggtgctcatcaaccgcgcccgcgtcgagtgccagagccaccgcctcaccgtcgaggaccccgtcaccgtcgagtacatcactcgccacatcgccggcctgcagcagaagtacacccagagcggtggggtacgccccttcggcctctccaccctcatcgtcggcttcgatccatacacggataagcccgccctgtaccagaccgacccctccggcaccttctccgcctggaaggccaacgccacagggaggaactccaactccatgagggagttcctggagaagaactacaaggacacctccggcaaggagaccatcaagctcaccatccgtgctctgctagaggttgtcgagagtggtgggaagaaattgagattgcagtgatgacaaagaaagacggccttcggcaactcgaggagactgaaatcgatgaatatgttgccgag

SEQ ID NO: 137835 - DNA, 228 bp, Zea mays
  Clone ID: MRT4577_57182C.1
cccacgcgttcgcggacgcgtggggtgatttgaaataattgggaataaatagttcgtgaatccctgaaacctgcatatttgtaattctggccagaaaaaaggaattgaagtcgtcacgccagttccaagccggccttattcctgttcttccggttaatgggttcaaccattttgcaccagccaaggaattccaaaagttccatgaaccaattggttgggccttcctta

SEQ ID NO: 137836 - DNA, 467 bp, Zea mays
  Clone ID: MRT4577_57183C.1
gcggatccatcagactatacaccagcagatctgagttggctccgtcctcctgtagcccaccggtcacatgcattcaactacagtacgtatacatgcttcatatatatatgtcttctgggggggccggccaattgcctactacactaccactacaccacctccgtccagcaaaccggtgcatctcctggacatcattgggcggcgtggcaaccgggcatggcgtctctattctctaagagatgtgtggctctgggggtgtcgtacgtcggagatggccggccggccgggatggagtacgtagagacgacaagtcgaacaaggtattttcgtctatacagctagctagaaatagggtcggcattaggcagtgcttatatatataggtcgtccaaaggcgcgcgtgttggacgtatacaatggcaaatggactgaaggaaagcagagattattacgatgatcgatagatt

SEQ ID NO: 137837 - DNA, 1261 bp, Zea mays
  unsure (1)..(1261): unsure at all n locations
  Clone ID: MRT4577_57184C.1
tcatcggtacataatttttgttccatgcttactgcttgttaaatctatactacttccgcctgctcccgaataatttttgttcactgtaactgggagcgtaacgagggcgtccaccatgcccccgcctgctcccgttgcggctgcaatacatgcccccgtcccgtcagcgtcagcaaccctctgcgctcgcgtaaatccctcccgaatacgtgcccccgtcccgtcagcgtcagcaaccctctgcgctcgcccaaattcctcccgagatcgccgccgatccgaagcagcggcaccgtgcccctccctccatagcgtccgtgcccccggctctgtctcgcctctatcacgcgccctgcgttccccgcccacattcctgcgcccttcaacctcagcgtctccttccattgacaaccagccttcgatgactacgccggaccatacacacgtcgcccccttcccggcgtgatggccgcgccccacccacccacccccatcccgccaacggagccccagcccgtgggcgtccacacccagaaggcccccacctgtccccgcctctgccaacgctcctgccccgcacacccacccgccgctcccgcgttgtccgcccccgtcatgaattgcccattcggcagcgaggccctccttggcgggaacggcgtggtagtcatggaggctaagacgctccacctcgacgtgtgtgttgaaccacacgctgtgcttgtccttgcataacctggtgaggatttggccgcatcgtcccgctgagcatcgcgtgcgacggcaggccctgctgctcccaggtgtcggtgcgagataggagagcgcgaacctggccgagctccatgtgaggcggtcccagggcacacgggcctcgcggtggcccaaggacgtcgggcggaagtcgcgccgagctacttccctgcctacgccaaggacgcccaacgcagagaagaggatgcccaccagcgacgtcccgtgctgcgaccgccacgcgaagaaggctgacggcatgccccgctccgatatgcccaacagctgggaccgggaaaaagacatgggacaaatagaagacatctaaagctttccaaggcagatgcctccagaggatatctactctctggtcatatgatcgatgcatagatcacttcagacaatcaaataacagtagtatacatagaaatggcacattacatgganagcaggtttatgatcagatttttgtataccagagacactcaagtctnccaactgcccgctg

SEQ ID NO: 137838 - DNA, 285 bp, Zea mays
  Clone ID: MRT4577_57185C.1
gcgacgccgcctccgcaagccgtccgccttgtccctcgaaggcttggtcctcctccttgtcgcccgaccttccccgcgacagacccgtttccccgctaggctagagttatcgttcctctgcagcgatggcgatcaagcggaccaaggcggagaagaagatcgcgtacgacaagaagctgtgcagcctgctcgatgagtacaccaaggtgctcatcgccctcgccgacaacgtcggctccaaacagcttccagacatccccccgggcccttaagggccaacttcgt

SEQ ID NO: 137839 - DNA, 548 bp, Zea mays
  Clone ID: MRT4577_57186C.1
ggccctaggggccttttttttttttttttttatttttttttttttttttttttttttttttttttttttttttttttttttttttttttttttttttttttttaaacaaaaatcattaatcatcaggggaaaaaacggggcctcccaattcggaaaaaaaaaaaagggggcagggaaccccccccatcatcatcatctttgcttgccccattaacaacaacaacagaaagggattgcaaaacccccccaaaaacctctttacatggcctcccccccaagaacgaaattccagttgcccgggcccatgccaaccccggggacatgaggacttttcaccaagggaccccggggccccgggctgaaaaacggatgtttccccggcaaccccaaaaggaacccccaactggggggggggggcccctgccccaaaatttgtctctggacccccccccgggggaatccaagaaaaattctgccccacaagcctttcaaaagggaccttgaaaaaatcccgccggaaaccaaaatccaaaacataccgcccaaaa

SEQ ID NO: 137840 - DNA, 389 bp, Zea mays
  Clone ID: MRT4577_57187C.1
ctgggagatctacgtctgccacgagcgtatgctcatactactagactgctgcctgctcgtccctgcccagcaaatatactgatatgaggggtagatgacttctaccatggtcgtgatactgatcgtaacccaggtaccgaatgacaagagcatgtcactggcatgacactattatgcctttcctccatctccgtcttccactcgatatcgaggttctcgtatcgaggagcgccatgaagattcaacacggctccctagggacacgagagttctataactagggtctaccccagcttgacggaaatctacatcaagattatccctaccgacaacctcgacgatctgcccgagaccctcattctccccataaagaaacgcattaaccgagc

SEQ ID NO: 137841 - DNA, 583 bp, Zea mays
  Clone ID: MRT4577_57188C.1
ttgagcttgagagcttgatgaacttgtgagtctgagaggctaagtgagcctgccttgtaacgtcgtgtgccctcccttttatagctcaaggggagcacgtacaaggatactgagtcccgacatgtggacccaggggcaaaatggaaggaagtaactaatgcctgtaacgcctgggccatcttcgagcgccataacgtccgtagtccatatagtattgatatgtcgcgctacttcctcgataacgcgcgagtgatgatgagcatagtgtacaccgcaacacgggcataccgcctgccaacggaatggacaggcacgccgcctgtaggatggcctggtcgccgtccgtcagtggagtggacagggctcattaaatgctaaggcggcacatctcctgccagcggaatgaacagggctcattaaatgccgaggcggcacatcacctgctagtggaatggaaaggcggcgcgccttatccgcaataaatgcagaggcacgcggcccagaagccttacgtcaggctccgcccattggcttacgtcacgtgcaccgtgccacgtggcagcatcggggctccgcctgagcg

SEQ ID NO: 137842 - DNA, 413 bp, Zea mays
  Clone ID: MRT4577_57189C.1
ggacaaaggggggaaccccccttttttttttggaaataggaaagttttaaaaaaaccacttccattgggataaaacgatcccacaaaaaaacaatttggggaaatttttttttaaacccctttcccttttaacctaaataatttgggggcccaagaaaaaaaaaaaaattcgacccgggactagggggattaaaatttttttttttccacccaatccccacagacgggggaaaacaaaagggccaaattcaaggctttaaccaaaaaaaagggtttttccaactgggaaatccacatttcagttttgatcccccaaaaatttgtaccccccaaacgcccgggcaaaagcttaaattggtattttttggattaacttggtttcttggacccccaatttttggtccctttttttt

SEQ ID NO: 137843 - DNA, 337 bp, Zea mays
  Clone ID: MRT4577_5718C.1
gacccggcgtccgcccacccgtccggaatttttaattaatgagttgtgggtggggcctaatgtcaccccaaccagaacgtaaaccaggtgttggttttagaggctttttttaaggattttaaatggccttactccaccccggggtccgaaaccaaggttcctgtttttttggcggcattccgggtaactcttaagttcggggttccgcctgaagaaccaggacctgcagaacctgcggaatctcttactggtccatggccaactgtttggactgatggactaaccagtcttgatcgttccaaaggacgatgtctttacattgggcccgtttcttggg

SEQ ID NO: 137844 - DNA, 677 bp, Zea mays
  Clone ID: MRT4577_57190C.1
cctcactcaaatacaatagacaatactatttggatcattcctcatccctctcccttccatacgaccctaccgcagccaacctcccctccctctgctcccgtgtccccatcgtccctcttcctcactcgtgccgccactgtcaacccctccccttctctccccgagatcatagtattagcacaaactatatgctagtatgtatagaggacacataatcgtatcattcaaggtagaaataaaagattattcatcaagctctcttgctccctaagcaccttgcatctgccctattttagtgttgcatcagccccttgcactacctcgtgctagccgtatgacaatggtctttccatgcaaatggttgcatgtgaacaaccacacctttcattgcctcctcatctctcgtcctcctacctccttgtgcaatttgcacaacccaccttccactaacattggtcccttacacttctcctatgtggttgttttaatttgtgtgcaaccatttacacaaaacattcatttgctaatattcgctagtgatatttataggtaaaaaattatggtgtcctattagcactaaatattttggataactgatctatcatcgctatttttagcatatatattctaactattagcgttgagttccccaccactgcaagctgcaagaaaatgtt

SEQ ID NO: 137845 - DNA, 311 bp, Zea mays
  Clone ID: MRT4577_57191C.1
gagtgtataaaggatggataggccttggagaaggcgatgccgaaatggtagagcccgtactcgatgaagctggcacaccgtcacacgccataccattgtactaagtatgtacagcagggatgtcagctcaccgcacggcaaaaacctgaaggggaacatacacgttttgactaagcccggacatgcggcttgggggtcatatggaccagtgcctcgtgcagcgcctgcggcttgtataataagggcgcggggcctgccccctttagcctgagaaccttcttcggagggttggcaccacacatgcgatggtg

SEQ ID NO: 137846 - DNA, 934 bp, Zea mays
  Clone ID: MRT4577_57192C.1
cgaacaaactggatttgctacgttaattctgtggtcttatttattttgccttgatatcaggtggataacattagcaaagctcttcataaatgtaattatcaaatgcgtggatttgagacaatgtacaatggtcacaccggaagaaaactgacagcaatgattttcctgggtcccacgtattaccaaagactcaagcacatggtggatgacaagatacattccagaggacgtggtcctgttcagatactcacccgacaaccagcagaggggcgatctcgtgatggtggtctccgctttggagaaatggaaagggattgtatgattgcacatggagcagctttcttcctgaaggaaaggctgtttgaccagagtgacgcatacagagtccatgtatgtgagaaatgtggtctcatcgcaattgctaatctaaagaaaaactcgtttgaatgtaggggctgcaagaacaagactgacattgtccaagtacacataccctatgcttgtaagcttctgttccaggagcttatggcaatggccattgctcccagaatgcttacccaccattgccataagctcctggaacagaagaagcgctgaacttgtatcacatgagatgtaactggaactttgctccattgctatatttctcgcgtgcacacggtagtacgctgttaaggaacattgtggtcacttgttttccgacttcgactctggtttgtcgtgaacgatggacaggccattatcgtatcttgatgggctatcagcccaatctgtgttagtgctgttagatgatctgtgctagcagatcgttgagttaattttgtacattataggaatgtgctgcagtgtattaatctacgaatacaaagactttggcgcgctaaggtgccttgtagaattaaatgccattacaatttcagttttatttagaact

SEQ ID NO: 137847 - DNA, 194 bp, Zea mays
  unsure (1)..(194): unsure at all n locations
  Clone ID: MRT4577_57193C.1
gagcagcgcaaaaacacgataaaangnngagaaacggcncgaagaacnggcagggaaganccacgagggcccnagncacccggaggaagggnccncnncggngggcaagaggaacancccgaaacagaagcaggaaagncangcaaagaacggcagnggangccgccaanagangcgccganccacgcgacaag

SEQ ID NO: 137848 - DNA, 329 bp, Zea mays
  Clone ID: MRT4577_57194C.1
aattcggcacgaggctcatcgaatccgtcgcgctcaaagcacgcccttcacagcacagctgcgagtgtgcgtgccaccgccgtgcgagccaagaaacgtgatgccgcgccgcggctaagaatcaggtgtattcttcaggctaacaagcgcgcgagacgacgcaatgacgctgcagatggagccgccggtgccttcgccgcggcggtcggtgtcgacgacctgcgacctccacccaggagaaaccttcacgggcttctgcgccgcctgcctccgcgagcgcctcgcggggctcgagtccaccggcggatccgccgcgggcgtcgggccgg

SEQ ID NO: 137849 - DNA, 2111 bp, Zea mays
  Clone ID: MRT4577_57195C.1
ctcataagcttcttctatccttttgtccacttatccaggagactcctgatgaaggctggcatgaattggtctcaaaaggatatatagagtatatagatactgaagaagaggagactaccatgatctccatgaccataaatgaccttcaaaatgcaaggcacaacccagaggaggcttactctgaaacttacacgcattgtgagattcatccttcattgatacttggtgtttgtgcgtcgattataccttttcctgatcacaaccagtcacctcgtaatacatatcagcctgctatgggaaagcaagccatgggaatttatgtcaccaactaccaattaaggatggacacgttggcctacgttctatactacccacaaaagcctctagttactactcgtgctatggaacatttgcacttcagacagttaccagctggcattaatgcaattgttgctattgcttgttattctggatataatcaagaagattcagttattatgaatcaatcttccttagcacgtgggttctatcggtcagtgtttccgtcctggcttacaggccacgaggaaacgaacgtccgcacacttatcaaagaggaatttggtcgtccaaatagggaaaatactatgggaatgcgccatgggtcatatgataaactagatgatgatggccttgcaccacctggaacaagggtctcaggggaagatgtcattattgggaagacatctcctattccacaagatgacgctcaagggcaagcttctagatactcaaagcgtgaccatagtactgctctgcgtcacagtgaaagtggcatggtagatcaggttctgttaacaacaaatgcggatggtctaagatttgtcaaggttaggatgcgatctgttcgcataccacaaattggcgacaagtttagcagcaggcatggacaaaaaggaactgttgggatgacttacactcaagaggatatgccatggacaatcgaaggcattacacctgatattattgtgaatccacatgctattccatcccgtatgactattgggcagctgattgagtgtattatgggtaaagttgctgctcagatggggaaggaaggcgatgccactccattcacggatgtgactgtggataacatcagcaaagctcttcataaatgtaattatcaaatgcgtggatttgagacaatgtacaatggtcacactggaagaaaactgactgcgatgattttcctgggccccacatattaccaaagactcaagcacatggtggatgacaagatacattcgagaggacgtggtcctgtgcagatactcacccggcaaccagcagaggggcggtctcgtgatggaggtctccgctttggagaaatggaaagggattgtatgatcgcacatggagcagctttcttcctgaaggaaaggctgtttgaccagagtgacgcatacagagtccatgtatgcgagaaatgtggtctcatcgcaattgctaacctaaagaaaaactcgttcgaatgcaggggctgcaagaacaagactgacattgtccaagtacacataccctatgcttgtaagcttctgtttcaggagcttatggcaatggccattgctcccagaatgcttacccatgatatgaagacagggaaggatcagaagaagcgctgaacgtgtatcacgtgagatgtaaccagaactcatgccccgttgctatattcctggatcctggttcacacaatagtaccctgttgaggaactttgtggtcacttcttttctgatttggacttcggttcttcgcgatcgatggagggctgttactatctcttgatggattatcatcctatctgtgctcgtgttgcctgaagatcagtgctagcagatcgtcgagttaattttgtacattaggaatgtgttgtaatgtattaatctgtgcgagtagaaagatttttgactaaaggtgtcaatttggaggtgtaactgtacgttaatactaaacgcgatgccattgcaatttcagttttattttgaaatacatggggttttagtggcatgtctctaaactatcacaatcttaatggcatggttctaattttcctaattaatctttttttttt

SEQ ID NO: 137850 - DNA, 225 bp, Zea mays
  Clone ID: MRT4577_57196C.1
cataaacattggggcggcggtgtttgatataaacattaccatttgcgtactattctttaaataacaggattgaccgccatgccgaacgtgcatgctgccaaaggtcagagctagcattatacacctagtgaccgagagaaacagagctgtcgcaacaagcaagctgtgttctacactcttacaaacaaacaaacagcaaaaccgcgattcacatagatagatata

SEQ ID NO: 137851 - DNA, 194 bp, Zea mays
  Clone ID: MRT4577_57197C.1
actcttgtatccacgacacaggttaccatgattgcttatgacggtctgaagcacagagtctctgacgtttgcctacctgatcttcagggtgactaggatcaagcttacaggaaaatcaggcttcctgctgaagatgtgcagggcaagaatgttcttacaaactcttttgcgttgaattttaccactgataaatt

SEQ ID NO: 137852 - DNA, 2009 bp, Zea mays
  Clone ID: MRT4577_57198C.1
ccggcttgccgacgccgctgccgtccgcgtccgcgtcggcctccgcctcggcgtcggcgtccagcggcggcgactcctcgctggggtcctccacgtccgacgaccagctggatctcggggtttacaggttgtcagaaacaagcagcactcttctgggcagaacagtagcaattgaatcccggaaacaaagtcaggtgccagcagaggggaccattttcaccaataatcaggctgtggagcatacccggttgtctgaaacatcagtttccccaaggaaagaatttcgccctcaaaatttggatcttgcaaatgatcgaactacatactgccgtggtcggagatcaaccgaaatcgtgttcagtacacaagtgcccacttctcctcctagttcaagaggacatcactatcaaaattcgcctgtgccatcaagaacatttgggcaatgccctgcatctcctacttcatggcaggatgattcgcgaagctcaagctcaccccaaccacttcctcttcctccaggttccccatgcttgccttcctcttctctacagtggaagaaggggaagttgctaggtagtgggacgtttgggcaagtatacatgggattcaacagtgaaggtggtcaaatgtgtgcaattaaagaggttaaggtcatttcagatgattctaactcaaaggagtccctcaggcagctaaatcaggaaatcgtgctgctgagtcagctgtcacatccaaacattgttcagtactatggcagtgatttgtgcaatgagacactctcggtctatctcgagtatgtttctgggggctctatccataagctgcttcaagaatatggtccgtttggggaggcagtgcttcggaattacacagcacaaatcctttctggccttgcatacttgcatgggcggaatacagtgcatagggatatcaaaggggcaaacatacttgtagatcctaatggtgacatcaagcttgctgattttggtatggcgaaacatatatcagcatatacatctatcaaatccttcaaagggagcccttactggatggcaccagaggttattatgaatagcaatggttacagcctttcagtagacatttggagccttggctgcaccattcttgagatggcaacagcaaagcctccttggagtcagtatgaaggggtggcagcaatattcaaaattggcaacagcaaagacataccagatatcccaaataatctttcttctgaggcaaaaagtttcctgaaactctgcttgcagcgtgatcctgctgcccgccctacagctgctcagctgatggatcacccttttgtcaaggaccaggctacagtcaggagttccaggtccagtatcacaagggatatgtttcctaattcaactgacggaaaaaacagcagggtgaaaattgaaacttcgtcatacagaagtttatctcctttaagagatcctgatatccttggaagaaacttgccaggaccaacatcccctattccttcgacatcaagtcgcaggatcgcagcattgaacacatccaatgttcggatgaacatgtcgctgcctgtctctccctgctctagcccgctacggcagtacaggcagtccaaccgaagttgcttgcgctcccctccccacccagcctattcagctggagcagccaactacaatcctatcaacaatgcactctacccaacgcgaccaagcagcggtctcacagatccatggctcgaaatctctcaggtgaaaacgcaaacttttgattctccaagaagattgtagagattccaaaaagaagcaatactttgtatacaggcagggaaagaagtgtttcattatttatgttgttagagaaacaaaggaacacctttttttttttgtgtttcgccctttctgtatgtatctttcacccaggatgcagttgcatcgcctttgtacaaattcagagaagagctagtcaaaaagagtagcatttcagatcgcacaaaaaaaaaaaaaaaagcggcc

SEQ ID NO: 137853 - DNA, 764 bp, Zea mays
  Clone ID: MRT4577_57199C.1
gcactacttcatcccccaacctttccttccggaggatggcagcgagcgcgccttggcgaagaaacctcccgctccgttgcggtgggtttggactccagcgcggaggcctggacgcgacgatgtgcaaggcggaggaaggccgactcggatccgctcgatttcgccgacgatgaggcccaacagcaggacgttgcggcgctgaggaagcattcccgttgatgtactccgagcaggcgccttgtttccaaaaccatatttactttcctgttttcttttgatctctctgtctcgtgatctcaaattctcaattcccatctgtcttctccttcctggtgaacgaggaacgactcatccggtcctccctgagctgatccctggctcctcctcctcctcctccccgagaccccgaccaactgctgcgttgaattgctgatcaagaacaagagccaactctggttatcaactccggcgactcaggcagacaagaagatgagtacctcatctgaagggtactggtgggagaagtatttatggtgaatgctttgatgatgaaaattttacacaaatggaagtcaatttttcatttgcactgtgaagacaccgtggttggacaaccgtcacgtcgtgtttggacatgtattagaggggatggacgtggtgaagcagcttgaatccaagagaccagcaggtccgatactcccaagcagccttgccgaatcgttaactgcggcgagggtcccctggacagctgagcgagcgaaagc

SEQ ID NO: 137854 - DNA, 341 bp, Zea mays
  Clone ID: MRT4577_5719C.1
cacgaccatgatgttattagcgagggatcccatcgtcgtgggtgtcgatcttgcagcgctggtccacgacgtgatatgcgggccttcgaaggtgactctaaggtcccaacatctcgaccaattactattgctagtgtctcacccccatggtcacgtgctacattgagtctaatcttgcacgagttgctgacaactggtggtcgtgggctatcaagaatgtgtacacggcatcctacaccaggatgaagatgtgtagctacgagctcatttttaatgaacggcagggttgcgtgtaatactatgaggtgacataccatgaaaaacctgggtgctcaggcaat

SEQ ID NO: 137855 - DNA, 759 bp, Zea mays
  Clone ID: MRT4577_571C.1
cctccgcccgccccctcctcctacgcatcccattctcccccaaatcggccgagtaaaccctagctaaaccccgacctccgccgccggcgagcgagatgaacttcaagggcgcgcggatgccgagcgcgccggcgggcgcgggcgcgctggtcaagctcgggctgctcggcggcgccgcgctctacctcggcaacaagaccctctacaacgtcgagggaggccaccgggccatcgtcttcaaccgcctcgaggggatcaaggacaaggtctaccccgaggggactcacatcgtcatcccctggttcgagaggcccatcatctacgacgtccgcgcgcgacccaacctcgtcgagagcacctccgggagccgggatctccagatggtgagaattggtcttcgtgttcttacacgacccatgccagagagactaccaactatgtacaggaccctgggggagaactacaatgagagagtgttgccttcgatcattcatgaaacactcaaagctgtggttgcccaatacaatgccagtcagctaatcacacagagagaggctgtgagcagggagatcaggaagattctgacagagagggcgaagaacttcaacatcgctctggatgatgtgtccattaccagtctaagctttggtaaagagttcactcatgccattgaagccaaacaggttgctgctcaggaagctgagcgtgccaagttcattgttgagaaggctgagcaagacaagaaaagtgcaattatca

SEQ ID NO: 137856 - DNA, 263 bp, Zea mays
  Clone ID: MRT4577_57200C.1
ttaaagaaactgctgtatttaagattctttgtccaagctacagtaaactttttctgccctaaaccttcaaacagttttttaatttatctgtgtgtggggtacctgtgacatgacaccaacaccaaagaaacatggagcaggcggatattttatccatttgacaggtaactctatggataccgtgtaagaacttgagcacagaagcgaggcgaccttatgcttgtctggcgggcgtgcctctcaatgccgttggtggacgatca

SEQ ID NO: 137857 - DNA, 811 bp, Zea mays
  Clone ID: MRT4577_57201C.1
ggtccctcgaggccggccgggacgcacttcctccgcatcgcctctccctgcagtaccccctacctggggttcctcttctctctcacgctagatcaggcggagcactattcatcccccaacctttccttccggaggatggcagcgagcgcgccttggcgaagaaacctcccgctccgttgcggtgggtttggactccagcgcggaggcctggacacgacaatgtgcaaggcggaggaaggccgactcggatccgctcgatctcgccgacgacgaggcccaacaacaggacgttgcggcgctgaggaagcattcccatcgatgtactccgagcaggcgccttgtttccaaaaccatatttactttcttgttttcttttgatctctctgtctcgtgatctcaaattctcaattcccatctgtcttctccttcctggtgaacgaggaacgactcctccggtcctccctccagtcctccctgagttgatccctggctcctccttcctcctccccgagaccccgaccaactactgcgttgaattgctgatcaagaacaagagccaactctggttatcaactccagcgactcaggcagacaagaagatgagtacttcatctgaaggtaccgtgatcaagtttcagtttggtttggtaccttgttcagtttcagtttgttaccttgttcagtttcagtttggtaccttgttcattctagttcatccttgtccagtttggacttcgtaacttgttaatttcagttgcagtttggtaccttgtccatccttgttcagtttcaaaaacttttctccttgttc

SEQ ID NO: 137858 - DNA, 863 bp, Zea mays
  Clone ID: MRT4577_57202C.1
cgactgcagagaaaagttgaaaggatgaagttagaggatctcgttccactgagctagcgagacggcagcgctgcggaacaacaatggcgatgatgcctcctgcagcggcgtcatccctcgcctccactccccgcggcatcgccgctccgcctactcgcacggcatccctgtgcatccgcttaggtgtcgtgacggcgacgctgttcgctggactggcggcggcgtcgcagccagtggagcgtcacgccgcggtggtggtcgcgatggcgaagagggagcaggagctggaggggatccgggccatgacgacggaacagctggaggaggaggtggtagacctcaagggggagcttttcctgctccgccttaagcgctcggcgcgccaggagttcaagaacagcgagttcggccgcatgcgcaagaggattgctcgtatattgactgtgaaaagagagcgggaaactgaacaaggaataaacaagagattgtccagggagcttgataggaaatggaagcagggcattgtggtcagaccaccaccatctctaagggagaacaaagaggagtagagagctgcaaaagaagcaatctgcaaaagtcgtttcatgcaagagtgttgcaagaaggttcctttgtgattccaaactttatttcattgttacgtattccatgtttacattttactaagcattgctatccgaatctgaatttcagtcgttagtctcttctgtaaattttgatttatttaaatttacgcctctatctgtgttttcggtgcatttttcttagctgcttcacatattaaactgcactttagacgtgcatgctatccagtaattgagaatggacagtcatttgcccct

SEQ ID NO: 137859 - DNA, 383 bp, Zea mays
  Clone ID: MRT4577_57203C.1
catcaatgcatcaaatgagttcaacactaatttccaaaaatctttggcatcggaaagtaagcagaagtccttacaggatcaagcatcatccagtacagaggctgccaatgtgaatccgcaggatttacatactcagaagtcatcacagtgtcatgcagcatccagcaccagcaccgaggttccaaatggtcagcctccagaatcacaaatgcaaaattcgcttcaggttcatgtgttacccatcaaacggtctttcattgtgtacccttcaaaattacctgtccttgatgacattttggagtgtacccaagaacaacagacacaattccacagggatgaaggggtcaccattgcatgtacctcgcctatgttttcacatcatc

SEQ ID NO: 137860 - DNA, 588 bp, Zea mays
  Clone ID: MRT4577_57204C.1
aatccagagaaccgaccgatcgatcatgaggcagctcatcgcggcagctgccatcctcctcctcgtcctcggctccggcgccgggcagcagcgcggtcgcgtcggtcccggtcgcgtgccgtggcggtcgaggaggctcaagctcggcggtggcgcaatctgtgacgaagaaagcggcggcggcaacggccacggccgacagctccgctcagccgtccggctgcaccaacggcagcggacccggcggctactgccaccctccctcggagcactgacgaccattgtccagctagccgtcgttggcaactttggcttcgtcggggaacaatgcgtgctagcttaatactacgtactacaaccaccacgaactcagctagtaccactagtcgactaccacgcgctttcaccatgtcttttttttaaaaataaaaaatgcttattatttatgcatgaaatattattgttgttcgcgctgcatgtggtcgatttaatttctgttttgaactgggcacagaaatgcatgtgagagtgttctactatataatctacgtatataatagtaataaatgaaatgttaatctaaaaaaa

SEQ ID NO: 137861 - DNA, 320 bp, Zea mays
  Clone ID: MRT4577_57205C.1
tgttgactcataggcggtgtaacataacgaggagagcgatgactttgaacgtcagacatggcaggtactataccagaacaaagtcattaaggagacaatctcacgcataaagacccagtgtcaaccatctatgtacacggacctttttacaattaatcagaatgagcttgacatttacattttaaaacgtctatagagattctacttttgttgcaaggaggcaggcttatattgatccaaactaagatgaccgggcgtttgtaatatgtttaccatggattaccgcaaccaagactggatggacatattggacgtacacg

SEQ ID NO: 137862 - DNA, 277 bp, Zea mays
  Clone ID: MRT4577_57206C.1
cccccttgttcctgggggggaaaccccgtttccccaaacccggtacgggccatgctggccaaacacgtttcgagttccaactcgccttggtttctctgcatcggaggcttgaagggccaaagccgtcagcggacgcccactcgacaaatggtttggcacgaacacgtgcaacttcaccccccaaaaggttcgaccagccccactggatgcctaagaaacactgcgctagatgctgcgccatccagggttttcgggaggtcacttttggtaaaaattt

SEQ ID NO: 137863 - DNA, 453 bp, Zea mays
  Clone ID: MRT4577_57207C.1
cattggtacctcgagccggccgggcggtttctgtttgctagtgttcatgtgacatgttgaccccagttctgccggagcactcccacaccagcaagctgctttcttacgagcgtaactgcgtcactgcgacaaccagcaccagcattgttgccggggaaaagtgaaccatggtagcagaaagttggcatgctgtaaaacagtgtcaaatcattcggttttgctaggacatttaccaatttctcccgaagctggaggcatgggcaccacctgtggggacaattttcaaaggaaactctaggaggggtctttgtttttattgttcttggcaggcagctgaggaactattcatcagtgatgtttcttggatgtgctggtccttcaaaatgctaatgggcagctgtacatgttatatggtactgaactcaatggctataatacaccctttttatgcca

SEQ ID NO: 137864 - DNA, 337 bp, Zea mays
  Clone ID: MRT4577_57208C.1
ttcactttcagcagattactgcgacaatgctagatagtttatcaaaacgagctaatacgagccctaaagccttacctttatgagtctatgcatgttgcatgcagttatggagggcacgaggcgccgttgagctattagtgatcactccgcagcattatgagtgtgacacagacttgaccaggttgaccaccacaattggctcaggcttctgaccctcaactcctttgcagcttgcgggggtcgcaaccgcagctgaagaccgatctgttctttatcccagaacaatggccttacatgacagctgcatgactgccgtttcttgaagccattgcttcac

SEQ ID NO: 137865 - DNA, 1705 bp, Zea mays
  Clone ID: MRT4577_57209C.1
ccggccgggcagaacctaagaaacgccgaagtttaataataagatgcaatgaagcaataaggaaactcgagacagtcttcctcaccgagcaccgcaaccacgcacaataatggagagctcgagcgcagcaacgacgatgaccggctccagttccggtcgagagcacggtggcgtccacgtcctgctggttcccctgccggcgcagggccacatgaacccgatgatccagttcggccgccgcctcgcgtaccacggcctgattcccacgctggtgaccaccaggtacgtgatgtccacctctcctgccgccggcgtgcccttccccttgctggccatctccgacggcttcgacgagggcggcatggcctcgtgctcggaccccgtggagttctgccggcggctggaggccgtggggtcggagacgctggcgcgggccatcgacgccgaggcccgggcggggagggcgccggccgtgatggtgtacgacccgcacatgccgtgggcgcagcgggtggcgagcgccgcgggcgtcccgaccgccgcgttcctgtcgcagtcctgcgccgttgacctcatctacggggaagcgtgggcgaggcgcgcgccgctgccgatggcggacgggagcgcgctccggcggcggagggtgatcagcgtggacctgggagcggaggacctgccgcccttcgtggtggcgccggagatctacgcccagtacctcaaggtatctattagtcaattcgagttcgtcgacgccgccgccgacgtgttcgtcaactcgttccgcgacctcgagccgctggaagcagagtacatggagtcgacgtggcgcgcgaagacggtcggcccagccctgccgtctttctatctcgacgacggccggatgccgtccaacgtggcctccggcgtcagcttcttcagcagcagcgcgccaacaatgggatggctggacaggcagcccccctgctccgtggtccttgcttcctacgggaccgtctacagcctggacgccgaccagctcggcgagctcggcaacgggctgtgcgattccggctggccgttcatctgggtcgtgaggcccgacgaggcgcagaagctgcctcaagatctcgaggacgcctgcggggagaagggcctcatcgtgcagtggtgtcctcagctagaggtcttgtcgcacaaggccacgggttgtttcatcacgcactgcggatggaactcgacggtggaggcgatcgtcgccggcgtgccgatggtgggcatgccgcggtcggcggaccagccgaccaatgcgaggtacgtggagagcgcgtgggggatcggcctgcgaatgcggttggacaagaatggcttgctgaagagggaggaggtgcagaggtgcatccggcaagtgatggaaggggagaggaagacagagttcaggcggaatgcggcgaagtggatgaacaaggccaaggaggcgatgcaggaaggtgggagctctgacaagaacattgctgaatttgcagcaaagtatttgtcagcttaaaaggcgcagtttgttgactgaataaagcctggctcacttgcatctagttagtgggttgttacttgttagtgaaaggtcatttctaagtattttggtgattgagtgtcaacacaagtgcttaagtgttaatctatgtcaattgatggacaaagtgcaaatcaagagtaaaggtatgtttct

SEQ ID NO: 137866 - DNA, 711 bp, Zea mays
  Clone ID: MRT4577_5720C.1
gccggcctggtcggaatgaattagatgattcactcatgtaccttctatatccatcacacacacatcctcagcctccgctgagctctctcgatcactcgacattaaacaacacacacacgataacggcatccagagaacaaaaatagctgcattatccatgctgaagcgcaactccgtgcagcacaatcacttgccgaggtactacacctgcgcaggcgcgtactactacgagatacgccgcggccgggcccgggcacagacgaccacctccacagcttcgacaagaacgagcagagccagatacaacctcgctagatctagagcgacccaagccgaagtcgtcggcgaagcaacgcagtctcaccagccagggtctcatgcagaccatcgtccgcatgatctgccagtgattcaacccgaacgtcttgtactgtagctatactcctatatagaatgatctgcagctgctacagtatgcaatccattctaatactactactatacacatatatgttcatgtgccaaccttgttgctaataacacattatatatgcccctacgagctatacgcagtctaaagctaaatagctcgctcgggatatatgcaacgcgcaagctatactactactactgctgatgtgaacatgtgtctgcatgaactgagcggcataatctgaagtcatgatattcgtgactgctttccagatcgac

SEQ ID NO: 137867 - DNA, 271 bp, Zea mays
  Clone ID: MRT4577_57210C.1
cggtttgtgggtggtttatttgtcttccatttatacatgatgagcattaacgtggtaagtccaacattgactccaattcttatctcgtcgatgctggaagcacaattcagtagagatacatgaacagttgatattcaggagtataatctctgggtagacatatagctatttcatttgatggtttatcgagtaacattgaatttgccaagagtatcatactaaagggggtcatgtcgaagcttgttctgttgtataaagagtatgctcgaaa

SEQ ID NO: 137868 - DNA, 289 bp, Zea mays
  Clone ID: MRT4577_57212C.1
gtaaccctaatctccctccagaaacagtggactctctaaaaaatatcctgacttctaataacattgatgtcaagaaaatgacggtcacagaccaggtgaactgccccaagctctcgtaaccagtttctacagggaggctgcacccactccatgttacttctgcttcgctttcccctaccccaccccccccccataaagacaaaccaatcaaccacgacaaaggaagttgacctgaacatgtaaccatgccctaccctgttaccttgctagctgcaaaataaacttgttg

SEQ ID NO: 137869 - DNA, 456 bp, Zea mays
  unsure (1)..(456): unsure at all n locations
  Clone ID: MRT4577_57213C.1
ccctcgctctcctgtctttttttgttgtgcgccgcctnacacaaatacaagcggggggtgcggctnccanccaccncccccngttcatctaccgccgccggtgcatctgccacctccggttcacctgccacctccggtgcatttttttttttcngtccacctnccttcttcgtgcgtgtgggggcgccnnnccatntnccnnccccccttcatctaacaaacaaaaccatcccactaccctactcaaccnnccctncctcancctcattctcatccacacccattccctttccaacatcctcatccaatccctttccatcttctttttaaccttctnnnttttcattacccctatcctntnccatttcntcnatttttttatgcatcatttcatcccctctgtnactccctactgctcttctcantgccagttttttttttttgcattgtttcctt

SEQ ID NO: 137870 - DNA, 307 bp, Zea mays
  Clone ID: MRT4577_57214C.1
cacacgcgtccgcccacgcgtccgcccacgcgtccgcacacctcacctacagactgctgtgtctcttgtgttgtgcatcgacactattattcagggttaggacatggcaatactggtcattaccatggtgcacgtgccgtgctgcaactgcagagccagcatcagccaagatcctggaaagccacaaagaggagttttgcatggagaagattgaattcgaggagaaggtcaacaaggtgattgtacgcgggcagttcgacggcgagaagctccagaaggcggtactagacaagggcggcgagaccgt

SEQ ID NO: 137871 - DNA, 230 bp, Zea mays
  Clone ID: MRT4577_57215C.1
ctgtcggttacggtggtggtggaggctatggtggtggtggcggcggctacggtggatacggtggcggtgactatggtggcaacagcaacaggggtggtggtggtgattatggagttgctggaggaggtggatgcacctctactgatgttggtagtgtaagtatttttaccagttgctatgattatgattttgctttatggtgtaatcagtgatatgcttcttagtgcttc

SEQ ID NO: 137872 - DNA, 446 bp, Zea mays
  Clone ID: MRT4577_57216C.1
aacaaaaacgaaaattttttagatcttggtaccatggggcgatacagttaactaacaacctggtaaccctttggaaatcaaaccgaaagaaaaagggggggagcaagggtgttttcttgggtgagggggtgaccccacattatcaggggtttaaagacattggttttattttttttccatggtggggtccaaaaataaccgggccgacggggggggcctcaaatgggggggacaaaaacgtgatcctcattggctgacaggcctttgacaccctggggggcaggggcaaaatacggccccgtaggtccaaggggtggggccgtaaccccaggggcattgggggactttgcctcggccattggggtctcgaccatggggaaaaaaaggagaggggtaatgcaaaaacaacgcttgggcgagccatggggaccgggtttaacttttta

SEQ ID NO: 137873 - DNA, 1065 bp, Zea mays
  Clone ID: MRT4577_57217C.1
ataatttagacaaaactaattaagttcatatatttatatatgtaatatatgtgtatattatcctaaatcatattagagagatagttatatactatatttatgttatatcgaagcaagtggaagagtgtgctataagttgtatatcggaaaaaagtatgtaaatctatagaatcaattttcatttttcaccccatgaatttgagatagacttatatgataactttggaaagtggtggaatgtcacattctaaaagaaatagcttattccattagtaagattccaattcctcaaaatgaaaggaaacaaacgggaccttacagttcatcaccataccatgtagattgcataggcatccaaattattgtggaaggaaattggatcagagaggagcaaaaaagaacatgaaacattctacgcaaccctaaacctactatctgacgtgcactctgctgaatgtataacaggggtaagagtgaatcctatgttttttttttggtcaaggaattgtcactttccgtttagttatggacatttattgccttacacaggggccaggttctgatggtgatgcacgaccatagcctgctaatggcgcagcagctactcctctttggttcagcaaacacctgaagcgcgccaatcttgacgtgacgaatcttgtgtcatttgcgagcttctcaatcggagtccacagcctctctgcagctgctgcggcacgtggccaaatcgtttgctgaatgtctgaggcatcaatttcctcaccccacatgcaaacctcaccaccaatgaccaattgctgctgctttgtatcattgataccttttaggggctcgttcatgtaaaatccttcccatgaggcatccaagtgatccagtcttcttttactaccacttctcgtgtcaatttcggccttccatgtctcttcccattgctatcatgtcttaggatcccactacacacggggtgctctgcatgtcttcgttggatatgtctacactatctcaatcgggtttggataaacttttctcaattggtgctaccccctaggtatcacgtatatcatc

SEQ ID NO: 137874 - DNA, 139 bp, Zea mays
  Clone ID: MRT4577_57218C.1
ccggcctcctcgtcaccgatggctacgaggatgggtccttgttccgccctcgagagctccacctgtccgaggaggacctggctgacaagtccgaccgtgttgtctacatggttgactccctgtcattggccatctcttt

SEQ ID NO: 137875 - DNA, 384 bp, Zea mays
  unsure (1)..(384): unsure at all n locations
  Clone ID: MRT4577_57219C.1
aaaacccgggtcgaccgactcgtacgggctggtaatgttctatccgttcatctacgtgtacttgttctcgtttcaaaattcatctagttgtttcttaaaacgacatggttctntcttcttgtgcttgctgttagaaattgccaagaattatcactttcgcattctcttcttgggtgtagctcttgtcttcttgttcaaggaggctgaggaaagaaaagacattgaagatgaatccgtcgcatcttcaaggtactacttccacatgtgctctctcatcataattccctaactggtcatcgaggatgtgaagttcccccactgccacacctgcttctttgatgatatggctgtcgaccttctatgcatctactactcatccatcat

SEQ ID NO: 137876 - DNA, 1577 bp, Zea mays
  Clone ID: MRT4577_5721C.1
cattgggtacctcgaggccggccgggaccgggatctcgccctcgctcacctacagctccgtccgccagcgtcagccaggctgccccgggaggccgggaggaagcagatcggagaaggtgatctgttgtaatggctcgattgtacatcggcaacctggatccccgggtgaccgctcgggagctggaggacgagttccgcacgttcggggttcttcgcagtgtctgggttgctcggaaaccacctggctttgcgtttattgattttgatgataagagggacgcagaggatgcaatccgtgacctagatggcaagaatggatggagagttgagttatctcgtaatgccagcggtggtcgtggaggtcgtgaccggcatggtgggtctgagtccaagtgttacgagtgtggtgagactggtcactttgctcgtgagtgccgtttgaggattggttctggaggtctaggcagcggaaggcgccgaagccgtagccgtagccgcagtcgcagtcccagatatcgccggagtccaagttacggtagaaggagttacagtcctgcagcacgctctccaaggcgtcgtagcgtctcaccagctcgtggacgcagctatagcaggtcaccacagcacaagggtgcacgtgaagaatctccctatgataatggataccgccgcagcaggagctagagccagatcgttgtatccgacgacgagcgttatgtgacagatattgggaaagctatggtcaataacctgcttgacagatccttcgtcgactgcttgactttggttagctcataactttctatatacctatcctttagcaaggcatcgtcctgcactgcttaaacgactcggccgactacggctttcagttctgtcttcatggttttgttctgcgctctacattcttcgcacaccctcgcatgcttcattcagtctgccgtgtgttaatctgcctgcgtatcttctcgaagatgctgcgcatcgcaaaagcagtaatgaccttccttctcataccatttggtaaggtttgatttgctgacaaatgcagcatctggtaagtttctccccgtaggtttggtctccgtgctgcgtgcgctgctcctggttcaggaactgcagtatgttagatggatgaggatgactgaatgactcacctactcacgttatcatgccttcagaggacccaagttagtgagcgccaggaagtgaattgaccaggccaaatgctacgttgagccgactttggctttgctctgcgatctccacttgccaacatgtgttgccttcgacgaagtcttcttcgccttccgcttccttctctgcagcatcctgattgatattcttcattcttcgagtgacatgcagtcaccctaattgatcgtcatagagcctgcgttgaagtcgaatcccccctaatggacaatgtagttaaattgttattagcttgtttcttgttggatagactaatgtcagatgctgtttggtataaaatggtaaccatctggttgatgattggcggcgaaaaaaaaaaaaagcacgtggttgctatatgacaagtcccaaggtattattac

SEQ ID NO: 137877 - DNA, 224 bp, Zea mays
  Clone ID: MRT4577_57220C.1
cgcagataatgctatacccaacaaacagcacgaaacagggtattctccagcgattgtacgcgtgcttggccccacgccgccatggatgcatgctctgtcctcttctaccagcaaattttgttacatggcgcctagtccaacgtgcgtacttgtgatgccttggttatcagtcaacgctacggagcccataaatcttcactaagaaaaaaaataccaactcttat

SEQ ID NO: 137878 - DNA, 676 bp, Zea mays
  Clone ID: MRT4577_57221C.1
cccacgcgtccgcccacgcgtccgcccacgcgtccgcccgctcaacgtattttctgtgaagtgcttgatgcagttgtgctccaacctggaataagggatcaccacttatggaaattcagcgcttcaggggagtatacaactagttctgcttataaagctctcttccttggttcggttcagttcgaaccagcagaacgtgtgtggaaatcttgggctcctggaaagtgcaagttctttatatggcttgtggaacataataggtgctggactgctgacaggcttataaaaagaggactagaccggcctgagcagtgccccctgtgcgaccaagaggctgaaaccatgaatcatttgctggtcaaatgtgtttttgccatacagttctggtttcatttccttagttcagtggggctgcaggaactgtgtccagctcatgaggattcctttgagtcgtggtggaagtctagcagctctcgggcatctgattttttgagaaaaggttttaattctttagtgatcctaggtgcttggaccatttggaagcataggaatagatgcgtctttgatggttgtaatcccagcctggtcacagcccttagagtggctagggaagaggcggtgctatggtccttgaccggagccaaggccctgtccttcctccaagttgatgagttgc

SEQ ID NO: 137879 - DNA, 476 bp, Zea mays
  Clone ID: MRT4577_57222C.1
gccagcggtcggcctagcagactgcaatgcagactgctccctggctattcttctggctgctccactttctcctgcaggtttccgcgccgggtacgggtacgaccaacaggaatattgaagcgcatcggcggcggcaacaccagattcatgggtgcagccaacaatggcgacacaacgctatagcgatatttatcgcccgaccttagcggcatcctgatcgctgttaagactactggtggtacaggaggcggaaaagttttctcaagactgctggccacgattcatggggtggcgcatctggttgtggcgctgggcattgagctcgccaccgatcaggtactcaaacaggcattcgttgacgtgtccatcaagttctcaagcgcgctctgcggcatgttctgggtattctctgtgctaacagtgttgcacacattggtgactgctctgatgaacgcgttcatggacttcattgagcc

SEQ ID NO: 137880 - DNA, 441 bp, Zea mays
  Clone ID: MRT4577_57223C.1
ctaaagcaaacttaactgcttttttttcctgaaaatattacacaacaaacattacaacgacaacggtggttgggtacagcaacgaccacagggaaccgggggcatgcatgataaatggaccctggatgggtagtttcatgacttccatccaaaaacccatgttttatttttttgtagggaaacccccccccccccccaaacggggcctcctttgcctacttttaatgacatgaagggcagccccatcactggattcacttcattggcatccgcccaacggattattaagggtttttttttcttcttctttccgggagggtggcacttgaaacaggatgcatgcaactgtttcgcatggcatcactgtggcgggagcaaaccccttctgggttatcactggagcaaaacctacaacccatctggctgacccgttcgcgtaaa

SEQ ID NO: 137881 - DNA, 193 bp, Zea mays
  Clone ID: MRT4577_57224C.1
ggaaaaccatttcaaactcctgtccatattttttgtacaaaaaaaatcacttctccacaccctcatgagatgaaaggaaaggtcaacgagaatgactaccctatccctttacttaagcagacaatatgccacactacaaacactggcgctcacaaacaaccatgacctgctggttaacttggtcttctgcaaa

SEQ ID NO: 137882 - DNA, 323 bp, Zea mays
  Clone ID: MRT4577_57225C.1
ccttctcgtccgcccacgcgtacgggtgctggccggcgacctgcagagcacggaggcagggtgcggcgcagcgtccaccagcggtcgggcggcggccaccaccaacggcgtcctgtccctgctctaccgacaggggatggagatcgacccgctggcgcggctcgagaccgagaggatgcctgcggggctgcaggaggcccggcggaggcacgcgcacacgatggcggcggccgtgcacagcgccagggcggagccgctgctgttggcggcagccgagcttgggcgcgcccgccgccgtaacaccaagctggaggagaggctcc

SEQ ID NO: 137883 - DNA, 477 bp, Zea mays
  Clone ID: MRT4577_57226C.1
ggaaattaacttcttatttttagggggccccattcattagccaaaaaacttcatttttgaattacaactaataagcaatctaaaaaagggcccccccaatgatgtgttgttggtaaaaggctgctgggtttgtcaaaacaagttggacaaagggcagcaactgttgcaattgtaaaagggttgcggggttagccacaaacttcttgtaaaaccgaagcacttttttttttgtcaaaaaagaaaccgggcttgttgtacctagctggccaaatggtagtagtatttgctgctggaaataaacaaaggggttcaatgcggccaatttgttaaatggaaaaaatttttgcttcttaaagtaggcagtaactaactggcttaatggtagtaattgttgttgctgcaaaaagcaacagggttcaatatatacagtggtttaatggaaaaaatttttttccttaaaataggggaaaagttttc

SEQ ID NO: 137884 - DNA, 1572 bp, Zea mays
  unsure (1)..(1572): unsure at all n locations
  Clone ID: MRT4577_57227C.1
gcggcgtccccgtcccatctcccatcccccgccccaaatttttggcagctccacaggaaacagagagcgcataaccggcgttgttggcggcgatgaggatcgaggaggtgcagtcgacctcgaagaagcagcgcatcgccacccacacccacatcaagggactcggcctcgacgccaatgggatggcgattgcgttggcggcggggttcgtgggccaggcggcggcgcgcgaggcggccgggctggcggtcgacatgattcgccagaagaagatggccggccgcgcggtgctccttgcgggtccgcccgccacgggcaagacggcgctagcgctcggcatagcccaggagctcggcagcaaggtccctttctgccctatggtaggatcagaagtgtactcctcggaggtcaagaaaactgaggtgctgatggaaaatttccgtagagctataggtttgcgtataaaggaaaacaaagaggtttatgaaggagaggttactgaactttccccagaagaggctgagagtacaactggtggatatgcgaaaagcattagccatgtaatcatcagcttaaagactgttaaagggactaagcaactgaagttagattcttcaatttatgatgctctgatcaaggaaaaggtggcagtgggtgatgttatatacattgaagcaaatagtggagcagtgaaaacatgttggatattgaatgcttttgctatcttaaccgtgcattggagagcccattatcaccaattgtgatactcgctacgaatagaggaatatgtaatgtgagaggaaccgatatgacgagtccacatggtataccagtggaccttctagataggttggtgattattcggacagaaacatatggccctactgagatgatacagatactggctatccgagcacaagtggaagagattgatatcgatgaagaaagtcttgcttatttaggcgagatcggacagcagacatctttgagacatgctattcagttgctatcacctgccagcgtggtcgcnnnnnnnnnnnnnnnnnnnnngatgtgcaaggctgacctcgaggaagtcagcgggctctatttggatgccaaatcctcggctcgcctgctccaggagcaacaagaaagatacatcacctagacttgcatctcctgctgtggaaggaaaagcctcgaagagaaatgcattctgcaaagtgcgtcgatctgcttcagtatgtcgtagtctacaagtcttggagagagcacgtttctgcggggaaggaaaactgtttgaattttgtagtacctgnnnnnngttagcctccagcgaagacttgattccggcatattgcttgttcacgcaccgttaacaccgattaagattggcccagccgtgcaggaattgccgggtgtgttttcannnnntcgctaatcgatgtccagaatctgtgtgcccacgggtgttgtattgaccctagctttgtaaccatgcacatgatttcnnnnnnaacgctgatggatggcacctggatctctgtccatggccatcgtaatcccactgtctggagcagggttttcatg

SEQ ID NO: 137885 - DNA, 432 bp, Zea mays
  Clone ID: MRT4577_57228C.1
gccaccatctatccatagaggtgcgaggccatggcggcccaggaggcggttccgatcgacgccatcggcagccagctggagataagtctcgtcgggctggagcacgcggtccttctcactaacaatctcgacctcgccggacagaccttcgtcgtcgaaaaagtccaggtgcgccaggcgccggccttgcttgaggtcatccagagggccgtctgccatcccaagaggaagtgggtggtccgcatacccaacaccttgaagttgcgccacatcgccaggatttcgaatgagatcgaggtggtcgttgccgtcgtgatccctcaactgctccgcgacaatgttgaccccaccggcgcgcgactcctacgccgctacgcttggtccatctgtcatgcggcgaggaaggtggatggcgcccccaggattcctggg

SEQ ID NO: 137886 - DNA, 2052 bp, Zea mays
  Clone ID: MRT4577_57229C.1
tgtgtttcagccttaaaaaaaaaaaaaaaaaaaaattttttaaaaaaaaaaaaaaaaaaaaaaaaaaaaaaaaaaaaaaaaaaaaaaaaattgtcccaacttccgggtacctggcgcggcgtctcaccccgcccaaatttgttgccttgaggcggcggccggcgggagagagcagctctagagagaacagagagcgcataactagcggcggcggcgatgaggatagaggaggtgcaatcgacctcgaagaagcagcgcatcgccacccacactcacatcaagggcctcggcctcgacggccaatggaatgtcgatgccgttggcggcggggttcgtgggccaggcggcggcgcgcgaggcggccgggctggcggtcgacatgatccgccagaagaagatggccggtcgcgcgctgctccttgcgggcccgcccgccacgggcaaaacggcgctagcgctcggcatagcgcaggagctcggcagcaaggtcccattctgtcctatggtaggatcagaagtgtactcctcagaggtcaagaaaactgaggtgctgatggaaaatttccgtagagctataggtttgcgtataaaggaaaacaaagaggtttatgaaggagaggttattgaactttccccagaagaggctgagagcacaactggtggatatgcgaaaagcattagccacgtaatcattggcttaaagactgtcaaagggactaagcaattgaaattagacccttcaatttatgatgctttgatcaaggaaaaggtggcagtgggtgatgttatatacattgaagcaaatagtggagcagtgaaaagagttggtagatgtgattcttttgctacagaatatgatcttgaagctgaagagtatgttcctatccccaaaggtgaagtccataagaaaaaggaaatagtgcaggatgtcacactccatgaccttgatgcagcaaatgctcagccacaaggtggccaagatattttgtcccttatgggccagatgatgaagccacggaagactgaaatcaccgaaaagctacgccaagaaatcaataaggtggtaaacagatatatcgacgaaggaatcgcagagcttgtacctggtgttttgttcattgatgaggtccacatgttggatattgaatgcttttcttatcttaaccgtgcattggagagcccattatcaccaattgtgatactcgctacgaatagaggaatatgtaatgtgagaggaactgatatgacgagtccacatggtataccagtggaccttctagataggttggtgattattcggacagaaacatatggccctactgagatgatacagatattggctatccgagcacaagtggaagagattgatatcgatgaagaaagtcttgcttatttaggcgagatcggacagcagacatctttgagacatgctattcagttgctatcacctgccagcgtggtcgcaaagaccaacgggagagaaaagatgtgcaaggctgacctcgaggaagtcagcgggctctatttggatgccaaatcctcggctcgcctgctccaggagcaacaagaaagatacatcacctagacttgcatctcctgctgtggaaggaaaagcctcgaagagaaatgcattctgcaaagtgcgtcgatctgcttcagtatgtcgtagtctacaagtcttggagagagcacgtttctgcggggaaggaaaactgtttgaattttgtagtacctgttttttgttagcctccagcgaagacttgattccggcatattgcttgttcacgcaccgttaacaccgattaagattggcccagccgtgcaggaattgccgggtgtgttttcaccccctcgctaatcgatgtccagaatctgtgtgcccacgggtgttgtattgaccctagctttgtaaccatgcacatgatttcttttttaacgctgatggatggcacctggatctctgtccatggccatcgtaatcccactgtctggagcagggtttcatgttctgaccatggataatggatagcattaaaagctggtcctaaggag

SEQ ID NO: 137887 - DNA, 387 bp, Zea mays
  Clone ID: MRT4577_5722C.1
cactcgtcctgtctgtacttttaagaacattctcaaaagttcatgtcaaagccatgtctacctgtaattttataaatatcatcttgccactgtcaaatccaacctctcattcttaatgtactactaataaaacatataactctactcaacgacgaataatattctccactatcaatccatttgaccactaatactactatccaaaagtatttctaccttgacactctaacaactcctacattatccctacatatttccttcctcttattatctctatatccatcacactccactattacatgctacttaccaactcataagcactagctactcatgccacacatgaaaacttttacaatatatcaatcttacctcccttcaccaaca

SEQ ID NO: 137888 - DNA, 497 bp, Zea mays
  unsure (1)..(497): unsure at all n locations
  Clone ID: MRT4577_57230C.1
taaaaaaaaaaaaaaaaaaaaaaaaaaaaaaaaaaaaaaaaaaaaaaaaaaaaaaaaataaaaaaaaaaaaaaaaaaaaaaaaaaaaaagtttgtccctgcccgggcggccccccgggcgggtacaagctacccagttaccgcaccaacccggggggggtttccgttgcctttcccccctactactgtttaatgatttttgggaaatctcctttatccatccctttctatctttttatggaataaggccttaagaccacccccattttcatgtggggtttgaccaatattttttgctttttaataaagctgtgggtttccgggcggcacacttttttaatgtggattgaaacttggcctttgcgggtgcgaccgcttcacttgggcatttcctcccttgcnccttttagttctgctccttgcataggttaaactataaagaattttttttgccccggtttccccccccggggtggaattgctggttccccccccccc

SEQ ID NO: 137889 - DNA, 970 bp, Zea mays
  unsure (1)..(970): unsure at all n locations
  Clone ID: MRT4577_57231C.1
ngtagagtttgcacagtccagcgatcttatgcgtctctgcaagctaacctgccagaaagcttaagaaagttaaaactaatggaacagatataatcggtgtgaatcatacactcaacgatgagtgtcaaaagaatggacaacctgtcaagaaagtgaagctacctgcagaagtggcaaatcattcctgtggtgaaggtaccaatggcacttggctggaccctgctaaccttactcctacgaaaaagaagaaacctgcacagcacttcagcaatccggcagccgttattgtggaatttgtacctggtgccactgttccttccagagaggagctactctccacatttggcaagcacggctacttgatcgagtctcagactgatatttcagaagctacccgcagtgcttgtgttgtgtttgggaaaagcattgaagccgaggaggcgtacaagaacggttgtcagtaccttcttggtcagtttgggcctccgtttgctacgctaaggcttgatttctctcccgtcaagttgactgtgccttcaccgtctcttgcttcaaagcctccgctccgagatattaggaagaacctcgaggacatgatttcgtcccgtcgctcggctttgaacaaggcgacctcgtcggcagacgcccagctggaccctgttccagataagcttctgggggagatgcaggggctgttggcaaaagtcgacaggatgcttaccaggcctcatgctaatgctccttagccccgccaatctggagggttgtggctgtaacctattcggtagttaggcaactttggtgtctgctctgttagctgtgaatggcggggcttgttttgtggctgcttcgtgtactatatatatgccaataaggtcgcagcttcttttcgtgcccctaaaaatgcgagggcggccgtagtatggcacagctcttttgtcagagctgttcgagtttgttccggaaccct

SEQ ID NO: 137890 - DNA, 542 bp, Zea mays
  Clone ID: MRT4577_57232C.1
cccacgcgtccgggcgacttgatcgagtctcagaccgacatttcggaaactacccgcagcgcctctgtcgtgtatgggaaaagcgttgaggctgaggaggcgtacaggaacggttgccagtaccttcttggtcagtttgggcctccgttcgccacgctaaggcttgatttctccccaaccgtgcctttgccgtctcctgcttcgaaacctccgctccgagatattaggaagaacctcgaggacatgatttcgtcccgccgctcggctttgaacaaggcgacctcgtcggcagacgcccagctggaccctgttccagataagcttctgggggagatgcaggggctgttggcaaaagtcgacaggatgcttaccaggcctcatgctaatgctccttagccccgccaatctggagggttgtggctgtaacctattcggtagttaggcaactttggtgtctgctctgttagctgtgaatggcggggcttgttttgtggctgcttcgtgtactatatatatgtgccaataaggtcgcagcttctttt

SEQ ID NO: 137891 - DNA, 650 bp, Zea mays
  Clone ID: MRT4577_57233C.1
tcgtcggggaacgccacgtagccccccaggggaatagcccggatggaatattccgtttcggcaccttggtatttcaacagcggtggcccaaatcctaaggcaaagcgagtgacatggatgccctgtaaacgggcggccgcaaagtggcccaactcatgcacagcaattagtactgcaagtactccgatcgccgccaacgccgctaaaactgacataaatttctcaaataggaaaaaactggggacgaaatcccgccgaacgtgtaattcccccgattttaacccaacggccgccagaccgtgttccctggcccatgcaaacccctaagtttctgttaacctgaagaaggtgagggtatctgacaaaaattccagattacacagttatcaatatcaactctatccgttagtcaatggcggctctcagaattatatgggcgatgagcaccaagatattggcaaggtaatagcaaaactggaaacttcaaaggaagtcgttgctaacctaaaactccagacctttcttcgttctgcttttctctcagaggcatcacatattaacagtggtgaggatgtcggcaaatttctagaggctatccttcaagaaggggaagaaatgtttaattaccttgccaaccacgccccggtttt

SEQ ID NO: 137892 - DNA, 594 bp, Zea mays
  unsure (1)..(594): unsure at all n locations
  Clone ID: MRT4577_57234C.1
aattcggcacgagggcgaattgcttactctgcgagtcttgtgcgattgatcgtcatcgtcactgagggggtgtggtcgcaattgattccagtcctgttgtttcggatatgttacttgccatctcgcgggctagcccaaagttttttcatgcctgacattagggttaaaagtcatatatccgtttacatatcacttgtttacctttcactaccagccgccacctggacccacctaaaattagctctttgatggacgcaatatggaaattggctagatctgcacattgtttctggaaaactggtgttttggtagcctattatggcatttcgggttttcttttctcagagttgattattgttgggacatttcatattttatacctgctcataccatcagactgatcagaagagagatttgccataggaaacataatacttctgttgagcggctgcgtttagttgtttgcttctgtatatttcaagtactttgtaaattgccacacggttcacctgtctttctaactagccgntcataagcatttgattaacacatatataaacgagagagaaaccgagaaggatctgttttccactg

SEQ ID NO: 137893 - DNA, 273 bp, Zea mays
  unsure (1)..(273): unsure at all n locations
  Clone ID: MRT4577_57235C.1
cccagcgtccgttttttttttgaaacagtgagaccacactttatttattgcatgcatgacaaggccngactgaattggaacaatgcgttcttagccacggtgctggagagtttgccttcatgacctctcgtggcgtgtaaaaactatatttttcggttcgtatccctcgcgtgtgccgctggtggatgccttttttgacttcttttggctctcttacatccagcgtcacttcgttcctctttcggaatcactcgacttctgttcacatgcgct

SEQ ID NO: 137894 - DNA, 169 bp, Zea mays
  Clone ID: MRT4577_57236C.1
ccctttgccagggccagcccaagcacagggggccaaatggcaactagcaaatcaaaaaccggcaccgatgcctttttgtttggcaggaaggcacaatgacttcttcatggcacctttggaaataccaaaatgacctcccgggacagacccaaactttacccgccctggt

SEQ ID NO: 137895 - DNA, 127 bp, Zea mays
  Clone ID: MRT4577_57237C.1
tcgcgatctagaccatgcacgcgcttataggcttgtcagcacatggccaggcgccgttcaagtctagtcctgctcaagtccaaccttcgcgggctacccggctcccggacgccacgacggaccacac

SEQ ID NO: 137896 - DNA, 467 bp, Zea mays
  Clone ID: MRT4577_57238C.1
aaaaaacttcaggggggttccactcgaaacaaacgaggtaacaattctggaaaatttaaataggttacatccggattatatcagttccacactcgtactaacccggggggaggaggacaaatgcgtgtttggaggacccacacttgtgcttattcctggagctatggacatggcaccatttgtagagcagactgaaacagaatctttatgagttcctgcttgctgaatggaacagtgcaccacactctagtctcctttcacatcctcgatcaaggcaccaatctcactatcaaaactctggtacttcttgcggaaaatatcatctcaatcagcttgacaacgttgtggaggccatgggccagagtgtccatttcgaagatatgagcaagaaacatgtcctcaacattattactttccaattgcaaaaaaaaaatacttctctagcagtgcaggtgtgcccttgagct

SEQ ID NO: 137897 - DNA, 369 bp, Zea mays
  Clone ID: MRT4577_57239C.1
gaacgagatacccatcgcctctctaccttcagtataatagcaaccatgcgatccaagttcaaagacgagcaccccttcgagaagcgcaaggccgaagccgagcgtatccgccagaaatatgctgaccgcatcccggttatttgcgaaaaggtcgagaaatccgacatcgcaaccatcgataagaagaaatacctcgtccccgcagacctcactgtcggccagttcgtgtacgtaatccgcaagcgcatcaagctgtcgcccgaaaaggcgatcttcatctttgtcgatgaggtgcttccgccgaccgcggcgttgatgagtagtatttacgaagagcataaggatgaggacggtttcttatacattaca

SEQ ID NO: 137898 - DNA, 1546 bp, Zea mays
  unsure (1)..(1546): unsure at all n locations
  Clone ID: MRT4577_5723C.1
gtacctcgaggccggccnnnnnnnnnnnnnnnnaaaaaaaaaaaaaaaaaaaaaaaaaaaaaaaaaactctttctcgccctcgctcacctacagctccgtccgccagcgtcagccaggctgccccgggaggccgggaggaagcagatcggagaaggtgatctgttgtaatggctcgattgtacatcggcaacctggatccccgggtgaccgctcgggagctggaggacgagttccgcacgttcggggttcttcgcagtgtctgggttgcccggaaaccacctggctttgcgtttattgattttgatgataagagggacgcagaggatgcaatccgtgacctagatggcaagaatggatggagagttgagttatctcgtaatgccagcggtggtcgtggaggtcgtgaccggcatggtgggtctgagtccaagtgttacgagtgtggtgagactggtcactttgctcgtgagtgccgtttgaggattggttctggaggtctaggcagcggaaggcgccgaagccgtagccgtagccgcagtcgcagtcccagatatcgccggagtccaagttacggtagaaggagttacagtcctgcagcacgctctccaaggcgtcgtagcgtctcaccagctcgtggacgcagctatagcaggtcaccacagcacaagggtgcacgtgaagaatctccctatgataatggataccgtcgcagcaggagctagagccagatccttgtatctgacgacgagcgttatgtgacagatattgggaaagctatggtcaataacctgcttgacagatccttcgtcgactgcttgactttggttaaggcatcgtcctgcactgcttaaacgactcggccgactacggctttcagttctgtcttcatggttttgttctgcgctctacattcttcgcacgccctcgcatgcttcattcagtctgccgtgtgttaacctgcctgcgtatcttctcgaagatgctgcgcatcgcaaaagcagtaatgaccttccttctcataccatttggtaaggtttgatttgctgacaaatgcagcatctggtaagtttctccccgtaggtttggtgtccgtgctgcgtgcgctgctcctggttcaggaactgcagtatgttagatggatgaggatgactcacctactcatgttatcatgccttcagaggacccaagttagtgagcgccaggaagtgaattgaccaggccaaatgctacgttgagccgactttggctttgctcagcgatctccacttgctaccatgtgttgccttcgacgaagtcttcttctccttccgcttccttctctgcagcatcctgattgattcattcttcgagtgacatgcagtcaccctaattgatcgtcattgagcctgcgttgaagtcgaatcctgcatccttattattcaaccgttcccccccccctaatggacaatgtagttacattgttattagcttgtttcttgttcgatagactaatgtcagatgctgtttgatatataatggtaaccatctggttgatgattggcggcg

SEQ ID NO: 137899 - DNA, 389 bp, Zea mays
  Clone ID: MRT4577_57240C.1
ccccagagtctcagtggctgatgcaccattacatcaactacattatcttttaggatcccacactgccagccagggaacacgttctacttcccatgcatcatcctcctcacgaccgccactgacatcgcaactatcctcctgttcctccaccaagtgatgccagaaccacttgaccacccgcacctgaagcacgcccacatcctcctcaaccacaactgcttcaccaagaccaacgacgtcctactcactcagctcgacccacaattccgcgtcgaccccactcattccatgatcacatctactgacggcacctattgctacatagaccctcattacctacccacttgagtcctcaccacccactccgacctgttctttttcaccatcat

SEQ ID NO: 137900 - DNA, 383 bp, Zea mays
  Clone ID: MRT4577_57241C.1
ggagacgcgacaaggagagcccgccaggaggggagtatgaagaatgagtgaaaaaagaagctgatgaggaggctgagcaggaagcgtcgaaggatgagggagagatccaagtaggctgatggggattgtggatggcggagtaggaatacgtgtgttacgcttcttcgatgcgtgagttcatggagagatgtcacatcctacttcgtcgtcaccgattgccatgggaacaatggctcggcttgaaaacctgaagttcagtaggccatgtatcgggggttctagctatatccagagtttctggctaacagaagtcagcgagacggtttagagaacctattatgagggagctttatttgttgctgatatcgacctacctgttcaat

SEQ ID NO: 137901 - DNA, 268 bp, Zea mays
  Clone ID: MRT4577_57242C.1
gaatcaacaaccagacatccatcttgctacgcaaattgctgatgacaacttcttcatggctactctaggtacaccgagcacaccgtgatcctacttctacacaggctcataaccactggctggatatgaataaccataaatactgtatacatacactctaaacatgaatcacggtatagtgacaagccagccttaaatcgtaatataccgaatatctcacactctatgcttagatgacatggaacatatcaccactcacactgcctat

SEQ ID NO: 137902 - DNA, 208 bp, Zea mays
  Clone ID: MRT4577_57243C.1
cttattacttgggccgcccggcttttttttttttttttaaaagccaaaaaagtgacctgctttggttcaaaggttcccggcccccccttcaacttacaaaatttggaccattgattgcttcacccaacccttaggttacccccaactttgttcacgactttcgatgggataaaatttttttctcggaaacaccttttttccggggggg

SEQ ID NO: 137903 - DNA, 493 bp, Zea mays
  Clone ID: MRT4577_57244C.1
caaccgacatcaatattttgaaatttgaaaaagggctgttcaatcgaccttcaacaggcaaaacacatgtaaagggcagggctgggaaatcaagttcggagcatgtatcaaacggaggagttcatcacgggcattcaccctttcatcggattaatcccattttctccacctaaaacgggcatacccccccacggttcacaaaaaaaaagtggcacctacatatacgggtcccaccccattaatccaaatcctttgttttcaggttcaaagagcaatcaattatttgaaaaccccaacccactcgaaaaaggatgggatcggatccttgaaaaaccacccaaaaatgtgagggttgatgacccaattattcacaaacggacggacccccacataactttgcagaagtacaaattattggcagaacccgtagggatcagccggcattgaccagggctggggctgctggggcttttttactatcatcacggggcag

SEQ ID NO: 137904 - DNA, 1050 bp, Zea mays
  Clone ID: MRT4577_57245C.1
ggttttgcattttcaccattgcactgatgtcgagctgcattctttcttcgtgcaggtgttcctccagcgtcagcccacgcgtacgtgaagtttcaacttctggttgttagggatcacacactaatcttctttattgtgcaactggtagttgctttcatgggtatggtgatttacagattttatggagatgaactgcgcgaaatgtttggttatgaagagcacccatatgctttctatgccatggcgatactggctattgttttggttggtttgctgtatgggttcttcattgctataatatgtggacagaggataactgaacggcattaccatgttcttgcaaagcaagagttaaccaaggagtatattgtagaagatcttgaaggagctgaccatgtgccagaccttgatcctagccatgttatagagttgaagatattaggactatattaaacatagctgcatattacatcagataaacattgttgatgaatggggaacagcataccggaaacaaatcccaggttgatgttgcaagaaatacgtacgtcattccacttcacctggagacagtgcaaaatgggcctttgtgtgactgtcgcccataaattcttgtgaagcaaaacacaattgctcattcgaagaacaccatttgaagattctttggttccaatgtaggcctgatagctctcaaacaagataataacattcatcgccgcacatctcaacgaatgaagattatcgtgaaagaagcgctaggatgatggtctcaatggacatttttgtaaagtagtagcatattatattcttttctcccttgcttcagatacacaacaaacatgcaacagccaagatgctaatgccccgtttgttgtacataccctgtaaaacattactgccaaactcgcagtactttgtccttttgattattttcatcgaatcgatgaactaaataatgtaacctggagctggagccgctcaaaagtctacacgcgcttcagaaaacgggattgatgtgaggcttgtgctggatcgcttcactttgctgcc

SEQ ID NO: 137905 - DNA, 180 bp, Zea mays
  Clone ID: MRT4577_57246C.1
cgtacttttttacgaatactaactttgaattcaactctgaaatataatgagctacttaactcggacctattttttttacttggaggtttatcaaagttggtgattgcttacctactagctttgtggctagtcttgtgactactgaactacactgccgaagcttgaacttctggttgcttc

SEQ ID NO: 137906 - DNA, 633 bp, Zea mays
  Clone ID: MRT4577_57247C.1
ccggccggggtgctctctcacaggtgggctggcttctcctccccctcttaccaagtcctcctcgggttagggttccttacggttttgcggaggggcgatggcgtcgattgatgtgaatggaccgttgcttcgtcggcggggttgcctgggacaccagcaacgagtcgctggagaatgccttcgcctcctacgtcgagatcctcgactccaaggtctatcaccagaccgtcgagtacggcggaggtcccgtcgacttcatcttcgttaccttctcctccgagaactccatgcgtcgacgctatcgagaacatgaacggcaaggaggtcgacggccgcaacatcaccgataaccagggccagacccgtgccgctgtcgacggcggtgacggttacagcgacggtcgcgacgctctagcgcgtttatggtggagggcgccgtgacggcgcctatggcgtcggtggcgtctacggaggacggcgcgaacgtgcatttggagactacggaagcgatgtactctactacggtcgtcgcgaggctggcgtaggatattaccatcacgcggcctgcaacacctgcatgcactgatgatgagcacccatcctgtgttcggccgagttatcttatctatctat

SEQ ID NO: 137907 - DNA, 546 bp, Zea mays
  Clone ID: MRT4577_57248C.1
gcttggatcctctagagggccgccctttccctttttttttttttttttttttttttttttttcttttttttttggggtgggtttttttttttttttttttttttcccttccccttctttttaaaaaaaaaaacccggggggccccggccccccttttccttaaaaaagcccaatttggtttgtggcccattccacaaacaaaatttgggaccttttaaacccccaccggggaaccaacaagggtccccccccctcaaaaaaaaaacaaaacaggggttaaaaaaaggtcttaaatggcaacaattttttgccccagaaaggcccccaaaattttattcccagggggggggccccccttttccctttccccccttaaaatttaccctaaagggaagagcccctacccccccccccttttggaagggccccccccctcccccgtggggggcacactctgggccccaaaacccttgttgaaaaacccatgcccaaaacccctttaaaaccatttcccccaagtttttcaaaagagcccccccccccccc

SEQ ID NO: 137908 - DNA, 736 bp, Zea mays
  unsure (1)..(736): unsure at all n locations
  Clone ID: MRT4577_57249C.1
ccggccgggctcctgatggtagcagccctggccgccgtccacgggctgacgctcaccggcgtcgacgcgaccgtggtggcgacatgcctggcggcgtccaacagcgacggacgcgtcaactacgacttctgcgtgtcggagctgaacaagcatcgcgacagcccgggcgccgacaccgcgggcctggccaaggtggcggccaacgtcggcctgaacagcgccggcggcgcggtgaacgagatcgaggccctgctcgccgcgaagccgccgccgccggacgcccggaccagcgccgcgctgcggctgtgcgagcggctctactacgacatggagctcgccttcgcgggggcctacgacgagatcaacgcgctcaactacactgcggggaagcagatggccgccgacgccgactcgctggtgcgccggtgcaccggcggcttcgcccaggctgggctcctgccgccagagcccgtcgcgcggcgaggcgcgtacgccatgcagatcgccatcgtgtgcacggccattaccaacctcatcatcagtccgtgatttaagatatacgtcacatgatgcgtccagaatataatgatcctctccaagcttaataaatcttgtattgtagtaccagattagagcttcttcatttgggcgtggatccgataaaattaaatcctttgcaaaattgaatagaaagatatttaatttcctcaaaaaaacaaaaaaaaaatttgcggnc

SEQ ID NO: 137909 - DNA, 1564 bp, Zea mays
  Clone ID: MRT4577_5724C.1
cgttcacctacagctccgtccgccagcgtcagccaggctgccccgggaggccgggaggaagcagatcggagaaggtgattcgttttgatggctcgattgtacatcggcaacctggatccccgggtgaccgctcgggagctggaggacgagttccgcacgttcggggttcttcgcagtgtctgggttgctcggaaaccacctggctttgcgtttattgattttgatgataagagggacgcagaggatgcaatccgtgacctagatgatttttatggttctgtaggcaagaatggatggagagttgagttatctcgtaatgccagcggtggtcgtggaggtcgtgaccggcatggtgggtctgagtccaagtgttacgagtgtggtgagactggtcactttgctcgtgagtgccgtttgaggattggttctggaggtctaggcagcggaaggcgccgaagccgtagccgtagccgcagtcgcagtcccagatatcgccggagtccaagttacggtagaaggagttacagtcctgcagcacgctctccaaggcgtcgtagcgtctcaccagctcgtggacgcagctatagcaggtcaccacagcacaagggtgcacgtgaagaatctccctatgataatggataccgccgcagcaggagctagagccagatcgttgtatccgacgacgagcgttatgtgacagatattgggaaagctatggtcaataacctgcttgacagatccttcgtcgactgcttgactttggttaaggttctcataactttctatatacctattatcttgtgtctactttataagtagcagtaaaaccttttgatgagtgtatttgttgaactaagacctactgtcttttcttgtgtggtaaaaaggcatcgtcctgcactgcttaaacgaataaaaaaaaaaaaaaaaaagcggccgactacggctttcagttctgttttcatggttttgttttgcgctttacatttttcgcacgccctggcatgtttcattcagtctgccgtgtgttaacctgcctgcgtattttctcgaagatgctgcgcatcgcaaaagcatttctccccgtaggtttggtgtccgtgctgcgtgcgctgctcctggttcaggaactgcagtatgttagatggatgaggatgactcacctactcatgttatcatgccttcagaggacccaagttagtgagcgccaggaagtgaattgaccaggccaaatgctacgttgagccgactttggctttgctcagcgatctccacttgctaccatgtgttgccttcgacgaagtttttttctccttccgcttccttttttgcagcatcctgattgattcattcttcgagtgacatgcagtcaccctaattgatcgtcattgagcctgcgttgaagtcgaatcctgcatccttattattcaaccgttccccccccccctaatggacaatgtagttacattgttattagcttgtttcttgttcgatagcctaaaaaaaaaaaaaaaaaaaaaaaaaaaaaaaaaaaaaaagaaaaaaaaagaaaaaaagcggccct

SEQ ID NO: 137910 - DNA, 964 bp, Zea mays
  Clone ID: MRT4577_57250C.1
gcagcagcagcaagcttgagccactgctgcacgtatattattaagatcgaaagccaccaccatggccttggcctctaataagctcctcatcaacagcttcgtcacggtggcattcttagtcgccagcactcgtgggagtggcaccatccagctgatcttggtgaacaactgcgcggaatccatctggcccgggcttctgggcaccgccggccagccgacgccgcagtcgggcggcctccacctggcccccggcgacgaggcggccttcgacgtgccggtggggtggtccggccgcgtgtggccgcggcgcggctgctccttcgaccagcgcgagcgggggcagtgcgcgacgggggactgtggcggcgtgctccgctgcgacgggcggcccggcgccgccccggccacggtggtggagatgacgctgggcacccccaagtccccgctccacttctacgacgtgtctctggtggacggcttcaacgcgccggtgtccatggcccccgtgggcggcggcgccgggtgcggcgtggccggatgccaggcggacctgaacgtctgctgcccgtcggcgctggaggtgagggaccgcgaggggagggtggccggctgccggagcgcctgcaaggccatgggaggggacaggtactgctgcacgggggactacgcgtcgccggacaggtgccgccccaccatcttcgcccacgtcttcaaggccgtgtgccccaaggcctacagctacgcgtacgacgacgccacctcgctgaaccggtgcaaggccagccggtacctcatcaccttctgcccaccgccgacttccaggaaatgacgaccacacatccatggattgcatcttgaaaataataatacttactaaatgtccctacggtttttttatatcagtcatgtagagcttgtttaattaggatacttatttaaacatattccaatgcgagaggtctct

SEQ ID NO: 137911 - DNA, 762 bp, Zea mays
  unsure (1)..(762): unsure at all n locations
  Clone ID: MRT4577_57251C.1
ccggccggtaaccattcatctgctttcggaaacttggcaaacgccaagccactacctcctgtgcagtttcatgctctagacagtgaccatcaggttcttgatgtatggaagccatctgtcattattgtttatcatccagatattacctttgtaagagaaattgaagtatacaaggcagaaaactcatcaaggaagttaaaagtttacttccttttttatgaagattccactgaggtgcaaaaatatgagtccagcattcgacgggaaaatgaagcatttgaatctttgatcagacagaagtccctgatgatgatacctgttgatcaggatggccgttgcattggaccaactgttgcaaatgaaccagagcctcctttatgtcagaactcaattacaagaaaggcaggtggtaaaaaggcgcccgagaaggagatgcaggttattgtagacatgagagagttcatgagcagccttccgaatgtattacatcaaaaaggttgagacaatggcacgttactacaagatcccggttctcctcatcgagttctcacaagataagagcttttcctttcagtctgcaaatgagattggtgatgatgtctctccgaccaacattatctcgaagctttctctgctagtgctgcattttcctcggcttcgcataatctggtcacgcagcttgcatgctacangcagaatatttatgtcactgaaaacaaccaggatgaacctgatgagaaaaaagcaccaagagttggcgtg

SEQ ID NO: 137912 - DNA, 2465 bp, Zea mays
  Clone ID: MRT4577_57252C.1
ggtatccaggctgctgtcctcgctaccatggacgcttgtctcaaggaacttaggcgcaccaacaaggtggatgttgaggacctcaccgtcgacaagggtctcttcaagtccttcgatgagatcgtccggaggcagctcgaccccatctggcacactcttgggaagaagacaaagcagcttgtggctgacctcaggacgctacgcaagctgcttgattacctcgtcaggtatgacgccgttacatacttgaagtaccttgacacattgagagtatcagaaggtgtcagatcagtttggatacttgctgactcaagccataggatatttgagcttgcaaaaaggcgcgtttaccaggcagtgagaacagatggtgttaaggttagcatagataataagggcacaccaacaaagaagaggaaagtggcacataattctaccaagaaaggaaaagtaactgaaaatgaagattccactgtaggtcccaacactcagaaggctaatactgatgtgggcattgtattggaagaggttttggaggaggcaccgaaatggaaagtgttatggtagaattgttgcaagagataacagaacaacggatgaagagcagtgccgggaatgtgcatgatgaggacaaaaatgatgaaagtggcatagttttggtatcatgtaaagatgaacgcacatgcttgcagctgcaggaatgcatattaaaaggcccctgtcaggttatgcgagaagagtgggagaagtatctgattggaaaagctgagctgcatggattgaataaggacaagagaaaatctgagcaaccaaaaggtgttggtgtcctggatggtgaagttcaaatgggatctagtgagagtgtgtgtccagttagcattagcaaactcgaaactaatgccttacttgccgctgcctctgaattaagaaatatatcaaatgaagcagatgtcaagagtggctcaaatagcagctgcagcaaggctgggggagcaaaggggaaaccaaagaaaaccatttcaaagagacaaggcagcaatcgaaaaaataaaagtaaggagggaaatgacaatagccaaggtactggtctggattctgaaggtcaatcaggaaaagcagatgtacaggctgagattgttgcttctaagatgtccgcatatgatgcttccatgtcagcctctacttctaatgttaaatttaaccattcatctgctttcggaaacttggcaaacgccaaaccactacctcctgtgcagtttcatgctctagacagtgaccatcaggttcttgatgtatggaagccatctgtcattattgtttatcatccagatattacctttgtaagagaaattgaagtatacaaggcagaaaactcatcaaggaagttaaaagtttacttcctttttttatgaagattccactgaggtgcaaaaatatgagtccagcattcgacgggaaaatgaagcatttgaatctttgatcagacagaagtccctgatgatgatacctgttgatcaggatggcagttgcattggaccaactgttgcaaatgaaccagagcctcctatatgtcagaactcaattacaagaaaggcaggtggtaaaaaggcgcccgagaaggagatgcaggttattgtagacatgagagagttgcatgagcagccttccgaatgtattacatcaaaaaggtatccgaatcgtaccggtcacccttgaagttggtgactatgtgctctctcctttgatctgtgttgaacggaaaagtatcgcggacttgttccaaagctttgcttctggtcgtctgtacaatcaggttgagacaatggcacgttactacaagatcccggttctcctcatcgagttctcacaagataagagcttttcctttcagtctgcaaatgagattggtgatgatgtctctccgaccaacattatctcgaagctttcgctgctagtgctgcattttcctcggcttcgcataatctggtcacgcagcttgcatgctacagcagaaatatttatgtcactgaaaacaaaccaggatgaacctgatgagaaaaaagcaacaagagttggcgtgccctccgaggatggtatcgtggaggatgatgtgaggtctgaaaattacaacacatcagccattgagttcttaagaaggcttcctggggtgacggattccaactaccgagcaatcatggatggatgcaatagcttggccgagctggccctgcttccagtggaaaggttggcggagctaatgggtggtcagaaagctgcgcggacgctcaaggagtttctcgatgccaagtgcccaaccatgttgtagccagagtgacgctgtactgtttgtattgtgtcctgtgggatacaaatacttcagttgatgtgccttatatatatattaaaaaaacaaatgttgtacaataccaatgccaatgccaatgcctgtgcatgttgttgtctgg

SEQ ID NO: 137913 - DNA, 231 bp, Zea mays
  unsure (1)..(231): unsure at all n locations
  Clone ID: MRT4577_57253C.1
atgaatcaccccatttcattcatgtgcatgtgtacatatattacggaagcatccataaacacttccgtgtgcagtaaagatgatatagcggccagcacaggagaagtgtgatgtagtgctggggggggggggggggcccactaactgacatgaantcatnaacttnatctcagcaacagttatcactacttaggaactgttccacatttggacctaaacttttgatttttt

SEQ ID NO: 137914 - DNA, 541 bp, Zea mays
  Clone ID: MRT4577_57254C.1
ggtttttctttttttgtggggccagtttttagcatttttaggtaaggcaacccattcttacgcgaagtaacagagcacgcacgtagtacgttcacgccaacgaccacactacggggcgagatattattttacagctgcctcacaggataaaagatccaccaaagacttaaaaaaggaaccagcgtcctgggctgagatccatggccatccatgattaccggaggcacgcccaccctctttatttatgacagggttacgccaagccacgcaaggaacccacacacatacatataggccatgaaatatatatggatagcccaggtgcaatctcacggatacgactccaaacgcaacacgagctccaaattcattcaggaactggcgatgcgctgaaccctgcttgggtgaagacctcgataaattctttttcacctctctgaagaccttttgccagggtcatgatgccgatgtccatcaggaggtgagttgccagaataggcgcaaagtggtcactgctaagatcaaggataatcactttccc

SEQ ID NO: 137915 - DNA, 580 bp, Zea mays
  Clone ID: MRT4577_57255C.1
gggggggggggggttttttttttttttttttttatacaagtctacaaaacataatatataaagaggtatgagcattacatcaatgttttcatgttgacatgggtattttgacgagttacatggctcagtgggcattttggcgaagccgggtggggggggcttcacttttgcatttttttcaatgactctgcctatacacgacacgacgctagcagaataagttcatacatgagaatccgctcatcaccgtcatttgccgcgcctgatagctccttgtcgacgttcctcgacatccgtactcctcccgaaggaagtcgataagatctccaatatctacctcacccgtgatattgctgtcattcggcgttccctggcgggtgctactcgaagccttgtccccagttcttgttttcctggctgcgggccgcttgcggtggctgcccttcatcagctgtgccactacgacaggccttttgatccttaggcgtggtgacttcagaaccatcctcctggcaacaactgctggattctgactcgctgctgggtcagctcggactcgcggaggcacaactataacgtc

SEQ ID NO: 137916 - DNA, 500 bp, Zea mays
  unsure (1)..(500): unsure at all n locations
  Clone ID: MRT4577_57256C.1
tctttaggaatgggggccagccgacaactgcactggtctccagggcttcctcgtcttcaacgctgttggtgggggaacacggctctggccttggttccctcctcctagtagcgcctgtctgtctgactaccggcatagaagctccaagggtggggtgttttttttttatttcttaaccacccaaggtttcctacttgggggggggggaggccatcaccaacagtagtcactgtgccaacccaactcccttcctcngagccaccacctgactgctggctatcacctgcctggacacatgagcgcgcatctacagtacatttggccgctcgatacccttggacattgtagcgcaccaatcctaccaccaaaccatcaacagggcttgtgatcccagtgttatcctcattcccttactgggctccctgagaggtcgatggctgctctgaacgtggatgttaacgagttccagaccaacctggtaccctacccgaggatccact

SEQ ID NO: 137917 - DNA, 123 bp, Zea mays
  Clone ID: MRT4577_57257C.1
cttgagtctgagaagcacattggcttttcactgtcaagcccattcggtggaggctccgcatgaagggtgaagagagatactcagaagaaggcaatctgtgacggcgatactggcgatgacgat

SEQ ID NO: 137918 - DNA, 400 bp, Zea mays
  Clone ID: MRT4577_57258C.1
atttcctttccttttgttctcaagtctttcttagaatgtcactcataactagtaatagtatttcttttccttttgttctcaagtctttctaaaatgtcactcataattggtaatagtatttcctttccttttgttcataagtcttctaagaatgtcagtcatagctggtaatggtaatcatggttgtaacctgatttgtagtgagagaccagtaaccatataatgagctatgttcttatgagataaaagctggagacttttttttgacatggttcttccttttagaatgataagaaaataatcttgatgtctatatgcacttattgagaccatgtaaagagaatataatgcaacatttgatatgtttgagatatcccgctgcctgtgtgctaagctagaa

SEQ ID NO: 137919 - DNA, 385 bp, Zea mays
  Clone ID: MRT4577_57259C.1
aaccccaaaacccccatttttttattacttttaaaaacggggaattaacaaaaaaagggcggggggaaacaaaactacatatacaacggggggccaacccaaacaaacctgggcttatttggtccccctttaaaaggtggacccttcctggtgggggaaaaagatccttggcccggccattggggggggattaaatttgggggggggattattaccggacctggattggggggggcgggacatgtgaccatttattccggccgggagaattataaaaaaacgggttaactggccaccggaggtttttaagggttttaaggggggacccagtgttccaaaacaacgcggtggggggggagcacggcttccgcctttttgggccacc

SEQ ID NO: 137920 - DNA, 477 bp, Zea mays
  Clone ID: MRT4577_5725C.1
ggggcgaccaaaacaaacaaaacacaaaggggggccaaaaattatgggcccaaaacactaggggagctctaaaacgcccacaagggcgacaaaaaaaaacagcggggggggttaattaaaacccaccccgcccatcatattaacaaaacgggggcccccccctaaggaagcttcggggggcaaaaagggcatttaaacaacaaacccgcgcaaaaagcggctcccaaagggggcttccgggctacccaggcgggagcccaggaccccggcccaaggttcgctgaaaacggcggggggaaacgggccaccaggggggcaaacccctttgggcccgaaaccaaaaacctggggggaaaagggattcggggcaaaacccggggggggggtttttttaaaattccccttgggcccttttttgggggggggcttccccttctgggggggctttgaccggggctgaaagcggggggccccgga

SEQ ID NO: 137921 - DNA, 283 bp, Zea mays
  Clone ID: MRT4577_57260C.1
aatgagatatcaacggccaatactcgttcacacaaaaattacaggtgcatggagttgttcagaagacagcagataagatgagcattaaggtaaaaggacctctattcatacaccactctgaacaacacggtatagccaaactgtgcaagctgagatggcctgttcaagaaccatcaatttggatgacgtcgtgaaggattttcacattacgatgcaacggctcctttcttcagctggaggtgccccattttgctgatatctggttgcatctgatgggttgtaa

SEQ ID NO: 137922 - DNA, 422 bp, Zea mays
  Clone ID: MRT4577_57261C.1
accctaaggagtcttccagcccattgaaacaagggggggaaaaaaaatgaaattctcccaaatcaccccgaaataaaaccatagtatacaaaccatataaaacccattttttttggggggctgagttcaaaaccaccctttaaaagggcatttcaggtcagggaacccccatccccactaaaatgggggcccaaaaagggacatggcagttaaacccaacccaaaccattattttttttgtaaaaaagtaacaaattcggcattatattattgcactctccccactcctaaagggcgccccccttggggaggttttccaggatgtaaaaagaggcaaaccacaaaaaaatgcaaatcgagtagctgaggaggcccaaccccgggggaattgtaaccattttgctccttttaaaattttaacc

SEQ ID NO: 137923 - DNA, 1603 bp, Zea mays
  Clone ID: MRT4577_57262C.1
ccggccgggccggctctttccttctcccctccgtttcgaaaaccaaatctctctgtctactaggcgggagagtgagacggccatggcggaggcgtccggccctagtaccggcgcaaggtcccgacgaggcgcccctcgatgcgtccgccattcatagccgggtggagcagctctcattgaaaaggctggaggtggagccggaggcggaggtggcggaggatgaggtggcactaggtttggactccacgcacaaggcggctcaggatgcgatggatgagtgggactcggccactgctgcggtttcaattgatgatttggatgcatacctggaacaactgagaaaggatgtagccatggcagagcaggggaatcagaaggtatctggtgagattagtgtcactgcagagacaacattcaatgatatgattcaattggatgttggtattgaaatgctggagtctttgatttcgaatcttggtccaaaggctttgaaccattttgatgaaagttctgttctggggctgtcagactcaactgattcatgcagaaatcgaagcattgctgacaaggactacatatatgagttggaacttgatcaccaaatagaaaaaagtacgatggaacttgaaattttacaacatctacaaagggatgatgaaatgtttcaacttgaatctaagttattgccatttggagcgaagatcttagactttaaagacgactgtctcaggatgttcctcaaggcaccaatattgacctcagattgtgaaatttatggacagaagtttaattgttctattgattcatttatttcagaccatgagctgctgatagaaattgataaaataaatatggaaccaaagaaagtacagatcattcctgatgacatgtctgtagatatactgattgagaggatggagtcctccagagatacagtttgttctccaaccttgatatggctaattcagcaatgccaacaccagtctataatcaatgctttgagacgatcattggtgaatgatgctaatagttcgaggcattgttttgagtacttaaacaaaaaggagatgattgttgctcacttagatcgtggtattgatgtctccatcaagatgtcttcagattggcctctttgttcctatggcctgaagctaatttcgatccgcaatgcaggggatcgtccaacaaatattgcttcaactatactttgtaagaccaaggaactggccaacgaattggagccgcagattcggcaacatcttctaacgcttgtggatgctgttgaagatattatcattcgagagctgcggtctcgttaggaccacgctgtcgacaggaatagctttgggggataatagacagcctctactggctcgtggatcaatgtttcactttcacattttgtacagaagcgactctatcaccgttacgcatctacggctgatttttttagtgtctggcgcgttgccagaaaagagaatcttgttcaactttattaagtttgaaccgtagcaaatttgaccagtcatgcctgattcctatacttgccttcatccttttttggcggcatgtattattacgagaatacactcgtttccattgc

SEQ ID NO: 137924 - DNA, 141 bp, Zea mays
  Clone ID: MRT4577_57263C.1
gggagatgtgcttccagttttcagcattataaagatggggggtcagtacttggggtcgcttggctcaaaaaaaaacttatgtctgcttacccaacatctgttgaaaaagccaggggaaggattttttggaccatttcattg

SEQ ID NO: 137925 - DNA, 471 bp, Zea mays
  Clone ID: MRT4577_57264C.1
cgtgttgttgcatcataagtctatctctctttattcatcatatatagagagaggacggggctacagataatgggcccgttcttcccgaggtcggctgacacatacatgcaccgcagcaacttagtcatggagataatattagggtaattgactgaggaagatgtattatgtactgccgatctggcactgcttaattattcgaaccatatagggctcaacggctgttcgctgccgcataagaggccaatttcttcccgtgagacgctccccttggggtctacatgaacatggggaacacgatagcttgcagggggccgggcctcttgggtctgccgtgggaaccagttgacgagcaacaggacgccggcgccggacacctatcgcgcgaccatcgtcatgtagacctgcacgaaggagcctctggagggcaagaactagttggtgatcatatggaaccgcaccgacgtggac

SEQ ID NO: 137926 - DNA, 167 bp, Zea mays
  Clone ID: MRT4577_57265C.1
cggacgcgtgggcggactcttggttttgtccgacagtgcctgcatgtactaggagcttattgtggatgctttaccagtcagacaaggctcactgacatagcgatcgtgttacgtttgccaaaatagcggttatgtaaggctggttacgttctaatgcaacaaagtgg

SEQ ID NO: 137927 - DNA, 415 bp, Zea mays
  Clone ID: MRT4577_57266C.1
actattaacttattttcattttcattattggatcaaccataacaatttatgaatgtacctttggctcaaacgaaagtaaggctacaaacgggatgcaaaagcgaatgcccagtcagggtgaacaggacgggggcactgttcatttatttataggcacgggacgcagcccatgtaaaattacacccatgccctttacatttgctaatgattctatagggatccatcgagggctaaatggccttttcccttttaaggcggttcttttttccgctatcatgccgaaactcccttgcgcgtagcttcgggggtgtttcatttcatccttcggattatttccgggctttttcataccgggggcttttgttcgaagatccctgtccacacattatactccaaaggcattgttaaatcatgt

SEQ ID NO: 137928 - DNA, 157 bp, Zea mays
  Clone ID: MRT4577_57267C.1
aattaactggtccctataattaactgatccccctaatttattcctaagctgggtatgttccacccaagagccaaacgcagcgactcgactacgcttagcgcttggttatcatttgggaatgggtgtgtccgacaaccgaccattgggtacacccaaa

SEQ ID NO: 137929 - DNA, 853 bp, Zea mays
  unsure (1)..(853): unsure at all n locations
  Clone ID: MRT4577_57268C.1
cattgggtacctcgaggccggccgggatgcccttcccggcccaggcatggcgccgcgctcggtgagcctgctgcttctgctgacgctcgtggtggccgccgtaggagccggagccgacgacgaggccgcgctgattgcctttaaagccgcggcgatctttggcggcgacacgcttgcgtcgtggaacagtagcggtgccggcggattctgcggctgggtgggggtgacgtgcggcggcggggccaagcaccgccgagtggtggcactgagcctgcccttgcacgggctgagtggagcactctcgccggccgtcgggaacctgtcgttcctcaggactctcaacctcagctccaacgcactcagcgggggcatccccgacagcctcggtcgcctccgcctgctccgagaactcgacctgagctccaacgccttctcaggcgagatccccgccaacctgagctcctgcaccagcctagtcctcatgcgcctccgcttcaaccagctcaccgggagcgtgccctacgagttgggtgagaaactgatgaatctcgtggtgctcagtgtttggaacaacagcctcaccggcaccatcccggcgtcattagccaacctgtcgtcgcttagcatcctgtcacttgngttcaaccagctccacggcaccatcccgcctggcatcggcgccttccaggccctccagcacctcgacctncacgacaaccacctctctggcgaacccccacattccttgtacaacctaacctcgttggaaaggttccagctcaggcctcgttcggttgtgcccaacccagncgggatgagaatggattgggagtgaatcagattgaatcctggc

SEQ ID NO: 137930 - DNA, 463 bp, Zea mays
  Clone ID: MRT4577_57269C.1
gggggggggattaataccccatacattagaatcggaaaaaaagggctcggcaattggatacccgacacaaacccgggggcgaggacaaagggggctgcatttggttaatacaataaccccagggatgaattcgaagacgtacgagtacctacgtatacctatatttggatacccgagggggaatatataagggcccagcagcttctagagcagcacatgggggggatcataaaccacgcacggaccgggcgggcataaactagctagcatgccctggccggcgtcgatcgaacgaaaatatgtcctcaaaagcacatgtcgagggcccaacaacagcagatgggggggcaaaatcctttccaaaaaccctcccccccccgggtgctgctgggggggggtgtctgctgctggccctaataccccccgcccccctcctgggccgttggcgggtaccccggcgggg

SEQ ID NO: 137931 - DNA, 535 bp, Zea mays
  Clone ID: MRT4577_5726C.1
aattcggcacgaggctactcatcatatgattcggcgcacaccgcgctgttctactcacgagacacctcgtcatgccgacaccggtttccgagactcttgatggagtgcacgcacgggacgcggcgagagcacttgtacctgactctggatgattcaggaggcgaacgactcgaagccttcacaggtctgccacggagccatacctcttgctcgctgtggggctggcgcactaggctgccatgcgtccaggagcctgaccatgcgatctattcgtcgtctgaatagtgatacacacaccataccccgcgtctactacaggctctcacttggagctgacatgtgctcagattcagagccctaacgcctttctacggatgaaataagattaactagttatacgagtacgagcacttgttggatctatatctgaagaaggacgagctttacacagcgaggggatcaccggatgatgtaagatgtttcgactcttacagcttaacagaggagaatggaaccagctactagtctagattct

SEQ ID NO: 137932 - DNA, 434 bp, Zea mays
  Clone ID: MRT4577_57270C.1
ggggcaacaaaaccgtttttggggttccaaaaccaaaatttaaccccccgggggaacctggcttttaaatttgggccccaataattcccttttattcaaaaaccaaaaggccccccccccccccccttaaaatcaaaactaaaacctgccccccaaaaaaaacccccccaaagggtttttgtatccccttttcctttaacagctccatttttagcatgttggggttcccaaacccccccccctggtttgcttgacaaaactaacccgttttttaatttgacaatcaccctttcacggccccccccccgggtgcctgactgaatgggggtttcatctcccccaaagcatttgggggtttaggaatcccccccccaggaagggggccccctgcttggctgattggtgttaacaggatatttgcccctttgacttgc

SEQ ID NO: 137933 - DNA, 2653 bp, Zea mays
  Clone ID: MRT4577_57271C.1
atcttctctcccttctaggcttctacatctggccgccgctgcgctacaccccgcgcggccgtgcctatggccgccaccgctacgctccaggtgacctcccgcggttccacctttctctcccttcctcctcccatcgcatccccagtctatctatcctctccgcccacctctaccgtagcagcgcgccaccacctcctcgtactatgtctggatctctgagcccacctccatcgaggagcgccgccgtctcctgctccaacggcttcacctccgacccgtcgcctcccccgactcacggctcgcctctacctcctgctccagcggcgttcaacgccgccggtatgggcgatcttcgtcgctctggtggaccacgcgacggcggtggcggatagcaactcaactaggaagtacttcgccacgacggtgatggacttccagcaacggttcgcgttggagtccgttgctggcatctcgcgagatgccccgacccatcatccatttcacgcgccagcaagaaagtagataagaacacattgcattttcagtttttgatgtcgaacacaatcgttcagctctactttctctgcaagtaaccacaatactttattacccatatgcatgatcttggtcgtgtgaatttcatagagctttcaaccatacatcttcttgtcatctggtctgcaaacaaagtggaaaagaaattgggccacgtcacttcataaccaccctgcattcccatctagccgtcgccactcgccgcggctaacccagctcccagcccccgtctcgtcgccatgggaaccaggaatcttacgcggaaccgcgccgcttccatggcgacggcatccactacgctgctcctctcccttgccttcctcgccttcgcctgggcggcgtcgccgtcgccggatgcggaggcgatctcccggttccaggagtacctccgcatcgacacggcgcagccggcgccagattacgccgcggccgtggccttcctccggaaacaggccgccgaggctggactcgaggcgcgcacgcttgagctcgtcgccgggaagcccctgctgctgctgcggtggcccggtcggcggccgtcgctcccctccatactcctcaactcccacactgacgtggtgccgtcggagccgaacaagtgggaccacccgcccttttccgccgccctcgatgagccatccggtcgcatctacgcgcgaggctcccaggacatgaagtgtgtggggatgcagtaccttgaagccattcgccgtctccgttctgcaggatttgttccagatcgaaatatctatataacatttgttcctgacgaggagattggtgggcatggcggtgttgaaccatttgtttcatccaaggagttcaaagatatgaacgtggcattagtccttgatgaagggcttgcctctccaggggaggagtaccgtgtgttctatgcagagcgtagcccttggtggcttactataaaagcaacgggcgcaccagggcacggtgcgaagttgtatgatggtagtgcaatggagaatttgatgaagagcgtggaggctattaggagattcaggacatcacagtttgatctagtgaaatctggagagaaggctgaaggagatgttgtatcggtgaattttgcgtacctgaaggctggcacacctacaccaacgggttttgtcatgaatcttcaaccatctgaagcagaggtaggtcttgacatccggatccctcctagtgcccatgtggaagcactggagaggcgccttgttgaagaatgggcaccaccttcacgcaacctgaccttcgagtttaaacagaagatgtctgtcctggacaactttgggaagccagccatgacagcggcagacagcacaaacccatggtggacgttgctcgaagaagctgtgaagagcgctgacggcaaactcggcaagccggagatattcccagcctctactgacgctcgctacttccggaaaatcggattaccagcatttggcttttcacctatggcgaacaccccgatactgctccatgaccataacgagtttctgagcaaagacgagtacctcaagggaatcgggatatacgagtccatcatcagggcactggccactcatgaagatggcggcaaagatgacgaatccagggcagagctgtgagcctgtgactgaggagaaccttgaaccttacctcgcttttgccgcagaccaaatggagcactggaagtcatgtttcggcattatgcagctgcctgtgcttctgctgcggcgtcggagcgatagaaccacaaacatcatctttgtacattctcgcaagagggcttatgcgcttaataattgatgaaattgagatatgtagttcgtctgcgcagttcagggctcaccctgttgctacttgatgctgctttggcattggttgttgtatcaaaacttatatttacgttgcttcgtgcttcattgcttttgtgcctttgttttcatttcatatggtagcatgacagtcgattatgcacaaaatcctcacaggggctcgtttagaaactcattctcttgggatgctctttcatttactagggtgagcaatcccaaagatatcatttgaatctatctatactactattatataggaggtgtttagtttctat

SEQ ID NO: 137934 - DNA, 375 bp, Zea mays
  unsure (1)..(375): unsure at all n locations
  Clone ID: MRT4577_57272C.1
gctgacgagcttattaattcccagacatttttcttttgtatcgaccttttttgnnnnnnttggttgaaccgtcaccatacaatacctctacaaaaagtagactgcttgcctgttccatagaacggaagactcgtgagacaaccgtggcaggcgcaagcttcacggtattttagcctacaggtagcgctcgataccgtagaccgaggcgacaaactcngcaaccacacaccacggtgtgaagcctgactaccactaaaacggcggctacaagggacaccccaaagaccgcgcatgcatgcatgcatacgtgctaagagacagaagtacgaatcattaattgaacgcgccaaggtggtacctttgtaatttcatgac

SEQ ID NO: 137935 - DNA, 522 bp, Zea mays
  Clone ID: MRT4577_57273C.1
ttttttttttttattttttttttttttttgtttttttttttttttttttttttttttttttttttttttttttaatttttttttttttttttttttttttttttttttttttaatttttttttaaaacccaaacaaaaaatttaatttttttaagaaaacaaatttcggtttagggcccccattgccggaccccttcaaaattaaataaaaaaaagggcccccccaacaaggggtttttcaaaggaagggttaaaaaaaaaaaactggtttaatggaaaaaattttttttttttttcaaaaaaggaaccccccaaggggtaaccccctcccaagggataaaaaaacttttgccccttttgaaggcccccacaaaattttaccacacccatttgtttaaatgaaaacaactttttaaaaaagccaaaaggttttcccaaaattagctaataaaaacctggaacaatttgttccaaaaactttttttgaaggccccaagggccattgcccacccgaggcggcct

SEQ ID NO: 137936 - DNA, 299 bp, Zea mays
  Clone ID: MRT4577_57274C.1
aggaggtcatgtggggttgaactgagccgagacacctacaacaccctgatagctgcgtacggacggtgtggctccaggactaatgccttcaagatgtacaacgagatgaccagcgctggattcaccccctgcatcaccacgtacaacgcgttgctgaacgtgctgtcgcggcagggcgactggtccaccgcccagtcgatcgtaagcaaaatgaggaccaaggggttcaagccgaacgagcagtcgtattcgctgctgctccagtgctacgctaaggggggcaacctggcagggatcac

SEQ ID NO: 137937 - DNA, 419 bp, Zea mays
  Clone ID: MRT4577_57275C.1
ggggaaccttaaaatacaaccattggagggaatttatgggtgtaacataaaaacatgacaccctaaatttttgttggcaggagtaagctttttacatgattttgcaaattaataataacaaagattggttaaaaaactacaagataaagctgtttttaagcttcgtttgattttgtataaaaaggatattaactattttgggcttaatttaagttagcctaaaaatccgtatttgaacccacttttgaagctttggttttgggggaaggggggaaatgactactcgcagccctggtaggggaattgcttttttttggaatggtagccccagggggtttttaaattattccagaaataggtaattttggggcccatttaagaacattattaattttgttggaaacctttttttggacctg

SEQ ID NO: 137938 - DNA, 202 bp, Zea mays
  Clone ID: MRT4577_57276C.1
attgctttgaacggcaactttgtgaagcttgtgtcctggtacgaggatacagcacccgagtggtcgacctgatccgccacatgaacatcaccaagtaaatgaacaaactgatgaaaacatgcaaagagtgatgaaagcatgcagagagagttgtgtttcttccccggaagtcgctccgagattaaattttcctaaccggatt

SEQ ID NO: 137939 - DNA, 306 bp, Zea mays
  Clone ID: MRT4577_57277C.1
tttgaattcggccgagggggagggggggcggggggtgcttgcaccttttgttgtgctcgcggtgggcttcgacgctcgggtgcgctcgggtggctggtgggtgctggtggagtgtgtgtaagggacctagtgcgtctgcctgtgcccctgttaatcttgacgctggtcttctggggggggggttcccgtgtggcttgcttgatcgcgattgcctgcgtctggctggtgtggcttctgcctacttggccggtgaccacttgtgcaggggcgctgcggggagagacgcttctgctgggcagaggacct

SEQ ID NO: 137940 - DNA, 282 bp, Zea mays
  Clone ID: MRT4577_57278C.1
gggggggggtcacacctttccaaaccaggttttggaaaagcccaaccagggaatccaatccccaatccccccccgtggtttccgaaaaaggaaaaaaggaaaacccccccaaaagggcccaattggggatgcccccataattaaaagtccagagggggggaataaaccggggttggcgggttccggtaaaatattaaaggctaccggggggcctgggcttggggtttaatctttcccaaaggttttccggctcccttgccccccgctagggccccgccgggg

SEQ ID NO: 137941 - DNA, 824 bp, Zea mays
  Clone ID: MRT4577_57279C.1
accgccgctccagaacggaacgaacgaaaaatccccaaccaatctcgtcgccgatcaaccctaggctcgtcgaatcctcctcccccaccgcataagatgcagatctttgtgaagacattgactggcaagaccatcacccttgaggtggagtcgtctgacacaatcgataatgtcaaggccaagatccaggacaaggagggcatccctccggaccagcagcgtctcatctttgctggcaagcagcttgaggatggcaggacccttgctgactacaacatccagaaggagtccacccttcaccttgtcctccgccttaggggaggcatgcagatcttcgtcaagacgttgactggcaagaccatcacccttgaggtggagtcgtctggcaccattgacaacgtcaaggccaagatccaggacaaggagggcatccctccggaccagcagcgcctcatctttgctggcaagcagctcgaggatggcaggacccttgctgactacaacatccagaaggagtccacccttcaccttgtcctccgccttagaggaggcatgcagatcttcgtgaagaccctcactggcaagaccataacacttgaggtggaatcctccgacaccatcgacaacgtcaaggccaagatccaggacaaggagggcattcccccggaccagcagcgcctcatctttgctggcaagcagctggaggatggccgcacccttgctgactacaacatccagaaggagtccacccttcaccttgtcctgcgtctccgtggtggtatgcagatctttgtgaagaccttacccgcagacatcactctgga

SEQ ID NO: 137942 - DNA, 963 bp, Zea mays
  Clone ID: MRT4577_5727C.1
gcgcggtaagaacagcttgttgtgcatggggagcatttactgagagtgtgagaggtcgagtgctggagcagagcccaccaacttggcaacaaaacctgcgtcgcaagaacgtcccctgcatgaaccacattaactgcattcgcgtttcttcaggtacgaggtcacggtcatggtcacggtgctaacctgcagcttcggttgccctccctccctcccgtgcactgtgcagctgaaggggaacgtgagccgcgaggtctccggtgccggcggcgaccgcgcgcggcggatgctggggcgggactgccagcttatgggcctcacgtggctgctggccaagaacaagacggcgtacatccccaccgtctccgccgtgctgcgcgccatgctctacaccgcgcgcccgacggaggccgccggcgcggcgccgcggtgcagccccgaccaggagaacatgccgctggccgtggactcgctgcagttcgagcgcgccggcagcaccacggggtccgcggctgccaacgcgacgccgcgcggcgccctcctcctcagcctcgcgctcggcctgacgatcggctcggtgggatgatgcgttcttgtgaaccaacgcaaagaggtctggaccgctgcagggcgtagggtcggtggtggaaccttgtcgatacacgtatcttgtagtgctagtcgttagcaggaggtactgtagcttattttgcatagcgaggatttggcagacatgacggcatgcatggctgtgaaggcgatcgtggtgctgcagatggctggcctctgcaaggggaatgttgatgtggcttttgacatttctaatctcggtggtttctaatcgtgtgcgattgaccacttctgtttttgtggatgaagaagtgctaatgcaccatttggatgaacttctgattgctgaaagacagaactgtttccgaatacaatggttgatggttagtgcct

SEQ ID NO: 137943 - DNA, 306 bp, Zea mays
  Clone ID: MRT4577_57280C.1
gtcggcgccgtacggcggctatggcggcgaaggctggggctacgactcgctgaagaacttgcagcagatcagggccgccgtccagacccacctcatgctgggtgacctcaccctatgcgtggcgctggcctcggctgcggtgggcgcggtcctgcacgtcggctggaacatcaacggaatgctgaccatgctcagcttggtcggcagcatcgcctgactcttctcggtgcccgtctacgaggtgtggaagaggttctgactgctgatagcgggtgcccttctggaaggggcaggggttaggacccc

SEQ ID NO: 137944 - DNA, 503 bp, Zea mays
  Clone ID: MRT4577_57281C.1
ccagcgttccacgctcgctagccattgcaccgacgctgaacacccactcactagggcttagcacgccatcgagcaatgactgatgacagtgatcctctcccgagagcacctgccgctgtcgtctacgcacaggaccaagctcacctcgaaccagatcttgactcctgccgctgcattagtatgctccctccatagtactgctactgctcacccccactgaaaactatcaaaaagatagggtccactcagcacgtcagcttcgcagccgccgcatcacaacatgaaattcaaattgcatgcaatgctgatcaccaggtctgaatcacctgatgtttcttgtgccacgatcgtacctccaaaagcatacttgacgagatctctgccatgattctatgcgattagtgaccatatgtacgaaacggacctaagaacgcacacagaacagagagtggacacatcatatatttctcatagtctcatgacccataatactggccaaactg

SEQ ID NO: 137945 - DNA, 593 bp, Zea mays
  Clone ID: MRT4577_57282C.1
gttgcctgtcgtctctccctgctcgggtgcacctaaggctctgacctttttccccacttttccttggcatctactgccttgtccggtgttgaaaacaacggatttcgttgtgttgttttgctgcggtttttgtccccacgcttctccctagtcacgctttgcggctcactttgcggctttgtggtgggtttcggattaggaaggctcggtttttggtctgggaaggccccccttccgcaggcgatgaatttggtgcgggttgatggcgtcctgtcaggagtccgctatgcaatgatgggttctttgaagccgaggtgaatctttgacctgcctagtttgctattccaaattccgagctcccaccgcttcttgatccgccgggcgccatgggcctttgctacggtctgtcggcggacgtccatgagccggctgtagcggaggagaacaacaaagtcgatggcgcggtggcggtccgaggcgatggcccgcccgagtagcctgtgaatgtgcctcggacgcccaagcagcccaagttgtccttttacttgccgagcccgctcacgccctgcatctacaagggctcttcggcaaac

SEQ ID NO: 137946 - DNA, 1099 bp, Zea mays
  Clone ID: MRT4577_57283C.1
gggttcacctccttggcctagtcgtgcatgcgggcggatcccaaatctgaaataagagaacctttattactgttcactcagaggacccgcctccctgaattcctcgccgccgtcttcgtccaccagaaccatggcctccgacaccgcctcggcagttccgtcgtctgtggtctcagctgccgaggagacgctcggatataccgaatccgtaggggaccatctctcccatctgctcgcggcggcggcggcggaccccgacgccgtggccgagctcccaccccttctccgggcgcgcgctttccttgccttggcgcaggccgcgacctcccttctcggagttcgtttaaggtgttcgggagttgaccctgacgagcaccccatcagaaaggagtttgaaaggttaagcctaatgcaggagaagttaaatcaatttgagaactgggacaaagcaccacttcgcccttctactacactaaatacacaagcagcagcaaggttcattggacactcactttcccatctgacatccgatcagaagaggagcatgcatgaaataagtagaggagaaaggcggagttggtctgggcagaagagaaagcctgaaccttcagtagaaaagaagtctgttcgtgctgctgcagaagagttccttgcaaaggcttctcaggaacttattggacatagtgatagcagggtcaagggtcctgttatactcatttctgatgaagatgaggactagatcaaaaaaatgggcgcttaccagattacatgcctgattcatcggctaggataaaggaaggtagaagttcctggtgatgaagataaacttatgtacattgctgtggtgatgaagatgaatttatctgcattgctgtgttgttctacatgtaacagggaatggagcaaagctgcataggcttgcttaagtccccagttctgggagcaattggcctcgaatcttgagtgcaatttatctgagtttctttccggaaagaattttgacattctatttgctagtggaactggagcagcaacatatgatttatgtgctacagtacccccatataatgagtgctatctatctatatattcgaatgac

SEQ ID NO: 137947 - DNA, 469 bp, Zea mays
  unsure (1)..(469): unsure at all n locations
  Clone ID: MRT4577_57284C.1
atataagttatcatgatattatatgttcccgttgcaacgcacgggtactgacatagtaattacagaagcaagcaagcaagcaaccagatgcatgcatgcatgcagcaactaaaaaaattacatgtcctggggggattatatactaatcaatgccgccgctacggatcatttagctagctaggcgaaaagctcgagcaaaaagggcgggtcggggggggccccccgggccccctgcaacgcgttgtcggcgccccaaacccaggcgttgggggggcccgtcgtcgtctcctcgcggggccgccttatgtgtccgcccagggcctgccccattttgaagccgagcccaaaaacgtggcacttgtgctgcgcctgggggttccttttttcaccttcttcttcgccgccgccgncggcggcggcgttgccggcctgctgataatgcttgggctggtgcctgagcgccctgggg

SEQ ID NO: 137948 - DNA, 768 bp, Zea mays
  Clone ID: MRT4577_57285C.1
ctctgctctgctctctccccccatctcttgcggagaagcaaagcgcggctcggctcggcgaggcgagtctgcggcggcgagatggacggcggcggcgaggaagggaaccagcagccgcagctggtgctggcgcacaagctgttcctcctctcgcagccagacgtggacgacctgcgccaaggtcggtcgtccgcgacgacgtcctcgccgcagtgaaatgcgatgacatgccgagcgctgtacgagacactggtggacgacgaagtgttgaagatggacgcgacgctgctcgctcatatgggcgcccggtatcgaggtatgagagcgagaggtgcgactagaatatcacggttgctgatcacaattagcaagagatggaaaagcgtgaagcccatctaccctgatccttagatttcatatacggttagctcacaaggagaagatgctggactcctgtgaggacactgaaagcttatctggacatgtggggtgaaatatgggaccaggtgtcaactcctagctgatgctgctatgccctacgtactcaagctctcctcacagagagctcctgatggtgacaatgtggacactatacgtcgggatctggcagatgagaccatatttgtggtcattgaagagacactctacctgcaccatacatgtccatcattcgagacaaggctctcactctccactataccagctggacgagtgatatatggtttcactgatgaccagttcatcctgactgcttacagatgagcgata

SEQ ID NO: 137949 - DNA, 235 bp, Zea mays
  Clone ID: MRT4577_57286C.1
gcagtcgcggcggggaccaagttgcttccgaacatcctgctcaccggtacaccaggggttggaaaaaccacactaggcaaagaacttgcgtcaaaatcaggactgaaatacattaatgtgggtgatttagctcgagaaggtcaaaggtttacagtacagatgcctacttctcagtctccagctgaaatagcttcaattcctgcaacctcagcagttcagaatgttctgattaatc

SEQ ID NO: 137950 - DNA, 200 bp, Zea mays
  Clone ID: MRT4577_57287C.1
ggcgcacaatagttcagagccggcgcaaatgcgggggcggcactaaccacatcacactagcacgaccggctgagaatgccaaacacacacccaaggaaccaaacgagcagagcacaaaagacaccgaacctacgaacaaaacaagaatggacaaaaccactgtttcaaaggcaactctcataaagaacgggggcgggaga

SEQ ID NO: 137951 - DNA, 405 bp, Zea mays
  Clone ID: MRT4577_57288C.1
atatgctgctgcctgacctgtataatctccgatctgggcgtccatgaggatttggatatgaacagaggcgctaccacagaggcaatcaataccttggtggcatacaagttccaatcaaagagggttcatgatggggatgtgggaggagatggtggtggagctttgaaacgttggaactgacagaaagcgagctattactagactaaaagctctatgctgtatctgcttgatcacgttttaatactacgaagacctgggcgaactatcctgtgcacatgcattccacacggaatgcatagataagtggatccagatgaacacgttgtgtcctgtatgcaaggctgagatcatgggatcataagcgtcctgtgatccatagagtgactatgaggatcccgacaacac

SEQ ID NO: 137952 - DNA, 415 bp, Zea mays
  Clone ID: MRT4577_57289C.1
gtggcgacgcgtcatttgctaaggcatccgtgagggatatgcagcagactctcacgacactaacagcgccgtgcagagagaaggctgtccacttagagtcaaagtcagctgataatcgtgtactccacgagcagctacataagaagaattgcggagatctacgattggcaagaaaaagttcttcaccgttgcgcatcaactctgcccaaaggtggatatatgccgtgaaaaggaaactgattgtgctcagcgcgagactattgatccgaaatttaagcttcaggccaaaggagctgagatccctatgctgaagtatgatcctttgaaaatgtctgaggaacattgcgactgaaccaaccctatccataaattaagggaggatactgtgtatgcataagaattggctttttccgct

SEQ ID NO: 137953 - DNA, 1277 bp, Zea mays
  Clone ID: MRT4577_5728C.1
tccggaattcccgggtcgaccacgcgtccgctcacttctatacttcaatccccttcctttatttttttttttgggaggggccgaggcaaccgtcgccactccgacgatcccgtcccatccgccgccgccgccggagatttcctcgagataagccatgggtcaagcactcggtttggtacaagtagatcaatcgacagtagccatcaaggagtcctttgggaagtttgatgaggttcttgagcctggatgccactttttaccctggtgcatagggaagcagatcgctggatatctttccttgcgtgtgcagcagctggatgtccgttgtgaaacaaagactaaggacaatgtttttgtcaatgttgtggcatctgtgcaataccgtgctcttgctgagaaggcatcagacgccttttacaggcttagcaacaccagggagcaaatccagtcgtatgtttttgatgtgatcagggctagtgttccaaagatgaacttggatgatgcatttgagcagaagaatgagatcgcaaaagctgtggaagatgagcttgaaaaggcaatgtcaatgtatggttatgagattgtgcaaactcttggcaggggcagagccggtaaaggacatggttgtgcgcatgtatacccgataatctgctgggcgttcgcgaccgcggcaggcgctgcacacgctgaagcacagataatgcatttgagcatgaaaacttaaatagtcaaagctgtataaaatgaacttgaaaaggcaatgacaatgtatggatacgagattgtgcaaactctgattgctgatgtggagcctgatgagcatgagaagagagctatgaatgagatcaatgcaaatgctaggatgagattggctgccagagagaaagctgaggcagagaagatactgaagataaagagagccgaaggtgatacaaaatccaagtacttggcgagaatgggtatcgcaagacagcgccaagctatagtggatgggctaatagacagtgttcttgctttctctgagaatgtgcctgggacctctgcaaaggatgtcatggacatggttctggttacccagtacttcgacaccatgaaagagattggggcctcgaacaagtcctcgtcggttttcatccctcatggaccaggtgctgttagagacatcgcagcgcagataagggatggtcatcttcaggccagtctgctgtgagcacgttggaaaaagcatgcttttgacattcccatcagtaaaaaagtacatatacatcatgaggagt

SEQ ID NO: 137954 - DNA, 2330 bp, Zea mays
  Clone ID: MRT4577_57290C.1
ctcgataggacaaattcctctggaatttggttgatgctgaacattttttttctgagatgatgaactgtatgtacaaagtacaatgacgaggcattgatcagtatgacatcacctggagactattcgttgggaaaacgtagatggcccgattggggcacagatcagaaaacgaacacgtctttacattacaatgacctttgttctttagatgccttatagcaaaaaaaggtgatattctatgtacagttgatcatcggccacaagcttcagcctcaaagtcagggaagacgacaaacgcaatggtcagaggagcaacatagattggcgagttaactgaaacttccactggatacaatgaagggatgccaccatcttcagtgagctcaagaggggctccattcagcagcatggtccgggcaaaagggttcccatctttcgacgagagatggtactcttccctcttggaaaacccatcggaggctttgctcccgacccaagaaaccgtcctcttcaggccatggacaaaggcactgtccctcctgatcccttgcccttctgcgaggttgacatttaggtcgttcctgactgagaccatgaagcccatcgttcggtgcaggttcagcaagagaagagtgacgccacccttttgcttggcgcaatgcacgtaggcgcgcaagtacgaagaaccactgatgtctacagaaagaactcctgtccccatgagctgatgccacaacaaggcactgtagtaatccgggtttggtacgaaagtctcggtgtcaagaaggccgtaattgccaccaatcagcgtctgtctgcagtagaccttggtgtcatactttgctgactgacccagctgatcaagataccagaagctattgagaaaagtattggacacgagccggctgccactgttatatgcaccaccagattcaccaacccatggagcagaccatggtccatggcgctgtatggtgagttggagacttctgaatgtgtcggaagtccggctcagatactgcgggttcaaaattctgtttggaacctgtggatcattaccagcaccaagattgtaaatatgatgagtcattgcgttgagaacatttggcccggagacatcgaggagctgagcaaaccatttctggtcataaaatcctcctggggctacaaccagtggtttgttggaatctccgtatagctcgctgatgatggtttggagttcaactagatcttttccatattgttcagctgacacactcgcaccaactccacttccgctcaattcattcccaaattcccaagaatcgataggatagttctttaaaacggtatattcaatgaattctcgagcattgctagaattccagggaccaccccagacaccttttcttgtctgctgtcttcctcgaagcgcgttgagaccgaatgtaacaactgcaccagttttcaggaacatatcattaatatcatcccatctttccaatgttatgcatccttgagaaaacccaaaaaggccacttgaaacctttgtaaatgggtcgcatggcaatcctaaatttggtgtgccatataacacttgatcttgtaaggagcctccaactctgatgcgcagcggactgaaggcttggatagctttagccagcaaaggattagtcaagtccagatttaagacagaagccctttcccatggacactggtcgtagttacacttctctggaggccaccaatcaatggtggcgcaaacaaactcatcactggtcgaagcaatcgtctcagagcctcgaacaatgacagttgcatccgcgtaatcctctgatcgaacccgcgcaggtagacagagcagaggcaagagaaagagagaccataacctcatgcttccagaacctgaacagacgcaacgagcccaagaacgcccgcgagtcggctcaggtactcctccccagaacgtccaagaaaaggacctcctctcgtcccaatgcaggcggcagggcaaatcaagaaaagctcgagcctttcgccgctgtcacgggtccccgtcgctcgtggataaagagtgggtgcggggaagaagagactggagattctcgaggaaacctcgcggtggttgccgcttcgctttgtactgtatccactctgcccctttcttccaagctactccctccctaccctccgtgccgaaagaaagctacgcagcagctctacatccaatagtatagtgggattactaacaaacagcgatggttttgttcgcaccacccgtgtcctgaaaagtcacagctgcgctgttcttttcagggagactgtcgtttggtttggggtagaggacacct

SEQ ID NO: 137955 - DNA, 236 bp, Zea mays
  Clone ID: MRT4577_57291C.1
cattacaaccaataaatagccaagcgaccgccccagaacaagggcgggccaaaaggaggggaccgacgcacaaaacacggaaaacaggggacagcaccagcgcgcaccgatccagacgagagcgcaagcagaagacacagcactcaaccaacaccacgctggactaagacggcagcagcagcaagcggaccatcggcacaaccaagcccaagcgacgcgcccaagaacaccatgcg

SEQ ID NO: 137956 - DNA, 243 bp, Zea mays
  Clone ID: MRT4577_57292C.1
atggctgagccccaatcgcggcgcggcgcggatccgaggttggtaacgatgaccggcgagaaattgcctcggaccccgaaatccccacgcccgcaggttcacggcacaagtgctacgatcctcgacggcttcccggacacggttcgtgcacctggaattttggcgaagacgataatggtgctggcggtcgattcccagccgcagttcaagcctgagccacctgcacttgccgcgatttgctag

SEQ ID NO: 137957 - DNA, 732 bp, Zea mays
  unsure (1)..(732): unsure at all n locations
  Clone ID: MRT4577_57293C.1
ggccgctttttttttttnttttttagaaataaacaatagttatatttggaataaatatctcaatacctattatatgatatataacaaccgtagtagcacgggtaactggatagtacaacacatatgaacggtctggacaatccagtttctgcccaattttttagacccatgtacagagtacaccggagtatctctcgcctacctctacagatcctgtctctctgcttgtgcatataccccactcctgttctcctgtccattaccctcaggtctaaagcatatatactgagctagttcattggatagcttagcagcaaatacctgtgaccccggaaactgtctaattgtctgcacctcagatttatgcctccaaaaggccccaccaaaactgtctccatgatcaactacggcacctaactggttagctgaattaaccagttgtgacaaaaatcgcatccaattatgctgcaacgattactgcaccatgcgcttcctcttcgatcttttgcccttcttccctgagtaacttggaagtttcttgtcgctgctagtagatgncatcctccacaggccctccctcttctatcgtctcatccgactcttcatcatccatgtcatatgtcgatgacgacgcatctgaatctcctgcagcaagtgctttgctgnnnnnnnnnnnnnnnnnnnnnnnnnnnngctgcataaacctctctccggcaggttgagcattagagc

SEQ ID NO: 137958 - DNA, 288 bp, Zea mays
  Clone ID: MRT4577_57294C.1
gccacctgtttcgatttttgtaacgactggcccgctacctcccacatggacccggcgaaattgaattccccgtcaagatgccgaccaccaactactccacggtcagacccagtgctcattgactatgcctgcccatggtgcaaccttgacacaatcgctatgataagcggcaggtggtaacccacaccgcccaatcctaaccaagcactctttggagtaaggatccctaacacgccaaccgatcattttgtggggggcgtcccactgaccggggataaattcatcttg

SEQ ID NO: 137959 - DNA, 826 bp, Zea mays
  Clone ID: MRT4577_57295C.1
ggttccaaacaagcctttacaattaatcaattatataattatccttcttgtagtgtttagaaataaacaatagttatatttgaataaatatctcaatatctatttatataatatataacaaccgtagcgcaactggctagtacaacaaccggctagtacaacgtatatgaacggtctggacaatccagtttctgcccaattttttagaaccatgtacagagtacaccggagtatctctcgcctacctctacagatcctgtctctctgcttgtgcatttaccccactcctgttctcctgtccattaccctcaggtctaaagcatatatactgactgagctagttcattggatagcttagcagcaaatacttgtgtccccggaaactgtctaattgtctgcacctcagatttatgcaattatgcctccaaaaggcccccaccaaaactgtctccatgatactacggcacctaactggtcagctgaattaaccagttgtgacaaaaatcgcatccaattatgctgcaacgattactgcaccatgcgcttcctcttcgatcttttgcccttcttccctgagtaacttggaagtttcttgtcactgctagtagatgcttcctccacaggtcctccctcttctatcgtctcatccgactcttcatcatccatgtcatatgtcgatgacgacgcatctgaatctcctgcagcaagtgctttgctgaattttctcctgttctcttcttcctttagctgcctaaacctctctccagcaggttgagcattagagcgttttgctcgtcctgcggtaattattccaccggacgcgtgg

SEQ ID NO: 137960 - DNA, 524 bp, Zea mays
  unsure (1)..(524): unsure at all n locations
  Clone ID: MRT4577_57296C.1
gtctataaatgtagtttattaataaatacagaagtaaatgtgtttgtacaatatctgatcgatagaacaggcgacgaattcgtacattaggaagtaaggcatctgttgctacttgtgttacgcgactaaggcgtctcttcgcggagagacgactccacaattttttttgcaaatacttctttttaaacacctcaagatcatctatattaaacaccactgtacatgtctaccgaagagcaaaaggaaaaggcactttcaggttgtgcatatgatctgctcatctacagcacgtgatgtctgaatgtctgatggctcgtcgtcatcacgcttggcttgtgactcctccatatatgtaggttctaatgcagaaggtttcactttttcacgtaattgttgactagagttgtcttctttgcgaactgcaggttcacttgccagttggaaggctacacctgtcttttgtggttgcttgtggtggggcagctgtcngtgcgaagagcatttccaagtcggttggcttgttt

SEQ ID NO: 137961 - DNA, 637 bp, Zea mays
  Clone ID: MRT4577_57297C.1
aataatcacataatctcctccttatcaatgttatgacaagataaagagaatgggggaaagtaaacacacatgaaaatagtttttagtctttacttaacaattacaagaaactagaagggtgaacacttttgattcatgttctcacatgaaaatggaaatgagaagacgaaagattgattcttccttcagagtgaaagaccagattcttcatcctcctcgagagatgaagtgtagacgaagaagaaagtccagatcaaaccaaagactccaaacagaatccaacccaagaggttgttgcttagaccaaagggtaatcctgttccttctgttgacatcctctcatcaaccaaagccatcgcgggattgctcatcaccgccgtcaaagcagctgttgctgcagctgaaactccagcccccatgactgagacgtttccttgctttgtctccattgaacatctcactcctcccttcttcttacccattggaggcaaaccaagaacaggagcagagatggcgacggtaggcttgagaaggagagccggacgagcggcggaaacggtggaagcggaggcagtaaagctagccatttctctatttgctttcccttacgactgaaagactcttcaattgatttttt

SEQ ID NO: 137962 - DNA, 473 bp, Zea mays
  Clone ID: MRT4577_57298C.1
aggtatgtatatggcgcgttaaggaacgaaagaatgtcatgcacacgttgtcgttttgatcagtggtggtgcagattggagacgaccgcccgtgaagcgtcgaggaggagtgagacgaggacaaaggcggaggccgtaactgcgagcatgagcacggtgactaggcccacgccgacgcctggccgggagttgactaggaacgcctggaggactccgaccagctgctggcagacgtccgcgtcttacgtggggtaccatttctttttccacgccggccactcctagggaggatcccagccgcgctccgcggctttcatctcgtggatccgtcggcgcaagacgaccatccccttgtgcactatacgcccatcgtcgccggtgcaggcgaacttcacatagtcgcggtgggacgacgtgcaacgcacggaggaggcagctggtttcttattggctactgcgggtggcggtggggg

SEQ ID NO: 137963 - DNA, 277 bp, Zea mays
  Clone ID: MRT4577_57299C.1
agctgccctcgtcgttgcagaagctcgttacgcagctcccggataaactgaccactacgctggcgccggagattctggctgctgctgcggagtcgcaggggattaaagtcgctgagggcggcatgaagggtgcggctaagagaatgctctttgggcagaatttggcaaatctggtgaagaagccaggtgctattgtggggatgctcagggcgattgtggaggttttgaagtcgagatggccagcttttattggcatgaatgttatctggagtgtcgc

SEQ ID NO: 137964 - DNA, 1670 bp, Zea mays
  Clone ID: MRT4577_5729C.1
ggaacaccttgcctctccccactaagcttgtttaccacgcttgtactttctatacagacgccacgccacctccttccccttcgatatttttttggttggatctagcgtgacggcaaagacggtgtatcgaagggtcgacaatggttacgacgatcggtagtccatagcagcggcgggcgcaacttcgacccggttttcttcccatatatctgtcaaatccttctccggttaccctccatcggcagcaatttccgccatagataccggcgatcgagggcctcggacaacccaatcgacggagcagcgcggcggcaggagagggcaaacccttttcttctcagtactctacttgtctgcgcctggatcccctccgcaggaagataagacatgggtcaagcactcggcttgattcaagtggatcaatcgacagtagccatcaaggaaacttttgggaagtttgacgaggtcctagagcctggatgccacttcttgccatggtgcatagggaagcaaattgctgggtatctgtcactgcgtgtgcagcagcttgatgtccgctgcgaaacaaagacaaaggataatgtcttcgtcaatgttgtggcatctgtgcaatatcgtgcccttgccgataaggcatctgatgcattttacaggcttagtaacaccagggagcaaatccagtcatatgtttttgatgtcatcagggcaagtgttccgaagatgaacttggatgatgcctttgagcagaagaatgaaatcgccaaagctgtagaaaatgaacttgaaaaggcaatgtctatgtatggatacgagattgtgcagactctgattgttgatattgagcctgatgagcatgtgaagagagctatgaatgagatcaatgcagctgctaggctgaggttggctgccagcgagaaagctgaggcagagaagatactgcagatcaagagagccgaaggtgatgcagaatccaagtacttggcgggtctgggtatcgcaagacagcgccaggctatagtggatgggctcagagacagtgttcttgctttctctgagaatgtgcctgggacctctgcaaaggatgtcatggacatggttctggttacccagtacttcgacaccatgaaggagattggggcctcgtccaagtcctcgtcggttttcatccctcatggaccaggtgctgtcagagacatcgcagcgcagataagggatggtcagctccaggccagtctgctgtgagcacgttggaaaaggcatgcttttgacattcccatcagtaaagaagtacatatacatcatgaggagtaaaaaaaaacttactagcgataatgtgagtacttggacatcagtacagcttgttcgttctatctatatggtgcatgtgattattattatggagattaatgttaaataggttcgcatgtattgtgccagaacaaggctaaggaccagtttgcgtaaaaaaatgtatgtttggaacttatctaagttttggagcctgaggaaacccctccatcctgtgcaaactattttgtggtaccctgcttctctgttatcgtgattcatgaatgagaatctcatgttcattttctgtgcccaaaaaaatatgtaaaaaaaaaaaaaagggcgccccccgactagaaaagcgcgtcgacccggatattaat

SEQ ID NO: 137965 - DNA, 268 bp, Zea mays
  Clone ID: MRT4577_57300C.1
gcccagtgtctaccctgccctctctgcacgggaagcagggtgtgacctcagtcacatgccatggtggctatgtgtataccacagggcgtgatggagcctactaccagctgtttgtacgagacggccagctccagccagtcctaaggcagaagtcctgtcgaggcatgaactggctagctgggctccgtatagtgcccgatgcgagcatggttatcctgagttttccatgccaatgagtttgtggtgtggaccctcggcacacgagagc

SEQ ID NO: 137966 - DNA, 624 bp, Zea mays
  Clone ID: MRT4577_57301C.1
ccctcgagttttttttttttttttttttttttttttttttttttttttttttttttttttttttttttttttttttttttttttttttttttttttttaaaacccccaaacggggggggggggaaaacagtaaaaaacatatggttttccacccacaaaaaaacgggggcccaactaaccccagggggcccaggaggggcaaaaaggaaaaggcttggggtttttttttaaaaaaaacccggcgggcaaatttcctgggaattctcctttaactcaaagccctaaaaaaaaccaagggggtttaattttttatggaaccccttaggcttagggggggggggtttggcccttgtggaggaacacccccttgttcttggccgggaaccatttttgggggccctctttagggaccctgggggggaccccaaccgggaatttgcccctggggggaggggcgacacggtccccaacccctttaaggaccacgtaaaattccttgccggaaaaccccggggagggatattacttggggccaaaatttttgggctttgggttcccaaatccaaagccgccgggggcacggaagttcctctctgagaggtgggcctcctccaccttaaagcc

SEQ ID NO: 137967 - DNA, 736 bp, Zea mays
  unsure (1)..(736): unsure at all n locations
  Clone ID: MRT4577_57302C.1
tttattgcagngcccncatggctgnggagcagngaagaatattctgcacttgtcggagcaaattccccgacagccatcagcacggcctgcgtggctgtcggtgcccatcgatcgagctgacaactttgtttcaagctcttcaagttcatcagtgcaaaagcagcagctgtacatactacatatataatagctgcctagctccaccgcaaagccgagcaggaggcgacgaaaccaactgagggtgcgtgtcggatggcgaggccgagggaggaggagctcgtggaggccgcgctggtcgcggcggccgcagcgctgatcgtgtcgggcgttaagaggctggtggcgccgcccgagcccgtagctccgtggtggtggcctgcgtcgctctcggtgccgtctcccgcgctgttcctgctcctcaacgtcatcatcgcgtctatcgttgtggcgtccgtgcagccgcggcggggaggagcggcagcttcggcgtcgtccgggggagccatcgacgacgaacgggaggcgcggggagacgccgcgaagaggaggaggagcaagagcaagagcaagagcaagaagcggacggcggccgatgccgccattccagatggctgctacatggcgctggtcgttcgggcgaccgatagaaaggcggcgngatggaggagggcgcagcaatagatcggcgccagtgacaacggctagagtattcgggtcgcccactagtcatctttct

SEQ ID NO: 137968 - DNA, 227 bp, Zea mays
  Clone ID: MRT4577_57303C.1
ctatccgaatttttaaatttttttacaatacatcccataaagtgttaatccaaccggggaaaagaacaggtttaaatttgctttccccttccagggcccaacccgggtaccgccaaaaagcatttccctgtaagtggctcccggggaaaaaggccccccctgaaaaaagcaccttgcctactttttggccgtttttacaattcccttattttttttgaacccaaatt

SEQ ID NO: 137969 - DNA, 287 bp, Zea mays
  Clone ID: MRT4577_57304C.1
gcgattggctagcaggcagggagcatgaggattgagaggacgtgtgacgctgaagcccaacactcccgacgacgttcgctatgcctacccctcctctattgacatatcaatgctcccagcgaagatgtcctgttagacatattctaacaagaacctgacgtgcaaaattaagacagaacaagtcacagccctgccctcatctgcaaccaacacctaccaggacttctgctctgtccctgctccacatatataacgtcactgctcttcctttctactatagatgtgtg

SEQ ID NO: 137970 - DNA, 661 bp, Zea mays
  Clone ID: MRT4577_57305C.1
ccggccgggcccaaattccccaatgtacgggccagttcactcgcaaccttccccagacatggctactgtgactcgaacgctgctccccgcgatcctcatgagcttacatgcattcgttgcgcgaggcctctccaccgagaaggctgatggcgcagacgacgttgccgacagacacaccgctaagtggatgcaggacacgaggaagaagtcaccaatggaactgatcaactgaggcacctccaatcaacgttgatgggcgcattgccgcctgataacgactttctgaacgagatgaacttggccacccaatcgagaacatctgccttgatctgcaagcacctaatgcgcgcaaatactgtgccctccgctatgatcaagttcaccatcactaaaatgacaagataatgatgcctaccgctgcacaacctgaattgaggcacttatgagcacacacatttgatccacaatgatctgcaatgcactttgaactatgcttgcagccaagatattacctatgatgaccatcctcttctcgggcgatcacttattaatcctgtctacatatggctcagtgatctacagacgaattgtgctccttttgcagaagctatacaagctgagagaattggagattgactctgaataacatgatactaactct

SEQ ID NO: 137971 - DNA, 1829 bp, Zea mays
  Clone ID: MRT4577_57306C.1
ggggtggacgaggcgcgccaccggccgagccgaatcgagctgcagaaaccaccttggcatggcgacacaggccgctttcctcgcggggttctcgcagctcgccgcgcagccgggccgtgaccgcgccgtggcggtggcggtggcgccggcgccgggcccggcccgggtggccgttgcggcggtgggtagcgccaagttgggcgtgaaggcggggacgtccaggaccgcggcggtggcgcgcctcggggtgcggtgccgggccagcctgatcgagcccgacggcgggcggctggtggacctggtggcgcccgaggagggcgggcggcgcgcggcgcttcggcgggaggcggcggagctgccgcaccggctgcgcctcggccgcgtcgacaaggaatgggtccacgtcctcagcgaagggtgggcgagtccgctgcaagggttcatgcgcgacgatgagttcctccaaacacttcactttaatgccatccgcggccaggatggcaggatggtcaacatgtccgtccccatcgtgctctccgtaggggacgcacagcgaagggccatccaggccgacggcgccacgcgcgtcgccgtcgtcgacgaacgcgaccgccccatcgccgtcctcagcgacattgagatctataagcataataaggaagaaagaatagcacggacatgggggacaactgcacctggattaccttatgttgaggaggcaattaccaatgctggtgactggttgattggtggggacttggaggttatagaaccaatcaagtacaatgatggtctagatcagtatcgcctgtctccagcacagctgcgtgaagagtttgccaggcgcaatgctgatgcagtatttgcctttcagcttcgcaatccagtacacaatgggcatgctcttcttatgaccgacacacgcaaacgtctccttgagatgggttacaaaaaccctgttcttctgctccatccactgggaggattcacaaaagcagatgatgtgcctcttagttggagaatgaagcaacatgagaaggttcttgaggaaggtgtcctcaacccagaatcaactgttgttgcgatctttccctctccaatgcattatgctgggccaactgaggtgcagtggcatgctaaggctcgtattaatgctggtgcaaatttctatattgttggaagggatcctgctggtatgagccatcccacggagaaaagggacctctatgatgctgaccacgggaagaaggttttgagcatggctcctggcctcgagaggctcaacatccttcctttcaaggtggctgcatatgacacaaagcaaaagaaaatggatttctttgatccatcaaggaaagatgatttcctcttcatctctggcacaaagatgcgcactcttgccaagaaccgagagagtcccccagatggttttatgtgcccgggtggctggaaggtactcgttgaatactatgacagcttggtgccatctgagggcagcagcaagctgcgtgaaccaattgcagcctaaatctggaaaatccttcatataaggaatgctactatatcttagcaagcggttctttgcgacatagaaccgatgctatgtgattgtatactggctgtaagactttaaaacactaggcttgattcggatgttaatgtgtgctttgtacccggtgtaccttctctgctggcagtgttgcacatgcactggagcacatcaaacgtttggtgttaataaggacaggctatgtatcctctgccagattgtacatatatacattgtggtgatatataattataaagctgacctctgccgtccgggctcg

SEQ ID NO: 137972 - DNA, 422 bp, Zea mays
  Clone ID: MRT4577_57307C.1
gattaagacccgttctagtgctgcagggggatctgttgcaacttaaggggggcaagggtctatgcaagggtggagccaatcgccaccggaaggtgctccgcgacaacatccatggcatcaccaagcctgcgatccttatgctggctctgatgggcggcgtgaagcgcatctcggtgctcatctacgaggagacccgctatgtgctcaagatcttcctcgagaacgtcatactcgacaccttcacctacaccgagcacgctcgccgcaagaccgacaccgccatggatgtcgactacacgctcaagctccagtgccgtaccctctacggcttttgatgctaggcgcctcttcttaactggggaatgcttatggtgatacgtatctgtcgctgtgggtcgtaatgtatcttcattccttgatat

SEQ ID NO: 137973 - DNA, 932 bp, Zea mays
  Clone ID: MRT4577_57308C.1
ctacttatgaccgacacacgcaaacgcctccttgagatgggttataaaaaccctgttcttctgctccatccactaggaggattcacaaaagcagatgatgtgcctcttagttggagaatgaagcaacatgagaaggttcttgaggaaggtgtcctcaacccagaatcaactgttgttgcgatcttcccctctcctatgcattatgctgggccaactgaggttcaatggcatgctaaggctcgtattaatgctggtgcaaatttctatattgttggaagggatcctgctggtatgagccatcccacggagaaaagggacctctatgatgctgaccacgggaagaaggttttgagcatggctcctggcctcgagaggctcaacatccttcctttcaaggtggctgcatatgacacaaagcaaaagaaaatggatttcttcgatccatcaaggaaagatgatttcctcttcatctctggcacaaagatgcgcactcttgccaagaaccgcgagagtcccccggatggttttatgtgcccgggtggctggaaagtgctcgttgaatactatgacagcttggtgccatccgagggcagcagcaagctgcgcgagccagttgcagcctgaaatatgggaagcgcttcagataaggaaccctattatatcagcacaatcggttctttgcgacatagaaccgttgttgtatgattgtatattggcttgtaagacttaaaaacaatgggcttgatttggacgttaatgtgtgctttgtaactggtgtgccctatctgctggcagcgttgcacatcaaatgtttggtgttaataaggacaggctatgtatcctctgccagattgttgtacatatacattgtggtgatataaacatgaagctgtcttctgctgttttagaaaaaaaaaaaaaaaaaagcggcc

SEQ ID NO: 137974 - DNA, 1873 bp, Zea mays
  Clone ID: MRT4577_57309C.1
aattcggcacgaggggacgaggcgcgccaccgcccgagccgaatcgagctgcagaaaccaccttggcatggcaacacaggccgctttcctcgcggggttctcgcagctcgccgcgcagccgggccgcgaccgcgccgtggcggtggcggtggcggtggcgccggcgccgggcccggcccgggtggccgttgcggcggtgggtagcgccaagttgggcgtgaaggcggggacgtccaggaccgcggcggtggcgcgcctcggggtgcggtgccgggccagcctgatcgagcccgacggcgggcggctggtggacctggtggcgcccgaggagggcgggcggcgcgcggcgctgcggcgggaggcggcggagctgccgcaccggctgcgcttgggccgcgtcgacaaggaatgggtccacgtcctcagcgaagggtgggcgagcccgctgcaagggttcatgcgcgagcatgagttcctccaagcacttcatttcaatgccatccgcggccaggatggcaggatggtcaacatgtccgtccccatcgtgctctccgtcggggacgcacagcgaagggccatccaggccgacggcgccacgcgcgtcgcgctcgttgacgagcgcgaccgccccatcgccgtcctcagcgacattgagatctataagcataataaggaagaaagggtagcacgaacatgggggacaactgcacctggattaccttatgtcgaggaggcaattaccaatgctggtgactggttggttggtggggacttggaggttatagaaccaatcaagtacaatgatggtctagatcagtatcgcctgtctccagcacagctgcgtgaagagtttgccaggcgcaatgctgatgcagtatttgcctttcagcttcgcaatcctgtacacaatgggcatgctcttcttatgaccgacacacgcaaacgtctccttgagatgggttataaaaaccctgttcttctgctccatccactgggaggattcacaaaagcagatgatgtgcctcttagttggagaatgaagcaacatgagaaggttcttgaggaaggtgtcctcaacccagaatcaactgttgttgcgatctttccctctccaatgcattatgctgggccaactgaggtgcagtggcatgctaaggctcgtattaatgctggtgcaaatttctatattgttggaagggatcctgctggtatgagccatcccacggagaaaagggacctctatgatgctgaccacgggaagaaggttttgagcatggctcctggcctcgagaggctcaacatccttcctttcaaggtggctgcatatgacacaaagcaaaagaaaatggatttcttcgatccatcaaggaaagatgatttcctcttcatctctggcacaaagatgcgcactcttgccaagaaccgcgagagtcccccggatggttttatgtgcccgggtggctggaaagtgctcgttgaatactatgacagcttggtgccatccgagggcagcagcaagctgcgcgagccagttgcagcctgaaatatgggaagcgcttcagataaggaaccgtactatgtcagcacaagcggttctttgcgacatagaaccgttgttgtatgattgtatactggcttgtaagacttaaaaacactgggcttgatttggacgttaatgtgtgcattgtaactggtgtgccctatctgctgacagtgttgcacatcacatgtttggtgttaataaggacagactatgtatcatctgccagattgttgtacatatacattgtggtgatataaacatgaagctgtcttctgctattttataaccagttctttttaagcaaaaaaaaaaaaaaacaaaaaaccccac

SEQ ID NO: 137975 - DNA, 242 bp, Zea mays
  Clone ID: MRT4577_5730C.1
cttattgctactctttttactacgtgctctttgtttcccgcgagcttgcacaaggcacgctcttatgtcttttattcaaaccaacacgagagggggcaggagaaaccaaacgccggaacaggaagccaaacgcgcggcagagggcgccacatgttctttaccggggaaaacacccgtgcaacccccagtgcagggaaaaaaagaacgcccgccccggccatgatcgaactatggctttcacc

SEQ ID NO: 137976 - DNA, 367 bp, Zea mays
  Clone ID: MRT4577_57310C.1
gagatgctgaagtacgctatctgcatagactcaaaggggcacaagttgcaccagatgctgtcaacactggctataaagctgatgatttcgctgatgacgcactctacaaaaaagagctgaccgaggatccttatgatcagagcatcctatatgaagtggactaagacttcagaatgtatcggtctggcaggactgataggaagaaatgacctgatgacaatgagtctatagaagattacgaatgttatatgggtgaaatgattcagcgaacgaaagctgattgatctccagatgggatgattgactgctaatgtcttacatcgagacatagagcctttcaaagcatgggtggggatggcgaatgata

SEQ ID NO: 137977 - DNA, 2150 bp, Zea mays
  Clone ID: MRT4577_57311C.1
ttgggtacctcgaggccggccgggattactaactctcctctctcccggactgccggtcagctcgactgctccagttcttcccatttcccagccgccgcggcgccacgcagacctagcagagaaacacccacccgagatggcgatggctctgcgccgccttgcgggcgtgtccggatcgccgtcggcctcctctgccgcggccacggtgctactccggtcggcgctgacccgcccgatctccaccggcttccgcgaggagcgcgacaccttcggtcccatccaagtccccaacgacaagctgtggggcgcgcagacgcagagatcgctgcagaactttgacattggcggggagcgtgagaggatgcccgttcccatcatccgtgcctttggcgtgctaaaaaagtgcgccgctaaggtgaatatggactatggccttgatccaacaatagggaaggccataatacaggcagctgaggaggtcgcagagggaaagttggatgatcacttcccacttgttatctggcaaactggcagtggcacacaaagcaacatgaatgccaatgaggtaattgcaaatagggcatctgagatccttggacacaagcgcggtgagaagtttgtgcacccaaatgaccatgtgaataggtcacaatcttcaaatgatacatttcccactgtaatgcatatagcgacggccgttgagatacattcgaggtttatcccaagtttgcaacagttgcatgattcacttcattcgaaaactattgagtttaaagacataattaaaattggacgtacacatacccaagatgccaccccattgactcttggccaagaattcagtggctacactacacaggtcaaatatggaattgaccgcattaattgtacattacctcggatgtaccagcttgctcaaggtggaactgcagttggaactggcttgaacaccaagaaaggatttgatgccaaaatagctgctgcagtggctgaggaaacaaacctaccctttgtgacagcagagaacaagtttgaagctttggcagcacatgacgcttttgttgagagcagtggtgccgtaaatacaatttctgcatctcttatgaagatagcaaacgacatacgtttgctaggaagtggtcctcggtgtggtcttggtgaactaatcctaccagaaaatgagcctgggagcagcattatgcctgggaaagttaatccaacccagtgtgaggctctgacaatggtttgtgcacaggttatgggtaatcatgttggtgttacaattggtggtgccaatgggcattttgaactgaatgtttttaagccaatgatcgcagccggattacttcgatcattgaggttgttaggggatgcatccgtgtcctttgagaaaaattgtgtcaggggaattcaagcaaaccacaagagaatttcacaacttttgcatgagtctctgatgttagtgacatctttgaaccctaaaattggctatgacaatgctgcagctgttgctaagaaagcccacaaagaaggaaccacgttgaaggaagctgcattagaccttggagtattaacggagcaagaattccatgagcttgtcgtcccggagaaaatgattggtccttctgattgataaccccatgttcactatgtttctttgaagcattcaggttgccacatccgcgagttctggtggccctgtgtttccaagttaatgattctagcgcacccataaataaagcaaataatttttcatatggtcattaggtcctcaccgtaccgcactagagaaatgatttttgcatggcggatggtatctgagaaaacagttgtattcttgttcaaatagggagcagtgcactttgattcatgaggcgccttccattatcttggcatcagtcaaccttttcttgccaagtagctagtgctatgtaacaagtgacatggcaaccatgtatagaaattatttgcatgggtttgtgttcttgccaggtagctaatgttatgtaataagtgacaaggaaacaatgtcatgaattatttgcattgggttttgacgagtgaaatagaaatatacgccctgttttagttttcattttaaaaaaaaaaaaaaaaaaaaaaaccagggcggccgtttcagaggtacccaa

SEQ ID NO: 137978 - DNA, 1872 bp, Zea mays
  Clone ID: MRT4577_57312C.1
ccaagccgtgaggtggacgaggcgcgccacctgctaagccgaatcgagcagcagtagccaccttgccatggcgatgcaggctgctttcctcgcggggttctcgcagctcgccgcgcagccgagccgcgactgcgccgtggcagtggcgccgacgcgggtggccgttgctgcggtgggtagcgccaaggtgggcgcgcgggtaggcttgaaggcggggatcgccgcgcccgcgcccgcgcccgcggcgggccgcggggtgcggtgccgcgcaagcctgatcgagcccgacggcgggcagctggtggacctggtggcgcccgaggagggcgggcggcgcgcggcgcttcggcgggaggcggcggagctgccgcaccggctgcgcctcggccgcgtcgacaaggaatgggtccacgtcctcagcgaagggtgggcgagtccgctgcaagggttcatgcgcgagcatgagttcctccaaacacttcattttaatgccatccgcggccaggatggcaggatggtcaacatgtccgtccccatcgtgctctccgtaggggacgcacagcgaagggccatccaggccgacggcgccacgcgcgtcgcgctcgtcgacgaacgcgaccgccccatcgccgtcctcagcgacattgagatctataagcataataaggaagaaagaatagcacggacatgggggacaactgcacctggattaccttatgttgaggaggcaattaccaatgctggtgactggttgattggtggggacttggaggttatagaaccaatcaagtacaatgatggtctggatcagtatcgcctgtctccagcacagctgcgtgaagagtttgccaggcgcaatgctgatgcagtatttgcctttcagcttcgcaatccagtacacaatgggcatgctctacttatgaccgacacacgcaaacgcctccttgagatgggttataaaaaccctgttcttctgctccatccactaggaggattcacaaaagcagatgatgtgcctcttagttggagaatgaagcaacatgagaaggttcttgaggaaggtgtcctcaacccagaatcaactgttgttgcgatcttcccctctcctatgcattatgctgggccaactgaggttcaatggcatgctaaggctcgtattaatgctggtgcaaatttctatatcgttggaagggatcctgctggtatgagccaccccacagagaaaagggacctctatgatgctgatcacggaaagaaggttttgagcatggctcctggccttgagaggctcaacatccttcctttcaaggtggctgcgtatgacacaaagcaaaagaaaatggatttctttgatccatcaaggaaagatgatttcctcttcatctctggcacaaagatgcgcactcttgccaagaaccgagagagtcccccagatggttttatgtgcccaggtggctggaaggtactcgttgaatactatgacagcttggtgccatctgagggcagcagcaagctgcgtgaaccaattgcagcctaaaatctggaaaatccttcatataaggaatgctactatatcttagcaagcggttctttgcgacatagaaccgatgctatatgattgtatactggctgtaagactttaaaacactaggcttgattcggatgttaatgtgtgctttgtacccggtgtaccttctctgctggcagtgttgcacatgcactggagcacatcaaacgtttggtgttaataaggacaggctatgtatcctctgccagattgtacatatatacattgtggtgatatataattataaagctgtcctctgcccaaaaaaaaaaaaaaaaaaaaaaaaaaaaaaaaaaaaaaaaaaa

SEQ ID NO: 137979 - DNA, 427 bp, Zea mays
  unsure (1)..(427): unsure at all n locations
  Clone ID: MRT4577_57313C.1
gcactcatcctcccactccttcaacctctcttactcatattctttccctatcccatatgattaacttgacggttatctctaagtgagcagacgacattccttatttttcacatattccatattatatatcaatattatcttaatcatagccttctacacatacacttctactacttttcatcaaccaaaaaattacaaaaatgagtgtctacaatataaatgaccctacaatcttttcgaaatatataaccaatatcaatttctttctactgattttaattatatatacncaacttttttttctaatcaaatgtcaaaaataatcttaactttgaaacctctacttacttcactttattatacttcctccatattattttaccaatttaaatttattatatcaaaccttccttatttccattttaca

SEQ ID NO: 137980 - DNA, 345 bp, Zea mays
  Clone ID: MRT4577_57314C.1
acaaatcagaacacaaatgagcgtggtgccccaacatttgttttggcgagctgatcaaatgccctaaatcacccagcgcatctaaaccatgccagacgggagcaaatgtacgccacaccataattactggcagatactcaacacaggaagcaattttgcaggcccagatattctgaagtcgaagcctttccgccggcggaccccttgtacttgtacagcgcttatagccgcgagcctgcagatacgccactgcgggagcacgtcagagcccatgcccaccaagaagtcgatggcgctctagctccagtcgagcacgcaccagtacacccaggccatcccgagctc

SEQ ID NO: 137981 - DNA, 170 bp, Zea mays
  Clone ID: MRT4577_57315C.1
cgagcctccgtaggcatgggaagcgtgcacatgcagtagcgatcctcgactctctgtccgggaatgctggacctcaatctcatgtactgctcccttcttgtcaagactggcgtgctgtctgacgcgacggttccggcgtccccggctgcgtgcgcacatgcttacgtgcg

SEQ ID NO: 137982 - DNA, 1222 bp, Zea mays
  unsure (1)..(1222): unsure at all n locations
  Clone ID: MRT4577_57316C.1
cattgggtacctcgaggccggccggggcgggagtcgttcttcccccaggccccagcctcatgccgccggcctaaccaaccaacctcatggccgccgccattgccgcggcgcttctccgccgctccacctcgcaccaccgtctcatattacctctcctctctcacctccaccgcacctttccgcaaccctcgtccccatggctcccaccccaacaccgcttcttctccaccggcgaatcagccggcgatcccacccagaaaccgacgtcttctcttgacccgaagaagctatggcgcgagctatccgcctcggaccccgccgtcggatcctgccgcctgccgaaggccacgtgggatgccattgtaggcctcgtccgcggcttcgccaaaagtccggccatatccgaccaggcgctcgcgctctacgtcccctcttctgccttcccatcctacgtccgccgcttccgcgggttcatcctcccgcgactctcccgggagtccgcggcgcatctcctctcgctccccgctgaggacgcacacgagctcctcctcccggccttcgcagagttctgcttctccaacttcgcagacaagctgaggcagcacaggtcggtcatggccgcggccgacctcacggccccgcacacctggtaccccttcgcgcgcgctatgcgccgccgtatcgtgtaccactgcgggcccacgaacagcggcaagacgcacaacgcgctcacccgctttgccgcagccaagtctggggtctactgcagcccgctccgtctcctcgccatggagatcttcgacaaggtcaatgcgctcggtgtctactgcagcctgcgcactggacaagaggttaaggaagtgcctttctccaaccatgtcgcatgtaccattgaaatgatgtccactgaggagctctacgaagtcgccgtggttgatgagatacagatgatggctgaccctgtcaggggctttgcgtggtcgcgcgctgtgcttgggctcaaggcggatgagatacacctctgcggtgaccctagcgtgctcaagattgtccagaagatttgtgcagaactggggatgatttgggttggtgcatcaatatgagagattcaagcctcttgntgttgaagcaaagacacttcttgnggacctcaagaatatccgctctggtgactgggntgntgctttctcacgcaaggagaatttcgaggtgaagctggcaa

SEQ ID NO: 137983 - DNA, 619 bp, Zea mays
  Clone ID: MRT4577_57317C.1
cctttttcgcttctcgacttccccaatcggccacccccaccccctccttccttcctggccagcgcggcggctatggcctccatgaccacacctcggctccccttcctccccgcccgaacccgctccgccgtcgccgcctcctcctcttcgtcctcctcctccccgctaccacgccgctccatcaaatgcagcagctccaccaacgctaactcagcccccctcccttctacagcgcggcagccccgggcgcccgtggtggacggcgtagggtccgccgacctcaacggcctccgggccccgcctataccagtcgcggactcccctctacccgcgtaccgcgatccgcacgggctgcctcggcctctcactagtgcggatctaatggagtcgagcggggaggggctcaaggttgcctaccagggcttccctggagcgtacagcgaggctgcagcaaagaaggcctatccaaattgccagacagtgccctgcgagcactttgatactgcatttcaggctgttcaaaactggatagttgatagggcggtactgccacttgagaatactctgggtggtagtatacatcggaattatgaccttttacttcggcatgagctgcaca

SEQ ID NO: 137984 - DNA, 355 bp, Zea mays
  Clone ID: MRT4577_57318C.1
tttttgaccacagatctatccattctggcgttcacctttatgtagtatggagcgctgatgatcctgatcagacaccgtgaggattgtgttcgttcggatcggtaggctgggggccagtgtggccatgcactgtgaccatacaaagctcgtctgcgtgtacgacccattgatcagcaccgactacatgacctacatgttcaagtacgacactgtgcacggacagtggaagcaccatgtagtcaaggtgaaggactccataacccttctctttggtgagaaggaggttgcatgtgtttgcctgcacgaaccctgaggagatcccgtgggggtaggttggtgctgaatattgttgtga

SEQ ID NO: 137985 - DNA, 807 bp, Zea mays
  Clone ID: MRT4577_57319C.1
aggccggccgggccgggtccgactctcggcaacggatatctcggctctcgcatcgatgaagaacgtagcaaaatgcgatacctggtgtgaattgcagaatcccgcgaaccatcgagtttttgaacgcaagttgcgcccgaagccttctggcggagggcacgtctgcctgggcgtcacgcatcacccactacctccattccggtgcgccatcgctctcgtcctcgccgatcgatccaagagactgggaccttcaaagagcaataggactcatggaggttggagacgcaagaaacggttctgcagcagcggcactgacaaagggaggtgcggatgatgccgcccgcaaaccgctccctccttgctgcgtcaaggccaaggcgcgggtgcctgaaaccgaggccaactgccatgatactgtggtttcagggtggttcacggaacccagatcgcgttttggagaggcccattcattgaaagtggagaagatcttgtttcaagggaaatcgccttaccaagaaattttagtttttgagtcttcaacctatggaaatgttcttgtgcttgatggtatagttcagttgactgacaaggatgaatgcgcataccaggaaatggttactcaccttccactgtgctcaattcctgcaccgaagaatgttttggttgttggaggtggtgatggtggtgtactgcgcgaaatagccagacatgattcagtggaaactattgatatatgtgagattgatcaactagttattgatgtttccaaagaattctttcccaacttatccattggatcaaagatcc

SEQ ID NO: 137986 - DNA, 284 bp, Zea mays
  Clone ID: MRT4577_5731C.1
aaccgttcatccttcgttcacccgtccactcccatcttccttcacccgcttgtttatcagccgagtcagcacgtacgtcggcagtggttaggagagccctggcgcagtgcttcacgtcatgctctctgtcatcgaccgcgacctgcaggtctctgagatctcgtgcctgaagcagcctggtgccaacagggtcttcggcgcaagcgggccacgtctacgcgggagtcgtacacgaattcactcgccggaagcaagagtctgtgggcaaagcccaattccaacgc

SEQ ID NO: 137987 - DNA, 1667 bp, Zea mays
  Clone ID: MRT4577_57320C.1
ttggtccctccagccggccgggggccggccgggatcacccactaccctattccggtgcgccatcgctctcgtcctcgctgatcgatccaagagactgggaccttcaaagagcaataggactcatggaggttggagacgcaagaaacggttctgcagcagcggcactgacaaagggaagtgcggatgatgccgcccgcaaaccgctccctccttgctgcgtcaaggccaaggcgcgtgtgcctgaaaccgaggccaactgccatgatactgtggtttcagggtggttcacggaacccagatcgcgttttggtaaaacaagcaaagtgcagtacttcaataacccgatgtggcctggagaggctcattcattgaaagtggagaagatcttgtttcaagggaaatcgccttaccaagaaattttagtttttgagtcttcaacctatggaaatgttcttgtgcttgatggtatagttcagttgactgacaaggatgaatgcgcataccagtgaaatggctgctactttgctaccgaacaaattgaattgaaggatgttctccccaccttacgtcttctaatgagtagtaactttatgggcagctagcattatgctataagcctactgactgataaatattgtgatatttgagattgatcaactagttattgctgttcgcaatgaattctttccaaacttatccattggattcaaagatcctcgtgtccgacttcatgttggtgatgctgttgatttcctgaggaattctcccgaaggaaaatatgatgctattattgtagattcatcagatccaattgggccagcacaggcactcgtggagaaaccgtctactcagacaattgctagagctttgaagcctggtagtgatcttttaaatctagctttgataatgtttcggagcatggtggtgttctttgtaatgttgctgagagcatgtggctgcacacacatgctaatccaggatatgcttgctatctgtcgacagacattcaaaggtgctgtgcactatgcctggacaagtgttccaacatatcccagtggtgtcattggatttttgctatgtgcaaaagaaggtcgtgcagtgaacttcttaactcctgtgaatccaattgagaaaatagaaggaacagcaaaagctggaagggaactcagattttacaattccgagatccatagggctgcttttgttctgccaacatttgtaagaagagaactggaagcatataccactcctagtgcctctgctgaaaacgagaaaccgaaagaatcggtgtcagaaccgcagaagataaagatattgtcaaacaacgccattcttacagcttcctagccctgagccgtactcaatcttgctcggtatagttgtattctcacagaataaatcagtcactggcttttgctgacaccgcacgagcagctttagtatagtgagttgaatgatgatcgattgaataagagggtagatattgaactgatgtaatgcctctatcgaaacaatatgtccccctatcttgttaggcgtgttgtgtgttgtgcacgatttcagctgtagcttgtaaattgtacgacccgttgatgtaatgtataccctgcgtttctgctgagaaatcacttttaaaaaaaaaaaaaaagcggcctcggcgggagggg

SEQ ID NO: 137988 - DNA, 1731 bp, Zea mays
  Clone ID: MRT4577_57321C.1
gtgcggcgctcaggcggcgggtccggaccgactctcggcaacggatatctcgtatctcgcatcgatgaacaacgtagcaaaatgcgatacctggtgtgaattcgacaatcccgcgaaccatcgaggttttgaacgcaagttgcgcccgaagccttctgacggagggcacgactgcctgggcgtcacgccgtctgaaattctgctgtcgcctgactttgatgtcgacccacagactgggaccttcaaagagcaataggactcatggaggttggagacgcaagaaacggttctgcagcagcggcactgacaaagggaagtgcggatgatgccgcccgcaaaccgctccctccttgctgcgtcaaggccaaggcgcgtgtgcctgaaaccgaggccaactgccatgatactgtggtttcagggtggttcacggaacccagatcgcgttttggtaaaacaagcaaagtgcagtacttcaataacccgatgtggcctggagaggctcattcattgaaagtggagaagatcttgtttcaagggaaatcgccttaccaagaaattttagtttttgagtcttcaacctatggaaatgttcttgtgcttgatggtatagttcagttgactgacaaggatgaatgcgcataccaggaaatggttactcaccttccactgtgctcaattcctgcaccgaagaatgttttggttgttggaggtggtgatggtggtgtactgcgcgaaatagccagacatgattcagtggaaactattgatatatgtgagattgatcaactagttattgatgtttgcaaagaattctttccaaacttatccattggattcaaagatcctcgtgtccgacttcatgttggtgatgctgttgatttcctgaggaattctcccgaaggaaaatatgatgctattattgtagattcatcagatccaattgggccagcacaggcactcgtggagaaaccgtttattcagacaattgctagagctttgaagcctggtggtgttctttgtaatcttgctgagagcatgtggctgcacacacatctaatccaggatatgcttgctatctgtcgacagacattcaaaggtgctgtgcactatgcctggacaagtgttccaacatatcccagtggtgtcattggatttttgctatgtgcaaaagaaggtcgtgcagtgaacttcttgactcctgcgaatccaattgagaaaatagaaggagcagcaaaagctggaagggaactcagattttacaattccgagatccatagggctgcttttgttctgccaacatttgtaagaagagaactggaagcatataccactcctattagttctgctgaaaacgagaaaccgaaagaatcagtgtcagaaccgcagaagataaagatattgtcaaacaacgccattcttacagcttcctagccctgagccgtactcaatcttgctcggtatagttgtattctcacagaataaatcagtcactggcttttgctgacaccgcacgagcagctttagtatagaatgatgatcgattgaataagagggtggatattgaactgatgtaatgcctctgccgaaacaatatgtctccctatcttgttaggcgtgttgtgtgttgtgcacgatttcagctgtagcttgtaaattgtacgacccgttgatgtaatgtataccctgcgtttgtgctgagaaaaaaaaaaaaaaaaaaaaaaaacctcgtgc

SEQ ID NO: 137989 - DNA, 566 bp, Zea mays
  Clone ID: MRT4577_57322C.1
ggccgggccgggtattcaaacgctagagctctgttaattttccctccgccgcgactccacgcccatttagcgccacacgccaacaccctagagggctacgctctctgctgctcatagcgagagtatacggatcaccgtctgactcctctgccaatcgcactcggttactcccggcgtactcttgcgcccgatcttggccgcatgaccgtgacaagaccataccttacgatcacatccaacctcccccacgccctcttgcgtcgccttcaccaggctccgatcgctgcataacatatacattcaagaactatgttgacatgatgcccatccccatcatcctttgatgttaattctgctaaaagagcgcgccgcttagtggattctctactatgagtgtgatcacaactgtaggcattcacataaaaccctgagctcaggaagacagccaaggataagttgtcagatcaattctcactagatatctggtgaactggaagagatactcctctatggctcgcatgacaatgcgggatatgcgatataagcttatcctgagatcctcgaac

SEQ ID NO: 137990 - DNA, 445 bp, Zea mays
  Clone ID: MRT4577_57323C.1
ggaaaaaatggggccgattcaaaataaaggcgccggaatttgacaacaaaccaagcacttgggcaccatttcctgaaggcaatttcgaaggccccaacctaatttgctgggtcatcaaagcctcaaaataatttcgaagtttcacgaaacccccggttgcgcgaaaggagattccccaaatcttgtaaaaaaactggcatgaaaatttgtaaacaaagcaagcttttttttttttgtcgaaagcacaaattcgggttgctctacaatctaaaaatatactgggacccaaaattttgctcagggctaaattttcaggcgcacaaaaacttggccgactggattcttggcttcttgccttttgctttcgggaacttctcctcggacttttcattttttgatacagccctagcaattggtttcattttcctaacattttgggaccttt

SEQ ID NO: 137991 - DNA, 182 bp, Zea mays
  Clone ID: MRT4577_57324C.1
aaaaaaaaaaaaaaaaaaaaaaaaaaaaaattaaaaaaaaattaaaaataacaagacctctggttacatccggggtcatgctacctcgtatcctattctataatatcacctaatttcactccaaaattcatccacttacacctccttttacaactaaaaccctgacattacccaacttattc

SEQ ID NO: 137992 - DNA, 831 bp, Zea mays
  Clone ID: MRT4577_57325C.1
cacgcccttcccgccgtcgcgaggcgtatctttcggcgacatacgcagagctgccacacgccatggagaagaccgaggctaagaaacccacgcccgcatcccccctcttctccttctccaaccccagcgcctccttcggcttcgggttcggcgccgcgcccggccctccccctccccctccgccgccagctgtcgaggtcctcctctccgaggaatcacccgtcgcggccggcaacttggagcctgtggtggttgacgactccctatcgatttacaaggggagagttaacacctctgatgttttcggggtaaaaaactctgatttggttccaggaaaatatgaaggtgggttgaagctgtgggaaggatcattggacttggtgaaaaccctaaattcagacatcaaagatgatcgattgcttatggaaggcaaacacgtactagagttaggatgtggacatggcctccctggcatctatgcaggtctgaagggtgctggtctagttcacttccaagatttcaatgctgaggtccttaggtgccttaccatcccaaatgtaaaagctaatctgttgaagaaatcatctcaaggaacatccacatctaggagtattggtttttatgctggtgattggagtgaaatcgacaagttacttctttgcggagatgctgtccaggataaaataaccaatcttcgcacagaaaatgaagggtatagaggctatgatatcatcctgatggctgagactgtttatgcattggattcacttcctagtctctacgctcgtcaagaagtgcttacactaccctagtggtgtagtttatatggca

SEQ ID NO: 137993 - DNA, 577 bp, Zea mays
  Clone ID: MRT4577_57326C.1
gtgaattggaacaacaatttattatttatccacgttggggttcagcaagggtagctaaaagagaaagcgcactcttggtgctccttgcaacgtgttcgtaagtgacagtgtcaggaagatcactggacttatgatagtttggattattgttagcagacaaagattcgaaaataccggcagctgggtatccttggctgttaaagctttgttgatcggaacagcatgcgctggttggggctacaacggtaccagcacccaagtaaagtttggtgaggtcgaaggcgaggtcggtcaaggctttgttcacgctaccgttcatccaataaagtgttcttggtgcgttaccttgaggatatccgatcatgtcgatattgaccatagcggtaagagcagcgccagatctcttgtaatcagcagccaaagcagcgctaccaagcaaaccctgctcttctccagaaaagagcacaaaaacaatggacttcttgaaaaggaaggattccttctttctaagctctacgatgaggcgaagaatattcagaacagcagaagaacccgttccattatcatcagcgccagg

SEQ ID NO: 137994 - DNA, 397 bp, Zea mays
  unsure (1)..(397): unsure at all n locations
  Clone ID: MRT4577_57327C.1
actccagnaacagcagcactggaaccattccctttaagaggaggaaccattgactgcctgactaaaagaaatagattaaactcaacataagtaatgttacctcctgtgtgaactatcaacttgtggagtgacatgccataggtacaacagaggtaaattcatgccctaagaggcggcccactaaaaagtaaaaaacgatattcacagagttttgcccatttctggccatatggctgcctggcattttgttttcggctttaggattgtagatagcatgtttgccattgctctttgcaaatgttttttgcaccaggcaaggcatgtcttagcacacacctttacctccatgttcaattgtgcaaccagtgcatcaatgtccaagcatgcatgtgtgttt

SEQ ID NO: 137995 - DNA, 396 bp, Zea mays
  Clone ID: MRT4577_57328C.1
gggtacctcgaagccggccggactttgccaacctccattcctcgtgcgttgaccacccgattctaaacaagctccagaccaccgaagaagcgggagagatgactcgtaccaagcaatactgcgtcgcaagtgcacacgaggaaacgctcccagatagagaagattgccaccaaggctggccgtaaacctgcccccaccactgtatggagctgaacatagcctacaccgctaccgacctgaaactgttgccctccgcgagatatcgcaagcatcaaaagaccactgagatgctgatgaagaaatagccttacatgatgtccgcaggtaaatatgccccacacttcaaaactgatatgacgtttacacatccatgcttcgtttgccctccaagaggct

SEQ ID NO: 137996 - DNA, 179 bp, Zea mays
  Clone ID: MRT4577_57329C.1
tttcttgctagttggactaggttctgacggttgctgatttatgtgcatgtcgcggggcgcgtaagtattcctatcgtggcacaaaccctcggatcagagtaccggagcgcgtacctcggcccataagtgcaagggagcacaccctgacgaacacccaggagaactaccccactgcgaaa

SEQ ID NO: 137997 - DNA, 310 bp, Zea mays
  Clone ID: MRT4577_5732C.1
gaaagtgaacacagcgcactccttacaaggtatcgtttcgggctgctgtgacattgctcagtggctcgcacgtgcagatgtggactccaccattggatattgctctagccggaagttgtgacaccacctggtactatttgccccgttaattgatgcccttgcacaccgagactttgtcaagaacctgatctctggtgcctcccaggttgactgtgctgtccgtttttttgcctgcgccactggtgggtttgaagctgttatcttcatggatgccccaacacttgagcatgctgctcttgagatcacactt

SEQ ID NO: 137998 - DNA, 827 bp, Zea mays
  unsure (1)..(827): unsure at all n locations
  Clone ID: MRT4577_57330C.1
cggccgctcgaggcggccgggcgggatccccttcttcccctccacaggcgcccaacgctatctcctcccacctccttccgtcaccggcaagtgggcctgtcggatccacacgccacaagggctccccgaaccaccagtcggatccccgcggcgccagggctccccatgccggatccccacgccgccggcaggtgggaggctgctgcgagatccagccggggtggccatggagggatccagtgggcggaggaggttcgtcgcgcgccctgacttccagcagtcctacctccgcagggcctcccctgctcctcccccgcagccagatacatcttccctgcgacctaccgaggcccctccgcggcgccccgccaccggagtagacaacggcgaccgcggccacgggaggtctgtgtgggtgtctgcaccggaggtcgccgttccactgcccctcgccaaccctccaacccccgctgatctaccgggaaccggcgatccccgtcccgccgagatccatctgcagccctgctcttcctctgccctacccagatttcacccgtgaccgcagtccatcgcaggggcacctgcagctctctctcccacttgaggaggtacatcgccagcaaaggcttggaggtgagctcgtggtctacccagcgcgagggctggcatcctctcaagcaatggtgcagtgatggngatgacgcacaggtggcggtgcacggtgagctcgaggtcgctcacggnctccctcangcgtgtgggatgtagtgtggcaacaaggccgcatgaggttccagctcttcagcgaccccccttcatcatattct

SEQ ID NO: 137999 - DNA, 1879 bp, Zea mays
  Clone ID: MRT4577_57331C.1
attcttcccctaagcacgcacacatcaacatcggtagctctcacattccctcccacggctgcactagcgcctggaattctatcgtacagtatagcttcattcttaactggtgaacaaggcagcagctagcagatcgatctccatggacatggacatgagctcagcttatccccaccattggctctccttctccctctccaacaactaccaccatggcctactcgaagccttctctaactcctccggtactcctcttggagacgagcagggcgcagtggaggagtccccgaggacggtggaggacttcctcggcggcgtcggttgcgtcggcgccccgccgcagccggcggctgcagatcaggatcaccagcttgtgtgcggcgagctgggcagcatcacagccaggttcttgcgccactacccggcggcgccagctgggacgacggtggagaaccccggcgcggtgaccgtggcggccatgtcgtcgacggacgtggcgggggcggagtccgaccaggcgaggcggcccgccgagacgttcggccagcgcacatccatctaccgtggcgtcaccaggcaccggtggacggggagatatgaggcgcacctgtgggacaacagctgccgccgggagggccaaagccgcaaaggacgccaagtctacctaggaggctatgacaaggaggagaaggcggctagagcttacgacctcgccgcgctcaagtactgggggcctacaaccacgaccaacttccaggtgtccaactacgagaaggagctggaggagatgaaatccatgacgcggcaggagttcatcgcgtcgttgcgcaggaagagcagcggcttctcacgaggcgcctccatctacagaggagtcacaaggcatcatcagcacggccggtggcaggcgaggatcggcagggtggccggaaacaaggacctgtacttgggcactttcagtactcaggaagaggcggcggaggcgtacgacatcgctgcgatcaagttccgcgggctcaacgccgtcaccaacttcgacatgagccgctacgacgtggagagcatcctcagcagcgacctccccgtcgggggcggagctagcggtcgcgcccccgccaagttcccgttggactcgctgcagccggggagcgctgccgccatgatgctcgccggggctgctgccgcttcgcaggccaccatgccgccgtccgagaaggactactggtctctgctcgccctgcactaccagcagcagcaggagcaggagcggcagttcccggcttctgcttacgaggcttacggctccggcggcgtgaacgtggacttcacgatgggcaccagtagcggcaacaacaacaacaacaccggcagcggcgtcatgtggggcgccaccactggtgcagtagtagtgggacagcaagacagcagcagcaagcagggcaacggctatgccagcaacattccttatgctgctgctatggtttctggatctgctggctacgagggctccaccggcgacaatggaacctgggttactacgactaccagcagcaacaccggcacggctccccactactacaactatctcttcgggatggagtaggtgcatgcgctgacaagctagctagctgaaatcaggtggtaggcctaggaagaagctaggactgacatggaactgatcacaattttggctgctacatataccatgcatgccccatgtatggatgggggtgcgtgtccgtccttctgcttgctattcacgacacttgctgacttactgtggcagagccgcagagggctcgtgtaccatcagcatttctaaattctaattatcaagctcgtttcaagctatattatgctaaaaaaaaaaaaaaaaaaa

SEQ ID NO: 138000 - DNA, 579 bp, Zea mays
  Clone ID: MRT4577_57332C.1
cattgggtacctcgaggccggccgggtaccagttctactaggcgccagctcgcttccgatctctactgagtgcctagatcagatgccgcccgcatcgtgcgtacaagcatgataagacgctagtcgagcaggatgcttgaacgaagatccagcgctgaatcatggctactgcgtgtgcttcagctctcgccttcgtcaggtacaacgtcttacgccgacgaggacgaggtgatagggcattaacccacgggtcgtgcatgatgacttgggtattcgccgagcggcccaacagagacgatgaccctgacaagcctagccggaactacgtcctcgatccagttctggaggcactgggagcctctccccttatgagctgggctcactcattccgtgtcccaggaactaatgacatgatttccttcgccagctgtgtcattatagcggctgggagatcgtgtagagtatcttactagttagacatagtgttctcagtgcgagctttgtacatgtcctccccttcgtgagaagcagggtgaaatatgcgtcttcatgacgatgtggatctgctgattcctaagt

SEQ ID NO: 138001 - DNA, 1842 bp, Zea mays
  Clone ID: MRT4577_57333C.1
agttctaacattcccctccttgcaccggtgctacccttcttctagcttagacttctatcaaggcacgcggccgccatggatatggacatgagctccgctacccaccccgctcaccactggctctccttctccctctccaacaactaccaccacggcctcctcgaggccctctccagctcctcctccgcccaccagatcgccggagatgaggcgccggtggatgaggcgcctaagatggaggacttcctcggctgcgtcggcagcgctgggacgggatcgacggctgtggtggaccacggcgagctgggcagcatcgccgcgggtttcttacaccggtatccggcgcacgacgggatgacggatcagaactctggcgcggtgaccgtcgcggcggcgacgatggaggttgccgagtccgatcaggcgaggaggcccgccgagacatttggccagcggacctccatctaccgtggcgtcaccaggcaccggtggacggggaggtacgaggcgcacctgtgggacaacagctgccgccgggagggccaaagccgcaaaggccgccaagtctacctaggaggctatgacaaggaggagaaggcggctagagcttacgacctcgccgcgctcaagtactgggggcctacaaccacgaccaacttcccggtaaagagaactcaaagtcaatctcgggcggcaacacatatttgctgcgagagatggctagctttacctgaatgatccatgcatgcatggcgtaggtgtccaactacgagaaggagctggaggagatgaagtccatgacgcggcaggagttcatcgcgtcgttgcgcaggaagagcagcggcttctcacgaggcgcctccatctacagaggagtcacaaggcatcatcagcacggccggtggcaggcgaggatcggcagggtggccggaaacaaggacctgtacttgggcactttcagtactcaggaagaggcggcggaggcgtacgacatcgctgcgatcaagttccgcgggctcaacgccgtcaccaacttcgacatgagccgctacgacgtggagagcatcctcagcagcgacctccccgtcgggggcggagccaccgggcgcgccgccaagttcccgttggactcgctgcagccggggagcgctgctgcgatgatgctcgccggggctgctgccgcttcgcaggccaccatgccgccgtccgagaaggactactggtctctgctcgccctgcactaccagcagcagcaggagcaggagcggcagttcccggcttctgcttacgaggcttacggctccggcggcgtgaacgtggacttcacgatgggcaccagcagcggcagcaacaacaacaccggcagcggcgtcatgtggggcgccacctctggtgcagtagtgggccagcaagacagcagcagcaagcagggcaacggctatgccagtaacattccttatgctgctgctatggtttctggatctgctggctacgagggctccaccggcgacaatggaacctgggttactacgactaccagcagcaacaccggcacggctccccactactacaactatctcttcgggatggagtaggtgcatgcgctgacaagctagctagctgaaatcaggtggtaggcctaggaagaagctaggactgacatcgaactgatcacaattttggctgctacatataccatgcatgccccatgtatggatgggggtgcgtgtgcttccttctgcttgctattcacgacacttgctgacttactgtggcagagccgcagagggctcgtgtaccatcagcatttctaaattctaattatcaagctcgtttcaagct

SEQ ID NO: 138002 - DNA, 840 bp, Zea mays
  Clone ID: MRT4577_57334C.1
cattgggtacctcgaggccggccgggaatccagcaatacccgacgcgcaagccagtgcctcacccagatctccgcgacagatcagtcgttcgtccagctaactgcactgcactgcacgcaatggccaccacggcgaccaagacgactgcaccggcgcaggagcagcaggccaacggcaacggcaacggcaacggcaacggcaacggcgagcagaagacgcgccactccgaggtcgggcacaagagcctgctcaagagcgacgacctctaccagtacatcctggacacgagcgtgtacccgcgggagccggagagcatgaaggagctgcgcgagatcaccgccaagcacccatggaacctgatgaccacctccgccgacgagggccagttcctcaacatgctcatcaagctcatcggcgccaagaagaccatggagatcggcgtctacaccggctactcgctcctcgccaccgcgctcgcactcccggaggacggcacgatcttggccatggacatcaaccgcgagaactacgagctaggccttccctgcatcaacaagggccggcgtgggccacaagatcgacttccgcgagggccccgcgctccccgtcctggacgacctcgtggcggacaaggagcagcacgggtcgttcgacttcgccttcgtggacgccgacaaggacaactacctcagctaccacgagcggctcctgaagctggtgaggcccggcggcctcatcggctacgacaacacgctgtggaacggctccgtcgtgctccccgacgacgcgcccatgcgcaagtacatccgcttctaccgcgacttcgtcctcgccctcaa

SEQ ID NO: 138003 - DNA, 1107 bp, Zea mays
  Clone ID: MRT4577_57335C.1
cgacgcgctagctagttctattgccgcaccccagatctccaggagggactcgttcgttcagctaactacactgcacgcaatggccaccacggcgaccgaggcggcgccggcgcaggagcagcaggccaacggcaacggcgagcagaagacgcggcactccgaggtcggccacaagagcctgctcaagagcgacgacctctaccagtacatcctggacacgagcgtgtacccgcgggagccggagagcatgaaggagctccgcgagatcaccgccaagcacccatgttcctgaacatgctcatcaagctcatcggcgccaagaagaccatggagatcggcgtctacaccggctactccctcctcgccacggcgctcgccctcccggaggacggcacgatcttggccatggacatcaaccgcgagaactacgagctgggcctgccctgcatcgagaaggccggcgtcgcccacaagatcgacttccgcgagggtcccgcgctccccgtcctcgacgacctcatcgcggaggagaagaaccacgggtcgttcgacttcgtcttcgtggacgccgacaaggacaactacctcaactaccacgagcggctgctgaagctggtgaagctgggcggcctcatcggctacgacaacacgctgtggaacggctccgtcgtgctccccgacgacgcgcccatgcgcaagtacatccgcttctaccgcgacttcgtgctcgtcctcaacaaggcgctcgccgccgacgaccgcgtcgagatctgccagctccccgtcggcgacggcgtcaccctctgccgccgcgtcaagtgaaaacatggcctggcctggcctgccccaccaccgccaccgacggcgccgccggccgcatcctcattccaatcataatagacgacccgcagcattaattatccaccggcttttttttttggctctttcttgcccctgtaatctttctcctcctcttccttcttgggaattgtcgccgccgtttcgatacgtaaatcacgagatcggtaatacagtaatgctcctcaattttacaatatactcctactattactactgaaaaaaaaaaaaaaaaaggaccctagggcc

SEQ ID NO: 138004 - DNA, 897 bp, Zea mays
  Clone ID: MRT4577_57336C.1
gtttctatggatccctctcatccgccgccttcgcctcactcgcgagcaccctcgttcgcctcctcgacactgcgctcctttcccctcgccagacctggccgcgtccccaccgcccccgacccctcccactctccctggccgcgtcgactgcccggatctccgcgcccagatcgccgggacacctcctcccctggagcagctgccgtcatcaccgcgccggattcctcactcccggaatcaggtggatgctatttgcaggctggtaaagacaactaactttgttgatcctgtgcgcaagaagtaatgatccggcccagctccaaggagtcacttaattatgacaacaatagccagaaagtttatcctcaaccaattgatgaaaatatgaatcagaacatgggcagtatgattggaagaatattcaacaacatatcctctttaaaggctgcatacattcagctgcaggaagctcacaccccatatgacccagacaagatacaaactgctgataagcttgtcatagatgagctcacgagcctttcagaactcaaacatacttacagagagagaaatcctaagccagtagcagcatcacctcaagattcacgcttgctttctgaaatacaggagcagcaaaacttgttaaagacgtacgaggtcatggtaaagaagttccagtcccagatccagaatagagatactgagattacccacttacagcagcaaaccgatgaggccaaacatcggaaaacaaaactggagaaggaaatgaagcaaaggggcttacttaaccaggaatcagaggaatctgatgaagagagagctatttctctgttgagctgacacaagcttgtttacatctactgctgataacgcataccaatcaatacatgagtt

SEQ ID NO: 138005 - DNA, 249 bp, Zea mays
  Clone ID: MRT4577_57337C.1
cggccaccagcgttgaccgcctcacctcccctccgcacctgttcctccataccccaccactcagcacgagcggcgacggcgactgcggtggcaaagcgagatgcaggaccttcctgctggcgccgacccagagcgacaacaccagatcctagaagatcctcgcggtgcccaagtcgactttccaggacggcctcaagaacgtctaccgcaagctagatatcaagcaccaccacgagaaggcgcggtgac

SEQ ID NO: 138006 - DNA, 717 bp, Zea mays
  unsure (1)..(717): unsure at all n locations
  Clone ID: MRT4577_57338C.1
ccggcaatccagcaacacccgacgcgcaagccagtgccgcacccagaccagatctccgcgacatatcagtcgttcgtccagctaactgcactgcactgcactgcacgcaatggccaccacggcgaccgaggcggccaaggctgcaccggcgcaggagcagcaggccaacggcaacggcaacggcgagcagaagacgcgccactccgaggtcggccacaagagcctgctcaagagcgacgacctgtaccaggtaaacaagctgagcgcaatgagtggctgaatctgaccgggatctgagtctctgaccgcgggggaagaatgatccgcagtacatcctggacacgagcgtgtacccgcgggggccggagagcatgaaggagctgcgcgagatcaccgccaagcacccatggtatgtcccgctagcttttcgccctgtcgtacgtggtggattcgagtgtgtgggcctgctggacgtggacagaccgagatctgagaacgaacgtggcgtggcgtgcaggaacctgatgaccacctccgccgacgagggccagttcctcaacatgctcatcaagctcatcggcgccaagaagaccatggagatcggcgtctacaccggctactcgctcctcgccaccgggctcgcactcccggaggacggcacggtcggngccctttctctctttctctctctctctctttcccagatctgccacccac

SEQ ID NO: 138007 - DNA, 1377 bp, Zea mays
  unsure (1)..(1377): unsure at all n locations
  Clone ID: MRT4577_57339C.1
cctcgaggccggccgggctggcccggcagtggcagccaggctctcacacgcctcgcctagtcgccttgccgccgcgcgttatataagccgccccggcaggcacggtcggtcgatccagcaatacccgacgcgcaagccagtgccgcgcccagatctccgcgacagatcagtcgttcgtccagctaactgcactgcacgcaatggccaccacggcgaccgaggcgaccaagacgactgcaccggcgcaggagcagcaggccaacggcaacggcaacggcgagcagaagacgcgccactccgaggtcggccacaagagcctgctcaagagcgacgacctctaccaggtaaacaagctgggcgcaatgaatggctgaatctgaccgggatccgagtctctgaccgcggggggagaatgatccgcagtacatcctggacacgagcgtgtacccgcgggagccggagagcatgaaggagctgcgcgagatcaccgccaagcacccatggaacctgatgaccacctccgccgacgagggccagttcctcaacatgctcatcaagctcatcggcgccaagaagaccatggagatcggcgtctacaccggctactcgctcctcgccaccgcgctcgcactcccggaggacggcacgatcttggccatggacatcaaccgcgagaactacgagctaggccttccctgcatcaacaaggccggcgtgggccacaagatcgacttccgcgagggccccgcgctccccgtcctggacgacctcgtggcggacaaggagcagcacgggtcgttcgacttcgccttcgtggacgccgacaaggacaactacctcaactaccacgagcggctcctgaagctggtgaggcccggcggcctcatcggctacgacaacacgctgtggaacggctccgtcgtgctccccgacgacgcgcccatgcgcaagtacatccgcttctaccgcgacttcgtgctcgccctcaacagcgcgctcgccgccgacgaccgcgtcgagatctgccagctccccgtcggcgacggcgtcacgctctgccgccgcgtcaagtgaaaaaaagaagaagaagaaaaaaaccataataccctgcgttcctgctgccccggctgtctggcccccactactgccaccgacggcggcgccgcacccccgttccaatcatcatatcgtagacgacgcgcagcattaaattatcaatcaccggctctggctctgtcttggccctgtactgtactgatgttccttcttgttttttttttcttgggaattgtcgcagtttcagtatacgtaaaatctcgaggtcgataatccaataataatccccccaatttagctaaaaaagaaaaaaagngaatt

SEQ ID NO: 138008 - DNA, 765 bp, Zea mays
  Clone ID: MRT4577_5733C.1
gactgcgctcctcatcgaccagcgtggccatattttgcatttgttcctgtttcagcttgtgagcgactgatactactgtcccggcccatcgttactggaccaagaactttgagatgtggtaattagtttatgattttgcatttgtcccggttggtgctactactgttgccatagcaggaaacgctgcaaaacaaaaaacaagtcccaaaattcattttaatctttaatttgctcatgattttgcattagcttatgattcactaaactgttagggccatgcagaatcaatcatttttggctctttcatgcaccacatatttcagcagcacagaaagtttatgggtgaaaatggtcatttggttcaggcccaaactaaaaccattcaggattattgaccaactgaattcaattaaaaattcttcagataggaactggtttttcaggaatgcttcaaacaaaaattcgttaagaaataatccatatttaatctgggccttcagtttactcaatttgtcttttaccacatcaatgaaaaagttcaacgagaaattaaataagccatcaggcttctgaggaacaggagcagtttgtggaggtataaacaaaatcaacctccatgattaaacaaaagttcaacgagtaattaaataagcgcccgctgggtcgttcgttgccagatcatgttttttaggtctgtctacctccatgattattaattttttttcgagcgatcccgatttcaacaggggacacgagaacggcttt

SEQ ID NO: 138009 - DNA, 1582 bp, Zea mays
  Clone ID: MRT4577_57340C.1
cattgggtacctcgaggccggccgggatccagcaatacccgagtacccgacgcgctagctagttctattgccgcaccccagatctccaggagggactcgttctttcagctaactacactgcacgcaatggccaccacggcgaccgaggcggcgccggcgcaggagcagcaggccaacggcaacggcgagcagaagacgccggcactccgaggtcggccacaagagcctgctcaagagcgacgacctctaccaggtaaacagagagcacactccggatcctgcctgcccatttccggcctcgcgctctagatcttatcttccgtggctcgaatctgaccgggggaagaatcacttccaccagtacatcctggacacgagcgtgtacccgcgggagccggagagcatgaaggagctccgcgaggtcaccgccaagcacccatggtatgttccgctttcccgggccgatctctcgacggcgacctagctgctggacgacagatcgagatctgaaaacatggcgtgcaggaacctgatgacgacctccgccgacgaggggcagttcctgaacatgctcatcaagctcatcggcgccaagaagaccatggagatcggcgtgtacaccggctactccctcctcgccacggcgctcgccctcccggaggacggcacggtccgtcgttgttccctcccttttcccagatctgccaccccacctccctgaaggcgaagcagctagcggtcctcccactgataaaccaaggattcctctctccctctctttgttgttcgtcccgccccgcagatcttggccatggacatcaaccgcgagaactacgagctgggcctgccctgcatcgagaaggccggcgtcgcccacaagatcgacttccgcgagggccccgcgctccccgtcctcgacgacctcatcgcggaggtacgaaatggccgccagatctgtgcttcttcgcctatatcgaccgagtagaagttgacatgacatctcggaaccgtgtctgtctgcatctgcgcaggagaagaaccacgggtcgttcgacttcgtcttcgtggacgccgacaaggacaactacctcaactaccacgagcggctgctgaagctggtgaagctgggcggcctcatcggctacgacaacacgctgtggaacggctccgtcgtgctccccgacgacgcgcccatgcgcaagtacatccgcttctaccgcgacttcgtgctcgtcctcaacaaggcgctcgccgccgacgaccgcgtcgagatctgccagctccccgtcggcgacggcgtcaccctctgccgccgcgtcaagtgaaaacatgccctggcctggcctgccccaccaccgccaccgacggcgccgccggccgcatcctcattccaatcataatagacgacccgcagcattaattatccaccggcttttttttttggctctttcttgcccctgttatctttctcctcctcttcttcttgggaattgtcgctgccgtttcgatacgtaaatcacgagatcggtaatacagtaatgctcctcaattttacaataaaaaaaaaaaaaaaaaagcggcc

SEQ ID NO: 138010 - DNA, 1200 bp, Zea mays
  Clone ID: MRT4577_57341C.1
cctgtgcggcgctcgaggcggccgggcttcccgggccgggaatccagcaatacccgagtacccaacgcgctagctagttctattgccgcaccccagatctccaggagggactcgttctttcagctaactacactgcacgcaatggccaccacggcgaccgaggcggcgccggcgcaggagcagcaggccaacggcaacggcgagcagaagacgcggcactccgaggtcggccacaagagcctgctcaagagcgacgacctctaccagtacatcctggacacgagcgtgtacccgcgggagccggagagcatgaaggagctccgcgaggtcaccgccaagcacccatggaacctgatgacgacctccgccgacgaggggcagttcctgaacatgctcatcaagctcatcggcgccaagaagaccatggagatcggcgtgtacaccggctactccctcctcgccacggcgctcgccctcccggaggacggcacgatcttggccatggacatcaaccgcgagaactacgagctgggcctgccctgcatcgagaaggccggcgtcgcccacaagatcgacttccgcgagggccccgcgctccccgtcctcgacgacctcatcgcggaggagaagaaccacgggtcgttcgacttcgtcttcgtggacgccgacaaggacaactacctcaactaccacgagcggctgctgaagctggtgaagctgggcggcctcatcggctacgacaacacgctgtggaacggctccgtcgtgctccccgacgacgcgcccatgcgcaagtacatccgcttctaccgcgacttcgtgctcgtcctcaacaaggcgctcgccgccgacgaccgcgtcgagatctgccagctccccgtcggcgacggcgtcaccctctgccgccgcgtcaagtgaaaacatgccctggcctggcctgccccaccaccgccaccgacggcgccgccggccgcatcctcattccaatcataatagacgacccgcagcattaattatccaccggctttttttttttggctctttcttgcccctgttatctttctcctcctcttcttcttgggaattgtcgctgccgtttcgatacgtaaatcacgagatcggtaatacagtaatgctcctcaattttacaatatactcctactattactactgctaaaaaaaaaaaaaaaaaaagcggcc

SEQ ID NO: 138011 - DNA, 328 bp, Zea mays
  Clone ID: MRT4577_57342C.1
gcagtgcttcaccctcgcgttgaagggcaaagcctggagggctggcggcggacgaagcgatgtcctggcgtccgttggagtgtcatcttgcggcgtaagagccgaactaccacccactgtccaaacgacggaagatgaggaggcgcgcgtcaggcccgaggcggaaaaagccgagctcgacgaggagatcgtcacgttgaaggctgagatcttcgccctggaggaagagttgaccacgatggatgcccacgtcgccggtacgcacgcgagcgcttctcactctcgtgtctcagctatgccactgtgattggctggagctgatgtcgta

SEQ ID NO: 138012 - DNA, 383 bp, Zea mays
  Clone ID: MRT4577_57343C.1
gccatcttggccggatcggttgccaccaacgctcaggtctaaatctggttgcctaccgccttggcatcctccgacgcgtaatggacgctacccgcatcaaggtgtgttgccttagctaggtgctgcctagcgcacgcaagagcgggggccaggcaaaggtggtagatatccggccagcagctgcatcggtcccgaccgggtacagtacctcgtacccttttgcggcgagcccctacgctaccttaccgtcgagttccacagagactaccgctgggacaccgccaggctgtccggcgaccccgagacctttggcaagaaccgcgagctggaggtgatccactcccgctgggccatgctcagcgcgctcggatgcgtcttacccg

SEQ ID NO: 138013 - DNA, 2381 bp, Zea mays
  Clone ID: MRT4577_57344C.1
gccggccgggccggggatccagcaatacccgacgcgcaagccagtgccgcgcccagatctccgcgacagatcagtcgttcgtccagctaactgcactgcacgcaatggccaccacggcgaccgaggcgaccaagacgactgcaccggcgcaggagcagcaggccaacggcaacggcaacggcaacggcgagcagaagacgcgccactccgaggtcggccacaagagcctgctcaagagcgacgacctctaccagtacatcctggacacgagcgtgtacccgcgggagccggagagcatgaaggagctgcgcgagatcaccgccaagcacccatggaacctgatgaccacctccgccgacgagggccagttcctcaacatgctcatcaagctcatcggcgccaagaagaccatggagatcggcgtctacaccggctactcgctcctcgccaccgcgctcgcactcccggaggacggcacgatcttggccatggacatcaaccgcgagaactacgagctaggccttccctgcatcaacaaggccggcatgggccacaagatcgacttccgcgagggccccgcgctccccgtcctggacgacctcgtggcggacaaggagcagcacgggtcgttcgacttcgccttcgtggacgccgacaaggacaactacctcaactaccacgagcggctcctgaagctggtgaggcccggcggcctcatcggctacgacaacacgctgtggaacggctccgtcgtgctccccgacgacgcgcccatgcgcaagtacatccgcttctaccgcgacttcgtcctcgccctcaacagcgcgctcgccgccgacgaccgcgtcgagatctgccagctccccgtcggcgacggcgtcacgctctgccgccgcgtcaagtgaaaaaaagaaagaaaaaaaaaacacacataccctgcgttcctgctgcccccggctccgtctggcccccaccgccaccgacggcggcgccgcaccccccgttccaatcatatcgtagacgacgcgcagcattaaattatcaatcaccggctctggctctttcttggccctgtactgtactactactatactaatgtcccttcttgttttttttttcttgggaattgtcgccgtttcagtatacgtaaaatctcgatgtcgataatacagtactactaccaatttaactaaaaaaaaaaaaaaaaaaaaaaaaaaatacccgacgcgcaagccagtgccgcacccagaccagatctccgcgacatatcagtcgttcgtccagctaactgcactgcactgcactgcacgcaatggccaccacggcgaccgaggcggccaaggctgcaccggcgcaggagcagcaggccaacggcaacggcaacggcgagcagaagacgcgccactccgaggtcggccacaagagcctgctcaagagcgacgacctgtaccagtacatcctggacacgagcgtgtacccgcgggagccggagagcatgaaggagctgcgcgagatcaccgccaagcacccatggaacctgatgaccacctccgccgacgagggccagttcctcaacatgctcatcaagctcatcggcgccaagaagaccatggagatcggcgtctacaccggctactcgctcctcgccaccgcgctcgcactcccggaggacggcacgatcttggccatggacatcaaccgcgagaactacgagctaggccttccctgcatcaacaaggccggcgtgggccacaagatcgacttccgcgaggggccccgcgctccccgtcctggacgacctcgtggcggacaaggagcagcacgggtcgttcgacttcgccttcgtggacgccgacaaggacaactacctcagctaccacgagcggctcctgaagctggtgaggcccggcggcctcatcggctacgacaacacgctgtggaacggctccgtcgtgctccccgacgacgcgcccatgcgcaagtacatccgcttctaccgcgacttcgtcctcgccctcaacagcgcgctcgccgccgacgaccgcgtcgagatctgccagctccccgtcggcgacggcgtcacgctctgccgccgcgtcaagtgaaaaaaagaagaagaagaaaaaaaaacataataccctgcgttcctgctgccccggctgtctggcccccactactgccaccgacggcggcgccgaacccccgttccaatcatcatatcgtagacgacgcgcagcattaaactatcaatcaccggatctggctctttcttggccctgtactgtactattaatgttccgttcttgtttttttattcggaattgtcgccgtttcagtatacgtaaatctcgaggtcgataatacagtaatactaccaattt

SEQ ID NO: 138014 - DNA, 450 bp, Zea mays
  Clone ID: MRT4577_57345C.1
aaaaaaaaaaaataaaaaaaaaaaaaaaaaaaaaaaaaaaaaaaaaaaagatcgccgccatggagacactggcgagcgtcatgcggcgggacaaccgccgcttcaagcccccgccctcctcctccgccgccgccgcctccgcctccgccggaagggcccccctcgtcatggccttcctcgcctgcctcgcctgggtgtacgtcgccggccggctatggcaggacgcgcaaacccgggcggtcctctccggcctcctgcaaaaaagcaccagcaatctccccagggagatctcgggggacgacaagctgagggacctcggatgcactgggattgggaggaaaatcgccgaggcggaaatggacattgccaaggcgaaaagcgagggctacttgtgggggaacgggactggtggtactggtactgagggttccggcaggaaaaagttccttg

SEQ ID NO: 138015 - DNA, 1281 bp, Zea mays
  Clone ID: MRT4577_57346C.1
agcgtcacattggccgtcgcgttggcctacttggcagtggatgccaagctctcacatggctcatcttcgccttcgccttgccgccgcgcgttatataagccgccccggcaggcaaggtcggtcaatccagcaatacccgagtacccgacgcgctagcctagttctattgccgcgcaccccagatctccaggagggactcgttcgttcagctaactacactgcacgcaatggccaccacggcgaccgaggcggcgccggcgcaggagcagcaggccaacggcaacggcgagcagaagacgcggcactccgaggtcggccacaagagcctgctcaagagcgacgacctctaccagtacatcctggacacgagcgtgtacccgcgggagccggagagcatgaaggagctccgcgagatcaccgccaagcacccatggaacctgatgacgacctccgccgacgaggggcagttcctgaacatgctcatcaagctcatcggcgccaagaagaccatggagatcggcgtgtacaccggctactccctcctcgccacggcgctcgcccctcccggaggacggcacgatcttggccatggacatcaaccgcgagaactacgagctgggcctgccctgcatcgagaaggccggcgtcgcccacaagatcgacttccgcgagggtcccgcgctccccgtcctcgacgacctcatcgcggaggagaagaaccacgggtcgttcgacttcgtcttcgtggacgccgacaaggacaactacctcaactaccacgagcggctgctgaagctggtgaagctgggcggcctcatcggctacgacaacacgctgtggaacggctccgtcgtgctccccgacgacgcgcccatgcgcaagtacatccgcttctaccgcgacttcgtgctcgtcctcaacaaggcgctcgccgccgacgaccgcgtcgagatctgccagctccccgtcggcgacggcgtcaccctctgccgccgcgtcaagtgaaaacatggcctggcctggcctgccccaccaccgccaccgacggcgccgccggccgcatcctcattccaatcataatagacgacccgcagcattaattatccaccggctttttttttggctctttgttgccccctgtaatctttctcctcctcttccttcttgggaattgtcgccgccgtttcgatacgtaaatcacgagatcggtaatacagtaatgctcctcaattttacagcgaaaaaaaaaaaaaaaaaaaaaaaaaaaaaaaaaaaaaaaaa

SEQ ID NO: 138016 - DNA, 136 bp, Zea mays
  Clone ID: MRT4577_57347C.1
ggacctcagcggcggcggatcaaggagcattgatagcggcagcagcacaccgtccagccccgagcagtgtcgggccagatgggaagaacatgagagtgaaattcaccgcgcgcgaccgcgcctcgttcagttcagc

SEQ ID NO: 138017 - DNA, 571 bp, Zea mays
  unsure (1)..(571): unsure at all n locations
  Clone ID: MRT4577_57348C.1
ggggtgttgggtcttttcgcgtggccggcggcggcgggtgctcggagcgggcccgcctgtgggacggcctacagcaagatcgcgcgcgacgagatgcttggcgagggctgtgactactttatgtgtctcatcacggatggcactgtccgggcgggggggcggcgngggaggagatggtcggggcttgcctgcacactcgcggggggggccgcggcagggatcgcgaggacagtgagagcctgtggggtgacaaccacccgacttatgccggttttgaggcggcagggaccgggggaggggaccgaccctttagaggttggccttatgcaccattcgtcctacccgatgggtctcggtgcctcattagagctgggctccgcgcacaccagcatctccatggggtcatatctcttccaccacaagcaggttatcctggttgtgctcatgcactgtctggaatcggagtttttgaggattaatgtgaggttttggtaaagaagacttgttcggtcctttttttgggggcttcttaagatgtatcctatgagtaggttatgcctaaaattggaaa

SEQ ID NO: 138018 - DNA, 1974 bp, Zea mays
  Clone ID: MRT4577_57349C.1
atgccacccacgccgccggagacggagacggagccggaattcgccgaggtcgaccccaccggccgctacgggcgggtaatgcctctcttcccttcccccgaccaccctccccgcctccgatccctcgccacccccgctgccgtgctcacgcattccgcactcttgcagtacacggaggttctcggcaagggcgccttcaagacggtgtatccttccattccccctgggcgtttgacgcctgggtctgattcggggccctttgacttcgcgcgatcgattaaagatcccggctttacgcgatacaaagcttttgatcaacttgaaggactagaagttgcttggaaccagatcaaagttggagatttacttcggaacaatgatgatttggagaggctgagatcagaagtgcggttgcttaaaaccctcaagcataaaaacataataaagttctacaattcatggcttgacaaaagaagcaacaatataaatttcatcacggaggttttcacatcagggacgttgcgccagtaccggattaagcacaagaaggtagacattagagctttaaagaaatggtcaaggcaaatcttgagtggtcttgtctacctgcacagccatgatccaccagtgatccatagagacttaaaatgtgacaatatattcgtgaatggaaaccagggtgaagtaaagattggagaccttggtttagcgactatcctggataatgcacgttcagctcatagtatcattggtacaccggaattcatggcaccggaactctatgacgaggaatataatgagcttgtagacatctatgcttttgggatgtgtttactggagcttgttacatttgagtacccatattgtgaatgttcaaatgcagcacagatatatagaaaaggtgaaaagccaggttcactggctaagattggtgatcctgaagtaaaattatttatagagaaatgcattgctaaagtcactgaaagactttcggcaaatgaactcttaatggatccttttctcctagatgttagtgatgaaaaaatattctatccagtgcatccaaatattaatacaacaggtagcatgtcagattcacatccttctgataactatgtacatgacactgtggatccacatgctgcaattggtcgaagtatcacagtcgagagtcaacggaaggatttgaatacaatatttttgaagctgcgcattgctgatccaacaggtcatgcccaaaacatccacttcccctttgatattgaagcggacacttcaatcagtgttgcaactgagatggttgtgcagctcgatctcacagatcaagatgtaacggcaattgcagaaatgatagatgctgaaatacgttcgcatattcctgattgggcagcagaggagtcaattgacaaccaaggggatgaagctgctcactctgagacccatagttcagaaggtgatgagggaacttctgaactgcgtgatgagatcggtgcctcacataacggttttgttcaagaacagcttccctctggacggaagtactgtagtgccaatggaataccaaagaggaacaaagtagatggcattgtgatctgtgcacgagatgaggaggatcaatccttcggctcttccatccatcccgctgaagccatgtttgaacgaatatcatcatctgtggacttgtcgaacccatctgcggtcgacagcatgtctagggatgcttctgttggtggcagccctcactctttagacggtgaggaggagcacaattctgatcagcatctggcagcaggtgtcactgagaggttaatagacctgttggctcagcagcaagaggagcttcgtgcgctgcaaaggaagcacaaggcggacatagaggagatgctgaaaatcgtacctgcggaggatcgggaagagaccttaactctatgccacttgaaggcggaacagaaaaacagagccgccgaaccttag

SEQ ID NO: 138019 - DNA, 260 bp, Zea mays
  unsure (1)..(260): unsure at all n locations
  Clone ID: MRT4577_5734C.1
cttgctcaagtagatccctcttctttttacttctcgacctaccaagctagctgcgtgcctaagacaatttttcggtacgacacannaccccacaacctatcaatctagaactaactaacacaacacgcaaaaattacataattactaatattttgtattcaataaactataaaataaattaatctaaaccatgttatatacaaagaaatatcaaacccatatatatataatcaaacattaaaatataaacttactttttt

SEQ ID NO: 138020 - DNA, 216 bp, Zea mays
  Clone ID: MRT4577_57350C.1
atataatttattttttttttacactcgaaacaggcaggtatagtataaatatccctcagatcacgccggcaagaatacatgccttatctcccagacttcccaggggcgagcgtgatatataagaagactagcatcagtgcaaagaagcctggctgagggaaacacgtaccgaatctatcagagcaacatgcatggaccatggagcatataatcaat

SEQ ID NO: 138021 - DNA, 701 bp, Zea mays
  Clone ID: MRT4577_57351C.1
aattcggcatcaggacgaggctgagtctcgatgaccttcgtctccactctccagcacgcagtcgcagttgtcgtctggggtggtggtgggccgaggtggagtcgtcggatctcacacacgcaactctctcaagactcaagcgaggaaaggttgctttccggccggaaagggaggcgagcgcgagacccctgtgatcccaattaagcgcccagccgcgacggccccaaaacggcaaacctccccagcccgcccgcccgcgccgcccgaccgcgatgccacccacgccgccggagacggagacggagacggagccggaattcgccgaggtcgaccccaccggccgctacgggcggtacacggaggttctcggcaagggcgccttcaagacggtgtatccttccattccccctgggcgtttgacgcctgggtctgattcggggccctttgacttcgcgcgatcgattaaagatcccggctttacgcggtccatgccatgggaggggaccgtttcttaggttctcgccgatttggattggctccatggtttctgatgcgctcattgctcaaagttccaggcccgatgccactctctctatatatgaatatgatgcctcacatattgccttttttgttgggaatcctgatctcctttcatttaaaatacgtgaccgcattgctctgctgtgactgcctgatgcatt

SEQ ID NO: 138022 - DNA, 2980 bp, Zea mays
  Clone ID: MRT4577_57352C.1
gtcgtcctgcgtggtggtgggccgaggtggagtcgtctgcatctcacacacgcaactctctcaagactcaagcgaggaaaggttgctttccggccggaaagggaggcgagcgcgagacccctgtgatcccaattaagcgcccagccgcgacggccccaaaacggcaaacctccccagcccgcccgcccgcgccgcccgaccgcgatgccacccacgccgccggagacggagacggagccggaattcgccgaggtcgaccccaccggccgctacgggcgggtaatgcctctcttcccttcccccgaccaccctccccgcctccgatccctcgccacccccgctgccgtgctcacgcattccgcactcttgcagtacacggaggttctcggcaagggcgccttcaagacggtgtatccttccattccccctgggcgtttgacgcctgggtctgattcggggccctttgacttcgcgcgatcgattaaagatcccggctttacgcgatacaaagcttttgatcaacttgaaggactagaagttgcttggaaccagatcaaagttggagatttacttcggaacaatgatgatttggagaggctgagatcagaagtgcggttgcttaaaaccctcaagcataaaaacataataaagttctacaattcatggcttgacaaaagaagcaacaatataaatttcatcacggaggttttcacatcagggacgttgcgccagtaccggattaagcacaagaaggtagacattagagctttaaagaaatggtcaaggcaaatcttgagtggtcttgtctacctgcacagccatgatccaccagtgatccatagagacttaaaatgtgacaatatattcgtgaatggaaaccagggtgaagtaaagattggagaccttggtttagcgactatcctggataatgcacgttcagctcatagtatcattggtacaccggaattcatggcaccggaactctatgacgaggaatataatgagcttgtagacatctatgcttttgggatgtgtttactggagcttgttacatttgagtacccatattgtgaatgttcaaatgcagcacagatatatagaaaaggtgaaaagccaggttcactggctaagattggtgatcctgaagtaaaattatttatagagaaatgcattgctaaagtcactgaaagactttcggcaaatgaactcttaatggatccttttctcctagatgttagtgatgaaaaaatattctatccagtgcatccaaatattaatacaacaggtagcatgtcagattcacatccttctgataactatgtacatgacactgtggatccacatgctgcaattggtcgaagtatcacagtcgagagtcaacggaaggatttgaatacaatatttttgaagctgcgcagtgctgatccaacaggtcatgcccaaaacatccacttcccctttgatattgaagcggacacttcaatcagtgttgcaactgagatggttgtgcagctcgatctcacagatcaagatgtaacggcaattgcagaaatgatagatgctgaaatacgttcgcatattcctgattgggcagcagaggagtcaattgacaaccaaggggatgaagctgctcactctgagacccatagttcagaaggtgatgagggaacttctgaactgcgtgatgagatcggtgcctcacataacggttttgttcaagaacagcttccctctggacggaagtactggtcagactcacccaggagagacggtgaaatatctcaatcggtggtggaacatcaaattggtgatagtagtgccaatggaataccaaagaggaacaaagtagatggcattgtgatctgtgcacgagatgaggaggatcaatccttcggctcttccatccatcccgctgaagccatgtttgaacgaatatcatcatctgtggacttgtcgaacccatctgcggtcgacagcatgtctagggatgcttctgttggtggcagccctcactctttagacggtgaggaggagcacaattctgatcagcatctggcagcaggtgtcactgagaggttaatagacctgttggctcagcagcaagaggagcttcgtgcgctgcaaaggaaacacaaggcggacatagaggagatgctgaaaatcgtacctgcggaggatcgggaagagaccttaactctatgccacttgaaggcggaacagaaaaacagagccgccgaaccttagataaactgtctcatgtgcatgttcctctgtgtgctgttagatttatacatactcacaccaaggagttgttgtttacactttacagccgttgttgtgcaaaagttggacatctgttgtgcagaagataagtctgaagcctttttcattgttcttttttgacataatggagaagctgggggagtgcttgtctggaggacctccaattcagtgaccgagcactaaatagtaatcaggttctttttgacataatggagaaggttggtttttgacggcaaagatgaagtttctgcccaccaaatgaaatctgcagatgccactttgatgccgctgcgtgcctgaattaacggttcataaggagtgcctcccttcctttttcttttgttttcttttttgtttcttctgtactttgacttgccaaggatatacatcagtgtttgagctgttccaaacttgcaatgacagactttaaagtgcaattattttccggatcaaaaaaaaaaaaaaaaaaacaaaaaaaaaaaaaaaaaaaacgagaaaaaagggaaccaaacggggccccttgcggcccgcccccggtgcctgttgcccccgcggcccccgtcttggccgcccccccccggggccgccctctttcgccccgggcgccctgcccccccgcgtgatcaccttgaaggactagaagctgcttggaaccacatctgcgctggaaattttacttcgagaccatgatgttttg

SEQ ID NO: 138023 - DNA, 1513 bp, Zea mays
  Clone ID: MRT4577_57353C.1
cctcgaggccggccggggatcttcactttagtcttcacggtaaaccgagtgcttcccacgagaaggtgatccaaattacttcttgttaaaagacgctggagttcgggacgctccccgcgcttcacgcgttcggagagttcggcctgctgacgcgtgctcaactgcccattcacggacccgagatatttcttcaattctttgagccattcgcgtctgcgtccgctcccccatatccgatcgatctttgagccattcgcgtctgcggccgcgcccccatatccgatcgatccactgcacctcgcgagcgatagggcaactcccctgcacgaatccactgctcctcgtccctgcgccgccgccgctcgacggagtcggcctcatcgccgctcggaatcaagtctcccccccaacgcacacacatgctcgccagatcccctccgtctccaccgccgtggtcgagcaagtgggtcaagtcgctggtggccctcaaggtggccgagaaggcggcgggacataagggtggccataggtaccatctcaggtggagctagccggtcgtgtccacggcgagcgctagcgagcgcagtgcgctggcgtccgaggcttctgcggcttcgactgactcgtattcgttgaaacaaactgaagcagcgctattagggatcagcgaggttgaggaagtccagctggaagttgctcgcctcggtgaaacgcgcggacccgaccagggcgcctgccctggtgatgcggcagccgccggggccggggccgagggtgacggcgcaaccctgcctgacgagctggccggtggacaccaggttcaaatccagaccagggacgtaccacacgtcgtcgaggacgatgcgctccgtgcgcaccgacccgcttccgcggactcgcagcggcagctctcttccattgaccacctggtggacgacggcgccctcaccgttgttgccattgccgtggccgccggtcagaagcaggctctggttgcccgtcatatgatgcaccgctgcagacgcggcgaaccaggtcgatgactcacgcggcggactgcatttgacccgtctgcttgcatcgtcctcgcctctcgctcctttattatgtccaaggaaacaagtctcgaatctggccacttggagcaggaagcagaatggaactagaacggccaggatgaagacacagacgaatgttgttacgacctcgctggagctgacggcaccgaatgaaccggtgagcccaatcagaagcaaaagcgcaaaatgctttcttttcagtagcagcagcttgtggatcgccaacttggaataacttagcagtgtttcttggttgctgccgtcgtctctcatggccactctgttccactgatccaatgtcagatctttactagctaacaagcttgatccaatttgtatcattaaattcttttatattcctgttattttccgctcctctactaatgagaagtatttatcctttcaaaaaaaaaaaaaaaaaaaaaaaaaaaaaa

SEQ ID NO: 138024 - DNA, 398 bp, Zea mays
  Clone ID: MRT4577_57354C.1
gggccgggggcccccctttggaaaaaaaatttttccccctttaatttggggggttgaaccgccagaggaaaacgttctgtttttcttgggccgcctttataataaaaccagctttttgcccttaaataggggtttttttacccaaacccaggcaaaggaacccgggttttttaggggcgaaaaacccccaaccccgggggggggggggggcctaatattttattaataggggggggggtttttgggttgggcctgggcctgggcctggattttgggcccccttcccgggttatgcccccggcccgcccttttttacaaacgccagcgctttttttggtaactgggcaaccttaaaaacttttgtcccgttggggggcccggtgcccccataaacgggc

SEQ ID NO: 138025 - DNA, 2631 bp, Zea mays
  Clone ID: MRT4577_57355C.1
atgtctggagatcatgccaagagggagatcatgactggtgaaaagcccacgggctcggggaggactctctcaagggagtccgacaacaagtataaggaggaatcctcttcctccatcaagtcacatcagagaggtgacaacaacaacaacaagaagaagaagaagaagaaaaagaaagtggtctactacgagaccgactcttcgtcaccctccacatccagcaccgagtcgtcgactacttctaagcgccatgaacgcaagaagtataatgtaaggggggaatgtacaaaaggactctcaaccccgacacgtgggctcagagacataacaaatgagataactggagcaactaatgtcggtcaccttgcaccatccccctgtgccccgacatccgccgctcgagtagaattggccagggtattctttgccccgaggtcttttcgtgggcggtccggacctcacttaggggggtccgggtcccgccgaagctcggggtccggcattctctcacgggggtccgaatccactgatgatattaagtcataccgcctgcacgtatgtctccgcagttggcaagtacgtggcccccgctcccgccagtttcgtcggggtgcgcgcggggcgccttattgccgccgcctaaaaaatatcttccagcggcccctaggcgacgtgcggtcgtgcgtgacggttcgcttccgggaggacggcccgtcttccatacacttcgaggctggttctctaggtgtgtgtcatgtggacctaggcccccatgtcggggaccgggttactgaattcggtctccagctgcagcacctcacaccccactccatcctccaggcggccatctttgctcacctgtgcgagatgttcgtgcgggtggcaccatgcacctctctcttccgccactttttcgtgctggtgaagtccgggaaggccaaggaccatctcggtgcgtattacttccagacaagggcggattcggccggcgcctatatctcctccctcagcggtgcgaggtgggaaaactggcgggccgaatgggtgatcgctagtaccgaggctagcgaccgcctcgcacttctgagtgacaggccgaggcttgagaggaagctatggagagctaagccgtcgttggtgccggagttcgagcccgtgttgggcaggatcgagtctctggcgacctgtggtctgacgtcaatgcatgtggtcggcgactttttgcagcgcaggatcgcgcgcgctacagacgagggcacgcttgagctgctggaggagctagagctcctggtgaaggggatcacttgtgagcccttcgttgctgagtccttgattcctcccgaggacattcctccgctttgcgatgaccaagggttgagggcagcgatcttgggctggctgccgacccttaacgagagcggcgtggcggttcgccagaccggtggtcgggacccccaccgcgggattcagatccttggtgtactggtcggagattctcggcctgccgatgccggctccagagctcccccagcaactctcagcccctctgacaagggcaagggagccgtgagcagttcttccaccccgggtggtttcgggaggtcggagggagagaggcggcaccgactgtgtcgtgccgacggatctttcgtcacggatccaccccttgattcggaccttcctcagaagcgccagaagacagccgacgggattggggaggccggctccccagctcaggactcgcaaaggcgcgctagtcctccaccagcaccaccattagtccctccgccaccgctgccaccatcatctggcctgccatcgccacaggggcagcaacatcaacaacaaaagcagcaagggcagcagacaccccgcttccaaggtcattggaaagtccaggcccccaacgccgtcggacacccaggttctggctggcactgtcgaggtagtgccgttggtcccccaggctcccgccgggggtccagtagcagcgtcgccgggccccaggttccggctgacattgccgaggcagtgccatcgggaccccaggctctagccgggagtccagtagctgcagcactgccaacggctatggcagacccaacgacggcggcgacgtcgaatataccttcggcaatggcggaacccatggggggcgtgcccgatcccgtcccgccgcccgttcttgaggagccagagttggaggaacgtaccaaagccgcgtcctgtcaatttgcttcggagcagttcgagcttgagcaggggcgtaaggacctcaaggaggacctggaggaggtgatcgagcgggaacagaaagcgacccgggaggaggctaagctggtcaagaagaaagagcgcctggaccaacgggaggtggtcatcacagagtttcatgagaagttgaaagcctacaatgcagtgctggagaagcagcgggataagcaggccgcgaccgaggcggcactacagaagctgcagcaggagcttgatgacaaggctggcaaaatctctcttgccgaggaaaaccttagggtgaaggatgcctccctagaggagcgggcgatggatctctttcgacaggagaaggacctcgcctggagggagtgtaacaccctgaatttgggggtataa

SEQ ID NO: 138026 - DNA, 415 bp, Zea mays
  unsure (1)..(415): unsure at all n locations
  Clone ID: MRT4577_57356C.1
ggttgttacaccacgcggatgcagcggaagcccttgcccacgtcgccgctcgccatgaagcactccctcggccagtcccacccggtgaagctggtgccgttcaacccggagtaccaggacgagtcggtgctgtggacggagagcggngacgatggcaagggttaacagatgtcatggccgggtgagtattttattttggcactgccaccgggggggggggaggtgatacctgaggaagaaagtgatgtctgcagccataggccgtcagagcaagccgtggtgtataaaggacggcattaacaagtactacgaagataatgtatgtagtgattgataattctaaggatgagatgaaaggttcttgaattacatggacctatcggtaagagagagagctcaaccttagaaactagga

SEQ ID NO: 138027 - DNA, 299 bp, Zea mays
  unsure (1)..(299): unsure at all n locations
  Clone ID: MRT4577_57357C.1
cgttgcccttgctctcctggcgctcgctgccagcgccccctccannacaacccacggctgtggctgccaaacaccacccattcatctaccacctccnntctatataccaccttggggggggtgcccccncancatcanccccanccatcccaataccccactcaaccaccgcacctaaccccgtgccaccaaatcgcatcctgcngcatccgcagcgncagcagcccgnncctcggccagngcgccnactctcctcagcaccaccgcaacccnncggccacgccctacggctccccaca

SEQ ID NO: 138028 - DNA, 317 bp, Zea mays
  Clone ID: MRT4577_57358C.1
tcccgacccaacccacccgtccgccagatccctccacccttcatgatttaatataacttgacatggtaaacgattgtgcatggtccattcctttgcaccctggacaacaaagctactcactaccaaacaactttcttccgcatatgccgagaacaacccacgaacaagattacaggtcatcctctatatattaacaaacgcctggaccactcaacattcaacccccatctttcagtcacaatcatcgagagcctttatgcggccatataatagcaaaccacctctatccaaaacaaccttgatgaaccctttctcca

SEQ ID NO: 138029 - DNA, 361 bp, Zea mays
  Clone ID: MRT4577_57359C.1
tttttttttttttttttttttttttttttttttttttttttttttttttttttttttttttttttttttttttttttttttttttttgggaaaccaaataaaacttgaagtttcattaaaaaacaaaagctggtagcttttggaacaaagtagttgccttttattacattacaaatgggacaatggctgcccccttttaaaaaaaaaaaaaaaagctattttttttttaaaacagattaacataactgggtttccaaacaggaaattcggaaaaaacctgggtggtcaaagttttttgggctcctggacaaacttggagtttttgagggcctccaccggaaaaatgggccgcaatttaagg

SEQ ID NO: 138030 - DNA, 262 bp, Zea mays
  Clone ID: MRT4577_5735C.1
cggatgatttcgttagcggtggaggtgtcctcaccggcgctggtggctgtggcgaacttaacagtggtgaaggaggtggtgatttcactgacgatggaggtgacctcaccggcaccggtggtggcggtgatttaatcatcggtggaggtgatggtggtgaatgatatttcaccgttggaggctgttcactcacatatgctggacatggaggcgattcttctagtggtggtgtgcttacctatacctgttgttgagggatttc

SEQ ID NO: 138031 - DNA, 683 bp, Zea mays
  Clone ID: MRT4577_57360C.1
ttttttttttttttttttgcttggttttactgcactgacatgacgtgcgttttctttgataatgtgattgtacaactacacttacaaataacaagcagatcaaagagaagaaaaaaaaagggctcttcttatactacacctactcagctaatgtacggagcacatataagcatgctgcatgcccgactgtatccggacaagaaaaaccgcacgtcctccatggaaagaagaaaaacacacgacctccatggcaagaacaactctagattccatctacaacctaataacaaagacgaaaacaaccagcaagctggatcagaaaattttgatgtcccctcttttccatataattttggataccttggaccactcgacaaacccagcctctttttttctggatagaagtcgccgtgcgatgctagcatgtgatggcccatatgacaattcctgacttttggttagatacattggtcagtgactttttgcattgccaaccggttactctggctgacgaggtgatggagccagacgagcaactctagaatgcagtcctcagtccttgccttgtcagcatggtatagcgtctcaatccgatctgctacacccggtcgcctaccaaccctctcagtccctgatttcgcccattcgctaaacctcaagaaacctcgagcgctctcgtgccg

SEQ ID NO: 138032 - DNA, 670 bp, Zea mays
  Clone ID: MRT4577_57361C.1
gtacgcctgcaggttccggtccggaattcccgggtcgacccacgcgtccgattcggaaccggagcggaagcgggcacgcgcggacgaggcgaccgcgggtgggagccgctccgaggacgaggatgaggacgacgaggactacgtaccctatgtgccgttgcggcagcgccggcagctactggtgaggggccgcatccctggtgcaacggcgacatgtccccggccgtcagcgggaggggggatctggggagctgtagtcctaccttgggtcgtggttctgaggaagaccagggactagtgaacctgagttccggacagacgtgcgcctcagtgcacacgatccccttcccggaaaaagccctcccgggtgctgtgccccctcacctgctgggtcctgggcttggctctgagggacactgctgggacctcagctccagaagctgctgcagcgaagacgcaagggcgctacggaggaagagcagcaggacagtggcagtgagccccgaggagatgaggacgacatcccgctgggccctcagtccaatgtcagcctcctggatcagcaccagcacctcaaagagaaagctgaaggtgggcctagcaggaaggagagaggacgggccttagccgcagtgctcctgcttctctgacctctttggcttcttttctc

SEQ ID NO: 138033 - DNA, 445 bp, Zea mays
  Clone ID: MRT4577_57362C.1
aacctttgggctgatttatgtgcttgttatcgtttatgagtcgatgggggaggatctgtccgtccatctacgttctgagcaaacctggttatatttagagagtaaccgttattttaacgccccgaacaaaaaaagaaatcttaatctgacctacagacctctatctagaatcgtcgtatgctgtagcgtaagtgcgccgtcggtcctgtttagtcctcccccccgttcgcgacccgtatgatacccacacccaccgaaactccgtagaactgtccgatgacgaaaaaaaaaaaaaaaaaaaaaaaaaaaaaaaaaaaagggtggttgtctcagaggacttaagtccatgcatgtgcgtacgtcatgctacagtctcctcacagcgctattcaaacctaacctatcggttgctgccccataatgcctgcgatcgggaaaatttttt

SEQ ID NO: 138034 - DNA, 354 bp, Zea mays
  unsure (1)..(354): unsure at all n locations
  Clone ID: MRT4577_57363C.1
tcttttcttttttgttaaaggcaggtgcagcgtggggggaagaagccaagggggggggggnannnnncagagaggcatagctttgcaatggatcttccgttgggaatgctgntgtcgctgctgctggtcctctccgtcttgtcctcgtcatcttcgtcggctgcttacacgctcgccgtcagctctttgttctcactgcctgtttcttcttcttgtcaatgctcaagactccctattcaattctcactcaacttaacttctatacatttccccggtagctgaacaagtatctttttcttgttttaacctctttttttctttcttgttcatttcttttttttattttttactttt

SEQ ID NO: 138035 - DNA, 1947 bp, Zea mays
  Clone ID: MRT4577_57364C.1
ggggtaccgggggccccccctcgagttttttttttttttttttttttttttttggtttgtgactaactgtgtcattgtttagtttgtgactaacaaaaaagtcgagttagacagggaaccaaatataccctgacgctacaggacgctgatcaaacaaaacaaaaaacatccatttctcttgtccaagaaagtcgtgttatcctaacaagggagtgcatccacccaggacccagcaatgaatcgatactacaatttccagctccattattctattgacatctattatgttacaaaaaagatcatatgctttacatgaacaaacgcaaaaccgaccccgaccctgaccccgttgtaatggaaaactgtacaatgctatgtactgaaatgcagccactgacagctgctcattggtggggaatggaggcacaaccgcacaatctgtatttggtggcagtaacaagcccactcaaggtggcctcactctagaaaccgttaccatggtgccttcatggttcacactccgggttgagattaacatgttccgttttgcactacaaacgctgataagaatgccgtccactagggtttgcaggagctgatggtggagagggagaagaagatggcagacggaccaatgaaggttgtggtggcggtgcggtgagggcgtaagtgagtcttgatgatgagctctcaatgagcccagcaattccagcagcagaagattgtgcattggatggaaggaaaaggtcgtgcttctggtctttgtaagcactccatacatcagaggaattcaggacttcacgaactctagcacaatgtgcaccttcggttgcaaaagcatgaagcacctccacagccaaaacacgtccaattgaagcctctgattcattccacttcatttgattacagagcccctgtcttccaccaacacgccaatcaagaataccaaggagtacttcaacaagaccaaccttaagcccctgtgcaacaagagcatcacgagcccgattaccagcaccaactacacgctttaatgtctccaatgccagtatacttccaccttgccatccaattgctttcataagcagtggtacaacctgaggagttcctgcacttgttgctgccatagcttctgcacaagttgtactagacgcaagctgatgcagaacacgcaaacaactaaggcgaacacgttcttgtggagtctgtacagtggcctcggagtgagctgagttgtcatgttcgctaggttctgccttcgatgcactggtagcctgcccagatgccatagtctcccttcttccctcataagccatagccgcaacaagctttggaacataaccgaggtagccaacatggtcagcaagtgctggatgaactcgtagtaaggaaaccaatgccgcagacagtagcaaaggaagctctggatctgtagcaattgcttcatgatgtgtagcagcaacagaggagacatactgatctaggagcccttcaaggaatcttttagggtttctcagtggaaacttgggatccttaagaaaaagtcttacataaattccaccaacctgtggttcatccttcattacatgttgcccagatgcttgttcaggtacatcccaatcaacaacacgtcctttcatctgctcttggtagaggtctgatgccattgttgccaactgtgcagaaagagaagctgccattgcgggtgtccatactagttcaggagtttccgttgtctgttcaagagaagaaacaacagcttcaccaggtccatctttaatggcagaaaccaaaccatcaggcaggaacctggcaagggtgattgccaccctggggccatgcattggttgtccaacaagtttgcccaataaagatgcagcagcagctctttgctgcatagagatttactcttgaagtggcaacataagttcaagaatgtaaacaccc

SEQ ID NO: 138036 - DNA, 295 bp, Zea mays
  Clone ID: MRT4577_57365C.1
ggattctattggagttgataccaaatataatgaaatgtcttttctggataacctttttgatgactccatgagaatagccagtgaaaactcacccaagggggaagctggtcaattgacagtgcagcatgtcaacaagagaaaatcaacatcaaaggatgaatcaaaatttggcccagtgagtattgctaaacctaaattaaaaaggtcttctggcagcgagaactctacagcaaagcctgagagtgctaaaaaggtcaaagctgacatagcatcgtcaataggttctttatcagag

SEQ ID NO: 138037 - DNA, 259 bp, Zea mays
  Clone ID: MRT4577_57366C.1
cgatccccggctcgtcgagcccactagttggcggccgccctctcgaggaggtcttgtcgcgtgtaaccgttcaatctcagcattcgtagcttccgtaagggaaaatttcaagtgagacagaattttatttataccattttttttggaaccttcagccgtcaagattccaacatcttgacctcaggttcaacacagatgtccttagtccttatgtcactgcttctgctgctgcctgctgcggaagcggtccaatgccggt

SEQ ID NO: 138038 - DNA, 339 bp, Zea mays
  Clone ID: MRT4577_57367C.1
aaaaaaaaaaaaaaaaaaaaaaaaaaaaaaaaaaaaaaaaaaaaaaaaaaaaaaaaaaaaaaaaaaaaaaaaaaaaaaaagaagggacagctttaatggataccaagttattctgtccacgtgcttgaaaaattttgtggcgtctcctttagtggtctcctggtgttccttcctttggcccgcgcgttttcctgcgtttttttctggggtaacccctggttttttccccttttatgtcgctttgcctctcttcccccttttggcccgcctggtgtgccccccattgggcccctttcggtggcctttcccttcctttgtgcggcctgtttggcaattggc

SEQ ID NO: 138039 - DNA, 530 bp, Zea mays
  Clone ID: MRT4577_57368C.1
cggcggagtcgtggggaaccggggaggtgaggtcgtgaggagaggaaaatttccaccgccgtgcagccatgtcggtgcaggagtacctggagaagcacctgctctcgcgcaagatcgaggaggccgtgaacgcggcggtccgcgccaaggcccccgacccggtgctcttcatcgcgggccacatgcggcgggcggcgcccgccgtgatcacgagggttcgggcgcgccagatccttgacgggcacggcgcgccggctgtcgaggttgagttgcacaccaacaaggccatacaccgagcatccgcggccggctcgggcgcgctcgagggcgccgccgccgacgcggccggggccgccgagaggcggaagatactcgccaaggtggtcgccgactcggtgcggatgatcaatgacaaggtatcggaggcgctcgttgggatggatccgcaggagcaggcgcagatcgaccaggctatcatggacttgaacaaggcgcgccacaaggctgagccttggatttggagcaaatgc

SEQ ID NO: 138040 - DNA, 380 bp, Zea mays
  Clone ID: MRT4577_57369C.1
aatgtatggcgccttgaccgtcataggtcacgccttctcatatttatagaagaggattacatgataatagaggattacatgataaggactctgtaacaaacataggagaaaaaggaggtgcagctccacaagaccaggagagaatatctagtcccctaaaccacctttctatagatggatataaactatatctctaacatcccccctcaatctggacggtgcgacactaagtgcagattgtgccggaacatattaaacgccgatcctgataaaggtttcgtcataatatcagcaagctgatccttcgatgatatggggcgaacatcaagttgattggcagcaacacgctctcgaacaaaatggtaatcaacttccacatg

SEQ ID NO: 138041 - DNA, 544 bp, Zea mays
  Clone ID: MRT4577_5736C.1
ccggccgggatcaccagcttcaacatccaaacaatccttccaacttacaccacaactaaaacaacaacaccaaaaaccaaaaccaactacatcaccactatgcctgcctacgagtactgctgccagtgtggaggcatgattgtcatcagcaccacctgcaccgcctgtggccacaagcagtgcaacaactgccctctctgctaaatgcccagtcaagacggcgacaacatcacctatcccactccttcttttcccctactcctctgaactctaccccagaggttgcaatgcccacgagatgagagtctcgacacaccctttctcagatgagacatgacgacttttaacgacggcgcatctccttctctctaccctcttcaacaatgacacagtcgtcacattcaccctttacttcttcgacttgattgatacccttcttcggcattccagtatcagcaacactggtctcgtttcaggtctttgttaagtttacaatgtgcttttccatctcttgcgaggcgcacaaaggaagcaaggaaatgga

SEQ ID NO: 138042 - DNA, 283 bp, Zea mays
  Clone ID: MRT4577_57370C.1
cgtacgcgagattttgaacaaaaacgagcacacaagcggtgatatcgcctttgttttttttaataaaaacttgttctgttagcattactacgaccagtcctagcgtgcagcgcggccacggcgccacgggcccatgttcgacccagatacgagcaacctcaagtcgggcgagcgtatataagcatagagcacccagccagacaatgaaagaaacggggcacgggggactcatacaggaggccatgggtccaagctagggtgagcacggaggcgctagcatggg

SEQ ID NO: 138043 - DNA, 393 bp, Zea mays
  Clone ID: MRT4577_57371C.1
gtaccggcccgaatttccgggctggcccacacgcgcccactcagcttagtgagccccatgaatactacctgcaaacacgtcgccctggaggacaggcacgcagcactgtcaaaccgtgatatagctgttacgaatagagaaggctttcatgcagctttttaggattactagtctgagctagcaacgtttactcgttacataagtctacgtgtcattgccgatctaaaacatgcatacttgttccactctgccaatattgtatccagcattgaaggccatcgagattatgaactatttcctaccgctagagtcttgaaacgaggtaaagcctgcggatgctacactgaaggttgtgttccataagatgggggttaacgatcaggccgaatgtgt

SEQ ID NO: 138044 - DNA, 263 bp, Zea mays
  Clone ID: MRT4577_57372C.1
acgcactcgtcctcaccagtctccctcgcacgtttttcagcttctctccaaatctcgcccatctggagccacgtgtctctgtaatacggcgtacaggataagaggcgctatggagccctcctagcgaatcgagtcccggactgctctggagaatctgcctaggagcatggcgctgcctctgacgcccatcatggtgactgtgccgtctgctgcgaatcatggtctccaggagctgctctcctcctcgctgccagctgccggca

SEQ ID NO: 138045 - DNA, 188 bp, Zea mays
  Clone ID: MRT4577_57373C.1
tttcccgtgtctacccactcgtcctcccactcttcctataagttgctttgttcaaaaaaaaaaaaaaaaaaaaaaaaaaaaaaaaaaagaaggataaaatataaaaattcacaatcttacatacacttacatactacttcataaacactactatagtatcacctaaatttaaattcactgtctctaat

SEQ ID NO: 138046 - DNA, 574 bp, Zea mays
  Clone ID: MRT4577_57374C.1
caggccggccgggccgggcttctcgtatgacgcggaccatggtaacgactaccaggaaccctaataccgccgcatccgcagccatgtgtatagacctcgttgatcgtggtaggaacaagaagaccgagcgcacagcggcgaagtcagacgatgtttatctcaagatccttgtcaagctctaccgtttcttggtcaggaggaccaagagcaacttcaatgctgtcattctcaagaggctcttcatgagcacaaccaatcgcccaccaatctccatgggcagccttgtcatgttcatggaaagaacggagaagaacattcgcgtgagattgttggcacagccacagatgacaagaggatccaagaggtctccaccaatgaacgttcactgccctcgaggttcaccgatgacagaaatgaccaggattgttgatgctggcacatagtgactcacatttgaccagcttgctctccgcgctccacttgtctgagaacacagtactcttgaggaggctcactaatgcccgtgaggtggcgagtgacttcgaccagtgtcctggagtgactcactgccaca

SEQ ID NO: 138047 - DNA, 298 bp, Zea mays
  Clone ID: MRT4577_57375C.1
ccccatataagtttcaactgaggttacaatcattttttcaacaaaaccttcaagtagtactttaaccgcgtttgcgtcatcacacttcactacacaattttatttataatttacgtcaattcttttctgttcctgctacaatgaatgaatatttaactgcttatatttttaagaccaataatatcatactatatgttaaacttgtattcatatcatatgactttcacttataatttttcccaaaatatttaatccttgttaaatgtcttttttactcaaaatacctttcattgaattt

SEQ ID NO: 138048 - DNA, 132 bp, Zea mays
  Clone ID: MRT4577_57376C.1
gagaaaacgtggcatgctgacttcgatgacgcgcagtcgccgacgtgggataacctgatgcacggacaggttgaacctgctgtacgccgtggcttgcaccatcagcttccgcgacgctgcgcgcggtcggac

SEQ ID NO: 138049 - DNA, 727 bp, Zea mays
  Clone ID: MRT4577_57377C.1
ccggccgggaaaatttgcaatagcatctcccgaaaagaaagcagagattacataagcaccgtaactgttcttatcgtcttgatctggtcaaagtttatagaccattcatttagcgctctagtaaaggctagaggtagtagtgtcattgcaacagaacgtacagcatcgagcggcagagatggcgagcatccgttttgtttatgcagcggccagcgcccagcggcatcaaattctaaagtaggttgcgcataacttcaccacccagttttgatttttgacccagttaggcaatcaggtcccatgtctgcatcagctggtgtgtatcactcattgatcatcgcccaatttggaacacataaatccacacaaaaagaagtcaagcatctctgcttttcaaacacacacacacaaacaaaagtaacaccatcgtgtcatatgagctgttcttcactcttcaagcagcatacagcagcagcacttaccttttgttgccatgattccttttggctcgcgtgctaggtgtggagcaatggcaagttgaagaaagtgagagggatggctcgccccacatccgcaccacccatggcggcgcagcatggcgagaccgaccgtctgtcgctgacggtccttatcactctgcctttggacaatatcgtctcgcccttggtcccgctctccatgcggccggagaagccgcgaggcgaggcaacggtgccggagcgacaca

SEQ ID NO: 138050 - DNA, 286 bp, Zea mays
  Clone ID: MRT4577_57378C.1
cgcgtcgattggcatcaaaccacagcgagacatacacacctacacatggtccaagaatatccctctgcctcttgcctttgcagccacaaatgcgtatattcaaatgctacttgctcaagtcaatacacagtctccaccagtcttaatgggcttgacacactggcagctatggtacacagcaatgcgggcgtttacacaccaattcagtgcaacacaatctggaatctaacatcaaccatgacgacagcacaacattctacacactgccactagcagggacctgcgc

SEQ ID NO: 138051 - DNA, 257 bp, Zea mays
  Clone ID: MRT4577_57379C.1
actgatacccaatggctcgttctgccttggcgatagcaagaatctttatgtgaaagtttcacgtaaacttgaaacatccatggttacaacacatcccacttcaagattctagctatggcgcactgaagattcaacaataccttaacatgcctctgacatagaagaacatgatcagcccaagaacacgaagaacgaaatggtccttgaatatctcaaaaagaactaagatccgctcaaaccctataaagcaatataca

SEQ ID NO: 138052 - DNA, 1199 bp, Zea mays
  unsure (1)..(1199): unsure at all n locations
  Clone ID: MRT4577_5737C.1
caacgggctccccaaaccctcgggcagcttctcccgtgcccctcgcgtgcgctctacgactgggcggccgccggcaccctacaccagttgcccaggtctctgtcttcgggaccttccccggcgacgagcatccaccaggtcattgctgagaaggccgagaagagcgacaccccgaaaattcacagcaaagctgatgacgaggacaaacgatgcaagtggtggtgggaagcttccccggaagcgcttctatcgcgccagggcacacagcaacccgctcagcgactcgcacttcccagtcccaatatcgcctgaagaggtcgatctctcacagcactacccgcggtacttccctgctgacaagggcagcgacggtgaggaggctgcagcgccacaacagatccgcttcgccgatgtggggtgcggatttggcggtttgcttgtagggctctcgcctctcttcccagatacgctcatgattggcatggagctcagggacaaggtaacggagtatgtgaaggagaggattttagctctaagagctgcaaacccaggacagtatgataacatatccgttgtccgcacgaactcgatgaaatacattccaaattacttcagaaaggctcagctcaccaagatgttcttcctgttccccgatccccacttcaaggagaagaaccacaggaggagggttatcagcatgcagctgttagacgagtatgcttacgtgatggaagtgggaggaatcatatataccatcactgatgtcgaggagctcggagagtggatgcggtcgtgtctagagaaacacccgttattcgaaaccgttcctgaggaagagattaaggctgaccctgttttcaaattactgtctactgccactgaagaaagccagaaggtggcaagaaatggaggacagactttctatgccatcttcaggcggatctccttacaagaagaataagtcgcttagagattataagctagatcgtgttaagtgtgtttgtaagttttatacatttttttaaaaaaaatagcagtaggtgtacttggtactaaatattgcaatgttgctttgcaaggttctgcagacccagttattttgttcagctttaaaagagtttgccaagacgattgtgttgagtttaccaaagcaatattccattgtatagagtgttcctaaaaaaaaaaaaaaaaanann

SEQ ID NO: 138053 - DNA, 382 bp, Zea mays
  Clone ID: MRT4577_57380C.1
cagatctttttgggagtagcgaatattcaaatgagaacttttaatgccgaaaatgagaaaggtgccatgttaacagcactttcacatggggaagccgatcctaaaggaccggggaaaccccgcagatagcgcgatcactctcgtcacccgaaagggaatcgggttaagatttcccaagcctggacattgcggcagacggcgactttaagaagtccagatacgccagcgggggcctcaggaagaggtatcttttttgcttaacgggccgccaaccctggaatctgttcaaccggaggtaaaggtccatcggccagaataacaccccacatctctcggttcctgttcgcccccggcgggcctttaaaattcggaggaccgaatt

SEQ ID NO: 138054 - DNA, 872 bp, Zea mays
  Clone ID: MRT4577_57381C.1
attgggtacctcgaggccggccgggcttggtaatttctaggagcgtgctatggtttccaattgaagttggtagcatccctgtgaactcattatttgaaatgacaatggtagtcaggcttctgcaattggacaatgcagctaggaaatctagattcccagagagacggttcccatcaacaaagaagcgaccgagattcagcaagttcctaaatgacattggcactgatcctgttaatctgcttctagatacgtccatttgggtaaggtccgatagattgcctatggattctggaatggcaccggttagttggttgtttgcaagacctagaaactggaggtttgtcaactgtcccagttctggtggaatccccccttgtagattgttttcactgaggtccaacacaacaagcatggtattgttgctcagctcaactgggatcattccagtcaggttattcattgacaaggctattgcagtaatgttcggaagtgttgccagccatgacggcacagggccagtgaaactgtttgcagcaacgtacagtgagtcaaggttcttgcatgcagagagtcctacagggattggcccgctgaaatggttttcttggagagacagcatttgcagcagagggaggtgaaagctcccatttccaggaatgggacctgagagattgttccgtccgacatacagtgcttggagctgcgaactattaaacaaagaaggcggcatggagcccgagaggaggtttttttctatggcgagcacctccagctttagcaatgagctgacgctatcaggaattgccccccgtcagctattcgagccaagatatatttcactcagatccggtgtgctgttgaacaggctctgc

SEQ ID NO: 138055 - DNA, 293 bp, Zea mays
  Clone ID: MRT4577_57382C.1
ctggatgcagggctggcctgggcgaccctccagggatgaggagctcagaattccagtcttctaatgtccacggacacctccccatccctctaacgtactgactatgtcttttgatttagcatgtcttctatagaccttccaaagagacccacactggcactgtcaccccctaggagggaaggtgatggttgatgtagcccgacgcgcatcttgttaatccgttctaattccgaggagagtgtgggtttaagataacacctattaatgcattgccacaataatgtgggggtaag

SEQ ID NO: 138056 - DNA, 1324 bp, Zea mays
  Clone ID: MRT4577_57383C.1
gaggccggccgggaccgcctagtggtgtggtcacgctagctgtagcttgcagagcgtcgtctgtaaatacgtagcccttccacaagcgaggcaaggggggagagcatcgtcagctagcagagagagtgcgtagcaactagcaatggcggagaaccctgctccgagttccccgctagtgacttctcccgacgccgctgcgccgcctctgccagcggagttcaccaagctcaccttccgtagcctgtacatccgtcggacaggtccaggcagccgggagatgactgtggacgggaggccgtctgaccagctgggacgacggttcgtgagcgactttcccatatacgatggccgtggctccggcgcccgcctcgtcgctcgcttgcagggagtcactgtccaaatcggcagctcgcaccagctagtcagcatcgtcttcgaggccgagaggcttaagggctccacgctgctcaccaacggagtgataacggatgggtcagacgagtgggccatctacggtggcaccggggtgttcgccatggccaccggtgtcatacgaagaaggtttctcgccggtagcaacgacggcaactctgatgagcttaccagcatcgaagttttctgcccggcgtttggctcggcacaacaacagccaaacaagcaggactccgtctctgtcaccaggattggggtatggggtggaggtggagggtcggcgcaggacatcccgacgacggagccaccacagcgtctgcacagcatcaccgttcgaactggttttgccgtcgactccatcgagttcacgtatactgacagaggtggccagaggcgcactgctgggcgatggggtggacttggcggcaaccttcgaacgatcgatcttggcgacgccgaggttgtcagggaggtctcaggaacatacggcatgtttgaaggcgccaccacgctgacctcgatcagaattctcaccagcagcagaacctgggggccatgggggatcgaggacgggacacgtttctgcatcaccgcgccgatcggcagcagcatcgtggggttctatggacgctcgaccagcaggctcgtcgctgcgatcggtgtttacctgcgtcaacaactctgatctggtcatctagctatcatcgtcgtccggtgctgtcgtatgtgtgttcatgtcaaataaataaaagtggtcttgtgtctacggctgccatcctcatgtgccaaataaatgacatgcatgcatgtgtctaaatttatattaaaaaaaaccgtcgtcaactaggtatgtatatcaaatatcaaagataagactagtaccacactcgac

SEQ ID NO: 138057 - DNA, 247 bp, Zea mays
  Clone ID: MRT4577_57384C.1
ctcctttcgctcttacaacaattaacgcgcgcttattttaatgcgactccattctactattgatcctcacatcttattacagctattcaaattaacttatacttcaattgcattatctttaaactacaactcaccctcatctgatctactatatataatgatatgtgcacttacatattattcataatatcactaatacctaatcattttacatactaactttatttacactgtttattactctatt

SEQ ID NO: 138058 - DNA, 1559 bp, Zea mays
  unsure (1)..(1559): unsure at all n locations
  Clone ID: MRT4577_57385C.1
ccggccccatgaactccacgggactctgccggacgagctctacgacgcgacctctctcgagcacatctccttcccaaacaaccgtctgcagggagcgctcagcgccgagcgtctagccgagctcaggagtctggtcgtcctcgacctcgcggagaacgaactcacgggcggcatcccggactctatcgggcggctcgagaggctggaggagcttcgcctagagcacaacagtatgtccggcgaactgccaccgggtctgagcaggtgctcgagtctcagaaccgtcattctccggagcaacggttttcatggagacctgaacagcgtcgacttctccaccttgcccaggctaaaagttctagatttcatggacaacaacttcaccggtacagtccctgagagcctgtactcgtgcagcgacctcatcgcgctccgactgtcctccaacggcttccacggtcagctctcgccggggatcggcaggctcaagtcgctcaggttcctgtccctgacaaacaactcgttcacgaacgtcacgaacgcgctccaggtcctcaagagcgcttcgagcctcacgactctgctgatcggcgacaacttcagaggcgaggcggatgccggaggacgagacgatcgacggctaccggagcctgcaggtcctgtccctggcggactgctcgctgtcaggagaaatccctcgctggggtgtcagggctcgagaacctgcgagagctgttcctgtccagcaaccggctcagtggcccgatcccggcctgggtcagcggcctgagcctcctgttcgttctggacgtgtccaacaacagcctcgcgggggagatcccgacagcgctggcggatctaccgatgctgaggtccgagacgaccgtggacgacgacgacgacgacggtgggtcttcgagccagtccgcgttcccgctgcccgtctacatggccgcgtcgctccagtaccacagggcgaactactgccccaagctgctgaacctcggcgacaacaggctcactggcgcggtgccgccggagatcggccgcctgaagggactcacgcagctcaacctgagcttcaacagcctgcgcggggaggttccgcaggccgtcggcaacctcacgaacctcgaggtgctggacctgtccagcaaccgcctgacgggcgagatccccagggcgctggagagcctccacttcctctcctacttcaacgtctccaacaacgacttggacgggcctgttccggcaggaggccagttctgcacgttccccgagctnctagcttcgcggggaacccggggatgtgcggccctatgcttgttcgccggtgcagcgctgcttctgtagaggcaggtcgtcgtgcgcccgttcgcgacgcaggactgtgtggcggtgacgtcgtcgtcttcgctgtgacctttggtgtcttcgttggagtaggcgtgctgtatgatcagatggtacggtccagatattttgggtagcgaaaagtgctgcagcaatgcaggaaaaaaaattcttcgcgtgtgcaaaagaaaaaaaaaaaaaaaaaa

SEQ ID NO: 138059 - DNA, 690 bp, Zea mays
  Clone ID: MRT4577_57386C.1
ccggccgggccgggaaaattgagtactctatgcagttgaatgcttctcgcatcaaagttcttcaagctcaggatgatctagttaacaaaatgaaagacgatgccatgaaggaacttctccttgtcagccacaaccaccatgaatacaagaaccttttgaaagacctaatcattcagctctggaggtattgtattggcttctcgagatggaaagattgtgtttgagagtacacttgacgcaagactagaagttgttttccgcaagaaattgccagagatccggaagcttctttttggccagactgcagcctaatcgactcatctgccgatggtacggctgcttctatgtaatggttgccggctgcacgcctgcactgcagccataaggaactccgcctgtttttgtcaaattgattgtttaaggtattcatcccctatgtacaaactacctattggttcattattgtcgccgagagcaccgactgtttgtactctgtttgctccgaggaataagaataaagcaccgccagactttccatcgcgaagctgaataaacgttgtaaatgcatttgttgcgctgaacattccgtttatggtttctccatgtgtatatttagttaatgtcggatgtggttcttatggaaaatagtttgtttgggcaaaaaaaaaaaaaaaaaaggcccctagggcc

SEQ ID NO: 138060 - DNA, 1094 bp, Zea mays
  Clone ID: MRT4577_57387C.1
cgggcgcgtgggcgtgcgcgtggggaaaaaacctgaagaaacagctgttctcaaagtattacgagatggtaaagagcaagaattgggagtaacacttagacctctgcaacctttagtcccagtccatcaatttgataaattaccaagctactacatatttgctggttttgtttttatcccacttacccagccctatctccatgaatttggagaagactggtataatgcctcaccacgccggttatgtgaacgggcactaagagagcttccaaagaagactggtgaacagttagttatcctatctcaggttctaatggatgatatcaatgtcggttatgaaaggcttgctgaactacaggtaaagaaggtaaatggtgtggaggttgaaaacctgaagcacctgtgcagcctcgtggaaggctgcaccgaagaaaacttaaggtttgacttggacgatgaaagagtcattgtcctgaagtaccagaacgcaaggcttgccacatcccgggtcctcaaacggcacaggataccgtcagccatatcgagcgaccttgtcgaagatcaagtaactgatggcgaggttgagacgtcatgcaccagctaatgctagactcttttttagacctaattgggagttccctgctgtagctcagctcaagaagcgagctgcattgttggcgaggcaagcgcacctgcctgcctgcctgcctggagtacatggtatcacttcctccctttagggcggctttagttttgacataaggaggagtgtctttagaaaataagattatgagctccggggcttttcagtctgaatgtaacggtaacataaccattctttactagaacatttattttttccgtcattgacaaagcaccccacatggtctgtatcatcaggaaacatatacatcgtataaaaaacatcagaaaaaggaaagatttgcagttcaaaaaaaaaaacattaaaaaaaaaagaataaccaaaaagaaaacaaaaaaaaaagcctagccatcaagacatacaaaaataacaaaccctatgtctaaaattccagacatgtaatcgcttattgcacgccatacaagacacg

SEQ ID NO: 138061 - DNA, 969 bp, Zea mays
  Clone ID: MRT4577_57388C.1
cccacgcgtccgcccacgcgtccgctccctctcatcaccaaagaactgcaactaggaacggttcgccacaaaaaaagaacgtacggctatgaagacgaggcgcggtgcctgccacgcggcggcggcggccacggcgccgggcgaggggccggaggcgcaacgccggaagcggcgcaggacggcggcggccgaggggtcgccagcggcggccggcactccaggtgtccgcccggtgggcagagacatgttcgaagagctgcctgacgatctcgtcgtctccatactacgggacgtcgccgcgtccgccagttcgccggccgatctcgccggcgccatgctcacgtgcaagaggttcagggagctcgggcagagcaaggtggtgctggcgcgggcgtcgccgcggtgcctggcggtgcgcgccaaggcctggtcggaggaggcgcaccggttcctgcagcgctgcgccgacgcgggcagcctggaagcctgctacctccttggcatgattcggttctactgcctggggatccgcggctcgggcgctgcgctgatggcggcggcggcggtgggcgggcaccgcgaggcgctctactcgctggccgtggtccagttcaacggcagcggcgggggcaaggacgaccgcgacctccgcgccggagccgcgctgtgcgcgcgcgcggcgtcgctgggccacgtgggcgcgctccgcgagctggggcactgcctccaggacggctacggcgtgcggcggtccgtgctggacgggcggcgcctcctgatccaggcgaacgcgcgcgagctcgcggcggtcgccgccgcctcgccgctgcagccgccgccgcagccgctcggcaaggcggcgccccacccgactcggcgtcactcgtgcctcctgagcgacttcgggtgccgcgccgcggccggggagccgcacgcggccaaccggttcctggcggactggttcgcgtc

SEQ ID NO: 138062 - DNA, 239 bp, Zea mays
  Clone ID: MRT4577_57389C.1
aacgaccgtagcgtgactgcgtgattgacgtggaaatatgtcagagttggacgatgagcgttctatgcaagctgcattcggtatacagacatgatgtggggagtcctccgattctgagttgccctggcatgagagcttgtggctccaatagcctgcagatgcagataaaacgatactatcttggtagcgggatgcggcatgggctaaatgaggacacggccattcgcctctgcggagcg

SEQ ID NO: 138063 - DNA, 398 bp, Zea mays
  Clone ID: MRT4577_5738C.1
atgtccgccgtcccctcgcccccagatctcgcgcacgcccacgatctcgtgcacgcccacgcgtgaacccagccccagttatgcccgcgccgagccctcacccacggatccgaggatctcctacccctctgcgccggatctgctcctcccttcgcccgagattgccgtcatcaatggaagtgccgaggatccgccggatcgcgccctcctcccctctgcgccggatccgtccgctcccccatctgtattggcagtgagggatgcggcgacctgtagtgcgacggcgtcagctcgctgcccgcttccccacgaaaaccctaatggtgtcccgcctccttcacctctgtcgcctgattacacctcacttcaccgttgcttccttttccaccgccatcagc

SEQ ID NO: 138064 - DNA, 303 bp, Zea mays
  Clone ID: MRT4577_57390C.1
ggaaaagtctggttttggtgctattgtttagaagcctgattgcctagtaaaagaaaggattggcgatgtgttagaaaatttagaataatactaccgtgcaaaagctgagttaggttggacgttcaacagctgggtcccacttgctaagattcacctagcttgggggatgatatagcaattccggggaggccaaatttgggggtttgggtttaaggtggattattggtttattagaatagtcatagagatcacaaaaggcgtgcatatccaggccatgacacgtcagacccagttaagtggttg

SEQ ID NO: 138065 - DNA, 314 bp, Zea mays
  Clone ID: MRT4577_57391C.1
gccacagacaccacgaaccctcaaagctgtcactactgtggcagattgacgtgaagtctacagaatctgagcacggcttccacacggcgagtggggcggtccagtcgcccgcacggaatgagaactccaggagaactgctatctctgtccacccgtgaaccgcgacgctcgggatgttcctatgtgtgaggatgagatctgacctgtctacattgaattatgtgaatgttttgagccattgttctactgcatatgactcgtagcatacaacttctaagttgctccgttctacacccgatatccctggtatttct

SEQ ID NO: 138066 - DNA, 359 bp, Zea mays
  Clone ID: MRT4577_57392C.1
gccggggatatgccagccgacaacggggacaagcctgtgccacacatggtcaagaaccgcgtgccggttccaaccggctgactgtaaacgggcacacggatcatctacttgcgggtaaccaaactcgaaatgttcggggcagatggaagatacagtaacacgccggacatccccgaggatggcgctccccggagaccaagcctcacctcgccggaatactaccacattatgatgtgcaaatttattgggtaggggaaaaattgccgagaccctggtcgatgcattcttgcttggaccttagtgcggtcccgcagatcgtatatttgccgtccgaggggacacgggctaatgtgagcaac

SEQ ID NO: 138067 - DNA, 286 bp, Zea mays
  Clone ID: MRT4577_57393C.1
ggccccaaacaatttggggtactgtaaaatactgggacaaacaatgcacgttggtgacctgtatagtttggttaaacctaaccgggggtcattaacataattgtttgtggaaagaaaacaaagtcctattactttaacaaaaaccgggtgtaggggcctttcgctgttttgggtgacgggtgccaaatatccaccaagatttttcccccatgggaaatgccataaaggctggcttaggtttcaggtttacgcaatttttattcacattttaccttttcaggggaaa

SEQ ID NO: 138068 - DNA, 286 bp, Zea mays
  Clone ID: MRT4577_57394C.1
cggacgcgtgggccgacgctactcgactccttgtgagctgtccgcaagaatcttcacggaggggtctatagcatggagagcgtcgagggcgacagcaagtcggccagcaccgtccggctcctcaagtacaccgaggcggtgccgatgctgacgttcgccaaggagaagcttgagacggcggacgacgagaacaaggtggcgtcgtacagcgcggtggacggcatagctggcggatttctacaagaacttcaagatcacgctgaaggtgactcctgctaaggctgac

SEQ ID NO: 138069 - DNA, 418 bp, Zea mays
  Clone ID: MRT4577_57395C.1
gggccgacccacgcgtcaggaaaaaaaacgcgcgcaaagcaatcgttggagcccaacagctagggttggtggcagtcggcgggccttcgttcttgggttggtgacttggtgttggttccaactgatctctctggccgtaaatggctcggaagttgcaagaacagagccaccaaaaccgcgccacacagcaggcacatgtgatcgatcgagagcgacgactgaggacaagccgcgcggcgctgcgacccagcggcgcgaccgacgcggacgggcgcgcggccggctctgcccgccctgcagctccacccaccggaaccgaattaaacaccgccgtcgccgcggctggggcttgcgctctcgacagacaggccatgcgcgccacaaggtcgttgaccccggccaagccggcctggcatgt

SEQ ID NO: 138070 - DNA, 516 bp, Zea mays
  unsure (1)..(516): unsure at all n locations
  Clone ID: MRT4577_57396C.1
ggggggggggttttttttttttttttttttttttttttttttttttttttttttttttttttttttttttttttttaaaaaaaaaaggtttcccaaaggggcctaggcccaaagctggggtcttttttttcccacaaaaaaacataaaaccgggggggggggggaaaaaaatcaccaaaccctacaagtagaacaagggtttaaaccccaccctaaaacccacaaattattgccacagtccccggggccaaactaggccctaccataacaaagcagcttttgatacagcaaaaacaaagggcagcgattaaggcccagggaaggaaaaaaccccccttccaaggggccaaaaacacccgtgttccttccaatacgggcccgggcggtttggaggaaaaggaaaggcttttctacctaaggggccgttcatccccgggggggcctgcaacatgcccaagagggcaatcacggggcccccagattggttcatgccccgggccttgnccagggaaaagg

SEQ ID NO: 138071 - DNA, 615 bp, Zea mays
  Clone ID: MRT4577_57397C.1
ttcttcctgtaccacataggctcccctagcaaatcgtcactgacgagtgatgtcattccgcttgctggattgttccagatatgggcagctgaccgggtcctcggcgcacgatgaaggccgttgctggcctatcttgcttgcttgcactctgctggcgaaccgccagatccacaccagctagaggcatctcgcatctgcgcatatcctgacacatcatgttgcgactgtacacagtgtgagcaactgacaaggtataggcaacatcgctagcatgtaccctaactagactcgagataagcgaacattccacacagagactcacttgcgcgcagggcacgggaagatagttatgatgtcaggtaccacatgtgctgagcggtcgagtgtcagctagatgcgagtagcgtacacctgactggtgactggagctcgcttctacagctgagagctagaaagacaagacgcggaagataaggaagaaagccatcatgatattggcttcagcctcttcgagtacgctgcacagtcatcacagtattaggtcggtgcagtgaaacctagatgaaaaccagagtcatgttcagattataaccttgttctatgctggaaagtact

SEQ ID NO: 138072 - DNA, 304 bp, Zea mays
  Clone ID: MRT4577_57398C.1
cgcgtgcgtccacgcgttctgtaaatgtttgcacggagcctgcaatgtcagcaatagcgcgcagggcgtgattatgtcatccatgtaatagttcatgatagcagtaagaaaattgaacgaagcatagaaaactggaatcaatgtgcacattacagtgctgactttgggaaagactacaggctttgtttttgacagtgcatcttaacggagccattaatacaggcctgtagtcatactcgcatcatgtacctcctctgcacgggtgacaccacggacttactctgatccctgaaggatgtacacc

SEQ ID NO: 138073 - DNA, 602 bp, Zea mays
  Clone ID: MRT4577_57399C.1
aattcggcacgagggagagaactagtctcgagttttttttttttttttttttttttttttttttttttttttttttttttttttttttttttttttggcaaaaaaaggtccttgggtaaccaaatttatataaaccccaaattttgggccccaatatatcgatttaaagaaaaaaatggaaagtttagggggggaaaaacctattaattttccccccggggggaaagaaaaaaaaaaaaattaaaaaaaccaacccgcccgggggggggtggtaaacaagaaaaaaaattcatgagggggggggttacctaaggccaggcttgcaaatgcagggccccccccatggggcaaaaaagggaaacccaccaggggggagggggaaaaaaaatccccacccttgcggccggggttaaacgggccaaaaccaaaaataaaggccgggggggaaaaaaacaaaacaaaggtttccttttggaacgggcccggaaggttgaggcccacccccagggggaggccccccttttaacgggaacgggaaccggggggaaagggaaccccccggcccgcccctttaagcgggcgggggcccccaatgtggcccc

SEQ ID NO: 138074 - DNA, 817 bp, Zea mays
  Clone ID: MRT4577_5739C.1
cgggccgggctcgggcagcttctcccgtgcccctcgcgtgcgctctacgactgggcggggggcggcaccctacaccagttgcccaggtctctgtcttcgggaccttccccggcgacgagcatccaccaggtcattgctgagaaggccgagaagagcgacaccccgaaaattcacagcaaagtcagttcgtgcccgtttcaagaataattcgattgcatttctaattgtttgggctgatgacgaggacaaacgatgcaagtggtggtggggaagcttccccggaagcgcttctatcgcgccagggcacacagcaacccgctcagcgactcgcacttcccggtcccaatatcgcctgaagaggtcgatctctcacagcactacccgcggtacttccctgctgacaagggcagcgacggtgaggaggctgcagcgccacaacagatccgtttcgccgatgtggggtgtggatttggcggtttgcttgtagggctctcgcctctcttcccagatacgctcatgattggcatggagctcagggacaaggtaacggagtatgtgaaggagaggattttagctctaagagcggcaaacccaggacagtatgataacatatccgttgtccgcacgaactcgatgaaatacattccaaattacttcagaaaggctcagctcaccaagatgttcttcctgtcccccgatccccacttcaaggagaaagaccacaggaggagggttatcagcatgcagctgttagacgagtatgcttacgtgatggaagtgggaggaatcatatataccatcactgatgtcgaggagc

SEQ ID NO: 138075 - DNA, 449 bp, Zea mays
  Clone ID: MRT4577_573C.1
cgccacatcatctaccgtcatcgtgcagcgtctagatgcgcccaatggtgagggtcctcctacagggaccgcctcggcagccacacccctgcgttagcataggaccacaacggcgctactactggtcgaggtcgtaccagacaaatgctacaatagtacactgataaagctgccacccgaagaaggtcacccaacactcaacacctcatgactattgcgcacgaagccgatgaggctcctctccatggatcccttaagctgtcaccctccatacaattaaggatgcgttgtcatattcaaaaaagctgacccccccaagagaggatccctgtagaacagcctacatggctagcaagctactatcagactctgttgtagaaccttatttatacaactcgcaatgtcgcgaggactattcataagtacatcagattttccttcacctaaaa

SEQ ID NO: 138076 - DNA, 135 bp, Zea mays
  Clone ID: MRT4577_57401C.1
caggacacgccctgtaacggcccattaaacgccgcgtgcattgaggttacccgcaacgttaccgccacactttccaacaccctaactaccgctccttttagctccctaccctccttttttgccaccttcgtcggc

SEQ ID NO: 138077 - DNA, 489 bp, Zea mays
  Clone ID: MRT4577_57402C.1
ccggaattcggctcgagcctgaaatttgaacaccaatccagcaaaggttgcaactttggagctccttatgagtggcaagtttacaacactcttagtgggaaccatggtgtcccacgggtacactacaaaggaaagcagggagagttttacatcatggttatggatattttgggaccaagcctatgggatgtttggaataataattcccactcgatgtctgttgagatggttgcttgcataggtatagaggcaatctccatactggaaaagatgcactctaaagggtatgtccatggtgatgtgaagcctgagaacttcttgcttggtcctcctggtaccccagaggagaagaagctttttcttgttgaccttggattggcaactaaatggaaagatgcttgcacggggcaccatgttgaatatgatcagagacctgatatttacaggggaactgctcgctatgctagcgtgcattgcccacttgggaag

SEQ ID NO: 138078 - DNA, 1756 bp, Zea mays
  Clone ID: MRT4577_57403C.1
ctcgaggccggccgggctctcacaagaacacctctgctctgcccgtatcctccttgctagctccttgccttgccttgcctttgccttccctccgcgcgaggagaagagccagcggacggacggagcacaggaaagccggacggacggacggagccggacgcgcgagatggagatggcgggggcggccgaagcggacacgccgtcgcaggagccggtgcgcacgggccggagcaacaccatcctgctccccatcggcggcatcctcctggcctacctgctctaccgcttcctccgcccgcgcctccgcggcctgcgcctcgacctgcccgcctggctgcgctgccgccgcgcgccgaccggcgggggcgccgtgctgccctacttcgcgcccatcgccgaccgcctcggcgccgtcgcgctgccgtacctcggcgccttcgccggcccgcaggcggcgctcctcaggttccccggcggggaggcgctgtcggtggccgccatcctcgaggcgcccggggaggtcgtcgccaagtccgcgcacagcacgctgtaccgcgccgccgtgcgctccggggaggccgccgtgctgctgaggttcgtgcgccccgcgtgcgccgacgaggccttcgccgccgccgccgcgcggcggatcggcgccgtccgccaccccaacctcgtgccgctccgcgcggtgtacgtcggccccaggggcgagaagctgctcgtctaccccttctacgccgccggctcgctccaacgcttcttgcaagaggggatcgcggagtcgcagagatggagcatagtgtgcaagctctccgtcggcatcgccagggggctagaccacctgcacacgggcctggacaagccgatggtccacggcaacctgaagacgagcaacgtgctcctggacggcagctacgacgagtgcagggtgtcggactacgggctgcacctgctgctgagccccgccgcggcgcaggaggcgctggaggccgccgcggcgcaggggtacggggcgcccgagctggccaaggcgcgggacgccacgcgggagagcgacgtgtacagcctcggggtggtcctgctggagctgctggcaaccgcgcccgcgggcggcgacggcgtcggcgacggcatcctcctcctccctgcctcctcctcctcctccttcaagaacctggtcctcgagcgcaagatctccgacgcgttcggctcgtctgggcttgctaggcagtgcaggagcggggcggggaaggagaggagcctgggcgcgttcttcgagctggccacggcgtgctgcagcccgtcgccgtcgctgagacccagcgccaggcaggtactccagaggctccaggagatcgcgcggtgaatggatgcgaggaccgactggcgactatacatacatactgagtgtctgcgttgatcggtctgcgaaaagtgtcctcctgccccccagccaggatagatgatgaacccaacaacgtgtttcgtggtgggcggtttgaacccctgtgctgtacagtttcaccgggagcagacagcagaggtggtggtggtggtggtcatcgctgctagatgaacaagcatcactactagactgtgtgtctttgagtttgttcctcaaagtggaaacgtacgatcgtggagtacctgccctgaaaatatgtaaaaatgcttgtagtgatattagtgaacagggtacgtgttgtatttcgataacacgttacagagaaaatcgtggaatgttcctttccag

SEQ ID NO: 138079 - DNA, 779 bp, Zea mays
  Clone ID: MRT4577_57404C.1
cgtgctcctggacggcagctacgacgagtgcagggtgtcggactacgggctgcacctgctgctgagccccgccgcggcgcaggaggcgctggaggccgccgcggcgcaggggtacgtggcgcccgagctggccaaggcgcgggacgccacgcgggagagcgacgtgtacagcctcggggtggtcctgctggagctgctggcgcccgcgggcggcgacggcatcctcctcctccctgcctcctcttcctccttcaagaacctggtcctcgagcgcaagatctccgacgcgttcggctcgtctggccttgctaggcagtgcaggagtggggcggggaaggagaggagcctgggcgcgttcttcgagctggccacggcgtgctgcagcccgtcgccgtcgctgagaccctgcgccaggcagatactccagaggctccaggagatcgcgcggtgaatgcatgcggaggagtagtactgagtatttaatcagcgcgcgttgatctctgctgcagcagcgtacgtacgttgatcggtctgcgaagtgtcctcctgctgcccccccaggcaggctagtgtccttcttgcaaggaatggatgcatgcatgttttcacatccgggaacctgtgctgtacagtttcaccgagagcggacagcagaggtggtggtggtcttcgctgctagatgaatgaaggacggtgcatgagcatcactaactagactgtgtttctttgagtttgttcctcaaagcggaaatgtacggtcgtggagagtacctgccccg

SEQ ID NO: 138080 - DNA, 359 bp, Zea mays
  Clone ID: MRT4577_57405C.1
ctcgcatggatagtctcagctgatctagaataccacggacaaggaccacgtgatctaaagcggggctagcggcggcaagtgcgttgccatggactacactgaccctaccgcggatccgctgatcgactcggctgatctgctgtcctgtgctctgcaccgcgccgcgatcgccgatgtcatcgccacgctgctgtttctgaacatgacgggggccaccgggatcgggtacaagcacgaaacggactcgtcaacgtccggctcctacacctcgtgctgcaccgtacgtgcgcttggcatctcctgggctttcaccagcatgatcttcgtactagcgtactgcacctgcggcttgtgcgggg

SEQ ID NO: 138081 - DNA, 421 bp, Zea mays
  Clone ID: MRT4577_57406C.1
ggggacgggggcgtgcgtggcgtggtggcggtgggaatcgtcgcctcctcccatcctcctccacctcgcacagcgcggacgattccaacagccagcacgccatgcacgcatccgaatgaggaacccggccggaacacacaagacgctttatggccatatggttcggcgtatcagcacacctataggagtaatggtctgtgatatatctccagtgttggattcgcatttgtaggcacgttaacaatatactatacagataaatatatgaacaagaacattaatttgagtctgataagggctatcaaggtcagggccactaggagcaagaaatcgaagcacaagatgactgttgcatacaacatatggaggaaagaatttgacaaccgtataaaacacctagaaatgttgcatgtgctagaag

SEQ ID NO: 138082 - DNA, 243 bp, Zea mays
  Clone ID: MRT4577_57407C.1
tcgaacggccgcccgggcaggtacaagcttttttttttctttgttaacatttgctgtcattaaaccaatttgcttattcaaaccccacaacgtactaccaacaaaaaaccaatgagggagcctatcttatatagaatataagagaagcacaataatgaagggttttgggagatgaacagtggcgggcccaggaaataagcaaagtacattgtctaggatgcaaaaagaaaaaccaaaaacgaa

SEQ ID NO: 138083 - DNA, 407 bp, Zea mays
  unsure (1)..(407): unsure at all n locations
  Clone ID: MRT4577_57408C.1
gcgtcctgacaacttcatctaactggnccctcanaaaacctcggtcacttgcttaccaancgaagaagcaagaattccttcgcctcggtgcctctggctatatggttggcattggcgctttggctgtcctcgtgcccggcttgcttttgggctttttgggtggcggtttcttccctgctggtaccactactgacttcttccaagctttcggcattgtcttcgctgccctcggctatttgaactacatctctgagaagtggcctgaagtgcccaagaaggaggttaccaccgtcgttggcggcgttttcggtttgttggctttgtggaacttgatggttttgttctggggttacgagattggattcatgatctttttcaacttccatctaaaggctggctttgtttta

SEQ ID NO: 138084 - DNA, 221 bp, Zea mays
  unsure (1)..(221): unsure at all n locations
  Clone ID: MRT4577_57409C.1
cccccctngagagtcgacccacgcgtccgggctgcccccgtggtcccggtcagtccatcccctcgatcgctccccaactccagcacgcaccacagcaacatccatccattcacggacacgtaaggaaagcaagggttgacactatcagcgccgtggccggcttcgtcgtcgctgaacccggacgcacagctcttgatcccggagcagctgatgcacgcgga

SEQ ID NO: 138085 - DNA, 857 bp, Zea mays
  Clone ID: MRT4577_5740C.1
cattgggtacctcgaggccggccgggagtttcgacatcagcggcgtgtcactgggttcggcaacccgttctgggcgaggtcgcgaggacgcatgtcccaccggcgccaccttccccgtcgtcttggcggcgctggccgccggcgccatcagcatcggcaagaccgtcatggatgagatacctatagcgtaaatggggagaacacgcactatggcacgccgactaatccgtgcgctcccgatagagttcctggaggatcctcaagtggatcagctgttgcagttgctgccaaactcgtcgacttcgctctaggcacactggaggtagtgtgagggtgcctgctgcctactgtggcatatttggactcaggcctttccatggattggtttcgacagaaaatgtcatgccaatgtcacagatgtttgacactgtcggtgccttggtctgaactcaaaatagccatgcaaagtgggtcaacactataaaacttaacctaggccctggtatccgagagtgggtgcatgaagccattgcatcagaagatggacccatgcaggattttcatgttctaaagatggaattcaagtcgacgctttttggtcttatcaaggatgatgggatccttgcgatactgacagtttctggttctccaccaaagctgtgcatggaggctattgcattagaaaacttccgcgcaaaagcattttcattgatgtcgatcgttggactatcttataaatctgttgtacctcgaattaaatctagacacactgattaatgttgccgattgattggtacttatgctgggcatgggctgcttcatgggaacaaaaaaattatttggacgaagactaaaca

SEQ ID NO: 138086 - DNA, 265 bp, Zea mays
  Clone ID: MRT4577_57410C.1
gcaagacttaggaagagatggaaaacttacttagagaggtatagtttgcagagagaggctaatcatgtaattggcaggaagcacagcaatacaggattggctggcatcaagggtagcgattgagctgatgaaggaaggtgcgatgcatacggtgttaaatggcatcatttaagcatttgcagtgcctactaccttgatatctaccgcggtctttatcaacagcaaatagggtgttactattgacagtgcaaacaaagttgggaaa

SEQ ID NO: 138087 - DNA, 160 bp, Zea mays
  Clone ID: MRT4577_57411C.1
gttatgcgtgcgcccacgcgtcggtgcactggtggagccatttaaggtgactaaaacgacagtgtcaacacagagcatgagtgtttgtccaattgtccgttcaacaaggatatcctgtcacacattgacttagttcagaaccccgtctttcgaaatgatt

SEQ ID NO: 138088 - DNA, 267 bp, Zea mays
  Clone ID: MRT4577_57412C.1
aaaagtccaactattacagctttgcagtagaatgttattcttgccagctctttgaacatttgatgtccctctgcataggtagcagatacatgaaatcttagctcttgttttaaaatctaagatctgatgaatacttgaactatcttgaatacacactttgatttatgacaatcaaaattttgaaaatagtaacaatgtatgtgtagtctcttctcttagaacaccataccctgctgtgtagtgttttgtaaatcaggaagagagtat

SEQ ID NO: 138089 - DNA, 638 bp, Zea mays
  Clone ID: MRT4577_57413C.1
catggtcaggagatcagctcaactattcatacaagaaacactggtgcaagctgtgaaagtgatgagctgaaagaacagaattctaagaacacagatgcttctttggataaaagtgttgctaaaatgcatgaactactaaaatttccttatccaagtggtaaggttgagatgtccacaatcagaccagaaaagcggagacataaactaaggctgcaccatccagcttatcttccttttttaggcttcctttggtccgcttgtttcaagaagaaaatatgcaaagtaagaggactgatcaaacgtgtatgaggttttatttcactatgacaggagtttactgtcaattaccatccctgaattatcatgtaacacaggaagacctagaaatctcgttttaaagttttgatttgaaatgcacatgtctatcaatcagttgtattgtacatatggaaaataaagccatactttaaaactggaagtttttcttttttggttcatccatatgtaacttaggtctcactctcttccaatgccactacaaatttcaacttcaatgttttgtacattaacactctccttttagttcctattttcatgttttatgattttgggcaattaaccttggacaaatttagagg

SEQ ID NO: 138090 - DNA, 742 bp, Zea mays
  Clone ID: MRT4577_57414C.1
cattgggtacctcgaggccggccgggcttttcggcggacttaccgcatacaccgctgcccgcgcgcagccgcgcaggtgcatctgcgccgccgccgggccgccgcacccgcacgtctccttatacccatccggccatctacacacggcagtccacgctcgagggaccgcactcactccgaatcctgaagcaacaaacaccagaagcgcaccaactccccaaccaccggagaccgcaccccagcaaaggatggcatctgactccacgggcggcgagtacggaggacgagcagcgcgcttgcggagcgcgcgctggaggcggagaacacacatgacatgaccattggggtggaaatccctcgtgacgtatttcaccactaagtgcggcaagatcagggtctactgctgcgataccgcaggggaagagaactttggggacctcacggatggatactatatccatgggcagtgcgcgatcatcctgcttgatgtaacctcaaggctaacttaccacaatgttcctacgtgtcatagaggacctgggcagggtctgtgaaaacatcccgattgtcctctgctgtaataaggttgatgtgaagaacaggcaggtcaaagccaatcaagttactttccacaggaagaacaatctgcagtactatgaaatttctgccaagagcaactacaactttgagaaatctttcctgtaccttgcaaggaagctgggtggtgatccgcaccttcact

SEQ ID NO: 138091 - DNA, 2926 bp, Zea mays
  Clone ID: MRT4577_57415C.1
gccggcagatacgaagcaataaaacgctagcttatataattcaggcacaccaacccgactccgtttgacgcggctccgatggtcacaaccggcgccctcgtcgccggcgccgcagtcaacacctgagacctcgtcctgcctgcctgggcagaagggcgtgagcttgccgctgccgcgatccgagtacgagcccccgcggatgcattatcagcatgccggtagccgcagccgcatgccgccgttcgcacgcggcggcggcgcctacagccgcggacagaaacagttctacccgccgccacctcctcccctcccggcggccgcgctgcctctgctgccgcagaacaagcatgaggtgctcatggaagccggccgcctcgctgccgagtacctggtggcgaagggcgtgctccctcctggctccttgcagcagcgcggcagcacagtcgtcgctggtgggtggggccagctaccgcctccacctccaccgccgctttcggtgacacaggaagccccagcataccatatcgccaggaatagccggcggcagatcgatgatgagcgtggtattcgtaacgcccgctcacggcggaaccgtggtggcgactacagtagcagcaacggtagtaactataatggaagggggaaaaggaaatttggggctgacaataagtattcagattggacaaaggatagggggaggaacaggcggtattctgatatccgaagttatgatgatgaggatgatgatggggctcctcctgggttcaaaagggagcgccgaagcagtggtgggattgacgaggttggtagtagcatgtcgggggtggcttgggagggaccatcatcgaaggtggaggcgatgggggagtcggagctggaggatactgggtcaaaggctagttctaacagcaatatccagcagaaagctagtgctttgcaagaggtggaggatgaaaatgaggcaaacaaaatgcaggagaacagtgtggtgtctaattcagacgtagctgagcaagcattgaatggtgaggataatagcaacaatgattcttctgctggtgttgaagaggcagggacaaaacatttgccagtatcctcaggtgaaaaggtctcagatgggaggcttgaacatagcggtgttctgaatgacaaggttgaagatgacagtactttgcatgagaagtctgaagatgacacaatgtcggaagaggtctctgttatggagagcaatttgcctaatgacgctagaaatttgctaaactattgtagttttgcaagagttccaacaagaccacgaacagtgcttgcaaacaggaatgttggaccaggtcaaagagaaattactgtgtctgaacagctcaatttggttacttctgaagaaatatccaatatggcaatggatggagaagctaacactaattccataactagcatcgaggaaggcagtaaagttgagctggttggccaagaccaagaacatgctgaacaaagcgctatctgcaatcaagtggcagaatcagtggcattccatgaaaaggaaactcgaggtgaaactgaagaaaaggaagaacagaagaacatccctcaacattatgaagttgaggataataaggagacaaacgaactgtgtcctacatttgcttcttctcagaataaccaaagcgctatctgcaatcaagtggcagaatcagtggcatcccatgaaaaggaaacacaaggtgaaactgaagaaatggaagaacagaagaacatccctcaacattatgaagttgaggataataatgagacaaatgaactgtctcctacatttgcttctcagaataacttcaatttgcaagttgagaaaggaatacaaatctacaatttagatacaccgccacaagatgaattgttgatcgatccacccgataaagggaaaacagttgattcggagttattacctaacatcaaagcagaagatgctgttacagtggaagaggaaaagattggccagtctagctcatttaaaatacgtgatctcaacctggttggtagtccagaggttgttgacatgcgaggtgaccctcgtttaggccaaagctctactgctggatgtccagtagacctacaagataatcaacaagttgagtttgaaacagctcttggtaacaacccgaataatactgacacatgtgccccctttctgttgggaaataagtcagttcaagttattgatatcgaagatgacataccaattgaagccggtgcttgtgacacgtcaaaatcaaaaggtgagatggtatattctagcatggagagcatgatgaacccgcctccggtgaacaccgatgctctacatggtatccaagatgggtatagtcttgcaatttcagattaccttggtgctgatatgtcatgctaccaatcaatacaagcagaacttcaagatgggatggacctaaacggttcagagggcattactgtgatggatgatccaatatacagttctcttagtgacataggttttatggaggtttgggaccagcaacctcaagactatgaaaagttcttctgaggcaccaactcgtgttgctgaaactgttctggagttcgactgataaataccagttatacttgcataggcagaaataaagcagtagatcgtgcctaacaaatagaatcccgtgtactcgtgcgacagcagcacctcatgcacttgtatgttccaggccatacatatgtgttcagacatatgtattcagactccctgccttgcccgacagtggtgtaaaaagtagtcgtatagctgtcatgtaattcaagggaattgacctaagcacgatagagcattcatccgaaacaattcttcatttgtaataaacagctctatattccaaattaaaagtgtttatttgttatatcaataaaaaaaaaaaaacccgcggcc

SEQ ID NO: 138092 - DNA, 325 bp, Zea mays
  Clone ID: MRT4577_57416C.1
accggacagccagacgggcccagaagtcagaagctccaacggtcgaatcctaacggcctggtgacgtggctggcgcacaggacatgtccggtgtgcaccggactgtccggtgtgcaccggactgtccggtgcaccatacgaccgtcagcctccaccaacgtagagttttggtggaggctgacggtcgtatggtgcaccggacagtccggtgcacaccggacagtccggtgcacaccggacatgtcctgtgcgccagccacgtcaccaggccgttaggattcgaccgttggagcttctgacttctgggcccgtctggctgtccggt

SEQ ID NO: 138093 - DNA, 503 bp, Zea mays
  Clone ID: MRT4577_57417C.1
ggagaaaaccacaaagaccttctttttgggggaacggaaaaaacccttataacaacggcccccacgaaacaacttccgaagggggacctgggtttttggcacaaaaccgcccaggggaaaacccccctttgggggaggggggggggaaacccaaacaattagggggacaaccggccgtccttatttaaaacaaaactaaaagggaaaggctgttggaaagccccttggggggaatcccgggggggtcccccttcggggcggaggggggggggaaaaacaccgggaagggaaacccgcccggcccctttcggtttttgagggaagggccccgttacatggggacaaggcgatagttaatatccgaaaacccggcccgaaacccttataccccccaccgtgcttgggggcagggcggcttgttcctggaatgcccgcgtgggtggacaggtagaaatcaaagctgggtgggatgggagatcttggagtccaccacgggcccgggc

SEQ ID NO: 138094 - DNA, 1483 bp, Zea mays
  Clone ID: MRT4577_57418C.1
gggcaggacgacacaggcagagccgccggccctcgcttggtggtggggtctagtttctttctcgcctctgcctgtgcctgctggtggtaagtaataacagcgacacggtacccacgcgcggcggcggcggcggcggcggcgacgaagacgaagacgaagacgacatgaccgtcggcgacgacgcggcggcgccggggcgcgggcagacggtgtgcgtgaccggcgccggcggctacgtcgggtcgtggatcgtcaagctcctgctcgagcggggctacgccgtccgcggcaccgtgcgcaaccctgacgacgcgaagaacgcgcacctgctggcgctccccggcgcggcggagcggctggcgctgtgcaaggccgacctgctcgactacggcgcgctgcgggcggccgtcgccggctgccacggcgtcttccacgccgcgtcgccggtcaccgacgacccggaggagatggtggagccggcggtgcgggggacgcggtacgtcatcgacgcggcggccgagtccggcacggtccgccgcgtcgtcctgacgtcgtcgatcggcgcggtggccatggacccccgccgcgagccggacgccgtcgtcgacgagtcgtgctggagcgacctcgacttctgcaagaagaccaagaactggtactgctacggcaaggctgcggcggagcgggcggcgtgggaggcggcggcggcgcgcggggtggacctggtggtggtggtgccggtgctggtgcagggcccggcgctgcagccgtcggtgaacgccagcctgatgcacgtgctcaagtacctgaacgggtccgccaagacgtacgccaacgcggtgcaggcgtacgtgcacgtccgcgacgccgccgacgcgcacgtccgcgtcttcgaggcgccccgcgccgccggccgctacatctgcgccgacgccgtgctccaccgcgaggacgtcgtccgcaccctccgcaagtccttcccgggctaccccgtcccggagaggtgctctgacgaggtgaacccgaggaagcagccgtacaagatctccaaccagcggctgagggagctgggcctggagttcaccccggcggcgcaggcgctgtacgacaccgtcgtgtgcttccaggagaagggcatcctccctctccctgtccccgccccaacgccggcgtcaccggacgcctgagctagctgatgagctggcccagaaccaacgaagaaacatgtttggcacgcaaaccgctattataacagtcgctgcttcgatcattctgccgctagagatagaatgtggagtgtgtgctactcgttgtgggcgtaagagtgtcagaagagtgcagcagtaactatatcgatgcgactttttatatgttgctatatcatgtgtgacaatctcctaataataaatatatggagtatcgtcctccttttctgtggctatgtagttcaccgggcttcttccggtgacaataattgtctgaa

SEQ ID NO: 138095 - DNA, 162 bp, Zea mays
  unsure (1)..(162): unsure at all n locations
  Clone ID: MRT4577_57419C.1
nccattagcacgtacgtgtacgcaggcttcggattcggatctagcgtggtcggctggcgtgtacgagctcaccatgtctttcgccgtgcggctgttgctgaccagcgacacatacatacatggctatccacagatcgagtcggtaactagaagtagaacgag

SEQ ID NO: 138096 - DNA, 140 bp, Zea mays
  Clone ID: MRT4577_5741C.1
tagatttgagctgtacaactcgggtatcttgacaggaacctgtggaacagagctggaccatggtgacacggatcgtcggctacggcacagaaaacgggcaggactactggatcccgaagaactcttggggcatcagctgg

SEQ ID NO: 138097 - DNA, 528 bp, Zea mays
  Clone ID: MRT4577_57420C.1
ggcaagtcgacaggggagccctctacctatttatttattgtatatctataaaaatgaagaaagttacatatgtacaaaattataacagaggaagatacaagagtagtgtctctccaaagggtgaggggatctcttctactctgcttcgcttcgacgcaccaagctaagctcctgtttcgtcttttccaaatattgaagttacaggtagcattgtcaaagataatgctattaattgcgagtagtccaaataacccaaccacctttaatatctatttctctttaaattagatcaccaaagtttgtcctggcttcaatcatcatgtctagaggtggcagactcagatcacattggatgggaattgtgttccagcatgattagccaaaactgcattcagagggaaggtggatcctggttccacacagccattattacacagaacataactgtaaccattcagtgccttgtttctcttcctcagaaagttcttagtattggagtttatctctaattagaagcccatttttgct

SEQ ID NO: 138098 - DNA, 207 bp, Zea mays
  Clone ID: MRT4577_57421C.1
gctgggcccgtatgtggcgttttttatgatgtacaccgaattacccacgaatgctagggttggaacatacacactcggtggctagggatagactgcactggctgattctttatatacacattgccgctttagcgttatactcgcattgagtgcagatcctggcttatttggggccccgactctacaggacaaagttggaagatatgg

SEQ ID NO: 138099 - DNA, 1495 bp, Zea mays
  Clone ID: MRT4577_57422C.1
ggacgacacaggcagagccgccggccctcgcttcttggtggggtctagtttctttctcgcctctgcctgtgcctgctggtggtaagtaataacagcgacacggtacccacgcgcggcggcggcggcgacgacgaagacgacatgaccgtcggcgacgacgcagcggcgccggggcgcgggcagacggtgtgcgtgaccggcgccggcggctacgtcgggtcgtggatcgtcaagctcctgctcgagcggggctacgccgtccgcggcaccgtgcgcaaccctggtaacgtcgtcgtagatctgtcgtccggcgcgccggtcgttattgttgttgctgctgacaggccgctgggtggtcgttggaggcagacgacgcgaagaacgcgcacctgctggcgctccccggcgcggcggagcggctggcgctgtgcaaggccgacctgctcgactacggcgcgctaagggcggccgtcgccggctgccacggcgtcttccacgccgcgtcgccggtcaccgacgacccggaggagatggtggagccggcggtgcgggggacgcggtacgtcatcgacgcggcggccgaggccggcacggtccgccgcgtcgtcctgacgtcgtcgatcggcgcggtggccatggacccccgccgcgagccggacgccgtcgtcgacgagtcgtgctggagcgacctcgacttctgcaagaagaccaagaactggtactgctacggcaaggcagtggcggagcgggcggcgtgggaggcggcggcggcgcgcggggtggacctggtggtggtggtgccggtgctggtgcagggcccggcgctgcagccgtcggtgaacgccagcctgatgcacgtgctcaagtacctgaacgggtccgccaagacgtacgccaacgcggtgcaggcgtacgtgcacgtccgcgacgccgccgacgcgcacgtccgcgtcttcgaggcgccccgcgccgccggccgctacatctgcgccgacgccgtgctccaccgcgaggacgtcgtccgcaccctccgcaagtccttcccgggctaccccgtcccggagaggtgctctgacgaggtgaacccgaggaagcagccgtacaagatctccaaccagcggctgagggagctgggcctggagttcaccccggcggcgcaggcgctgtacgacaccgtcgtgtgcttccaggagaagggcatcctccctctccctgtccccgccccaacgccggcgtcaccggacgcctgagctagctgatgagctggccctgaaccaacgaagaaacatgtttggcacgcaaaccgctattataacagtcgctgcttcgatcattcattctgccgctagagatagaatgtggagtgtgtgctactcgttgtgggcgtaagagtgtcagaagagtgcagcagtaactgtatatcgatgcgactttttatatgttgctatatcatgtgtgacaatctcctaataataaatatatggagtatcgtcct

SEQ ID NO: 138100 - DNA, 601 bp, Zea mays
  Clone ID: MRT4577_57423C.1
cccgggtcgcctttcgtccggctcactgcagaaccccggtgggggggagggtttcagcctccttcagctggggggggctttctgaaatgctgcgtcggcgaccatgttctccgcactgctgccatgctcctatagctctccttacccccccgtgcctgtcaccatccgcctctcctgtcatctcaaaacggtgtctggcactgggaccccatccaacaagccctcacagctggaatcttacctttatcacccttgcttctccaacaaacattagccctattacatctgttacctctgatgcatttattgcctcagaacatcacggcacaacaactacaacaacttgcactagcaaaccttgctgcctatctctgaccacagcacctacttgcattcaaccaactagctgcattgaactctgcttcttatttgcaacaacgacaactaccattcacccagctacctgctgtctacccccagcaatcccgtccacccaaccaactggcagcattgaactctcctgcttatttacagctgccccacttactaccattcgaccagctagctgccgtgagccctgttaccttcgtgatacaaccac

SEQ ID NO: 138101 - DNA, 394 bp, Zea mays
  Clone ID: MRT4577_57424C.1
ctagaactgtagacctgcatggttaatggcctggtggtgctccaaggtatcggccttggtgaacacctcgccgcactgcgggcacgcacacagctccctcggcctcgggtaccgcctgaccattaaccatccattaatcacggttagctttgccgcaatcaccagtcaccacatcatgattaccttaatcatcatccagctcaaaagctccatagtctaattagtaatcataaaactaatattgagctagtagctgggacggatcggacggacctcgacatgggctccacgttgatggcgcggcactcgtagcagccggagaggccccgcaaggaggagtgggggctgctgctgctgctgccggcgcccggcgccggagacgacgactaggcgc

SEQ ID NO: 138102 - DNA, 196 bp, Zea mays
  Clone ID: MRT4577_57425C.1
atgtcatcattcctagtacacaagaattaccggagcccgtgaatcaagcagggccatcatgcccgcggagtcaaggggcaccatcattgcaagggcgggatggcgggcaattaaggaccgcaggatcaaaggatcctgcacagaccacttataagcactcacccatgaaaagagccccccgataaaaagccttggc

SEQ ID NO: 138103 - DNA, 627 bp, Zea mays
  Clone ID: MRT4577_57426C.1
tggagttgaatactccagggcattcaaagaccccgccgtggtcttggtcctattcgagatatgttactggattctgaatcatatgaaagtggggttcggattggtactaagtttcaagcagaagttccaaaatggtctggtcctatttctagtaacagatgggacgaccaggactggcactggaaatgggatggaggatttccttcctgtatttgcaggataccatttttttacaaggatgatcctgtatccatcatgtttacatgcatattctttgttgcgacttggtattgaaaaaaacaaaccccgggggacagaccttcgctgtggttttgcctgaagaaaaggatctcaacacagggtcatgaaaagggactgctgggcgtcggctggactgcccaggaacacgttgaaagcaacataactctgggagtttcttttttttagaggggggcttgaaccctggttgttggtatcataactggaagcaaaatcaccacaatagcggtgtcttctcaactttaatattatcaaatagtctcttatgttaataccacattctttatgcagtagagaagatgagttttgctgaacccactgaacttgatcggagtaaaacgacaatgc

SEQ ID NO: 138104 - DNA, 333 bp, Zea mays
  Clone ID: MRT4577_57427C.1
acccgatcgacacctcgagggtggtgctcgttgccctggctatactggctctctctgggagcgccactctccacacattcaagcggaggctgctggttgccaaccaccgacgccggttcatctaccgccgccggagcatctgccaccttcggttcacctgccaccttcggtgcatctcccaccgccggtccacctgtcgccgccggtccacctgccaaccgcggtccatgtgccgccgccggttcatttgacggcggcaccattgccactaccctactcaaaccgcccgggcttagccttattccccagcacacccatgcccgtgccaacagc

SEQ ID NO: 138105 - DNA, 409 bp, Zea mays
  unsure (1)..(409): unsure at all n locations
  Clone ID: MRT4577_57428C.1
nnnnnnngnnnnnnncnncngcnngnngngcgcggaccacgcccttcnctgggcngcatttaacgatagcaagagttaggtncgcctcagattcttcccatntatacacccnctgcccccacctcagctgctcaagcacccatggcgcctacttggcgacaccacctgctctcgtgcatccaacaagctttggctatcataagggcataccaacaaccgcaacggtctcactacatcatactatcgctaaccttactatccatggtgtaccctgacgtctatctacgacacatacatctgagagaatgtagacctatcgctggggataatgcatctacatacctgcgataaccagttgctgaaacagactgtaccaactctgactcaggtagctgctgcataccctgct

SEQ ID NO: 138106 - DNA, 669 bp, Zea mays
  Clone ID: MRT4577_57429C.1
ctcagcggcgggcggatttctctcacttccttgttgcttctgtcctcattaccgcctctgtcacttaggaaggcgtctcgcctccaccatggccgatacaatctctgcatcctcctatgtgcgtcacttatctatgtccactgtgatcatcttcccacccctggattcctgatctcacatgcttcgtccaaatttgctgatgcatccgacactgcttagacgacagatgctcgtcttccacaatcgggccttcaaattactgcgtgcatagcttccaccactcagagatgaatagctatatcatgatcctcatctgtatcgctcggagtcattgcttgaccaacattccatctcactgcccgtccctggttgcccctggactccgcgccttcatctgcttcctcgatctctggtctctccccaactgaatgtgctgtacttaccacttactccacttctgtagcatgtaggatctgcttctccaaagtatgacacacacgacatgatgcctctcctttgggtcagcacttgcagggaattggatgatttgcatgctgcaattataagagagcaacctctcgctcatcctcaagtggacgatatggtgatatagacaaagaatattccttctacctccaaagaagagcttaccctcctgacaagattgac

SEQ ID NO: 138107 - DNA, 1037 bp, Zea mays
  Clone ID: MRT4577_5742C.1
gtgacggcacggacgcggcgctgcaaaccaaaaaaacctcgcgtctctttctgaatccagactccagaggggcgggcgtgtcctgtcggatgacgagccggcgcgacaggttggagccttcgccggcttgcggccgcggtggcgctgctgctgctgctggtggccgccgcgccggcgtctgggcaggtggcgacgtcgtgcacggcgtcgctgatatcgacgttcacgccgtgcctcaacttcgtgacggggagcaccaacggcggcggctcgccgacgaagcagtgctgcggggtgctggcggagatggtgcgcacgggcgccgactgcgcctgtctcatcctcacgggcaacgttcccttcagcctccccatcaaccgcacgctcgccgtctccctccccaagctctgcagctccacctccgtcccgctccagtgcagagacacggcgacgcaaatcccagctccaggacctatcgccttcgctccggctctgcctccactgccacccatcccaccggaatcgtccgaccctccggcggatcccacggcgatccctccggcggtggactcgccgccgttctcccagaggccagtggtggtgcccagctcggcagttaggaggtcgcacgtatccgtggcggctgtcgccgctgtgctgcccatagttgctgccgcgtccattttcgtttgatcaggatgtggtgctgtaggatgcatgcgttgtggtgtgcggtttgagaaggaactatctgtgttcccgggattttgagttggcttgtgatcatgattttgtacagcgtattataaacagcacagtaagaaatatggctccaggagtccaggcagaaccaatcctcttctcccacctctctgcctaatttctccttttttttatttaccccgtgctcccttgcctcatgtatctgtctcccgcaagagcaattatgaacatttaatttcgctatcgcaaaagtttgtttgggtgcaaaacattttgtaacaaactatcgtgcttttgtgaaacgttttgttttg

SEQ ID NO: 138108 - DNA, 1554 bp, Zea mays
  Clone ID: MRT4577_57430C.1
cccacgcgtccggttctagatcgcgagggccgcccttttttttttttttttttttttttttttttttttttttttttttttttttttttttttttttttttttaaaaggatggtgatgcaggatgcccaaccaaaagggtaacttttttatagataaacccgaaaaagacttttctacatccccctttttttttttttttttctcacaaactgtggtcgtgaattttcagtttcctttgtgttcaaatttacatgagggactagtgtactgttggcccccaaattatccattcctttacatcaaggagcaatacctctgaagatcgtaaataaggcttttcttcaaaatgcctatgcccagagagctaataccgacatagaagcagatccaagcaccaaggcaatgtaacacgccttcttcagcttcaaagacgctgacatcatcttgttgtggaaaaaatcaagagaaactaggtcgactagcgccatatagatgagaattccagccgaaagtgaaccaaggatcccttccattattaaggcatttggattgctatcgtcgtagccagtcatgtggaacactagcattccaagaagaattcccaatggcgtcgtcactgagaacattatgcacatgtagccaactgttgccatcccaaaaccagcctgtgcgatgcatccgcccaggcccatcccctcgaacacctgatggaaggagagcgcaaccacaagtggccggattgcacagacatcctgggacatccccatcgtaactccgatgatgacggagtggaagactatcccaatctccagcactttggacaccatcttctgcttcctcctggcctcctcctcgtcctcaccgggcccctcccctacctccaccacttcatgggcgacggcatggcacccggcagtgatggccgggacctcgtcgctgcgggcgcccttcttgggtccgaagagcgccacgtcgtcgcggtccgggtctgcgccgttggtggcggcgtgcggcgcggggtcctcttctcggtcgtcgcccaagaaagcgcgcttcttggggctcatttcgccggcgagctcgaacacgggtaccttcttcgggatcggggcgtagggagtttcgtggtgggcgccgacgtgggcgtgggcctcgaggtgggaggaggcggagaggtcgacgaggagcgcgagcagcgcgccgacgagggtgaaaaggcccgcgaaggggaagtccctccagggcctgcgcgaggcgacggcgcagtcggcgagggcggcgtgcgcgtcggggagcacgtggacgagcgaggtggagaggatgaccccagccgcgtagcacttgacgaggagcaggccccgcgcgtagtttgggctgccgcggaaggcccgcgtgagcgcgacggggaggcagatgccgacggcgctggcgacgagaatggccagcagcgaccccgtcttgagccgtgcggcggccgcgccgtcccggcagacccgggatagggccgggccgtcggtggggaggcacccggtgccggacatggcggcgcgggg

SEQ ID NO: 138109 - DNA, 123 bp, Zea mays
  Clone ID: MRT4577_57431C.1
gtagctgctaattcgctcgagttcagatcgatcgcgcgccaagcaagtcttccggtcggccgtcgaagagcgtaatcgagcatgaccagatggtgaatgctcgccttcggaagcgtcggcgac

SEQ ID NO: 138110 - DNA, 378 bp, Zea mays
  Clone ID: MRT4577_57432C.1
gcagcgtaccacggcaagactcgcagtcacatggccttcgagaacacctcgaccaatgtcgctgccgctcagatgcgaaatgccctgaccaacctcgccgagaccgttgaggaccccaaggagaagaagctgttcgagaccgagatggacaacttctttgccctcttccgacgatacctgaacgacaaggccaagggaaatgcagtcgactgggaccgcattgcccctcccgcccagggccaggtcgtcgactacgaggacctcgccaacactgagtctgttcagttcctgagcaagctcgccgtcctcaagctcaacggaggtcttggtacctctatgggttgcgttggacccaagtccgtcattgaggtccgtgac

SEQ ID NO: 138111 - DNA, 434 bp, Zea mays
  unsure (1)..(434): unsure at all n locations
  Clone ID: MRT4577_57433C.1
ctccgaaaaaaaaaaannaaaaaaaaaaaaaaattaaaaaaaaaaaaaaaaaaaaaaaaaaaaaaaaaaaaaaaaanaaaaaaaaaaaaaaaaataaaaacccccaaaaataaaaaaaaaaaagaccccccgggtcggcacggtttaaatataagggtttccccgaccccaaacctcccgggggtgactgttattaaattcgcccacttggggggggttttcaatgccgctatctggccaaacgttgtacgataccggagttaggtaaatcgctggagttccccaatttagtcggctgtgaaaaccatcgcccattcccccatcttgtcgtctttccgaaaagccccctttcctgagtggttgaaagaaaattgaaagcccaaaaaggccattgtacctcgcggtagtgtttttttaggggaaatcggtttttg

SEQ ID NO: 138112 - DNA, 743 bp, Zea mays
  unsure (1)..(743): unsure at all n locations
  Clone ID: MRT4577_57434C.1
actctgtcctcttccatcgggcttccccggttctctcccctcccctcccatggtcaggttccaatccctactcctccggcgatttgagacttgcctgtgactagcaagcctcccgccccacctcacctgctggaggccgaatctgttccccgccatccaccggctcgccgacgaggcaacaagactcagcaacttgcatgatggaggctgcggaatttcgcccttggtcagatcttccgccagaactcctgggacttgttctcaagcgcctcccttccctagctgaccgtgttcgtctaagagctgtctgccacccatggcgctctaatagtatgttgcaaccccttcctctcccatttccatggctcactctccctgatggtactttcctcagcattccaaacggtgagattcaccgcatatctttaccagaagatgcgtgttgccagggctccattggaaactggctattcctcacgcacaatgatgatgtgtgctacttgatgaaccctttctccaagaccaggttggagcttcctaagctagccaaaatatggaagcgtggaatattggatcttgattctagatttagtccaattttctacaagttggtggtgccctttccccttgactcattgccctggtcccttgntgctgcactgatcatggatgatagtaactgtggtacactttgtattagtgaaccacccgtttgagactgactcattcagagacgatgagca

SEQ ID NO: 138113 - DNA, 292 bp, Zea mays
  Clone ID: MRT4577_57435C.1
ccaggactcagtgatgcatgcgcgacgacgaaaccactgccgtcgactccctgtcgccacttccgtccccgcggtggacatgcttcgttgacgccgacgacgatgatgacacatacacattgcccatcatccacggcgatgacgcgtcgtcggctgtttcgtcaagaaggcttcagctcgtggcgccgccactggaattattagctgagacgtctgcatcatgcgcatggtcctcctcctcttcgtcgtcagagatagctggaggccatgtcgtcgccgccagtgacaacac

SEQ ID NO: 138114 - DNA, 285 bp, Zea mays
  unsure (1)..(285): unsure at all n locations
  Clone ID: MRT4577_57436C.1
tttcattcactcttactttatctactaattctactctactatgtatgtacttattaactctttctattcccctaaatataatctttctanttcctaaataccttccttttccattcaatatactatttttaaatnnttncttanataantaatttttatttttaatttattttntttttttattttattttctcttttcttttttttatttttttttttttttttttttttttttttttttttttttttttttttttttttttttttttttttttttttattttt

SEQ ID NO: 138115 - DNA, 1983 bp, Zea mays
  Clone ID: MRT4577_57437C.1
cattgggtacctcgacgctggccggggccagcacgcggctgctacgtgcgagcgccagccgccctcctctccagcgcgtggacgcgcagccggccgccgccctcatctacaccagcgtcgccgctctaccccctccagcggaccagcgccgccgtcggtcggcctccagcggaccagcaccgccgccctgactccctctcctccagcgtcgccacccacatcctccctccacaatcctctaacagccagtgccccacctctcctcccctctgcccccctcctccctccaccatcctccagcagccagcgtccatcccaggtttaggtttccagcagccagcgcccagcccaggttcaggttttcagtgacagtgaagcaccccaagttcaaattcagacatagtaagtcaccatgtcttcgtccatgcaatcttcataccttcctgctaccactgagtccgtagccaaggctcaggaggccaaggacgcttctgagtccatctcaatcctctaccgcgtgcttgaggatccctcttcatctgcggatgcactgagagtaaaagagcttgccatcacgaatctcacaaactacctcacaaaagagaacagagctgaagacctcaggaaccttttgacccagctcaggcccttttttgcattgatccccaaggcgaagactgcgaagattgtgcgtggcatcattgatgccgttgccaaggtgcctggaacatctcagcttcagatctcactgtgcaaggagatggtagaatggacccgtgcagagaaacgaaccttcctcaggcagcgtgtggaagcaaggctggcagcccttctgttggagaatcaggagtatactgaggctcttacactcctttctggactcatcaaggaaaattgggagctggatgacaagttgctttctgtggacatcgaccttttggagagcaagctccatttctctctgagaaaccttccaaaggccaaagcttctctgactgctgccagaactgcagccaatgccatttatgtgccgccatctcagcagggcacaattgatctgcagagtgggatccttcatgctgaagagaaggattacaagactgcttacagctacttcttcgaagcatttgaagctttcagttcactggaagatcccaaggctatcttcagcttgaagtacatgcttctgtgcaagataatggtcaaccaagctgatgatgttgcaggaatcatctcatcgaaggctggcctcaagtatctgggtcctgatgttgatgctatgaaagctgtggccgatgcctactccaaaaggtctctgaagtacttcgaaactgctctccgtgattacaaagctcagctggaagaagatcctattgtccacaggcacctttcctcgctgtatgacactctcttggagcagaacctctgcaggctgattgagccctactcaagggtggagattgctcacatagcagagatgattgagctgccaatgaaccatgttgagaagaagctgtcccagatgatcctcgacaagaaattcgcagggacacttgatcaaggcgctggctgcctcatcatcttcgaggacagcaagactgaggagatcttccctgccacacttgaaacgatcacgaatgttggcaaggttgtggacagcctgtacatgagatcggccaagatcatggcctgaaagatgcagtgggaggcctaggtgtcgtcagcttcttttcttggtctattgtcagttcagttaaccaaactttagctgtccaagagacatcttattgtggattttttttttatttgtggttttgggtggcagactgtttgcgttacaatttgctcatgttgctcatgaatactcatgtttctgtttgatggaagtactgttaaggctatgatgtttttatactttatgttaaaaaaaaaaaaaaaagcggccaggtgttagctagctacctacctgttgccatactttat

SEQ ID NO: 138116 - DNA, 558 bp, Zea mays
  Clone ID: MRT4577_57438C.1
taaccctccctcagtggttgtgtacagcgtctccgaaaaaagtaggtactagatgatggaatagctcaaagggaggcaccccaagaaaagctcaaagcttatgagaagaggggtgcacttcagatcctgcatcggatgctgagaagctgagcctccagcagctgccatgatggtgtacagtgagttattgaaggttggaaacggagtggaggcttacatgtgtgtggggtcatttggtcttctagtttgtttctgttgtttcttgtaaatattagttgtgaagtggtaacctatgttcatgtggtgggttttgtttctgaccaatctgtgaaattaaggccaggccccgtttggcaggtctccggctcctcttaaaacggctccggctctggtttcgaagctccttcgcaggagccggtgttttttttttgtaaattgtttggcaaaacagatccttttgtgtttttgatttggtgtacgagacaagattatggtgaaaaaatattttatggaagaatgttacacaaaaggagcggcgctcgcggttctagatcgcga

SEQ ID NO: 138117 - DNA, 761 bp, Zea mays
  unsure (1)..(761): unsure at all n locations
  Clone ID: MRT4577_57439C.1
cggtgtcgccggatccgttcctgctcctgtgctctggtcggtctcctccagcgtgccccagctcgctccttctcgtgccctccccatcatggatcgcgccctcctcctccccttcatgctgctggtcctggtagcctccgtcaacatggagcactgcctcgagctccctatgccgcgcgctctgctcacccggggtcagagttcgtcgactgttctctactcctcgctttggcggctggtctgctcgccgaacctccagcttcctcgctctcggctctaagaacgtcaacccccccttgctactctcttgccagcactcatctccatccatggatgtcgccatctcagcgcccttgctctgcttgaggaaatgccaagccttgaacagccatcgtcttgctacgatgcgtgcgtgcgccactcatcccacgctggtctttgtgtttgggcagccctgtcgcggtgtcgtcaaaccttgccccctcatcgtcatgttttccctgctgtagcaccatcgatttgtacttgtgtggaatcgcagtagtgcgtatggatgtcaagggaagtgaaagctccatgcgatgctagccaagtacttgacgtaaagcctgaactatggtctctttatcattcttgcgagttttgagctgactatagttntggtaagcatcgtcgctgtcgaaccatagttaatgcttggttccccatccgatgttaattccttgatgttaatattgggtgttcttgggtgcgatcgagga

SEQ ID NO: 138118 - DNA, 495 bp, Zea mays
  Clone ID: MRT4577_5743C.1
gtgaaacatggactataggcttagatttccataagctcattgatccattccaaatcaacacctcgtatcatggagggtaggaaaccaagacacattgccgtcctaaacacacttgtagcttaactatatggggctgtacaataacgctggcttgttcttatacacacatgccaatataacccaacaactgctaattcctcaacggatcgctagtaggcgcttcttgggccaacaacgactgcaccgttaaatcccttggatggctctgacatccactgtcccctttatagtggctccgttgatgtgcctccaactgcctatgaggaagctgttcaccactagttgtgcccacggcgatataccaacaccttctttggctttatctgccaccgtcagcagctcttttagcggagccggtgttagacctgtaacttcctccacgttttcatgattcgcttgagcttgacgcggacacccatgaacacgaggggatcc

SEQ ID NO: 138119 - DNA, 461 bp, Zea mays
  Clone ID: MRT4577_57440C.1
acccaaacggccatgcgggggaatagatagacagaaagaaaagggactcaaccaacacaagagagggggggggggagccgggggagggatggggcaccgggcgcactgacaccgggccccaccaccattaccacccggcgcaaactttttttagcccacgttatttggagcccggaccggacacgtccacccgaaaggaactggtagctacgtaccgggctacgttcgacacacacccccccccccccgggggggcccccgtaaccggggcgtactgaaaaaaaaaaacccgggtaaaactgccatgtacccccgcgaaaaaaaacccgccacgcgcgcacgccgatcccctgggggctgggccctggcccccccccttttgtgcgcacggcctaacttggtgggctttttgggctcctaaggagaaaaaacctccctcttggggggcgggtcctgggggc

SEQ ID NO: 138120 - DNA, 834 bp, Zea mays
  unsure (1)..(834): unsure at all n locations
  Clone ID: MRT4577_57441C.1
gctgtatccatatccacatccatccatcaaacacggaagagagagagggagggagggagaggagagattattttggaccagttccaccgcttaatttgcaggaccgccaccccccgcggcgccgacgatcacctcaggcgtgcgcggatatggggcgccgcggctcctccgaccgcctcgaggcgctctccctcgagatcgagcgcaagctgcacaaggccctgatgtccaactcacagcgtcttcatacttcagcaattgtttgctgacatcgcattgaaggtggatgaccgcgctcgagatgcaattatgagtgagaatgatgatggcattgctccagcagatgaacgggaggatggttggctatgcttctatgagattcttgccaatcattttgttagagtgcctgaaagtggcaggcgtatacttgagttgatagtgcaactctggagccagtccttcgcggccaacatatttgcacttcttttccagaaatggttgtttgaagcccctcttgatgaaaaagaaatatcgctacgatatagctctgctcttgttcaaggtgctacaaatgtattttggattgacatacagacaaatacaagacattttctctctttgtatcattatctcccttgaggacgttgctctagtccctgaaagacttagtaaaatatcattacaggctgcttcaaaagctaaaaattgagccagtactactacactacctctcccgcatgagcatacttncaaggggttggaactgaggttgagtacaagcaccagactaaagggctgcctctacagcttcacttctcctggtggccctaccta

SEQ ID NO: 138121 - DNA, 254 bp, Zea mays
  Clone ID: MRT4577_57442C.1
tcgccatgaactcgtccttgacacccttccacaagtattagtttgcttgcatgcgctgttgagctgaaattgtaggttccctgcatagtgtacgccaagttcaagtgattagtgtcacggatacagtttactgtgtacaaagagagagagagagagagagaaatacatggcattttctccatgatactataatataatatgatgagatatgcatactggactttattaagcagagtaaggggtattacagtcct

SEQ ID NO: 138122 - DNA, 290 bp, Zea mays
  Clone ID: MRT4577_57443C.1
cccacgcgtcccgccaagccttccgccaagccttccgccaagccttcccaacccttaaggtttggcccccaaaacccaaattttcttccattaattacttgagcccttgacccccaccgaacccggtacaaagccaagaacggggctgctgggcgcaaggctggcggccccaggaagaagtcggtgtcgcggtccctcaaagcccggctgcagttccccgttggccggatcgggcgctacctcaagaagggccggtacgcccaacgcgtgggcaccggcgcccccgtcta

SEQ ID NO: 138123 - DNA, 2211 bp, Zea mays
  unsure (1)..(2211): unsure at all n locations
  Clone ID: MRT4577_57444C.1
ccggcgttccaccgcttaatttgcaggaccgccaccccccgcggcgcctacgatcacctcaggcgtgcgcggatatggggcgccgcggctcctccgaccgcctcgaggcgctctccctcgagatcgagcgcaagctgcacaaggccctgatgtccaactcacagcgtcttcagatactccagcgattggttcctcgaggccggccgggaaatcaatgaaacacggaagagagagagggagggagggagaggagagattattttggaccagttccaccgcttaatttgcaggaccgccaccccccgcggcgccgacgatcacctcaggcgtgcgcggatatggggcgccgcggctcctccgaccgcctcgaggcgctctccctcgagatcgagcgcaagctgcacaaggccctgatgtccaactcacagcgtcttcagatacttcagcaattgtttgctgacatcgcattgaaggtggatgatcgcgctcgagatgcaattatgagtgagaatgatgatggcattgctccagcagatgaacgggaggatggttggctatgcttctatgagattcttgccaatcattttgttagagtgcctgaaagtggcaggcgtatacttgagttgattgtgcaactctggagccagtccttcgcggccaacatatttgcacttcttttccagaaatggttgtttgaagcccctcttgatgaaaaagaaatatcgctacgatatagctctgctcttgttcaaggtgctacaaatgtattttggattgacatacagacaaatacaagacattttctctctttgtatcattatctccttgaggacgttgctctagtccctgaaagacttagtaaaatatcattacaggctggtagagaccttttccttctgctctctagattcatgttcttctatgatcaagatcacatgctttctagtttcctagagcattttcccaatttcccaaattccttcttggttggtggaccagcagattactttgtaattgaactcgctgatcagcttcaaaagctaaaaattgagccagtactactacactacctctcccgcatgagcatacttcaagggttggaactgaggttgagtacaagcaccagactaaaggcctgcctctacagcttcacttctcctggtggccctacctacccaacacgggcggtgcggcacgcagcctggaacaccttggatttgctgttccctctttcttctctttgttattcatctgtaatctggtaaaagggtaacacgatgcctctctcggttggtcattgggttgttggttggctacagatcggtcgttacccgaggcacgtgatcagcctgttcttccggctgctgtatccgtggtactggccttcctcttgctggaacttcgtgatgacctgtgccatgaccgtgtactactacatcctgaacctgctggtgtcgtgttgggagaacatgaggcggcggcccagtcaccggagaacgcacggtgaatgaagacgcggcggcccatccagtggcaccttgtgttgttgttgttgttcatttttctttcctttgcgcgagtggtgtagtagttagtagcagcggcttatgtgttcgtcgcgaaacaacattccctgtataatataaactgctgtacttgttcagctgttgttcatataggaagagccgaatgaagaggaacagctggtaatggagggagagcgtgtgcgcgcatttctcgcttcgtttctggggcatttacttatctgcagcgtccttccaccattgatctccaaatccgtgaacggactggggatggggacgacanacgagctcgcattggcaaccgtatataaagttactgtcagtcccagcaatgttgagctgtgagtcacgaggggggagacttcgatgtctgtccagactccagaaggactgcctagtggtccttcttgctttgtataaatggaagttgagctgcctgctgcttgctgctgctgctgtatatttgcctgggacggttgctggataccggtcacatcgataattgttccaggtcttagataaaaaaaaggtgagtggctttagatttgtttttggactgcattgaggttaacctgattgagcataacgatctagagatacaaatatctatctagtatgtaatgaattgctgcatgtgaatacttcatttacagctactcgtttatcc

SEQ ID NO: 138124 - DNA, 510 bp, Zea mays
  unsure (1)..(510): unsure at all n locations
  Clone ID: MRT4577_57445C.1
ggccgccgtgtgctggcgattcgccctttactacgtccgggcgggcggctgtactatctctataaccttttgtgctggttccttttttgtaaggccgcatgcctttgtttgcgattaaatgtttttgaattgggcaaacaaattaagagctgtacgtcgcttgttccaaagctcaagctccggcccaaaggggggggggggggaccttcttttccaatttgccgcggccctgctaaatgcgttgttgctgacgctactctagatgccagcgattattgggcaactttttttgtaagagtacagttgcatagcttcgtcgcctccaacggaaaggtgtttctgtgttttctgtggcatgcgtgtccaaagatgaagactagcttcgccttcatgggcgccttttcgntcgtagggtcctttctacgaggcgaccctgggggtgttctcgagtggttctgtgttgaagccgttgctttttcggaaatcttaagtgatcgtcgggacgtctgc

SEQ ID NO: 138125 - DNA, 558 bp, Zea mays
  Clone ID: MRT4577_57446C.1
gtggtaggacagccatcggtcttcatcggtggccgccgcggcaagcacattcctgggcacccgcctggcggaccccgcgccgacagaacgggcgcatcgtggcccggttcgggttcgggttgggcggcaaggcgaagcctgctccgaaagaaggtggcgcaagacattcgacctgctgtgaccggacgctgtggttgcccggcgcgcgtggctgcccgactacctggacggttcgctggtcggctactacagttccgacccgttcggccttgggaagcccgtgtagtacctgcacatcgagttggactcggtgtccagaactggcaacatgaggcctgcggcatcatcggcacccggttcgagtcctacaaagtcaagtacacccctttgcagacctacaccgaggtgttcggactacagcggctccgcgagtgcgagctcatgcactgacgttgggccatgctcgccacccttgacgccctctccgaaagagtggctaacctgcgtacctgacacgacgcctgcaacgtggagctgctgaactgttgctcctacctg

SEQ ID NO: 138126 - DNA, 338 bp, Zea mays
  Clone ID: MRT4577_57447C.1
ataaagagagactttttcaggagtacctgttattaatgtactcaaaacaggaggaagaaacagtttatctacctaaccacatgaactgattcctaaaacagacccccctgattcctgaacaaactttcagctggctccaaatgacgtccgtcggcaggtttggaatctcgacaggcatttgctaacacgcgttgtttatagctcacaaaaccgatcgcgcaccaagtcgtctcccacgttggtgtccgcgtttcgcatagcggccggactacccgggacggggccaacgttccaacgacattggcctcgtgtgggcccatgcaccagcaccagccacc

SEQ ID NO: 138127 - DNA, 409 bp, Zea mays
  Clone ID: MRT4577_57448C.1
gtgtctgcggtcgccgtggaggcgccggagctcgacttgggccggaatgccgtggacttgagccttctcgtgaaggagtcctcggaaaagagccagcaaggggagcgtgtcaggcagtggcacatggcgttcccactagccggtaaggccaagggcggcgagctcgtcgtcaagctggcgttccagatcatggatgacggaggcgtcgggctgtacagccaaccgcccgttgcagcttcaggcaaaactagctcctcttcgtcctcctccttgtttgcacggaaacatagcaagtcgtcgttcagcatcccgagccccaaggtgatgcgctcggagccggcgctgataccatccatgggagcgccatcggtggacttgctaggaatcgacgatttcaagctcgattagc

SEQ ID NO: 138128 - DNA, 304 bp, Zea mays
  Clone ID: MRT4577_57449C.1
agtaaactgggccaggcccattacagaggggcaagacagtaattaccccaaaccctaaacgggtattctaacagtatcctctatcctgcattgctgtactcccttcaggcctgcagtttagtttatgatatggccttttctcctatatagtatgctacatcatttcaattaaatttccacacatctctcttgtacttttttataataattcatacggcccttccttcatctaagggaaatcatttgattgtagcattagtccatgactgaactaaatactagcaggatgcaaatccctatcttg

SEQ ID NO: 138129 - DNA, 545 bp, Zea mays
  Clone ID: MRT4577_5744C.1
tgtattcggcacgaggctcgggctcgcgagccgcagagaatttccctgcccgactcgggggggaagaccgcgcctttaagggtccgcgtgtgggtatgctcggggtgagccgcgcttgttaacttcactgcccctttctagtttagggcgtccttgatgttgtcgatacatgagacatgggggaggggggtgatgagtcctgatcatcgggcttctaggggcatgtgccatggggacgtttctgtctcttctttctttggtagatttaccaggcaccattatattgctagagtatgccaacccctgagagatcatagttataacattttcttgagcatcgttggtaaactaagtatgctttgatgctcatgcaatgggttactgcagtagttggctagcagcattgcgaacgggctacaggatcatgttagtgacttgcagttctggcagacacagcttctatatgatattttggttatcgtgccttgtcacatagctatgtgccttcaaggagctgggaatgggatcaatagtttttttttcct

SEQ ID NO: 138130 - DNA, 651 bp, Zea mays
  Clone ID: MRT4577_57450C.1
atattagcaaacccttgtcttcctcgccaactaaaactcttaacaattgcacttcaagaacgtgtcacgactcacaaattaaagagagaggacagagtcaaccccccccagataccaaggacggtcagatcgactgggctcacgagaaggatccctgctggaatgaaccacctctcctcgcccaacttaataactcgaggtcctgcaaaatcggagggcaaagaaacattgcacgtgaaccaaggagctcaaaggcaaggcagtattttatagtgaaaaatgtattcaagagatttgcaatgattcatcatagtccaaaaaagaaagaaagaaagaacaaggtggttcttgatccctcaaactaaaacgaattagcaacaagctgcacgaaaacggggtatcaagcaccatcacgcctactcacggtgtatccttcgagtaggggatggagtatggggcgggtagtccacactgctgcctgcgagcgcgcggacgaggcggcggatcggtggaaagctttgcaaggcagaggtggtggtggagtggggtgtgaggacgagacgagacggagtggtggtagtcctggagcctggactctggaccacgcgtccgcggacgcgtgggcggacgcgtgggcggacgcgtgggcga

SEQ ID NO: 138131 - DNA, 926 bp, Zea mays
  Clone ID: MRT4577_57451C.1
ttttgcctagcaaccttgaggatgaactcggtgaggacaacacagcatgtgtcattggtgaaaagcgcgctggcaaacgcggacacgatgcagactcggaagagcaggtccttgctgcctctgctcttccacgagagcaggttcccgaggtacttaaacatgtcagccctctcaaggaagatgctgacgaccattgtcccgaagagcaggccgatgatcgggaggtcaatcgcggcgtacgcgtcctccggggagatgacgcggaacaggaccattagcatagcaccaaggagggacccagccgtccgcccaacaggcatgaacgggacggtggggaagacggccatcacccagaaaatcccaaaggcgatacatcccagcactactttggaggtccctgccaacgccatattagcaaatccttctcttcctctacaactaaaactcttaacaattgcacttcaagaacctgtcacgactcacaaattaaagagagagtacagaacaaccccccccagataccaaggacggtcagatcgactgggctcacgagaaggatccctgctggaatgaaccacctctcctcgcccaacttaataactcgaggtccttcgagtaggggatggagtatggggcgggtagtccacactgctgcctgcgagcgcgcggacgaggcggcggatcggtggaaagctttgcaaggcagaggtggtggtggagtggggtgtgaggacgagacgagacggagtggtggtagtcctggagcctggactctggactggacacggaggcatggagaccccgccgcgatgtgggtgggggcggctaaataggcgggccgcggggggtgtcgccatggcccgtggccgtggctgtgcaccatgggagccgcgtgagcgtgtggggacggggaacatcccggccgg

SEQ ID NO: 138132 - DNA, 538 bp, Zea mays
  Clone ID: MRT4577_57452C.1
gtacagcagatgcaacgcttgcactagggatactacaggcaaaattcgaactcgaaggattacaagacacgggatcatctcgggacggaaacaaggacgaagcagtcaagaaagcacgaacaagcagcacgctgggggaaaggaatcggccaagaactacagagagaggagaaaaagtattgattcaagcctggacgcggagaatggataaagagcttagtaaccgccaccaccgtagccgccttgttggtagccgccttgttgttggccgtagccgccttgattgtagccgccgccgccgccgtagctgcgctgctggtagcctcctccataaccgccacgggagcctccaccggatgggcgggcgttggctaggttgaccttgagacgacgtccatcgagttcttgatcatttagccctgcgatagcagcctgggcttcgccctcggagttgaaagtaacgaatccgaatccacgagagcggccggtctcgcggtcttgcatgacgatggcgtcagtaacctgcccgaactggctg

SEQ ID NO: 138133 - DNA, 3042 bp, Zea mays
  Clone ID: MRT4577_57453C.1
gccggccgggccgggagacaagtcccttccgtccctccccacgccgccgagggccgccgaccaggaggagatcacgcgctcatctctcatggagtccgtctagcttccgctcgtctgcgcccactccaagcagccgcagcggaactcaactactgcaggttgagatgaacggtccatcgaatttcatgcctactcctgaacaggatgttctggacgtcaagcccttgaggacattggctccaatgttccctgcttctctgggtgtcaatacatttaaccactcaaccacgccaccattgatatttgtcactccttctggacaatttcaagggggttttggtgattggaataattctgctgccaaatcatttttcgctttcagcagcaaggatgctcgtggaggcaaggctgatacatttagtgatcagaatactggtactggcaaggctgccacttttggtgatcaggatgcttttggcagccagaatgtttttgctagtgatcacagtactggtactggcaaggctgccacttttggtgatcaggatgcttttggcagccagaatgtcgccactggtgtgcaggatgctgcgaaaggccagactgcaacagattggacagatgtgagtgccaatgccaatcctaatggcccaattgatgccattgccatttcagcttacaggtcaacacagcctaatgttatatcactggatgatgatgacgacgacgatgatgagccttatgctgctaacaagacatcagcatctggacgcaagatcaagaggccatcccacctcagcggatacaatgtgagtgatgctttggtaagtgacagctccaacagcatgaaggttaagcgccccaaatcctctcacgggaaagctgctgctgacaacgagcatgccttgcttcctccttctgaggatcccagggaaattgtggaggcagttctcatgacctttgaggcgttgcggcgtaggcatctccaattggatgaggcacaagagactaacaaacgtgcagatctgaaggctagtgctatcttgatgtccagtaatatcagggctaaccctgggaagaggataggggttgttcctggagttgaaataggagacattttctacttcaggatggagctatgtattattgggctgcatgctcctagcatggccggaattgactatatgactgccaagtttggtgacgaggatgattctgttgcaatatgtattgttgctgcaggtggttatgacaataatgatgatgatacagatgtactggtttacagtggttcaggaggtaatagcaagaacagtgaggagaagcatgaccagaagcttgagaggggcaacctggctcttgagaggagcttgtccagaaaaaatgtaatccgtgtggttcggggctataaggatccaggttgcttgactgggaaggtttatatttatgatggcctctataggattcacgagtcatggaaggagaaaacgaagagtggaatattttgttttaagtacaagctgctgcgagagccaggacaacctgatggggttgcaatctggaagatgtcccagaaatgggtacaaaatccactgactagaggcagtgttttaaatcctgatctatcatctggtgcagaaaatcttccagtgtgtcttgttaatgacattgacagtgatgaagtgccacaccatttcacatataccactcaggtcgaacacttgaaaccactcagttctgtgaagcctttacagggttgcagatgccttagtgtttgtctgcctggtgatgccaactgctgctgtgcacagcgtaatggaggcagcttaccttacagctcatcaggactgcttgtatgccgcaagactatggtttatgaatgtggtgaatcctgtcggtgttctttcaattgtcgtaacagagtgacccagaaaggagttaggatccactttgaggtctttaagacgggaaatcgaggctggggtcttcgttcgtgggacgctatacgggctggttcatttatatgcgagtatgttggtgaggttattgatgatgctaacattaatctgaatgatattgaagatgattatatatttcagatgtcgtgtcctggtgagaggacattaaaatggaattttggacctgaattgataggggagcaaagcacaaatgtttctgctgatagctttgagactctacccattaagataagtgctaaaagaataggaaacatatcacgtttcatgaaccatagttgtgctcctaacgtattttggcagccagttcagtttgaccatgaagatgatcatcgcccacatatcatgttctttgctttgaagcatattcctcccatgacagagttgacttatgactatggtgacgttggagctgatcctagtggtgtacggtctcctagagcaaagaactgcctttgtgaatcctcaaattgtcggggattctttatctgaccgtggaaaatgcatattctatgattctatctatcaacattcaaccctaccagctagatcctttttggtggcacctgaaggaaaagtaggactgttcgaacagcttgcatcactctgtcgtggacattttacgcagatcttttagatgaccattcagcaattaatgcacaaacgttttttttgtgggggaagaatgttggtcttggaagatcaattttgtgtagtttgtagacttgtagagcatttagtgctgctaaacttgtgcaccttaagtcttttggctgtaaaagagcctccaggctccagctgaattggttagtcagtctaagtagcatttctttgatcctgaatttgactccacgtggagtcaatttcaagctggagttaaaaaaacattcttatgttctatactaaagtacagttctaaggctcaaccatgatcatagtcgttctcacaaaaaaaaaaaaaaaaaaaaaaaaaaaaaaaaaaaaaaaaaaaaaaaaaaaaaaaaaaaaaaaggaaaaaaaaaaaaaaaaaaaaaaaaaaaaggtcctctgcgttgttaccactgtt

SEQ ID NO: 138134 - DNA, 189 bp, Zea mays
  Clone ID: MRT4577_57454C.1
aaactcgcgctcaaccgctagctcctgagttgggcatccgggcatctgcctcaatgctgacgatcgacgcacgcaccaccttcgagcacgaccctggacgttcacccaagctgcactcctctcgccggagactcagcggatgacgctccctagacgggatcccctgacagccacatcgtccgcaccccc

SEQ ID NO: 138135 - DNA, 240 bp, Zea mays
  Clone ID: MRT4577_57455C.1
aatcacccagctttaaagctgcttttaacaatgaagattgaacatagttcagcaattttgattaaattaagacttgggggtgaatctttccagtttactgaactctagatcatgcttgtagtccactgccatatatcatgctcgcttcgcttggcaacccccgttctcctgccaaatgtccctagaccctctgtcctgcagattcagggtggcttttcccctgactgtgtccgatgccaa

SEQ ID NO: 138136 - DNA, 1283 bp, Zea mays
  unsure (1)..(1283): unsure at all n locations
  Clone ID: MRT4577_57456C.1
gcacgagatgaagtgccacaccatttcacatataccactcaggtcgaacacttgaaaccactcagttctgtgaagcctttacagggttgcagatgccttagtgtttgtctgcctggtgatgccaactgctgctgtgcacagcgtaatggaggcagcttaccttacagctcatcaggactgcttgtatgccgcaagactatggtttatgaatgtggtgaatcctgtcggtgttctttcaattgtcgtaacagagtgacccagaaaggagttaggatccactttgaggtctttaagacgggaaatcgaggctggggtcttcgttcgtgggacgctatacgggctggttcatttatatgcgagtatgttggtgaggttattgatgatgctaacattaatttgaatgatattgaagatgattatatatttcagatgtcgtgtcctggtgagangacattaaaatggaattttggacctgaattgataagggagcaaagcacaaatgtttccgctgatagctttgagactctanccattaagataagtgctaaaagataggaacatatcacgttcagaccaagtgngctcnaacgattttgcagcagtcagttgaccagagtgacacgccacaacagtcctgcctgagcaatccccagacgatgactagaaagggctgacgtcaggggaggcctaacaaacgcctggagccatgcggtctacgcggaagaatcacacactcaccacacagccaaaggactgactttgtgaatcctcaaattgtcggggattctttatctgaccgtggaaaatgcatattctatctatcaacattcaaccctaccagctagatcctttttggtggcacctgaagaaaaagtaggactgttcgaacagcttgcatcactctgtcgttgtggaaccattatattaattaatgtcaatcttttagatgaccattcagcaactaatgcacaaacgtttcttttgtgggggaagaatgttggtcttggaagatcaattttgtgtagtttgtagacttgtagagcatttagtgctgctaaacttgtgcaccttaagtcttttggctgtaaaagagcctcgaggctccagctgaattggttaggcagtctaagtagcatttctttgatcctgaatttgactccacgtgagtcaatttcaagctggagttaaaaaaaacattcttatgttctatactaaagtacagttctaaggctcaaccatgatcatagtcgttctcacaaaaaaaaaaaaaaaaaaggccccta

SEQ ID NO: 138137 - DNA, 441 bp, Zea mays
  Clone ID: MRT4577_57457C.1
ggggcaaccttcaagcaaaaagggaagggggcaacacccccctttttttattttgggacaacaacaccttgtaaactcctacatttgcccctcgtaatatataagggtttaaggacaaaacaaaacaatccctgcggggggggtttcaggcaaaacaaaaaaaacaacccccgggggaccgggggcttttccccctttactttggtccccaaaaaaaaaggggcataacctttgccccctttcccgggcccgggaggggggtcttccccccccccccccgggaaaaaaaaacccaaccccacccccaagtgccgggccccgggaaaccaaaattttcccccgggtttcccccccgggggcccaacgtgggcaacttgggccacctgctggggggaggggtctctctccccctgctaatgggcgccccccccccccccccca

SEQ ID NO: 138138 - DNA, 373 bp, Zea mays
  unsure (1)..(373): unsure at all n locations
  Clone ID: MRT4577_57458C.1
gggtgtgtgccttcttctttctggttggccnctttcttcgtcctggntcctttcttcttggctttccccttctttgtcgtctgcttgagggccccacccttgntgtgttcgcggtcggtggccgcgggggctgtccttgcccgttggtcttggggcgcccgttggtgttgttgtttcagggttgcggggtttgccgcgttctgctggttgttcggccgcctctgttgctgtgtcctgttcgtggctctgtttgctgctgcttgccggctttttggttgttgcttttgctgctgccgtttggcttgggggttcctttgcggccctttggttttttgggtggttgctgttcgtgctggtggtttgctctttcttt

SEQ ID NO: 138139 - DNA, 439 bp, Zea mays
  Clone ID: MRT4577_57459C.1
gaaaaaaaggcatttcctttaactttttattaaaaccctagggttcaaaaatttaaaattttttttgttcaaaaaaaaaaacacggagtcggggtcaaaaaaaactgaaaccatttaacctttcaaaattggccaaatcccttctaaaaccaggggccccaaaacaaaaacctgaaacaaaactaaactgcaagtaaaaaaaaacatttgggaaaaccttttttaaaaccttttcccttgtttaattaaaggcggaatttttttaaactggagttttggactgaaaacccaatttttttttccaagttacgggagggtgttaatttaaagggttggctggaaaaaaagcaattccaacttgacccattttttggaaaccaaaaaaacctgttaaaaacccaaccacctggaaccttgtttaaaaaaaaaaaacattttt

SEQ ID NO: 138140 - DNA, 339 bp, Zea mays
  unsure (1)..(339): unsure at all n locations
  Clone ID: MRT4577_5745C.1
acgcaatcaaaaagctttgtaatcagctgaatcaaagtttcnaacaaagggaccactacccaggtacattatactgtttatattttggaggcaagtaacaaattaaaaacaacagttggtaaagaaaaagctaacgcttaacgtatgagctgcaaaataaaacaccaaagctgcttacgacctatttggatgtttcttactgacgacataatacaagaagtctttaacatgaaaatattatctaactaaatgttagataggtataaccctaccttcagaacataaacaacctatagcggccttgtgcgcaataaaaattgaacaaaacgtattcttcct

SEQ ID NO: 138141 - DNA, 351 bp, Zea mays
  Clone ID: MRT4577_57460C.1
gctacttcacctttgtcatgctcgtcagggtggtgcaggagaagataccccgtagcaccttcaggatgccccgggatagggttctggcccctgggttcatttctgagaggcagggggtggaacttcttatccaggcattcaataactgggccccggagtgaatggacctaataaggcttcccaggggatccatagtccccacccaccactagggggacacccaacattaagcatcagaagctctactttaacggaataaagctcacatgtcctgatctttgccatttgggagagttattcaggtgggccattgaaaaaaagggagcaataaaggccaacaatatggcgaag

SEQ ID NO: 138142 - DNA, 269 bp, Zea mays
  Clone ID: MRT4577_57461C.1
agatgttgcgatccatcatatctggcacgtatattagctgcatttatcttagatactggcagaggatacctgtaactaatcatagaggtgtcctgagtgatgattctgctttctccacatttcctcctgaatttgtaagaccgttcattgaccctatcgcttcaatatttcatcgtatgctctgtggaagatatgatgcttctaatgacgatggctactgtctggaaaatgagcctttaccaggatcagactcaattgatgcatccagg

SEQ ID NO: 138143 - DNA, 129 bp, Zea mays
  Clone ID: MRT4577_57463C.1
tctgcgcacggacagtgcaccagcctgcttaagtatgctgggcatgatggacctggttagcactggccttgaatgatcggcacgatagctgtcatcagagaaagttgccgcagagtccaaagaaatagc

SEQ ID NO: 138144 - DNA, 142 bp, Zea mays
  Clone ID: MRT4577_57464C.1
ctgcaggcacggccagaatttcctggggcggacccagccatccgagcttggctggatacatctccatccatccactagccaactgtaagcacgcctccaacataagacaccggggtgtcatcgagaaactcagccgaactgc

SEQ ID NO: 138145 - DNA, 279 bp, Zea mays
  Clone ID: MRT4577_57465C.1
gcgttacaccgctctgaccagagggctgggggtggagctgctgcggctggtggccgaggccatggggatccggcccgactactttgagggcaacattattgccggcgacgtgggtctcaacgttaaccactaccctgggtgccccatcccggagaagactctcggcctgccgtcacattgcgaccgtaacctcatcacccttctccttcaagggtccgtctacgggcttgtcgttgtttacaggggataggtgtttaaggtcgagcccatgcccggtgc

SEQ ID NO: 138146 - DNA, 239 bp, Zea mays
  Clone ID: MRT4577_57466C.1
tggatgcccgcggcgtggcgtggcgtggataggatcgccatcgcgagcccaccccgccgccaatcgtcatgctcgctccgcaggcaaacgaacatacgccgcagtcctatcatctctttgctctgcgccccggccgggccccgccgtctcgcgtcgcgtcacgcatttgcggtttccgtccacatcaagccctgccgtccgatcctcctccagctccctgtttctgagcgcaaccgcgg

SEQ ID NO: 138147 - DNA, 927 bp, Zea mays
  Clone ID: MRT4577_57467C.1
gaaaaaaaaaaaaaaaaaaaataaaaaaaaaaaaaaaaaaaaaaaaaaaaaaaaaaaaaaagttacctcgaggccggccgggccggcatcatcaaccgcacagcacaatccacctcgtatcgtatcgacgaccacaatggcggcgaggcgttccagttcttcttccaccaccgcggtaccattactgtgcgcctcggccttgctgctattcatcctgctgtcgtcgggcgtggcgccggcggcggcgtgcggcggccacccgtgcccgatcccggacggcaagtgcccggtgaacgcggtgaagctgggcgtgtgcgccgacgtgctggacgggctgatccacgccgtggtgggcggcccgcccaagaagccctgctgctccctcatctccggcctggccgacctggacgccgctgtctgcgtctgcctcgccatcaacgccaacgtcctcggcgtcaacctcgacgtcgccgtcgacctctccctcctcgtcaactactgcggccgccgtgtgcccgccggattcaaatgcgcctagctatggactttgctgtggcagtgcgtgcacagatcgatcgatcgtctctacacgtaacacatagattgtcgggaataaaaacagtccctgtggttgccaggccagtgtccatgcggactggaggcgttgactagtcttcagcgtgattggtttcctgtacgatagggttccatcctccatgcgtgaagacaccgtaaatgttttttcactcacatacccgcatatgcacacaagtgagcgaggggcgtttctggctgcctaggctcgcgcgagccacacgccgcaggtgctagcaaccaatcatgtagagtgtgtctgtgtacgtacgtgtgctgcaggatctagttgatcgtgcaactacacatatgtcgtcatataaggtatactat

SEQ ID NO: 138148 - DNA, 325 bp, Zea mays
  Clone ID: MRT4577_57468C.1
gcttgttacacggttgggttgagtgcaaggtgtagaactgttgatgatagtagatattggagcagtgtaaagatgtgagtgcttaagcataagtcattagagtctttaattccatttgatggtggcctttctttgtatattccagattggaggagaactgacagacttcatcattgtgcttcatgaccgtaaagctgtcaaggctttcagcagtcgcattcatctttcacttggggcaggattgagtgctgcagcatgacccattggcagagcatttgaggcatacgttcgggccagtgaaaaaggttctgggatatgctacact

SEQ ID NO: 138149 - DNA, 357 bp, Zea mays
  unsure (1)..(357): unsure at all n locations
  Clone ID: MRT4577_57469C.1
tatcacctctgccctccagttgatcatggtcatgctctcttggatcctcaccacatacctcggccgacgcaccatctatgtctatggtcaactcatcaactgtgcattcttggtcgcgctcggtattgcagcttcagttggcggtggcaaggcggctagcaatgcgcaagcatcacttggcttgatcgtctccgtcctgttctgcttgggacccgcccctgcctcatgggtcatcatcggcgagacatcctccgttcgtctcaggccactgaccaccggtattggacgaggtgcctactacgtggttaatattccttgcatcttncttgcgagctacatgctcaacactgataagtg

SEQ ID NO: 138150 - DNA, 254 bp, Zea mays
  Clone ID: MRT4577_5746C.1
tacacaagatgacacaccgtggttttgaaacacactaataacaccacgaaaatgcagacgtgccaagacactgaacaatgcacgcgggatggtcgatcgcaaatattaaaaaggcaagctgccatgcgctatgaaactgaaagggggcaaccctcgaacgagggagctcataaaacttttaaagaggggggaaatcctgaaaggggttacggtataaactaagttacaaaggggaagggaatggccttataaaa

SEQ ID NO: 138151 - DNA, 435 bp, Zea mays
  Clone ID: MRT4577_57470C.1
gctctaaaaccctatcccctggtccttctcagccggcggcaagcccttcccgtgctccggaaccgctgagagacaagaagagatggccggcaagggcgatgggccggctatcgggatcgatctcggcacgacggactcttgcgacggcgggtggcagcacgaccgcgtcgagatcattgccaacgaccagggtcaaccgcaccacgccctgggggggggacttcaccgactccgagcgcctcatgggagatgcggccaaaaaccaggccggcatgaaccccatcaacaccgcctttgatgccaagcgtcggatcggcaggagggtcagtgacgcggcctgacagaaggacatcaagctgaggccctatcaaggacactttctggaccaggcgagaaggcaatgatagcgggccagcacacaggggaggagaagca

SEQ ID NO: 138152 - DNA, 334 bp, Zea mays
  Clone ID: MRT4577_57471C.1
ccccccccaacccgaaaaggtgctgtataatcccggccccacggccttatgatggtattgcccgtgtgaaagcgggcacattgtggcccaaaaggcccttctttctttgcacctgacggtttttttcagagataaccgcctggggcccggcacattgcccaattttgcccacttttaaccttgtttctaaccccaggtcttcttctgttaccaagcccgtgcggtggacttatacttggccctttggggcctaacatgtcgtgcatccctaggacaaaaggatcttaagggtgttgggtccgggtgctacgtgcccatttaccggtgtacctct

SEQ ID NO: 138153 - DNA, 271 bp, Zea mays
  Clone ID: MRT4577_57472C.1
ctcttcctccactccccacacggcagagcacaccgactctcaccggcgcaatttgtgcctccaccggccgacgccatgccctacctcgcccgcaagcggctctacttccgcggcatcaaagacgccattgccgcactcacggagtcttccaccacgccggacatcaccaaccacctccccgcggccacctccgcctccatcacctacaccaccgaatgccgcccgggactcgagaccaccaccgccgaggccctccgcgcaccccccggca

SEQ ID NO: 138154 - DNA, 264 bp, Zea mays
  unsure (1)..(264): unsure at all n locations
  Clone ID: MRT4577_57473C.1
ggccgacccacgcgttcggcaaatggcaccaagaaatccatttataggttttcttcaggggaanaaacggcggggncgtgtagcatttgccaccgccgcctcatcctctcaaccgacgtcctgctctccgtgctcgcggctgacagcgccagcgccaggacctcctgcatgccatagtggaccattctgcacaacccaatcccaagctgcctatggttctagaccagcctgacctgctgtatatggccattcctcccctgtcct

SEQ ID NO: 138155 - DNA, 740 bp, Zea mays
  Clone ID: MRT4577_57474C.1
cattgggtacctcgaggccggccgggatttcgttctccgaatcacgacgtatctggtagctttgtgatccaacacaatgcagatatagaaaactgaactgtaagattaataagcagacctttcccgagatgaagatgtgtgacatggcggaacatgcgcctgagaagtgcacgagaggaactgagggaaatgggttgcaattcgatgcgaccaaggtcaccagagacacatgtgtgatctcgagagtgagcgtcactgcttgtgactgagccgcaatccctcactgctcgtgctgtgcatcacagacagactgccatgtaccagcgccgcacctgcctctatcgtcccactcatctcatccattcatccgaacgaggagggtcgaggccatgaagaacgtgtaatacttgtctagagactaccgctggcaatatctgaaactgacttaaccaagatctgtgattgtatactcaagcttctcaaatgtcactctttcgtcagtcttccactacatccacgagtgcgaagaccgttctatcttaagatgacaggtgactactacacatactttgctgatctacgactgcatctcattagaaagacgctgatctcaacacctatggctgatatacaacgctgcccaggaattgcttttctgagctatgctcaactcaccctattacgctttcactgacactctacttctgcttgatctactatgagattctcaactcacgcca

SEQ ID NO: 138156 - DNA, 253 bp, Zea mays
  unsure (1)..(253): unsure at all n locations
  Clone ID: MRT4577_57475C.1
cacgcgtcttatagctggacctctatagcgccgcggtgggggggggggggtttttatcaataccataccattatgatgtatatatgttgctgaaattatgttccaggtctcattacacacaaaacttcaatggttgtctatatcttatattcagatttggagtctgctcataatcaggggggggggggcggtggcttgnacctgccgcaccgttctgtctttttcttctttgttgtatttttcttttttttct

SEQ ID NO: 138157 - DNA, 460 bp, Zea mays
  Clone ID: MRT4577_57476C.1
gggtcgagccacgcgtccgaacacgcgtccgagcttcttcagcaacaaacaacacaatcgaaagtctcaaaagctttccgaaagccaactctcacgcaacgccaaatcaacaaacacctcccgccaataccaagcgacatcagcccgcggagcgctcttacgaaaacaactaaaccaataccactaccaactaagcaataatgggtctcatgtggactaaaggcttcggcggaaagcacgctggcggtggagtcatcatcgacaagcacggcgctcgccgcgctcctttcaggttctccttcaagggcctgaactgcttcaagtaaactacccaagttcctacgattatcagcacacgggaacagcgacggaattctactttcggttctcgactgccttcaagtgttttcacctttgttctttttttttcacgactcgacctacctgttcccaagggggg

SEQ ID NO: 138158 - DNA, 427 bp, Zea mays
  Clone ID: MRT4577_57477C.1
agacaagacaaatgcaactaggacggattgaaccattcgcgcttacgtaacatagaatataattacgagacttcgaggttgctacatatactcacaccacactaggcattctatgatacgatgcaacgacacatgcgcgactggggaaccccaatctgggtatgcacatcagaatacgccatttattcccttaggagcttgcacatacatgttcacggtaaagcatgccggcatgacaggatgcatatgctaaggtagcgaacccgatctggaagcgcggctttgtggccggttacaggggataatagagtaatacattgtcaaacttgcaggagcttggtggagccaggacagccggtgcctgtcctaacatatgttgggaccgggctccaacactgggcgatggacctggctgacgggctccttg

SEQ ID NO: 138159 - DNA, 2272 bp, Zea mays
  Clone ID: MRT4577_57478C.1
ttcaccttcacggcttcaccagcctgcgctctctcctctcagcgcgacgactgggtgggcggggctaccgccgccgccgccgcccgacaccaggtgccgtggttttcctcggtctcttcaccggcgacgcgctccaaccaggtgctagcgcggtacaattttcgagaatttgtggtgttgaactgaacctccatgacacaagctaaacctgcccctagtggcaagaggaactggagcagtggcgggactgccgctggaaggaagaacaaggaaagaggagatgacaaagcaaaaggaatcagggttgctggttggaacaagggcgacaagaagaaagaagacaaagggcgccaagtaagtgcgggatcgaagaggcggtggagtgagggagtgccccgggttggtgtgaagagggctgtgtctgggtttgacaggaggaagaggaagatcgatgatgactcgtgggatgatgatggtggcaaggatgtttcatcttccaaatcaaagtttaccagaaagtgttcttccacaataagccgtcgaaaggtttctcctggaaaaggtgacagattgaagtctcaaacgttgtatgaggatgactaccgtgcagggaaaaggagtattagcaaagtttctgatgttagtagaggggtcaagaatcgactggtgaattctgtagcatccaaagggaagaagcttggtgcatccgaaggagtcatacgaacaaagaagggtggtgctaaagaagttgatttggatgaggaggctgttaatagcaagaagtcagatgacttggatcttattattgaagaagagaagcctcgccctcgccttactcgagtactggaccagactggtaagaaaataaagcccgctaagaaggttgtagttcctgacaatgaagaacgtgctcctcctaagaagagaaagcgaatgaagctagatccttatgacacttcaaacaaacggattgaagattcttctatccaagatgtttccagtgcagagaaggttctcgtgaattgtacacctgaagaagagactgaaatgtcaataaatgcaaaatttcgtgctatacagccaagttcttcaatcctttcatatgtggaagataatttactaggtcgtaggcgcttaattgagataaaaaatgctggctacaatgtcaagatttctgctcctctggataacgttcccttctcaaccagcacagaacgtgaacgcatagaagacattgcgttcagaaataagctggaattctttgctgctgcaaagatctcttcctcattccccactccaacactcccagagatagcatttgcaggtgtatcgaatgttggtaaatcctcactcctaaattcacttacaagacaatggggtgttgtgcgaacatcagataagcctggacttactcagacaataaatttctttcaacttgcttcaaagttatgtcttgttgatttacctggatatggttttgcttatgcaaaggacgaagttaaggaatcgtgggaggaacttgtgaaagagtatgtttcgaccagagttggcctagaaagggtgtgccttcttgtgcacactaaacgaggaatgaaaccgttggactatgagcttgtagacttaatggaaaggcacaagacgccataccagattgtactgacaaaaactgatttagttttcccaattgatgttgctcgccgtgccatggaaatccaagagagcctgaagaggaataagtcagtggtaaacccagtgatgatggtgagctctaaaacaggagctggcatacgcaacctgagaggcgtgcttggaaagttagctcgcttcatcaaaccgtagcaaagctgcagccaatttcggagtctgcgtctgcgtcggtcgagaccgtgagaggaaactcacaccaggctgtcttaggcaggtgccgcgctacgtcaacgctctaaccagtccaccgccacaagctttgtctgcatcagtttagactatcgaacacttgcagcaagcgttcctagttaggttatgctttggagcctagctgtatcacaggccattccggtaggattgaactgttcaacttttgagtggattatgcgatgctcagattaatccatgaaatatttgagtttccccatttggatatacggaatcgtacatccttaaaaactattatgcatcgttccttgatgtacaatactttttcagtgatgattcatcactcatcagtcattgatgttttatgtgttcttcacgaaaaaaaaaaaaaaaaaaa

SEQ ID NO: 138160 - DNA, 291 bp, Zea mays
  unsure (1)..(291): unsure at all n locations
  Clone ID: MRT4577_57479C.1
cggtaccggcaattcccggggggcacccacctcgtctcgaccgtcacatgggaccccaccgccgggcggggaggccggggggacccccggcgactccgacgccacctccccgaccaacaccaccgtgacgctcccgccgctcaccctccgcgacgtgccgcgcctcgcctcctcgtccccggcggcggcggcggtggtcccgaaccccatctcgcttttttggggggggcacccncccgccaacttctacatctctccgggggacgtaaaaatgggacacgccttcttgga

SEQ ID NO: 138161 - DNA, 243 bp, Zea mays
  Clone ID: MRT4577_5747C.1
ggcttatgtcagatgccgatcgatctaaaaggggggccatttgaattatggttggccgcaaacaattagatcagtacgtggtggctatattacaagttacaaggtattatcaaaaaacaaacaagaagcataaataaagggcggcacgcgactataagagaatgagctacctaaaataaattacttaccgctccctgactgcttaccagctatccatataatgagtcgtattagatctatgaa

SEQ ID NO: 138162 - DNA, 338 bp, Zea mays
  Clone ID: MRT4577_57480C.1
ccggccgggtggaggagatccgatgggatgactcagaataaagatggtggagggacctgaccgtatgcaatatgtgcaacaactaggcactggcatgcttatgctcaagtaatctgataacttgaatgttgtgtatctggcaaactgcttctgtggtttccgttgttttttttgttttgttttctcagtttcgctgtgaagagagaaatgcaggtagacgaggaatgtatgtgacaaaagaatgtccgacccagatgaaaatatatatatgaatccatgacaagggtatgtgggtttagttcttctatccgaaaaaaaaaaaaaaaaaaggggcggcc

SEQ ID NO: 138163 - DNA, 235 bp, Zea mays
  Clone ID: MRT4577_57481C.1
ctcgttattaaaaactaaacttctgggaggtggatgctttgatcagtttaagtcattaatttacatcttcatattccttgcaagtaaaacaattcatgtatcgatatctaccttaccatcggtcacaactcatgcaacgccagcagcaccaaccgcactcagactcacgctgtcatttactgggtctgcaaatgcccctaccgcaactagacagactggctcgcgctatcaccta

SEQ ID NO: 138164 - DNA, 644 bp, Zea mays
  Clone ID: MRT4577_57482C.1
cggcactccgttcgatatgttcctactagatgtgttgttcgtcttcaccgtcaatccacctcccccttaccctgagtcgccttttgtttgcagggatccggaagagatggccaagtcgaagaaccacacggcgcacaaccagtcgtacaaggcgcacaagaacggcatcaagaagcccaagcgccaccggcagacctccaccaagggggtaagatgatttacttgatgtccctcttccgtcgtcccgttcggttgattgtgcagatgcgtcagagtggtcattggttgataccggaatcatgtagctgccgacttcattggttgttccggataggtgaaatctatcttaggttgtgaagttagttcctggatgcgaatttatttttggcatggtctgttctagtcgctgaacttggttcctacatgctaattgtttttgcctggttttctagtgccgtactagtagtggctcatgctcgcggtactagcaaatcctgttagctaggatgaaagatatctaagccatttgtgaaagtctcttgcggcagtgtggtaatgggacgtcctggttttataaacctattggactagttataaaaggattcggtgcatagccttttttttattatcaagccactttattt

SEQ ID NO: 138165 - DNA, 506 bp, Zea mays
  unsure (1)..(506): unsure at all n locations
  Clone ID: MRT4577_57483C.1
gggagtcttaactataacgcaaagctctacgatttcggccttgctaagctggggccaactggtagcaactagcacatcacaaccagggtgatggggacatatgggtatgcagctccagagtacgtagccaccggtacgggtcctcatttctcccacgtaaccagctggtatgatcatacccttcttccattgtaatgaactgtcaacgcttcctccacgcgctagttgtttggaagcagaaacatacgccgccgagacgcagactccgttgtctgtttgtccgccacaatcagtataacgcgattgttctcgccctgcagacctttccacacttgattgcgtgaaacagcaagcatatatgcatcgttcacgtcactttgagttatattgacacctacctttgggtagtctccatcctcgctcacgtttgggcattgggtgtaggaacagaatccgaatgcagaactgatgngattcttactcttactgctacggtagagggaggg

SEQ ID NO: 138166 - DNA, 283 bp, Zea mays
  Clone ID: MRT4577_57484C.1
gcagctgacgcgtttgcggacgcgtgggcagacgcttgggctggtgtttcagtaatgtcacaattagcaatggctcttaagtttgtgcaatatcacaattttcttaaaaaaaaaaaaaaaaaaaaaaaaaaataaaaaaaaaaaaaaaaacaaaaaaaaaaatttacaaaaaaaaccctataaaaaataaacacataaaacaaaaattattaaaccattttccaaaaaaaaaaaaaaggctgccctttttaaaagacccaagtttaaacaccctttatatcaa

SEQ ID NO: 138167 - DNA, 519 bp, Zea mays
  Clone ID: MRT4577_57485C.1
gtacagaaccctttagggtgtcttgctggagctagccttagaatcatgaactccactgctccaggtcgtgacagtacctaaccgaccagaacatcttgatataccaaagcactagcttggtcccgagtcgcgcttgttcttgcatgggctgcatgggctacactgttaatgtgtaagagtgaggcaagtgttgggggttttttctcgatctacgtgggatcttctttatagaatactactatagtactttgttagccccataggttgagttttttctagtcaatagtaaaagcaaattccatttttcgagatatcataaaacatactccgctctaaaatagtagtcggtttagttcttcatttctatgtctatatttaaatggatgaaaatgaacctagacacataaaacatatacgtcaaatgttgtatgaatcttttccctctattctaaattaaaactcggtttagctttctatcggattcatataataattaggggactgtgttttatatatgca

SEQ ID NO: 138168 - DNA, 320 bp, Zea mays
  unsure (1)..(320): unsure at all n locations
  Clone ID: MRT4577_57486C.1
gggggccgcgccccccgcccccgcgccaccccccaggggagcgcgggagaggacacgcagggagggccgccgcggccaagacaangaaaccagggagcacaaggaggggggccgccaggcccccgacggacccgcccgcggcaacagaagcagaggcaacgccacaagcgacacgagaaagaacaggcgcaccaagagccacaaggcacacgacaacgaagcaggagcagggcaagcaggccgcccccccaaacggcagcagccccgaacgacagggaggccgccgaggagccggggcgccgccggcggcgacgcgggga

SEQ ID NO: 138169 - DNA, 167 bp, Zea mays
  Clone ID: MRT4577_57487C.1
acgatcggatccttaaaaccctaaacctagtacgtcgcccggccgtcgccatggaccgcggcggcgacccagcctggcaccgcaaccaggccatctccgtgaaccaggatgtctaccaggactatggctacgacgactactttcactaccaatgcaacttcctctac

SEQ ID NO: 138170 - DNA, 817 bp, Zea mays
  unsure (1)..(817): unsure at all n locations
  Clone ID: MRT4577_57488C.1
aataccgttcagacgaaatcacctctaacatctcgatctacctcttcctcctcctcagctctcgttccatcaggttcttccacagcgtagcaaggcaatctagtagatcctccatgtcggacgtgacggcggtgatggatctggaggtggaggagccgcagctggcgcttccaccggggttccggttccaccccaccgacgaggaggtggtcacccactacctcacccgcaaggtcctccgcgaatccttctcctgccaagtgatcaccgacgtcgacctcaacaagaacgagccgtgggagctcccgggcctcgcgaagatgggcgagaaggagtggttcttcttcgtgcacaagggtcggaagtacccgacggggacgcgcaccaaccgggcgacgaagaaggggtactggaaggcgacggggaaggacaaggagatcttccgcggcaagggccgggacgccgtcctcgtcggcatgaagaagacgctcgtcttctacaccggccgcgcccccagcggcgggaagacgccgtgggtgatgcacgagtaccgcctcgagggcgagctgccccatcgccttccccgcaccgccaaggacgattgggctgtttgccgggtgttcaacaaagacttggcggcgaggaatgcgccccagatggcgccggcggccgacggttggcatggaggacccgctcgccttcctcgatgacttgctcatcgacaccgacctgtttcgacgacgcggacctgccgatgctcatgnactctccgtctggcgtggacgacttcgccggcgcttcgagctcaaactgcagc

SEQ ID NO: 138171 - DNA, 2849 bp, Zea mays
  Clone ID: MRT4577_57489C.1
cccacgcgttcgcccactcgtccttcacgcgtccgcgaggagtggaggaggtcaccccgagacagtcgcttcaccgccggtctctcctccccacctccacgcggttcgcggccggccatacaccgtagcactaccttggtgggggcttgcgccagagctcgcgaccactgcccgtgacgcctgtctttgactcgttgaccgtggagtgagcgcgcgcgccggagccggccagtcatggaagtgcgcggcggagtggggcagggttcggtggcccggcacccgcccgcatcggatacctcgcggccggccgggctgggctccacgcctaatccccaaaccccgggccactgctccgctcctcctccttgccgccgtgcggttgagcgccgacgagcaagcccgacgccaccctatggctatggaggtccgccgcagggttccgccgccgcacgggagcgccccacggcgccagcaggcgaccggcggcgaggggcagcgggtgcgtgtgcaggcgggggacgcgctgccgctgccgatccggcacacgaacctcatcttctcggcgctgttcgccgcgtcgctggtgtacctgatgcggcggtggcgggagaagatccgctcctccacgccgctccacgtggtctccctcgccgagatcttcgccatctgcggcctcgtggcgtcgctcatctacctcctcagcttcttcgggatcgccttcgtgcagtccgtcgtctccaacagcgacgacgaggaggacttcatcatcgactcccgccacggacaggcgcgggcgccgccgccgcccgcgccggcggccccgtgtgcgctgctggggagccccgccgccgcgccggagaaaatgccggaggaggacgaggagatcgtggccgcggtcgtggcagggaagatcccgtcctacgtgctggagactaggctgggagattgccgccgggccgccgggatcaggcgggaggcgctgcgcaggatcaccgggagggagatggacgggctcccgctcgatgggttcgactacgcgtccatcctcggccagtgctgcgagctgccggtggggttcgtgcagcttcccgtgggcgtcgccggcccgctccttctcgacggccgccggctctacgtaccaatggccaccaccgagggctgcctcgtcgccagcaccaaccgcggatgcaaggcaattgccgagtccggtggggcctccagcgtcgtgctcaaggacgggatgacgcgagccccggccgtccggttcccatctgcacgccgcgccgccgagctcaaggcctttttggaggacccagcgaactttgacaccctggctatggtgtttaacaggtcgagcagatttggaaggctgcagggagtgaagtgtgcgattgcagggaggaacctttacatgaggttcagctgcagcacaggggatgccatggggatgaacatggtctccaaaggtgtacagaacgtgctggactacctccaggctgacttccctgatatggatgtcatcagcatatcaggtaacttctgttctgacaagaagtcagctgctgtgaactggatcgatggccgtgggaagtcggtggtttgcgaggcggtaatcaaggaagaagttgtgaaaaaggttctcaagacaaacgtacaggctctcgtagaattgaacgtgatcaagaaccttgccggttcagctgttgctggagctcttgggggtttcaatgcccatgcaagtaacattgtggcagccatcttcattgctactggtcaggaccctgcacagaacgtggagagttcccagtgcatcaccatgttggaagctataaatgatggcaaagatctccacatctctgttactatgccatctattgaggttggcacagttggtggaggcacgcagctggcctcacaatctgcctgcttggacctgcttggcgtcaaaggtgccaacagggaatctccggggtccaacgcgaggctcttggccacggtggttgcgggtgcggtcctagctggggagctgtcccttatctctgcgcaggccgctggccatctggtcaagagccacatgaaatacaacagatccagcaaggatatgtccaagacccttgcagaggaaacagacaaacccaagaaatgctgaataatatcaagtagttgttctatagccctttgggagaaaaggagcagaaagggtcgtacaggatgactttcttgcggcatgctcaggtggaaaggggggaaaaagaccttcaggcgaaaagagataattcagtcgccttgtcatatttaccaggcggtgagacctgttgtggatcctggagtatgacctatttaatttgttgatgttgttgttatagttcctctaccgtacttgaccccgtttgcatcttgttttgaccgtcccatgggcattggagaatctgaccatgggttttgtcccaagcttgcatcacactggggggacctctgctttgcggcggccccgtctcagaaaaaaaaaattgcgctggtaactgccgggtactgtgtatttcagctttgaaacttttatccaatgcttttgagtcgaagagtcagtggactcgatgatgtggttgtaaagaaaaaaaaatgcttttgtgtggaagagtcagtggagtcgatgacgtggttgtaaaaaaaaggtgtgcttcagaacaagagtacatcacgttgcctctcaaaaaaaaaaaaaaaaaaaaaaagcggcctgctttctctgtagcgtgttcgtctcaattgcatgttccggttggctgggatgccccgtccacggatcaggtttataatataataatttaatacaaaaataatactttagc

SEQ ID NO: 138172 - DNA, 820 bp, Zea mays
  Clone ID: MRT4577_5748C.1
tgggttggtgacaatcacccagtagccatataaccaagctatatcaattatagtagtcattagattactagataggaatatcatgtcctgaagaacaaatcaacttgtcatgtttctatttttatgggtagtcttcttgaactgaagccttgtgggctaattactgtatcgacatggtccattcattatgaccaagcacataaacatccccataattcatctgaaggggatccgatctatggactgtttcccactcacccacatatcatcatgtattagtattagtattaccgatcagcagtggacttcggttttcaaaagttcaaacgcctaaagaacacaaaagactaaaataaaatcctgagcagtttaataggatactataaaatttcaagtaggtaattttagtagtatggcaaacagaatataatttagggaaaagctattattcataagtttctatttgttttcagtttactttgtggaagcattttatctgttaccatttccagtgcagatcaaattatgaactggaaatttggacggtggcagaccattttgcttttttcccctccataaacttaaggctctcctgcatcacaaggaggccacttattactgttttaaattaaacaagaaaaatatctaactagttagagcatctccattagttccataaaaaaccctctaaactcatatttagcaagttggtaaatacaatttggaaacaaaaacaaccttagcctcaaactattcctaattcttagattgttaaacatttttaaatcgatcccgcgtactctgcgttgttaccactgct

SEQ ID NO: 138173 - DNA, 1317 bp, Zea mays
  Clone ID: MRT4577_57490C.1
ttggtaccctcggggccggccgggaaaacccccgtcctcctcgccgctccgccgcgcggttgagcgccgacgagcgagcccaccgctgcctcgtccgccctatggatatggatgtccgccgcagggttccaccgccgcacgggagcgtccctaggcgccagcaggcgaccggggccgagggggagcgggtgcgtgtgcaggcgggtgatgcgctaccgctgccgatccggcacacgaacctcatcttctcggcgctgttcgccgcgtcgctggtgtacctgatgcgtcggtggcgggggaagatccgcgcctccacgccgctccacgtggtctcccccgccgagatcttcgccatctgcggcctcgtcgcgtcgctcatctacctcctcagcttcttcgggatcgccttcgtgcagtccgtcgtctccagcagcgacgacgacgaggacttcatcgtcgactcccgccacgcgcgggcgcgggcgccgccgacgcctgcgcagaccccgtgtgcgctgctggggagccccgccgccgcgacggagaaaatgccggaggaggacgaggagatcgtggccgcggttgtggcagggaagatcccgtcctacgtgctggagtctaggctgggagattgccgccgggccgccgggatcaggagggaggcgctgcgccggatcaccggacgggatatggacgggctcccgctcgacgggttcgactacgcgttcatcctgggccatgctgcgagcttcgggtacgtgcagggggtggaaagactcccatctctgttactatgccatctatcgaggttggcacagttggtggaggcacgcagctggcctcacaatctgcctgcttggacctgcttggcgtcaaaggtgccaacagggaatctccggggtccaacgcgaggctcttggccacggtggttgcgggtgcggtcctagctggggagctgttccttatctctgcgcaggccgctggccatctggtcaagagccacatgaaatacaacagatccagcaaggatatgtccaagacccttgcagaggaaacagacaaagccaagaaatgctgaataatatgaagtagttgttctatagccctttgggagaaaaggagcagaaagggtcgtacaggatgattttcttgcggcatgctcaggtggaaaggggggaaaaagaccttcaggcgaaaagagataattcagtcgccttgtcatatttaccaggcggtgagacctgttgtggatcctggagtatgacctatttaatttgttgatgttgttgttagaaaaaaaaaaaaaaaaaagcggcc

SEQ ID NO: 138174 - DNA, 287 bp, Zea mays
  Clone ID: MRT4577_57491C.1
acctagccagaacatactcatactattcatttcacattatcttgtacatggcgatcatgtactctgtaatgctactgactccatgcacaacttctgattctgataacgcaaagcctcaatcatgattcatcaacatgagcacatcacaagaatctaacatagcatcaaacagaccaaactcttatatggatctaagctacaccaaccctttgtagcgacacctaatccttagtatcaccaagcgtacaccgactgatcaaacgtacataatatcctacgcattataa

SEQ ID NO: 138175 - DNA, 463 bp, Zea mays
  Clone ID: MRT4577_57492C.1
cccacgcgtccgaaaaaaaaaaaaaaaaaaaaaaaaaaaaaaaaaaaaaaaaaaaaaaaaaaaaaaagggaagaaaaatataaaggataaaaaataaaaaaaagagggggggggagttttaaagtatccaattttggggcctgggttctttgaagtgcatatttttttttaagggggacataaattaattcttgtggttgcggttttaaaacgtcttgatggggaaaccctttttttaacctagtttattggaaaagaggcccatcccctttttttttgttggcttaaaagcaaaaaggttggcaaaggtggcctttcctaaaaggggcccttcctaaatgggtattgggacggttccctgcaacgggaacttaagagtggccggtgtgttagtgccccttaatttgacttttttatttgcctttcccctaaggcccgcttttttttttttttaccttttatt

SEQ ID NO: 138176 - DNA, 693 bp, Zea mays
  Clone ID: MRT4577_57493C.1
cagaactaaatccaactctcagtaatcatgaggtgtctattgtattccttgaaaatgcaccaagacccctttcttaatgccatgcaacaccattatattgtaagtgttggctgaactgcatttgttgtaataaacagagcaactatacataatctagtttggttttggattactaatttttattcaggaactatgcaaaaaaaaaacatattaccttataacaaacttcgcaactacgattttacagaatttgtaaagatccatccatacagcagataatcaaagaattcctgatcagttcatatagcttgagttgaacttcttgctctcatgtcaacccaatccatttcttgaaacgtattgctgcttctcttctttttagttgtgcttctgtttgcaccttgggagccttacctttgtacaatgttctgtggtacttaagccacaaggacttgtatttatatttgtctataaacatctctcttttctccatcatctctataacttccatggctcgaaggaagaaaccacctctcacaaaacaatacaacagagagtctaagagctcctgatcaaatttcatagaacttagactagccagaagtttcatttcaccccacaaatctgtcacttccacatatttgccaccaatggcagcataagcagttattaaagatgaaaaggttgtgcatt

SEQ ID NO: 138177 - DNA, 800 bp, Zea mays
  Clone ID: MRT4577_57494C.1
cctcgaggccggccgggatcagcattcgcagacatggcatcgccagcgcaaggttccggagagagagattgaccacggacaccttggtccgcctagcttgctccactcgaagccgatcaccagcaccaggtcgcacagccatgccgttgtcgccgtctgcgccaacgactagcccgctcccgcggcagcagctgcggtacgtaccgtcccagctaatcgccgccctcaaccgcccatctccattcatcgccatgccaagtgcgccgcggggagtggatgcggtggcgtcccagcggctccgggccgcgagcagaggcgctgcttccccgaaaaggcgccccggcgcgacgagacaaggcagcggcggacaagctcattccgttccggcgacgagacaaggctgcttgatggtgatcttcagcgtctctcacccatctagtgttcttttagcactaactttccaggagagaattttcttatttacatcgaggaccctagggtcgttgatgaggacaccctttcctttacctttatcggccacttttggctgaatgaagactttattaccattgagatccatggtgttaacggggaagggtgtttatccacctgtattccctaaaattaaccggccctaattaatagccgattgtatcttctgacaaaatgcattgcagtcattagtggcatgagaaaaagattatgacatttacaataagcttccctttttaattcattaaaaggtggaatgttatgagtcatttaaatgttggcgaatttttgcaaaaaaaaaaacaaaa

SEQ ID NO: 138178 - DNA, 245 bp, Zea mays
  Clone ID: MRT4577_57495C.1
ccgacgcgtggcatacaccgtgaactctatctacatcaaagcgcaaacaaacgccatcgagactatgagggtgttgctcgccgcctcgctctcaggctctgctgcgagcgcacctcactcatacatacggggctgtagtgccaccactgcccccgccatctatcgcgatggtgcattgcagatacgctcactgcaccttatggcatcaccaacagttgtacacatgaacacgcctgtacaactgt

SEQ ID NO: 138179 - DNA, 482 bp, Zea mays
  Clone ID: MRT4577_57496C.1
tccgaattccgggttaaatatttgtgtgtttgcacagcgaggtctattttcatattgattttctgtacctgggactttggagaggggaacacgttccaaaaccggagcgtttcatcaccagcaccagtaactatggtctgttggtatgacctcgctgaggttgttgccctcaccgagagcatcggcaagctgctcgtcgaggtgctcaaggagctcgggaagagggttccagactcccttgtgaagacccgcgtcgaggatgatggcttcactatcaactcgagaagagggttccagactcccttgtgaagacccacaactagagaaataggatggagagggtaatttactaagagaggacgtgtaataaataaggccataaattattagaatgaatggaaaatgtcctcttacaactttggaggtatgtcaggatcttcttctaaacaattatacttgttctgctgcattgacagctcgag

SEQ ID NO: 138180 - DNA, 327 bp, Zea mays
  Clone ID: MRT4577_57497C.1
gcgggagctgcaacgagtcgaagactcccaccagatcctgagtcaaaccagccatgacttaaatgagtgcacctggtccctgaatatcttggccatcaacaagccccagaacaagtgtgacgatctggaccggtttgtgatggtggcaaagacggtgcccgatgacgccaagcagctcaccacaaccatcaacaccaacgcagaggccctcttcagacccggccctggcagcttgcatctgaagaatgggccggagagcatcatgaactcaacggagtacccacacggtggctcccagggacagctgctgcatcctggtgaccacaa

SEQ ID NO: 138181 - DNA, 1748 bp, Zea mays
  Clone ID: MRT4577_57498C.1
gccggccggctggacgattggccgctggagacgacgcacgctcggccatggcgctcgctctcctatccccctccacgccatcccatcgtatactgcttcgtcctattccatttccatctctgccagtcgcgcgcgccactagtgccggtagcttcggcctcgcgttcttctgccccctctctcgcggttcctcctcgctgcagaggaccggcgcggcaggcggcgttattgatagtgccggagagggctcatcggaagaaccggtcgctggatggctcagcgcagacctgctcaggcggatatcaggcgcggcggacgcggaccgggtcctggacattgttgccgagtcagttgaaggcgcgggtgccgctctgggcgcgcccgagtgcaacgcgatcgtctccgccgcttttgaccgtggcaacatcgcgctcgctctctcggtcttcgaagccatgcggtccggtttcgcgggagttggaggctggaggtgggcaaggcctgatgtgaggacttatgcgttgcttgtacagcggttggcggccgccccgcgtgttgctgatgcaatcatgataattgattatgtgtctcgcgcaggtgcttcttctatggatgaggttcctttcggaatcattgttcgctgtccaacctgcatgatagcagttgctgttgtgcagcctcaggatggaactcaggttgtttcctgttcaaagtgtcgatatcaatatgaattattttctggagacattacgagtattgaatccgaagaagttagcatggatatttcagccctggagaaagccttgagatttattaatatgaggaaagatggtattccagctgctgtccactctattgtgatccgctcaccttcaggaacagcacgtacttacagatttgctacccagaatgtaactcttcctgctcaagaaggagaaagggttaccatttccttggcggccccagttaacgtttaccgtgacatgggacccctcaaggttgctgcgcgctcacaaggatttaaacctggagaacctatgtgtctcactaatcacatcaatgggcaagtctcgaagttgctaagagctccatcaaagaacaagggaacatttttccttagcccatatttattggtcggtgctcttgccttccttgcatctacagatgctgcttccgcattcattgacccaagtcttcctagacttgttacagcaactgccattgcatcagctgccataggaacaacactaaatggagtggtcctgccaaaaattcaaaagcttccagaaaaagcagtggatatagttgctgtacagcaaaagcttttgtctcagtatgatattcttcagagtcgtcttaaggaactgaaacagtttgctcaaaaagaggtgtggatgcttgcccggatgtgtcagttggataacaagatagtagcagttggtgaaccatcttatcggtaatgcgcagggagttgcagtaaaacttgtaacataccatattatttgtaataatccacacacttttggttattagaaggtttacttttttattacccgctcgttctaagttctaaattataagacgttttgaattatctagatatattcattctactatactactagacataatttagatatatctatgtacatagtgaaatctatgtatttatagaaagccaaaatgtcttgtaatttagaatggaaggagtactaatacagtattttctggcaaaaaacaagagaaca

SEQ ID NO: 138182 - DNA, 440 bp, Zea mays
  Clone ID: MRT4577_57499C.1
ggggccccaaaatgaaacctatgtaaaaacgaaacaaagacaaaagaccggaactagggaagcgggacagggggggggggagaaataaaaacaaaaggcaacccgggcaaaaccagaacggacccgggtccagggcaccgaccaaaaaaaaaaaaaacaaaaaaaaaaaggaaaaaagggaggcaccaaagggcaaaggagaaaacccaggaaggggaggcaaaaaaactggctctacaggggccggaacaaggggcgggggacccccgggaaaacccgggaaagcccgaccggaacccgcaggcggcccaacacaccctagagggagaccgaaaaaaacccgggggaaagagggaaaaagggggggacggggggaaaggggaacccccccaaaaaacccaacccctacgaaccgggaacaaaaacgggaaagcccgggg

SEQ ID NO: 138183 - DNA, 304 bp, Zea mays
  unsure (1)..(304): unsure at all n locations
  Clone ID: MRT4577_5749C.1
ggtccaaanaacatgcaacactatagaactggtgaataagagttgaacagttacatcattacacaccaaactaaaaaaatatatggagccggaggaagacatttaaaagggctcaactgagatagtgccctcagattgcatgatgcactgcggggctcctacacagtatgcgggtgacattgatggaacggcctccaaccttgctctcaatgttgctggacagacaggccaggccttgatacaaaccctggcctgtcgtggcacaacagctctggatgtacccgcgacactcgcgcacgccgcg

SEQ ID NO: 138184 - DNA, 363 bp, Zea mays
  Clone ID: MRT4577_574C.1
ctaactgctgcacctgtgctagcacatcggtgctggacagctgggccgtcctcagatctaggacacatgtgtctcgcagatcgacgacggaatcgcagtcgtctgtggcattaaagaactaactgaagacgtcttgtctaactagacctggaggcctctcttgggcgtcaaggactaacacctgggccacgaaaatcagaacgacaaccggcgtacatcttgcatcctcatgcagagggtcgccatgagccaggggacggccgctcaatctaaacgatccagtctaactctacgtggtatgcgctcttcatagatatcatgtagcgagagccaacttcagatcgctgctactggctgtactac

SEQ ID NO: 138185 - DNA, 446 bp, Zea mays
  unsure (1)..(446): unsure at all n locations
  Clone ID: MRT4577_57500C.1
gcgttcgtcttcttgttagtctctcaaaacccggttaattaaatgaaggtaaggctcaagagctatctatgaagatactttacgaacgagttntggtattctttgttggttttttcttgttgtggtttctctatttgatgtgtggtttgtgtgttcttctctctgatttgatttcttattgtgtggggggggggggtgtgttgacttatgtggtttgtgtttacgttctgattcttggaatgtgattgattttctattttgcaaatggggcctttttgaattggcttcctcggtgaatctagagcatgtgctctacctaataggtcctaaattactctttcttcttcctcttctcctgtcccaaggttcgtgagttgggtttgactggtccgtgttcgacatcaatattctttgccttgtttataggcgtgatgcctggcttcttt

SEQ ID NO: 138186 - DNA, 634 bp, Zea mays
  unsure (1)..(634): unsure at all n locations
  Clone ID: MRT4577_57501C.1
ccacgcgtccggtaagacataataagaaattaacaatagatacaaaactgtatgaaacgtataatgtggaagggagatgagctagcttgaggtggatgtacacccagaccacccatgttcaagtgttcgtcgaggcaaatttgtgtgctttcttcttattaatgataataaaatgccactttccacctagttcctcctaggttggtctagtttttttgatgtggatgcgtgcattatgtcctcatagcctttagctagtttatattgctccattggaccgttcttcttcttcatctgtcaaaacttaatcatggagcctttttagcagtagattgtttctattgttttttcttgaccactgggagagaattcctctaggcattttcaattataagatagaggagtaccctggaaccacattccttgagaagtacccgcaaattggtgagccctaggttcgggcctgggtggctatcctcttagctggtggcactaaccatccaagctactgctcggttcacattggtaccggtaccaatttgtcatacatgacttcacatttattcacctaattgtattcaagtctaattntatgatggttgcttttcaatgtgtaatgtgatttgaggcatgc

SEQ ID NO: 138187 - DNA, 1585 bp, Zea mays
  unsure (1)..(1585): unsure at all n locations
  Clone ID: MRT4577_57502C.1
gacattccgattcggcgatttgattccctatccctgcgctgcccacctcccctttcccgcctggtcctcccattcacttgcccccttttttccctctcccgacctcccaattcccgaaatcacccccgacactccccacccaagaacccctcgtccccacctcgccatgggcagcgccgccgcctcgccgccgccgtccgggaagctgacgcaggaagagctgaagcgcgtggcggcgcaccgcgcggtggagttcgtggagcccggcatgacgctgggcctgggcacgggctccacggcggcgcacgcgctggaccgcctgggcgacctcctccgcgcgggcgcgctgccgggggtggccggcgtgcccacctccctcaagacggaggcccacgcggcgcgcgccgggatcccgctgctcccgctcccgggcgccaggatcgccctctccatcgacggcgccgacgaggtcgacccggacctcaacctcgtcaagggccgcggcggctcgctgctccgcgagaagatgatcgagggcgccggcgcccgcttcgtcgtcatcgtcgacgagtccaagctcgtgccgcgcctcggctgcacgggcgccatccccgtcgaggtcatccccttcggcgcgctccacacgctgggcctcatccgcggcctcttcgacggattgcctggattccacgccaggctgaggactgtccccgccgctcccgccaaggggggagaagactcggactcggagtcggagcagcccttcgtcaccgacaacggcaactacatcgtcgagatgttcttcgaggacggcatccgcggcgacctgcgcgacatcagtgaccgcctgctccggatcaccggcgtcgtagagcacggcatgttcctgggcatggccaccaccgtcatcgtcgccaacaaggacggcacggtgtcagtcatggacaggaagaagtagcagtagtaatctacaagcagtagcctgttcttcgaaacagcgatcgcctgatcaccggcatgttccttgacgtggccaccaccaccatcgtcgctgccaacagcgacgacaagaagtactaataattttgcaagtagcctgtgtctgtgcaacacccagctactcttatctaagttggagttgtatcgtgtccgtgcgttatcctcatatgctgagtgtctgcaggagtatgttaatcatcatcctggtgttattatcgtaccttgctaccagtgactctcatgctatttattaaacaagctaattttgcaaaaaaaaaaaaaaaaaaaaaaaaaaaaaaaaaaaaaaaaaaaaaaaaaaaaaaaaaaaaaaaaaaaaaaaaaaaaaaaaaaaaaaggggccacattataaataaaaaaaaaataaaaaaaaaataaataaaaaataaaagggggctccatttttaaaaaaaaaagttattaaagcccgtgtggacgaaaaaaaactttttttatagacaacttaattntaattaaattagccgcctttaaaaacattacgattaaaaaaaaagcgggtttaacaaaaaaaaatttactaaaaaaaatccccattattggaaattgg

SEQ ID NO: 138188 - DNA, 421 bp, Zea mays
  Clone ID: MRT4577_57503C.1
aaaaaaaccctttttaatcattgggaacccccccgccttgcaaaaaacggttaataccctttttaaaggtgggccccagtttaattgccccgggaggttgccccttctttttgggttaaacgaaaacttccttttttgggcgggcccttaaaaaccttgggaaaccttttggaccctgacctgcaaaaggggggttttttgccccccccgtttggtttattgggggggggggggggaaaaaaggccagggccatttttttctttttccccccccgttgttgttgaacggccccccggttcccccccttggggagttccccccgggggtggttttccccaagattaagttcccggtggggttgttcccggaaaaacctaaaaaaccggtggccttttgcccgggccctgggcgggccggtgg

SEQ ID NO: 138189 - DNA, 1068 bp, Zea mays
  Clone ID: MRT4577_57504C.1
tcatcgagggcggccgggacttgtgcctaactgcggctgctgtagatacgcgcgccgccactccaaggtccaagcctcccttgctcccgccaccgcccctcaccatgggcagcgccgccgcctctccgcagccgtctgggaatctgacgcaggacgagctcaagcgcgtggcggcgcaccgcgcggtggagttcgtggagtccggcatgacgctgggcctgggcacgggttccacggccgcgcacgcgctggaccgcctgggcgacctcctccgcgcgggcgcgctgcccggggtcgccggcgttcccacctccctcaagacggaggcccacgccgcccgcgtcgggatcccgctgcttccgctcgacgccgcctcgggcgccagcatccgcctctccatcgacggcgccgacgaggtcgacccggacctcaacctcgtcaagggccgcggcgggtcgctgctccgggagaagatgatcgagggcgccggcgatcggttcgtcgtcatcgtcgacgagtccaagctcgtgccgaggctcggctgcacgggcgccgtccccgtcgaggtcatccccttcggcgcgccccacacgctcggcctcatccgcaggttcttcgatggagtgcctggggcttccacgccaggctgaggacgtcccccgccccagggggagcaaggctccgacgcgagccgttcctcaccgacaacggcaactacatcgtcgagatgttcttcgacggcggcatccgcggcgacctgcgcgacatcagcgaccgcctgctccgcatcaccggcgtcgtcgagcacggcatgttcctgggcatggccaccgtcgccattgtcgccaagaaggacggcacggtcgcagtcatggaaaggaagtagttagaatacaattcttcgaagaagccatcgcctgctctccatcaacggcgtgttcctctatgtggccatcaccaccaccgtcgccaacggcgacgacaataagtaataattctgcatgtagcctgtgtctgtgcaacatccagcccatcttatctaaagttggagctgttatcgaaacaaaa

SEQ ID NO: 138190 - DNA, 354 bp, Zea mays
  Clone ID: MRT4577_57505C.1
accacgcatccgcatcgagcgacagcagcacatacgcagctagctacgcgcagcaccactgcagcggcgatggcggcctccatgatctcctcgtcagctctggcagtggagcgtcagggcctgccgcctctcggtcgccgcgcctcctccttctccgtcgtctgctccaagaacaacattacgacggacaacccctacgggattgtgggtggcctgaccgtccacgtcgacgccaacgggagaacgggcatcggcaacgtcgtgtatcagttcggcgagcaagtaagcgcgatcgtcgacggatagacgtcaatctacagcgaggatgactggtctcccacctgcgacgtctac

SEQ ID NO: 138191 - DNA, 603 bp, Zea mays
  Clone ID: MRT4577_57506C.1
ggccaaggttttttttccgggtttttttggtacaaaaaaaaagggggctttttttggattttggccccccctggccccgttggaagttacaggaaaagggtggggggccttttgaaaaacaaacatacaattggtggttgttaattttaagggggggctgaccgcccttaagggaaaaacctttcaaaaaaaaaaacctttaactggtaagaaactgggaaccttaaaaaacccaaaaatggaactgaaagggtcattaaactttggggtgggttccaacccttatttttgccttgtaaaatgaaacctggatggggccctgcccttgggacctttttactcccggggggactttgggccccacatggggacctttaaagggttggtattaaaacccccccccccgttttaaaatttggttaaaaaggttgggaaaaaagggcccgccctccttttttttacctgggggggggaaacctcaacatttttttggtggggcccccctgggggaaagtttgaatttaagacccttccaacttccggaattaggattccaaggttgtttctcccacttaacgggtcggggagccaaacattacccaa

SEQ ID NO: 138192 - DNA, 364 bp, Zea mays
  Clone ID: MRT4577_57507C.1
cgtaagctcggaattcggctcgagatctcttctattcatttccacttgctacatattaagccatggggggttttataacatatcgggggggatgacgaccatctcaaatgaaccttatccagggactctcatctcactctgcccctagcctgtttaccattataatttacgggatcttcaattacagcgaacacgtgaccactatgatagactaagaggggctctcatgccatctccatccatgcactatattaacactgcgcgacacacccttagtgaattgactcatctagattgtagacatatagacatagcccaacactataactccgcagcatttcactcacctgacacatttcaaccc

SEQ ID NO: 138193 - DNA, 244 bp, Zea mays
  Clone ID: MRT4577_57508C.1
gacactgataaagtagagtggactcattggcccattgcacatgcaggccatccatccagtggaccatcatccactttccaatatattggtccaagttttggtgtagttaatggagtaatggcctttaatatgtttctatgtgtcgatactctttcagtaaattggctagatttttttaggcgactaaactgtgtggtcactgctcagcacataggttctccttttttattcaaggtcactttag

SEQ ID NO: 138194 - DNA, 370 bp, Zea mays
  Clone ID: MRT4577_57509C.1
acgatcaacgtgaagaatgtcgctgcgacggatctgaagcgtgggtatgtggcctccaactcggagggtgaccctgccaaggaggctgctagcttcacctcccaggtcatcatcatgaaccaccctggacagattggcaatggctatgccccagttctggactggcacacatgacacattgctgtcaagtttgctcatctcgctaccaagattgataggatagccaactgggagctgcataaggagcccaaattactcaagagcggtgatgctgatctcgcgaagatggctcccactaagcccatggcggaggagaccttatttcaggatcctcctcttggtcaattggctgttcgtgacatgatgcaaa

SEQ ID NO: 138195 - DNA, 460 bp, Zea mays
  Clone ID: MRT4577_5750C.1
atcaaacagcattatttcttaagaattttacaagtggcaaggttactttctttacacactgcttgcgcatagccacatttcgtgagagccctgcaaagtccagaaaaatctgcgagactgtctctaaaaacactatagctattctcgttaaaagaggcactttgcctacaagagggtttagaaaaaaaaatagatcagactgtcgagtagaaatacagcgaacagctggggggaattttattatacagtacataagctgttgctgggaggggccaaggttggggaagctgccatcatacatggcctggctcacgccggcacaaatcccgatggattgcttgataagctcgtgtgcgaaaacctgcataaccggctggttagtcaccttcttggaaaggtgacgttgctgcttgtactcgaagagatcgggcgacgacacgctgggagcatgcggaggggg

SEQ ID NO: 138196 - DNA, 156 bp, Zea mays
  Clone ID: MRT4577_57510C.1
gaagactgcaggagtgaatccttgcatagatgcatgtgtctcgcttgttagagacccaccacctctgcatgttgaccaaactctcaactctcgcagcctaattagtacttagcagcagtaggcgaaatccatcgtcgctaccgactaccgacacca

SEQ ID NO: 138197 - DNA, 127 bp, Zea mays
  Clone ID: MRT4577_57511C.1
gtagagcaaaagagaggcaggattggggtcacagccgcttcttcagcatggaccaagtgggccttcgggattgcagggttctcgaagtggctgtaggactcgaatttacagaaagccccacaggtgc

SEQ ID NO: 138198 - DNA, 158 bp, Zea mays
  Clone ID: MRT4577_57512C.1
tcgctaaagggcgtcggcgcttatgcctgcggtttgcgtgatcccgacggccgacatggcttcgtggtcggcagtaccggctgtgggcgtaacactcattctggtagccatgctgggcgccgtgctaccagggctactattatggcctgaggaactac

SEQ ID NO: 138199 - DNA, 251 bp, Zea mays
  Clone ID: MRT4577_57513C.1
ggagcaaaaagggggttttgccttttttccagaaaaataatgttttttccagccctactaagttgtaacaaatggggcagataccatgtgcactttaatttttcacacaatagggccttttccctaccttggaaaaaaaattatatttccccccctggtggggggatcgttatctttttttttagattttttaacttcggggcgttttaataccatttttgggtgttgcctaaaaatttgtccccgttccc

SEQ ID NO: 138200 - DNA, 438 bp, Zea mays
  Clone ID: MRT4577_57514C.1
cgcgtttcgttctattgatacccgtgtcggagcgttgggaagtgattattaatctgttatctgcgctatgcggctgacttgggggtgatggcgcgcgagcagccggccgtgtggatcacgccggcgatgttcggcgcgccggtcaccgagcaggaggccgaggatctgagcaagagccaaaggaaattttgctctggctcaaagttgaaagagataggtgggagtgggataattgctgagaagagtgccaacggggacgcagaggctttaactcctgctaacaagacttccttgaggatgtaccatcaaactgagactggaacaagccagattgcattcagcgctgatggaagtgtttcaccaacgaagccatagtcgatacctgcggaggctaagcagcgagagcttagtggcaccctgtaagatgctggtgataaa

SEQ ID NO: 138201 - DNA, 587 bp, Zea mays
  unsure (1)..(587): unsure at all n locations
  Clone ID: MRT4577_57515C.1
tttaaatattaatagagctcctgcagagatctggggggggggggggggggggcctggtagtgatccatcaggggccaaccacagcttccgtaatcttttcctgctacaaagatcgacacggcgacgcaccgcaccggcacttagaatgtaatagccgctactctaaagttgctggcatttgaatcacccgcacccctataccactaccgtcagcttccctccatacccctccccacatcacctaaaccacaccgaaacactagccgagataagggagctggaaaggaactactagccaagatatagtactttacataacaggttagacaggtgcagaacttcgacgtggtggagagttttaactaaaccatacttaaagacgtcgtggagaactacgataaagagtaggttaactctatggacaacaattgtgtaactttttccaacttttgtaaggttgtcttgctagacttcgttgttaacaatttgttccttctgttccgggttaagagaaagactagggactagttcgaagttntagtctagactaacctctacaactcgaccttcgtcgcttgtattatctt

SEQ ID NO: 138202 - DNA, 207 bp, Zea mays
  Clone ID: MRT4577_57516C.1
agctaacagtacacattcaatttattatgcgccggcaaaacatgcatgtggagaaaaggttggacaggactacacatcccaactagacactagtatatactaggaggggcgggaaaaagatcacccactccataacatagggcaactaaaacgggggaggcgttaacctcaaacaggggcagaacaagaacaacaatacagaaacac

SEQ ID NO: 138203 - DNA, 697 bp, Zea mays
  Clone ID: MRT4577_57517C.1
cacccaaacacaaccgaagcttcctcctccgtcctctccctcccgcagctagcgcccgtcgcacgcatcgcacggcacacacatggcggcgtccgcgagccgaccccgcgccggcgctggcggcgaggagccggcggcggcgtacgaggacctgctgccggtgatgggggagaggctgggcacggcgggcctgctagcggagctgcgcgcggggttccggctgctggcggacccggcgcggggcgccatcacgccggacagcctgcggcgcggggccgcggcggcgctgggcgtggccgggatgtcgcacgccgaggcggacgccatggtgcgggagggcgacgccgacggcgacggcgcgctcagcgaggccgagttctgcgtcctcatggtgcggcttagccctgggatcatggccgacgccgaggcctggctcgccgacgccatcgccgacgagctgcagatggtggatgatgacatggacatggatgctgatgctgatgcggatgacgacggtcatggtgccgccggtggccaagaccacgccgccgccggccctgctggtggtgctcctgctaccgccgcccgccggtcgtcggtttgatcgatgcattggtcggtccacgcacgtgtattagtctgtgccgtgattacactcagtgaccttttcgtgcttaattaccttgtttttgtaatt

SEQ ID NO: 138204 - DNA, 382 bp, Zea mays
  Clone ID: MRT4577_57518C.1
gctaaaattcggttatttaaacccacgtaaattcacatttttcaggacatgtttcgttccaaaaaaaaggggggctaaaatttcagaaaaaggttttggcccacacacttattaagggcctgattggatcttgatacaaaaacgccggggaccgaccaaaaaagttcctacgtccatgcaaatatgggtggccaaaataagggcctggccggcacacagtatactaagacggggctggaaaaacagatggaacagcaaccgggacggatcagttgggggcgggctttttggcgcccttcttttgggggggctcggggaaagcgaatccggcggagcccacgggggggaggggggccacctcctccttgacccggtgcccggg

SEQ ID NO: 138205 - DNA, 199 bp, Zea mays
  Clone ID: MRT4577_57519C.1
ggcttagacccggcagcacctgcggatggccgagcgcatcaggagccacaggacatactactcttgatctcactcatgctggcagtggagcgcgcacaggacacccccaagctcttcaactggtggagctaagctgatgatcccgcgagagatatcttgctgaacgactacatgcttgctaacgcaacgaatcacacaa

SEQ ID NO: 138206 - DNA, 593 bp, Zea mays
  unsure (1)..(593): unsure at all n locations
  Clone ID: MRT4577_5751C.1
ggccgcttttttttttttttttttaatagaagagctagttgtaacattaagctgtctgccattacacatcatatacgtttgcttacagaagtgcaccctagacacacgaggagagcagcagtaaactaacagctgcattcttgttatattttttggtcatttcttacgtgcatgctatacaaaagaaacttctacagtagtacaactactcacgtttttttacttcgactttgacagagcagaccacgacgccgacggcagctgcagccaggagcagatgctgctagagaggcagcagccttccatgtgagtcactgagtccccatcaggccagggccggccagcgaacctagcgaggctggtggatcacgcgaggagcgctgctcttggggctgccggcgtacttggtcggcttctcggagtgcctgggtttctcccggaacccccgcgggggtcgccgctcttcggggagcccaagttcagcgccttgagcaccgaatctgtcttaagggcggcggcggcgggtgcctgctcgccgtagaagaggtcctcatcctcatcccacggtccgcccacgcgtcacgnccacgtcc

SEQ ID NO: 138207 - DNA, 216 bp, Zea mays
  Clone ID: MRT4577_57520C.1
cgtagaaagctgtgaaattaccacagagaatcaccaaaataccgtcgagtattgaactagcatgagctgtgtcctgttaacgacaactatgtcatttcggagtagataatcaagggcaggaagctgcaatcatttccaggcggtaggaacggagtgccagcatagacctgaaagttagtgtccgagaaatcaagagagatagaccgcagaatttga

SEQ ID NO: 138208 - DNA, 1497 bp, Zea mays
  Clone ID: MRT4577_57521C.1
cattgggtacctcgaggccggccgggaccgggaaactgttgctcccgctttggccggagagaatagaggagcgccggggagagctgcgagcagagacggggcgaaggatagggatcgcgagcgaattcccggcctctctgcccccgcgacagcgacgcgggcggggccgcgcggcacagcgctcgctacctatagagaccccggggggcagactggagagggacaggccgcgtgcgcacgccaccgcgcttcattggccacgccgttgccatcacgccgattaaactagccgatcgatcgcccagctcgcctgcctgtgatcgaccgggtcgctgcctccgatcctcttgctgcccagcaccctggctacttcagccagctagccaggttgagaccgactagctcgatctagctgctgaggcgtggccatggagggcgacgacgacggcccggagtggatgatggaggtgggcggcgcgggcgccacagggaagggaaaaggcggcgcgctggacaagaacaagaagcgcttcagcgaggagcagatcaagtctctcgagtccatgttcgccacgcagaccaagctggagccgcgccagaagctgcagctggcgcgggagctcggcctgcagccgcgccaggtcgccatctggttccagaacaagcgcgcgcgctggaagtccaagcagctggagcgcgagtactccgcgctccgcgacgactacgacgcgctcctctgcagctacgagtccctcaagaaggagaagcacacgctcctcaagcagctggagaagctagccgagatgctgcacgagccgcggggcaagtacagcggcaatgcggacgccgccggcgccggggacgacgtgcgctcgggcgtcggcggcatgaaggacgagtttgcagacgccggggccgcgccctactcgtccgagggcggtggcaagttcgcgcacttcacggacgacgacgtgggagccctcttccggccgtcgtctccgcagccgagcgccgctggcttcacctcgtcggggccgccggagcaccagccgttccagttccactccggctgctggccatcgtcgacggagcagacctgcagcagctcgcagtggtgggagttcgagtccctcagtgagtgagtgtctgagtgatcgatcgccagaccatgcgacggcgggtcactcggttccaacttccaagcacacacacacacacacgtaagcacgaatacgagttggtagcggtcatcagccccgagcgcacggtgtacatagctttcagtagatcgaattccaggcatgtccatcaacaagcagtttcttctcgtcatcgatcatcatgcatgcaaaagaaaattttctctcccccattgtcgtcgccgctaccagatcatgtaatccaggaacatgtagagaaagatcaaacgagcttatagagaagggaggtcacatgttcgatcgatcaaaaagaaaaaaaaaaaaaaaaaaagcggcc

SEQ ID NO: 138209 - DNA, 418 bp, Zea mays
  Clone ID: MRT4577_57522C.1
aaaaaaaaaatggcccccatttggggtgggggatttttcgaccgtatcaaaggccccctgacataaaaaaaaaagggccttgtttattgcaagttgagtttataaaaaaaaacccccttttcacaaggggaaactggggcaaacaaaaggggctggtaaaagggggcacccctttttttttttgttccatatcaaaacccaatcccattcgaaaaagtaaaagcgggggaaaaccctggggcccaggacaaagaagacctaacccttcttttttagccgaaaaacccccctttgggggggcagcgacgggaaccccccctttttcgggggggggacccccccccacccctttccgaatttaaaccaccccccaagctttctctctttttgggaggggggaggggtctttaacgaccct

SEQ ID NO: 138210 - DNA, 714 bp, Zea mays
  Clone ID: MRT4577_57523C.1
gaaggatgcgcgcagctatgacgcgcatggccctgctcccgccctccccctcgtccgcctgaaccacgtctcgttccagtgcgagtccgtggaagcatcggtcggcttctaccagcgcgtgcttggcttcgagctcgtcaaacgcccggcgtccctcgacttcggaggagcatggatgcacaggtacggcatggggatatatctactgcagcgcggctcggattcgtcgcccaacgctccggcagctgcaagaccgccggcgatcaaccccaagggcaaccacatttcctttcagtgcacggacatggggctcatgaagacgaggctgggtgacatggagctggagttcgtggcggcgcgggtgtgagacggcgagacggtggtggagcagctcttcttccgcgacccagacggcaatgtggtcgaggtctgcgactgcgagaagctccccgtgatacccctcgcagatgcaggcagcaccggccttcttccaaatacgctgctgctgccggtggaaacgaacttgcatggctagttcgtggtgcttgctcattggttgcttagcacgattatttgattcgtgtgattagatttgtgagctgtaacaatactgtaataacaggcagttctgcacgctattgtacatatgttgcaagtgtccgtacgtagtgtaatgtgtatgtacaggttcggagattgccgggttaggcgtct

SEQ ID NO: 138211 - DNA, 491 bp, Zea mays
  Clone ID: MRT4577_57524C.1
cacgcctgcatgtaccgggccgctaatacacggccaagcggtagttgcgtatagaggacgcataacaaaacagcatgaatatggacacttgctctcgtcatgggcctggctactagatagatgccgagcgcctgtgcaatgcaaatgaccctgcccctgcacggagctagagggcttgaacagatctggcaccggcctgacgacgatgatgggcgccaatggcactgtacccctcacacaggagtacctgacgcaagctgagcacatgccgctggcagaggccacctactaccccggtggtgggcagcaccatcaccatgcatgcagccggtcaccctacagtgctagcagcagcagatgatgatgaatgacatgcagctcgtacagcatgatgttcacatgatgatgcagcttaagcgtgccgatgatctcaacatgatgctgtacgaaccagatctgcatcatcatcatcagcagctggtggcactcca

SEQ ID NO: 138212 - DNA, 224 bp, Zea mays
  Clone ID: MRT4577_57525C.1
cgctaactaggggcgctgctctggtggccgtgtgtgagaggcgcaggagtgggggtgtgaacttcatgaattgtgcagtggctgttcaaaagtaccttagccacttaaccttgtggagaagactaggttacacttaatgggccaagcaatagggtgtagcgtttttatagaactgataatcaggcttatggcataagagaaatggagttatcaaatttacagat

SEQ ID NO: 138213 - DNA, 300 bp, Zea mays
  Clone ID: MRT4577_57526C.1
aggaaatagctaattatcaagcttaatagacgtatatgcggcgtcactgcgtgggtatcgagtcacgcagtcagttgcctgccatggaatgcatctgagcctgacatgatgatgatggttgtatagtggccgtcgtgctctgtactcctctccctgcacccaggaccatgtggtgcttctgccgatcagtgaggactgtgagtgcaacaccgtaccaggctactcatgtgccctggtgtgttgagtcaccatccatgctataataatcttatctatatcccacctgtttgcaatcaaccg

SEQ ID NO: 138214 - DNA, 520 bp, Zea mays
  Clone ID: MRT4577_57527C.1
agcttgggtgccaatgccacatggtaccattagcaacagctatggacatatatcttaggtactcacgagtacagggctacattacctcataagcgagagcctgcattcattcaatctttgatagtcaattttagccttgactgcattcagagctacagaatctattgtacagggtgttcattaccattacgtaacatggatccatcatttagctatatctaaacgactatgttattcccgaccaacacagtctgagactgaaaggatcattacacaagaacgaaacgacttgctgatggcaaatactgcaaatgctggtattggcggctttggttcatagcttaaaataccggccttcaacacaatcctgttcattagggcacaggaaccacaacgcgcaatgctacccattgagggtctatacgtacccacctgcagaataatccaaacagacactgccctgaagtatcctatgtacaggtgcaccacagaagtaagatcctgcgtcaatacccatttg

SEQ ID NO: 138215 - DNA, 454 bp, Zea mays
  Clone ID: MRT4577_57528C.1
gcttcctttgtgaatcgcttccaacttacggcacggggaaggaggcagggaacgaggcgaactacatcgttggcatgtcgacgtgctaccctaagccaggatccatcaaggtcagcgacggcgaggtgctgaccatcgtctccaactacagcagcgaccgccagcacaccggcgtcatgggcctggtctacatcctcgtggccgagccgcagcagccgactccggcgccatccctgtgcttcagtttcccagtcccatggtgcctaccggcatggatgtctagcaacatgtgaagagtagattatcatctacccctagctaatggagtgcaatgcaaatggtgaggagtggagaagctgaaacaatcaccgtggatcaatcgtcatagttatacgatggatgtgtttttgtcatactagtattactagctaatatacagaagcagtcaccagtc

SEQ ID NO: 138216 - DNA, 677 bp, Zea mays
  Clone ID: MRT4577_57529C.1
ttttttttttaaattctttttttttattggggtgcaaatagcatgttaatacagtatttgaagtcattatacaaaatctattgaaagaactgcatggacaagttgaatgaaacatcgacatcattcagtcatctcaagaaacaaacttgtttaaaaatgtcacattgtctacaaacccttaggccctgtttgttttttcacaggcttcaggaaatttggtagagttggtagagcaggtcattaggtgctacataaaattgtggagctgaagctacaaacctttagaagacatttagataaatcattttatttattatttagattaaaaatatttttaaaaaactatttaaattgttattataaactacagctgcaacctgcagccatcccagacaccgcttagtcatgaaaaacaaaacaatggcccatcaggtaataataacacactgttgatgtccctgaattaacgtgaaaactgcccatataaaacacagcagaacaattactctttaggttcgacaatccaattcattcatgcatgacaccacgattgtgcgctgctttgcactaacgtccacacgcgaacttaattcatcacaatcgcatcagatggacagagtaacaaataggaatctaccaatcctcacagaaacaaagaatcaaacccagcatgttga

SEQ ID NO: 138217 - DNA, 441 bp, Zea mays
  unsure (1)..(441): unsure at all n locations
  Clone ID: MRT4577_5752C.1
cattcttccttttataatcttcttaatcctcttttaatcacaaataaactccattaataatcttcagaatttatggccatgtctcccatgtgcacatttcttataccttttataccatcatagtaccatcctcatctctcatcatcacccattngataatactctaatctaaaaaactttatcccacctcttattatttatttccataatatgatcggggacaatcttctttgacaatatttcttaccattcaanataaacttattctcattttggacaatattctacataatcctaatacctacaacattgacattaccaatatctatctataatcctatgatctttatttttttttcttcattttagaaattgtatattaagctcaacttttatattatcttttcatattttctcaacatttatttttccatcatatcc

SEQ ID NO: 138218 - DNA, 268 bp, Zea mays
  Clone ID: MRT4577_57530C.1
agctcggaatcggctcgagctgcggaaaaaggatatttttacccctggggccaagctccaaaccgggaatctgccccatatgaaggcctcaaggacacggccgccgagcccaccagtgacccaccggggcatgcccaccaaggcgggcatcactccccgcaccatcaacgcctccaaaaggaaaaagtagggctccaccctcctccacgggagacccccccaccacccaaaagggccaattgtggccaccaaacagaaggtatagcca

SEQ ID NO: 138219 - DNA, 337 bp, Zea mays
  unsure (1)..(337): unsure at all n locations
  Clone ID: MRT4577_57531C.1
acgcccacgcgtacgcccacgcgtacgaacacgcgtnagaggacgcgtggacggacgcgtgggggtaaacataacaaagggctccaatatgactggtgctaatggtttcgtgaaatgacattgttcctgttgtgcattttggtagagctttcataatgtagggaagttgattctaaatagagagagttttggactttggacctatacttggaatctactttcagatcttgcatgtttgtggacattatgtaatgatttttccttttgaacagttgatgggaggctgaattttttggagttaaaaaaaatggtaaaaggcggaactaataatgatatt

SEQ ID NO: 138220 - DNA, 372 bp, Zea mays
  Clone ID: MRT4577_57532C.1
caagtcacttcccaacttggacatggcggtccaccccatcttgccgaaactgctcgttcgatcgcaagaacggctcctccctagttgtcggctctcggccgcatcaccatccccgtcgccgcgagcagtctcgttctccagtgaaggtgaaggtgaaggtgaagcagcagaatgggtcggtaggctggtgctttgcacataaacccaaagaagtttggtgctgttgcgaagccttgcatgccagaaatggtggcctggccttaaacaaacagaatgatgacaagtgcatcaggcagaaggatcttttggttgcatgcacccaaactcagaaggggaggccaaagaacgcagcgaagatcatcaattaccatc

SEQ ID NO: 138221 - DNA, 2266 bp, Zea mays
  Clone ID: MRT4577_57533C.1
aaggcgttgctagaacctggcaaagcgcttgccgctgctcccctcttccgtttccagcgccgccgccctccttcctgttcctgttctccagcactgccgttgaacctggactttggcggcagctacttcttctcgacgggcggcacgacagcaagccagcaaggagaacgcgacggcacgggcctgctgctacttctgtttcctctcccacgcttgctgccgcggagccgccagagacagacgctgccgccgtcggccgtcctccgccctccagtggtcgccagccgccaggacaggactacaggaggacgccaggacgactcaccgtcacgccagccgccctaccgccaccgcccaccgcgcgcaccgcgcagtcgcccagccgcccactcccagccgccaccgcccagcgcgcagttgcccagccgccgcctcgccgcgcgcagcgcgctgcaggaaatacgaaataggccgacaggcgcccaggcgcccgcagtgcctgtccggctgtccattgaaagttgtttcagaacacgcgggcatgccgcacccgccgagtgcctgagactccactccccgtctcgcctcctcctctcgatccagccaccaccgccttcacccatcgcctccgccatcgacacatgcctcacccaccgcctcggaagaagaagacgtggatctaaggaagaagacgcggatccaagggttgactgctgaggaagaagacgctactcctcgtcttcgatctgttgagcggttcaagcagagctgatggctacatcagagccagtacaagagagtttggtggtgcactactcacaacctagtaggccccgggtcctccttgctgcttcaggaagtgtagccgctataaaatttgagagcctttgccgtagcttctctgagtgggcggatgtccgagctgtggccaccacgtcatccttgcacttcgttgatagatcatctctaccaagtggcatcgttctttacactgatgacgatgaatggtctacctggaagaagataggagatgaagtcttacacatcgagctgcggaaatgggcagacgttatggtgattgctccattgtcagcaaataccctggctaagatcgccggtgggttatgcgacaacctcttgacctgcatcgtgagagcgtgggactacagcaaaccgctctttgttgccccagccatgaacacgttaatgtggaacaacccattcacggagcggcatcttcacacaatcaaccaactgggcatagccttgatccccccagttaccaaaaggctggcctgtggcgattacgggaatggcgcaatggccgaaacctcacagatccatacttccgtgaggctcgcatgcaagacgcaaccgcacgatgcgagcagttcactcgcaggtcctgtcagtaataaccggccatctagctgatgcagcggttggccacttgattgtcaagcttaggaatttgttttatctggagtgttgtaccagatttttttcaactagagtttgtgtgtattgaattagggggaaaggttgttgtcacatgataacaataacttccaatgatgactctattcagtttgtaattgtctgtgggagtacaattatgcagctgtattgtctgctacaatattgtttgtttgtgtgtgtgggagtggggggtgctgttgccacagagatagattcctccctgcccagtaatggtagtgattattcagtttgtagttgttagtggaagtgtccagcaaacttttctacccttcgatattcctggtacaaatgttgaaacgactgtcccgaccgctgtcggccgtcctccgccctccaggtacgccgccgccccctcctccatcctccggtcccccctcctccctcctccggtcctccccccacctacagccgctgccagtgcgcagtccaggagcaaccgcccagtgcgcagtgcgcctgctccagcgagctgccaatgcgcaaccgcccaggtcgcaggggcgggccccactaaattcaaagtggtcgccagccgccaggacaggactacaggaggacgccaggacgactcaccgtcacgacagccgccctaccgccaccgcccaccgtttgcatcgcgtctccccccccccccccaatgggagacgacaacgaccagagcgcaggggaccagacaaaaaaaaaacaacgcgcagcgcgctgcaggaaatacgaaacaggccgacaggagcccaggagacagcaagtgctgtccggctgtccattg

SEQ ID NO: 138222 - DNA, 1151 bp, Zea mays
  Clone ID: MRT4577_57534C.1
gccaaactaaactgccagacgcacagccgcggagccgccagagacagacgctgccgccgtcggccgtcctccgccctccagttgagcggttcaagcagagctgatggctacatcagagccagtacaagagagtttggtggtgcactactcacaacctagtaggccccgggtcctccttgctgcttcaggaagtgtagccgctataaaatttgagagcctttgccgtagcttctctgagtgggcggatgtccgagctgtggccaccacgtcatccttgcacttcgttgatagatcatctctaccaagtggcatcgttctttacactgatgacgatgaatggtctacctggaagaagataggagatgaagtcttacacattgagctgcggaaatgggcagacgttatggtgatcgctccattgtcagcaaataccctggctaagatcgccggtgggttatgcgacaacctcttgacctgcatcgtgagagcgtgggactacagcaaaccgctctttgttgccccagccatgaacacgttaatgtggaacaacccattcacggagcggcatcttcacacaatcaaccaactgggcatagccttgatccccccagttaccaaaaggctggcctgtggcgattacgggaacggcgcaatggccgaaacctcgcagatccatacttccgtgaggctcgcgtgcaagacgcaaccacacgatgcaggcagttcactcgcgggtcctgtcagtaataaccggccatctagctgatgcagcggttggccacttgattgtcaagcttaggaatttgttttatctggagtgttgtaacagattttttttccaactagtgtttgtgtgtattgaaattggggggaaaggctgtaacaataacttcctccctgctcagtaatgatgagtctattcagtttgtaattgtcggtgggagtacaattatgctacaatattgtttgtttgtgtgtgtgtgggagttggggagtgctgctgccacagagatagcttcctccctgcccagccagtaatgatagtgattattcagtttgtagttgtcagtggaagtgtccagcaaacttttctactaccctttgatattcctggtacaaatgttggaacgactgtcctaaccatttgagtg

SEQ ID NO: 138223 - DNA, 266 bp, Zea mays
  unsure (1)..(266): unsure at all n locations
  Clone ID: MRT4577_57535C.1
aatacaaaatccggacgaactcccaggaggtgaaaaggagatccgacttccccgaccggtgatgggtatcgagttgtatggggaggcatggggtagggagagctaatctgcggcccggagccgaggaaggccctccaggcgcacgaaggacagatttaaaaaacggaactgccagacctgatggccgacgccgacagatgagaggnaatgacggntgagtatgaggggatctttctggattagtcgagataggaggggagtgggga

SEQ ID NO: 138224 - DNA, 234 bp, Zea mays
  unsure (1)..(234): unsure at all n locations
  Clone ID: MRT4577_57536C.1
cgggccgacancccgggncgaccacgcgnccgacgaggagcccgagaacccaaggcggggggggggagcagaacacgccnacagnggccgcgcaagcaccaagagncgaanccagacaagcagcaaacccaaggcgcagccacgacancaacacccggaccaggaccaggaggccccaccgcaccgaacacaggccaaccgcagggcggggggagggccccgccaacacagcgc

SEQ ID NO: 138225 - DNA, 478 bp, Zea mays
  Clone ID: MRT4577_57537C.1
ggtgaccaccacgcggctttcaacgccggagaccgtcgtggagaaggctgcgctgccaccgaagagaatttatcaaaacaatggttatttgatggtctcatgtaatggtgggcttaaccaaatgcgagctgctatatgcgatatggttgccatcgcaagatctttgaatgtgactttaattgtgcctgagttggataagacatcgttttggaatgatccaagtgaatttgaagacatatttgacgttgaacattttataatctctctaagagatgaggttcgcatacttaaagaattgccaccaagagtaaaacggagagtggagttaggaaagttccactcagtgcctcctgttagttggtcggatatctcctattaccataagaagattctacctgcaattcggaaatataaggtactccatcttaatagaactgatgctaggcttgctaataatggtctgcctctggagatccag

SEQ ID NO: 138226 - DNA, 1200 bp, Zea mays
  unsure (1)..(1200): unsure at all n locations
  Clone ID: MRT4577_57538C.1
ttgggtacctcgaggccggccgggtgctctctcagaggtgggctggcttctcctccccctcttaccaagtcctcctccatcctccggtcccccctcctccctcctccggtcctccctccacctacagccgctgccagtgcgcagtccaggagcaaccgcccagtgcgcagtgcgcctgctccagcgagctgccaatgcgcaaccgcccaggtcgcaggggcgggccccactaaattcaaaggtacaagtgaatacccattatttttataatttttttaatatatacatgtatgtagtatatatacataggaaatagaaaatgagcaaaatagtgaaggaattatgttactttgggctaaatttctacctcctccagttggcccattattctcacacacacggtcagcccgcttctgctcttccagtggtcgccagccgccaggacaggactacaggaggacgccaggacgactcaccgtcacgccagccgccctaccgccaccgcccaccgcgcgcaccgcgcagtcgcccagccgcccactcccagccgccaccgcccagcgcgcagttgcccagccgccgcctcgccgcgcgcagcgcgctgcaggaaatacgaaataggccgacaggcgcccaggcgcccgcagtgcctgtccggctgtccattgaaagttgagcagttcaagcagagctgatggctacatcagagccagtacaagagagtttggtggtgcactactcacaacctagtaggccccgggtcctccttgctgcttcaggaagtgtagccgctataaaatttgagagcctttgccgtagcttctctgagtgggcggatgtccgagctgtggccaccacgtcatccttgcacttcgttgatagatcatctctaccaagtggcatcgttctttacactgatgatgatgaatggtcaacctggaagaagataggagatgaagtcttacacatcgagctgcggaaatgggcagacgttatggtgatcgctccattgtcagcaaataccctggctaagatcgccggtgggttatgcgacaacctcttgacctgcatcgtgagagtgtgggactacagcanaccgctctttgttgccccagccatgaacacgttaatgtggaacaacccattcacggagcggcatcttcacacaatcaaccaactgggcatagccttgatcccccc

SEQ ID NO: 138227 - DNA, 359 bp, Zea mays
  unsure (1)..(359): unsure at all n locations
  Clone ID: MRT4577_57539C.1
ggccggccggacctgtattcctgaagcgagcgccatcggctcctcggacctgaacactcagagctctgagccgccgtgcaacccggctaggtttcgtgcctgccgctgctgagcctagaacatatttgattgtggagagtccgacacggagctattgtacagtgtccatccctttcacgagatgggacgtgaggncgctctctcgcttgctagggatcgagcaagaacaggagcgctgaagcgtgtgactctgaggtcatagaacacggccgcgaggaactccggtggtcgcgtcacctgtttccaccggggcggagggagcgtataggccgcagagtaaggccaatgagaaacgcgac

SEQ ID NO: 138228 - DNA, 1054 bp, Zea mays
  Clone ID: MRT4577_5753C.1
gagaagagctaggtgtaacattaagctggctgccattacacataatatacgtttgcttacagaagggcaccctaaacacacgaggggagcagcagtaaactaacagctgcattcttggtatatttttggggcattttttacgggcatgctatacaaaagaaacttttacaggagtacaactactcacgtttttttactttgactttgacagacagaccacgaccccgacgggagttgcagccagtagcagatgctgctagagaggcagcagccttccatgtgagtcaccgagtccccatcaggggccggccagcgaacctagcgaggctggtggatcacgcgaggagcgctgctcttggggctgccggcgtacttggtcggcttctcggagtgcctgggtttctcccggaacccccgcggggcgtcgccgctcttcggggagcccaagttcagcgccttgagcaccgaatctggcggaggaaaagcacaccaacgtacgcgtacgcggatgagctcactatgattcgtcttttaggcaaatctaaaaatcggtggaagagtaagagagagagatccgtacctgtcttaagggcggcggcggcgggggcctgctcgccgtagaagaggtcctcatcctcatcgtaggcaaggagggcgaccaactcgagctgctcggctatctcgtccaggtgggcgtgctcgcgggaccagtggtcgcggaaccaggcggtggtggtgatgaggtcccaccactgcggcgagaagtcctccacctgcagcagcgccgccgggatgaagagcggcgcgttcgggttcagcgacgacgaaaccgcgacggcactcatggttcaacttcagcccctcaggcctcctaccttccttcctgttcgtggttggatggatctgatctgcctgctggagctggggagcgaggggaagaaggcctcggcgacggacaagacggaaaggagaaccaaacgaaatatcaacagcggagtgagtggggccgcctgggggcaatccgcagcaggccggacgcttgggtcgacccggg

SEQ ID NO: 138229 - DNA, 657 bp, Zea mays
  Clone ID: MRT4577_57540C.1
cccgaggttcggccgggcaattgatctaatcaaaccctgcatcaaatagatctatctcatgaacctagatccagaccaaaaactatgtaagatggctccgataccactgttaggaatcgtgctagacacatctaccacgtcacgtaggaaatttgcaagtaagagatcatggatggttaccaatagacgtgcagcgcagcggaagacgagttggagcggcgatccaacgtaggcgcgcgtcgatggagaggaagtagccaatcacgatcgtctcctcctccgcagtctgtcaacgcagcagtcgcagctacgtctccacatagtccacacatgcggggaaggaacgccgtgcgccggtgtgctagcactacgcgcgcagcgagggtctcacgactaggtatgaggaaggcgatggctagggtttgcacgtgtggtgtagagctctaaccctagccccttcccatatatttatagagcatgttaatgggctgcagcccattaaacctctaatcccaattgggccctaatctgaattgtatatgattgcctcttgggcatatcactaacatggaggcccatctagcacacattagccatgcgtggctgcaagctgctgtcaggagtttgactttccggttacacagaaggaagaaaaag

SEQ ID NO: 138230 - DNA, 1287 bp, Zea mays
  Clone ID: MRT4577_57541C.1
gggtacctcgaggccggccaggctcatgttctggtgggcttaaccaaatgcgagctgctatatgcgatatggttgccatcgcaagatctttgaatgtgactttaattgtgcctgagttggataagacgtcattttggaatgatccaaggtgtgtttattgttgatattaaagttttcttttcccagttcttttttactggatggattttatgcatagtctttgtgataatatgcttatgcattctgcctctagtgaatttcaagacatatttgacgttgaacattttataatctctctaagagatgaagttcgcatacttagagaattgccaccaagagtaaaacggagagtggagttaggaaagttctactcagtgcctcctgttagttggtcggatatctcctattaccataagaaggttagagatgtccgatgtcatgaactcttgtgtccatatccaatccatagaatctttaccatttggccaaaagctgataacatttcatcctgtacagattctacctgcaattcagaaatataaggtactccatcttaatagaactgatgctaggcttgctaataatggtctgcctctggagatccagagactgcgttgccgggtcaattattctgcactgaaatttacgtcccaaattgaagtgttaggaaggagagtgattagaatgcttcgccaaaatggccccttcttagttattcatttacgatatgagatggatatgcttgccttctctggctgtactcaaggctgcactcctaaagaaaccgaggagcttacaaggatgaggtatgcttacccatggtggaaagagaaagtaataaactcttctgtgaaaagaaaagatggtctttgccatttattccagaggaggttgtccttgttcttagagcattggatatcgacaaaagtatgcaaatctacattgcagctgggaagatatatggtggaaaacgcagaatggcttctcttaccttggcttaccctaacgtggtgagaaaggagacgcttctggaaccttctgatctcatgttctttcagaaccattcgtcgcaaatggctgcactggattacttggtatcactggaaagtgatatatttgttcccacatatgatggcaatatggctaaagttgtcgaaggacaccggaggtacctgggattcaagaaaacaatcatgttggatcgaaaacttatagttgagctggtagatcagtataccagtggttctttgcggtgggatgagtttgcttcattggtcaaggctgtcc

SEQ ID NO: 138231 - DNA, 1515 bp, Zea mays
  Clone ID: MRT4577_57542C.1
ttttgtttccatgtgctgctcgagcaggctcagcctgtggctcatgcgttcgttgcagcctcgacgtggcagactcatctgcagcgaggggatcagtcagtcattgcattgggtacctcgaggccggccgggatgtttccccatctaaggcgtcgccagccctggcaaagcgcttgccgctgctcccctcttccgtttccagcgccgccgccctccttccgcctgttcctgttctccagcaccgccgttgaacctcctcccctctccctcgtgcttccctctctcatcctctctgccgcttccccgctctccccaaactactctgtgccccgtcagatcgacctggactttggcggcagctacttctagaacgcggcggcacggcagcaagccagcaaggagaacgcggcggcacgggcgtgctgctacttctgcttcctctccgacgcttgctgttgagcggttcaagcagagctgatggctacatcagagccagtacaagagagtttggtggtgcactactcacaacctagtaggccccgggtcctccttgctgcttcaggaagtgtagccgctataaaatttgagagcctttgccgtagcttctctgagtgggcggatgtccgagctgtggccaccacgccatccttgcacttcgttgatagatcatctctaccaagtggcatcgttctttacactgatgacgatgaatggtctacctggaagaagataggagatgaagtcttacacatcgagctgcggaaatgggcagacgttatggtgatcgctccattgtcagcaaataccctggctaagatcgccggtgggttatgcgacaacctcttgacctgcatcgtgagagcgtgggactacagcaaaccgctctttgttgccccagccatgaacacgttaatgtggaacaacccattcacggagcggcatcttcacacaatcaaccaactgggcatagccttgatccccccagttaccaaaaggctggcctgtggcgattacgggaacggcgcaatggccgaaacctcgcagatccatacttccgtgaggctcgcgtgcaagacgcaaccgcacgatgcgagcagttcactcgcgggtcctgtcagtaataaccggccatctagctgatgcagcggttggccacttgattgtcaagcttaggaatttgttttatctgcagtgtgcatctggagtgttgtaccagattttttttccaactagtgtttgtgtgtattgaaattgggggggaaaggctgttgtcacaggataacaataacttcctccctgctcagtaattatgactctattcagtttgtaattgtcggtgggagtacaattatgcagctgtattgtctgctacaatattgtttgtttgtgtgtgtgtggagttgggggtgctgctgccacagagatagcttcctccctgcccagccagtaatgatagtgattattcagtttgtagttgtcaaaaaaaaaaaaaaaaaaaaaaaaaaaaaaaaaaaa

SEQ ID NO: 138232 - DNA, 1508 bp, Zea mays
  Clone ID: MRT4577_57543C.1
ccggccgggagtgtatgattttggtgtagtgggcaaagcccgcttctgctcttccagtggtcgccagccgccaggacaggactacaggaggacgccaggacgactcaccgtcacgccagccgccctaccgccaccgcccaccgcgcgcaccgcgcagtcgcccagccgcccactcccagccgccaccgcccagcgcgcagttgcccagccgccgcctcgccgcgcgcagcgcgctgcaggaaatacgaaataggccgacaggcgcccaggcgcccgcagtgcctgtccggctgtccattgaaaggtaattcttcttagaagtcaaagatgaggacatcattgctcaatttcaaagcatgaaggatcgaaaagttagattgtgatttttgagcagttcaagcagagctgatggctacatcagagccagtacaagagagtttggtggtgcactactcacaacctagtaggccccgggtcctccttgctgcttcaggaagtgtagccgctataaaatttgagagcctttgccgtagcttctctgagtgggcggatgtccgagctgtggccaccacgtcatccttgcacttcgttgatagatcatctctaccaagtggcatcgttctttacactgatgacgatgaatggtctacctggaagaagataggagatgaagtcttacacatcgagctgcggaaatgggcagacgttatggtgatcgctccattgtcagcaaataccctggctaagatcgccggtgggttatgcgacaacctcttgacctgcatcgtgagagcgtgggactacagcaaaccgctctttgttgccccagccatgaacacgttaatgtggaacaacccattcacggagcggcatcttcacacaatcaaccaactgggcatagccttgatccccccagttaccaaaaggctggcctgtggcgattacgggaacggcgcaatggccgaaacctcgcagatccatactgccgtgaggctcgcgtgcaagacgcaaccgcacgatgcgagcagttcactcgcgggtcctgtcagtaataaccggccatctagctgatgcagcggttggccacttgattgtcaagcttaggaatttgttttatctgcagtgtgcatgtggagtgttgtaccaaaatttttttccatctagtgtttgtgtgtattgaaattgggggggaaaggctgttgtcacaggataacaataacttcctccctgctcagtaattatgactctattcagtttgtaattgccggtgggagtacaattatgcagctgtattgtctgctacaatattgtttgtgtgtgtgtgtgggagttggtgggtgctgctgccacagagatagctttctccctgcccagtaatggtagtgattattcagtttgtagttgtcagtggaagtgtccagcaaacttttctactaccctttgatattcctggtacaaatgttggaacgactgtcctaaccatttgagtgatttgctttcgacctgcc

SEQ ID NO: 138233 - DNA, 1157 bp, Zea mays
  Clone ID: MRT4577_57544C.1
ggacccccgggttggccggaccggtactcattgccatctctacgttctccagcaccgccgttgaacctcctccctattcccgttctctagcaccgccgttgaacctcctcccctctccctcttgcttccctctctcatcctctctgccgcttccccgctctccccaaactactctgtgccccgtcagatcgacctggactttggcgacagctacttctcgacgggcggcacgggcgtgctgctacttctgcttcctctcccacgcttgctgttgagcggttcaagcagagctgatggctacatcagagccagtacaagagagtttggtggtgcactactcacaacctagtaggccccgggtcctccttgctgcttcaggaagtgtagccgctataaaatttgagagcctttgccgtagcctctctgagtgggcggatgtccgagctgtggccaccacgtcatccttgcacttcgttgatagatcatctctaccaagtggcatcgttctttacactgatgacgatgaatggtctacctggaagaagataggagatgaagtcttacacatcgagctgcggaaatgggcagacgttatggtgattgctccattgtcagcaaataccctggctaagatcgccggtgggttatgcgacaacctcttgacctgcatcgtgagagcgtgggactacagcaaaccgctctttgttgccccagccatgaacacgttaatgtggaacaacccattcacggagcggcatcttcacacaatcaaccaactgggcatagccttgatccccccagttaccaaaaggctggcctgtggcgattacgggaatggcgcaatggccgaaacctcacagatccatacttccgtgaggctcgcgtgcaagacgcaaccgcacgatgcgagcagttcactcgcaggtcctgtcagtaataaccggccatctagctgatgcagcggttggccacttgattgtcaagcttaggaatttgttttatctggagtgttgtaccagatttttttcaactagagtttgtgtgtattgaattagggggaaaggttgttgtcacatgataacaataacttccaatgatgactctattcagtttgtaattgtctgtgggagtacaattatgcagctgtattgtctgct

SEQ ID NO: 138234 - DNA, 213 bp, Zea mays
  Clone ID: MRT4577_57545C.1
ccacgcgtccgatcaacttaaaaaaggatgattgttatggagctattgatgcttactgtcatgatcatgaactacatactaccatcatgacccaagctactcctatgtgcttctgctgtgactgacgcacacaagtcctctctattcatgagctccttctgctacgaacattcttaagcacacctactttagggctgtcaccatgacttatca

SEQ ID NO: 138235 - DNA, 312 bp, Zea mays
  Clone ID: MRT4577_57546C.1
gcgcatttggctgccgccgaccctggcactatattttagaagaacactgagctcggatgggggggcgccgatatggccgacgttgcttataatgcaagatccttcgtctaatatccaacttaatcttgtcttcacatactggatcccaatgcctactgacatgcatattcggtactatggcacgcgcatgtgctgtcgctcaactttgctgtgcatatgatcctaagattgacctgggtaatgcataccaattgtaagcacttctcctttcttacgtacacctccactgcttttgggatgatgaccctaata

SEQ ID NO: 138236 - DNA, 137 bp, Zea mays
  Clone ID: MRT4577_57547C.1
cgatcccgtagtcacgggcgacgggcgctggaattctctctttaagctgtggagcagcgcagagagcgcggtgctcgcggtcctttgttgatggttggggaacacctctttaatcacttgcagtactggattggagc

SEQ ID NO: 138237 - DNA, 323 bp, Zea mays
  Clone ID: MRT4577_57548C.1
gggcaaaaatcgagcctaagcttattaagacccttcgttgttcggtccactggagcctgtccctgctttaaaaaaaagaaaatgtaaaagcgccgaaactggaaaaaatatactttttttattttccggcgcccgggtttgaacttggacagccagcctttaacgggtgggggccctcccgggtgagggatttttttacccctattagggggggattaaccttcagtgggagaccaaaaatccccacttggccaggagggttttttcaaaacgtcccagtttttgttttttttaaggatggcctgagcggcccccatgggatt

SEQ ID NO: 138238 - DNA, 723 bp, Zea mays
  unsure (1)..(723): unsure at all n locations
  Clone ID: MRT4577_57549C.1
ccggccggggctgcatcttccccagttccctgctccaccgtgtccctcctagctcgtgcctataaatctcccatggtaccgtctccctgagattttcttgaagccgctcggatctttatcctccaccgtctaggctcctcttcttatctcttcgtacgtagcttctgcttgattttctccggccatcgatttgtctatgctcgctcaatcacaggcctggccttatctgccgctgctcctgatttttttcagccgcgcgtcgtgcttatcttccctgcgcgcgccgtctttccagtagcgcgcagccgcgctcttcttccagccgcgcgcagccgctcctctctcccctgtcacgcgcgcgagttcttctgcgggtcgcgtgccgggatcctggccgcgcgccgtgaaggtctctggtcccctactcggagtccctcccatggtagccgctcgtccgtttccctgatgctcaccgcgccgtcgccttactgctcgcccctggcttctctgctgcacgcacgcgacctcccaactcttcagccgagctcgcggccgtgcagttcgccatggcgcgcctgctctcagctgctcctatggtgcccggccaactccctgctctaattttcctctgtctgccatgacgnccggagttcttctgttcggccccagctcgaattggtcttccgctttctgcgcgcgcgaatccgcggtcgcggtcttgtc

SEQ ID NO: 138239 - DNA, 342 bp, Zea mays
  Clone ID: MRT4577_5754C.1
cctcttcatgcttggtctctaccgtttggtcaggatgaacatgttcagactgcttattaggacaccggtaattggagtaggatgtacacatacatacacctgtcctgccaatgcaatctggccgtgactaatttcagtactacaatcagagagcaaaccagtgatttgcagcaacgtcaattagacagcagaaaaccatggatgtgcacatatctagctcaagtacactagtcttcgcaaactcatggtctgcaggttgtgactcatctggctcacaatctagctaaaccactacaaccctgaacattagctgataacaaggaggttctactgggacatgat

SEQ ID NO: 138240 - DNA, 224 bp, Zea mays
  unsure (1)..(224): unsure at all n locations
  Clone ID: MRT4577_57550C.1
ntgaggttctgacttctgaggaggatggggatggctcacggcgccgtgacgcgacgatcggcgtcggcagcggcgcgtccctgctgtccctcctgcatgcttgccacccagcttcgcctcgccacgcgtctcgtggaccattgcgcgcgtccctcgtgccacggcgcacccgcagccatgagtgccagcgctcccgntctcccgnnaccttncccccccccccc

SEQ ID NO: 138241 - DNA, 1911 bp, Zea mays
  Clone ID: MRT4577_57551C.1
aaataaagccttattagaggagattcataggaaaataaatacattgtattcaaatttcaatagaaaaaaaaccactccattttttcatttgtcacgtttcaacttaaaaataaagtaacgaacgataaatattaaaaacggatgcaacattacttctctgaccactcatcaaacccgcccttacagtcttatccatcgcggcctcgccgtccagcagctagctacgacctagctctgggcctcttgccctgtgcctcgcccgagctgcagctccactccggtgcaccatggccgtcctgacgaaggtgcttctccgtctcttcttcaccactggcggcctcatcgtcttcctgttgtgtcccgcgtcctgccttgctcgtcctcctcattccagcagcaactccaactactactgcgactggtgccctcgccgttccaccgcctcccccgacctcgacgcgtcgttgctgcgttcttgtggaactagtagagacggcgacgacggtggcttcggctgcgggtacggggctgcggagcagctggacggaggtggagctccccacgtcgctgccgcgggcgccgactccttcttcagcgctggcgctggctgcggcgcctgctaccagttgaggtgcagagaccggagggtgtgcggcgacggcggcgtcaaggtcgtcgtggtagccggcttggccaaccggacggggttcgtgctcaccagggaggccttcgctgcgatgatggccaggccgcgcgtgtcgtccaatgaccaactgctgcccggcttgggtggcaatgttgttgaggtcgacttcaggaggataccttgcgagtacaagaacaggaacctgtcggtacgcatcgacgaggaagggagccggcacccggcgcacctggccatcaccttcctgtaccagggcgggcagacggacatcgcggccgtcgagctctcgcacgcgcacgcgcagccgccgtcgtggcggcccatggcgcccgtgggcaggcgcggcatcgtgacgtggcgcacctcaagcgcgccggcggggccgctgcagctccgcctcgtcgtcacggccggcgtcggcggcaagtggctgcgggccggcggggacgtgctgccggcggactggcggcctgggcaggtgcacgacacggggctccgggtccgcgacgtcgccctgagctcctgcgcccgctcctgccgcggcgccgctacagccggcgccagcgaggagctcaggtagtagagtagattagatgtaggcatggcatacaatggcattgggctggaggcgagcgagattagcttgctgcttgagtgcccatgaaggatgctcgtgctcgtccattgaggaaaattaaaagcaaaccagcagagagctgatctctgatgatctgacgcagtccatggaaatggaagcaaattaagttggtttcttgctgactaatgaacggacagatgggcgaccgatggatctgattcacacgtcgcatgcatggacgcattgcgctgcatgaatataaacggttgatgaatgttacacacgctttggatgggtgcgcaagattcgatgtcagtgacagtcaaatagcagctatattatagcatcagaaataggaaaaaaacacgtaaaattcgaagagttcaaaaattgtatcagcgtagtttttttttttttgaaacttggcatatgtgtctataccacgtacgggcccatgcatgacagcatctatgcaccacaccttgcatgcatggcttaacgactgacggtcatatgctggatttgtgtcatgtagtgtcacatgtgtggcaagcacgcattcaagcacttgtgcatggctccaaaagtctcttatatcctttcgaatagattgtaatagagatttcaataaaaaaaatattatccagct

SEQ ID NO: 138242 - DNA, 410 bp, Zea mays
  Clone ID: MRT4577_57552C.1
aagcagtggtaacaaacgcagagactttttttttttttttttttttttttttttgggttttttttttttttttttttttttttttttttttttttttttttttttttttttttttttttcacaaaaaaaacggggggttaggggaaacctttaaaaaaacaaaaacccccccgggggaaaaaaaaaacactttttatacttccaggccaaacgggaacagaaaaaagggggggggggggacaacctccccccccccgaaggggggggacccccaaccagttgggggggaaagaggttctaaaggggccccaaggaaacccttggggcaaaaaacgcaacgggggtccaggaaaacgggggcgacccaaaggggcccccgcgccccccccgggggtccccccggttagggg

SEQ ID NO: 138243 - DNA, 315 bp, Zea mays
  Clone ID: MRT4577_57553C.1
ctatttttcatgctcggagagatcgataccgccgtggttccactcttcaactcttgatcgtaaacaactcacgtgggctaccacatcaaaacaccttctatttggtatgccgttgacctggcctgcttttgtccttgtgcccttctgtgggcggccctgactacatgtgctgacatggggtcccactgcataacctacttggcagggtcgactctcacaccgtgagcacacggtttgaagtgaccatgaagggattgtgaaccgagcactcctaaaacaacatacagctctggtgcatatttaatagggaccgct

SEQ ID NO: 138244 - DNA, 527 bp, Zea mays
  Clone ID: MRT4577_57554C.1
gcggccgcgtcgacccgggctcgctcctggccgccatcgccgactccgtcacccgcggcgaccccgcgccgccgcccgtgagccggttctactccgccgagtcctcggggctcacctcctgcgactccagctgccgcaccgactgcggacgcccgcccctcgagcgggcgtacggcggctccggcgagatccgcgtgccgccgccgctgcagcagcagcaacagcacctgctggctcaccccgcggactccccgctgttccgccacagcagctcccccgccgggctgctctcccgcctcatgaccgacccgcacggaatggcggcgaccggaggagcgatggggagctacacgcaggcgggcagcgacgccgcgctgggccccggccacggtcacggtcacgcgcagctcagctcgcagtggagcttctccaggcaggacctgccgcagatctcggagatggggatgataccgggcgacatcggggagagcatcgtgggcgccggcgggtgcaacagctccagcgac

SEQ ID NO: 138245 - DNA, 394 bp, Zea mays
  Clone ID: MRT4577_57555C.1
aggccgttcggttcgaacccttgtgccactactcctaaggtcaaggcgatcaacaatgccaacccgcccagactaggatctcgtagtggatggggaggcgacgaggcgttatgtatgtccccctcctcctccctttttttactcccataggatcattggcggactaacatggccaaccggacgcagagcacctttcacctggtggtgaggaaggacagtgtcctagttaattagagtgctaagaccgaataaaaacgggtgaacagtacctaagacggtcgaagggtccacgtgagcggggttacggtatacctcgacaatgttacgatttaggactacccgaccaggttgatggtatttattgtccgcatcgtcataattgagatgaaaatca

SEQ ID NO: 138246 - DNA, 367 bp, Zea mays
  Clone ID: MRT4577_57556C.1
gttgttcacatgtggatgccttggttcatcattggttggctcatatattacaaaccgccacgtgcccaaaggcagctctgcctaataacgagatcgtggtccacaaatgtttgtgggcgccatactctatgtgcgactcatgacagagctggaccacgcaccacggatacgatccatccccatgctttagaaatctaagctaattggtccaagaaccgattcttacggtcaatggatcactcggcgcaatggccggcttaaaaagaccctttcgaagctaccaaaacgattttttggaaacgcctgataacgaggtttgcccatttcttgaccgggccattacacggtgaaggggggctgcacgggc

SEQ ID NO: 138247 - DNA, 638 bp, Zea mays
  Clone ID: MRT4577_57557C.1
ccggccgggccgggatatacggtgacgtcagccagcgcccattcaagtcgatgatcgcgggcgatggcccttccctcttcaagaacggcaaaggatgcggcgcatgctaccaaattaggtgcacgggcaacagagcctgctccggacggccagtgaccgtcaccgtcaccgactcgtgccccggcggtgcctgcctcgtcgagtcggagcacttctacatgagcggtacgggcttcgacgccatggccaacaaccgaggcatgtgcgaccgcctccgctccggcggaatcctcaagatccgatacaggagggtgggctgcaactacaacgggaggaccgtcagcttcaaggcggacgcggggtctaacaccgtactacctcgccgttctcatcgagaacgtggccggtgacgacgacatctccgcggaggacatcatgcaagccggctgcgactcttgggcgccgatgcagcagtcatggggcgccgtgtgtcgcgtcaactccaacaacggacaggcactccgtgcgcccttctctgtccgcgtcacctcaggttccggcaatgtcctcgtcatcaagaacgccatcccccgccgagtgacccgctcgtgaggacctatcgctcctacgcgaactac

SEQ ID NO: 138248 - DNA, 276 bp, Zea mays
  Clone ID: MRT4577_57558C.1
cagcaaggctttcctacatatgtataataatgtgggaatgatttggttttaattataaactggggtctaaatcctaaagtaaaattgaaactccaagatgcaaagtccagagtggcattttgctactctgtctcatgccttgatagctttccaaaatgaaagttacttgaggcagctcttgtgggtgaaaagttatttgtacagtagagtaagattattaggggtatgtctatacaacaaaagggggggtctttcctaaaaaagagaacatatgat

SEQ ID NO: 138249 - DNA, 367 bp, Zea mays
  unsure (1)..(367): unsure at all n locations
  Clone ID: MRT4577_57559C.1
anaagaagaaacattctaatatacacatcatatgcatttcaattcccccatatcttcttatacatacccaaacgtcaaacatattttttcctttccacacaaataatctcaacctacaaaatcatgtagaaactgatgattactaccaccaataaaatctctcccaaactgacgattttgccctttatacccaccaccaccatcgccactaccaccatcaagcccaaacctctgaacaattgtcatcggaaaaagctccggtaacccaatctgatgatgaaaccctaacgtctaaaaaactcctccgtttgtgctgctattcatcaccggcacatttgacgacccaattccgtacgaaaaaacaaac

SEQ ID NO: 138250 - DNA, 649 bp, Zea mays
  Clone ID: MRT4577_5755C.1
gcgtgcgctcaaactcgcgcccgtgcgcggggtgatgacgccggaagagcgtggtcgtcgtcaacgactcgctcgtgcgcggcaccacctctagcaagagtgtgcgcctgctccgcgatgccggcgcgcgcgaggtgcacatgcgcatctccagccccccagtcgtcgggtcatgcctatacggggtggacacgccgagcgaaggcgagctgatatccaacaggatggacctcgagggtgtgaggaggaccattggctgcgactcgctcgccttcctctctctcgaaaagctccacagcatctacggcaatgaagcacatgagttctgtgacgcctgcttctcacggaactacccggtgctgcccacagtgccggagccggtcccggagctggtgtctgccttcgaagactaacaagaaggggagtggatctatactctgcatgcttactattaccatagaatctagactcaattttgggcatagcatttttgcctttgcaaatgcattcatccatctgaattttgaggttacaaagtttagacactgatcgaactgctattgtgggttcgatctaatctattgtattgctatatatgatgacgacgacaaaatgaatgatctcaatggtacatgtttacctttccact

SEQ ID NO: 138251 - DNA, 577 bp, Zea mays
  Clone ID: MRT4577_57560C.1
caaaaactttcatctctcaagactaatagagaattctgcagcaagtctgaatgcaatattcaggtttggtgtatccttctcagtgacaaagtaccttttaggatgcactggcctttacactctgacatgcaagttaatggtatttatgttagggtggttaacaggcaacccacacaaaagttaggggccaatggtagagacgatggtccactattaacagattacctgaaggagggacctaacaagatttctctatacaagaaatgacgactcgtactattctgtattgggtatcaagaattgccaaaaggagatctatagaacaggtcctaaatttggtgccaaaggaacaagatggtgaaaacttcgatgacacccttgcacgtgtgcgtcgctgtgttggtggtggagctgaggcaaataatgcagacagcgatagcgatatcgaagttgcggctgattttgtctctgggaatcttaggtgccctatgactgcttcaaggatacatatcgctggtaggttcaagtcctgtgctcacatgggctgctttgatctagaagctcttattgaaataaa

SEQ ID NO: 138252 - DNA, 599 bp, Zea mays
  Clone ID: MRT4577_57561C.1
agggcacttgttttgttcacagtatatcaaaatataaagtacaacaatattttgccaaaattgctgcaatcatacacgatttttttgacatgacaaaaaacgaggagctagccttgtctttggtacttgagacatttggaaccattagcctttagctaggtcgtggtccgaaatggaagcatcgctgctcggtctcttgtcaaaacaggtctgtgtaagcatgtataaagcataaaagaaacctaaaatgattcaccaattaaaagacatggattgagaggaatgatataatataagagtagagttatgcattcacttagatcatgctgctctacaacaacctgtcacatcatttattcattttcatattcttatatctctcatcatttattcttattccttcgttacttattgtgagtgtttatcaaccaaaggttggagcctagacagcaataaaaaattgtttatgtgcaaacctcttgcagaaaccagagcacaaacgtttcctttacttcctaaaaagcctattactgaaaggatcatcatgaacacaatgaaacaggcgacgccaatagagattctggctaccctgcttttcc

SEQ ID NO: 138253 - DNA, 491 bp, Zea mays
  unsure (1)..(491): unsure at all n locations
  Clone ID: MRT4577_57562C.1
tgcttggacctttgggctgatttatgtgcttggtgaggagagtctggagtgggagggcatgggttgctggacgtctgtagtcgttattgttgttcgatggtcaccccaattttgtgtcttcgttgatgttgtatctgtttttggttcttctttgttctttagactctgtctgtctggtgttagccgttctgtagcccggactactctacattctggtgaagacgagggagacttcgtatacttagggagggtaacgcggtaattagaccggtgttaagcctcgggaggcggcgcgtgacgaatacggtaccgatttcattgggtggcatatcggtaaccttgattcctagccggagtgcgccaacgctcatcataacgaagttcntcgtggatgtcccgccttttgtgtcgcctctacggactccgagttcgggataacggatagcgcttggattggatttcacgggtagactccttgtccgataatcccg

SEQ ID NO: 138254 - DNA, 274 bp, Zea mays
  Clone ID: MRT4577_57563C.1
gaaaatatttgacatttattcacatattcttattatttgaatttaagatatttgaatacaacgtttatgtacataaaaccttggccttgacaaaaaatattttcctgagtgatgcgaaaacatttacaggaatttttgaacagtaaaggactattgctcactatatataggcataggacatagctcatgaggaattacgagtatgcccctcataaaagtggacaacagtgactcataccctgaaagactaaaaaggtcatgggatctttaagtc

SEQ ID NO: 138255 - DNA, 639 bp, Zea mays
  unsure (1)..(639): unsure at all n locations
  Clone ID: MRT4577_57564C.1
cccacgcgtccgatagaatcaatccgcaattaatagatgtactacacatagttcatgaatttatttttgtataaatgatttggtagtatgatctcagattgttcaagaatataaggttcaaatttaaccataagtaacaaaggaataagaataaatgatggaagatacaagaatctgaaaatgaataaatgatgtgataggttgtaggagagcagaatgagctaagtgaatgcataactctactattatattatatcattcctctcaatccatgtcttttaactggtgaatcatttaggtttctgttaggtttctgttagatttacttatgcttgttctgacgtgtctttatgctttatacaggcttacgcagacctgttttaacaagagtcgggcagcgatgtttccatttcggaccatgacctagctaaaggctaatggttccaagtgtctgaagtaccgaaaacagggctagctcctctttttttgtcatgtcaaaaaaatcgtgtatgattgcaacaatattggcaaaatatcgttgtactttatattttgatatactgtgaacaaaacaagtgccctctgagaccatcgtgatttatgcattttcaaactaaattttacgacacttcttgttna

SEQ ID NO: 138256 - DNA, 1593 bp, Zea mays
  Clone ID: MRT4577_57565C.1
ggcttcacatgcacttgtctttttcattagaagaattgcattggctcaaactgtcaaaacctgacatacaatcgtgtcgtaacggtccctgagaaattacaacccttgcggacgacggtacaaggatcgtcctgctgtggcaaaactcgttccttattcgcaagttacgtgttgctgcagcgtttacacaccgcaggaatcaaatccgccagaaataactacacctccagcctactccacaatgctgttgtgatccagaattctacatctacatttggtcccagtcaatagaattgttgttctcaaaattataagaaggttgctgcagacggttgcggcccaatctgctcattgtggcgaggccttcgatcactttgtaaagtgaagaccaccatcgatcagctgggacctgatactgagttagagattcatcgatttcagtattgtgcttcccttccagtacgctttgcagagtgattacagcatcctttgttctcctcagaatattatttccctcggcagcttctaatgcaaggaggtcactatgtgatgatgtgaggcttctagcaagcgcaaactgggcagcttcagcccatcggttagatgcaacccatctcctttggatatcttgcagcttgatttcttccctccgggacctctcttctccacttgcaaatacaagactcttgaggtattctgcgttgctaggtcctgtactttgcaccatcttggagaaagcactcccctcgttgcttagaagattctcaggagagtcgaattccagaacctgcccagaacttagaataagcaacctgtcacagagcatttacatcccttagttatttgttgatatatgaaatagtattttcctgctctttttgtatgccatatttattttttaggcttcaagctccaagtaacagcatgggattccccttgaaggcttccccccgatatggtttatttcaagaatatgttctagtgagtctatggtaaaaacgagtagtcacttatgcctctacgatataagataatgttttatcagtttctacataatactttgcatgccaaccatatcagtgtatttgtagtagtatggtgtataaatgttgctggtcataaagccacgcttgataaggtgttctacgcttgaataaatgatgtgacaggttgttgtagagcagcatgatataagtgaatgcataactctactcttatattatatcattcctctcaatccatgtcttttaactggtgaatcattttaggtttctgtttgatttacttatgcttgttctggcgtgtctttatgctttatacagacttacacagacctgttttgacaagagccgaacagcgatgcttccatttcggaccacggcctagctaaaggctaatggttccaaatgtctgaagtaccgaagacagggctagctcctcgttttttttcatgtcaaaaaaatcgtgtatgattgcaacaatattggcaaaatatcattgtactttatattttgatatactgtgaacaaaacaaaaaaaaaaaaaaaaaatcgtgaaaaaaaaaaaaaaaaaaaaaaaaaaaaaaaaaacagc

SEQ ID NO: 138257 - DNA, 477 bp, Zea mays
  unsure (1)..(477): unsure at all n locations
  Clone ID: MRT4577_57566C.1
ctcccccccccctgcggggcgggggcggcggcaaccaaacacggctggggggacctnaaagctcctccgcttccctccacccgagaggcgagagcatggacacccangtgaagcttgctgttgtggggaaggggatgggcaggacccnctccannnntcanttgtggtatttgattatggganttcttnnnatnaccanaacccnctcatcatgaggaatgtcaagcggcccctccccgagggggacatcctcaccctgctcnagtcccagagggaggccaggaggctgcgctgaggccctaccgttcttggggggctcttntttnggctttggggggggggaatttntnctatngtttaacttctntgaccctntcttnagagtgntaagcctggggataagattgcaggtttgtttancnnnnccacannccacaaagaaaaaaaaaaaaaaaaaaaaaaaaggggcgggccgct

SEQ ID NO: 138258 - DNA, 301 bp, Zea mays
  Clone ID: MRT4577_57567C.1
gtagtaaaaaaacggttcggcccacccgtccggaccttgcaacatataacgaaaaattttttaccaacaacaccacaccaacacacggcggaggagttttgcagctgcggccgctccgcaatacttgataccgcaacgctacccccacaatgctaacaagatgctaacaatttcctacttcccccattcttatatcaaaccttgcatcaaatgcttcaatacgctatgaatacacagttcatcaaccctctaggcaacaacacaccaatgcccatagcgtcatacagttaccacctaccct

SEQ ID NO: 138259 - DNA, 510 bp, Zea mays
  Clone ID: MRT4577_57568C.1
atgtcggctccaagaaacaatgagggtcccctgctcgaggaagtatcgaccacaacaagtggtgaggaggtggatcctcaaatcctcgacatcgccatgaagcttgctgaaaagatgttccccaagatgcaagaggatggtgccaagagaaaggccgaagaagaggaagcaagaagaaaggtcgaggaagaagacaaaggaaagaaaaaaattgactacaacgatgacttgattgaactcctggtgtctaaagtaatgaggaaaatgaatgtccgcatcgaggattcaccaagtgatcccaaggccaaaagacgtgagagtgctcgtgagatttggagcattttaaagatgtcacatgaaggtgatcccaaggccaaaagacatcgcattgagtcattggaaagtgaactaccaagctttttgaggaacaccgaggatagtcggttgcaattgctgcagcagcagggagaaatccctccaccttgtgcaagaaatgtggcgccaacttga

SEQ ID NO: 138260 - DNA, 196 bp, Zea mays
  unsure (1)..(196): unsure at all n locations
  Clone ID: MRT4577_57569C.1
gccggtctggcggtaccaacacctgtcctgggctgccgtggaggccgcgacacgctcttcaacgccgtgccggggctggacggcgcgccgggctccgtgtccctggagcttgccaccaggccggggtggttcgtggcgacggcccccacattgatgttttctaacgcgagggggggggggnnctncctatccaaca

SEQ ID NO: 138261 - DNA, 322 bp, Zea mays
  Clone ID: MRT4577_5756C.1
cggggggggaaggggaaccaactttttagccaaaaggccaaaacaatttaatttattgggggccacaggggcttaagggggaggccccccctgatcaaatatggcatataaggggcctttattattatttaacgaaggccccgggggggcttttttcccctgggggggacggaacttcaaggggcccccttaaacccaagggacgttccctttaattgggcccgggggtccggggaccccacaaaaaacaagggccaccgggttacgggggaattgggtgaaactggggccacccttttaacaaaacattgggaccaggggg

SEQ ID NO: 138262 - DNA, 432 bp, Zea mays
  Clone ID: MRT4577_57570C.1
ccgggcgggatatctctctttctaatccttccgtctaggtacagatgattgctaattgtcagctactcttcacaagggatggtcgcgtgggcgatggctatccctggtcagagcgcgacaatagcctcgttcaggagttcaaagatgaggatcccgttccttgtctcttggatctgtagaaatctggtggggggcatttgagctaaatatcgcggaattgtctcccccctgtaactcttcctcaggcgtcgagacctgcctgcatgaagttctcgacttacctctccgggggctaggaacagagaatatccacccctttgtgcatcgccacagctaagttgatgcacgaccagaagaagaccttaccactctgatggcaggtctctctggtcagtgcgcaggtgatctgactagctttcatcatgcttctgc

SEQ ID NO: 138263 - DNA, 267 bp, Zea mays
  Clone ID: MRT4577_57571C.1
gacccacacgtcaagtgctgctctagggcgatagcagctcagtgaggcacggtgatagaggctgcatatcatgattggagcaagatcatcaacgtgccatcggaagatcctgtcaacgcaatgcttgtttaatttcaagatcgataggatcactaggtatctacctagataaacgagattgaacaaatatcatccttgagcccggatttacatcatacaacatcatatcagtgctgtgtactcgatccacaattaatgtcgctacat

SEQ ID NO: 138264 - DNA, 435 bp, Zea mays
  Clone ID: MRT4577_57572C.1
gtcgacccagcgttttttttttgtgtttaaaccatcttttgtgcgtgagtggccaacctaatgttcagatatacatatatatattttttaatactatatatttttaagtttcaaaaggacactcaattgggaaaaagcataaactatatatttatagatctcttttttattacatttttgcatataaattgtgagtggatgcaataccagccatgaaaattatgatattttaagtttagccttgcgggaaagtgaatttcaacaattcaaatgggcggtaacaggaatcccgctagctcagtcggtggagtttacttcccgcaatttcaagtaggaccaattatatagtattttattttccgtacaattattttcagaaaagtttaaaattccatgaaatttacttttaagtaagaattccatgtaatttactaa

SEQ ID NO: 138265 - DNA, 998 bp, Zea mays
  unsure (1)..(998): unsure at all n locations
  Clone ID: MRT4577_57573C.1
agctgtcgctcgaaagaaagatgagctagcggtcgaatttctaaccacactgccaaataactcaagctgcagcattcagctattgcggctggcgtcatttattggaaactggttgcagtctatcttaaattttcctgagaatagtaaaaagattctacatatttttgatccagcattggatagtagatgctgggcaattttgagagtgtgtgttgaaaagaagccatccatttcaatatctctgaacttacttaaatcccttagtcgagttgcaagtcatggcttgggcagagttgatagcaacacatcatgtcctgacaatgaatctattgagctctttgaacaagtgtttgactgcatgtctttgcttttctcttccaatacaagagctttcttcaacgctggtgtggatttatgggcctcttgtgccattgaggttgtcaatcttgctcagaaggtgtcagctaaaaaggacaatttttgccctgttcttcagaagcttgcaaattgcctcctcgggcaattcgcatgcttcctgagattttatgcaaatccgaagaatattttccatgcttttgttgataaggttcttgggccattgttggaattgttagttttacttaattcacaagcacattccagtgggaggtgcggatgacctacaccaagggcagcgagggcctgctctgcgtcgagaagtcgatgtggcggcccaaggaactcgacgctagcacgtgaaatgtgtcgaggagaactgctaccacgtaggggggtgaaattagaggaattttgtcttctggatatgcgtatggtccttgttggtgcgctgaaaggaccagaaaatatttggtgtaactgtagaacaatacgtctgttttttctgccgtttgtttttgtttttgttttttcacaacgttgctgtaagttagtgctggaaatcacaggtacattcagttcaaaaaaaaaaaaaaaaaaaaaaggngcggccgccaccgcgg

SEQ ID NO: 138266 - DNA, 449 bp, Zea mays
  Clone ID: MRT4577_57574C.1
ccggccgggatcccgactaattgtatcaatgcttctcctcgctggctactccgcgcgccttctctttctctcccggacgacgatccggatcttgagatcgtcgtacgtagttccctcgctccccctctggctgactgcggaccaccaggccacacgggaatccgctgcccaaagatggagagtgggacgagaacaatccggccacggccgaggacatcaccgacatattccagatacgaccgtcgacgacaagcaagaccaccaacggacctggggctgtgaacgagcgcggaggattccgccggacttcaagaacggggtggacgacaggatccacaggaccgacttctgcgacgagcaacaaggacatcgccgcccacacgcaagaagggctgcctctagtgagtgctgaatcgaaactcgctgagactgctgcgatgactccaaag

SEQ ID NO: 138267 - DNA, 258 bp, Zea mays
  Clone ID: MRT4577_57575C.1
ttgacagggcgttgcataaccatctgtaaatgtaagccggactggaaatgtgtaattctacaaaaacggctttgttcatccccttgtatacaatgtatcgatgttcaacgatataaaaaaagtctggtgggtcattatacacgcttatgtgaaaattttttttttcaaccagcgccccaggaaagccgctgtccagatcgcatgaatgcagctgtagatcactcccagctgtgaccatactctttgttgtacggaggc

SEQ ID NO: 138268 - DNA, 212 bp, Zea mays
  Clone ID: MRT4577_57576C.1
cttgagtagttaaacttaggacaatgaaatgcacattggctacaagggtgtaggaagaaacactcccaagtggaaatcaaagcacgcggcgttcattcttcaccattaaccatggaatgggaatctgactttgcttgcaactaggccataaaaacaaagacatcattcgccaatcgaggttaacctagtgcagtgtaatttacacgggagga

SEQ ID NO: 138269 - DNA, 160 bp, Zea mays
  Clone ID: MRT4577_57577C.1
ggggggaacagtattctttattaaatgtgttctgacaaatagttttccacaacatggtaatcatgcggggattcaaaatgtgtaaaggcaacatttctggtactcataaaagagactgggggggccccacaaaaaaaaataacacttgcctgactgggag

SEQ ID NO: 138270 - DNA, 317 bp, Zea mays
  Clone ID: MRT4577_57578C.1
gtgtggctctggatcgtcctcagggccaacgtcctgggcatcaacctcaacctgcccatcaaggtggggctcctcgtcaactattgctggaagcgggtcccctctggcttccaatgcttctgatcatgcccatcgattcatctgcatgctacatagtttgttcaagctagtatatatacctacgtacgttgagtatatatgatgtagtactatatatagtgtccatgcatccaatgcatctcgtcctccatcgcatgttgttgtcgttgtggtgtgtggttttcgatcatcctgtcgctgtgttacatatcattagt

SEQ ID NO: 138271 - DNA, 413 bp, Zea mays
  Clone ID: MRT4577_57579C.1
acatgactggggtaaaaaaggacatgggattgtagcttttatgagcactgctactaggtaatgttcacatagcatgggggggggggaatgctggggatcaccacatccaccaacggcaggcaaggcggttgccaaagaagaggcagcctcagacaagcaccggagctgcagcttgcctagcaaccggaaccctgaaaggggagcaagaaacggaatccagcccagccttcgcgaaaaacgcccagaggaaaggctgccaccgcgttcttcacaaatgcccaccttcaaggcaggccgagctgtgcggcccctctgtgtggcaaacttcaccagctggcccccgcccctttgggccccgacctcgaaggggtcatgttggaggatgccctgcgccccctcgacgggtctgaact

SEQ ID NO: 138272 - DNA, 397 bp, Zea mays
  Clone ID: MRT4577_5757C.1
cggggaagggcccatgagggggcagcgggattgcgagccacaaccctgctgagaggccctgcgagggctttctcccccgtaccgaatgtatctatggccagaggtgcctctatccgcacagttactgcataagcgatagtatctgcgaagcttaccttgctcaagggacacaagcagggggtgactggcattgcactgaccgctgggtcatacaagctttattccgcgagtaaggatggaactgttcccatgtgagatcgccaaactgggcactgtgctcgtgtacaaccactggtcgtgaagttcggtgtcttatcattgaaggagcgggggtatttggtggaatacctgatgcacatgaaggtgtcgaatatgcaaacagcaggggaaatgatcc

SEQ ID NO: 138273 - DNA, 360 bp, Zea mays
  Clone ID: MRT4577_57580C.1
tttttttttttttttttttttgtttttttttttttttttttggtttttttttttttttttttgggccctcaatcacattttttttattaatcggggccaaaaaatttttccaaccccatcaacttcttgaattaattaggggccaaagaaaaaaaaaaaactttttatttgagcacatttgttgatccgggtagaccaaagttttaggctcaaaagggaacctaattgggactaatttcctataaataaaagccggagggaaacggggcctgatatgcgcccaccacatcctttttactttcagccataccattcagatccaagggaggcgggcttttcttcttcttccaacggggtccc

SEQ ID NO: 138274 - DNA, 896 bp, Zea mays
  unsure (1)..(896): unsure at all n locations
  Clone ID: MRT4577_57581C.1
attgggtacctcgaggccggccgggatcgtgctctgctcactctctccaagaccaaatgcgttgcgttgcgttgcttgctagcaacttgatatattcttgctgccatgccaatcgtcggtgctgatcctaatcatcctgtctaagctcagacgacgacacatcgagggatgcccctcgccggagccgcgacggccgcgaacctgccacgactcgccccctacgcccaagtaccagcccgcccaccacgctgtcttcgccactcggcatcgccgacgtggcggccctcgccgacgccgacgccaagagcgtctccccgcccgcatggccggacgacgacgacgacgacgtcgccgggagggacgactgggtccaccatctcccgccccttgacatgcacatgccgccgctcggcctcggcgccgcagaggcctgggagccccacgcgcaacctccgggtccgggcggcctcaccctctcgcacgcccagcagacccacgacagcaccttcctcggctggtttattgccgacgacgtcgccatgtcgggcgtcatggacgaccacaactcccactcggtacttcatgacctcgaccacataccctcttcctccgtgccgccgccgcagttccagcctctcgcgccccacgtgcactacccgcccaagctgcaccaccaccaaaaccccgtggtgcccgcgtcgcctcccaagcacacgctcctgaaacccaagccggaggcgccggggaccgacgacgcttccacggcggtggaccagctcgccgaggccgccaagcttgcgaaagccggagacgttttcggcgcccgcgagatactggcgcggctcaactacctgctcccgcggggggncgncgacggcgacgccactgctccgctc

SEQ ID NO: 138275 - DNA, 832 bp, Zea mays
  unsure (1)..(832): unsure at all n locations
  Clone ID: MRT4577_57582C.1
cattgggtacctcgaggccggccggggtcaagcgcgtcgtcgggatgcaaggggactccgtcacctaccttgtcgaccccggcaaaagcgactcctcctccagaaccgtcgtggtgagttggtcactaactgggctgggctgggcttttgggttcctacttcttgttaggtgctgcctccgtgatcggatttgtgctcaactgattgatgctgaatgagcattgttggtcttaaaaggagtttcagcagctgcttttagagacagtacatttttacacgcttcgagttgagatgcataggaattaggagacgtgtgtttttggtaattggtacctacttgcgcctgagactctagtctaggcaccaaagtcagggaggtgtttctatgagctctgcttcaaaactgtattatctgatgtctgtctgagccactggtggtgttggattggatcagtaatgagatgtggtgttactactgaccctaaaattaatcactactgatataattagatcctcaatgaattagaactatgtgctggtaaaaccttgcactatgctaccctcggtatatttaccccgccagaccagaaggtgcaatttctacacttctgtttcaacttataattgtagatgtcaatagcgcagagtttggcttatttaggtttgagttttcatagactgtcgacaccactggntggtgntgggtcagtatggagatatgatggttactaaccctaaattagttactactgggtataatttaagttctcgatgaattagaactacattgctggtaaatccttgcactatgctaccttcagtatatttaccc

SEQ ID NO: 138276 - DNA, 308 bp, Zea mays
  Clone ID: MRT4577_57583C.1
gttaagaaaaaagagagatatttcagatttaaggcgacgtagagtaaaattgggatttacggtggcaaggaacatattccttctgtccggggatccgcccccgtatatacaggttcttggttatgcaccacccctagacgtatatgaccaggctcggcaactgtattgcgttattccaagctgtcactagcgattcactcatcagtttgtcacgagccagattggcgcatcatgaaacttttgctgactgcccagggaggctagggtatcggtggggtggcttgccctcacccttacatcatattaca

SEQ ID NO: 138277 - DNA, 192 bp, Zea mays
  Clone ID: MRT4577_57584C.1
tttactggtatatcggtcatacctaccgagtgcccttttctaaaatacgtacgagcggacgtgtacgaatcaaaaaagcttgctattcccggcgtagactcagctctgggaggctactatcaactaaccctgtgggaggattctgatactcgcgattcggtcgttatatctcaagtgtctgtacgcgcatct

SEQ ID NO: 138278 - DNA, 214 bp, Zea mays
  Clone ID: MRT4577_57585C.1
cccgaagagttaagacaggcgacaaagtaattatgaactgtatccttggcccgaacccgaagggccgaagaaacctctattgcttcctaggaccaaaacgcatcgcagcagctcgtttacatgagctcgaaggacataaacgctgagcattatgtagggccaaagacggacgccaaacaacttttgttggtggcctgcgggtttagcagcctga

SEQ ID NO: 138279 - DNA, 285 bp, Zea mays
  Clone ID: MRT4577_57586C.1
gaattccaactggaacggtgtttcgaattaaagcaaattaactctggtactggtacattcgactcgaataggatccaaaaatactcacggcaatatcactggccacacaaagcagacatatagctatggataaattaggctggtgcattgcccagccaccaccatcgccagcaccccaggagaaggactgatcggaagtcacgcctagatctcattgaggactatctgtgcgctgagccagtgaacgagtacgtgcagagctgcgacatagttgccttcaacaag

SEQ ID NO: 138280 - DNA, 384 bp, Zea mays
  Clone ID: MRT4577_57587C.1
cgccacttgcttcgtgtagtcatcagacttctgatagccaccaatggcctctgtcggggtccagaccctgaccgtcatgtcggtcgcggaagcacccgtggtggagaccccgtcgctggccgtaatgctcttagagtctgcctccgtccaggcctaggccgaggccgtggttgctgattctgctgatccacgaaagcttcccgtggccgaccaggagcagccgtcttagcgagagccgcggctcctgctgatgcctaggagcctgtagtggacgaaccggtcaccgagctgaggctgttgatcctgctggacccgaggagacttctgcggttgaacaggcagcatccgcctaggatgaagctggtgctgatcctcctgctggtg

SEQ ID NO: 138281 - DNA, 279 bp, Zea mays
  unsure (1)..(279): unsure at all n locations
  Clone ID: MRT4577_57588C.1
accatgccgcagtgaatacttccactggggcgaagcctgttcgtgagcttgtctctgctgaccagtggcttaatggtgaattcatcaccgctgtccctcntcgtgtgtgctgccgtcttttaagctagtcagttctccagtgctctctcggctgcttgctctgtttgttacccccttcgtcgctgggttcttgtctcccctgncggtccatttgtttccataggtgtgctctctgatggttcattcggngttcctttcggtactcatttttttttttcc

SEQ ID NO: 138282 - DNA, 135 bp, Zea mays
  unsure (1)..(135): unsure at all n locations
  Clone ID: MRT4577_57589C.1
gtctctgtgctatcgctaggnttatctgctcgaggatggcgtcggtgcaggtctccggcgcgggggtcggtgccgcctctcttctctgtgaaggtccacacctcccgcgacaagaacacgatcaccctgaggaac

SEQ ID NO: 138283 - DNA, 356 bp, Zea mays
  Clone ID: MRT4577_57590C.1
aaaaaggtaaaaaaaaaattttttttaccccccataaaaaaaattgtttttaaacccccattacagggattggaaggggccttcaaaaatcccctaaaaaaattttcccggccgttccaatttggttaacccccacccaacggcccttttcccttccaaaggctcccttcgcttttgttcttttaaaaaaattaattcccccccccaacaaaaaaatggattatttaaactggatcccaaaaacacaaagaaaaaacggccccttctttctttttaacccccgggggcttaaaatggggaaaagggaacccccacaacctttccaaaaaggagggcctttacggacatttttaacc

SEQ ID NO: 138284 - DNA, 394 bp, Zea mays
  Clone ID: MRT4577_57591C.1
gcgtagatcgcgagcggctgccttttttttttttttttttgtttttattttttgtcttttttggggatttttggtggggtaaggacacttgaatttataccagaaaaagaagaaagagagagagagagagatgattcagcggaaatcctacaattgtgcctacatgttcctggatgttttacatgctaccatgcatgttattgcctagcttgattcgatctgtgcacactgactgccagaaccagcattaaaagcgtttgtagtcctagagggacttacgcaagctacgcaaccgaacgggtacgtactaacgctagctagtcagcccttcagatggcctttaactcgggggcaaaaagtcgttcctgtccaacgaccatggtaatatggtcct

SEQ ID NO: 138285 - DNA, 286 bp, Zea mays
  Clone ID: MRT4577_57592C.1
gtacgtaagctcggaattcggctcgagccataacaccatgcctatgctctcctctccacccggagagcggacacccccctgtcctcttgacccgatcccgtccccgcgcgcccggaatgcagtcgcacacgcgtgctcacgacgctggactgctggttggccggctgatgcatgagcagaggcctcgcccacagcctgtcgagccggactcattggccgagtaccgacgttcagccaaaggccaggagaaacgcacccggcagacagacgcaaggcgcacccaaag

SEQ ID NO: 138286 - DNA, 311 bp, Zea mays
  Clone ID: MRT4577_57593C.1
gatatttatttttttttttttttttatttttgggggggtttaatggagaatcgggcgcttactaacaaaaagcaggaaaaggacacacgcaccaggaaaacaaaggggctcccacaagaaagaaccataaaacacccaggcgaaggacaaggtaatacaccgcacggccaaataccctgcagatcaactggaaaccgagcaacgagcgcacacatgcagaaggacaggagcatgaaaaacagagggacacgccccaccgggtacaccccgaaggaaaaaggactgaaggagagaatggtttctcgctggtt

SEQ ID NO: 138287 - DNA, 129 bp, Zea mays
  Clone ID: MRT4577_57594C.1
acactgtgtaacgcttgatatcgaattaatatgtactgagaaagcattccgaacaaatatatatcggtaataaaagatagtcagcagcatagcatagacgaccgagtatctatcgtcaggcaaagggca

SEQ ID NO: 138288 - DNA, 324 bp, Zea mays
  Clone ID: MRT4577_57595C.1
gccccttctcaccactgggggcagaggcacatttatgttgtctgggcacccagacccctcgtaaaaaaggcgcacacactgagtatctgtgattctgaaccccaggccatggagacttctcgcacccatgccaatggcgtaaatgaaatgcacatacacattcgccctgagaagctactcactatgaggccagatgaccatcaaacgccagacataagcagtgccaatgagaaatctgagataacggacgctataaattccttaatgcttgatgggaaatagccaaatcaagaatcctctgtcaaggaagcagttctcactgct

SEQ ID NO: 138289 - DNA, 477 bp, Zea mays
  Clone ID: MRT4577_57596C.1
gggccccccctcgagttttttttttttttttttttttttttttttttttttttttttttttttttttttttttttttttttttttttttttttttttttttttgaaacaaccaatcttgttaaagttttaaaatggggggccttttcgggccttgaaccgcaaaaggcaaaaaagcctcccccaaacaggggccaacccatttgggaggcaaaaagcagcccccctgaaaaaaaaaattatatttcttatcctccaagtcccccccggggcaaaaggctttttattaggaccaaaaaccggcaaaccccttgggaggggggggggataaaaaaaaaaccctgaaattggaccctcaggggcccaaaacaaaaacacggggcccccagggggggcccaaaggggaaaccacccttggccctccctgcaggggcccctttttgggggggggaggggcgggaggaaaccccatttttccc

SEQ ID NO: 138290 - DNA, 784 bp, Zea mays
  unsure (1)..(784): unsure at all n locations
  Clone ID: MRT4577_57597C.1
atgccaagcttatctctctttttgatggtttgattgaagcgcctgcttcgagacaaatcagaattgatggggctctcaaggttggacagaaacgtggaagattggttgcagatctagaagaagatgaacaacctaaaaagaaggttagattagggaatcgctggggcgtagtcatgtcaaggaattcagggttctctactcaggttgtagagttggatttcctgtaccccagcgagggcatccaccggcgctgggagagcggctacaggataacttccacggcagccaccaacgaccaagccgctttcatcctgagcatgccgaaacggaagccgatggacgagacacaggaaacgctgcggacctccgccttccccagctcacacgtcaaggagaaatgggccaagaacctttacatcgcttcgatttgcttcgggcggaccgtgtgctgatcgcgcgcgcctgggaaatggaagtcgaagcgagggcccccgatccggtacggtggcgcctcgcatcaagagatgcaaaatggggcgtcaagtcgaaaccagttttaatgataggatcagtgtatctttgaagatacggtatgggttaccctaccgtatttgtaaagtaatgatgccggccgaacgacctttcctaacgcgtttgggcagaaattcgttgctgtccccatattttgacgggagtttttccccgtgttgtcggtagaaatttgcgaaaaaaaaaaaaaaaaaaaaaaaaaaaaaaaaaaaaactcgaggaggggnggcggtac

SEQ ID NO: 138291 - DNA, 554 bp, Zea mays
  Clone ID: MRT4577_57598C.1
tcagtgacgccttctgattctgcgccgccggcgccgccactcgtccgcagatgggcaaggcgggcaagtggctcagaagcttcctcccgggcagcaggaggggcagggacaacaaggccggggcgctcgcgccggcgccggagcccgacctggcgctgacgctgccgggagtcgccacgacgccagggtccactcccggcgccaaggagaagcggaggtggagcttccgccgcccggccgcggcggcgtcgcccgggcccgggtcggcggccaaggacgccgcgcggggccgcctcgcgccctacggcttccttgagccgcgggtggacccggaccagcacgccatcgccgtcgccatcgccaccgccgccgcggccgaggcggccatggcggctaagcaggccgccgccgtcgccgctaggctctccgcgtccgcgccggggtccaagcgcaccgtcatcggcatcgaggaggccgccgcgataaagatccaggccgtcttcagatcctacctggcgaggaaggcgctgtgcgcgctgcgcggactcgtcaag

SEQ ID NO: 138292 - DNA, 3032 bp, Zea mays
  Clone ID: MRT4577_57599C.1
tatttcggcacgaggcaatggggagggcgggggggggaccaggagctccacaacaattcgtgcctgcctgcctgcctcggcctcctccctcgtcctcccctcctacgccgcctcaaacccggcccccacgcgcgcgtgcgcggcgctcgaggcgacgaatccagccacctcctccgcgcccgtccccgccgccggtcgccgatttggaaggagctcggaaggctggggcgctgacctgaattttatggggagaggatgccagagctgcgaagcaatactcgtcaagcacgcttaaggtctaagaagcttgacgatctgcagccaggagagccgcttgcgaaaccggtgtcacctgctctgccgagcgcacggaagcgtgctcctacacgtgctgctaggggcagaaagggtgctgctgggagaggagtgcctcccgcaccaaagcctagaagaaagggggttgatattgtcgtcttagaagctgatcctgcttgtgaaaccccacttaaagctttcaagggactggaagttgctgctgctgcacccaagaaccttcctttgaagcaggtagccgaagttggtgttccgaaaatgaatggtgaaagtggggagaagattgttggggctgaagatgaatcgacagctacacctgtcccagaaagggttcaagtaggtaattctccagagtacataactgacaggaagttaggtaaaggtggttttggtcaggtgtatgttggtcgaagggtttctggtggtgctgctcgcactggtcctgatgcatatgaggttgcattgaaattcgagcatcgtaacagtaaaggatgcaattatggccccccatatgagtggcaagtttataacactctcaatggttgctatggcataccatcggtccactacaagggtcgtcagggcgaatactatatacttctcaacaatgtttattcacttaactttttttcagcttctagactaaacgagtcaacaatctcaaacaggatgactccaaatatggctgcttgcattgctgtagagagcatatcgattcttgagaagctccattctaaagggtttgtgcatggtgatgtgaaaccagagaattttctgcttggtcagcctggatcgcctgaagataagaagctttaccttatagatcttggtttagcatccaagtggagagagaataatggtcatcatgttgattatgatcaacggcctgatatctttaggggaacaattagatatgcgagtgtccatgctcatttggggcgcactggtagtaggagggatgatttagagtcactggcatacacccttattttcctgataagaggaagattaccttggcaaggctaccagggagataccaagagtttccttgtttgcaagaagaaaatggctacttctccggagatgctttgttgttattgtccagctccattcaaacagtttcttgagattgtcacaaatatgaaatttgatgaagagccaaattatgccaagcttatctctctttttgatggtttgattgaagcacctgcgtcgagacaaatcagaattgatggggccctcaaggttggacagaaacgtggaagattgcatgcaaatctagaagatgaacaacctaaaaagaaggttagattagggagcccagcggctcaatggatttcagtttataatgctaggcgacccatgaagcagaggtaccattacaatgtggctgactcaaggctaagtcaacatatagaaaagggtaatgatgacgggctttacgttagttgtgtggcttcctcggcaaacctttgggcactcatcatggacgctggaactggtttctgttctcaagtttatgagctctcaccagtttttctccacaaggactggataatggagcagtgggagaaaagctactacataacagcaattgctggatcatccaacgggagctcattggttgtcatgtccaaaggaactccttacacccagcaatcatacaaggttagcgagtcgttcccttacaagtggatcaataagaagtggaaagaagggttccatgtgacatccatggccaccgctgggaatcgctggggcgtagtcatgtcaaggaattcagggttctctactcaggttgtagagttggatttcctgtaccccagcgagggcatccaccggcgctgggagagcggctacaggataacttccacggcagccaccaacgaccaagccgctttcatcctgagcatgccgaaacggaagccgatggacgagacacaggaaacgctgcggacctccgccttccccagctcacacgtcaagatctcgctgccatttgcatctcctgtcaccgttccaagctgaggttgcagtctagaaacaacctaatattacgggctaaccgtgtgctaatgcggcgcacgtgggaaatggaagtcaaagcccctcgcatcaaaaaatgcgagatggggggtcaagtcgaaaccagttctaatgataggatcagtgtatctctgaaaatacggtatgggttacccccccgtatttgtaaaaaaaaaatgccagccgaacgacctttcctaacgggtttgggcaaaaattcgttgctgtccccatattttgacaggagtttctcccgttatctatctttgaaaaaaaaaaaaaaaaaaaaaaaaaaaaaaaaaaaaaaaaaaaaaaagtgctctcaaggttggacagaaacgtggaagattggttgcagatctagaagaagatgaacaacctaaaaagaaggttagattatggagcccatcggctcaatggatttcagtttataatgctaggcggcccatgaagcagaggtaccattacaatgtggctgactcgaggctaatccaacatatagaaaagggcaacgatgatgggctttacattagcagcgtgactttctcagcaaacctttgggcactcatcatggacgcatgaactggtttctgttctcaggtttatgagctctcaccagttttccttcacaaggactgtataatgaagcattt

SEQ ID NO: 138293 - DNA, 295 bp, Zea mays
  Clone ID: MRT4577_5759C.1
ccctatttcagattgaataaaccgaatgacaggataaagggatcatgtccggggtgtggggatttataacattaataaggttcttgaaagaggtgatcgtatagaactgctgggggacaagactgcaaatatgcaaggaaagacagctcgatacaagagacacgctcggcggtccagaaacactgtgttggtggagaaatgccaaactcacggacggattgatacttcccctactgggaataatatatgtccttctagacttcgtgtgccatggactcaccctaccaacttgcat

SEQ ID NO: 138294 - DNA, 623 bp, Zea mays
  Clone ID: MRT4577_575C.1
gcagcggcaagtccacgcagatccctcagtaccttaaggaggctggttgggctgacggtggtcggcttataggatgcactcagcccagacgactggctgttcagatggttgcatcaagacgagctgaagaagtaggtgtaaagcttggagaagaagttggttataccatccgattcgccgatcaaacaaacccgggtatgaccatgataaaatttctcacagatggggtattgattagagagatgatggaagatcctcttcttaccaagtatagtgtaattatggtggatgaagctcatgaaaggtccatctcaaccgacatgttgctgggtctcttaaaaaagattcaacgtcgtcggcccgagttacggcttattatctcctctgcaacaattgaagcaagatcaatgtcaaccttcttcaacattaggcgaaagaattctttgcttgggtcttctgataatttgcccagcccagaacctgctgtactttctgttgaaggtaaaggatacaccgtggaaatccattatgttgaagaacctgtctcagactacttacaggctactgtgaatactgtacttcttattcacgaaaaggaaccaccaggggatatcttggtattc

SEQ ID NO: 138295 - DNA, 226 bp, Zea mays
  Clone ID: MRT4577_57600C.1
agcagtggtaacaacgcagagtaccgggtactctatgcaagctaagagtgacagctgtgtttcagtcacatatatgatctagtctgtgtgtcaatgtgtcgaaaaacatgtctgtgattttgttatatgaatgtaacgcgcaatgaaacaaaaaaaaaaaaaaaaaaaaaaaaaaaaaaaaagtactctgcgttgttaccactgctaagggacgaatcccagcaca

SEQ ID NO: 138296 - DNA, 2956 bp, Zea mays
  unsure (1)..(2956): unsure at all n locations
  Clone ID: MRT4577_57601C.1
gcgcccacgcgtccgcccacgcgtccttccacgcgtccgggctgactcaaggctaagtcaacatatagaaaagggtaatgatgacgggctttacgttagttgtgtggcttcctcggcaaacctttgggcactcatcatggacgctggaactggtttctgttctcaagtttacgagctctcaccagtttttctccacaaggactggataatggagcagtgggagaaaagttactacataacagcaattgctggatcaaccaatgggagttcattggttgtcatgtccaaaggaactccttacacacagcaatcatacaaggttagcgaatcgttcccttacaagtggatcaataaaaagtggaaagaagggttccatgtaacatctatggccactgctggaaatcgctggggcgtagttatgtcaaggaactcagggttttctactcaggttgtagagttggacttcctgtaccctagcgaaggcattcatcggcgatgggagagtggttacaggataacttccacagcggccaccaatgaccaagctgctttcatcttgagcatgccaaagcggaagccgatggacgagacgcaagaaaccctccggacctctgcctttcccagttcacatgtcaaggagaaatgggcgaagaatctctacatagcctcgatctgctacggacgaacagtgtgctgatagtcgaagagaggggcggccccactgactgagtacggtggcttgcgtcaagagattagagatgtgagatgaacatttaatcaaaatcagctctaatgatgataggatcagtagatctgaagatacggtatggtatcctcccgtagctgtaacaaaatggtttacccagctaggcgcacgagggaagttaggtaaaggtggttttggtcaggtctatgttggtcgaagggtttctggtggagctgcccgcactggtcctgatgcatatgaggtcgcattgaaattagagcatcgaaacagtaaaggatgcaattatggccctccatatgagtggcaggtttataacactctcaatggttgctatggcataccatcggtccactacaagggtcgtcagggcgactactatatacttgtaatggatatgcttggtcccagcctttgggacgtgtggaattcaatggggcaggcgatgactccaaatatggctgcttgcattgctgtagagagcatatcgattcttgagaagctccattctaaagggtttgtgcatggtgatgtgaaaccagagaattttctgcttggtcagcctggatcgcctgacgataagaaactttatcttatcgatctcggtttagcatccaagtggaaagagaataatggtcatcatgttgattatgatcaacggcctgatatctttaggggaacaattagatatgcgagtgtccatgctcatttggggcgcactggtagtaggagggatgatttagagtcactggcatacacccttattttcctgattagaggaagattgccttggcaaggctaccagggagataccaagagtttccttgtttgcaagaagaaaatggctacttctccagagatgctttgttgtttctgtccagctccattcaaacagtttcttgagattgtcacaaatatgaaatttgatgaagagccaaattatgccaagcttatctctatttttgatggtttgattgaagcacctgcgtcgagaccagtcagaattgatggggccctcaaggttggacagaaacgtggaagattgcatgcagatctagaagaagatgaacaacctaaaaagaaggttagattagggagccccagcggctcaatggatttcagtttataatgctaggcggcccatgaagcagaggtaccattacaatgtggctgactcgaggctaagccaacatatagaaaagggcaacgatgacgggctttacgttagctgcgtggcttcctcggcaaacctttgggcactcatcatggacgctggaactggtttctgtccccanggtttacgagctctcaccagtttttctccacaaggactggataatggagcagtgggagaaaagttactacataacagcaattgctggatcaaccaatgggagttcattggttgtcatgtccaaaggaactccttacacacagcaatcatacaaggttagcgaatcattcccttacaaatggatcaataaaaagtggaaagaagggttccatgtaacatctatggccactgctggaaatcgctggggcgtagttatgtcaaggaactcagggttttctactcaggttgtagagttggacttcctgtaccctagcgaaggcatccatcggcgatgggagagtggttacaggataacttccacagcggccaccaatgaccaagctgctttcatcttgagcatgccaaagcggaagccgatggacgagacgcaagaaaccctccggacctctgcctttcccagttcacatgtcaaggagaaatgggcgaagaatctctacatagcttccatctgctacggacgaaccgtgtgctgatagtcgaagagaggccgcgctgactcagtacggtggcttgcgtcaagagattagagatgtgagatgaacattaaatcaaaaccagttctaatgatgataggatcagtagatctgaagatacggtatggtatcctaccgtagctgtaaagaaatattgtaccacccagtgccggccgcgagaccgttactgccatgaagtgaagctaatgcattttggagtctcttcccgggcgggaacaaaaaaaaaaaaaaaaaaaaaaaaaaaaaaaaaacgcgtttgggcaaaaatttgtttctgtcccctttaaaaaaaaaaaaaaaaaaaaaaaaaaaaaaaaaaaaaaaaaaaaaaaaaaaaaaaaaaaaaaaaaaaaaaaaaaaactcgagaggggggcccgtgtacc

SEQ ID NO: 138297 - DNA, 236 bp, Zea mays
  unsure (1)..(236): unsure at all n locations
  Clone ID: MRT4577_57602C.1
aataacgcgccgccaggggcaagagcaagaggagcaagggcggacgaggcggcggcggcggcgccgatgacaagctngacggcggnggcgaagccgataccgngaccaccatgaccagtgggctgccagaccttcagctcgcgcaggccacagagcatgccagcccgcaggaattcgttcttgacaagtacgccgacgctctctatgagaagaggggacccacaagagaggaagca

SEQ ID NO: 138298 - DNA, 1213 bp, Zea mays
  Clone ID: MRT4577_57603C.1
tcgcgggtcgacgcaagcctctacggacgcgtgggcggacgcgtgggtgcaaatctagaagatgaacaaccttgatggggccctcaaggttggacagaaacgtggaagattgcatgcaaatctagaagatgaacaacctaaaaagaaggttagattagggagcccagcggctcaatggatttcagtttataatgctaggcgacccatgaagcagaggtaccattacaatgtggctgactcaaggctaagtcaacatatagaaaagggtaatgatgacgggctttacgttagttgtgtggcttcctcggcaaacctttgggcactcatcatggacgcaggaactggtttctgttctcaagtttacgagctctcaccagtttttctccacaaggactggataatggagcagtgggagaaaagctactacataacagcaattgctggatcatccaacgggagctcattggttgtcatgtccaaaggaactccttacacccaacaatcatacaaggttagcgagtcgttcccttacaagtggatcaataagaagtggaaagaagggttccatgtgacatccatggccaccgctgggaatcgctggggcgtagtcatgtcaaggaattcagggttctctactcaggttgtagagttggatttcctgtaccccagcgagggcatccaccggcgctgggagagcggctacaggataacttccacggcagccaccaacgaccaagccgctttcatcctgagcatgccgaaacggaagccgatggacgagacacaggaaacgctgcggacctccgccttccccagctcacacgtcaaggagaaatgggccaagaacctctacatcgcttcgatttgcttcgggcggaccgtgtgctgatcgcgcgcgcctgggaaatggaagtcgaagcgagggccaccgatccggtacggtggcgcctcgcatcaagagatgcgagatggggcgtcaagtcgaaaccagttctaatgataggatcagtgtatctctgaagatacggtatgggttaccctaccgtatttgtaaagtaatgatgccggccgaacgacctttcctaacgcgtttgggcagaaattcgttgctgtcaccatattttgacgggagtttctcccgtgttgtcggtagaaaaaaaaaaaaaaaaaaaaaaaaaaaaaaaaaaaaaaaaaaaaaaaaaaaaactcgtga

SEQ ID NO: 138299 - DNA, 1918 bp, Zea mays
  unsure (1)..(1918): unsure at all n locations
  Clone ID: MRT4577_57604C.1
cccgggcctttaggggaaacaattagatatgcgagtgtccatgctcaattcgggtgcactggtagtaggagggatgatttagagtcactggcatacacccttattttcctgataagaggaagattaccttggcaaggctaccagggagataccaagagtttccttgtttgcaagaagaaaatggctacttctccggagatgctttgttgttattgtccagctccattcaaacagtttcttgagattgtcacaaatatgaaatttgacgaagagccaaattatgccaagcttatctctctttttgatgggttgattgaagcacctgcttcgagacaaatcagaattgatggggctctcaaggttggacagaaacgtggaagattggttgcagatctagaagaagatgaacaacctaaaaagaaggttatattagggagcctagcggctcaatggatttcagtttataatgcttggtggcccatgaagcagaggtaccattacaatgtggctgactcgaggctaagcatgatgggctttacattagcagcgtggcttcctcggcaaacctttgggcactcatcatggacgcaggaactggtttctgttctcaggtttatgagctctcaccagttttcctccaaaaggactggataatggagcagtgggagaaaagctactacataacaacaattgctggatcatccaacgggagctcattggttgtcatgtccaaaggaactccttacacccagcaatcatacaaggttagtgagtcgtttccttacaagtggatcaataagaagtggaaagaagggttccatgtgacatccatggccaccgctgggaatcgctggggcgtagtcatgtcaaggaattcagggttctctactcaggttgtagagttggatttcctgtaccccagcgaaggcatccaccgacgctgggagagcggctacaggataacttccacggcggccaccaacgaccaagccgctttcatcctgagcatgccaaagcggaagccgatggacgagacccaggaaacgctccggacctccgccttccccagctcacacgtcaaggagaaatgggccaagaacctctacatcgcttcgatctgctacgggcggaccgtgtgctgatggcgcgcacgtgggaaatggaagtcgaagcgcctcgcatcaagagatgcgagatggggcgtcaagtcgaaaccagttctaatgataggatcagtgtatctctgaagatacggtatgggttaccctaccgtatttgtaaagaaataatgccagccgaacgacctttcctaacgcgtttgggcagaaattcgttgctgtcgccatattttgacaggagtttctcccgtgttgtcggtagaaatttgcgcgtgcactcttcccgttttggggcccatgcaatgtgtttcacccgatgtatcgctgggctgcctgtgtcgtgagcctcaatggcattttattttgagagacgtagataaattgaattggttgaatatttagagctcagccagtcaaggcccgattagcttctctttttgagatacaattcccgggctatgtcagtagcaacgtatctaatactccagtcgttccaaaatataattcgtttaaattaatctctactactctataagctcttattgtaggcatccacagttatcggttctgccccgcagcccgtcagcccccgcggtattttcggagctaagaatattgtgaaggaacttattaaaaaggcacatgataagcatttggaagctgagctaggtcgcgacatgatgcatggaattgttttaaaatagagtgaacctcagattcttatcaaagctcgtgatgttgctaggagcagtgctcgaaatagctngtctgaaaggataatntgaagtctatgggtcact

SEQ ID NO: 138300 - DNA, 1001 bp, Zea mays
  unsure (1)..(1001): unsure at all n locations
  Clone ID: MRT4577_57605C.1
ccattttcctccacaaggactggataatggagcagtggngagaaaagctactacataacagcaattgctggtcatccaagggagctcattggttgtcatgtccaaaggactccttacacccaacaatcatacaaggttagcgagtcgttcccttactaagtggatcaataagaagtgggaaagaagggttccatgtgacatccatggccaccgctgggaatcgctggggcgtagtcatgtcaaggaattcagggttctctactcaggttgtagagttggatttcctgtaccccagcgagggcatccaccggcgctgggagagcggctacaggataacttccacggcagccaccaacgaccaagccgctttcatcctgagcatgccgaaacggaagccaatggacgagacacaggaaacgctgcgccgccttccccagctcacacgtcaaggagaaatgggccaagaacctctacatcgcttcgatttgcttcgggcggaccgtgtgctgatcgcgcgcgcctgggaaatggaaatcgaagcgagggccaccgatccggtacggtggcgcctcgcatcaagagatgcgagatggggcgtcaagtcgaaaccagttctaatgataggatcagtgtatctctgaagatacggtatgggttaccctaccgtatttgtaaagtaatgatgccggccgaacgacctttcctaacgcgtttgggcagaaattcgttgctgtcgccatattttgacgggagtttctcccgtgttgtcggtagaaatttgcgcgtgcactcttcccgttttggcgcccatgcgatgtgtttcacccgatgtatcgctgggcttcctgtgtcgtgactcgagccgcaatatctggtggcctgccgactccggttggcattttattttgagagacgtagataaattgaattgattgaatatttagagctcaaaaaaaaaaaaaaaaaaaaaaaaaaaagtactctgcgttgttaccactgct

SEQ ID NO: 138301 - DNA, 1575 bp, Zea mays
  Clone ID: MRT4577_57606C.1
aaaaaatatctccccccttctttgttgttgttgatatgtggcacccaaaattatacaacatccaagtggagagagaataatggtcatcatgttgattatgatcaacgacctgatatctttaggggaacaattagatatgcgagtgtccatgctcatttggggtgcactggtagtaggagggatgatttagagtcactggcatacacccttattttcctgataagaggaagattaccttggcaaggctaccagggagataccaagagtttccttgtttgcaagaagaaaatggctacttctccggagatgctttgttgttattgtccagctccattcaaacagtttcttgagattgtcacaaatatgaaatttgacgaagagccaaattatgccaagcttatctctctttttgatgggttgattgaagcacctgcttcgagaccagtcagaattgatggggccctcaaggttggacagaaacgtggaagattgcatgcaaatctagaagatgaacaacctaaaaagaaggttagattagggagcctagcggctcaatggatttcagtttataatgctaggcgacccatgaagcagaggtaccattacaatgtggctgactcaaggctaagtcaacatatagaaaagggtaatgatgacgggctttacgttagttgtgtggcttcctcggcaaacctttgggcactcatcatggacgctggaactggtttctgttctcaagtttacgagctctcaccagtttttctccacaaggactggataatggagcagtgggagaaaagttactacataacagcaattgctggatcaaccaatgggagttcattggttgtcatgtccaaaggaactccttacacacagcaatcatacaaggttagcgaatcattcccttacaaatggatcaataaaaagtggaaagaagggttccatgtaacatctatggccactgctggaaatcgctggggcgtagttatgtcaaggaactcagggttttctactcaggttgtagagttggacttcctgtaccctagcgaaggcatccatcggcgatgggagagtggttacaggataacttccacagcggccaccaatgaccaagctgctttcatcttgagcatgccaaagcggaagccgatggacgagacgcaagaaaccctccggacctctgcctttcccagttcacatgtcaaggagaaatgggcgaagaatctctacatagcttcgatctgctacggacgaaccgtgtgctgatagtcgaagagaggggcggctgcgctgactcagtacgatggcttgcgtcaagagattagagaaatgagatgaacattaaatcaaaaccagttctaatgatgataggatcagtagatctgaagatacggtatggtatcctaccgtagctgtaaagaaatgttgtacccagtgccggccgcgagaccgttactgccatgaagtgaagctaatgcattttggagtcaaaaaaaaaaaaaaaaaaaaaaaaaaaaaaaaaaaaaaaaaaaaaaaaaaaaaaaaaaaaaaaaaaaaaaaaaaaaaaaaaaa

SEQ ID NO: 138302 - DNA, 268 bp, Zea mays
  Clone ID: MRT4577_57607C.1
actcaccatttaattatgaacagccgctacctatatatataatattcgccttcttttttggggctaaaaaaaaagaggaggaaaaaacaaaaaaaaaaaaaaaaaaaaaaaaaaaaaacaaaaaaaaaaaaaaaaaaaataaataaaatcatcaaacacttattaacaaggggggggcccttttaaaggaccaaagttaccttacgcggcgaggcaaggtcatagtttttttatggggtcccccaaatctaattcacgggccggggtt

SEQ ID NO: 138303 - DNA, 417 bp, Zea mays
  Clone ID: MRT4577_57608C.1
ggggttacaaaaaaaaaaccctcccgtcctaagctggggcgacggggtgggaacaccctggggggggtctctgggttttcaggctaggaaaaaatgggggggggttagcccttggggctacaaaccaaaaatactatctacccgggggggatttcgggggggcgggtctggtcaagggggccatgcgggcaggacacgggaagggatatatagaatcggggggggtttttatttcgagcccctggacaaaacgggggggcctcaaataaaggaagggccggttcaaagcccgccaccctatacgggggttattgaagagacagcaagccctctttgggggggggtaaagggttttgaaggcccccaaacaaggatttcctgggacccaaaaaaaagggggggtttccacctgggggg

SEQ ID NO: 138304 - DNA, 449 bp, Zea mays
  unsure (1)..(449): unsure at all n locations
  Clone ID: MRT4577_57609C.1
tagtccaccatgctaacggtctcgccggcgcctcaagggaatccgcgacgatggggcccatgcggagtcagcaccgcatccacgtcgagccttattcggccacacggccgtcggacggctcgtctccgctgnatccaggtaggtacgaccggttcggtcgccttccctgcgcttgctcctgtggccaccgagcccgcagcaaggtctcccgatccaacagccttcgtcactgtccagcgacgaggagatcgggcttcggttcgggaactatcgaccggtctggggcatgttcgcagtaagctaaagctaaacgctccatccgaaacacgcctgcttaaaatcgatcaagtggcanagttgtcaaatctgataaataaacaccatgtggctactagaagaggtgaccactgagaacgactggaggacgcggggaaagctgtggaagcagc

SEQ ID NO: 138305 - DNA, 381 bp, Zea mays
  Clone ID: MRT4577_57610C.1
cggcccgaaatccccgggccgaccacacccgtccggcaatccaactgcaaccaatttggttccaaaatattactgcttgtccaaatcaatttttttagctcgcccagaaaaagggggggggacgccaaaataaccttaaaaaagcagtacacgggcttttccaactacccatccaatttaaacctcttttcaaattccccgaacccttcttccaaaacaaagctaaaattctttttttacctggccaacccaaagcctgcttcctccttttccgggagccctaactgaaacctggcgaacccgatgatctaaaaccggttgaagcaactgaaggacaaaggcccgtggttattgcccccaaacgccggggccaaccccatt

SEQ ID NO: 138306 - DNA, 554 bp, Zea mays
  unsure (1)..(554): unsure at all n locations
  Clone ID: MRT4577_57611C.1
gaagcgcgcccgtcagcatcctcgcgggctccggccgcgcggcagcgcagcaggccgacagggacaaggcggccacggcggcggaggcgaggaancgaaggaaggagctcaccaagctcaagcacatgnangnngnntcngccgccggctttgcccccgccccggtggcgagcagtggtagggcggattatggaaatggaatgacagggcatgcacggcattggtgacacggtggtggtgacccccattggtttcctcggcggcgaactaaacaacttcgttcgtggtctcttctttcgatccattggtttctcaagcgaggcggcagcacggcttcagtcaggtttctcaagcgccccaaccaaggatttcatttcaggtttcaaggaaatgttttctgtttttttcttcctagtattctttgctgcaatatgtaactgaagaaattgaacgagagtgctcatcagtcagaggtcgtgtataatgtaaccattctttctttaggatttttatactaccagcaagcagcatcaaagacagtagtacaatatgac

SEQ ID NO: 138307 - DNA, 567 bp, Zea mays
  Clone ID: MRT4577_57612C.1
cccccgggggctttaacgattgcttctttaatggctggcgccgagctgctcgaggggggtgccggaaccagcacacaacagggcgtgcggagcatcatcaccctgcccatgttccagagcatgctcagccaccgcggagacagcgggtgccagggcgccttatacacctacgacgccttcatctaggtatctcagcaagagccgcggggggggcacctcttttgacgagcagacgcacatgcggatagctctgcgccttattaggccatacgtcccacaaaaccaccgccttgatggctcgactgctaagtatggaccgtttgcctggggatactggctggtgaaggaacacaaacagacggacccaccctagtatggacgacgacccatacacctaactcataagtacaactacaagctcgccggacaagacactgaacctgaacctgcagagcgacccggacctggtggagagagaccacctggtagccttcaagacggacatctgattctggatgaccccagaatcgcccaagccctcttgccacaacgtgatgaccgacgact

SEQ ID NO: 138308 - DNA, 844 bp, Zea mays
  Clone ID: MRT4577_57613C.1
ctcagcagacaagcagctagaggtatgcatgtgtccatccatctctctctcagcagtcaggaagagacaacccgttcatattctatgctagctttgtgtatgtatgtgtatggatggagcactggccactgggtacgtatatcatcacatgaattttgatttgttattctatatatgcttgtagctagtaccatgcgtacatgcttgcagcatcctatacaaaaagacgttctttaaaataaaaataaaaaaaactagcagaggatcagctgacttgtgggaccgcccgcgcagatgtatgctctatgtcgtcactggctaggagaaagacatatccacctgcacttgacagcctgcgtttggaagcatttgctatccttgctactacggtgccaacaggccggcccaaggccttggacccatctcctgtactgtacaaacgccttggtttggtttgctttttatttatctgttggtggtgatggtgaagctaggtcgtcgttatcgtcgtcgtcgtcgttcacttgagctgcatggcctccaatggcctccccagcagggacagcacggtggcggcgatgtgccgcggcgtcagccctgcctcctcgatctggtcctgcggtgcgccatggtcgatgtaccggtccggcaggaacatggatctcagtttgaggggcccgtccaggaggccggtcaggctgaggtagtgggcgacgtgggagccgaacccgccgatggatccctcctcggcggtgatcagcacctcgtgctcggcggcgagctcccggatcagcgccgtgtccagcggcttgcagaaccgggcgtcggctaccgtcacgtacac

SEQ ID NO: 138309 - DNA, 286 bp, Zea mays
  Clone ID: MRT4577_57614C.1
cggagaaaagcagcagcaagagtagagtgtataaatacattatgcacacgatgcactcagcactcaggacttgctcgaagctcaacgtcggaaagcctttcttggggccaacccaaagttcccccccttgggtgggcctttaacccggccccccaaaaaaaaaaaatatcgggggggtttttttttttggggggggggggggggccccttttctttcttcggggcgcccccaacaaaaaaaaatgggggggggggggcgtaaaaaaaaaccctttttttggggggg

SEQ ID NO: 138310 - DNA, 273 bp, Zea mays
  Clone ID: MRT4577_57615C.1
agcagagttgcggcggcgcgacagggaccacgcggatcgtgtgcacggggcagcccacgaacacgaaggcgatggatggaccatcccgcgcttggctgttagatccctcggccgcttaccaccgctgccctgcgggcccgggcctctcttccctggacgcaccgtggcgttgcgcgcgtctacgacggtggcatcgtcggcttgcttttgcggtgatgcagctcagagaattgtaattaaattaaaatgaagagcgtttaacatctgagcgca

SEQ ID NO: 138311 - DNA, 323 bp, Zea mays
  Clone ID: MRT4577_57616C.1
ggaaaaaaagggggtcaacccatgcgtttttttttttttattacaatgattttttttactgggtgctagctagctggaactagtcagtaaacttttggtttacttttggggagggggcaaccccaatctttttttggggacaatctaccctctccgggaccctggggtccaacgggacccccttcccttacaagggaaggttggccccggggtcaaccggagcctgcgggaaatcctgttgggatgtcccaacgcgcgcttttttggggggggggtttcccccattaccctagggggccccttatggcccccttgggggggcc

SEQ ID NO: 138312 - DNA, 370 bp, Zea mays
  Clone ID: MRT4577_57617C.1
agattccaaactacaagtcaacggtctggagtgctctgctcatgcttccgggagtatctggtatatcgcatgtctaagtagtgtgacaatatagcaagctgtatgtatgcattgtcgatctccggagctgtgcgtcatctgacgttgcttgtcgtccggtgtcaagtcgcgtcaggctcattgtgtggggacgcgtgggtcgacctagcgggggggcccggtcctcttttcgccatactggacgttgttctgtaacatcctccctgactccgaacccgttgctgtgttccaccaggagttcattaacgtcgaacttctctcgattacattgggaagcaactcgtctttctgttcttctaccccttggatt

SEQ ID NO: 138313 - DNA, 362 bp, Zea mays
  Clone ID: MRT4577_57618C.1
cccgtcccgccgacgtcgcctcaccgccgccggagaagatgggtcgcgtgatccgcgcgcagcgtcaaggctgcggggtctgtgttcaagtcccacaccgaccaccgcaagggcccctcccgcttccgctccctcgacttccgcgagcgcaacgggtacctcaagggtgttgtcaccgacgtcttccaccaccccggacgtggggcgccgctcgccaaggttactttccgccgcccattctggtacaagccccacaaagagctctttgtcgtagccgatggcatgtacacgagaaagttcaacgacagtgttttttttttcaccccctcccccctaacgggatgtccctccgcgggatccct

SEQ ID NO: 138314 - DNA, 197 bp, Zea mays
  Clone ID: MRT4577_57619C.1
ggaaccaaagcgttatttttatcggcatatgggggggggggccctctacttgacagaatgaatcttaaggccctagctctcgtcgggtgtactattggtacaacaacaaaacctgaatcacccacaaaaaaaacgggccacatattacacaaacaggaaaaaagggccctccccccctggggccctttttccatggc

SEQ ID NO: 138315 - DNA, 141 bp, Zea mays
  Clone ID: MRT4577_57620C.1
cctgctcctgccggactgcaggaatgtcgttactcagcctagcaaaccgcttggcccagcgaacattcctgaaacacccttaactctagatggcatactttctgctatagactgccagttcctcaatcataaagttacaac

SEQ ID NO: 138316 - DNA, 388 bp, Zea mays
  Clone ID: MRT4577_57621C.1
gcttgttctcttcgtgcccgacaagccaatcggagccgagatacggccatggactccaccggcaccggagcaaggggtaaggggaagaagggagcggccgtgcgcaaggtcagcggaccaaggcagaagtcggagtcgaggtccgtgaaggccgggctgctgctacccgtcagtcgcatcgaccgcaactggagaaagggccttaaccacaaggggttgggagccgtgcccacgatttacctaacggttgacctgaattccttggcgctgatgttcctgaagctagctgttaaggctaccggggccaccaggaaacccggatttattccgcgccacgtgctcctggcaacccgaaccaacaggaagctcgagaagctgttgggcggct

SEQ ID NO: 138317 - DNA, 215 bp, Zea mays
  unsure (1)..(215): unsure at all n locations
  Clone ID: MRT4577_57622C.1
gttntgggggggnnncggatatacttttagcaaacaaatggaacttcaattcaccatacaatacacgcactcgtacatacatattcattctactactcgcactgggcacaacacttgagcagcaacagagagatgctcatccttttcctttttattaattattaaacgggctttctatataatccaaaggttggacttggtccttaaaggttggg

SEQ ID NO: 138318 - DNA, 351 bp, Zea mays
  Clone ID: MRT4577_57623C.1
tgggtggctacaccagtgagcttaaccgtattagaagagcgcggacgacacctgacgtcacgaggatctgccctaccttaccggttcagaacaggcaccagaccatgtcgcaaatcaggacgcctaacctgaccgaacgattgatgatgacgagcatgaagtgaccaacggtctcgacgatcttgatgtcggaactgatgatgccgcaatgagcctgcgacgccgcctccctgatatgccgcagcagcacgttaccattcatgttcaacccaatggccatgacgattccacccatgttcttacagcaaccctttgttggtgctgcattctaaatagaaacatttgcgttgc

SEQ ID NO: 138319 - DNA, 688 bp, Zea mays
  Clone ID: MRT4577_57624C.1
gtgaaactccctcctcatctggtcccggcacggcagtgaattcggcacgactctctcgggcccccggcgtagcagtctctgtctctcttcaccctcctcccttcccttcccttcccttcccttctcgcgcctccacaactgcccgcccgcccgcccgcccgctaacaccatgggcaccacgtacaagtgctgcttcatcttcaagcgccggttccacacccgcgacgcgccgccgcccgaggacgtccgcgcccttttctccgtccacgccggcgggggaccccacatgggcgccgacgatctgcgacgctacctggtggccacgggccaggaggaggccgaggtggagcggctgctggagcagatcgtccagggccgtgcccgcgtcccgcgcctcgcccgcccgctcctctcgctcgacgacttccaccgctacctcttctcgcacgacctcaacccgcccatccgtcacccgcaggtgcaccacgacatgacgcgcccgctctcccactacttcatctacaccggacacaactcctacctcaccggcaaccagctcagcagcgactgcagcgatacccccatcatcatggcactggagagagggggcagggtcatcgagctcgacatgtggccaaattcaaccattgacgacatcaacatcgtgcacgggaagacactgacaacc

SEQ ID NO: 138320 - DNA, 290 bp, Zea mays
  Clone ID: MRT4577_57625C.1
acgcggacgcctggggaaaggcgagagagagagataaaatatatatgggggagggggaaagagagaggagtggaaaacccccaaaaggttcccttttagggaccttaaactcagcgactgcaaaggaggattaagggaatggccggaatcgaaccaatcagccagaattggaacccgttctttttccgaaaaaaggacccaccctccccctccaaaaagaataaaaaggccgtaaccccccgcccgcctcccgttccgagatttattccattaaaaaatgcaagggtggg

SEQ ID NO: 138321 - DNA, 2050 bp, Zea mays
  Clone ID: MRT4577_57626C.1
tagagacctccacatgtctattcttgaagggggatttccagagtatgctcgtatcaaacccaaatttgtctgaactgctactgaaaatttgcatgggggggaaaatgacatgatttttattttgtgccatcctgtagtaggcccactaaaatattagagcttagggtttacatgtgaccgtgtctccgtaagcgccgtctgtccgtccgaccgtccccgcgtcggcgcgtcccgcacaccgcgctcccgctcggccgctcctgccggcgcgctgcagcagctcggctgctcgcggtcgcttgtcccgtgcgcccggcggccggctgcttgccccgccgacctattcggctgcttcctgcttgagtgcttgtcccatccggcggcccggctgcttctgcttgttcgcttagtatcaatccaggctctgatttggtggctgaagctctgtttctccatggcgcttcgtttcgagatattaggaagattcaatcgcgcccgcgcagctcgcttaactcttccccactttacttgtcaaacaccactttttatgcctgttggaactcaaggtacaataaaagggttaaccactgaccagttagaggagataggttgccagattatacttggaaacacctaccatcttgaattacgtccagggtctcaacttattgatgatttgggtggcctgcacaaatttatgaattggaaaagggcgttgctgactgactctggtggtttccaaatggtttcgttgctgcatttggctgatattactgaggaaggagttacgtttcagtcacctgttgatgggaagcccatgctcttgacacctgaggaatctattcatattcagaacaatattggagctgatatcatcatggcacttgatgatgttgtaaagaccacaattactggcccgaggataaaagaagctatgtatcgcaccattcgttggattgacaggtgcatagctgctcacaagaaacctgatgtccagaatttatttggcattgtgcaaggaggattggatcctgttctttaagttatctgagttaggagcttggttgagcggaatcttcctggatatgcgattgcgatccaggctggtggcgaatgcaatgattccgtttgacacggtgttgccctgtcctatgctcgattggctaaaaataaaccgcgatatgccatggtagcttcagggcaaggaccccaaattgccatttatgcaataagtgcatagacgtattgtatgactatgtttatccaacacggactgctcgttttgggactgcacttgtgcctgagggtgtcctaaagttgaaacataattcaatggcgactgatgaacggccaattgatcatacgtgttcatgcatggtctgcaaaaaatatacgcgcgcctacttacattgcctggtcacaaaagatgctatgggttctcagctgctgtcatatcataacttatcatttatgatgcggttaagtagagacctccacatgtctattcttgaaggacgatttccagaattcgtgcgaggattcttgagggtgcagtttccaacgggagacgttccgcagtgggttcgcaacgcgatggaggtcgctggcattgacatatccgagtgctgtgcttccaccaatgtctgacaccaagcgtataggggccacctttaactgtaccggttgactgcaaatggagttgtgccgagttaagactcttcggcaagcaaaagacgacgacaggctttcacaaagaagtttttttccgtcatacatgtagggtctcacacggattcagcataggattttccaatagtatgctgaagcttggcgacaggttttgttagtgttttgtgttgtgtttggaaaccgcagaggtatgctatgctattcttctggggtctaggttatgcttcgtcttaatcactggatgtgatttttagtggtacggtcagatcaaaggaaggtgtacccaactctgacgaatattttttgttataacgaaaagaatgttatagtccttgcgaaaaaaaaaaaaaaaaaagcggcc

SEQ ID NO: 138322 - DNA, 412 bp, Zea mays
  Clone ID: MRT4577_57627C.1
cctttttcttttttggagagaaatgtcaattaccccactgattcaacagattgcatatgctataccacatccaatccgccattcacactcttttcccaccattttgcaaatggttctggcccaaaatccatgcaatccccgactcaatttatatcgacccacacatgaccaacttctttttgtcctcctcgacactttaacgcgcctgttccatgcctagtaaaattcgttttccactagaacgttttttttcatggccaatgaaccccatagtgcccctgtctcagctgctgctggagccttctatggctccttcacaacgattgcttggttagtcagcaccatttcaaccacgtgagccatctttctgcccggcgcacctatgtcctttggcagggtcgatcacaccaac

SEQ ID NO: 138323 - DNA, 468 bp, Zea mays
  Clone ID: MRT4577_57628C.1
attcggctcgagcttgttgccgctgtttggtttatattggccctaagtctttgcccacggaggactgtctctaacaacaagtgatggacacatatggatatgaaggcaccgcctggtgctgttctgagggctggatccaggtatgttctgactgcattgtttaccgataaccagctaactggctttcttgctacagggggggctctataggaggggactgacaagattggatctgagcttactgttttatatgtacgaggggctgcatattgtaccggtagaggagagatggtgcaagatatccaaaatcccttgccggaaaattaaccaatggttctgataaatccacctgaagcatgctcaactgctgatgtttacaagcgattcaggttggaacaaacaagtcaagctgatcccatgaccatgctagaggaaataactcaaaatgggatactccaggatgtttgt

SEQ ID NO: 138324 - DNA, 128 bp, Zea mays
  Clone ID: MRT4577_57629C.1
gtcagccagcgtccacgccttcgtttcccactcccagggccaccaccacggggctccccttccggggggagccaggcacaagtccggtgatggagccctcacggggaacatcacgacgactctaatca

SEQ ID NO: 138325 - DNA, 707 bp, Zea mays
  Clone ID: MRT4577_5762C.1
cattgggtacctcgaggccggccaataaagatagatacacgttctcgccaaaaaaaaaaaaaaaaaaaaaaaaaaaaaaaaaaaaaaaaaaaaaaaaaaaaaaaaaaaaaaaaaaaaaaaaaaaaaaaaaaaaaaaaaaaaaaaaaaaaaaaaaaaaaaaaaaaaaaacccccccccccaaaaacacaacaaacttcgaggggggggggggtttccccttttcctccccaacgcccggggcaaggaaaaaaaaaaaaaaatcccccccccttttctcggggtgggggggggggtagccccccccccggaaggaaaatcccgtggaagccccccaaaattgggccaaaaatttttccaaaaaaaggggaaaaatcggtggaatcggggtgggtaatgccggggccccaaccagggtggtatttgcccaaaagggcccaaaattgggggtggccgtggtggacatccccaacccccgattgggggaaggaaaaaggaaccccccccgaattaaaaaccccggcctcaataatgttggaaacaagggaaggggaagaaaccttttcttcaacactgaggttaaaaaccccccccttgaggtggaaataattttcgtctggggaaacccccccccaaaaacccggggttttgaacttgaaaaggttcccaaccccccctacgggaaaagcgctgcccgaagaacccccaat

SEQ ID NO: 138326 - DNA, 468 bp, Zea mays
  Clone ID: MRT4577_57630C.1
acctatacaaagattggtttaatattttctgaatgtctcgagaacgatcacagcgcacaaatggcagctgtggagcgtccggccacgacctagccaaagggtagtacgtcggtaacaactccatgcctgatatccttcacgttgagtttctttggcgctagacggtcactgtctgatcatggaacctgaccagcggtggcacgaacccgtgtggccgattcactagcctcggtctaagcctaccataacgaactcttgcttgaacatgttgaacacagccggcatgacggcaccaggagttacattggagtccatggacaccttgtggcatgtgaccgatagccaaactatactatatacattgcatgtgggccagcatcctcttgatagatgcaatacatctctcacatgatattccagcctttagcacaacagtatgggccatatggcgagatgagatgatggccc

SEQ ID NO: 138327 - DNA, 426 bp, Zea mays
  Clone ID: MRT4577_57631C.1
ctgtgatcataccaagctcgcctgaagcctgggcccgtacatgtcgatggaaacctatgcaccttcaaattcggggagccattctagtgagttctatcataatactagatagcttttccctctataccatatccataacccttgttttttgctgcataccaattcatgtcgacagtgtgcaaaaaatattgttcacacatgcatcactaacaacaaatgtcaactgagatcataaacaactatgggacgaaagcaatgtcaatgcattatgaagctacatcaaaggctcaaactgctggcctttctgcaactgtggaaatggactacactctgcttgacgatgatgggttggacaagctcgacactgtacattttagctagctcggtacacggccacgattttgttctactggataatcttaaaac

SEQ ID NO: 138328 - DNA, 452 bp, Zea mays
  Clone ID: MRT4577_57632C.1
cagcagctcgctagccgtacgatggcgggcaccggtgacgtcgccgccgccgcgcgggcctcggcgcgaccggcgggcagcagcagcacccaccctttgggggggcgcgtggtagatcgtgacgggcgcgtgcggggagatcagccgcccctgctcactcacctgttctctctcagggctagcctggtgctgggctacacggagctcgccgacaatgcggtcgcactcgaggggtatctccacgttcgcggagagcacgcgctgggctgtacgtacttaggacgaggtcactatcgcggtcgctgttatacgcggggtgaaaggactttggctgagcacacattctgctggcctgagcctgcgtgctggacgacacacaccccaccagtgccggaatcgtcatcgacgcttttaacaagatgctacatctgaacatgaaacagccgttcctg

SEQ ID NO: 138329 - DNA, 260 bp, Zea mays
  Clone ID: MRT4577_57633C.1
acttatttggttccgtacggtggaacgtgaaacgacgcgtttattcacagtgcctctgctacttggcagcgtatgcatggcctggacccggcggccacgccgcacgccgtggctgtcacactcacactcttgctgcgcgcgtacgtcgtccccggccgccaggcgtgtcgacgatcgactggtattggcgatgctacgaatgctagcgactattgagctagtcgacgacgactagcgtacgatcggtgcatggaccatcg

SEQ ID NO: 138330 - DNA, 406 bp, Zea mays
  Clone ID: MRT4577_57634C.1
acgggagctttgtgaaggtggagaattattggataggatcttgtccagaggtggaagattcattgaaggggatgcaaaaattattgttgaacagatattaaaagtagttgccttttgccatcttcagggtgttgttcaccgtgatctgaagccagagaatttcctattcagcactagggaagagcattctgctatgaagataattgattttggtctctcagattttataagaccagatgaatggctttatgacattgttggaagtgcatactacgttgctccagaagtcttgcataagtcatatagcacacaaacagacatgtggagtattgagtgttatcacttatatattgctgagtggtagcaggccattctgggcacgaactgaatcatgtattttccgctc

SEQ ID NO: 138331 - DNA, 426 bp, Zea mays
  Clone ID: MRT4577_57635C.1
cggagttcggctcgagtggacagcagactagcacttagctcatcgactccagatgggagaactcgacaccatgaaggtgctgatcgctgcccttgcatctcctggcgctcgctgcgagcgccgcctgcagtacaagcggcagctgtggctgccagaccttttttttcatctaccgcctccgaactatctgccgcctacgggctatctgccgccgcagcatctgccgtagccatggcaataccccactcaaccaccgcatctaagcccgtgccagcagatcagatcctgctggagtcagaggcgtaggctagcccgtacctgggccaatgcgtccagttcctggggcaacagtgacaccgggcggtgacgccctacggttagaccagtgccagccgctgtagaagcagagctgtcaccagatcaaag

SEQ ID NO: 138332 - DNA, 559 bp, Zea mays
  Clone ID: MRT4577_57636C.1
ttaaaccaataaaatcctataaaagaatttttttaatctaaatgtcttgaagacttttgcaaaaataaacaagacacgattttagggtgtactctctccgtttctttttattagcgtggaagtgttattttgcactatccagcgactaataaaaagaaacgggggagacatagacagcattaaaggtttattttggcactgtagtgctagctgacctcctgtccgataatgttgcctgcatgcagagcaaggacgcggttctgccatcgccgtcggcatcctctgtattcctgatttctctacccgcttaaaaaaaacagaggaaacaaggcaggaatgatgcctggccggctgcccccgcatttgatggatgccaaagaaagaaaggcattatgcattgaccaaacaaaacctaagcttacggtctacgccaacctacctaccaaatgttgctgctagccagcacttatctgccctactactacatccatctgatctgaaggactgaattggagaaaaaactgaagcaccaccggattggcgacaaaagaagaagaag

SEQ ID NO: 138333 - DNA, 262 bp, Zea mays
  Clone ID: MRT4577_57637C.1
ctaaatctggaccgcgactcgagccagatactgtggtcatgaccctctagcttgccatctgtgcttctctgctccagcagcagcaaaagctattcttgtgctcctctgccctgctcttagtgctccgtgtgctgcagcttttcctcttgtcctgagttctcctgatagcattcaagacaactgtggggaaaacactgatgctgtaactgctttggagctccttgggtaaaacctccatcttctcacattttgttccatttga

SEQ ID NO: 138334 - DNA, 483 bp, Zea mays
  Clone ID: MRT4577_57638C.1
attgggtacctcgaggccggccctttgtgcgtgttgtgctgccctcttgcaacgcatgaatctcaggataatcgatgctccacgagacccccagatcctcttgctgcgggttctgatgacgttacgcaactgaaaagccagctgcagccctgtcttagaggtgtggcctatacggacacacacactgcagccatacgtgatcgatggacacgacaacgatgagaatctcatctacctgatcatggagaacgaccatcatcttccctacgaacgtctatacattttgatctgctccgcagcagagctatcgctcggaaatgatagccctggtattattctagcgactggtcggtactcttctctttctatctccccttgaatcaatgtcattcgctgcactatctatcctgaaatgcttgcctgaatgtagatggataatatcgtctcctacctgtacatctcactacactgatctcgatgatg

SEQ ID NO: 138335 - DNA, 1541 bp, Zea mays
  Clone ID: MRT4577_57639C.1
gcttcgtctctctcgccggcgcggcaggcaactatcatcacttcattagctcatccaatctattccgatgacgaccgtgcccaagccacagcaggtggcgcactcacgggcacggctcgcaccccgcgcgatcggcgccttgctggagtttgccccagcctcctcctccctccgcttcgccgtgcaccgctgccgcactgctcgcctagaggtgaaggcatctggaaacacgtttggaaactactttcaggttgcaacctattgtgaatctcatgggggtggtgttggttgtgttatcagtggttgtccacctagaattccactcactgaggcagacctacaagttgaactcgatcgaagacggcccggacagagcagaataacctccacaaggaaggagactgatacatgcaaaattctgtcagggacacatgaaggggtgactactggaacgccaattcttgttattgtcccaaacacagatcaaataggcagtgatcaccgtgaaatagccaatgtgtaccgaccttctcatgcagacgcaacttatgacttcaagtacggtgttagagctgtacagggaggtgggaggtcgtcgggcagagaaaccgttggaagggtggctgcaggggccctcgccaagaaaattcttaagctcaaatgtggattagagatagagagcaacatcgttagatgtcctgatccagagtacgcagagaagatgatagacgcaatcgacagagtacgagttcgaggggattcggtcggtggagtgatcacatgcgtcgctagaaacgttcctcgcgggctcggttctcctgtgttcgacaagctcgaatccgaactggcaaaagctatgctttctattcctgcgagcaacgggttcgagattggcagcggattcgccgggaccgacttgacaggaagtgagcataatgatgagttttatatggataaggctggaagtgtcaggacacggactaatcgctcgggtggtgtgcagggagggatatcgaatggtgagattgtgcacttcaaagttgcttttaagccgacaccatctatcggggtgaaacagaacaccgtgtcaagggagcgtcagaacgttgagcttctggcaagagggcgccatgacccatgcgtcgcccctcgagctgttcctgtggtggaatccatggccgcgttggtcctcatggaccagctgatggcgcacgtggcccagtgcgagatgttcgcgctcaatgctgcacttcaagaaccagttggctctttctagcagaggcagagcacacctgatgagctcgcgccaaattttatcatttatcatagtaataagtagctcaagcgtggcttggtttgcttgtctcttgcaccgtagttttgttttttttccccccgcaagtgtgatgcgatgaagtgaataaggcacttggtttcctgtgcatttgtacacgtttcatataatgtaatctacttcgaagatgatgcatttttataaaaaaaaaaaaaaaaaaaaaaaaaccgcaaaaaggggcggtacc

SEQ ID NO: 138336 - DNA, 796 bp, Zea mays
  unsure (1)..(796): unsure at all n locations
  Clone ID: MRT4577_5763C.1
gtttattataccctttaacacttgtaacattgtttatctttacactgatgcttattttgaacctaccctttgaagcctccacttttccatcccagttcaagaacggtgctttacctctctcgcccttgattgttcccccttctttgttgccttgcaacttttatcttaactccaccctttgttgtgtgtttgtctgttatcacctttaacccttgtcatctctcaatctttaccttgatgcttatcttgtacctgcattttaaagcctcctctctcccatttcagttcgagagtgttgttttacctatcctgtccttggttgtttcccctccattgttgttgggggccttcgtcttccgaaggtcctcaaaaacatgatttaacaatgtttccaaagtgtaatacatgaacaggtacctttggactcggatcagaaccacagtatgagaagcacgaacaatacgaaggttgacgcagcgccgaagctacgcgcaagggagcttcgatatgacagcaggaaagggaaccgacttaaaggggaaaaggctatttagaccttgatgaattaccttagagtcattagcaaatgtaaagggcattggatgtaatttcacatggnngctgcgtctcgtgcctataaatagatgaacagtactcccgtactggacactttgacttggcatttgcttttgcgtcacgctcgtacctttgttttctgtcaagccgaaggtaccaaatgtaattcaatattgntcttatattaacttatgattatatactgagaaatttatatatg

SEQ ID NO: 138337 - DNA, 1845 bp, Zea mays
  Clone ID: MRT4577_57640C.1
catcgggaacctcgactcagcttcgtgtttcaagtcggcacgagcttcgtctctctcgccggcgcggcaggcaactatcatcacttcattagctcatccaatctattccgatgacgaccgtgcccacgccacagcaggtggcgcactcacgggcacggctcgcaccccgcgcgatcggcgccttgctggagtttgccccagcctcctcctccctccgcttcgccgtgcaccgctgccgcactgctcgcctagaggtgaaggcatctggaaacacgtttggaaactactttcaggttgcaacctatggtgaatctcatgggggtggtgttggttgtgttatcagtggttgtccacctagaattccactcactgaggcagacctacaagttgaactcgatcgaagacggcccggtcagagcagaataacctccacaagaaaggagactgatacatgcaaaattctgtcagggacacatgaaggggtgactactggtacgccaattcttgttattgtcccaaacacagatcaaataggcagtgatcaccgtgaaatagccaatgtgtaccgaccttctcatgcagacgcaacttatgacttcaagtacggtgttagagctgtacagggaggtgggaggtcgtcgggcagagaaaccgttggaagggtggctgcaggggccctcgccaagaaaattcttaagctcaaatgtggattagagatcttgtcgtttgtttccaaagtgcatcaggttgtgctcccagaagacgcggttgattatgggtctgtaactttggaacatatagagagcaacatcgttagatgtcctgatccagagtacgcagagaagatgatagacgcaatcgacagagtacgagttcgaggggattcggtcggtggagtgatcacatgcgtcgctagaaacgttcctcgcgggctcggttctcctgtgttcgacaagctcgaatccgaactggcaaaagctatgctttctattcctgcgagcaacgggttcgagattggcagcggattcgccgggaccgacttgacaggaagtgagcataatgatgagttttatatggataaggctggaagtgtcaggacacggactaatcgctcgggcggtgtgcaggttttttttcccttcatcctaataaaaccctatcgattgtgactgtggcattgttctctaaaaaaaatggaatcggtttgtttgcgtaatgtgcagggagggatatcgaatggtgagattgtgcacttcaaagttgcttttaagccgacaccatctatcggggtgaaacagaacactgtgtcaagggagcgtcagaacgttgagcttctggcaagagggcgccatgacccatgcgtcgcccctcgaggtaatggcaccgtgtaatgacgctcctcgctgctagtgctgctaccattctttttaatttcttccccgcgactgcgactgcgatacgaggtttgctcttgacgtggcttctgcagctgttcctgtggtggaatccatggccgcgttggtcctcgtggaccagctgatggcgcacgtggcccagtgcgagatgttcgcgctcaatgctgcacttcaagaaccagttggctctttctagcagaggcagagcacacctgatgagctcgcgccaaattttatcatttatcatagtaataagtagctcaagcgtggcttggtttgcttgtctcttgcaccgtagttttgttttttttccccccgcaagtgtgatgcgatgaagtgaataaggcacttggtttcctgtgcatttgtacacgtttcatataatgtaatctacttcgaagatgatgcatttttatagatgtggcttgtg

SEQ ID NO: 138338 - DNA, 383 bp, Zea mays
  Clone ID: MRT4577_57641C.1
gccggcacacacatggtgaaagaatgcccccgcctacaggggagctgagacctgtagttagccaaagtgctgacggaggaacttgatgccattatggtacgggggaccgaataaacattgattgttcattaaggatcagctgtctaaagacctgaatttaatgaacttcacatgtagatgaatgatataaggacatagaaaacccgccctttaaattaaatctaacgtgcactcttcttctattgattgatatgctatgctattgcttcctttaaggaaatgaaaacatgaatccttgttatcgtaaaaagtatcaaatataagaagcacgtagcgtagctgcccacccacttacgaaagcagctcaccgtgcaggtgaacaa

SEQ ID NO: 138339 - DNA, 793 bp, Zea mays
  Clone ID: MRT4577_57642C.1
ccctcgagggcctgcggggaaactgcccctgcccttcgatccggtctatctccgtccctacttggcagagcctgacttccattccaactcgatctcggcgatgccgcgcatggcgcgacgcacaacagtgacttcgcgaagtcgcgaagctgcacgcgtctagcgagcgcgtgtagctcgcccccctggcggaagccgccaccacaggcacggcatctggccggcggagcattcgtctggccggcgtcagacatgacgcggccgagatcaagccggagacggctcgttgcctcttctcaccaccacagccgcagcctcccagtcgccaggatactaggatgcggtcgtgaagactttccattacgttggatcaaaggtgagaccttgacattgctcgccgatcgatcgcctaatactactgctgaagttgccgtcagtgacccacagcgacaccaaaaaaaagaggctgggccgggctatgctaatgctacagcctgcatgccctttgcaacttggatcggttgaacacacggcatcacctttctatctctctttatttattataaacctacaagtgcacatacatatcgtacgtacgtgcgaataattaaacttgcccctttctgctcggaatgtgttctcggccggggccctgacacagcaggaaacctgtgctgatccctatcgttgaacacacttcatttcatcgatcacctttttgtgcgtgttcttcattattttaggcaagatatagtaccgtaaaaaaaaaaaaaaaaaaagcggccctcgagct

SEQ ID NO: 138340 - DNA, 1447 bp, Zea mays
  unsure (1)..(1447): unsure at all n locations
  Clone ID: MRT4577_57643C.1
cccaaaaaaagcgagctttctattgtggcgacgtgggggaggggtgtcggcagaagttcaaggggtacgatgcagctgggacgataaggggaaaattacgcaaacattcttgtgttattgttgcgggttangcaggcttgtgaccaccctcttcttttgaacgggacatgaatcagatctaggtgaggggaattccatagaaaggggaaagcaacttcctaaggaaacagtgacaaatttgcttgaaaaggtggaaaaaggcgcgggaatttgttccatatgcaatgatccacctgaggatgctgttgtcacgacatgcggtcatgtgttctgctaccagtgtgtgcatgagaggttaacaagcgacggacatgtttgcccctatgcactctgtggaaacaagctaagttttcgatctgtttttacaccagcggtattaaaactctgtatttcgccaaagccggagtttggtgaagaaactagctgttccacagcagccgacaaaccatcctcgatctgtgaaagcagttacatctcctcgaagatccgggcagcagtggaaatacttaattcaatcatcaagacacctgcccttacagcgggggacactactgaatcgattcccagcatggcaccccctgtcaaggcaatagtcttctcccagtggactggcatgctggacctgctagagctttcactgagcagaaatggtatacagtttaggaggctggatggtgcaatgtccctcgacttgagagaaaaggaagtgaacgggtttaaaactgatcctgaggtgagagtaatgcttatgtcactgaaggctggcaatctgggtctaaacatggtagctgcttgccatgtgatcatgcttgatccgtggtggaatccttacgctgaggaccaggcggtggacagagcacacaggatcggtcagacccgtcctgttactgtttcacggttcacagttaaagacactgtggaagaccgcattttggctctgcaggagaagaagagagagatggtggaatccgcgttcggcgaggacggttccagaggcactgctaccaagctgacggtggaagatctcagatacctcttcatggtgtgatggcagcttgtgatcatccgtagggctgatgacttttgttgtgacaatcctaacaaataggctagggtagacttgatcacagtacttggcaccgcagtttgtgcaaaagtagtaggcatcttgaagctgaggtagcgtgtgtttatgttaatcccctctaatccgcttcagtccatcgcatcagtaacggtctaaccaaacagtcctttcgangttctgttgacctgtattcctgtgggatggagctcgtcctgctcggcaagctggttaatctgggagtttaaaggaacagctttaaggcttgtttggtgattgagtatcaagctggttaatctggac

SEQ ID NO: 138341 - DNA, 710 bp, Zea mays
  Clone ID: MRT4577_57644C.1
ggtaccctcggtgccggccggtcattgtgactgtattagacatttgctaatgtgtcacatatgcgatgtctatttgaattggtgacgtgaaggttaggtctggtattttatgtattggctagccatcatatttttcggggttatgccagttttatttattaagatatagtcgatgattagctctaatagtcactattttctatattcggtgaccgattaaacatcttagggagatgagagtgtaacttagacaaggaatgcttaggtatatgtgtaggtctggtacgctggaatcaattataggtctacgacatgaagtataacgatgatgcgtggaataggtttagtgtttccaatgactagttaatgtgttcttctcgtgtaaccgattctattggtttgaggtaaggctcgaactggaacccactaccgatgtcgtagtttcgagtgaatttagtattagtgtggtatttaacgtgtaatcgatgaaaagtccggattagtattcgttaatcgatgtagtggatctgagctaaatttattattggcgcacatttttgttagctgaattgttagatagattaaataaatatgtgtggtgcgaaataaaattaaaatagttctttgtaagcaaagtggtataatttataatgcgagggataagtttagcatttaattaattagctgataagttgggtttaggctaattg

SEQ ID NO: 138342 - DNA, 354 bp, Zea mays
  Clone ID: MRT4577_57645C.1
taaaaaaaaaaaaaaaaaaaaaaaaaaaaaaaaaaaaaaaaaaaaaaataaaagggaaaaggggaattaaaaaaaaaaaaaaaaaaaaaaaaaaaaaggggcggccgttatttggagatccatcttttaaaacaaataattggcggccccctttttaatggacagggttacctaaatccaattccccggccgtttttttacaccgggggggcctgagaaaactttggggggcccaaatttaaacgcttggcattaaaaaaacctttggccacccccccttttatcgattgggccctaaccccttttcctcccgaagggttattctgcaagaggtgcggaacgggacccccttct

SEQ ID NO: 138343 - DNA, 284 bp, Zea mays
  Clone ID: MRT4577_57646C.1
ttcaatccttagccctattctgccagtgtgggagctcaggaatctgcgccagggccagtgatacagagaccttcgcatttcatgctgagatcaaccagctggtctgactcatcatcaacaccttctacttcaacaaggagatcttcctccgcgagcttatctccaactgtttcgatgcgctggacaagatcaagttcgagagtctcactgacaagagcaagctcgatgcgcaacctgagcttttcattcaccttggtccagacaagggcacgaacacgcttttc

SEQ ID NO: 138344 - DNA, 305 bp, Zea mays
  unsure (1)..(305): unsure at all n locations
  Clone ID: MRT4577_57647C.1
ccaaggacaaccaccacgccacagagacaacgagggagcacacggagaaagcgacggcgaagcacaccgcgccccacaccggcaagggcgacacggcgccgcccgacaccganggagaccaggacaccagcggaagcacgcgcggcacgaagcccgagcacacgaagcacgccaagaccaggcccagaaacgagaagcacggcagccgcggagaccgccccgccaccaacacaaacgaaacgaaggcacacaaagcgccccaacagacacccaagcccccggaccaagagaagaaggccccggcc

SEQ ID NO: 138345 - DNA, 742 bp, Zea mays
  unsure (1)..(742): unsure at all n locations
  Clone ID: MRT4577_57648C.1
ttttttttttttttttaacgcttaagctatgattttattaaacataaagctgtcaaaatatgaaccggatgaaacagaaaactagaaggattaataattttcttcttggtctgtccaccagagccaaataggacatctaaagaaaaacagtgagccataacgtccagccaccttttcctccatgagcagctatggaagcaacaggggctcgagcagcagccgaacacgcacacttgtgcttgccatcactatataaaaaaattactctgtcacagaaccaaatccaatagatatgcaatcaggacctaacattaggctataaatttcctgcacatacaatttacagagcgtgagcatgggtatctttcagagatcttaataattctgtgaaaggcaaatatagtaattggaacgcactagtttcaatcaggatcggtaaagacagcagtaatcacacagaaacatgtatttgcataagagggtgtgcattgatgcatatgcatctaaactggcccacaggaagacataacttagaagcggttcttttcaatgttgcatcttatggtgcatcacatagacccgcttccaccgagcaaatgcagttttagaggaagtcttaacagcatcaaatctcggaacatcattgcatcagcatgacgcanaattttatcataggagtggaacacaaaataactgcttgaattgtgtaaagacctaaatatctggctgtttatcatgaatg

SEQ ID NO: 138346 - DNA, 426 bp, Zea mays
  Clone ID: MRT4577_57649C.1
cctcgaggccggccgggatctgctttctgctcctggctgcattccacgctgcttctctcgccttcgtgcggttacgctgatctatggacttcatgtcttccggcccggatcttctcttcaaggcctctgcctggcgtcctgatctatgtgtcttccttctgatgctgagacggttcctctctctcccgtgccttagcatctgtcctgctcgagaagcctgagactctatctctatctcaccttgccgattgatgcatcatgattgctacagaggtgcgaacatcagacgcatctccgatgtcacgcgactctctcacatgatctactgagacgagtgcgcatatccgcagtacatattcgtgcgctagatctttactaccttctgtccagactataatactggagtggagatactgcaccccctct

SEQ ID NO: 138347 - DNA, 302 bp, Zea mays
  Clone ID: MRT4577_5764C.1
ccggaactgcagtgtcgggccaagccaacgggccttttttttgtatgtagactacccgacccgccgggccggatcttagaactgatgacggccggctacgctcctcacatgggaaagccatggctgtctgtccgtaagactgtccagcctctgcagatgccggcgacatgttcgatgcggccggtgggtcccgcgaattcacgagatcacagcccagaggggttttttgggcattctggacctacccaggatggcagcgccccacccgtgggtgcctctgacacgggggcccttctcgacaa

SEQ ID NO: 138348 - DNA, 548 bp, Zea mays
  Clone ID: MRT4577_57650C.1
ccattgccatctctatccgtgcgtgctgctctggtttgcgtctcaaactcaatgcttccgtgtgtgggctgcggagggtttatgttttgttaacctaaactaatttacatttcaatccacctcaacacatatagattagagtcaatactagaatattcaaattaggcctcagtggactgcagcaaactgatcgtccacgatctaattggatgactaatcacgcttaattgacaactaatctaattgacgactaatcggatgattaggtttctaatcgttttgaccgtgtcgttgctgcttatcgagcgcgctaccattaattggacgatcggaaaacactgatcttgactgggaattgggaatgtagtggatatcttgtctgtggctttctgaaaactgatgaacatgtgtgtgaattgatgactaatgagttgtgttaatttggtgctacaatgatgtgatctgtgaaactataagtataattattattttctattgttaattagtttgaaattaactagaaattaattattatatacatttttttg

SEQ ID NO: 138349 - DNA, 381 bp, Zea mays
  Clone ID: MRT4577_57651C.1
tttggtttcgacaaagacaatcaggtacgtatgcgttaccacaaaacaatacaagtcacagtccgctctgaagtctgagctgaaacagattatacaaattaacgcatgttctaaaccgggtgcctgggggatgaagctgctcagcaagatgggcatatatacctgaggctgaggagaagtaaaccgacgcgttcctcgaatacgggcccgcggaatcgcatttcgtcgtcgagcagtgctgttggcaaacctagaacttccccgtcgatcggttacaattgagatctcataaagagggcagcaagagcgtcatcgccttcgtggtgtgggccctgacgggtgacggctacaagtttgagaggcctggaacgctggagccct

SEQ ID NO: 138350 - DNA, 236 bp, Zea mays
  Clone ID: MRT4577_57652C.1
acgaatcctgctgaatctacaggcactaaatgggtatggtgtaattaatgagccgcgttgtatttaagccagctagtcattatagtgatatgttaactggggtattcattatttctgtaatactgtcaaatcttttttctaatttctctattaagccgagatatgtttctaaaacaaaaatatggaaaaaaaccttcacgtgtatagcattctacaacacaaaatatttataactg

SEQ ID NO: 138351 - DNA, 809 bp, Zea mays
  Clone ID: MRT4577_57653C.1
ttattctatatcatggctgcccaaatttccatgaagagaaaattcgtcgctgacggtgttttctacgctgaactcaacgagttcttcactcgcgagctcgctgaagatggctatgctggtgttgaggtccgtgtcactcctgctcgtaccgaaatcatcatccgtgccactcacactcaaaatgttcttggtgagaagggtcgtcgtatccgtgagctgaccactcttgttcaaaagcgtttcaagttccccgagaacgctgttgaactctatgctgaacatgtccaaaaccgtggtctctgtgccattgctcaatgtgagtctgtcaagttcaagctccttaacggtttggctgttcgtcgtgcctgttatggtgtcgtccgtttcgttatggaatccggtgccaagggttgtgaagttgtcgtctctggtaaggttcgtgctgcccgtgctaaggccatgaagtttgctgatggtttcatgattcactctggtaaccctgctcgtgagttcattaccactgctgtccgtcacgttgatttgcgtcaaggtgtcttgggtatcaaggtcaagatcatgttggataacgatcctactggtcgtaacggtcccaagcaatgtctccctgatattgtcaccatcctcgagcccaaggatgaagccgctatcactgagccctctgctcaagacttcagacctgctcctgctgcccctgctgctgctgattatgctgctgtcattatataattttgaaaattaaacttttttcgtctctatctcgctctctcttttaaaaaaaaaaagtttaa

SEQ ID NO: 138352 - DNA, 474 bp, Zea mays
  Clone ID: MRT4577_57654C.1
ggggcccaaacaaaccccctttcattcaaaccccttcaagggaacgccaaacacagggggggaaaccggggccccaggtacccaacacacccacgggggcagacccggggattccgaccctacggggaagaaaaaaggcttgggggctaaaagcaaaccgaaacggggaacacaaggggaagagaaactggggaaaccggtaaaaacaagccaacgggtttccatccaggagggagggggggaacgggcaacccttagggggccatgcggccaattccaaaacctggctggggggggaaccaattcccttggaccgaaaccggggtatggggccctgggggcacaaacaaaaaaaccgggcttggggaccccgggggggagggcggggtttttgggggcggggggggccacctttggtggataggaaacaaccgggggcggggggccgttctttgggggggccttcaccccccc

SEQ ID NO: 138353 - DNA, 564 bp, Zea mays
  unsure (1)..(564): unsure at all n locations
  Clone ID: MRT4577_57655C.1
ccgggctcatcacttcgctccataccgtgctagcccggccccttggggagggggaggggagggggtcgtaccgtanagcggcgtgcatggggggtcagggaagtggcagtgctcgtgggagcggggccgccgccgcgcttgcgctggtcctcctctgcgtgctcctccacggggagttggcctagtcnnctntgtgcggtntggtgggcgctncnngtgnagcttcaacaccgncaactgggccaagggcaagcgggtccgtgccggggacgtgctcgcgttcaggtacaacgccaaggcgcacaacgtggggcccgtgagcgcgggggggtacaagtnctgcagcgcgcccaagggcgtgaggggggggaccaccgggaacgacctgtttacgctgaagcgcggggccaactacttgatgtgcgagttcccaggtcactgggagggccgggatgagagattggtgtgatcggcgggtgaggggcccggggcgattagggcgggccggggacgacgagtgtggggacacaggggctcgattcggggggcaagttttgattattt

SEQ ID NO: 138354 - DNA, 601 bp, Zea mays
  Clone ID: MRT4577_57656C.1
atacacaatcgatgtatgtatgagaattgtagagaagcatttttagtctgaaaatcgcttctttcagggttcatcctagaatatccaagagaaccacatttttagtgtactgaagagcccttcagcaagctctttcgaacatgtaccctgaacagaattttaacccttttgacaagttgatactaaagtctgagtttgaaccaggcccattttgacacaagatgagagcaacctgttttttacctattttttcctatttcaggttcttgatcacttggaatgagggaagactgaactgagcgttcttgatcacttggtatagttattgcacatcagcaccaagcctaatcttttacttgttccagctatggctgacatggtctctgaggttgctaaccagggggctgacttggtatagttatttttttggtccacttgctctattccatctatcctagatgctacttaagaacaatgatgtatccctgagttctatgggtttccctgtttaagaacagatatgctacagtttatctgatgtgtatgtcctttatcctgtttaagaacaaatatacaagtatttacaagtgtttagatagtt

SEQ ID NO: 138355 - DNA, 431 bp, Zea mays
  unsure (1)..(431): unsure at all n locations
  Clone ID: MRT4577_57657C.1
tcgagtttttttttttttttttttttttttttttttttttttttttttttttttttggggaagaaaaaccttgctacatttttttttcgtctcgtttcatggggggagcaaccaaagggaacaaagggggtcccaacccctaatccaaagggaaaacggacactaacacggggacagaagcgaacgggaacccgatactataaatagataaaataactcgggcgaagccaggatggggccacacattagtccctccanccgccgccgccgccgccgtagccgccaccaccaccctcgcgccgaccgccgtagccgccaccgccttcgtagccgccgccccccccctcgcncctaccgccttatcccccaccgccgccttaacccccgtctcggcgcccgcccccttttccgcccccccccttaccgccccc

SEQ ID NO: 138356 - DNA, 311 bp, Zea mays
  Clone ID: MRT4577_57658C.1
tcggcggcggcggcggcggcgaccatggctgtcgaaaagaacaagaggatcttcaagggaaagaagggcggcaagatatagaccgcaaatcctatgtttaccaatgacaaggatgacattaagtgtacctcccaggtcatgatcatgaaccacccttgccagattggtaatagctttgccccagttatggactgccacaccttacacattgctgtcaagtttgctgttctctttaccaaaattgatatgcgatcccgcaaggagcttgtgaaaaagcccccatttttcaaaaacagagattctggtatggt

SEQ ID NO: 138357 - DNA, 240 bp, Zea mays
  Clone ID: MRT4577_57659C.1
gagtgatggatagccgtaggcaatcaccatacgtagctcgaattcgctcgagctcaattgcactaacgatagataattcatactggagagagaccctatgattgtgaagaatatggcacatgctttaactagtggtcagttcttaacacacatacgagaattcctactgcagataaactctactaaccagttggatgtgacaatgcttctgacaacatctcaaacctttctaatcataaa

SEQ ID NO: 138358 - DNA, 550 bp, Zea mays
  unsure (1)..(550): unsure at all n locations
  Clone ID: MRT4577_57660C.1
taccagaaataatccagtttannnnnncgaataaagatacatgtcaggaagattgacgccttggaagacttaattaaataactaacgaaatgtcatcttctgagcatctttgctaccaccaccatccattccacgccatcgcgcccttcacagcatgacgatgttaagtgtagcaggaaatgtcaagatgcttgatcttagttggatcgtatttctgcaggtctccagcgtttagtagatcagcgatgcacttcatctgcatacccctgtgtaccctctctagctctctcactgccgcacagcatggcccagtttgggatgggagctgaacgagggctcctctcatgatgtacatttggcacaagctcacaatctggttcttctcctgagcgttacatcgcgacccggttacggtgttgacggaaattgttgtgatcaacaggagtaagnnnnnnnnnnnnttgcannnnnccatcnnnnngatgatttagcaggtggttacgaactgctgggtgaaggaatcacgagtgagccagtatgtatttgctcg

SEQ ID NO: 138359 - DNA, 715 bp, Zea mays
  Clone ID: MRT4577_57661C.1
gggccgacccacgcgtcgaccaaaacttcggccaagccttcggccaacgcttcgaccccacgaccaaataccttcgcacacacacaagttttcagtagaagaacatcaaatacatactggctcactcgtgattccttcacccagcagttcgtaaccacctgctaaatcatcaaaaagatggccccctgcaaagtagcagcagccttactcctgttgatcatcacaacaatttctgtcaacaccgtaactgggtcgcgatgtaacgctcaggagaagaaccagattgtgagcttgtgccaaatgtacatccagagaggaaccctcgttcagctcccatcccaaactgggccatgctgtgcggcagtgagagagctggagagggtacacaggggtatgcagatgaagtgcatcgccgatctactgaacgctggagatctacagaaatacgatccaactaagatcaagcatcttgacatttcctgctacacttaacacatcgttagtttcattcctctcctccccatgcatcgttgtaaggtcatgctgtgaagggcgcgatggcgtggaatggatggtggtggtagcaaagatgctcagaagatgacatttcgttagttatttaattaagtcttccaaggcgtcaatcttcctgacatgtatctttatttcgaaaaaataaactggattatttctggtatcaaaaaaaaaaaataaa

SEQ ID NO: 138360 - DNA, 301 bp, Zea mays
  Clone ID: MRT4577_57662C.1
gacccattcgtccaaccggaccaacgcacttagcgctccgacttaaacacataatgcgaacaccactatcaaggcctcatctagatcgccaaacggcaaccataccgcacctataccactacacataccagctacaaagatcacccctgcctcgaacgaatactcgtgtcctactaatacaaccagtgctccatctctataagatcctaccagaccacaaacaacacaccacttaatacaccctctatactgcaatactcatacaaatcactccacaccacttcacttcgatttgaccacc

SEQ ID NO: 138361 - DNA, 535 bp, Zea mays
  Clone ID: MRT4577_57663C.1
cgttgctgtcgcatcttcctccctggattccccacgctgcaacagggagcacgtctccttccctccatggccggaccgccctccccctgctgccggcgacagcagcttggcatcttcaacctcggccgcgagctccctcctcggctgcttccagcccaactcggcgcccttgctgcaggcgagcagcagctccctggattcatggcgccggtgaagctcgagcaaccaagctcccagctatggcgcttgctccctgcagggatgcagttcccttggccgacgcccagcagagcagccatggccgagctccctgggagcacgccggtgcccctgctgtccccatggtcgaagcctctgctcggccagcagacatggccgccagcccccggcgagctcgagttcttctccctggccgccctgctccctgtccacggcgcctgggaattccaacagcagctcccccttctccctgcgccctctctccatggcgagcagcccccctgcagcgagctctttcccctaacctgctcgcggc

SEQ ID NO: 138362 - DNA, 298 bp, Zea mays
  Clone ID: MRT4577_57664C.1
ccttttcctcctttttttggtctcccatctcctattttttgtttttttttcattttttcaggcaccccgccggcccctttagagactaaaagggactaaactttagccactaaactttagtaaacctaaaccaaacggggcctaagcaattccacaccccgtaggggactggctttcaatttccgtaactaacaaggtacccatttattggcgtaccgcccctgatctttggaggtaaatgagggtttaaaccaaactaattcagaaaaacgccagcttgaacatgggacgatttatc

SEQ ID NO: 138363 - DNA, 389 bp, Zea mays
  unsure (1)..(389): unsure at all n locations
  Clone ID: MRT4577_57665C.1
gccgtcggtgctactgctccgcgtgcgggctgcccgtgcgggtggtggccnttctcggggcggcggggggcatntggcaggcgttgctgctgctcatgacgctcatgccacttgtgtgctccctttcggggggggggtcggcggcccccgaggtgtggnggtcgtttgttgtgacatcttctcctccgccctggtgaggggtttgatgggtgttgagcaggtcgtggntgctctagagggctcggccgtgggggtcatggcgggcggtgttctgggggtggcccgggtgcccagggacgagctattgggtntcatcgctggcgtnggtgttgaacctcaggaccgtcgtggccttgtactggcccaatgcccttgtgttaatggtcagc

SEQ ID NO: 138364 - DNA, 290 bp, Zea mays
  Clone ID: MRT4577_57666C.1
cccattttcggaacgaacaaattaccatcggatcccaactccggctggagcgggtctagttggactaagatccgtccgatcaccccgcgccgacataaatgaaagaagatggcagatgccgacacattactttgcacctctgattctgcgaacgagggacaccatgacaagctatatgaccaggtctgacatgccggaattgacgcttgacttgctgaagaccgtgacagctaggatgcttgtgatgacctgcaccaataccacacatggacatggtctttggagagatc

SEQ ID NO: 138365 - DNA, 588 bp, Zea mays
  Clone ID: MRT4577_57667C.1
gcacgatcctgttgagcatggtttactatttcattctctaactaaatatttccgtaaaccgtaaacgatcctctaacatttcaccttttgccgtagggcttcatttctctaggaaagctaataatttaaaattattaaagaaaactaaactagggctttttattcgttgattgacacaattattaattaatttatgtagcagtttttagtaggaaccccttctcaaaccgaaaggtcaaaagccggagacccgcgcgattcgagcacacgattccctcgtcgggtgggtgtgggtctcgtgccgtggcctgcggtgcgggcgcttatttaatcgaaaaaattgctattttagtctttttaacgtgggttaaatgctattatgtgaccctctgtctatgacttatgggatcatatgtgtttatgatttatgggtctgagtctaaaatagagaattcacaactgagagtgacaaaatagcaaattcctccttattaatcacgagtacccgcaggcacgcacaccccacaacaacaacaaccatctccaacgcagcatgcagacagtaagaacagcaggcagcgagtgcaa

SEQ ID NO: 138366 - DNA, 269 bp, Zea mays
  Clone ID: MRT4577_57668C.1
ccaaaaagaggttttatttactttgggggccaccagggcagctcgcagacatcaggtttcccagcagactttaggccaagctgttagggggaagaagaaacccaggcaaggaggggaactggccccaagtggtttccggttacatcttccctgcttctcttttctctgccgatcagtttggggtttctgtacccacaaaagtttcatgcagttttaatgaaatgaaaatactttttgttcaagggaatgggggccgcgggcggtgagga

SEQ ID NO: 138367 - DNA, 452 bp, Zea mays
  Clone ID: MRT4577_57669C.1
ggggggggttacgaatgcccaaaccggaaccggcagagtaaaacatttttcctggactaccctacgacatgcgggcgttattatgtttgcccttgcccacccccagactaaacggggaccggatcatcatcactagggaaattgggagggagggagaaaaaacgggggcgacccccatctgctgggtttcgaccggcccccggagctagccccggctagttgcagcagcagcagaggcagtcgaggcaacactcgcaggtctcgtagcagcaaaagcagcccaacccaatgaaaatgcaggcgtaaaggcaacccttttcctcggggggcccctgcacgggccccaaggaggacatttcctgggcccacggggcgttgtacattttgcctgccttgcggatcgatcggagctgggggggggaacaaaccaacaagggctctctctctctctc

SEQ ID NO: 138368 - DNA, 285 bp, Zea mays
  Clone ID: MRT4577_5766C.1
cacgagcgcctcaagaagccggactggatccgcgtaaaagccgcgagcccgtcgtcgcgcttctacgagatcaaggacatcctgcgcgccaacaacctcgtcaccgtgtgcgaggaagcgagctgcccgaacatcggcgaatgcttcggcaagggcaccgcgaccttcatgatcatgggcgacaagtgcacgcgccgctgcccgttctgcgacgtcggccacggccgcccggacccgctggacgtcaacgagccggggaatctcgccaagaccatcgccgacctg

SEQ ID NO: 138369 - DNA, 754 bp, Zea mays
  unsure (1)..(754): unsure at all n locations
  Clone ID: MRT4577_57670C.1
aattggcacgagggcgcgcccaggccccgaggccgagcgatctggtgacggcacggcagcatggccgaggcgacgggccacggcggccgcgtcgtcgacctctcgggggccgagatccgcggggacctcgaggatcgcaacccgcccatcttcctccctcgccagcccgccgcgtccccgctcctcgccctcgacatcggagggactctgatcaagctggtgtacacggcgagccgcggcggaggggccgacgggacggacctgcgcttcgccaagttcgagaggcgacgcctacaggagtgcttcaacttcatccgggcggaggggctcctcgccagcaatggtggcggagaaggcgtgaccctgaaggctacaggtggtggagcatataaatttgctgatgatttcctggagaaactaggtgtttgtcttgacaagcttgatgaaatggatagtgtcgtttctggagcaaactttttgttgcaggttactggaaacagaaagtttgaaagggtaactgggacacatattggtggtggtaccatgtttggtttagcaaaacttttaacaggctgtaagagctatgatgaattcttgcaattaagccagaaaggggacaactttgttcttgatttaattgtcaaggatatatgtggagaagctgtctgccagaagcaagggctttcacatcaactcttgcttctagctttgggaaagntattacttctaagaagaagctgacagattacaagcc

SEQ ID NO: 138370 - DNA, 856 bp, Zea mays
  Clone ID: MRT4577_57671C.1
tcatccgctgatgtcccatcaactggtgctgattcgtgatgaggctccttctcctcgagggtaagattttcaccacttggatccccataactcatcagggcaccaagtgctcccaaatacccttcatgtcgcaaaaatactgcttgcatttggctctgtgaccagaaatcaattgcataagaaatattttccatcgtgcttttgtgaccacgtatatatgatccaccgaagaaaacccttcggaggcccaaaagtgatgcaacaaggaaagcaatttgtgcaatgttgtaggtaaaggcgctcaacaatgtggatgcaaggtcttcaggcttgtaatctgtcagcttcttcttagaagtaataactttcccaaagctagaagcaagagttgatgttgaaagcccttgcttctggcagacaagctctccacatatatccttgacaattaaatcaagaacaaagttgtcccctttctggcttaattgcaagaattcatcatagctcttacagcctgttaaaagttttgctaaaccaaacatggtaccaccaccaatgtgcgtcccagttaccctttcaaactttctgtttccagtaaccttcagtatactaactcctgagccaatattgacaagaaggtaaggaaacaaattatttggggaaacatctactggattcctcagtccattcatgtgtgtgaaggctgcgccaggaatactctgcaacaaaaagtttgctccagaaacgacactatccatttcatcaagcttgccaagacaaacacctagtttctccaggaaatcatcagcaaatttatatgctccaccacctgtagccttccgacagcaacggaattcga

SEQ ID NO: 138371 - DNA, 199 bp, Zea mays
  unsure (1)..(199): unsure at all n locations
  Clone ID: MRT4577_57672C.1
attcttcaaattctgggcctgccactggggtgattccctgtgataagcggcttaagccacattcttgtacataagctgtcttttctgnttaattgaaaagcagaactcctgccagtttctttcaaaaaatggcaattactttgcggaagatcaaatatcatgctaacttgcatttactgatactagccttcgtgttcat

SEQ ID NO: 138372 - DNA, 476 bp, Zea mays
  unsure (1)..(476): unsure at all n locations
  Clone ID: MRT4577_57673C.1
ggaagnnnaagggaaaagncanagagaacgcaaggggggnacaccagcaagngangccacgggacagnnaaacanngaaacggngnggngnncncacngcannanngccnanagagggggggcaaaaggccnacaacgccaaccaagcnaaaaagcanngggggccnnnacaagcacaaaaggggncgaggnnaaaggagnaagccggagcaggaaaacgcngcagcancaacagggcagaaccagcacggcggcgccaagncgcgnnngaggnggcaaccngaccaagnnccgcacacgggcngganagcacacgagcncggacggggggaaagggccaaagccagaagccgggggacaccggggggggccgcaaaaacnaagagggaggagcagagagggacncnanccaaggcgcgagccagccacccaggcgaggaaaagcaaacagcacaggaaaaaaggcgggagggaaa

SEQ ID NO: 138373 - DNA, 582 bp, Zea mays
  Clone ID: MRT4577_57674C.1
gatttcaacgcacctacgcccacgtgccacgattgattgattgcttctccccgcccccgcggcaaaaccttagcttctcctaatccatggacctaggaacgctcaccccgcatgctgatctcacaacaccccgcgagggcgtgctgcactcagcataacaaactctactatcagtcgaacttgctcgccaacttagatagcaaatgaccccatcactgcacccaattcgatgaagttgtattatcgatcgccgacgtctgccgccattgcctcgacgacgtctgctctatggcggacaacgtaagcgaaattcatatcgctatcgctgaacaaccgaccgccatccaattggtctatcggaaactgctcggctacgacatcactctcgacatccacaagcgagatgagtgtgagaagaaggatcgccctgatgtgatcaccacaccggcactgaacacgacatcctactgtttcaacaactcgcaagagctaaacgactataaagatgcgaggcatgctactccctagtatgacaggtatgggaactcgaccactcaggcattatacaacatgatgacgcac

SEQ ID NO: 138374 - DNA, 321 bp, Zea mays
  Clone ID: MRT4577_57675C.1
ccacccacgcttgcgccatacaactgatgcttctgttcatcctccctctgctatatctccacaataacacctgtaaccggatcagctcaaaatcctactgtggaaaggccctaaaaatctaccaaaatcatattccatggacttatactaaataaaataccactcttcttaactgacatatcaaccatatatcatactcagaatcaacaccagcaaactctcaagctacttcacaaagcctacaaactttacaacacttatgccctacagcataacaccattactgacattcaaccataaatgggcgttcttcactacatt

SEQ ID NO: 138375 - DNA, 382 bp, Zea mays
  Clone ID: MRT4577_57676C.1
agggaatcggtttatatggcataaacgattcgccccgtgaaaatccgcgccctgaacaccaactgtccagaaagagtaaagagaaagatttgttttgatttgatgaagttgaatttcttcttttattcaaccttccgtctgaacgaacattcttcggtcaatcgagcttttccaccagtaggctgacacaacacggtggcgcaagaggcgcaataaaccacagtggctgcatgactgaaaatcgttgtgaactgaaagcagcccgggcacttaacatccatgaagtaactgtttggactttgcacgagacgcttcaacttattgagcttttgctcgtacactttaagcggatgaagtaggtcgtgatcggtgggcatggttt

SEQ ID NO: 138376 - DNA, 388 bp, Zea mays
  Clone ID: MRT4577_57677C.1
gctacacatttgtacactacacaaactatgcagggcgcaataccaaggagcaaagaggaactgtttatgacggacaactgctgttgctggaacaggctcacctacaaatagatcagcgggatcactgttgggtgcaaggacatctagcacgggtactgctgcatcgacggaaacctgcagtatactagccaactacaatgtagggaagctacgactgaggggaccacactcgggaggacagaccaaacgcttactacggtacattatcatagtacgggaggaggtagaacgagaaaaaagtcaagattgcttatcttgctggatgaggatacaagaaacacacatcttctcaagaaacactgaatgacactgaattgccaaacatgct

SEQ ID NO: 138377 - DNA, 278 bp, Zea mays
  Clone ID: MRT4577_57678C.1
acgcatcaagtaacccattacgcacatcagattacagcactcgacaccatgaaggtgccgatcgatgcgctcgctctcctggctctcgctgcgagcgccacctccatgcacacacacagctgatgaagctgtaaaccaccgttgcatgcacagacaccgtactatatgccgcctccactatatgttgacccgccacatcagccgcaaccatgagaatacctcaatcaaccaccgcagctaaacccgtgacagcagttccgatcctgcggcgatggcag

SEQ ID NO: 138378 - DNA, 593 bp, Zea mays
  Clone ID: MRT4577_57679C.1
gccggccggttcggaacttcggcaagcattgatgctattgccgacaccggcaccagccttgtctacgtcgatgactccatccttagcgcctactatggacaggtccgtggcgcacaggtcgactcccagcagggaggttacgtcttcccctgctccagcaccctgcccgacttctccatcgttgtcggtggcgtcaagcagaccattcctggaaagtacatcaactttgctcccaacggcgacggcacttgcttcggtggtctccagtcgggatctgactttggtttcaacatcttcggtgatatcttcctcaagagcaagtacgtcatccacgagatgggcagcaacggccccaggctgggtttcgcccagcagtctggtaactaagctgctggcaactgtgtcgaggatatccttgatgaggcttgcaatggcaattatgtggagatgagcgagcgagagatggcaatggcatagagcattggatgggctctaaggcatgtttgtgaattactttctggagcagtagctttttgtaaatattttcaatcaagtattgaaacttctaaaaaaaaaaaaaaaaaaggccccta

SEQ ID NO: 138379 - DNA, 448 bp, Zea mays
  Clone ID: MRT4577_57680C.1
gtttatagttgagactgtaatactcatctctcacttgttttctgtcaagggggtgcaagaaataccaattaatctggatgtttatggcttttctggtaaatatgggttgacagaaattatagcttctggcttgagctgggtggtttcagatcttgtccagtgccaaccagtgtgtatatatacatttttaaggtcttgtaacctagataattagtgtcaacttcgaggctgcgagtccacaccttatctaccgtgcttgtctctttttctttatttacacatgcatttattttgcctcttattgcattatgcccctttcaggatgaaagatgctcgaagttgaaaatatacccaatactgcagaaggtttaccttgaaagaattttgaggaaaccagaaattgatgcatttgcagaggagcttatgccgcatcaagaaagctttatta

SEQ ID NO: 138380 - DNA, 2300 bp, Zea mays
  unsure (1)..(2300): unsure at all n locations
  Clone ID: MRT4577_57681C.1
tttctgtacaaggtaagattgttgtagttttatctcaatgtccttggattacgtgctggtagtacccattctcagctgtgttgctactctgtacaaggtaagatttttgtagttttatctcaatgtccttggattacgtgctggtagtacccattctcagctgtgttttgcaattgtgagcatcggaatacaactatctagatgcattacgtgttaaatgccttggatttgttcatgtcatctatataaaaacatgtttcatgtttagcttatcatagtttatagttgagactgtaatactcatctctcacttgttttctgtcaaggtggtgcaacaaataccaattaatctggatgtttatggcttttctggtaaatatgggttgacagaaattatagcttctggcttgagctgggtggtttcagatcttgtccagtgccaaccagtgtgtatatatacatttttaaggtcttgtaacctagataattagtgtcaacttcgaggctgcgagtccacaccttatctaccgngcttgtctctttttctttatttacacatgcatttattttgcctcttattgcattatgcccacgcgtccggaaatataaaaccctttttaagggacgatggccgaaaccaaactggtgctttttaccgtttcctttgttgcaaacgctaaatttctcacgaattcttccgtcgtcggcggcgcagattgaatgccaaaaccctagctcgccctccccaattccccatttcggccacaccctccttgcctccacggctccacccctgcttcaggttacctgtgccagcgacgccggtagaagccatggacagctctctcgcgagcgcggcggcgatagccgatcagcgccagaagatcgagcagtaccgccacatcctcgcctccgtcctctcgtcttccccaccggacatctctcaggccaagcgcttcctcgaccacatggtttcggacgaagttccgctcgtggtgtcgcgtcaattgctccagacgttcgcgcaggacctagggaagctggagtcggacgcgcagaaggaggttgcccactacgcgctcacgcagatccagccgcgtgtggtctccttcgaggagcaggtggtagtgattagagagaagcttgcagagctatatgagtctgaacaacaatggtcaaaagcagcacaaatgcttagtgggattgacttggattcaggaatcaggatgcttgatgacaccaacaaattatccaagtgtgttcaaattgcacgactctatttagaggatgatgatgcagtgaatgctgaggcttttataaacaaggcttcatttttggtcaccaacagccatcaggaggttctaaacttacagtacaaggtctgttatgcaaggattttggatctgaaaagaagatttctggaagctgcacttcgatattatgacatttctcaaattgaacaacgcaagattggagacgaagagattgatgaaaatgcacttgagcaagctcttagtgctgctgtgacatgcacaatattggctggtgctggtccacaacgctcccgtgttcttgctactctgtacaaggatgaaagatgctcgaagttgaaaatatacccaatactgcagaaggtttaccttgaaagaattttgaggaaaccagaaattgatgcatttgcagaggagcttaggccgcatcaaaaagctttattaccagataagtcgactgtgcttgaccgagcaatgatcgagcataatctccttagtgccagtaaactttacacaaatatcagctttgatgagcttgggacattactggggattgatccaaggaaggctgagaagatagcatctcggatgatttatgaggatagaatgcggggctcaattgatcaggttgaggctgtgatacattttgatgatgacacggaagagctgcagcaatgggatcagcagattgctggactgtgccaagccctgaatgacatccttgacagcatgtcaagcaagggaataactattccggtgtgaataaatatctcatgctgtcggtcgatggtgcatggcagaactgctaccatgccccggaatccagaatcaacattttgtatagtttgcagctgcaaatgtgtatcttgtgattttggggggaggatgcttgtttaagtaacgctcactggataccttgtagcactactgtttcaagagcgctcgaatgattcagtaagggctttcggtttcatcagaatccatatgtctggattggctgagtttcaatccatagcaanngggccctcg

SEQ ID NO: 138381 - DNA, 305 bp, Zea mays
  Clone ID: MRT4577_57682C.1
gattcccactttcataaaaacaagaagttggtctttcaaagctaaaagataaaaactggggtcttaaaaactggggggttgtttccaaaccggcccttaaataaaggggtcaaatttttccgctctcattcctagaaagcattttttgcaaaagaagggaacttgtaccccgtttttacgcgggaagcccagcccagcacagcccagggcgtcgggtcctggtcacattacagggaactctccgcagttttagatcgggcataccgatcccagccttttaattgtagggttttttctgcgccagc

SEQ ID NO: 138382 - DNA, 3047 bp, Zea mays
  Clone ID: MRT4577_57683C.1
atggctccacaaacgcgaccctcggtgcagacccgcttcctgcttgacacgatggtggggaaggatcgcaccaatcaggaaaactggagccgggtgtttgcatcttttgatgtgatcactaacgggttggtggcggtggaaaaagcgcaccatcaactgatggcacaagtggagctggcggcattggtggcggagaatgtggcaatggagagaaccgaactgtaccacaaggtggaggaaaccggtaaggttgtggctcagatgagattggagatagaaaggcagttaggcgattttacagttggtttggagggagatgattactttaccatttataagattcctgagtcgatttgggtttcatctgctgccatgcatttggagtttagtggtgctcagtggtggaagtgctacaaattgcagcatggaatggtgggatggcaggggtttgtagcagctgtgactagcaaatttggggcaaatgcttatccaagggctttgaggaggttgatgtccttaaggcagactgatagtctggattcctacatctctgaatttgagaaggtgagggctatcctgctggctcaaatacaaccggaggtgttggatcgaaataagttcaaaggacagaagcagacaacaactgctaagttccaaggatttccaaataagatggagaataaaggaggttaccaggcaagtgatctggcaaaggagagacaagtcagagagtacaggaagttaaatggattgtgttatgcttgtggggacaaatttgaacctggacatctagcaaagtgcaccaagaggaatcaaatccagctcaatgctgtggctctaactggtactgctagtggaaacagtatgagaattatatccactgtgggcaaacaagcgatggtcatgctgatagactctggaagctcctcagatttcatcagtgaacacatggttcaaaaactggggttagcagtggcagtatgtccctctgctagtgtcaagatggctgatggaaattgtattgtcagtgacaaactgggagaggctcgaagttgaaaatatgcccaatactgcagaaggtttaccttgaaagaattttgaggaaaccagaaattgatgcatttgcagaggagcttaggccgcatcaaaaagctttattaccagataagtcgactgtgcttgaccgagcaatgatcgagcataatctccttagtgccagtaaactttacacaaatatcagctttgatgagcttgggacattactggggattgatccaaggaaggctgagaagatagcatctcggatgatttatgaggatagaatgcggggctcaattgatcaggttgaggctgtgatacattttgatgatgacacggaagagctgcagcaatgggatcagcagattgctggactgtgccaagccctgaacgacatccttgacagcatgtcaagcaagggaataactattccggtgtgaataaatatctcatgctgtcggtcgatggtgcatggcagaactgcttacatgccccggaatctagaatcaacattttgtatagtttgcagctgcaaatgtgtatcttgtgattttggggggaggatgcttgtttaagtaacgctcactggataccttgtagcactactgtttcaagagcgctcgaatgattcagtaagggctttcggtttcatcaaaatccaaatgaaaagaagtggattggctgagtttcaatccatagcaagtcaaaagaatttttaaattttttcctatcaaccagtgttctcggatctttctcagattgtggatttatccagtgtggaagtgtatccagtcaagactgtggaacacaggttggtgagaaagggaagccattcagttgtccaggtgaaggtggcatggtcaaatctccctgatgatgctttgacttgggaggattttgaagtgctgaagagaagatttccaaatgtgattgattgggggcaattaaatcctggccggggaaaagatgttagtactgtggtagtgattagagagaagcttgcagagctatatgagtctgaacaacaatggtcaaaagcagcacaaatgcttagtgggattgacttggattcaggaatcaggatgcttgatgacaccaacaaattatccaagtgtgttcaaattgcacgactctatttagaggatgatgatgcagtgaatgctgaggcttttataaacaaggcttcatttttggtcaccaacagccatcaggaggttctaaacttacagtacaaggtctgttatgcaaggattttggatctgaaaagaagatttctggaagctgcacttcgatattatgacatttctcaaattgaacaacgcaagattggagacgaagagattgatgaaaatgcactagaacaagctcttagtgctgctgtgacatgcacaatattggctggtgctggtccacaacgctcccgtgttcttgctactctgtacaaggtggtgcaacaaataccaattaatctggatgtttatggcttttctggtaaatatgggttgacagaaattatagcttctggcttgagctgggtggtttcagatcttgtccagtgccaaccagatgaaagatgctcgaagttgaaaatatacccaatactgcagaaggtttaccttgaaagaattttgaggaaaccagaaattgatgcatttgcagaggagctgaggccgcatcaaaaagctttattaccagataagtcgactgtgcttgaccgagcaatgatcgagcataatctccttagtgccagtaaactttacacaaatatcagctttgatgagcttgggacattactggggattgatccaaggaaggctgagaagatagcatctcggatgatttatgaggatagaatgcggggctcaattgatcaggttgaggctgtgatacattttgatgatgacacggaagagctgcagcaatgggatcagcagattgctggactgtgccaagccctgaacgacatccttgacagcatgtcaagcaagggaataactattccggtgtga

SEQ ID NO: 138383 - DNA, 327 bp, Zea mays
  Clone ID: MRT4577_57684C.1
atggacagctctctcgcgagcgcggcggcgatagccgatcagcgccagaagatcgagcagtaccgccacatcctcgcctccgtcctctcgtcttccccaccggacatctctcaggccaagcgcttcctcgaccacatggtttcggacgaagttccgctcgtggtgtcgcgtcaattgctccagacgttcgcgcaggacctagggaagctggagtcggacgcgcagaaggaggttgcccactacgcgctcacgcagatccagccgcgtgtggtctccttcgaggagcaggttggctacattggtttgctattgcgaatgctactttaa

SEQ ID NO: 138384 - DNA, 603 bp, Zea mays
  unsure (1)..(603): unsure at all n locations
  Clone ID: MRT4577_57685C.1
ggnanaatgtcacatagcatttcgtacatttctcagatgattagccggcaaatcattttaagggattctatccgatttcatcatttcaaagatgggaagtgttcttgtggagattactggtaactgatttgaaaggttggtttagcaccagttcctaacatttcaggtcataccacattgccagatgctaggtacatgtttcttacctttctcttatttaagtcatatgtgtgtgtgtgtaataaaataactgttcgagtttctcctaagacatgaatttactattcaataactattattccattttccctcaacccatggaatttgtaaagaaataattgcatctgtcaaatactcgaagcttacacctgtagcatctaacattaaaattgaatttattaattcggcttgctaattttataggtgttatcttttcatgactgtccttgggctgcccaacataacagcttttggtcatcactagatcaggctggtgcgctccactacacctgaacaggcgaaaagtactggaaagagcgataaacagcgatcgttacagggaggcagtactgaacacggcagggtcacgtgtcactccgccta

SEQ ID NO: 138385 - DNA, 781 bp, Zea mays
  unsure (1)..(781): unsure at all n locations
  Clone ID: MRT4577_57686C.1
caggtctgccgttaccacctgtatctccggaaacgaaaatcagaaatgactaatcctttcaactgtctgtactaaattactttgtacgaatgcacatctcggccgtcgggtagctgctcaccatttaaaagtatatatccgttgtttcagaaatggaattgctattctcgattcagacaagacactgatttgtttacgaaacgctcttgattttgtaggatatctcatttgtcaaaaaagccgtttcttctttttaaagacgaagaatttatttatatattcgataatggcaaaaatgtggagctgtatcaatgattctcaatggaagatcggggctttttttaccaattcttatgctaatcctaagaaattccgttcaagaaacaataaaatctattttgggttgaaccgacaacctgattgtgtggttattcttcatccagatagaaagtcatcggtcatactggaagctgatcgatcacaaataccgattgtatacttagtggattccacgatcccgtcccataaaagatttacttttaccatcccagcgaatgattctttacggctgctcgtatatctattttgtaatttgatcacgaaaactgtgaggcaaaaaagaacagcaatcaacgggccgagagcgggagcacgaggagcgagtaccctntctgngtattcgcacctaccctgccgcctcttctaagtggangaaagaagttntttcgcttcaaaattggattgtcatgaatcgtaaattttttttgatgcttctgcttct

SEQ ID NO: 138386 - DNA, 356 bp, Zea mays
  Clone ID: MRT4577_57687C.1
gtcctgctcatttgccactttaattaacacaaaccaacaaggggatcaggacctggcgcttgcacccgccaccgaggctagacccaaaccactctccaaatgtgagggccaaattccaggtttttcaaaatgggactatggagcatccaacgaactttttaaatacttgacacaaaggctagttaccttgacaccataatgtgggcgcacgcctgaaatttccaggtttgcggaaaaccttacgtcaacctcaaggccctcgttgagctcaacgaggaacgggttcacggtcttttccaccacaaattggacaaggatcgcgccaagggactgaagaacttacggaacattgaact

SEQ ID NO: 138387 - DNA, 361 bp, Zea mays
  Clone ID: MRT4577_57688C.1
ccacgagcaacagacaaagtacagtactagtaccaacagtggcgggtaaaatataacgcctccttatgctccttaggtctatcagaaagtgctgatacagggaccatctttcaacattgctgacaagctcgtattgctcccattattcccccggacctctcaccaacacagttttgggtatgtgaaaacccaattcttgaaccctacaggatccaacaggctatcgaagatgtcatcttacctttataacccttgcttctacaacagttataaggcctattacagcaggtaccttaggcgcatatattgtcacaaaacatcatgtcacatcaactacaacaacttgagctagcagaccttg

SEQ ID NO: 138388 - DNA, 388 bp, Zea mays
  Clone ID: MRT4577_57689C.1
aggggaaaacgggctacttttgggcgggttcttggtaaactgagccaagtttgggacatggggtctagggccccccatcacatcacggggggagggaaaagctcacttttttgccggacacaaatgagcaaggttcgggtcaaagggggatttgacccaacgggggcaacaaaccaggggcatgtgaccaggagggatccaacatttccagcctaattcgagattattggtcaagaatattatttctcggcacatgatccatttgctcttacaatgggggaatgggggcccccaaatcactggggcgattattttttcagggccaacctcgactaaacaattcctagctttgagccccttggccatgggttccacttaagggcccccg

SEQ ID NO: 138389 - DNA, 408 bp, Zea mays
  Clone ID: MRT4577_57690C.1
gcggtgaattattccatctctctggggctggttcggttaggggtgaattgagagggattgaaggggattcaatccccttctatataaatttaaataggagggaatttaatcccctccaatccattttaaacccctggctttgttcgtttcatccctaatccatggggattgagggggattggagtggattgagggggattttgacttgtaggggattaaatccctctcaatccccatgggtttgataaaaacgaacagggccttaaaccgaacaagccctggttgtgtgccgtcgacattcccacgtgaatcgcatgcttgtgtcagtgttacgtcttttctcgtgttgtacagcagccgatgacaaataaatgaaaatgttttgcaactttgcgttgctttgctttg

SEQ ID NO: 138390 - DNA, 298 bp, Zea mays
  Clone ID: MRT4577_57691C.1
tcagactacacctatgctactacttgcattacataaacacagcatgtgattgacacatattgacaacctaacgacagtgaggtactgcatagcttactacgttcttgcgtattcttgctatttttgccagcgcaaccaatgcgataattattgcgcagtgctcactggctaccagtatgcattacctacgctgacctcccaccagttactcagaggggcgcttaacacccaccatggcgagcctattctttacagcaagaattgtgaaggcgtgcgtgttaaaacaacctattttcct

SEQ ID NO: 138391 - DNA, 849 bp, Zea mays
  unsure (1)..(849): unsure at all n locations
  Clone ID: MRT4577_57692C.1
gcctcgttacggcgcttgcttccattccaatgaaaggcgcagttgtcttgggctgggagagggacatgccgactgctggctgatctggtgattttggccctcagctatctaggacgttcgtcggatttctacagtggtggatcgatcgatcacggcatgcagagacgtgaagcaagcaattagtatggctcagtgacagtgacagtcagtcagtcttgctttactttcttttctttcgtgtcaaaaagtcggtcaattttttcctttttttatttattgagatgaaaaagaaagaattcaggcttgcttcgccggcctgtccttgtccgatttctagctctacgttgtcgtcgtgcctttgagagagagagattgccggaacagatagcagaggctgcggacccgcccatccgcagcccagccagaccttgaggcccgcgtccgaattgcttcttgggcccagtagaaagcgcttcggcccacaagcagacgccaaacaccggcggcatcatcgcctgcaagattttgcgcgggaccagaaactgccccttgccaggtcttgcatgcatgatgcatgctgttcctgtccgcgagcaagaatggagtgaccgcgtgctttggaagttttcatataggtgtttagtgtcacactaaacgcttcgtcatgccggagtacgtaatgtaagtgccaacgcggcaaaagatctgacagaacacaacattttgcttgattccacgcatcagattaattccgtttaacctatggaccaaacatattaacattgaacacagcanatagtcttcttcactctgcacacactgttcgagaccgagagcaggctagcagct

SEQ ID NO: 138392 - DNA, 132 bp, Zea mays
  Clone ID: MRT4577_57693C.1
tcgtccgggtgcattgattccatggtccaccatggcgcatccagatgtggccactatgacgactaataagcgactcctcctcatctcgctggcgtctgcgggcattcggacggcgcaggcctatgcgatcgc

SEQ ID NO: 138393 - DNA, 155 bp, Zea mays
  unsure (1)..(155): unsure at all n locations
  Clone ID: MRT4577_57696C.1
ccgcgggctgtcgctctcccgctcggctcggcgaacgcgatctgttccccaacctccgcagccgctccaccgtcctccactccggctgccgaatcgacccgnccccgaatccagaatccaggagctgaggggatggnacgcgnaacagggcgcca

SEQ ID NO: 138394 - DNA, 461 bp, Zea mays
  Clone ID: MRT4577_57697C.1
aaatactgaaagacagttataatatgggaatactaatatgaagggtaaaaggggaatgcgactggtttacataaagtttttgctaagcagttcaggtgccaaacattaaatgtcttccaaggttgggggccctactggcaaacggacctccaaaactttaactgaaaagggcccaccattgggcacaagcttagcctcacacacgttggatcagagcaagtccattcgtcctgagctggggaagatgctttggaagagaattgtgcttatgttgaagggctccatgagcgtggagaccggtcattatttggcctgacaggatattttttaagagaagggggcctcttgcgaagaggggagctactagggctcctacttgcacgcgatgcgctgtcttttgcacgccttttttaatcatgaggagtgtaactagggctgcgggtatgacagggctttttttt

SEQ ID NO: 138395 - DNA, 519 bp, Zea mays
  Clone ID: MRT4577_57698C.1
tcaagcggccgcccgggcaggtgctttttttttttttttttgttttttttttctttttttttgttttatttttttttttcttttttttttctttggttaccatttatagtttaaaagcttgtgctccccgatcttaggaaaagtgattgttaaccccccttggggccctaaatgctcatcagatcctggaaatgtaccttcttattccatgggtggcatcaatcatagctcaaaaaagtgaaaaccggctccaccacatataagcttaaaaggggcccccccaatgatcattccttggtagggggcggtggggtaacaaaaaccaggcctaacaaaggggaacaaatgtggtacaaacaagaggggggcggggttagcccaaaactggtcttaaaaaggcaaaacctgttgctgtggcaaaaaggaagcacgacttgctgcaactagctcgttaaagggcaaaagtatttgctgctgcaaataaccggtggggatcagcgcggccaattggttaaatgg

SEQ ID NO: 138396 - DNA, 332 bp, Zea mays
  Clone ID: MRT4577_57699C.1
acccacgcatccgaaaaaaaaaaaacaaaacaaaataaaacaaacacctctactactacaacaagttcttgggcaacaaggggcagcgcttcaccaaacaacccctcaaacatctacatgcatgcccaagccctattcctataacgccgctaccgcctttaccttccacctcctcaactcatccaaaatcagaactcacacgacctttctattcgcgctacctaaaacaacaagtgcctccaggaacttaaaaactgggatcagtgaaaaaccatgctgttccaaactaaaatggactaccataaaaacccctatgatacgaaggactctaa

SEQ ID NO: 138397 - DNA, 381 bp, Zea mays
  Clone ID: MRT4577_576C.1
attcggctcgagcacatctcatatatttgattttaattctatagttttactgtgtctaaaacctttagaatctagagtctcctgccataacttcaatttcttatttactcctgctcgactttcaccaatcaatactacactgtctgcaaaaatgcatacaccaagggatatcctcctgtatgtcccgtatgatatcatgcattaccaaagcaaaaaggtaagggcttaaagttgactcttattgtagttctattcttatcaggaagtcatccgtgtccccatcacttgttcgaacactagtcacaacattggtgtacatgttttaaatgagtctaacatacttttttggaactttatgtttgtttaaagcccaccacataa

SEQ ID NO: 138398 - DNA, 389 bp, Zea mays
  Clone ID: MRT4577_57700C.1
attcgggtctagcggcctgttgccctgtcgctttttacattcaggcatccatgggcgagagcgggagctatagcgttctcatcatgcctaccttaccttgcctgcctgtctgtctgtactgtctgtatccatgagctgcacttgtgcggagacggcgccgactgaacatggcctgatatccagtggacgcgccggacgtttgaggcggaaggctactctcattgcttaccagaccctctacggccgctcgatgctgttacgaggttcaaagttctgagaccgacggtatgaggatctgcctgtcatcatcggtcaactggtgtgagcaatgcgaggatttaacccccgtgctgtacgctgcctacgagcatcctaaagagcgcggcccc

SEQ ID NO: 138399 - DNA, 333 bp, Zea mays
  Clone ID: MRT4577_57701C.1
aaaggggttaagtaaaaaaataagttataggatgataatattaatgtgttattgtagattattaggaaaaattaagttttatttttggtgtaggaaaaggagagttttagtagatatttggaaatttagaaacaagagttggctaggagtaaatttgcgatcagtcagttaaaaagtgtggaggttgtttataaattatggcctataatatacacgatcaggggtgaggttatagagttggtggggggataattaaagagatgcttgtataggggatgtaaataaacatattaagtttaggataattaatagtggtttataaagttatggggt

SEQ ID NO: 138400 - DNA, 170 bp, Zea mays
  Clone ID: MRT4577_57702C.1
aaacccttctctacgccactcttcctcccactcttcctaactatcagattttcattaaatccatcctttacatctcccctgtcagttctatcttaaactactacgactccataatccactatctcataaacgacataatctcccactcatacaatctaacctcctattac

SEQ ID NO: 138401 - DNA, 464 bp, Zea mays
  unsure (1)..(464): unsure at all n locations
  Clone ID: MRT4577_57703C.1
aatgacgccacgccaaccccgggctcaactggggtctttacgccccaggggcgttttgcctctcagtccaggcccccacgcagcaccaccactgctggagacagcgccgctccgacccgcgaccgatccggccggatcgcccctgcatggaccagaactagaagggggcgaagaccggggagggcacgtaccgggtggtgcacaagggcatggaccgccacaccaacgagacgagcgggctcaagaagatccgcctcgagcaggaggacgagggcgtacgatccaccggcatacgcgagatctccctnctcaaggagatgcatcaccgcaacatcgtcaggctgcaggacgtcgtgcacaacgacaagagcatatacctcgggttcgagtacctggacctcgagctcaagaagcacatggacgtctgcacggacttcaagaaccaccgcatagtcaaaatcttc

SEQ ID NO: 138402 - DNA, 193 bp, Zea mays
  unsure (1)..(193): unsure at all n locations
  Clone ID: MRT4577_57704C.1
gcgnnntccgcggtccttcgnttttctttgtccccntngntcccccggaaattctttcnngtccnngcctngccctccctgtngcgccgcngnnngatntnggccccggntccctgcgggggcgctttggggggtggccccnncgcccggcncntctnctttggaaaacngncctnttncntnnccctgccct

SEQ ID NO: 138403 - DNA, 200 bp, Zea mays
  unsure (1)..(200): unsure at all n locations
  Clone ID: MRT4577_57705C.1
ttaaaaatgaaatggggggcttgtttttatcntggtatgaggctgcatttttgtttgtttacatgttctctgtctgcatttatgttagtgccgaacgttgggttccgttccatctggaccccttaaaagttgtgtaggggggggggggcaatacttttaagtgttggtggtgcgttttgtcttggtggggtgtcgtctct

SEQ ID NO: 138404 - DNA, 868 bp, Zea mays
  unsure (1)..(868): unsure at all n locations
  Clone ID: MRT4577_57706C.1
gaataccagcttgcccagcagtcaccaccacatcctccactatttcccttagcgtgcgtcctgggatccaaggacgtagttgctagcaatggcgcatctgcggctccacggcaccatcgacgctaccatcgtgggggccgacaacctccatgatcgctcccgccacaccggcaaggtccccggcttcctcggcaatattgtgcaaggtgtccaggagacgacgggtttgggcaagggcctgtcgcggatgtacgcggccatcttcctcggcagcgcgtgcatcgcccgaacgcgtaccatcgccgtccctgccgccggaagcgcgcggtggaacgagccgctccgcgcctactgcgcccaccacgccgccgacgtcgtcatctccgtcatgatcgagcagctcggcctcgacgacgacaccgtcctcggccgcgcctacctgcccgcccgggagctcctcagcgacggcacaaccatcgaccgctggttcgacgtccttggcgccaacaggaagaagctcccggatgggcccaagatacacgtgcagatcagcttccgcgatgtcgccgaccaaggcgtgtcatggggcggtggcgtcggctccggcgtggttccccacaccttcttctcccagaggcccgggtgcagggtcaccctgtaccaggacgcgcacgcgtctccggagttcgaccccaagatccagcttcgacggcggggggctctacaagcccgggcattgctgngaagacatatacgacgccatcagcaatgcacggcacctggtgtacatcacggcctggtcgatgttcccccacatcacgctggtgcggggaccgggacggcgcccaggaaccctcggcgagctcct

SEQ ID NO: 138405 - DNA, 1680 bp, Zea mays
  Clone ID: MRT4577_57707C.1
gcctccctccgggcggggaccacgcccgactcgctcggcccagcagagggagcatcgcaattcacaccagcgcagcgcgacgaggggaagaggagtttctcagccgcagtcgccgaaccacacgccgccgaggccgtaggcgcgcttgctgtcccgccgcccgcatggcaccgaagcgcccggccgccgcagcggcggcggcctcggggtcggcgtccgaggcatccgacgcggaggcggacgtgggccaccagccgtcctccccatccccgtccaagacgccgccgaccaaccctaaccctaagtccgctgccgctggccccgccgaggactccaccgcggccggatccgactccgaggccgcgtacgactctgacgcggaccaccgccccgcgcaccggaaggcggcggtagcggcgtccccatcgcgcaagcccaggagccccaggccgcgctcccgctcccgctccccggacgcagcctcgtactccgacggcgcggcctcagatgccgacgctgaccctgccgcccgagacggcgccgactccgccgacgacggcaacgcctctccgctcgcgctcccgcgcctatcccgcgccgaggctgccgccatcaagcccctcagctcgcgccccatggatccgccgcgccgctccatgggtaccctctttctccgagctgcgctcgaagcgcccccgcagcgccgccgtcccgtcatccgtggagcagctcaagaggccgacgcggctctggagcctccgtgacgagatcgtcatcctgcggggcttggccacgtaccgcgccaagcgtggcgtcctccccggctccacgtacgacatttctaagctccacggccgcatccggagcgagctcagcgttaaggtaaccaccacgcagctcggtgacaaggtacggcgtctcaagcagaagtacaacctgcttgcgtcacgtggcaagagcgggcgggatccagacttgcccagccagcacgaacagagcgtctatgagattggcaagaaggtttggggaggaagtgctaacggtggaggaagtaccggtggtgatgggtatgagattggtggtgacagccaagaggagcatgagtttggagagagtgacgaggatgtggagagtgggtgggatgaacgtgcccgcaagaacaggaggctgatgccaatcactatggcaaatggacacggatctgggttcggggctggcagagggaagtttgatgttgagaagggaaaggatgcttatccatacctttgggagactgtagaggatctgtcaaaggagcacccgaatggggtagcattcaagaaagcctttgagctgatcgaaggcgccagagcgcgtgggatggaggagaagctacgaaaattcaggctgacagagatcagacaccagctgcgacgtatggaattgatgaaggagacagtgaagatggtgcttgatgcgctggaaggttgactgagtaatgatcttctggtgggtgagttgtgcaatgtttaaaggagcaatcagtgtcttcttttgtttctagatagagtttctgtgactgaattacttgacttgcatagacaagttgcacttgtgtctcttgggtgctaacttttgcattatatggtatacagtttctatgctcacttaagtttggttaaaaaaaaaaaaaaaaaaaaa

SEQ ID NO: 138406 - DNA, 1160 bp, Zea mays
  unsure (1)..(1160): unsure at all n locations
  Clone ID: MRT4577_57708C.1
ggtgccctctttctcggagcagcgctcgaagcgcccccgcagcgtcgccgtcccgtcatccgtggagcacctcaagaggccgacgcggctctggagcctccacgacgagatcgtcatcctgcggggcttggccacgtaccgcgccaagcgtggcgtcctccccggctccacgtacgacatttctaagctccacggccgcatccggagcgagctcagcgttaaggtaaccaccacgcagctcggtgacaaggtacggcgtctcaagcagaagtacaacctgcttgcgtcacgtggcaagagcgggcgggatccagacttgcccagccagcacgaacagagcgtctatgagattggcaagaaggtttggggaggaagtgctaacggtggaggaagtaccggtggtgatgggtacgagattggtggtgacagcgaagaggagcatgagtttcgagagagtgacgaggatgtggagaatggccgagatgaacgtgcccgcaagaacaggagggttatgccaatcgccatggcaaacgggaacggggctgggttgggggctgtgaatgccaatagcagagggaagtttgaaactgagaagggaaaggatgcttacccctacctttgggagactgtggaggatctgtcaaaggagcacccgaacggggtagcattcaagaaggccttcgagtcgatcgaaggccccaaagcgcgtgggatggaggaaaagctgcgaaagttcaggttgacagagatcagacaccagctgcgccgtatggaactgatgaaggagacggtgaagatggtgctcgatgcgctggagggttgaccgagactgaatggtcttctggtcttcttttgtttctagatagagtttttgtggctgagttacttaacttttatggacaaaggtgcacttgtctcagtaagaatataggtacagaaagaaagtgagactgatggtgtttcccttgttcctgtggatcatagtgttttgtgtgtcatacatgatacatgtgctaacttttgcgttatatggtatacagtctgtatgtttagtcaagtttggtttgatgcatcctcattatgaaggttttgttctaaaaaaaaaaaaaattttaaaaccaaacaaaaccccccgggcggttgtctagaggtcncaaaaa

SEQ ID NO: 138407 - DNA, 314 bp, Zea mays
  Clone ID: MRT4577_57709C.1
acacccttccgccacacccgtccgccaacccgtccgttgtggttttttcctccccctccggttcgggttcgggttcggaaggttttccggggtccgttttcatggttaagcgaatcaagatgccgccttcggatgttaagacccgtggtttctgtggtggccttccctgggcaacgaacaacaactccttcaaaaacgccttatgaactaacggtaaggtctttgagtccaaatatacatccttaatcggagaacccatagatcctccgtcttttttttattaactttttccacgaagaaggtatttctgtaac

SEQ ID NO: 138408 - DNA, 344 bp, Zea mays
  Clone ID: MRT4577_5770C.1
cttctctctctttggtttttttctatatgtctctatttttttccttgcgaggaaaacaagtgatagtgcacagctccttctggaacttttatatcttccacgaaggtgccccaggggaaccaatctggctcctgggggggggggccataccccgtgcgttacccaacgcccggtcctctgtggccggctttctctgtctgcggcgttctcctgcctccgttctgcttcttggttttccccccgcccctggggtttttgctcccggccttggcttcccgccccttgggctgcttgtgggcctcggggtgtgcccttcctgcgccgtggccccccttgttctgttc

SEQ ID NO: 138409 - DNA, 685 bp, Zea mays
  unsure (1)..(685): unsure at all n locations
  Clone ID: MRT4577_57710C.1
acgactgccttgcctttggcatgtctctaatttcgacagcttcgatactcctcctcctccacgcctgctccctgctcgccgccgtaagagtccccgacccggtacaacatggcgacgtgaacacggcgatgcttactaacggctcggcgacgccgtcgtcccctgacagcagcagcaacggcaacttcgacattgtcgtcgtcgtcgtcgtcccgccccgtccccatggtgcaggtgcagggcgatgatgactgctacgtcatgaagctctacatgtccggccgctacgtcatcgtcgaacaccggccatgcaaatacatcgcctggtgcttcctcacctgcggcggcggggagctggcggcggccgaccggaaagccgtcacggccactgcgatccaggggacctctctgcctgccgagctatgcggcacgcaggtgatcaatgctccaccattagcaggcngtcgtcgtcccagcagcagctgctggtgggtgggtgcgcacccgacnnggcgcctagctgcgtagctaccttaatccgcgaactaaggggttaggttttagacgtaaaacctgagaggattcaagggaataaaatctctttcttatgcaaaggaaatttttagtcactcgaatcctctctgactttctggctctcaaattagacctatatttgttggctggg

SEQ ID NO: 138410 - DNA, 283 bp, Zea mays
  Clone ID: MRT4577_57711C.1
ccgactcgcatctgccggtctactcagaagacgcttagcactccggtggccgtcacgcgaccagaggcctagccgtcgagtacctaggatgccgcgtggaagccgacgccgcacctcccgcatagcacctccggccaaccgggcccctcagataagagctgaacccacgccagcaccagtcgctcagccaccagcagcggcacccccatctgcagttggatctcctgctgctgcgccccggcagccaagtctgatggctcgatggcaccactgcagctggcgt

SEQ ID NO: 138411 - DNA, 120 bp, Zea mays
  Clone ID: MRT4577_57712C.1
atcgggtatgcaatgtttttttgctcccgaaaagaaaagatatgcacaggggagaacaattaataaaaatacgcaatccttaacggataacgccggcgcgcatgtgttttagacaaattg

SEQ ID NO: 138412 - DNA, 409 bp, Zea mays
  Clone ID: MRT4577_57713C.1
cggctcgagtatgcacccgagcaatagagaatgcgtcgagtactatctgttttctgcatctacatatatataccggatcaacaatcgcccaatgtgaatgtaataagcaatatcattttctaaaaaaaaaaaaaaaaaaaaaaaaaaaaaaaaaaaaaaaaaaaaaaaaaaaaaaaaaaaaaaaaaaaaaaaaaaaaaaaaaaaaaaaaaaaaaaaaaaaaaaaaaaaaaaaaaaaaaaaaaaaaagggggggccccccttttttgagctttttaccccggaatttatttccgacccggtccctgggggggtcccaactttcccttttgggaggggttttaaaactgggggaaaacatgggaaaaacgtgtccctggggaaaaattttttcccctaaaaattccaaaaa

SEQ ID NO: 138413 - DNA, 829 bp, Zea mays
  unsure (1)..(829): unsure at all n locations
  Clone ID: MRT4577_57714C.1
gcacgagatttgcgcccgtcatttgcacagttaacaagtgccctgaagactgttcaaagactagtgaccctttgtcaccaggagaaccagagcccccatgttcaacaagaaatctcagtgcatttgactccttagtggggctttccactttgcgttgtgcatagttttttgttctgctgctgtttgtgtttgtcaaaaagtcggcaaatgcaccttgtagattgagcgtccgaggtggtagacactttgctgccgcgacaaggaccccaaaggtagggtatgtatagagtcgcccatcaaacagcaatcggatcagtgtgtagcaactcattgttatgccctcgtcaatacctggccaaccgggtgcgagccctctggaaaagcagtgagagctctgtgttcattgtgaatttgcctggctatgctaagtggattttctgtcttgctgcgcaacagacagcatatttgcaagttggaagtgctgtaactctgtacaatcagaacacgtgaatttgccgcgctatctagctttgttgttgctgactttgcgtgtggtttaagagctttagcatcttccatagttttcctgaaaattattatctaaattacctttaagagggttatttgagtnnaaaannnnnnnnnnnncnnnnngnnnnncnnngaaaaaaaaaaaaaaaaaaaaaccggcccaaaggggatttcaggacctggggggcggggggggcgataagtttttggggttcttttttgccnggcccgttccggggggaatacccntggggttttgtttttgccccctaggaataggattggaggttttggcctt

SEQ ID NO: 138414 - DNA, 313 bp, Zea mays
  Clone ID: MRT4577_57715C.1
tcctctcgtccggatcgcgagcggccgccccggtggttttttttttttttttgtttttttctcttttttttttttttttcacgcgaaaaaaaatatgcagtatgcccccattactgtatatgtctttggcaggatcacatctttggtagtccatgggcatacaattttgccccaaaaaaaagggttaaccctttttttttacaaataaaatttgattttagtattagggggcagactagttgggggcttcccaccaagtccagttttgattttttcttttaaattaaagcccccaagaaccagaagggggctc

SEQ ID NO: 138415 - DNA, 776 bp, Zea mays
  Clone ID: MRT4577_57716C.1
ggaacggggaggagcaagaacacccagcccacgccgtgctggaagtggtccgtgctcctgcagcggcggcgggaggaagagggaagcgaggggatggcgcagccgagcaaggagccgtgcaagaaggaggcgtgcgacatccaggcctgcctctccaagaacatgttcgactccaggaagtgtgtgagagttattcagttacttcagtcatgttgtgagcagtgtgagtacaaatcaacacactgtggttccttgtccggattactcaagaacatttctaagtgaggaacaataccgacatagtttactgcagccattgaataaaagttcttgtaggttagtttagtacctcggccggctcacggcaatctctcttacggatcaaggatgattcgcggggcttcaataatgcagacacccctcaacctgcagaatgatgctctggtcgctgagttgtatggtaccgagtggaaacagcaaagtggtttgttaatgatcgattttaatgcctgtatacctgtggtatccttcgtagttcgtgtgctcttctacaaatgtaaccccatgttcccgtcttgaaccgcaaaataagtgaaccccatgcatatggagatattttggtgaccccaaagttgtgtataccatttcattgctttaccctaccatgttctgtggcaagagaatcaaatctggataaacatctgggatgataatttatctcttgggcaaaaacctgtgatgtaagatatgattcaaataaacaactttgtggggcc

SEQ ID NO: 138416 - DNA, 521 bp, Zea mays
  Clone ID: MRT4577_57717C.1
acttgggggtggggggttttttttttttttttttttttggtgtttttttttttttttgtttttttttttttttttttttttttttgaacgggaaggggaggaaaaagggggggaggggttcaaaaaaaacccagagccttgtaaaaaaaaagttcgttttggggggggggggggggggtaaattgggggggaaaaacatttaaagggggaaaagcgtgaaggtagcggcggatgaaattctgtcaagggggggggctttgagggcaggggctctaaatggttgggggccggttgcgttggaaacaaagagggaaaaaaaaacggaccgggggggttggggaaaccgctcaggaataatgtctgggacaggggctaaatgaagaagcaggaaaaatccggccggacaaggggtttcttttggagaggaggttggggagatgcggaaagaaagtcctggccgcgggggactatcccattggggttaaagggagactttgtaagggggggctttccgggggggg

SEQ ID NO: 138417 - DNA, 304 bp, Zea mays
  unsure (1)..(304): unsure at all n locations
  Clone ID: MRT4577_57718C.1
aaaaannnnnnnnngggcgngcacatggggattaaaccccctgcaaacaaaaagggagcttaggggaccaattgccaaaaaaagaaaaggggaaaaaaaaaacgggtaatcatcccgaagaccaaaaacataccggccaataaacttgaaaagcttttcggggaaacaaaaaaaaacccgcggcccctttttctttcccaaaaaaaaaagggcaactaacaacaaaaagcaaatgggcgcaaactatcccaaaagaaaaggaaaaaaaaaaaaactggggctaaactttcggaggaaccaaaag

SEQ ID NO: 138418 - DNA, 328 bp, Zea mays
  Clone ID: MRT4577_57719C.1
cagaaataagaagttacatttccagatactaatgtgaaaaaaaaacaacagagggggggctttcaataaaccaacgagctaaaaacaaaaacaacaaagttctaccaacaaacccatcatagaaggagccctcctttacatggcccatgtgttgtcgctccctccctccattttttgaataaataaattataggggcccccccccttagagagtacatcttttcctcccccgtgtgggccgttaaatttttttttttaggccccctaaataaacctgtctcgcgcccttttaccactcctctgtgttggaaaaacccgggttttcccc

SEQ ID NO: 138419 - DNA, 280 bp, Zea mays
  Clone ID: MRT4577_5771C.1
attgtttcttccttcacaaggactattatgcagtttgttctgtcaaattcattgcgcggaagcaatggttcatttgcgccacagaagccgaaggtctcgtacatgtatacagttatgaaacccaagaaatgcaaaacgtcatcagtttcagaattgatgacgagcattattattatttgcgccacagaaatgcaaaaggtcccatcatatcgctggccgttcatctatcccagccctatgtcatgtcgtgttggcactaccacaaagaggtaatgaagct

SEQ ID NO: 138420 - DNA, 694 bp, Zea mays
  Clone ID: MRT4577_57720C.1
cccggggattttaatgatttttcaagtcatattaagctaagaccaggattacagtaaaccttcgctttgtataatttatcaccattctggattgtgattaatatgttaacttctgtatttatatgcagatgcagatgtataacattaactagcttacctagcagtgttaatgtacatttgatgttagccaatatagttagctgtcttctgaatcatgtgatttttgcatgctttgttatataatccttcatcattgcctctgtatccatctatctgatgcatgacatctgaataaatctttgcaacaacaattactctcgccacacttattatggcgctaaaagtctagaaccttttacatgtattagccatttctgtctgtaggatatccatgctgaggctgtcaagaagaggcgccgcgccaccaagaagccatactcgaggtccattgtgggtgcttccctagaggtgatccagaagaagagggctgagaagcccgaggtccgcgatgctgctagagaagctgctcttcggtatgcttgtcgattttataataaaataaagccatcatttgtgcctatgacagtggtaactgtctgttggcctaaccaacaaaatctctgagtgacatttaacagaaacacaatagatacagatgcttgatatcaggctcatttgaacacccactgacacc

SEQ ID NO: 138421 - DNA, 589 bp, Zea mays
  Clone ID: MRT4577_57721C.1
tttccatgcaatgccaactttctagtagtaggagtagcatttagcaagcagtgactagggagtaacaacagccgccttggcatggcacaggcatgctctttagcagacaggccggtcatccatggcagagagcagcataaagctgatgcactgaaacaagtgccgcaatcatgcactacacccacacaaaggagaaaggctgaaagatcagcgaggattaaaaactgaaagagagaagaaaaaaaaaaagaggagctgttctgaatcttgaagcacctcagcatcccaggacagtctaaaagatgctccatggcgggcggcagccagtttcgaatgaccaaagattacgcatcacgagtcacgctctttaaccccttgctagcaatgctaaaacaatgtcaacagcttcgcccccaatgcatgtaacaaattgtacaactgtcggacgagtccaagcaaacatctgagtaagacgccttatttaccgtctggtacacagatggcacgtcagggggggcgctcataagcctctctagccttgcacgtaccaataaacgccagccatcataagttatccataccatcatac

SEQ ID NO: 138422 - DNA, 673 bp, Zea mays
  Clone ID: MRT4577_57722C.1
atgcacgcctcgtaagctcggaattcggctcgagggcggtcagcagctccggagatccacgacgagctcccgcatcagcgcctcgaacacggccgcctctacctcggcgcggacgtcgcggcgctcgggccccacgtcggcggcgactagcctggaggtcgggagctcggacgccaccagctgagacgcccgtgccagctcccccgtgtgcgcgtcccagtcccagtaggcggtggcggcggacctgtcgtcgcggcagctcttggggctgacgcagtagccgccgtagtagcagtcctcgtcggcgtcggcgtcggcgtccctgaggtggaggtgctcggacttggcgagcagcgcggggctgtacgccgccgcgtccaggaggttccggaagtcgtccatggcggcggcgtccttggacgacggggacagcagggtggcgtggacgggggagctctcgaacgggtggtccaggacagagacggggctcagctgctgcttctcatcgtcgtcgcagtcggagtcgttgtagcgccccgcggtggcggcgtcctgcgccttgacgacgacgacgacgacgtcggaggcggcggtctttacggcgtccagctccacgtagcacgacgccggcgccacggcagccggcagcttcaaggagccggagaagtgcagc

SEQ ID NO: 138423 - DNA, 302 bp, Zea mays
  Clone ID: MRT4577_57723C.1
aaaaaaaaaaaaaaaaaaaaaaaaaaaaaaaaaaaaaaaaaaaaaaaaaaaaaaaaaaagggaaaaaaggggaaaacattatggtgggttgacaaattttgggcgcccttttttaaggttcctagttttcttaccggtgcttgcgacatttaaaggtgggggtgggttttacaaaaatccaatttcttgcccggctttttacaacttttgttttttttaaaccctgccttaaccaattttaggggcggtggttaacaaccccttttcgggagaaacccttttgctcacaagttttatccctt

SEQ ID NO: 138424 - DNA, 824 bp, Zea mays
  Clone ID: MRT4577_57724C.1
aacatgcatggaactcgtatacttctcatccccactccccagcgtcctctgctctgccgccgcacccaactaaagcgcagtgtggacgtgcggtggcttcacgctcgcaccgcacgccagcccggaccctaatccagcttgctgggcgcgagcacggaaggaattcccgtagcgaggaaggaatcaccggcagcgggtggaaagcttcacggggcccaagcaggggctgcaggaggccgcgaccgggctgtttcgactcatgcctggatctgggggagagggacgcgcggagccgcgccgcgccagatcccgttcgtcggcggccagatggtgatcagcggttccagttccaaagatggctcgtcgtggattgatggaacaggacttaagcaaactggatgtgacgaagcttcaccccctgtcacctgaagttatctcacgccaagcaacaatcaatatgggtaccattggccatgtggctcatggaaagtccactgttgttaaagctatatctggtgttcagactgttcggttcaagaatgagctggaacgtaacattactataaagctgggttacgctaatgcaaaaatctacaaatgtgaggatgacagatgtccgcgaccaatgtgctataaggcctatggaagcggaaaagaagatagccctctatgtgatgtgcctggatttgagaacactagaatgaaactcctgagacatgtttcttttgttgattgcccgggacacgacattctcatggctacaatgcttaatggagctgctatcatggatggagctctttctttgatcgcagcaaatggaaagt

SEQ ID NO: 138425 - DNA, 1523 bp, Zea mays
  Clone ID: MRT4577_57725C.1
ctcttccactagcgacgactgggcgacctccgccgccacactaaaccctactccaggtccccaggtctgcgtcgggcccttgccggcgacgagcacccgctagttaccactgtgcggtttccaagatggctcgccgtggattgatggaacaggacttaagcaaattggatgtgacaaagcttgacccactgtcacctgaagttatctcacgccaagcaacaatcaatattggtaccattggccatgtggctcatggaaagtctactgttgtgaaggctatatccggagttcagactgttcggttcaagaatgagctggaacgtaacattactataaagctgggctatgctaatgcaaaaatctacaaatgtgaggatgacagatgtccacgaccaatgtgctacaaggcctatggaagcggaaaagaagatagccctctatgtgatgtgcctggatttgaaaacactagaatgaagctcctgagacatgtttcttttgttgattgcccgaacaagattgatcttatccaggaaagtgcagcaatgaatcaacatgaagcaatccaaaaattcatccagggaacaatagctgaaggtgcacctgtggtgcctatatctgcccagctgaaatacaacattgatgttatttgcgaatacattgtgaagaaaatccccatccccgaaaggaactttacctcgcctcccaacatgatcgttattcgttcctttgatgttaacaagcctggttcagaggttgacgaaattagagggtggtgtagctggtggcagatcctcaggggagttcttagggtgaccagaagattgaagttcgccctggcattgtatgaaagatgagaatggaaacattaagtgcacgccaatctactcaaggattgtctcactctatgctgagcagaatgagctccaatttgctgtcccaggagggcttattggtgtgggaacaaccatggacccaactctaacgcgtgctgataggctggttggccaggttcttggtgaagttggttcactacctgatgtttatgtagagcttgagatcaatttcttcctactccggaggctgttgggtgtgaggacgaaaggtacagagaaggcagggaaggtgtcgaagctcaccaagggcgagatcctcatgcttaacataggatccatgtccacaggcgcccgtgtactcgccgttaagaacgatcttgccaagctacagctcaccgcgcctgtctgcacgagccgaggagagaaggttgctctgagccgtcgtgttgagaagcattggcgtctcatcggatggggccagatccaggccggtacaacacttgaagtaccaccctgcccgctctaaagcgtcatactcagacgtgagcttaatttgtgtgtgccaaagaaaaaaaatgagtttgttgttagtattgtctttgtgttactgcatatccaaagccttaggccattctagtttaaaaaaaaaaaaaaaaaccaaaaaaaaaaaaaaaaaaggcccctagggcc

SEQ ID NO: 138426 - DNA, 598 bp, Zea mays
  Clone ID: MRT4577_57726C.1
cggacgcgtgggctcccgcactactctgccctcagtcagagaccgaccaagaagccggaacagcatcggctccccactcccaaaaccaagcaagaacccagacaagagcgggcaggccaaaaccacccatacctggaaccgctgatcaccatccgggcgccgacgaacgggatccggagcggcgcggctccgcgcgtccctctcccccagatccaggcatgagacgaaacagcccggtcgcggcctcctgcagcccctgcttgggccccgtgaagctttccacccgctgccggtgattccttcctcgctacggggattccttccgtgctcgcgcccagcacgctggattagggtccgggctggcgagcggtgcgagcgtgaagccaccgcacgtccacactactgggctactggccacgcactgcgctttagttgggtgcggcggcagagcagaggacgctggggagtggggatgagaagtatttgggccgccgagcagaagagaaaggatattttaaaaagcgttatagcatatgagaggaatatttgttcaaataaacttatgtcataaagatatttttatacttttttaagttgt

SEQ ID NO: 138427 - DNA, 1954 bp, Zea mays
  Clone ID: MRT4577_57727C.1
ccgggatttgggccgctgtttttccccccgagtgagcaacagtggggtctcaacatgggccgcctatgtagctcaacactgaaatgcggcagacgcgtgggtggtcggagctggggcctcagcttgatcccaggctgccgttcgcggaatctctcttcccactagcgacgactgggcgacctccgccgccacactaaaccctactccaggtgcccaggtctgcgtcgggcccttgccggcgacgagcacccgctagttaccactgtgcggtttccaagatggctcgccgtggattgatggaacaggacttaagcaaattggatgtgacaaagcttgacccactgtcacctgaagttatctcacgccaagcaacaatcaatattggtaccattggccatgtggctcatggaaagtctactgttgtgaaggctatatccggagttcagactgttcggttcaagaatgagctggaacgtaacattactataaagctgggctatgctaatgcaaaaatctacaaatgtgaggatgacagatgtccacgaccaatgtgctacaaggcctatggaagcggaaaagaagatagccctctatgtgatgtgcctggatttgaaaacactagaatgaagctcctgagacatgtttcttttgttgattgcccgggacacgacattctcatggctacaatgcttaatggagctgctatcatggatggagctcttcttttgatcgcagcaaatgaaagttgtccacagcctcagacatctgagcatcttgctgctgttgaaatcatgcgccttcaacatatcatcattctgcagaacaagattgatcttatccaggaaagtgcagcaatgaatcaacatgaagcaatccaaaaattcatccagggaacaatagctgaaggtgcacctgtggtgcctatatctgcccagctgaaatacaacattgatgttatttgcgaatacattgtgaagaaaatccccatccccgaaaggaactttacctcgcctcccaacatgattgttattcgctcctttgatgttaacaagcctggttcagaggttgacgaaattaggggtggtgtagctggtggcagtatcctcaggggagtcctgagggtgaaccagaagattgaagttcgccctggcattgtcatgaaagatgagactggaaacatcaagtgcaccccaatctactcaaggattgtctcactctacgctgagcagaatgagctccaatttgctgtcccaggagggcttattggtgtgggaacaaccatggacccaactctaacgcgtgctgacaggctggttggccaggttcttggtgaagttggttcactacctgatgtttatgtagagcttgagatcaatttcttcctactccggaggctgttgggtgtgaggacgaaaggtacagagaaggcagggaaggtgtcgaagctcaccaagggcgagatcctcatgcttaacataggatccatgtccacaggcgcccgtgtactcgccgttaagaacgatcttgccaagctacagctcaccgcgcctgtctgcacgagccgaggagagaaggttgctctgagccgtcgtgttgagaagcattggcgtctcatcggatggggccagatccaggccggtacaacacttgaagtaccaccctgcccgctctaaagcgtcatactcagacgtgagctgaagttgtgtgtgccaaagaaaaaaaatgagtttgttgttagtattgtctttgtgttactgcatatccaaagccttaggccattctagtttaattttgtttcgttcaattttggaggccacttccattatgattcctgtgaacattagcaggtcagaaaccagtactgtgaacattatgagtacgacgtgtggatcagtattgccaatgtcttgctttcacactaaaaaaaaaaaaaaaaaaggcccctagctcgtgc

SEQ ID NO: 138428 - DNA, 417 bp, Zea mays
  unsure (1)..(417): unsure at all n locations
  Clone ID: MRT4577_57728C.1
cccacgcgtccgcagtgctgttattntgntaatgatttgctaaggcggagaatggcctcgtgaacctcatgctccgtgtgcacaatcacatactggccagcgatctgctagcgaccttatcctctatctccatactaggagctatactcggcggatccgttgtacgtgaagttcggctgtgagggactgtctgagggcatgatccagatactgttccagatgatggacaatgaagacctctgacctgacctggacgacttcttggacgacctggagaaggaccgctcgccgtcgattgccgagctggtgaagctgaacgcggaccccgagaaggctatgatctacatgctggcatactcgttcatgcagcaggtggagcacgaggccgtccacatcgctgatccctctggtggtgct

SEQ ID NO: 138429 - DNA, 293 bp, Zea mays
  Clone ID: MRT4577_57729C.1
atccgtggcgcgcgggtgcagcaaacatagcagggggagtttttagattggataacccaatacccccgcacagacctacagtttataactgctcaagaccaggggtagcatactggcctcctttctcaggagctgacaagaggctatcaaaatatgcaacctgattggaagagggctaatgattgtgggatgctagtattcttgacagggaggtactagagtgcgagctatcggtaggcggacatgaacaccaggctggaggaatatctggaaacgctgagcacatggtaggg

SEQ ID NO: 138430 - DNA, 2610 bp, Zea mays
  Clone ID: MRT4577_57730C.1
acaacttaaaaaagttaaaaatatctttatgacataagtttatttgaacaaatattcctctcatatgctataacgctttttaaaatatcctttctcttctgctcggcggcccaaatacttctcatccccactccccagcgtcctctgctctgccgccgcacccaactaaagcgcagtgcgtggccagtagcccagtagtgtggacgtgcggtggcttcacgctcgcaccgctcgccagcccggaccctaatccagcgtgctgggcgcgagcacggaaggaatccccgtagcgaggaaggaatcaccggcagcgggtggaaagcttcacggggcccaagcaggggctgcaggaggccgcgaccgggctgtttcgtctcatgcctggatctgggggagagggacgcgcggagccgcgccgctccggatcccgttcgtcggcgcccggatggtgatcagcggttccagggtttacgccacctacaacaagcctgatgctcaggcacacgacaatgaaaccgggtaccctcgaggccggccgggaggcccggcccgcggctggacgggagcctttcttctcccgttcacagttcaccccacttgctctctttctccccagtagcaacgaccgcgcgtcctccgccgccgcactaaaccctactccatgtacccaggtctgcgtcgggcccttgccggcgatgagaacccgtcagttccaaagatggctcgtcgtggattgatggaacaggacttaagcaaactggatgtgacgaagcttcaccccctgtcacctgaagttatctcacgccaagcaacaatcaatatgggtaccattggccatgtggctcatggaaagtccactgttgttaaagctatatctggtgttcagactgttcggttcaagaatgagctggaacgtaacattactataaagctgggttacgctaatgcaaaaatctacaaatgtgaggatgacagatgtccgcgaccaatgtgctacaaggcctatggaagcggaaaagaagatagccctctatgtgatgtgcctggatttgaaaacactagaatgaaactcctgagacatgtttcttttgttgattgcccgggacacgacattctcatggctacaatgcttaatggagctgctatcatggatggagctcttcttttgatcgcagcaaatgaaagttgtccacagccccagacatcagagcatcttgctgctgttgaaatcatgcgtcttcaacatatcatcattctgcagaacaagatcgatcttatccaggaaagcgcagcgatgaatcagcatgaagcaatccaaaaattcatccagggaacaatagctgaaggtgcacctgtggtgcctatatccgcccagctgaaatacaacattgatgttatctgtgaataccttgtgaagaaaatccccatccctgaaaggaactttacctcacctcccaacatgattgttattcgctcctttgatgttaacaagcctggttcagaggttgatgaaattaggggtggtgtagctggtggtagtattctcaggggagtcctgagggtgaaccagaagattgaagttcgccctggcattgtcatgaaagatgagactggaaacatcaagtgcaccccaatctactcaaggattgtctcactgtacgctgagcagaatgaactccaatttgctgtcccaggagggcttattggtgtgggaacaaccatggacccaactctaacgcgtgctgacaggctggttggccaggttcttggtgaagtaggttcactacctgatgtttacgtagagcttgagatcaatttcttcctactccggaggctgttgggtgtgaggacgaaaggtacagagaaggcagggaaggtgtcgaagctcaccaagggtgagatcctcatgcttaacatagggtccatgtccacaggcgcccgtgtggtcgctgttaagaacgatcttgccaagctacagctcaccgcgcctgtctgcacgagccgaggagagaaggttgctctgagccgtcgcgttgagaagcattggcgcctcatcggatggggccagatccaggcaggtacaacacttgaagtaccagcgtgcccggtgtaaagcgtcatactcagacgtgagctgaagttgagtgcaaaagagaaaaaaaaatgagtttgttgttagtcctgtccctgcgttactgcagatccaaagtcctgggtcactctaattttattttgtttcgttcaattttggaggccgtttgcattatgactcctgtgaacattaccaggtcggaaaccagtattgtgaactttatgagtacgacatatggatcagcattgccaatttcttctttcgcaccaaaatttagacttattataaaaaaaacaatcggcaaaaaaaaaaaaaaaaagaaaaaaaaaccgttaaaagcggcccgccaggtgaagccagttaaaaaaaaaaaaaaaaaaaaaaaaaaaaaaaaaaaaaaaaaaaaccccccccccaggtatgggtggttttggcctgcccgctcttgtctgggttcttgcttggttttgggagtggggagccgatgctgttccggcttcttggtcggtctctgactg

SEQ ID NO: 138431 - DNA, 320 bp, Zea mays
  Clone ID: MRT4577_57731C.1
ccacgcgtctgtttacccactggagaagtccatggcgcgagggaaggtgtgcacatcctgcacgcttcttggctgaagagacatggcaggagccttcctaaagcgaaagacatcagcatgggagagctcatcaagagaccgcaccgtgtaactgcaaaagctgaaggaagcatgtaaagaggccctaccgagtcacaacagcctggataacccagcccaaggcgccccaggcgaacaggtaaacgagctccagcaagatcaccagaagggtgcacagactgatcctccagcataagtccccacccattcgtagggcaaaa

SEQ ID NO: 138432 - DNA, 910 bp, Zea mays
  Clone ID: MRT4577_57732C.1
cggccgggagtagcatcggccgcgcgtcctccgccgccgcactaaaccctactccatgtacccaggtctgcgtcgggcccttgccggcgatgagaacccgtcagttggtattgggtcagtaaccactgaacaagacgctaggttcatctttccagttaccattgtgcagttccaaagatggctcgtcgtggattgatggaacaggacttaagcaaactggatgtgacgaagcttcaccccctgtcacctgaagttatctcacgccaagcaacaatcaatatgggtaccattggccatgtggctcatggaaagtccactgttgttaaagctatatctggtgttctttttgttcggttcaagaatgagctggaacgtaacattactataaagctgggttacgctaatgcaaaaatctacaaatgtgaggatgacagatgtccgcgaccaatgtgctataaggcctatggaagcggaaaagaagatagccctctatgtgatgtgcctggatttgagaacactagaatgaaactcctgagacatgtttcttttgttgattgcccgggacacgacattctcatggctacaatgcttaatggagctgctatcatggatggagctcttcttttgatcgcagcaaatgaaagttgtccacagccccagacatcagagcatcttgctgctgttgaaatcatgcgtcttcaacatatcatcattctgcagaacaagatcgatcttatccaggaaagcgcagcgatgaatcagcatgaagcaatccaaaaattcatccagggaacaatagctgaaggtgcacctgtggtgcctatatccgcccagctgaaatacaacattgatgttatcttgggataccttgtgaaggaaaacccatcccttaaaggagctttaccccacc

SEQ ID NO: 138433 - DNA, 378 bp, Zea mays
  Clone ID: MRT4577_57733C.1
cgttgctgtcggccctccgccgctagtcccctcccagtacctccccgcgctgtcatcgccagtcgcccagtcctccctacaggacgccatgctacccagccttcctcgcagtcgtcctcagctcctgtcttagcgctctcccatggtggtaggccgacggctcctctcctacctcagagatagatctacacccacggcagtggctgctctaatgacatcaatcaatacaacgggggtcctgctacggatccatctcctcaagtgttgatttaaggtcaagtgtgttgtgtacttgtgtgcaggcctattgttgctgcttcccaaaatgcctcgaatctgtgctccaaaggcagcatgtctcctcctgtgcactcctat

SEQ ID NO: 138434 - DNA, 499 bp, Zea mays
  Clone ID: MRT4577_57734C.1
gcgactttcattctcctatatccgcgagtacagctttcaccaattcccccccttctcgcatttcccaccaccgacgaccttccctcctgtcacagacccctgagccacgaattttcattgacatccccctacgctggaatgccacgtcaccaaacgccaagctgacacacgtactgtctctagcaagttattcaggctgctgcccatatgccaccttaatagaccatagcatgatgtgaaaaaaccttccacaccatatgcacagaaactggcacagtaaaatacttccgccctactgcttttgtatatctggatgccaatgcaattcatgaggcaacgtctggcacctacagccaggtcatgcatcctgacaccgctcatcagataccaactaggatgcatccataaacttgctctcgtggacactactccatcgtgctaggacatcgccgacatgacaacttaaacgaatcagaaaactcacaaaaaagtagcactg

SEQ ID NO: 138435 - DNA, 204 bp, Zea mays
  unsure (1)..(204): unsure at all n locations
  Clone ID: MRT4577_57735C.1
cgtgcggacaaatgtgccacctactcaagtctattgaatgttaggaacaaggtctgattcatgtgtgctgattagtgttnagccgatggctgaaactgcacactcattcaggcctgagctgttctatggtgactaccggaatgagaccactgcaaggatactattgaagacacttgtgatcattggagtaataactgcatcgac

SEQ ID NO: 138436 - DNA, 185 bp, Zea mays
  Clone ID: MRT4577_57736C.1
cgcggtggcgatacaacggaaccaccccagaacggcggaagtatgccaacaaacaaccgcgaaaacagaactctgggagagaagtcagaacaacgtccggaggatgataacaagccaatgaagaggaaaagaaacgatggtacaaaaggcacacgaggctaaaaagcggaactaaagtagaggga

SEQ ID NO: 138437 - DNA, 356 bp, Zea mays
  Clone ID: MRT4577_57737C.1
gggggggtgtgaacactgctcattgaacacacttgcattaaaaatgagaacagcagctgagaactccacactgcttaataaaacagtctcagtgcatcataataaaacatagtctcagtgtacacaaacatagtctcagtgcatcataataaaacatagtctcataataaaacagtctcagtgtactcctgaatggcatgacctaaaagcaaacgccatcttgatgtttcagttcttctggcggccacttgttgatgaaaatcccttgtgtatcacctgttgatgagaaaacttagacaaatgtatatatattcaattcctctatattcagttcaatatccaatttggagaccctc

SEQ ID NO: 138438 - DNA, 489 bp, Zea mays
  Clone ID: MRT4577_57738C.1
caaacaaaaaagtttggggcgcatcttttgactttgggattatgagtaagcatgccccctcctgctaagctagctaaagggggttatcaggcctaaataagtatccattttaaaaagtataaatggttatacccatacatgcgagtttttattttaaaaaaaaccaaaggttctaaacctgcattgggctaactcgtaaatcattcctgaaaggcaattcctttttttaattcaaagttcggtgggacaaattaaaagggattgaaatcttagttgttaaggtaaaagtaaaagcacggggatagcagcagttggggccttcaatatctaagggggttactgggggatagcagcaactgcaatctccaatattctagggcatgttggcctcccttttttaaacttaaagatctaaaaggttaaaaaggtttaagctttcttttgaggcccaaatctttaatgtaaggggggctaaaggtcggacccgtg

SEQ ID NO: 138439 - DNA, 470 bp, Zea mays
  Clone ID: MRT4577_57739C.1
aataaaccaaactttcaaataggacatgaccgttttttcgatcgacctgtctctctctctctctctctctggctcacacgtcacacacacatacaaggacaacgtcgtacatacatgctaccatgcacaagcaagcggacgggcacacacggagagaatttatttagaaaaacatagcaggagacaagaagccaccaaacaacacgcggagagggaaagaaatcatcatgaccaccaacgaagaaccggccggcggcaacgggggaaaggttggtcgatcgaaaggcggccgtcgacgcgcgtggtctaagttttagttcaccctggagcaatcggtggaggggctgatggtgtaggggatgctgacgccgcacttggaggggatgctggcggcgttgccggcgttgaggccgctgacccccctggcggcgttcctgaggcaattgcagggggcgcgcctgtcggcgggg

SEQ ID NO: 138440 - DNA, 247 bp, Zea mays
  Clone ID: MRT4577_5773C.1
cgagaacggatttcaatgaggtaccatatgtcaagtcgatccatgataattttctaaaaagactattcaacgagctcctgcatctcaatgatgaagtgaatgtggaaattgtgccacaaatgcatgctccttctgaatctatcgatttagtggaaagtttgattgattcagaaactcctagtccctttgatttatctaaaagtgccccgattgttcataccaaacatctaagtgaagacataagtgc

SEQ ID NO: 138441 - DNA, 1599 bp, Zea mays
  Clone ID: MRT4577_57740C.1
gtaccctcggagccggcccggggcctcctctccttctacctcgcgcacccgccgccgcttgctgtctcctctctcgcgcgcaccggtgttcccatcgccgtctccttatctccctcgtgcagccgctgttgtctcctctccacccttgtaccccgccgccgcctcctcttcagatttcctcttcttcaccctcgctgcctcctcttcaccctcgctacggcctcctcaaatcgttgagacaactagtacagttgagacaactggtgcgaggtcggacggcggggaccatgcgaacaagctcgttgctgccttctcggctcgtgcaccctcatctcaagaagtgaatcgcctcagtcatggctagagcttcatggaatatgaactatgagaagattcttgttgacatcttgcacgagcacaatcatgtgaagtaccgtggccagaatggttgggcaccagaaggttggcgttctatgacacaaatgttcaatgagaagtgcccgttggctaagtttacaaaggcacagatccaggaaaaagaaaaggaacttaaggcaaactataaggtgctgaaggaagcccgcaagcaaagtggtgttggatggaatgaggccatgggtatgatcattgcggagccaccaatatgggcaaatataattgtcagtaatccaaaggtcaaggaaatttcagtcaaggccattccctttgtataatcagttgtcagcactctatgatggcagttgtgccaccggtgatctcaattttacatcaactcagcaacatacatcatcccgacaacaattacatattcaagctgaagctgaagctgaagctgaagctatgagctctttcaggattgatgatgacctcggggttaaccctgatttgaaccaaatctcttcaaatttgcatgggttggcatcttcaagtacccgtgttgagattggtggacatgaccgcaccccggcatcttcagaacagcgagcggagagtcatggaaggaagcgtaagcaaagtcagattgctggggttcttgaggaatatttggattacaaaaggcaacataatgataagttgcttgatgtggtaaatcagattgatcaacaagctgagggatgtaacaagaaggaagaatattgtattggaaagtgtgttcgtgtgttagagtcgatggaagatataactgaagaggagatggcagcagcaatgggcgtgattaagtgtgaggagaatagagaaatatttctgaacagccagaggccacgtgtccgattattgtggcttaggaacgagatcaacaagcagaagaacaacttatatcacttccccaacacaacttggaagtaacaaagtgatacacaagggattttcatcaacaagtggtcgccagaagaactgaaacatcaagatggcgtttgcttttaggtcatgccattcaggagatgatgttttattattatgcactgagactatgtttgacattggtcgtgtacactgagactgttttattatgagactatgttttattatgatgcactgagactatgtttgtgtacactgagactatgttttattatgatgcactgagactgttttatt

SEQ ID NO: 138442 - DNA, 214 bp, Zea mays
  Clone ID: MRT4577_57741C.1
ctcacgcacatccctctctatcgactcgggtcatatcaaggccggctgcagcgcccacccgggcgtccagcccggacacaggtgctctctcttgccgctggcagaaacaacccccgccaatcagacgagatcacgctccggccgaaaggcataaaggatcgggcggccctcggtgcgagcgccattcgtagacaccggcttaagaccctcttac

SEQ ID NO: 138443 - DNA, 328 bp, Zea mays
  Clone ID: MRT4577_57742C.1
gtgatttcttgcttgcccccaccgcgaggtcgggggacggggattctctgacctccatcggagagcgaccccccaccagggcgctcggccgaaagcctagaagagtgccgggccgggagaccggacgattatggatcgcgttctgattcgctaatggaagatacgggggccatggagcctatcttgaagggattcgccaccaacgtggacagtcatagctaactgtcgcaggtgacggaggctgctacagacgctgcgcagcacctgtgccggcgaggtgcatcggatgaaggccgagagcgacacgcgccgcgacggccgcagcgac

SEQ ID NO: 138444 - DNA, 2295 bp, Zea mays
  Clone ID: MRT4577_57743C.1
ctcgaggccggccgggccgggattgtcgagcacacagcttcggactcttctctagggagttcgcgcacaggctccacctcatcggcccccgcgaagtcagagccacatccctggttcgagccccagagcagagcagcctccccgatctccacccctctgtgatagtccgcatgaagcagatggcgcgcaagtcgatgggcggcaaggcgccgcggaagcagctggcaacgaagggggcgcgcaagtcggagacgaggacgcgcggcgtgaagaaggcgcaccagctccgcccgggcaccgccgcgctgtgcgagatccgtcagtacaagaagagcacggggctgctaatccgcaagctcttgttccagcgcctcgtcggccacgacgccacatggttcctgctcgacatcgccttctacagccacaacaggttccaggaggactccaccagcatcagcgggatccccatgtccaacaccaggagcgcagaggagaaggaggttctcgccacctcgcccaacaggtgtttgacgaattgcttcaaactcatacaaagttgttttagctgggatgcagtgccatatcaacagccttggccaccacctcatatgcaggtggagtttgggtgtggcagtgctgatttatgtccaattccatggccgtttttcaccacaattggtaccaatgaggagataattgacatcacatctgatgatgacaaggttgataatgtggttgatcagctgattgatgaacagatcgcagcagtagtctttgtgccagcgtgtatggaagctacgcctaataatgtgataaatacaagcaaaaccgtggagacctttgctgctcatcagtctcctgagtatgatagtggattgaaagataaggatcagagaatatcatttgaagatgagatatctgagggtgggcaagctgaacaaagtactccacaacaggaattgtgggctatgccaccagatactagtgaccgtgaaactgttgagaggacaaccagaagtattgaggtggagcatttctctcaggttgagtcaaagcataaaatgaactctatgtccgtggaagcttctgagcatgtcactatcactcagattgagaagaagccggttcaacaagttgagataactcaggagttagattcactgccgatatgttctagggagcattctaatgaggcacttgaaggggagagaacagtgcaggctgggttggaacaagagtgtgaggtgctggggatattgtcaacgatcacctcagatatttttgcaatagggctcagtccaaatcaatatactgtgtatttttatcggaatttgatggcctgcatgatgttaatccgtcgcagattcttgctgtcatttggacgtagttgggatgcggtgacgtataagcaaccatggccaccaccggtgcatgttgtgatactaggagatggcttttccgtcaggcttacaccttggcaaccacttgatactgatatctacagctttcctgtgaacaaaccagaatcatctgcaggtgtcttttgtattgcaacagaatcaacgcagtgtgcctatgattcccaatgaaacagtgtctcgacaatcctcttgatgatgcacagatgcctttatgaacagatgcaatacaaatctgaagagggatgtactcgggtagtgaaatgcctcccaccggctgacgcaagtttacttgtctgggctgttaatcagatgacagatccattgattgcattgatgtatgcggtccaagtgatgaattttctcaaggacaaagaggagtcacctcgagaggatgttttgctgctccagaaggacccatttgatggcaacaggcatcagaaacccaacgtgacacttgccatctccttgaggaaagatccaggagtcattgttgcgtgcactgccccaaccaacgaagtaccaacatatgtggaggactacactagtagctcacaatctgcaactgctggctagtggctatcaccgatgctcccggcatgacaactaaaatttcttaccatcagcggcttgggggcaagccgcatttcaagcggtggggaatgtcagcaacggtctaggggagacgctagacgaggcagccgtcgcggaagagcggcgatgtcccagcaaggagcagctcgcatatccgagccaaggagttatgtaaacgagtgggccatatgttgggccgcagggtgaagggtatttgagtctgtattccgtatgaactggttatgaaaagaaatagaatatcagaaaagccttcgtgctcccc

SEQ ID NO: 138445 - DNA, 282 bp, Zea mays
  Clone ID: MRT4577_57744C.1
gaagaaaaacacccggcagaagactgggtgtcatcaaaatgcgcaagtcgactacaaaagatacatatctgcgtgagctgacggtttcaactagcggcatcctataaatttccccctaaaaatcacagttcttccatatacagatgattgattcatctcacagccgcgaacccccgctaatttggaccagacaaatgttcagctttcctttttcttgttatagccaaacattgcctccttaacttttgcccgtttttcagtggctatataataatacttgac

SEQ ID NO: 138446 - DNA, 331 bp, Zea mays
  unsure (1)..(331): unsure at all n locations
  Clone ID: MRT4577_57745C.1
gcgcgctatcagcggctttccgacttccgagccgggtgtcgcgccctggaaactgaagctatanccgtcgcgagggatggggagggggcccaccgctncccgcgtggggctgnntcgcagcttttccactttcttnncccccgtnngaaacgttttcgtcaacgccgcgacccatgtccacgccaacgcacccnaaccttccnntttcctactcttctcatgtctagacatgatctaccctcacgtcaccttcgaaagcattcttctttggtttcaagaccgccaaccnnccgcgggnntcgcgggaatcaaaggaagccaagagaagcgg

SEQ ID NO: 138447 - DNA, 296 bp, Zea mays
  unsure (1)..(296): unsure at all n locations
  Clone ID: MRT4577_57746C.1
tccttctctttcatttttttnaccgcgggtggggatcaacatattgtggcaggctacaaaacccaaaaccaaaacaggtaacactatcaaaaataagatatacacaacaaggtgcctactttgatatacacaaaatccataacacataaaccaactttatctactaatgaactgctcccattacatgcaaaatatcctgctaatcttatcgatcgaacccttcatataaaactcaaactacatcctataccaacacattaacccataggcaacccaaccacctatgttatcaaact

SEQ ID NO: 138448 - DNA, 518 bp, Zea mays
  unsure (1)..(518): unsure at all n locations
  Clone ID: MRT4577_57747C.1
attgagtatcactaatcatcttctagtgttngacagaaaacaaacaaaatactctcacactcttgtaggattgccatcaatcaccaaaagggggagatcgaaagtatctaggaccctggttggttttagtgattaatgacaacataagattacatgcgactaacgtgtgttttgcagagcaaatggtatgttagttcacattgcagagagttgtgctacaatggtgaaaatatccccttagatgagaacttgaagcgatggctgaaaaaggtgaatcaaaagatgaaggactacatatcctaagtgttaaaggagttgaggacacttggtatagaattaggacttctatttttgttttagccgtactataaagaggggctgtggatgagtagtttaaccaagagaaatctagtgtaatgtcggtgcatgttcacacgcacaactagtgctaggtgtcactctataactcactcaaaagttagaatcgaaaactgtttagaaaaaaaaaaannnnnnaa

SEQ ID NO: 138449 - DNA, 188 bp, Zea mays
  Clone ID: MRT4577_57748C.1
aaaaattttaagtctgatcagatatttacaactgttcattatagtggtgccttacgcaatcttgcgacagtaaattcaggggcccattgctacttatgccatatgtggacatacttctgtgttcttcaattgtgtaaacttcctggaaagctgtcttcactaagtatcccctagtctctatatatatg

SEQ ID NO: 138450 - DNA, 147 bp, Zea mays
  Clone ID: MRT4577_57749C.1
gccactcgtacgaatacgcttcagtctggatgcagggggcaacaatatctaagtagggggcaagaacgacctaatcactttcacacgtaaacccctacgaactacaggctccacaccatcggcttccaacttacatagtgcagatat

SEQ ID NO: 138451 - DNA, 187 bp, Zea mays
  Clone ID: MRT4577_57750C.1
ttttctgatgaagagggatgcttgtctctctctttcttcgagcttctcacattcctcagagaatgtcgacacgtgctgcagcagatgcagagcggatatgaacccaattgatgaagatggccaagcgacgcaacactactacactgacaagactgcacacgactctgcagcgtgcgtttgctgaatc

SEQ ID NO: 138452 - DNA, 1366 bp, Zea mays
  Clone ID: MRT4577_57751C.1
ctctacggcgccccttaggtggcgctcgtcttttttctcacgccagttctcatatttccaataaagaaaataaaggggaaaatcccttcaaatgaccagcagagaaagggaggagaatcgatcgatcatcgaccacgctcatgcccacgcccgcttcttcgggataagatcgagcgtcttgactttatctatccctggcggcgacgatgtagtcgttgacggtgaggctgtcgccggcggcggagggcgtggagagctcggccgtcacctggttgggggcctcgaacgccagggtcgccggggcgtgtccggcgccgtggagcgcggcgttgatcctggcgatgagctcctggccgcaggtctcgtcgcgcaccttccagacgcactgcagccgcgcgggacgctgctcgtcgccgtcgccgtcggagaggacgagcctccacccgacgaccttgaagaggagcctgcgcgcgtcgtcgagggagagcggctccgcgtcgggctgcagcgggaggctcgcgagggagagcgcggagagggtggggatgaggatctggtggagcgtgtccacgttgcccagcaccttctccccaaactggctctcgatctcctccgggaaggggtcgcgcgcgcccaagtcgcccagcaggtcggccatcgccaccacgcagccacgcgccctgccccggcggctcccaactgcgacgcccggccggatgaagcttgcgctgctgcagcggcatgtggaggccgcgggtgcagctgctggcggggcgagggagagcctgagcgccattggattgggtggaaacggagcccaatggatggctcaggatgcacactggcaggggaggggaagcccggccggcgtcggcacatcggcgaccagtggagcgacatcctcggcgcgccggagggcgcgcgcaccttcaagctgcctgaccccctctactacattggctaagcagcgatgccaacggcgcggcgcggctctccatcagcccatccatcaacccgtcacccggctccagtgcctgtgctcaactactctttgtttgttacccctcacttcttatcatcattaattcctaaggttaattccctgagctgagtggaaataaggccgactcggtggagagctgtcgacttctcaataaataattgctcatgaaaaccacgatggtttatgttattcaaagtcttatatatatataatggattagtaaaaaagaaatgtgttgtgagcaactgttgaattttgcagcgtacatttggaataaatccattgcaacagactaaaaaaatacatgaaaaaaaaacaaataaaaagccatggtctcagagggacggaggctccgtcatgaac

SEQ ID NO: 138453 - DNA, 2122 bp, Zea mays
  unsure (1)..(2122): unsure at all n locations
  Clone ID: MRT4577_57752C.1
ctcgcctcttcccgacttgccccctcgattcgatccgagcttacttctagggttcttggccccgctccaccgtcgcccatggcagacgatgccaaccgagcggccttcatggagctgcagtcccggatgatagataccaccgcgaagatcaagcaggtcgttcccttgttcccgttctctgacccgtttcataggttccggtcgtgcctcatcttagggctttttagttgtcgggtcttgatttgtccggcgggttgaaactcgacggttgctcttcatattgtctgttcagtgcggctgctgctcgtagtacaactgtagattcttctggatctcgtccggtcagctattgtgctatcacactttgctgtgctggaaaacccttttttcagccagtaatatgctttggttgtatgggtggctcattacatgcattacttctacaacagtcactgccaatttatgtaaaaatggccagctcgatgtccaagaattttggcttcttaatgcagtgatattgttttcctttaatttctttttctgcaagagctcccatatgaagtgtaatgttgaaccttttaaattcagattaacatatgtgctttacaaaattttctatcttgtttatttcctagtaggaactccaaagcatgagtagaaaaggaattgatttggtttttgatagttattattgaaagagaaatcaacggtttgctagtaatgttgtgactcaatcatttctgtcggtgtacaatcatattgcacaaaattatttacagcctttgtaaatgcaagcatattagttctgtttgactaccttgatgggttcttcacttgtactctgttgtgattttacctttgatggaagtttctttgtaaggaaatttctatagtaacttctagcctatatgtcatagaacctctgttgcaataatacctttctttcatcagttacaaacccaaatgcgttctaaagaaggggaaaagaagcgtgcctaccttactttggaggaacttcgccagttgccagatgataccaacacctacaagactgtcggaaaagtgtaagtaaacgaggaagaccatcttcaacatgggggagttcaattccattttcttgtatggtgctgtgatgcaaaatacggtatcgtgtatttcatttttttcccccacgtccatctgttgccaggtttattctggagccaaagtcagttctgttcaatgagcaggagcaaaagcttaatgacagtgagagtgcgatagcttcaatgcagacatccaaagactaccttgagaaacagcagggcgaagtggagaacaatattagggagctgcttcaacaggacccaggacttgcgcgtcagatcctctcaatgaccgttcaatgagagttgtttttctctccatttaattttttagataatttgtaatgtcgcagtttgatcagtcatgctgtggtcttgccttatctgtgagacatgtgcggtctgtaatttctgaggtgtttggctggtggaatgatgtggtccatcattatctcactctagtgctttgtttggtttgtggaatagattgagttaattcatcatcaaaaaaaaaaaaaaaaaaagtcagttctgttcaatgagcaggagcaaaagcttaatgacagtgagagtgcgatagcttcaatgcagacatccaaagactaccttgagaaacagcagggcgaagtggagaacaatattagggagctgcttcaacaggacccaggacttgcgcgtcagatcctctcaatgaccgttcaatgagagttgtttttctctccatttaattttttagataatttgtaatgtcgcagtttgatcagtcatgctgtggtcttgccttatctgtgagacatgtgcggtctgtaatttctgaggtgtttggctggtggaatgatgtggtccatcattatctcactctagtgctttgtttggtttgtggaatagattgagttaattcatcatcatcccattcctcacaagctaacaattaatgcaaataatagcataaggaatgggttatttcaaaaaaaaatagtatcagcatctccaagagctctccataaaacgactccctcaaatcagttntaagggat

SEQ ID NO: 138454 - DNA, 583 bp, Zea mays
  Clone ID: MRT4577_57753C.1
tccagctcctgagagagctcccaggtcagcgcctcattgccgctgaggttgaccacacctctcccccagacgaaagcagcctcaccgatgttgtccagaggggtctcctgcacttacgccggcagtcagctctatcgacgacggtttcctcctctccgcctaacaagagcttaatgaactcgaaggtgatgaagataccaggacgaaacgtactgcgcgccaaacttcactaggttgctgaaagagcatcaggtcatctgatcaaaacctgtgcgacagaatgaggtgaagcatgtgatcgatgtgatgatggcgcctaaggtgcatgtgaatgcacctgttgatgtccatgatgtatatcagagcaaataacatgctggtgaaacttggatgaatacatgctattatgcatgacttcatagacgacgacatggataacgaacaatatgaaagtctcttatgctggccaacacttaacttacgctatgatctgtagctctgttgctattaccaggacacgaggaacgacatccctgagatgtgagtatgacaatgagatggacaaccctaagacaacgaatta

SEQ ID NO: 138455 - DNA, 209 bp, Zea mays
  Clone ID: MRT4577_57754C.1
cggacgcgtgggcggacgcgtgggcgcgcatcgcgccaccccatccgtcaccgtcgacccgcgagcaccctgtcgaagggaggaggtggaggctagctcctgactagattcatgatgactattactatcgtcaaattaaggttgggtctggtctctattaatgtgctgacagttttcttgaccttaatggtgcttcttccacacaccat

SEQ ID NO: 138456 - DNA, 431 bp, Zea mays
  unsure (1)..(431): unsure at all n locations
  Clone ID: MRT4577_57755C.1
aaaaaaacggcctttccttccccccgcccaaaccaagaaagtgagagcgcgcagcgagcccctgccggcgactcggcagtccgcactgaggagtgaggacgattcgttcagcttgctcccaacaaattcgttggaggacaggggaggggcgaggtcgtccgccgctggttctgtagtcagccaggtgagagttccttcggctgctcggttcccttcatcggccgtaccttcgccatcgttggtttacttccccacgcgtgaacccctcacgctacgtccacttctaatggtcgatagtatcctccctctcctaccgccgctggtcgctgccgctgccgccgccgccaaagaggaggttgccaggcgcgctgctctggacgaccgtgcccgcgccacaaggccgnacgctacgcctctcttgnccgcgcctc

SEQ ID NO: 138457 - DNA, 320 bp, Zea mays
  Clone ID: MRT4577_57756C.1
tacccacgcgtctgataaaaaaaaaaaaaaaaaaaaaaaaaaaaaaaaaaaaaaaaaaaaaaaaaaaaaaaaaaaaaaaaaaaaaaaaaaaaaaaaaaaaaaaaaaaaaaaaaaaaaaaaaaaaaaaaaaaaaaaaaaaaaaaaaaggatggggggccgcttcaatgggttcaaactttattttcccttaaaggtaatttattttcttttttattttttaacttaatttcatttcatgggctttcttttaaaaattttgggaagggaaaacccttgttttaaccaaatttattccctttgaaacaattttccttttccca

SEQ ID NO: 138458 - DNA, 589 bp, Zea mays
  Clone ID: MRT4577_57757C.1
ccggccgggaattacttgtccctgatatatcgcgtcttcgtagtcgcctacgtccgcggctcaaacttttcacccttctcccaattccttacgacgggcggcgatccacccgcaccatgacaccatgacggagcgaatttctatccacatcctccaggccggtgttcaagaagtactactcccgctggaacctgtactgccttgacaatgacattcaggttgacgaggacatgaccctcgactcaaacattgtccgaggcgatgatgctttcttcaccttcttcctggagactggtgttgagaagcacccgccccgtgctgtttttgttgaccttgaacccactgacatcgatgacctgataactgtcacctaccgcaagttcttcctccctgaccaactcatccgcggcaacgaggataccatcaacaagtttgcccgagttgactagaccattgtcccggagatagatgacctgtgtcttgattccatcatgaacgtcgacgaccactggactgatgtacagcgcttcctcgacttcaactatgttcaccggacgaacgcagctctggccttgtgtccctcctccta

SEQ ID NO: 138459 - DNA, 348 bp, Zea mays
  unsure (1)..(348): unsure at all n locations
  Clone ID: MRT4577_57758C.1
acggtttagtttgtttactatgtataaacaggggggggtaataaaattatatagaattggactatataatctatatacagtgagctggattgtatattactgcgagggaacaaccgggccctaaaaattcatgcaacacatatttagctacgcttttnnnnaactgatggcatactcacgcgcgggccctggcacaaaaactgggccaactcaaatacagtccacagcgacaatgtctacatgctttgtgtacgcatacaagctgggattaggggtggcttccattaaaaatgaaggttatcggtgaccgctcaaacagattggtgaccagtttcaatacctctcggg

SEQ ID NO: 138460 - DNA, 301 bp, Zea mays
  Clone ID: MRT4577_57759C.1
tcctatttttctattttcaagagataaggaagggaggatgtttatatatgatgtgggagcaccaagcacacttattacatcctatccacacaccaattgatatgaaatcgatatttctatatgaaaaacaaaaacacatttttagggaataacgaggcaaaaacttttatataaaattaagaaagtattagttcacttggcagccctaaaccttaaagcccaggttcaccctgttctcaattcctgaccgattctcattggctgaacaggttatacctatagggagtaggaatttaccttt

SEQ ID NO: 138461 - DNA, 205 bp, Zea mays
  Clone ID: MRT4577_5775C.1
caacgtcgaggaggtcaccgaagcggcgccctcgacccccgggaacaacaaggcctactgtgatgaccacggcacttgctaccggaaccataaccaagacgtcgaaccccaaaagccctgttgcggcggccaacccatacaccctctgctagaacaagatcacttgatgctgatgcttatcgatggcatgcaagcatatatatac

SEQ ID NO: 138462 - DNA, 633 bp, Zea mays
  Clone ID: MRT4577_57760C.1
cggcactagcttcaacgtctctctcggctctcgcatcgatgaagaacgtagaccaatgcgatacctggtgtgaattgcagaatcccgcgattctccgtgtttatgctcgcaagctgctcccggagcctactagcggagggctcgtatgcctgggcgtggcggagaacaaatacaaatacacatactcctccccagcgcacacatcactagggaattcgatctatatatcctcttcttctcatggcggtgttcaagacgacaatcgtcctagtcctggtttttgtggtcctgtcttcaacgtctccgtgctacgaagccggacgaagctgcattggtggctgcgatcagcagctagatgcgacaccgtgcgtggaccctctcaagaacgacgcggaccactgcacgaccgcgacatgcgccttgcaatgcctgtccgccaagcacaagaccaagtcggcctactgcaagcatgagggcagcaaatacgagtgctgctgcccgccatgagagcaaccaagctagagcagcggttatgtgatacactcaataaaataaataaactcaacgtttgttcaataataaataaatggaagggatattgactttaccaaaaaaaaaaaaaaaaaagcggcc

SEQ ID NO: 138463 - DNA, 2037 bp, Zea mays
  Clone ID: MRT4577_57761C.1
atggattcaacagactccatagccgacaaggcaattggaaggatacaagagattgcggacaagatattttctatagcgagggaaacaatccgtcctggacgagggttgacctcatttgatgctaccaaaattcatgtagcattggaggacattgcttgcatgatggagcaagactctctggtgttgcaagagtatttggacaaggtcaacaacgttaacaaccagcttgacagcaactacgaaccctcagacttgtcctcaccaccccctggtgaagaagacctaagtcaggactgggactttgccaagcactttgaaaaatggagaagtgtggcaaagtgggacacaagagcaactaaaatttacacagaaatttgtgtagaagaggtcaatgcacgcaacaggccacaacactttctaaatgcagaagggtatgctaacctcattaggaagtttaaggaacgcactggccgcatgtacaccagggatcaaatgaagaataggtgggactctttaaagagaatgtacacgcaatggaaaacacttaatgaaagggctacaggtcttggtcgagaccctcatactagttcaatcagtgcaccagatgagtggtgggctaagcaaaatgaagcaatgccagggtgtattatgttcaaaacagcccctcttgagaatgaggacgaccttaagataatgtttggacccattgtgtgcaccaatgagacaacccttgttcctggagttgaggatgctaattcatcgtctgatggtcacgaagaagacattttaggtggcggtgaaaacagcacacctgaccccagctcaattgtgaaaggcaagcgtaaggtgttgcatgattctcctaaacctaagaagaaaagggatatgaagtatgaatacatgaaatgccttgtcgaagcttacgagtcgaggaccttgagctctaacaagtccatagcctcatttgagaacaacctcgttcgtaaagaggttgctgctcaattgcaacaagtcattgaagatggtgcagcggaaggaagcgacttacatttctttgcgactcatttgttgatcgaaaaacgttatagagatgtatttgcaaccctaaagaccaaagaaggaaggaacgcttggttgcgccgtgattacgagaagaatgagaatgctgttacaaactttatgccgtatgagtctttttcccatcagagaagtttttcaattattcgagttgaacttgtctttgcaataataacagttatgtgtgagcctgatacacactcatctgatgatgagagggatggtgaattcctagttgcactatttgctgtggacatatgggggagctcgccaagtggggtttcgagaagaaccatggttgaaacaggtatccaattggttgagcgaacattggagagtagtgatgatttctttgacatgtttcgcatgcgtcaaactgtgtttcgacgtttgcatgatacgttggtgcaaaattatggtctggtaccaagtcgtggtgttagtacaacgaaagcaactgccattttcttgtgggcatgtgggggtccacaatcatttagacagataaggaataagtttggtcactcattggaaactataagccacaaatttagtgaagtccttaatgcaatctataggatgtcttctgacgtaatcaagcctaaggacaccaatttcatagagattcaccctagattacgagagactagattctggccgcatttcaaggattgcataggaaccattgatggaagccactttcccgcgtctgtcccggccacggagcaagcaaagtatattggtcgtcacggttacgcatcacagaatgtcatggctgtttgtgacttcgatatgaggttcacatttgttgtcacgggttggccaggtaaatactatcttgtagattctggttatccgaataggaagggataccttgcaccttataagggtcagaagtgccacatttcagaatggcaaaatgcgaggcaaccagttggtagcaaagaagtttgtacctag

SEQ ID NO: 138464 - DNA, 513 bp, Zea mays
  unsure (1)..(513): unsure at all n locations
  Clone ID: MRT4577_57762C.1
accaaggaggcgcaccgccgcacccccaacnncaacgccggcagccccaccgagnacaccaacgaccccagcancgccgncggcaccgggncggcaaagcaggcggagaacggagaccgcggagcagngcgcgaaggggggcgggggggaggggcncnacaacggcgggnccacgccgaccancgacaaccncncgcaggccagnngcgacaaggncgacagccaagcgncganccccnnncaggcccggcactgcgagaagaagcaccnncgcanccaggacganaccccgacggggaacgcagcgggcgcggacaacgccaccaaggagaacaaggaggcgcgganancgancggccaggagcggcccaagaagccaggggcgagagngaacancgacacaggggngnacgagnccngcgacggggagggcacaaangcacagncgcgagcngacnccgccaagcaacncncggacgagcgcaagccacgcaagagcaancccaaccccag

SEQ ID NO: 138465 - DNA, 3846 bp, Zea mays
  Clone ID: MRT4577_57763C.1
atggtgccaggtcagtccagtcacctggagagactgcatcgtcgtctgcacgacgagcaggagcgccgacgccaggagcaggagcgggagcagcaggactcttccccctcgcctcagcgggaggtggaatctgagaggccgccttcccctgcacctcagccagagatgccccctgcaccaccacagggcatcccggctgctggaggagaccctgacggagacagagacgacgacgatgccggtggcagttcgagccacgacacggagcgctcggaggagccggagctagagggatggatcgctagacccatcactcgtgacgctactcgcgggtgtcacttccacgacgctctcgacaccctgctgcgttgggccttcgaccgacacacttggtccatcgagtaccgttgtgtagtttatcagcatcgtcgcgggttatacccggaccagtgggaggctacttgcttggtgcgccgtccggacgatgatctctggggtgcagaggccttctcagagcactattctattactgagagggatactgccgaggtagccatgcaggatgcagcacgacgggcactttctcagtattgctcgttgttcagcggggtagctgatggccttgacctgaagtactaccctcgtcgttcgaccggcagtgctggaggtgtgattgtctcgccagttggtgagggcaatcccaggctgaacagcatggtcaacctggccgccgtactcaacacagagctggaccacacccttaacgagttgggcaagatgtctgagaataggcgcagaggtgcaaggcgtgctcagccagaacagcaggcaccccaagaggatgcagcccaacagcagcagttgccaccgccaccccctatgatagtcgagcaaatgttcatgatgcaaactcaggcagttcaggcaattggtcagactttagcagcgatgcagcaggaggagttcagggacaacttccgtcactaccatgtgcccgagggactgatgatagtgaagaaaaaggagtttctcgccctgaagcaaggtcccctgtccgtcagtgagtacagggataagtttttgcagttgtcacgttacgccccagaagacgtcaacacagatgccaagaggcagtaccgctttctgagaggattggttgatcccctccgataccagctcatgaaccacactttccccaccttccagcatttgactgacagggcaatcatgactgaaaggaagcgtcgggagatggaggataggaagtgcaagattggtggacctcaggccgggagtagcagtcgtccccgctactcaggaaactcaccacaacaattcaagcaagcaagacaaggagcaccacagcaagcatcaggagtccgtggtcaggcctacaaccgtggaaaggtgaaccacctggaggccaaagcaatccaggatgctcaggacgtggcagtaggtatgtttccagtcgaatcctacccagcaaaagtattatttgatactggtgccacacattcttttgtttctgcatcttgggtagaatcacataacatccccatagaaccaatgatcccgcctttgatttgtccgaatctaaggattgaaataagggggatatacttcccaactagcctagtagtaatgggaactcaagggttagatgtcatcctagggatgaattggctacacaaaaatcaagccactgttagttgtgacaagagaacagtcaagttggtgtccccatccggaaaggaagtagtaactaagttgtacttgcctgaactagaagaaggagcctgtcaccatttatcagtagaggacaaggggtccaatccaattgaggcaattaggattgtgtcagaattccccaatgtatttcctaaggagctacgaggcatgccacctgaaaggaaagtagaatttgccatagagcttatccaaggcaccgcccctatttccaagagagcttatcgagtgtccagaccagagttggtggaactcaagaagcaaattgatgagttattagagaagggctacatcagaccaagtacctcatcttgggcagccccagtgctatttgtggagaagaaggatggcactaagaggatgtgcatcgattacagagctttgaatgaagtcactgtcaagaacaatgtgttcatggactacctcgacaagtttgtagtggtgttcattgatgatattcttatatattcccagaatgagcaagagcatgaggaacatttgaggaagcttagcaagtgtaagttctggatcagcgaagttctattcttgggtcatattataaaccaagatggactagctgtagatccaaagaaggtagcagcgattctggactggaaagcaccaaaagatgtccgaggaatcaagagtttcattggaatggtcggttactatcggcgtttcattgagggtttctccaagattgccagaccaatgactgccctgctagcaaagaaggttgagttcaagtggaccccagcatgccaagaatcatttgaaatgttgaagcagaagttgacaacatcaccagtattggttctgccagatgttcacaagccattctcagtatattgtgatgcttcatacaccggactgggatgtgtgttaatgcaggaagggaaagtagtggcatactcatcgcgacaattgaaggttcatgagaagaattaccccactcatgatctggagctagcagtagtggttcatgcactaaaaacctggagacattatctttatgggcagaagtgtgatatctacacggaccacaagagcctcaaatggctagaattgatcaaagactatgagctggagattcattatcacccaggcaaagcaaatgtggttgcagatgctcttagcaggaagagtcaagtcagtatgttggccgctcacccgatgtcgttcgagctagcaaagaaattcgacaggctgagtctcgaatttctgaacaacactcagggagtgataattgagttggaacccaccctagagcaagacatcaggaaaggtcagaaggatgatgagaagatcaatgagatccggcagctaatcatagatgggaaaggtctagatttccgtgaagacggagaaggagtgatatggttcaaggataggctgtgcgttcctgacatcacatcaatccgggaactgattctcaaggaagctcataagacaacatattctatacaccctagaagcgagaaaatgtaccaagacttgaagaagagattctggtggtatggaatgaaaagagagatagcagagtatgtggccatatgcgacagttgtcagaggatcaaggcagaacatcagagacccgcaggtttgttgcagccgttgcagattccgcagtggaaatgggatgagattgggatggactttatagttggtctgccccgcactcgagctagttatgactccatctgggtagtagtggaccgtttaacaaaggtggcccatttcataccgatcaagaccacctataacagtgcagtgttggcagaattatacatgtctcggattgtgtgcttgcatgtttgtcacccgcagacagatggtcagactgagagaaccaaccagattcttgaggatatgttgagagcttgtggtttgcaagacaagttaggttgggacaagaggctatcgtatgcagaattctcctacaacaacagctatcaagccagtctgaagatgtcaccattcgaagcgctttatgggaggaattgtcgaactccattagattgggaccaacccgacgaaagacaggtgttcggtccagagattttgcttcaagccgaagagaatatcaggatggtctag

SEQ ID NO: 138466 - DNA, 3300 bp, Zea mays
  Clone ID: MRT4577_57764C.1
atggctttgggagatagggttcaagagaggtctagggttttccctcctcttgcccaaggtaacaacgagcagctcgtggttcctgagtgtgttgccgaagatccctctgagcaacaacttggtgaaggcaagtgtcctcagacctatcatatggcccgtatcaagtgcactgcacataagtctgtgatcccctttttgccttctcgtctagcggagcatccaccacgtcgcacggtgtcaggtcagtccagtcacctggagagactgcatcatcgcctgcacgaggagcaggagcgccgacgccaggagcaggagcaggagcagcaggactcttccccctcgcctcagcgggaggtggagtctgagaggcctccttcccctgcaccccagccagagatgcccctgcaccacctcagggcatcccggctgctggaggagaccctgacggagatagagacgatgacgacgttggtggcagttcgagccacgacatggagcgctcggaggagccgaagccagaaggatggatcgctagacccatcactcgcgacgctgctcgcgggtgtcacttccacaacgctctcgataccctgttgcgtcgggccttcgaccgacacacttggtccatcgaatactattctatcacttgcttggtgcaccatccggacgatgatctccagggtgcagaggccttctcagaacactattctatcactgagagggacactgccgaggcagccatgcaagatgcagcgcgacgggcactttcttagtattgcacgttgtttagtgggcgctggaggtgtgattgtctcgcccgttggtgggggcaatcccaggctgaacagcatggtcaacctggccaccatgctcaacacagagttggaccacacccttgacgagttgggcaaggttcgggtggaggttgcgaaattgcatgctgaatgcgtggcacaccactatcttgatggtggttctctcacccctgtcgggattcagcacccttaccgttcgccgccccgtggtcgcttcgactacggtagttcaggcaattggttagaccttagcagtgatgcagcaggtgcagcagcagccacccccacctcaacctccagtgcaagttcagatgccacaagtcccccgagacaagcgggcagagttcatgaggggccatcccctatctttgcccactctgttgatcccatggacgcggaagattggctacataccgtggagcatgagttgcacactgcccagtgcaacgaccgtgaaaaggtgttgtatggtccccgacagctgaggggagcagcacagtcttggtgggagtcttacctcaccacccatgccaaccctgaagccattacttgggaggagttcagggacaacttccatcgctaccatgtgcccaaaggactgatgatagcatacaaccgtggaaaggtgaaccacttggaggccaaagcaatccaggatgctcaggacatggcagtaggtatgtttccagtcgaatcctacccagcaaaagtattatttgatactgatgccacacattcttttgtttctacatcttgggtagaatcacataacatcaacatagaaccaatgatcccacctttaagagttaattcagttgggggaaaagttcagtccgataggatttgtccgaatctaaggattcaaataagggggatagacttccccgctagcctagtagtaatgggaactcaagggttagatgtcatcctagggatgaattggctacacagaaatcaagccactatcagttgcaacaagagaacagttaagtttgtgtccccatccagaaaggaagtagtaaccaagctgtacttacctgaactagaaggagtctgtcaccatttatccgtagatgacaaggagtccaatccgattgaggcaattagaactgtgtcagaattccccgatgtattccctgaggagttaccgggcatgccacccgaaaaagttgaatttgccatagagcttatcccaggcaccacccctatttccaagagagcttatcgagtgtccggaccaaagttggtggaactcaagaagcaaattgatgagttgttagagaaaggctacatcagaccaagtttctccaagattgtcagaccaatgatagccttgctagcaaagaaggttgagttcaagtggaccccaacgtgccaaaaatcatttgagatgttgaagcagaagttgacaacaacaccgaagtgtgatatctacacggaccacaagagcctcaagtacatattcactcagtcagagttaagcatgaggcagcgaagatggctagaattgatcaaagattatgagctggagattcattatcacccaggcaaagcaaatgtggttgcagatgctcttagcaggaagagtcaagtcaatatgttggccactcactcgatgtcgttcgagctagcgaaggaattcgacaggttgagtctcagatttgtgaacaacactcaaggagtggcaattgagctagagcccactctagagcaagacatcaggaaaggtcagaaggatgatgacaagatcaacgaaatctggcagctaatcatcgatgggaaaggtccagatttctgtgaagatgcagaaggagtggtatggttcaaagataggttgtgcgttcctgacatcacatcgatccgagaactgattctcaagaaagctcatgagacaacatattctatacaccctggtagcgataaaatgtaccaagacttgaagaagagattctggtggtatgtagtggaccgtttaacaaaggcggcccatttcatactagtcaagaccacctataacagcacagtgttggcagaattatacatgtctcggattgtgtgcttgcatggtattccaaagaagataatatcggacagaggcacccagtttacctctcacttttggcagcagctacatgaagctttgggtacacacttgaaattcagttcaacttaccacctgcagacaaatggtcagacagagagaaccaaccagattcttgaggatatgttgagagcttgtgctttgcaagacaagttaggttgggacaagaggctaccatatgcagaattgtcctacaacaacagttatcagaccagtctgaagatgtcgccgtttgaagcactttatgggaggaattgcagaactccattgcattgggaccaactcgatgaaaggcaggtattcggtccagagattttgcttgaagctgaagagaatatcaggatggtccgggaaaatctgaaagcagcacagtccaggcagtga

SEQ ID NO: 138467 - DNA, 242 bp, Zea mays
  Clone ID: MRT4577_57765C.1
ctaataattgcacagggcctatgaggttcctgcaagactgcaatgactagttattttcatcgaattgaacccaacgactggtttaactcatttgcttggccacaattactaaagatggatgctggattagaacctactttcctatcaatgggcaggtgtcctcgtagaagataaagaaaatttttcgtttgatacatggcgcaacatagtggtatctcttaaacgccacaaagccagtgttc

SEQ ID NO: 138468 - DNA, 2769 bp, Zea mays
  Clone ID: MRT4577_57766C.1
atggctcgtctcagttgcactgcacagcgtccactgcgtcgcacggtgttaggtcagtccagccagctggagagactgcatcgtcgcctgcacgaggagcaggagcgccgacgccaggagcaggagcagcaggactcttccccctcgcctcagcgggagtctaccaacatcgtcgcgggctatacccagaccagtggaaggctacttgcttgcggggtagctgacggccttgacctgaagtactaccctcgtcgttcgatcgacagtgctggaggtgtgattgtctcgccagttggtgagggcaatcccagactaagcagcatggtcaacttggtcgccgtgctcaacacagagttggaccacgcccttgacgagttgggcaagatgtctgagaacaggcgcagaggtgtgaggcgtgctcagccagagcagcaggcaccccaagaggaggcagctccgcagcagcatttgccatcgccacccccgatgaccattgagcagatgttcttgatgcagacccagacagttcaggcaattggtcagacattagcagcgatgcagcagtgcaacgaccgtgagaaggtgttgtatggtccccgacagctgaggggagcagcccagtcttggtgggagtcttacctcgccacccatgccaaccctgaagccattacttgggaggagttcagggacaacttccgtcgctaccatgtgcccgagggactgatgatagtgaggaaggaggagtttctcgccctaaagcaaggtcccctgtccatcagtgagtacagggataagtttctgcagttgtcacgttatgccccagaagacgtcaacacagatgctaagcgacagtatcgctttctgaggggattggttgatcctctccattaccagctcatgaaccccactttccccaccttacagcacttgatagacagagcaatcatgactaaaaggaagcgtcaggagatggaggataggaagcacaagattggtgggcctcaggccgggagtagcagtcatccccgttacttaggcaactcgccacaacaattcaagcaagaatcacataacatccccatagaaccaatgatcccacctttgagagttaattcagttgggggaaaagttcagtccgataggatttgtccgaatctaaggattgaaataagggggatagccttccccgctagcctagtagtaatgggaactcaaggattatatgtcatcctagggatgaattggctacacagaaatcaagccactgttagttgtgacaagagaacagttaagttggtgtccccatccggaaaggaagtagtaaccaagctgtacttacctgaactagaagaaggagcctgtcaccatttatcagtagatgataaggagtccaatccgattgaagcaattagggttgtgtcagaatttcccgatgtattccctgaagagttaccaggcatgccacctgaaaggaaagttgaatttgccatagatcttatcccaggcaccacccctatttccaagagagcttatcgagtgtccaggccagagttggtggaactcaagaagcaaattgatgagttgttagagaaagccccggtgttatttgtggagaagaaggatgaaacgaagaggatgttcatcgattacagagccttgaatgaagtcactgtcaagaataagtaccccctgtccagaattgaagatttatttgatcagttgagaggagtcagtgtgttctcaaagatagatctgaggtcaggttaccatcagctcagaatccgacctgcagatataccgaagacaacattcatcaccaagtatggactatatgagttcatggttatgtcattcggattgacaaatgcgccagcttactttatgtatctgatgaacagtgtgttcatggactacctcgacaagttcgtagtggtgttcattgatgatattcttatatattcccaaaatgagcaagagcatgaggaacatttgaggaaggtacttcaaaggctacgagattgccagttgtatgccaagcttagcaagtgtgagttctggatcaaagaagttctattattgggtcatattataaaccgagatggactagttgtggatcccaagaaagtagcagcgattctggactcgaaagcaccaaaagatgtccgaggaatcaagagtttcattggaatggccggttattatcggtgtttcattgaaggtttctccaaaattgccagaccaatgacagccttgctagcaaagaaggttgagttcaagtggacctcagaagggagagtagtggcatactcgtcccgacaattgaaagttcacgagaagaattaccccactcatgatttggatctagcagcagtggttcatgcattgaagacctggagacattatctttatgggcagaagtgtgatatctacacggaccacaagagcctcaagtacatattcactcagtcagagttaaacatgaggcagcgaagatggctagaattgatcaaagactatgagctggagattcattatcacccaggcaaagcaaatgtggttgcagatgctcttagcaggaagagtcaagtcaacatgttggccgctcactcgatgtcgtttgagctagcgaaggaattcgacaggttgagtcttggatttctaaacaacactcaaggagtggcaattgatctagagcccaccctagagcaagacatcagaaaaggtcagaaggatgacgagaagatcaacaagacccgtgtaacgccctga

SEQ ID NO: 138469 - DNA, 3135 bp, Zea mays
  Clone ID: MRT4577_57767C.1
atgccccctgcaccaccacaggccatcccgattgctggagacagagacgacgatgacgctagtggcagttcgagccacggcacggagctctcggaggagccggagccgaagggatggatcgctagacccatcactcatgatgtcgctcgtgggtgtcacttcaacgatgctctcgacaccttgctgcgtcgggccttcgatcgacacacttgtggggtagctgacggccttgacctgaagtactaccctcgccgttcgaccgacagtgctggaggtgtgattgtctcacccgttggtgaaggcattcccaggctaaacagcatggtcaacctggtcgtcgtgctcaacacagagctggaccacgccactgacgagttgggcaaggttcgggcggaggttgcagaattgcatgctgagtgcacagcacaccactatctggatggtggttctcccgtccctgtcgggattcagcatccttaccgctcaccgccccatggtcgcttcgactatggtagtccaagcaattggtcagaccctagcagcaatgcagcaggtgcagtagcagccacccccacctcagcttacagtgcaagtccagatgccacagattggttgcgtactatggaacgtgagttacacactgctcagtgcaacgatcgtgagaaggtgttgtatggtccccgacagctaaggggagcagtacagtcttggtgggagtcttacctcgccactcatgccaaccctgaagccatcacctgggaggagttcaaggacaactttcgtcgctaccatgtgcccaagggactgatgatagtgacgaaggaggagtttctcgccctgaagcaaggtcccctatccgttaaagatgtgaacacggatgctaagaggcagtactgtttcctgagaggattggttgatcccctccactaccaactgatgaaccacactttccctaccttccagcatttgatcgacagggcaatcatgacagaaaggaagcgtcaggagatggaggataggaaacgcaagatcggtggatctcaggtcgggagtagcagtcgtccccgctactcaggcaactcaccccagcaattcaagcaagagttaccaggaatgccacctgaaaggaaagttgaatttgccatagagcttatcccaagcaccgcccctatttccaagagagcctatcgagtgtccagaccagagttggtggaactcaagaagcaaattgatgagttgttagagaaaggttacatcagaccaagtacctcaccttgggcagccccagtgctatttgtggagaataaggatggtacgaagaggatgtgcatcgattacaaagctttgaatgaagtcactgtcaagaacaattgtggatccaaagaaggtagctgcgattctagactggaagcaccaaaagatgtccgaggaatcaagagtttcattggaatggccggttactatcggcgtttcattgaaggtttcgccaagattgccataccaatgacagccttgctagcaaagaaggctgagttcaagtggaccccagcatgtcaagaatcatttgaaatgttgaagcagaagctgacaacagcaccggaagggaaagtagtggcatactcatcccgacagttgaaagttcatgagaagaattaccccactcatgatctagagctacaagcagtgaagtgtgatatctacacggatcacaagagcctcaagtacatattcactcagtcagagttaaacatgaggcaacgaagatggctagaattgatcaaagactatgagctggaaatccattatcacccagacaaagcaaatgtggttgcagatgctctgagcagaaagagtcaagttaatatgttggccgctcacctgatgccgttcgagctagcaaaggaattcgacaggctaagtctcggatttctgaacaacactcaaggagtgacagtcgagctggaacccaccctagagcaagatatcaggaagggccagaaggatgatgagaagatcaacgagatccggcaactaatcatagatgggaaaggtcctgattttcgtgaagatgcagaaggattgatatggttcaaggataggctgtgcgttcctgacatcaaatcgatccgtgaactgattctcaaggaagctcatgagacaacatattctatacaccctggtagcgagaaaatgtaccaagacctaaagaagagattctggtggtatggtatgaaaagacagatagcagagtatgtggctagatgcgacagttgtcagaggatcaaggcagaacatcaaaggcccgcagtcggtctgccccacactcgagctggttatgactccatctgggtagtagtggaccgtttaacaaaggcgacccatttcataccagtcaagaccacctacaacagtgcggtgttggtagaattatacatgtctcggattgtgtgcttgcatggtattccaaagaagatagtatcggacagaggcacccaatttacttctcatttttggcagcagttacatgaagctttgggcacacacttgaaattcagtttagcttatcacccgcagacagatggtcagactgaaagaaccagtcagattctcgaagacatgttgagagcttgtgctttgcaagacaagttaggttgggataagaggctaccgtatgtagaattctcctacaacaacaactatcaagccagtctgaagatgtcaccatttgaagcgctttatgggaggaattgcagaacttcgttgcattgggatcaacccggcgaaaggcaaatgttcagctcagatattttgcttgaagctgaagaaaatatcagaatggtccgggaaaatctgaaggcagcgcagtccagacagcgaagctatgctgacaccagaagaagggaactcagttttgtagtgggatattatgtctatttgaaagtgtcacccatcagaggaaccaaaaggtttggagtcaaaggcaagctagcacctcgctatattgggtcgtataagatacaagcaagaggtggagaagtggcttatcaactcagcttaccggagaatctctctgccgtgcacgatgtgtttcacgtgtctcaattaaagaaatgcttgcgagtgccaaaagagtag

SEQ ID NO: 138470 - DNA, 231 bp, Zea mays
  Clone ID: MRT4577_57768C.1
taaaaacagttgtaaagaatgtattttttttccaacaaacattttcaagtctacaggcaaagtatatgaataaaaaccccaaacaaaaggaaccaccccctggccttgtatttttccacattccactaccaaagttcaacagttttaccgcttccaatttcacaggagtaaaccagggggggttcaactcaccatcaataaactctgggttctttgcccccatgggggagg

SEQ ID NO: 138471 - DNA, 505 bp, Zea mays
  Clone ID: MRT4577_57769C.1
ccccacaattggttttagaaaaaaaaaaaattgccaagccccaaaaaggggcccctacaaaaaaaatttttttttaccggcccccgggggctccaccccttatttttaaacaccccctgtaggcgggcgttaaacgtccccagaccacggcggcgcccaaataacatcgcccaaaaacaaatttggttggtgccccgccccgccccaccccggggaacccaaaaaaacgaaaaccccgagcccccccccgacctgggggggggcccggggtcccttgccccctaaaagcaggcgcccgtttaaacaccccttccacacggcccccgaaacgcggggctgaaccggaaaatcgggcccgggcccctggaggcacaccatttttctaaaaagggagaaataaaagcgcggggcgaaaaaggcaaaaagctgttcccggggaaaaatggttccccgctcaaaatcccccacaaaacccgggccgaaattaaaaagggaaaaccggggg

SEQ ID NO: 138472 - DNA, 316 bp, Zea mays
  unsure (1)..(316): unsure at all n locations
  Clone ID: MRT4577_5776C.1
gggtacctcgagccgccggnnccggagcgatgactccccattgtcttcgcagtcacatgctcgtacaggcctctctccctgcctctccggctctccacctcgaccgcaggaggcgaggagaggacataccaaaacatattaccagcggtgcaccgcacgcgcaccgacctgcagcgggtcgggtaggcctggtgctgcgcgcgagcgcgatacacggtggtgcggtaagtaacggagaggcggcgcggtcgtttgcgaggaggacgagcaggagcagcaggccaccgacggcttcggagatctcgccggagaagat

SEQ ID NO: 138473 - DNA, 339 bp, Zea mays
  Clone ID: MRT4577_57770C.1
atgccgtatgagctagcaaaggaattcgacagattgagtctcggatttctaaacaacactcaaggagtgacagttgagctagaacccaccctagagcaagacatcaggaagggccaaaaggatgacgagaagatcaacgagatccggcagctgatcatagatggaaaaggtccagatttccgtgaagatacagaaggagtgatatggttcaaggataggttgtgcgttcccgacttcaaatcgatctgggaactaattctaaaggaagctcatgagacaacatattctatacaccctggtagcgagaaaatgtaccaagacctgaagaagatattctga

SEQ ID NO: 138474 - DNA, 186 bp, Zea mays
  Clone ID: MRT4577_57771C.1
ttttctttgtttttagcagaaaccacccaattattattggcaaacacctgtttgacattgcaatcctcaaatggctccctgcgaacaactaccagatgtaaccctgggaggcgaccaaaccggatgccaggggcaaattgagaccctatcctgctgacattgtagacaaaatccttaacccctcat

SEQ ID NO: 138475 - DNA, 396 bp, Zea mays
  Clone ID: MRT4577_57772C.1
atgacgttcgagctagcgaaggaattcgacaggctgagtctcggatttctgaacaacactcaaggagtgacagtcgagctagaacccacactggagcaagatatcaggaagggccaaaaggatgacaagaagatcaatgagatctggcaactaatcatagatgggaaaggtccagatttccgtgaagatgcagaaggagtgatatggttcaaggataggctgtgcgttcccgacatcaaatcgatccgggaactgattctcaaggaagctcatgagacaacatattctatacaccctggtagcgagaaaatgtaccaagacctgaagaagagattctggtggtacagtatgaaaagagagatagcagaatatgtggccaaatgcgatagttgttag

SEQ ID NO: 138476 - DNA, 467 bp, Zea mays
  Clone ID: MRT4577_57773C.1
agtatcaaagcacgcctttggcaccggagagattttccaaattcatggtattcatggtaccacccacccgggaaggtcccacttccgtttttctggttttaaaaggtcaaaaaccccaagggaaagggttttgacttttattccattcccttacagccttattaaaaggccgaaatggttccaaaaaaacctttggttttttaaaaaaccgcccttttgccattacagatgaaactgcaaaaccctggccaaacagttctacttcttctcctaatggttcgccgcctccttttccttttcctcctggatggcttacttttcgtcgtcggagtcgtcggattcttcgtcttcggagtcaatttcattatcgtagtcgcccttcgtgtgaccttggttgaaacttctaagctcgtccctcccgccatccgggttcaagaactccaacccgtataccgtgtctctgtgct

SEQ ID NO: 138477 - DNA, 1674 bp, Zea mays
  unsure (1)..(1674): unsure at all n locations
  Clone ID: MRT4577_57774C.1
ctagggatccaaatctatccaggtccggcagtctggggtaccatagtcgaagcgaccacggggcggtaaacagtaggggtgctgaatcccgacaggggcgggagaaccaccatccagatagtggcgtgctgcacattcagcacgcaattccgcaacctctgcctgaaccttgcccaactcgtcaagggcatggtccaactctgtgttgagcatggcagccaagttgaccatggtgttcagcctgggattgccctcaccaactggcgaggcaatcaaacctccagcactgctggtcgaacggcgtgggtagtactttaggtcgaggccatcagctaccccactgaacaacgagcaatactgagaaagtgcccgtcgtgctgcatcttgcatggctgcctcggcagtatccctctcagtaatataatagtgctctgagaaggcctctacaccctggagatcatcatctggatggcacaccaagcaagtagcctcccactggtctgggtataacccgcgacgatgctggtagactacacaatggtactcgatggaccaagtgtgtcggtcgagggcccaacgcagcaaggtatcgagagcatcgtggaagtgacacccgcgagcggcgtcacgagtgatgggtttagcaatccatccctcaggctctagctcctccgagcgctccgtgtcgtggctcgaactgccaccggcgtcgtcgtcgtctccgtcagggtctcgtccagcagccgggatgccctgtggtggtgcagggggcatctctggctgaggtgcaggggaaggcggcctctcagactccaccttctgctgaggcgagggggaagagtcctgctgctcctgctcctgctcctggcgtcggcgctcctgctcctcgtgcaggcgacgatgcagtctctccaggtgactggactgacctagcactatgcgactgtgacagccctcnccaagttatgggcccacgtgcaccaatccttgctttaatggcctcgggtggctgtgcacgtgtaccaggtaacttaacaaggctatcgagttcaccaactggaactcatcatcccaaggatctcccacataacnaggtatattacagtaatcacatttgatacacacacattggagatagagcggaagacttttataaagtacactttacattccagaactcaagttttacaaggtagaaagagatgtatttattacaagtcctgatagtacccaaagtgtataacttattacaataattggaagggtgaagcctttccataagagatacacataaacattctaagcttcaaggcctccacatgaagtaactaaccaaaagataagggaataaaacttctcctgtgaggaacaaggaatgggcacaacacggccgagacaatctccacgaaccctggccatgatgaggttgaaggattgctgttgtggtcaccagacacaggagttggttgtgatgaacaagggcagatcgatctagtggctgaggaggggagctaaaactgtcgtggagacaggaactacaacgcacaagcagctactttggctagaggttgagggtaggggagaacttcacaaaattcagccccaaggcactgaatataggggcaggtgtccctgcacatggcaaccatgctgtggggagtgtttcccggccgg

SEQ ID NO: 138478 - DNA, 1995 bp, Zea mays
  Clone ID: MRT4577_57775C.1
atgaccattgagcagatgttcatgatgcaaactcaggcagttcaggcaatcagtcagaccttagcagtgatgcaacaagtgcagcaacagccaccaccaccacagcctccagtgcaggtccagatgccacaagtgcccagagacaagcgggcagagctcatgaggggccatccccctgttttgcccattctgctgaccccatggacgctgaagattggctacctgaggggagcagcccagtcttggtgggagtcttacctcgccacccatgctaaccctgaagccattaattgggaggaattcagggacaacttccatcgctaccatgtgcccgaaggactgatgatagtgaggaaggaggtgtttctcgccccgaagcaaggtcccctgtccgtcagtgagtacagggataagtttttgcagctgtcacgttatgccccagaagacatcaacacatatgcaaagaggcagtaccgctttctgagaggattgcatttgatagacagagcaatcatgactgaaaggaagcgtcgagagatggaggataggaagcacaagattggtggacctcaggccgggagtagcagtcatccccgctactcaggcaactcaccccagcaattcaagcaagttcaccagcatccgcgtcagcaccagccccagtaccagaggcagtttcctcagcaacaacaacagcagtaccgtcagaacactcagccgggaggaaatcagtaccaacgtcagaacaaccaggcagctcgtcttcctgccccagcaaccaaccagagtagccaagcagccccagctcaagtaggaggtcgtgcatgcttctactgtggagaacaaaatcactgggcgaagaactgtcccaagaaagcagcccagcaaccaccaacagtcaatgccccagcaagacaaggagcgccacatcaagcaccaggagtccgtggtcaggcctacaaccgtgaaaaggtgaaccacctggaggtcaaagcaatccaggatgctcaggacgtggcagtaggtatgtttccagtcaaatccgacccaacaaaagtactatttgatactggtgccacacattcttttgtttctgcatcttgggtagaatcacataacatccccatagaaccaatgatcccacctttaagagttaattcagttgggggaaaagttcagtctgataggatttgtccaaatctaaggattgaaataagggggatagacttccccgctagcctagtagtcatgggaactcaagggtttgatgtcatcctagggatgaattggctacacagaaatcaagccattgtcagttgcgacaagagaacagttaagttggtgtccccatctggaaaggaagtagtaaccaagctgtacttacctgaactagaagaaggagcctgtcaccatttatcagtagatgacaacgagtccaatccaattgaggcaattaggattgtgtcagaattccctgatgtatttcctgaggagttaccaggcatgccacctaaaaggaaagttgaatttgccatagagcttatctcaggcaccgcccctatttccaagaaagattatcgtgtgtctggaccagagttggtggaactcaagaagcaaattgatgagttgttagagaaaggctacatcagaccaagtacttcaccttgggcagccccagtattatttgtggagaagaaggatggcacgaagaggatgtgtattgattatagagccttgaatgaagtcactgtcaaaaataagtaccccctgcccagaattgaagatttatttgatcagttgagaggagccagtgtgttctcaaagatagatctgaggtcaggttaccatcaactcaaaatccgacctgcagatatatcgaagacagccttcatcaccaagtatggactatatgagttcatggttatgtcattcggattgatgaatgtgaaagggaaatgtgcccttgggccatttctaaagtattttggtgattaa

SEQ ID NO: 138479 - DNA, 992 bp, Zea mays
  Clone ID: MRT4577_57776C.1
atgccccctgctccaccacagggcatctcggctgctggaggagaccctgacagagacggagatgacgacgacgccggtggcagttcgagccacggcacggagctctcggaggagccggagtcggagggatggatcgctagacccatcactcgtgatgccgctcacgggtgtcacttccacgacgctctcgataccctgctgcgttgggccttcgaccgacacacttggtccatcgagtaccgttgtgtagtctaccagcatcgtcgcgggttatacccggatcactgggaggctacttgcttggtgcgtcgtctggacgatgatcttcggggtgcagaggccttctcagagcactattctattactgagggggatactaccaaggcagccatgcaagatgcagcacgacgggcactttctcagtattgctcgttgttcagtggggtagctgatggccttgacctgaactcctgaagtactatcctcgctgttcgaccggcagtgctggaggtgtgattgtctcgccagtgggtgagggcaatcccaggctgaacagcatggtcaatctggtcgtcgtgctcaacacagagttggaccacgcccttgatgagttgggcaaggttcggacagaggttgcggaattgcgtgctgagtgcgcaacacgccactatttggatggtggttctcccgcccctgtcgggattcaacacccttaccgttcaccgccccgtggtcgcttcgactatggtaccccagtctgcaggacccagatagatttggattcttagatcgatcgagtcggagtctgtaataatgcttagttcagtgtcttagcctaagtcagttttagttagagttagtttgcttatcttatgttggatgcttgttatgatggacatgtactgaagttggatctttgtaatgattgccaccaaggtgtgggtatcccctgcaacttggtgtagttattaataaagtcagtatttagttgg

SEQ ID NO: 138480 - DNA, 674 bp, Zea mays
  Clone ID: MRT4577_57777C.1
gccggccgttccggagattggcaacgataaaaaaacaaattatgataaacaaatgaacttgttttctgcacaggtacaaaagccaaccccaacgaccaccgggcctcaattggtgacagtagctagcgtggacgcatcgtcatcaatcgagcagaagggagggagagagagagagagatgaaggagggcacggcgaactgcatcgacatcctcatcgccatcatcctcccgcctctcggcgtcttcctcaagttcggctgcaaggtcgaattctggctctgcctcctgctcaccttcctcgcctatctccccgggatcatctacgcgatatacgttatcaccaaggactagccagctagcgccgtaaaccgggacaaggtgagagagctagctgatcagccagcggagtaatggagatgaactgctgagatcacttgccctgctgctcaatgtttctgaatgtaaagttcgtagcacgtacgtacgaagtgtgttttggatggagactgaatctcagctgtgctgtgctgtgatgctgctatatagcttgtgccgcctgttctctattcactagtcggtgctcccgcgtaaaatttctctcaaaaacaaaaaaatgtgtaaatctctaagacttcttgatggacgaaaaaaaaaaaaaaaaggcccctaggggc

SEQ ID NO: 138481 - DNA, 436 bp, Zea mays
  unsure (1)..(436): unsure at all n locations
  Clone ID: MRT4577_57778C.1
ccggggcttcgggcccctcgctctttcgcttccatnncgtcccnncgtctccatgcctggcagggacgcggcgaacncnnccacgtagnncgcgaccagcnntcgtcgcncccgtagtccatgggggcggcgtacgggagggtgtacctcnngccgaccanncggcgggcgggcagcgcccagcagcannngcggggggaagggcgggcatcgcagggcgtggnncgagcggnntggtagggtggnnatcggtcttcttgcctccaagtgcccctgcttcagnatccctnnccggggcgacgcnncctcctgcggcacagcgtnncctctccttcgtgtgggtttcccgcgtattcccgctcncctctccggacccctgcggcccctcggnagccccgttgccccggagggtggcncccttcatgccnnngctcca

SEQ ID NO: 138482 - DNA, 673 bp, Zea mays
  unsure (1)..(673): unsure at all n locations
  Clone ID: MRT4577_57779C.1
cctcgaggccggccgggcccgggaatttacaaaaaaaaaaaaaaaaaaaaaaaaaaaaaaaaaaaaaaaaaaaaaaaaaaaaaaaaaaaagttgtcagtagcgtggacgcatcgtcatcaatcgagcagaggggagggagagagatgaaggagggcacggcgaactgcatcgacatcctcatcgccatcatcctcccgcctctcggcgtcttcctcaagttcggctgcaaggtcgaattctggctctgcctcctgctcaccttcctcgcctatctccccgggatcatctacgcgatatacgttatcaccaaggactagccagctagcgccgtaaaccgggacaaggtgagagagctagctgatcagccagcggaggtaatggagatgaacgtactgctgagatcactttaatttgccctgttgctcaatgtttctggatggagactgaatctcagctgtgctgtgattctgctatatagcttgtgccgcctgttctctattcactagtcggtgctcccgcgtaatatttctctcagactcttgtgctatagtatgtgatgcatgcatgtgtttgcttgatganaaaaaaaaaaaaaaaaaaaaaaaaaaaaaaaaaaaaaaaaaaaanaaaaaaaaaaaaaaaaccccccataaaaaaaaaaaaagcggcccc

SEQ ID NO: 138483 - DNA, 171 bp, Zea mays
  Clone ID: MRT4577_5777C.1
tattacttttttcatagaatgactacaacagcgaatgttcttttacaaaacggtaggggtccaccaagaccgtctctctccttgcttctccaaacaccacgatccgaagcaccaaataattatgcactaccttatgtcactattcttaagtgcatgctcttcaaatcacga

SEQ ID NO: 138484 - DNA, 320 bp, Zea mays
  Clone ID: MRT4577_57780C.1
catgcacgcgcacggagctcggaattcggctcgagggggatcgttgacccccgtgctggtcactccgaggcgaaatctgcactgcaaggggttcttttaaagggagatcccggacagcaacggcccaaggacgcattgatgagctcggcagacttcatagggttcctgaacaacagatattgccagagtctcaattctttacaggttcatggtccacaccaactataatggagcttctcaaactgtggggaggagcttgagccatctttataggacgtcacacactgtgctttgttttttaaaaaaagcggctcaaggtt

SEQ ID NO: 138485 - DNA, 192 bp, Zea mays
  Clone ID: MRT4577_57781C.1
acatggcacccacttccccaatcattcagtggaaaaacaaatattagggaatcagaacactgtgtcaacttcaagcaatacatcaaacactacacttgatgtcatagtggaaaatttttgggactcctgttggagcagaaattgagagagttgacatctggtgtgaaatcaccctacactaaaccagccgaa

SEQ ID NO: 138486 - DNA, 267 bp, Zea mays
  unsure (1)..(267): unsure at all n locations
  Clone ID: MRT4577_57782C.1
atacaactcaaattcnacaaaaattttttttttttaaaaaaaacaaaaaaaaaacaccgccccgtttttatttaaaaagttggccaaccccaaaaaaaanccnnnccnttttatantatccaatcttacttactctttcatccaacttcataccttttttattntatcacttttttttttttcatttcccttcatattacaactttttaacttttaaaaccctccctttacccaatttaatcccttntcaacacatccccttttctc

SEQ ID NO: 138487 - DNA, 408 bp, Zea mays
  Clone ID: MRT4577_57783C.1
cccaagcgtccggatgcatgcagttctcgcacctcgctatgggacggacgtccttaggagttgctggcccgtatgaagcttgttccgtattcatctcatagctcccagtataaacagcgaacattcatgatgaagtggttgctaaagaggactctactccaatgcctgctcatcaactgggtggatccatctaactggggtttaagagagggatttagacctccgtctcagcaacaaaggtgttgacgagtactcaaagtgattcggacgctggactgcaattccagtactgggggaggattaattatgcgtgtgtataagctttggacggttcctaccttccggctagtgtcataagttatgcactttatatacatcaagacgtgttctaaatgtgactcttcctat

SEQ ID NO: 138488 - DNA, 1953 bp, Zea mays
  Clone ID: MRT4577_57784C.1
aaatgataataagcctgtgacaaacagccgtgacacacaagaggttaagctggaacaaggtcttgactatgtgccacttaagtggaatggttgttttccactcaagtggcacatagtcaaggatgtgcccaacaacactttgaagcatattacactggatattcggctcgagagccgataagaagccgccgcctcctacaaacagccgagacacaacaaggtttagcaaggttggcatggtgccagttctcaaccagaaacgccttcgttttggatcaagcaggcacggctcgtggtacaatggtacgtaagcagtcccggacaccagggccaagcccagagcgcgttcaccttttggttttagtggtgagaaccaagcccgcctgaccgtgtcggtcgcaggccctgggtctggtggttgcgggcctatgcaaggcagtggaccttctgcaagcaattatggtcacaatggtgttcgttctccagctcaatggtacgatggtccagtttactcgaatgggcatcagataccaactgctagccccttcgccgggaagggtttcctttaacctacaagcaaggttctttgttatcaaatcatatagtgaggatgatgtgcacaagagtataaaatacaatgtgtgggctagcactcctaatggaaataagaagctggatgctgggtaccgagaggctcaggagaaatccagtgactgcccggtgttcttgtttttctctgtgaacacaagtggtcagtttgttggtgttgctgaaatggttggtcctgtcgactttgataagactgtggagtattggcaacaagacaagtggaatggttgttttccactcaagtggcacatagtcaaggatgtgcccaacaacactttgaagcatattacactggataacaatgataataagcctgtgacaaacagccgtgacacacaagaggttaagctggaacaaggtcttgaaatgttgaagattttcaaagaacatgttactaaaacgtcaattttggatgattttggtttttacgagaatcgccaaaagttgatgcaggaaaagagggcgaatcagcaactgcttcaaggccagggggccgatgtttctcaagagaaagacaaggatgcgactaatggcaaaccagggtcacagaaacaggcaacgagcaaggaaggcactcctgctgaggtggcggcggatgcctccaaaccagtagctgaaagtggaatatcaaatgacaactaagcatcatgcatactggtcggcaccataccggtgcaaatgctgcaggttttgcggtatctgcaaatcaaaacctattgattctgcctgaattctggacttctttcggtactggagttcgtgagatggggctcatcatgggagtgaatcagattttacttattgtcgctttgctagttgtgtgactggtttttggtgtcttggaacccgtgttaggcttcttacatacccctgtgacgacaccgagtttgttgtaacccttgtttttttttgcctttttgttttagttctatcattgttaacgaagcagcctatttcctatactttgaacaacattaaggtagttttttttgcatgttgcggtactgtggagagtaataagacaaaaagactaggtttttacccttttatccccgtattctgtattgattatatcttgttttttttccaaaaaaaaaaaaaaaaaaaaaaaaaaaaaaaaaaaaaaaaaaaaaaaaaaaaaataaaaaaaccaaataagagcccctctatggggggggcgttttatgggacccaatttttcggccgcttgcattgcaaccttaaagctttttatatgggggcacctaaattcaatttcttggccggggttttttaaaaacctctgtgttgggaaaaaccctgggggttccccactttattttgcttgcagaaaaaccccttttt

SEQ ID NO: 138489 - DNA, 2175 bp, Zea mays
  unsure (1)..(2175): unsure at all n locations
  Clone ID: MRT4577_57785C.1
ctctacctcttcgctggggggctccttttccctcctctcgcgtggcgtctgtggcggcttcctgcctcgtctcccctccccctccctagggttatcctcctctccgcccttcgaacccccgaaaccggccctctacctcttcgctggggggctcctttccctcccctcgcgtggcgtctgtggcggctatcctcgcctcgtctcccctcccccctccctagggtttatcctccaccaccacctacccaccgcctctccccaccacagataagaattatcttatcgattttttacaccggccttgaatccgatccaggagcagtcgtttggtgttggtagctgcggcagacgtctgtcctagatcgaattgactcgcgagaagaagccatgtcgacagttgctcctgcccctagcgctgctgaccagaccaccaatcttctgcagaagctgtctctggagggcaaggatggctccgacactgccaagaagccttctgggatgccatatggatctacccacgctggagatgcacagagcgctgcttcacaggtggacaggtcgataacacctctactacaggaggccatggatcctaatttcttctaccagcccagtgcatatgcctctccagcctattacttccctagtggttatgatggctcagccaatgaatgggactcaaggtatgctggtcatgaaggaatggagatgccccctactgtgtatggagacatgtaccttggatatggctatgctccatacggcccatatccttcgggttctccagtaccaactgttgggcatgatggccagtcatatggctctcagcaatatcaatacccgtctcaatattatcagcaaccaacaccaacaaacgcaaaacatggtctaaatggtgccagttctcaacctgaaccaccctctgttgccagtcagcaggcacgagttttggtagatgcaacaaaagcaactccaaacgtgagggctaatggtatgacaattgctcacaacagttcgctgccacgtaagcaaacccacctgaatgtatcggtagcaaacagtggtttatatggaagaggacctatgcaaggcagtggaccttctgcaagcaattatggtcacaatggtgttcgttctccagctcaatggtacgatggtccagtttactcgaatgggcatcagataccaactgctagttccacatcttaccgttccaattcgtcttctatgagaagtcagagccagcatccaacaacaaacctcatgggtatacatgcacagatgccttcgtctggaatgggtctgacctcacctagatatccttctaggatgtacccagacaacagattatatgggcagtatggtcagtatgggaacacactgaagggtggccttggttttggatcaaacatgtatagctcgagaaacaatgggaggtggggagttgtggataccaaatacaagcccagagggcgtgcaccttttggttttagtggtgagaaccaagatggctttaccgagctgaacagaggaccaaggtctggtggtttcaagcaccaaaaacaattcggtcctactgtaactattgctgtgaagggccaagccctcccttcagtggggaaacagaacagtactcttccagacaaaggccaatttaaccaggaagggtttcctttaacctacaaggatgcaaagttctttgttatcaaatcatatagtgaggatgatgtgcacaagagtataaaatacaatgtgtgggctagcactcctaatggaaataagaagctggatgctgggtaccgagaggctcaggagaaatccagtgactgcccggtgttcttgtttttctctgtgaacacaagtggtcagtttgttggtgttgctgaaatggttggtcctgtcgactttgataagactgtggagtattggcaacaagacaagtggaatgggttgttttccactcaagtggcacatagtcaaggatgtgcccaacaacactntgaagcatattacactggataacaatgataataagcctgtgacaaacagccgtgacacacaagaggttaagctggaacaaggtcttgaaatgttgaagattttccaaagacatgtttactaaacgtcaattttggatgatttttggtttttacgagaatcgccaaaagtttgatg

SEQ ID NO: 138490 - DNA, 1377 bp, Zea mays
  unsure (1)..(1377): unsure at all n locations
  Clone ID: MRT4577_57786C.1
caatgataataagcctgtgacaaacagccgtgacacacaagaggttaagctggaacaaggtcttgactatgtgccacttaagtggaatggttgttttccactcaagtggcacatagtcaaggatgtgcccaacaacactttgaagcatattacactggataacaatgataataagcctgtgacaaacagccgtgacacacaagaggttaagctggaacaaggtcttgactatgtgccacttaagtggaatggttgttttccactcaagtggcacatagtcaaggatgtgcccaacaacactttgaagcatattacactggataacaatgataataagcctgtgacaaacagccgtgacacacaagaggttaagctggaacaaggtcttgaaatgttgaagattttcaaagaacatgttactaaaacgtcaattttggatgattttggtttttacgagaatcgccaaaagttgatgcaggaaaagagggcgaatcagcaactgcttcaaggccaggggggcgatgtttctcaagagaaagacaaggatgcgactaatggcacaccagggtcacagaaacaggcaacgagcaagggaggcactcctgctgaggtggcggcggatgcctccaaaccagtagctgaaagtgaaatatcaaatgacaactaagcatcatgcatactggtcggcaccataccggtgcaaatgctgcaggttttgcggtatctgcaaatcaaaacctattgattctgcctgaattctggacttctttcggtactggagttcgtgagatggggctcatcatgggagtgaatcagattttacttattgtcgctttgctagttgtgtgactggtttttggtgtcttggaacccgtgttaggcttcttacatacccctgtgacgacaccgagtttgttgtaacccttgtttttttttgcctttttgttttagttctatcattgttaacgaagcagcctgtttcctatgctttgaacaacattaaggtagttttttttgtaaaaaaaaaaaaaaaaaaaaaaaaaaaaaaaaaaaaaaaaaaaaaaaaaaaaaaaaaaaaaaaaaaaaaaaaaaaaaaaaaaaaaacccaaaaaaaaaaaaaaaaaaaaangtcccttggcccgacccccccttgggggaaattttggaaaatacccaaaacctgggggccctttggactttcttttaaagggccccattcccccttttggggggggttttaaaattcccggggcggggttttaacaacggggggagggaaaaaccctgggggtccccaatttaaagcccttggaaaaaaacccctttttcccaatgggggaaaaaaaaaaaaggccccccccgaaccccctttccaaa

SEQ ID NO: 138491 - DNA, 575 bp, Zea mays
  unsure (1)..(575): unsure at all n locations
  Clone ID: MRT4577_57787C.1
gttgtgtttttttaatncnnnataccacaatattaacaagggtgttgcaaaaatcttgctgnntcgtttacaagtnnntcgacnnaaccaaaccctcatacccgatncccagctttcanntaaccgcttnncaccagctagngnagtcatgccatttcgcgacctaaaaatgatnnntgcttaccagggaaccttgattagacaaaatacnncgacgggtggggagggcttcatnnncatttcatttaatagnnnagtttgcncttctggaccccgaaggggttcacnnnggccctttccacaagggtnncccttncnnaaaggcngaaacnncagcntnntcaggtgggagccccngcttttcccggnagnaaacccctcanntgnntccacnctnnnctgtcnngggtcnnggtcgccctgggnnntctcgtnnngtggaacccccgtcgagcctcgtnngcttgatgcggtccttttgnggggtggngttcagcnttcttagcntcggnntgcgggnntgtcgttgggggacccaggcntntganggaaaatcttttgcttttcttgcgcgt

SEQ ID NO: 138492 - DNA, 185 bp, Zea mays
  Clone ID: MRT4577_57788C.1
aacgaacaaacgaacaaaccaaagaaaaacaaagagggcacccccacgacgggcgcaggagaacccgacgggaaagcaaacacagcggcaaaaggcaacaccgacgcacgaaaaaaaggcgccaccccaggcgcacgagccgaagaaacgcgacaaccggggcggaacaaaaaggagcaaggcca

SEQ ID NO: 138493 - DNA, 365 bp, Zea mays
  Clone ID: MRT4577_57789C.1
tcgtagacgccctgactgctaatctcggggtctacggcgtctacatatcctgcctgctagctgcacgtcgtcagcattttgcgcatcgtgagggccaccatccagggccaccgtcggaaggtcccagtcaacctctgcgcctccgtcaaggtctcactatcacattaggtggcactacatcgatctggccttaacaatgcctggatatcatggatggacgaacacattgcggtcacaggcaaggctccacctgtgaacgttgcaagataccacacctgggttggcggtgccgcccaacggtccccagacctgcgtatgacgcctggactccacgtccagctgactgttacactggagcagctgat

SEQ ID NO: 138494 - DNA, 222 bp, Zea mays
  Clone ID: MRT4577_5778C.1
taaaaaaaaaaaaaaaaaaaaaaaaaagggggggggaaaaaaaaaaaaaaaaaaaaaaaacgatggtgaggggaaccaaaaataaacatacgacgtgcatgccaacgtaataactaattttatagttgccgcctttaatgcaatccactggcccgtcttttggacaaccttgtgaactgcgcaaaaccctgggggggggggggggggtcccttttcaaccct

SEQ ID NO: 138495 - DNA, 494 bp, Zea mays
  Clone ID: MRT4577_57790C.1
gccggccgggccggataatgtcatcttcatgttttaccaagatcataggtttattacactacttatggagaccgatattcctttgttgcacttcttgcaccatgggctccttatggataccggaaaagttgccaagcccctgcttcactaaatgctggctgttctctggatgatgtgaatatctctcacatcatgataggctctttccaccctcaaatgatggatctaaaacggctctatgggactgttctccctggatcatgctggaatttagatcgacagtgttcatatcacgcccatcaggatgtcactcctctcctccatcccaatctgtctgttgctttcgatctcaacgaggacagtgctacactactcgcccttgctcatcccgacgctgttctattcatgcaactctttgattcgcacatactgctgactactgtctcgacgaatcgactcacagagctttactgcaacacactaaagaactcact

SEQ ID NO: 138496 - DNA, 125 bp, Zea mays
  Clone ID: MRT4577_57791C.1
ctgcgggcccactctggatgatgctctcattgaattccgcttccacgatagtgcctgatatagaagacgcataactgctcatcttttaagagcatttatgcgttctcatatttggcctatgctga

SEQ ID NO: 138497 - DNA, 191 bp, Zea mays
  Clone ID: MRT4577_57792C.1
ttatttatatgcgatacagataatcgaagccagttagcacaggggagccacccccatcctttagatatctttggcgaaacgacccaggactcttataaccccatgggggacacccctattttcatggctaatgcgaagaagacttttacctcccccattaaatgtaaaaacacccacaaacctttaaaaag

SEQ ID NO: 138498 - DNA, 930 bp, Zea mays
  unsure (1)..(930): unsure at all n locations
  Clone ID: MRT4577_57793C.1
atgtcaatgtgtcggagactccacctccaaagtgatggtttccccgtcagagtcttcacaaagatctgcatcttggcggcgatggggggccgcctgcggcggcggctaggtaggttttggctgctgcgggatgggggtgcagtctcncggccggccgggaagtagcagctacatacgtcgtcctccattaatattggcagcaagctaggatcatcagcatctgagcttatatattactacatcgatcggttgccaaatggcggggatgacagtcggcaataagctggcgctggctgcggtgctgctgtgcgcggcggcggccatggccacggcgcagcaggcctccggcgtgcgcgccacctacaacttctacaacccgcagcagaacaactgggacctcaacgccgtgagcgcgtactgcgcgacgtgggacgccagcaagccgctgtcgtggcgcatgaagtacggctggacggccttctgcgggcccgccggccccaccggccaggccgcgtgcgggcagtgtcttctggtgactaacactgcgacgggggcgtccatcacggtgaggatcgtggaccagtgcagcaacggcggcctggacctggactacgacacggcgttcaagcccatcgacaccaacggccagggcttccaggccggccacctcacagtcaactaccagttcgtcaactgcggcgacaactgaactgatagattattcacctgtgcatgcacctatatgtactagcaccactattccaagagttatatggatgtgatcccacacgtaagagccaataaaacatatatacgcccagtggaataaactgaattacctaagtactctcgactactcatgtatctatgtctcacgaaatactacctccgttgtccgttcggaaaaaaaaaaaaaaaaaacccgcggcc

SEQ ID NO: 138499 - DNA, 1818 bp, Zea mays
  Clone ID: MRT4577_57794C.1
ccggccacctcaccgtcaactaccagttcgtcaactgcggcgacaactgaactgatagattattcacctgtgcatgcacctatatgtactagcaccattattccaagagttatatggatgtgatcccacacgtaagagccaataaaacatatatgcccagtggaaaaaaaaaaaaaaaaaagctcttagcttgctttctagctagcctgtcgatctttaattttagcaatacaatgacgacgcgagcgtgcttgttggttgcggtcgccatggctctcgcgctgctcttacaggagcatgcagcaggtgcagaggctcacaaacagaagcagcaggtgcagaggctcctcaggcgcctcaacaagccacctgtcaaaacgattgagagcccagatggagacatcatagactgcgtgcacatcaccaagcagccggccttcgacaaccctcttctaaagaatcatacaatccagatgtggccttcatctcacccacgaggaggccagctgaatgaagactactccaacactgcatccagcatcacccaaacgtggcaccagaatggcagcaggtcgtgtcctgagaacaccatacccatccgtaggaccatggaggaggacgttcggagggccgactcacccaggagctatggcaagaaggagaggcggccgaaattcacccccgtcgatggcgctggacagccaacgactgtgaccagtggccaccagtgggcccaggcatctgcgcagggtggcagtacgtactatggaaccgaggcgaccttcgatctttggcagcccgtcgttgagacggccagtgacttcagcttgacccagttctgggtcgtcagtggatcctaccaagccaatgacctcaacaccattgaagcaggatggcaggtttccccgaatatgtatggcgacaacagccctagacttttcatttactggactcgcgacgcgtatcagacgacgggatgctacgacctcaagtgctcggggtttcgtccaaacaaacaatgccatcaccttcggtgtcacccaactgtccccggtctccacctatggtggcccacagaacgacatcactattttagtttggaaggatccaaagacggggaactggtggttgcaagtgggaaaagatcttctgggctactggccgtcatccctcttcaccaacctggcgagcagtgcctccaacatccagtggggcggcgaggtatactcgcctgacgcgggccaaacatccacacagatgggcagtggacatctccccgaggaagggctcgggaaagccagttacatccggaacatccaagtggtcgatgcgtccaacactcttctgtcgccaagtgctctgggtctgtttgcttcacgacccaactgctataacgtgctcaatggtggtgccggtaacagctttggcacctacatctactatggggggccagggaggaaccctaactgccagtagtagtcaaattgaacgtttcctggagtgcaagcatagctctctctcctttacttaattacacgtgaagaagatataccataccggccccttacagcaactagaatgtgttatggcttactgatggcccaataggtatagttacagggcatatagttacacatgcaataatgcgctgcgagatctctgcgcgcaatggtcaattgtttccggacatacatcggaaagaagtgtcaagaacaagctttacaagcttgcgacaaatgtaatcatgcttcaccatatgtttggaatatagaatttattcgcagcttcaaaaaaaaaaaaaaaaaaaaaaaagcggcc

SEQ ID NO: 138500 - DNA, 274 bp, Zea mays
  Clone ID: MRT4577_57795C.1
ggcccggtcgcgcgttcaatgctggggcgacgacaccatatgccgggtacacttccgcgagctctagcaaatacgcgtacgcttgcccaccgccagaccctggcgacgaaaacggcagccactgctacttagtttcttttgtgggaggagtgaaccacaaaaatcgcacgacccgatcgcggttctccaatgcagaatctacggctagagacgaatcttagtttggctgtaccacatcaataacggattccgcaccggagatggcttgcgtttg

SEQ ID NO: 138501 - DNA, 1684 bp, Zea mays
  Clone ID: MRT4577_57796C.1
ctgcgaaaaaaaaaaaaaaaagagcagctacatacgtcctcctccattaatattggcagcaagctaggatcatcagcatctgagcttatatattactacatcgatcggttgccaaatggcggggatgacagtcggcaataagctggcgctggctgcggtgctgctgtgcgcggcggcggccatggccacggcgcagcaggcctccggcgtgcgcgccacctacaacttctacaacccgcagcagaacaactgggacctcaacgccgtgagcgcgtactgcgcgacgtgggacgccagcaagccgctgtcgtggcgcatgaagtacggctggacggccttctgcgggcccgccggccccaccggccaggccgcgtgcgggcagtgtctcctggtgaccaacacggcgacgggggcgtccatcacggtgaggatcgtggaccagtgcagcaacggcggcctggacctggactacgacacggcgttcaagcccatcgacaccaacggccagggcttccaggccggccacctcaccgtcaactaccagttcgtcaactgcggcgacaactgaactgatagattattcacctgtgcatgcacctatatgtactagcaccattattccaagagttatatggatgtgatcccacacgtaagagccaataaaacatatatgcccagtggaataaactgaattacctaaataccggactactcatgtatcgtcatgtctcacgaaatactacattcgttctcgaaaaaaaaaaaaaaaaaaaaaaaaaaaaaaaaaaaaaaaaaaaaaaaaaaaaaaaaagtagcagctacatacgtcctcctccattaatattggcagcaagctaggatcatcagcatctgagcttatatattactacatcgatcggttgccaaatggcggggatgacagtcggcaataagctggcgctggctgcggtgctgctgtgcgcggcggcggccatggccacggcgcagcaggcctccggcgtgcgcgccacctacaacttctacaacccgcagcagaacaactgggacctcaacgccgtgagcgcgtactgcgcgacgtgggacgccagcaagccgctgtcgtggcgcatgaagtacggctggacggccttctgcgggcccgccggccccaccggccaggccgcgtgcgggcagtgtcttctggtgaccaacacggcgacgggggcgtccatcacggtgaggatcgtggaccagtgcagcaacggcggcctggacctggactacgacacggcgttcaagcccatcgacaccaacggccagggcttccaggccggccacctcaccgtcaactaccagttcgtcaactgcggcgacaactgaactgatagattattcacctgtgcatgcacctatatgtactagcaccattattccaagagttatatggatgtgatcccacacgtaagagccaataaaacatatatatgcccagtggaataaactgaattacctagatactggactactcatgtatcgtcatgtctcacgaaatactacatccgttctcgaatatgtgtcgtccactaattcatttttaaactaaaatgctttggttgaaaaaaaaaaaaaaaaaaaaaaaaaaaaaaaaaaaaaaaaaaaaaaaaaaaaaaaaaaaaggaaaaaaaaaaaaaaaaaaggggcggcc

SEQ ID NO: 138502 - DNA, 739 bp, Zea mays
  unsure (1)..(739): unsure at all n locations
  Clone ID: MRT4577_57797C.1
ggcgagtcgtgcaagcaggcgtggagcaaggtcaggagctgcatcaagcgctaaaaggccctaggcgttgttgctctgctgctgcgtggttttctgagttgtggactgtggtagatttgcgcttgtggtttctgtttgttggatctacttatttattttggatatacatcatgtgtgaagatctgcatgtgtaaaaaaaaaaaaaaaactgcgataaaaacgcgcgacgcgacttattcagcaccaccgccgcctttcattttttccttcgcatcttgagagagagagagagagagagcggaggaggagagcaaggagatgggcggcttcgaccagcaggtgaaggagcggaccaaggagctgaagcacctcaagaccgcggcgatgaagggcatcaaggcggccggcgagtcgtgcaagaaggcgtggagcaaggtcaggagcagcatcaagcgctaaaaggccctaggcgtcgttgctctgctgctgcgtggttttctgagttgtggactgtggtagatttgcgcttgtggtttctgtttgttggatctacttatttattttggatatacatcatgtgtgaagatctgcatgtgtgtgttcctagtgttttttgcttctgttcgttcgctgtgtgatcctcttcgagttgttgtagccacagaaagaaaaaaaaaaaaaaaaaaaaaaaaaaaaaaaaaaaaaaaaaaaaaaaaaaaaaannnnnnaannnaanggg

SEQ ID NO: 138503 - DNA, 936 bp, Zea mays
  Clone ID: MRT4577_57798C.1
gccggccgaggcgggctccggaaagccgaacacacttcctcgcgctcgcgctctcgagtcccgactcacctgcttctagccatggaggcgcctccatcttctcccttcctagtgttgctcctgctgttcttcccttcgagcggccttgccgcccccatggattttaaccatgaagtgcaagtccttatggtgatcaagagcctcctcaaggacccctatggcgcgctgagaaactgggacaggaactccgtcgatccctgtacctggtccttcatctcctgctcgccggagaatctcgtcactgcactggaagctccaagcaagaacctttccggccggctctccccgagcatagggaacctgacaaaacttgagaagcttcagctgcagaacaacaacataattgggccaatcccagcagagatcggcaagttagcaaagctcaggacgctggttctgtccagtaacaaattacatggcacagtcccaaattctttaggccgactcggaagactccagtacatagacttgtcgtacaataacttgagtggcccgataccaaaaacgtctgcaagaacgctcaacatagccgggaatcctctcatctgtgctgcagaacaggattgtgacagtaccaagctgaaaccgatgctggattcctatatcgctggtgaacagtaggagccccaagttgggagtcggttaccttgctaaggagtatgtacctaacgaacctcgggtgccgtttggtttcacaaaatgtaatgtaaatgataataattaacactcgtgtgacaacaataataagtttgagtaagttggtatcagtttttagtgtaaaatctgattatggttaaacataaacaaagaagatttaacgttatcagttaaaaaaaaaaaaaaaaaaaaaaaaaaagaaaaaaaaaaaaaaaaaaa

SEQ ID NO: 138504 - DNA, 1286 bp, Zea mays
  Clone ID: MRT4577_57799C.1
ggcgagtcgtgcagaaggcgtggagcaaggtcaggagcagcatcaagcgctaaaaggccctaggcgttgttgctctgctgctgcgtggttttctgagttgtggactgtggtagatttgcgcttgtggtttctgtttgttggatctacttatttattttggatatacatcatgtgtgaagatctgcatgtgtgtgttcctaaaaaaaaaaaaaaaaatcctcgttgccacccgtcgctgcgatccaaacgcgcgacgcgacttattcagcaccaccgccgcctttcatttttttccttcggcacgagccgccgacgcggccgcacaactcatttccagagctttacagatcagcccccgagttcgcgaccactccgcaccgcgcttcctttatatgtagtggtctcctcgtggcccgccgttcgctgcgatccaaacgcgcgacgcgacttattcagcaccaccgccgcctttcattttttccttcgcatcttgagagagagagagagagagagcggaggaggagagcaaggagatgggcggcttcgaccagcaggtgaaggagcggaccaaggagctgaagcacctcaagaccgcggcgatgaagggcatcaaggcggccggcgagtcgtgcaagaaggcgtggagcaaggtcaggagcagcatcaagcgctaaaaggccctaggcgttgttgctctgctgctgcgtggttttctgagttgtggactgtggtagatttgcgcttgtggtttctgtttgttggatctacttatttattttggatatacatcatgtgtgaagatctgcatgtgtgtgttcctagtgttttttgcttctgttcgttcgctgtgtgatcctcttcgagttgttgtagccacagaaagaaatcttccgtgccaacaaactctctagtctggaatggatattcaccgcacaccgaattttttttacaaaaaaaaaaaaaaaaaaggcccctagggccgaaaaaaaaaaaaaaaaaaaaaaaaaaaaaaaaaaaaaaaaaaaaaaaaaaaaaaaaaaaaaaaaaaaaaaaaaaaaaaaaaaaaagggggggggccttcgagccccgttttttctgggagttggaactacccccccatttttcggtggggcataaaattctttttttttttttaaaaaataaaggggggggccccttctgaaaaatttttttaaaaaaaaaaaaaaaaaccgtaaaactttattttttttttcccctttaaaaaaaaaaaaattggagggcctttttttttttttttgttaggg

SEQ ID NO: 138505 - DNA, 107 bp, Zea mays
  Clone ID: MRT4577_5779C.1
aattccctgtccatgccccgttattcaagacggcagcacgcatgacttgctatcctccggcttgtgcacttcgacagcctacttaccggcgaagccccttctaaacc

SEQ ID NO: 138506 - DNA, 322 bp, Zea mays
  unsure (1)..(322): unsure at all n locations
  Clone ID: MRT4577_577C.1
tcggcctagggtttaaataacaaatctttatgcccgtcctgacaaggggcacaagggggttcgttcaacctacaggggggtgaacaacacaaatcacagctgcagccataatcttgaggcagcaccccttcatattcacgattatcgagcccccttggggccacggagttacgaagcgctctttgatgaaacagatgatagccccatgtctctcttatagctaacgtattggtgaaacaaggtgactatagcgtggcaacactccaaggttatatatgtgcaacacccgctggntcttatacagcgccgttcacaatatata

SEQ ID NO: 138507 - DNA, 952 bp, Zea mays
  unsure (1)..(952): unsure at all n locations
  Clone ID: MRT4577_57800C.1
tatctggcagggnaagctccaagcaagaacctttccggccggctctccccgagcatagggaacctgacaaaacttgagaagctgtgagtactgttccatgggtacaacaagtcttaggcttattttggaatacagaactttttagataaattaataaattatacagtaatttcacagaaatcagttcatttttacgagaaaaacgcaggaaggccttagcgttgagtgttttttttttttactttctttttattgggagttgttcgtttttttggtgtcccagtcagctgcagaacaacaacataattgggccaatcccagcagagatcggcaagttagcaaagctcaggacgctggttctgtccagtaacaaattacatggcacagtcccaaattctttaggccgactcggaagactccagtacatgtaagtgaggcacacgtgccaatttcttaatgcttcatgttcttgcctgggtaaaaccatagcctggtttgcactgacactgcactcctctcttgcagagacttgtcgtacaataacttgagtggcccgatatcaaaaacgtctgcaagaacgctcaagtaaggatccggtcctgtgttttcgtcatggacgtgtgtgacatttttatagggaatcaatggtctggaagaaaccccttaaaatctgttgttttttttttccgcctgcagcatagccgggaatcctctcatctgtgctgcagaacaggattgtgacagtaccaacgctgaaaccgatgctggattcntatatcgataaaggaggtaaccccttcatcccccagtcggttaccttgntaagaagtatgcacctaacgaccctcgggtgccgtttggtttcacaaaatgtaatgtaaatgataataattaacactcgtgtgaccacaataataagtttgagtaagttggttcaaaccccccccccccc

SEQ ID NO: 138508 - DNA, 682 bp, Zea mays
  unsure (1)..(682): unsure at all n locations
  Clone ID: MRT4577_57801C.1
cggtcaaaagaggcgatccaacgcgcgactttacttattcagcaccaccgccgcctttcattttttttccttcgcatcttgagagagagagagagagagagcggaggaggagggcaaggagatgggcgggttcgaccagcaggtgaaggagcggaccaaggagctgaagcacatcaagaccgcggcgatgaagggcatcaaggcggccggcgagtcgtgcaagaaggcgtggagcaaggtcaggagcagcatcaagcgctaaaaggccctaggcgttgttgctctgctgctgcgtggttttctcagttgtggtagatttgcgcttgtggtttctgtttgttggatctacttatttattttggatatacatcatgtgtgaaggtctgcatgtgtgtgttcctagtgttttgcttctgttcgttcgctgtgtgatcctcttcgagttgttgtagccacagaaagaaatcttccggccgcaagcctgcacgtgctaacaaactctctagtctggaacggatgttcaccgcacaccgaaatttttttgcaaacaatttccacatctttgtagatgcaatatagggcccgcatgactatcannnntntnnnnnnnnnnnnnnanntnntnntnnnnntntatgnttttttgatatanntattaaaaaaaaaaaaaaaaaagggcggc

SEQ ID NO: 138509 - DNA, 452 bp, Zea mays
  Clone ID: MRT4577_57802C.1
tgggggcggggccgtttccaggtggcgtccccgccggcagtctttgtacgtgtgtttcttagtctgtttagagctaccaagtgatttcctgatcatggtgggaaaacccaattcttcactcggattttttttcacttctccctgagataggatcctattttttgccaggattatgtactattagcacataggcaatacgaggattatgtgggcagcaccaaaaaattctggcgatcatgagcgctcaggccatttttatcgacagaagcggaagaagccaagattggaaatggcccctggaagtggaagcaatcattgccgcaacaagaaaccgtacacgcaaatccactggccgctaggggctgggaccatgcacacaccatcaaagtaactgctgctagaatagagagcagtcgaaggagcagcaagccaagtactaatctactactact

SEQ ID NO: 138510 - DNA, 675 bp, Zea mays
  unsure (1)..(675): unsure at all n locations
  Clone ID: MRT4577_57803C.1
tatanttactggggaagaagagatctccgatgacatctgcagaacacgcagggcaggattccaaaacagagggaggcataaaaatgcagggtggagcttttcttttgctgctactagatattgcacattctgtatgtatatatgattccactccaacacctaattaaaacgcatacaaactgacaccgatctctcagtctcaccaaagctcagatgtttctttgatttgcccccaccggccacgggcacgcaacagcacccaaagctcagatatttcagtcgagaactcatcacggcgacccctgaactcctccgcgcccaacgagccgcctcaggttcccgaggtgcctctgcagggcacggcacgcgcgcgccctgagggcccggacggcgagcctgagcttcttgaggcggacgccgatcctgggcctggcccgcgccagcgctgacggccggggactcttcttctcgagcaccttgtggatgaggaactgcgccctgaggtgccgcgcctcctccgcgtccaccttgtccaccttggcgtacgcgaacggcgtcgacgcccgcaggagcagcatcttcggctcctcgcgaagcagcgactgcgaggaggagacgggatcgggagcggggtctcttggcgtgagcttcctggccgcccggccggcctcgagt

SEQ ID NO: 138511 - DNA, 1548 bp, Zea mays
  Clone ID: MRT4577_57804C.1
gacccccgaggctcggtacctcgaaggccggccggggaactgcggatatgacaaaagcaaacaattttttccccagaacctcagccttccgacatcaccgccgacgccatggccggctctccccgccacctctccctctttcccctgcgcctcctgttacttcttccgctgctcgctgcgggtaaacccgtcctcgaggacggttacacggtcaccaccttcgccgacctcaacccgctcccggcctccgggccacacccctacgcagtcctcccgcggtcccgcgccggcgacctcctcctcctcgactccgccggctccgcgctctacactatctccctctcctcctcccccggcgagccgcgcaggctggcagggggcaaacgaggctccgggttcaacgacggcgggcccggcgacgccgcctttgaccgcccgcgcagcgtcgccgtcgatgccgccgacaacgtatacgtcgccgaccgcctccatggtgccgtccgcaaggtcgcgccctccggttacactactacaattgctggagggttctcatcagggcctggtcacagggatggaccagcacagaatgctactttctcgccagattttgcacttgtttatgtcccgaagatttgtgccttgttagtagctgacagaggaaatcgaatggttagacaaattaatctaaagccagaagattgtgcacatgaaaaacaatcaggcttgggaaatacattggtgtcgttcattgcagtattgtgtacattgctcggttcattgatcggattcttagctcgtcatttttaccctgtcaatgcaggaagtctccgtcaaccactttttcagcaggatacggaagcaattcctgaggacacagaggaaggcaactccgatcagcttctgcgacataaaaagcgcagttgctagcttcgtgccctacaccctcctgctgaaactagtaagacttggttccggttatctacacgtgatgttatctagtgttaggttacagcaagaagttcaccgaaagccttctcgtcgacctgagttacacaagaccatcaatgctcctaacattggtcttaacaacaaagctcccgttcctcctactgagcaactgggtgatctgataagctttgccggagatgctggtgttaaggaggatagtggtaatgccgatagtcaggagggtaaggtgtcatcctatcatggtgacttgatggggcttccctacaccccaccgtgcagcgttaagaaaattgatcacatgatagaggccaacctatcgagcttttcaagtcacgagaaacgttgtagattaactgttagtggttgtagtgtaagcaggagggtgcatggagacaaataagagggtgtttggtttgatcatgacatgtaatgttaccctgggcattgtgggttcgtgtgatgatgcctaagaattctgttctggcataacagctttgtagcaaacccaattactccataatgttctcttattgcaaaaaaaaaaaaaaaaaagcggcctgggtgatggggagtctatgg

SEQ ID NO: 138512 - DNA, 389 bp, Zea mays
  Clone ID: MRT4577_57805C.1
tcggagcattcataaacacacctttcgtattgcactagcaacaacctaacaacaaggggtactatgatattatccctgcttgcgcttcttgcgcattttgctagcgcaacaaatgcttccattattccacaatgctcacttgctcctagttccattattccacagttccttccaccagttactttaatggccttcgaacacccagctgtgcaagcctataggctacaacaagcgattgctgtgagcgtcttacaacaaccaattgtccatttgtaacaacatttcttggcacatttaacaattcaaaccatcgctacgtaacagtaacaacagttcctaccatcactgatccacctatccatggtgaaccctgttccctactttgcaac

SEQ ID NO: 138513 - DNA, 453 bp, Zea mays
  Clone ID: MRT4577_57806C.1
acagaaacagacagctatcttagtcactataatcaaaatttgagttctacaaagtaaattccacaggtgtggttcataagacaatgctgtccacagtcaaaaccgaacccaaaacactcattccaaaagaaaagagattaagatctgttaatcattgatgtcagacattacaaggaactgtatgaacacgtgcttaaaatttaatgcttgattcaactatgcaaccactatatttttaatctttggtggcagtaaattccatagtgcctgaaacccctttggttggagacgcagagttgttactagaaattgcaatgacttcatgatctaccgtttggactttgatttagtcaaagtttccagaagtctgtacatccaacggtcaagcattcctgtcacagcaaaggttccacctagcacagcacaaagtcgagtaataaaatgaagaaaact

SEQ ID NO: 138514 - DNA, 381 bp, Zea mays
  Clone ID: MRT4577_57807C.1
aagaaatacggaaaacctgttcaaaatgttagtagtccaccctagccagatgcagatgctggggttccatttgcctgttgggatgtctctgtgagcttctgaccgcgaggtcgcttactttttccattggctgaagtatcctgcacggtctcatttggcttcggaggcacctagccataccaacgtgccattgaatgcaatcagttcatgccccccaaaaagaagtccttgcaagatgaatggaacttgcaaacaaacataaaatcaaacctggaacatctgctggtacatcactggcatcataacatttccaaaagcatgtgggtcaacaccactctgaaaatttaaccagcaacagtcagtagcatattcctacacaat

SEQ ID NO: 138515 - DNA, 979 bp, Zea mays
  unsure (1)..(979): unsure at all n locations
  Clone ID: MRT4577_57808C.1
cattgggaccctcgaggccggccgggtgcgatgattataaaataattcctcgttctgaatgctacgccatggcatgacagacacgtttacacccatagaatatgagcactcgatattcggtttggacctgctgacatagaggagttagttcgtaaagcattacagctaaattgtactgcgaagcccattaaccaccccacatatgatgatccaaacaatggcaaagcatatgctatattcagaactaaagatgctgctgatgctgccatttcaaaaatcaattctggtttggttgttggtggaaggcccctgtactgcagcaaagggttacttgaggttccaaaaccttcagcgaatcttgttgggcacctctcctcatatgttaagattggtcaaaagcagcgcgacgagcagaagaaggctgtagcaacctcgcattgttcccagcccaacacgatcgagtacgacttggccttggactggatgcttcttcgggaaaagcaagaccagagcttcagagtacttcacaagaagcacagagaagccaggaaagggttcccaagcctggtcggcaaaggatccaaggcagagtaccagcccggttccaccctttcaaagcttggcgcggtataactcccgactggcagaaaaaaagggtcgtgcgcccaaaaggttctcttttttcagtacccatcaagtagttcgttgggtcaattcgtgttaatttctgttaggaaaggaaaaggtgttaataagtgttataataggaaaaaaaatgcacgtcagctttgacaggtcaaaccaccctaggtaggcatcaatatgttgctgcgactgcaatgttttaatttgacttggaccctcttatgttgggcgacaagtttcccctctgggggaaaaaaactgtttcgtctctgttcccatctaaaaaaaaaaaaaaaaaaaannnnnnngnnnnnnnnnnnnnnnnnnnaaaaag

SEQ ID NO: 138516 - DNA, 2306 bp, Zea mays
  Clone ID: MRT4577_57809C.1
tcttggtgtttttttatagccaaactctggaaggtcggcaaaggcccaactgtcggcttcgccccgttgacatcaacctgtcagtgatgagtttgggctgttcgcctgtggctgcctttgttccgtctgtgtctgtctatgatgggacgggacacctagggttcggataccggcaccggctcaactgacgacggactatcgccagtggcgatcaccctccctgtcccctgaccgcggcgtcccctgctcgcgccgcaccggtggcgacaaggcaccccttgcctgctcccctagacgcgagcgagcgagccaacacctgtcggcacaagaatggatgggaatgctgagacgatccaattctcatggggcaagcgtcgagggaaaggtggtgctaagatggatacacagttctttgggtccttcacattggacaatgtgaagtattcactgtttgactgtgtctatctatttaagcatggtgatcctgaaccgtacattggaaaaatagtgaagatctgggagaaagataatgataaaaaagtaaaaattctttggtttttccaccctgatgaggttcagaaatatttaagtggccctgtgatgggaaaggagatttttcttgcctgtggtgaaggtgctgggcttgcagatatcaacccgctggaagctgtcgctggaaaatgcactgttatatgtacttcaaaggataagaggaatcgtcaaccatcccctcaggaactacaaattgctgattatatcttctatagggtctttgatgttaaaagtctaacactttctgatcagttaccagataaaattgctgcatttacagttgatcttcttctgaatccaaaagatgagctagtcatacctgcaaatgttctggtgaatccaaatgtggatgagggtatggttgccacagttcctacacccccttcagcagttaaattggaggatcgaagtcaggctgctgcacttccccttacgcagacaggccaggtggatgaaaatctgcctgccacagttccccttccccaatcagaggtcaaggaggaacagaaaccagtcattgccattcccatttcccagactgtggtcaagaaagaggataagaaatcactttctgacattcccctttcccattcagcagtcaaggaggatgagacaccagttgcttcaattggccctccacagtctgcagttatggagaacattcccaaacatacacagttacaggatgctcatgctggggagaggccaccaaaaaagttgaaattatcccaagaaactacagagcaggacatagatccaacgaatactgaacaaagacctttggagctacagccaaagaatattgacagaagcaaatggtttaacattgaatggaatgacagactaaagatggctgatgataaggggacacttgtctatattcaaaatctcgatattcggtttggacctgctgacatagaggagttagttcgtaaagcattacagctaaattgtactgcgaagcccattaaccaccccacatatgatgatccaaacaatggcaaagcatatgctatattcagaactaaagatgctgctgatgctgccatttcaaaaatcaattctggtttggttgttggtggaaggcccctgtactgcagcaaagggttacttgaggttccaaaaccttcagcgaatcttgttgggcacctctcctcatatgttaagattggtcaaaagcagcgcgacgagcagaagaaggctgtagcaacctcgcattgttcccagcccaacacgatcgagtacgacttggccttggactggatgcttcttcgggaaaagcaagaccagagcttcagagtacttcacaagaagcacagagaagccaggaaagggttcgcaagcctggtcggcaaaggatccaaggcagagtagcaggccggttgcccggttccaacctttcagagcttggcgcggtatgactgccgactggcaggaagagagggtcgtgcgcgcagaggttctctttttgcagtagccatcgagtagttcgttgggtcaattcgtgttaatttctgttaggaaaggaaaaatgtgttaataagtgttaggatagaaaatgcacgtcagctttgacaggtcagagcagcctaggtaggcatcaatatgttgctgcgactgcgatgttttaatttgacttggaacctcttatgttgggcgacaagtttgccctatgggggagagagacactgtttcgtctctgttaccatctcatctgatttcactttcagtcaatctcgtccatatcgttctac

SEQ ID NO: 138517 - DNA, 1230 bp, Zea mays
  Clone ID: MRT4577_5780C.1
tttcatgagcttgcacatatggtgcactctgaacatgatgcaaacttttttgcccttaataagcagttgaacgaggaagctgcttccatggactggaccaagtctacaggtcatatgttgagtggtcgtaaaatcttcgattcatatgaagaggaatttgttctagaaccagagataactgttgctggtcacaggctcgggggagagtcaagttcgcttgctagcgctcgtgcgttgtctggagctgctgcttaccagcgttttctgaatgcatctgcaaatgtggatcatgcttcaggcactaaaattgaatatagttctgatgatgttcctcgaggttttgttcatgaaactgtgaaggtagagccagatccagattatgctatgcatgtggattcagcagctgggctatcatttgcagggcagcatactattggttactctgatcctaatcctgacgatgttggcaagcaaagttttgatagatgcctagagcctgatcctgatgattcctcaaatgctaataatctgaaccaggagctgaggtttgatgtaagacaccatagtgaacctgatcctgatgatggtagtaaatgaagttctggaacatggaaacacgatggaaatggatagtgaactgacaaaccacatcacagttgtgaagtatgaacttgaccctgctgattcctcaaatgctaaccaggagttgatcattgatgggaagcatggtgaagaacctgatcctgatgatacttgtcaagatgttttaaaatctggtaatgggacagaaatgataacagaacagagtggaaattccatggttctgaaagctgaacctgatcctgacgatcatgttggtgactcaaacatcaatgagctgcaaagggttgaagaaccagtgagagccctctgttcacgactccagaagtccattaagatgcttcggttgcaagcaacacctgtagaggcagagtctagctgaggtgcgcgatgacagctagcatgcgccatcttggcagagtgatcggtgttgtgtcgctttacaggtgccgtgtgtgtgctttctgggtacctaaaattcgtgtgagcctcattcatttgtaaaaaaaaaggcgtggactcataagtggtggtgaactatcggcgattcttcccatactactgcaagacaaaaatattgcgctttgcacagttccactatatatatatactaagtgcatgtttgtattt

SEQ ID NO: 138518 - DNA, 668 bp, Zea mays
  Clone ID: MRT4577_57810C.1
gccggccgggttgggatctctagaccctatacccctgttctattttctaccgccgccaatctcttttcgcgctctgcaaccgctgagagagaaaaaaagatgtgcgcgaagggggatgtgccgcgtatatcgatctatatctcgacgacatactcttgtgtctgcgtgtgtgagaacgaccgcgtctagatatttgtcaacgaccacagtaaccgcaccacaccctctcacatctcctttaccgagtctgagagcctcatctcagatgtgggcaaaaaacacatcgccatgaaacccatctacaccgcctttgatgtgaagcgtctcatctccaggaggttcacagatgtgtctgtgcacagagatatctagatgtgggccttctaggggatttctgtgcctgtggagaaaacactgagtgtggtccacaacaagggtgaggagaaacacattgcacatgaaaagatctcctctatgtgtcttatatagatacgcgagatagctgaaaattacattgtgagaacaatctagaatgttgtgtgcacagaccctgtgtacttctatgagtctcacaggcaggccacaaaggatgttgtggtgagtgctgtgcttaatgtgctgtgtataatctacgagacaacagatgtggatatatcctatgtgcttga

SEQ ID NO: 138519 - DNA, 459 bp, Zea mays
  unsure (1)..(459): unsure at all n locations
  Clone ID: MRT4577_57811C.1
aggtagtatcaacgcaggcggggttagagaaggaaaaagtttcccaaaccctatctggggatctggatagaggacccagatgtcttcttcgacactgaccgtaccgggggtcccatgcgggcgtatccgtgatcgcagctgtacgccatacgatggagaccaagaccaggaccaacttccaggcgctgtacacggacaagaaggtggagcgcaagaccgagaagccgctccactacaaggtgctctaccttccaccgcgtaatccgccatgctctgtgccatggcgggcattacacccggggaaatggcaccgcgggcgagacctctacgagagcaagtccccgccagaagttcaggcggaagcacaccggtancgggggtgctctccatggcaacgccggtaccaacaccaacgggtatgaattctttatgtgcaccggggataccccctgggtggat

SEQ ID NO: 138520 - DNA, 331 bp, Zea mays
  Clone ID: MRT4577_57812C.1
gggaaaaggggggggggccccatttttaaattggcatgggaaagaattggtgttttcttattttattacaaacaaagtttttttttaaaaccgcaatttaaaaatttcccctcccaaacacaaacataaacttcccccttggggggggggatttaaaacctggacgggggcccagtttttaaaaccccattttgggcatgttttatggagttttttcagctcatattaggggcgatgggatcaatactagcccagttccattttattggggcctaaccccatcccatgtcacttggtgggggggctttttggaggaaaacctttaaccccc

SEQ ID NO: 138521 - DNA, 513 bp, Zea mays
  Clone ID: MRT4577_57813C.1
ccacgctcacctgcaccgacttcaacgccacgtacgccacggcgcaggacctcttcacggccgcccccaacaggatgagcccgctgcagtccggctgctgcaagcctcccaccaagtgcggctacaccttggtcaccccgacgtactggatcagccccatcagcgccaccgccgaccccgactgcgccgcctggagcaacgaggaggccaagttctgctactcgtgcgcctcctgcaaggccggcctgctccagaacctgcgaggggagtggcgccgcgcagacctcatcctcgccgtcgccactgccgcgctgctggctgtctacgccatgggctgctacgcgttccgcaccgccaagaccgacgaactctttcgccgctacaggcagggctatacatgatcgatcatgacgacgatgatatgtaatgtattaattaatcggctcttcttgtatttgtatttaattcccaacataacgttgcagatatctattactactctattaagaccat

SEQ ID NO: 138522 - DNA, 727 bp, Zea mays
  Clone ID: MRT4577_57814C.1
cgcgctccgctccccacgccagcacgcccgagccccgaatcgagtcccctaccccatcgatccccgccgcccgcctttccccgccattcttctagaacctacccagctctcggggaccttctctctcagcccgagatccctccccaccgagatcccgcgccgccatggtgtcgtgacggcggcggaggcggcgtcatggagcgggagcccaagtcccccgacgaccgccctgagcccgctgcggcggcggcgcagccgcagccgctggagtggcggtttgcgcaggtctttggcgagcgcgccgcgggagaagatgtgcaagatggtaataaattcaaccggccgctggcctcttcggatcggcccagtaccgtcgttccctcgcgagatttggtcggtccggtgtgttccggagaggtttagcggaaccatccctttcgtcgccacgggtgtccggggatcgccgggggttccttgggccgctaaacccaatgggtcgtggctggcttttacggtggtttgggtgttgaagcgtttgacttgttcgagtcggagtaagtgctatgcgcagtgtcttaacagggattcaggactgtttattactccttacacctcgacatgttgaggtttctctactgtgtctggttcgagcaactacttcatgtggtggtctttgtcgtgtaattttagctccaacagatcggtactctggtagttgtgcttcagt

SEQ ID NO: 138523 - DNA, 303 bp, Zea mays
  Clone ID: MRT4577_57815C.1
ggtattgttattttttttttttgggggggcgcctacctgaaccaaaaaacattattttgatttgcgcgaaggagcaatccaaaaaggggcacccccaaagaagggttgctggaaaaacccccccggggaggggaaaacaaatttttgcgttcaaccaaccggcggggttggactctgcaggttatttacaacagcaacaacccgggcgcgggggtggacccgcgaatatataacacagccccgccggcggaccagcttttcctaccgagaagcgggccagaacccggccgggtcaaggacata

SEQ ID NO: 138524 - DNA, 1704 bp, Zea mays
  Clone ID: MRT4577_57816C.1
agtgttttggtatcgatacggtaacacggtcttacgcccccgctcgcacgctccttcccactcagcagcagcacgcgctccgctccccacgccagcacgcccgagccccgaatcgagtcccctaccccatcgatccccgccgcccgcctttccccgccattcttctagaacctacccagctctcggggaccttctctcccagcccgagatccctccccaccgagatcccgcgccgccatggtgtcgtgacggcggcggaggcggcgtcatggagcgggagcccaagtcccccgacgaccgccctgagcccgctgcggcggcggcgcagccgcagccgctggagtggcggtttgcgcaggtcttcggcgagcgcgccgcgggagaagatgtgcaagatgtggacataatctctgcaattgagtttgacaaatctgggaatcatcttgctactggagatagaggtggacgtgtggttttgttcgaaagaacagacattgctgataatgcttgtcgaagagaacttgagaggcaagaatatcttgtttctaggcatcctgagttccgttacaagaccgaatttcagagtcatgaacctgagtttgactacctaaaaagtttggaaatagaagagaagattaacaagatcaagtggtgccaaacaaccaacaatgcactctttctcttgtctacaaatgacaaaacaatcaagtattggaaggttcaagagaaaaaggtgaaacgggtttcagtgatgaatttggacacctcccaaagttcagacaatggttcaacttcaagtccgggtaccagtagttgcagagctcttcttccaaatggtggatgcacaggaaaaatgtacagtccaaacaacaatatgtcatttcctccaggaggatgcacatcgctgcgtttgcctgtggtggttacaggccaagaatttactcatgttgcgagaagcagacgtgtatatgcccatgcccatgactaccatattaattccatttcaaataatagtgtgcatggtttttgaggcattgtggcatccagtggcgctggggtacgcctggatgctaggcaatatggcataacgaaaaccttgtggctcctatggcgcctggggtatgcctcaactccttggcgacggctcaaaaaccatggtagtgtgtaaaaccagtatggtggcaacattgttcttctgtagtaggaaatgtggtctatgacttatgtaacataaaagctttgaagtaggtaaaataaaagaagcttattctttcattataaagaagctactgctcttaaggctattaaattcaaccggccgctggcctcttcggatcggcccagtaccgtcgttccctcgcaaaatttggtcggtccggtgtgttccggaaaggtttagcggaaccatccctttcgtcgccacgggtgtcccgggatcgccgggggttccttgggcccctaaacccaatgggtcggggctggcttttacggtggtttgggtgtttaaaggttttacttgtttgaattggagtaaatgctaaggccagtgttttaacagggattcaggactgtttattactccttaccccccgacaagttgaggtttttttactgggtttgggtccaacaaaaacttcaagggggggtttttgtcggggaaatttagctcccacaaaacgggaatttgggaggtgggcttccggt

SEQ ID NO: 138525 - DNA, 408 bp, Zea mays
  unsure (1)..(408): unsure at all n locations
  Clone ID: MRT4577_57817C.1
gaaagggnaccctccgggccggccgggaaaaaacactcttctcccccaactccccagcgccagcgccccaattatttggcccccgtcagagaggggacaaagaccccttcgaggcggcggcgacgtcgctgcgcggcaagggcggcaagggtctgggcaagggtaggagccaagcgccacacgaaaggtgctccgcgacaacatccagggcatgaccaaggcggcgatccaaatgctggctcgcaggggcggcgccaagcgcatctccggagctaatctaccaggagacccgcggcgtgctcaagatcttcctctagaacggcatccgcgacgccgctgacctacaccgagcacgcgcgccgaaagaccgcgaccgacatgcacgcttgggtacccgcctcaagcgcc

SEQ ID NO: 138526 - DNA, 1248 bp, Zea mays
  unsure (1)..(1248): unsure at all n locations
  Clone ID: MRT4577_57818C.1
ctctgttccacctctgctcctcgtgttcgcaaaccctgctcgcattaaaccataatacgcgagcccccacggcttctctcatgaccccgatctcctttcctgcccaccaccaccgatggccgccgctcaactccgtttattgccgctcttgctgctaacgctgacagcggcggccaagaacgtcaccctcgactctgccatactatccttcgcggacctcacgctgctgggggactccttcctccgcaacggctccgtctggctcacccgggataccgacgtgccctcctccagcgccggcaccgtgctctgcacccagcccgtcgcgttccggggccccgacgccacggcctccaatgccaccgccgccgtcgcatcgttcgcggccaggttctccttcgtcatcactaaccccaacgcgggcgccgcggggggcgacggcatcgcgttcttcatctcccccgaccgcgccacgctcggcgccaccggtggctacctcggcctcttcaactcctccaactccgctgcagccaagaacggctccgcgtccgccaccattgtcgccgtcgagttcgacaccatggccaacccggagttcgccgaccccagcgacaaccacgtcggcctggaccttggctcgccggtctccgtcaccgcggccgacctcgccgcatctggggtcgacctcaagagcggcaacgtcacgacggcgtggatcgactaccgcagcgcggaccgccgactggaggtgttcctgagcagctacgccgtggccgccaagccgaagcggccggtcctctccgtcgctgtcgacctctcgccgtacatcaaggaggccatgtacgtcggcttctcggcgtccacagaggggagcacgcagcagcacaccatcaaagggtggaccttccagacgttcggcttcccgcccacggccaactcaacctttgaatccaatgccaccagcaactcttcagagccggccgcgccagcgccagcctccaacgcccccaacagccacaagaaggagggtcgngatcgcgcttggaatcctcggccccgttgcgcttgccctcgccttcatcttcttcgcctgggtctccatcaagaagatcatagaactcacctcccggaccgacgccgctttctcgnccgagctggtcaagggcccgaggaagttcagctacagggagctgagcgcggncaccagaaggttccacacgagcagggtcgtcggcaagggcgcgttcg

SEQ ID NO: 138527 - DNA, 484 bp, Zea mays
  Clone ID: MRT4577_57819C.1
tgctatatagacgtgagctagaagacgctcaagggctgtgtggcacactacatctggtgtgcatgcgcatgggatatgcatgacgtgtgttggggatgagtgcaagagaccagctttagctgtggctactattagcgctgcgcattcctgctgccgactgcacaaaggtgacgcggcccaacgaggtggatgggccatattacccacgaaaggcagcggtgagtgggccacctggtctgtgcatctctaacctgcggataatatacaaaaaaggatacaaacggcctattatataacaaaagggataatattcaacaatcttttatcagaaaagaagattacttgtttgtagtgttcagaagatccaagatcctgtactacatggtatgacggtgcttaaattgtatattgtgagataaaaaaataaaatggccgtcgttctcaacgatccaaactgacaaacacctgcatgcaaccaactaaa

SEQ ID NO: 138528 - DNA, 2720 bp, Zea mays
  Clone ID: MRT4577_5781C.1
ttgggtacctcgagccggccgggacagcgaacggcgcactcactgctcatagaaccaaaacccctctccgtcaccgcggtggcaacctgccgtcatcgccatcgccgcgtgcgttctcgaacgttcttgtggcctagaaatacacgtttcccaggccggcgacgccgacgccgacgcggtcacgccttttttttcagccggctggttcacgtgctcgacgacggcgagcgtctgtctaggagcaagatggatgggaacaggatagctcggttttcggtcacctggaggggcagccaacttgatgtggatgcggatccaagttgtaccgtgaaagagtttgggcaactgttgcaggacttgactagtgttaggccagagacgttgaagctcattgttccacgatctacaaacaaaggctccaagctgatcatgccattttcggatgcacattcgagattgacactgaatggagtgggtattagcgagggaaaacctatccgaatgatgggagtttatgatgatgaaatcgaggaggtatccgacaatggcaaaagacctgaccaacgcattattggatttgatgaagaagaacagcggcttaggcaaagatcattaggcaggccacagatttcactcaaacttccccagggacaatacatcttctgcgattttcggacgcttcacttacctgggattgagctgaatcctccaccttcggaagctctgaaacgaatgcacatgcttgcatgcgaccctggtgtaattgcgatcatgaaaaagcataaatggagagtcggaatcatgactgagatggctcctgttggatatgtaggcatcagtccaaaatgtattttaggtttcaataagaacatgggagaggagatatctcttcgcctgcgaactgatgatttgaagggattcaggaagtatgaaagtatcaagaaaactctacttcatgagcttgcacatatggtgcactctgaacatgatgcaaacttttttgcccttaataagcaggtgtttcctagatattcccatcacattcggttgcctatcttgttacatttgcgtttatttgatcttaattttgctttttaatttttggcagttgaacgaggaagctgcttccatggactggaccaagtctacaggtcatatgttgagtggtcgtaaaatcttcgattcatatgaagaggaatttgttctagaaccagagataactgttgctggtcacaggctcgggggagagtcaagttcgcttgctagcgctcgtgcgttgtctggagctgctgcttaccagcgttttctgaatgcatctgcaaatgtggatcatgcttcaggcactaaaattgaatatagttctgatgatgttcctcgaggttttgttcatgaaactgtgaaggtagagccagatccagattatgctatgcatgtggattcagcagctgggctatactaggcagggcagcatactattggttactctgatcctaatcctgacgatgttggcaagcaaagttttgatagatgcctagaacctgatcctgatgattcctcaaatgctaataatctgaaccaggagctgaggtttgatgtaagacaccttagtgaacctgaccctgatgatggtagtaatgaagttctggaacatggaaacacgatggaaatggatagtgaactgacaaaccacatcacagttgtgaagtatgaacttgaccctgctgattcctcaaatgctaaccaggagttgatcattgatgggaagcatggtgaagaacctgatcctgatgatacttgtcaagatgttttaaaatctggtaatgggacagaaatgataacagaacagagtggaaattccatggttctgaaagctgaacctgatcctgacgatcatgttggtgactcaaacatcaatgagctgcaaagggttgaagaaccagtgagagccctctgttcacgactccagaagtccattaagatgcttcggttgcaagcaacacctgtagaggcagagtctgctattcaaactctctttaagattatcaagaatgttatagagcatccaaatgacattaagtataagagattgcgtaagtccaatccacatttccaaaggagcgtagcaaactataaagctgcaatggaggttcttgaattgattggtttctgcgaggatgtaatctcagatgaggttgggcgtgctgagacttacctggtattgaaaaggaatgatcctggattgctatggctggcaaagtcctcccttgaggtctctctggcttgataaaatttgatacatcattcatggttgctatttttcgtcgtgaatatatttgattgtttgtacaagagagctagctattggcatgcaccattctcctgtatggggactgttgtatacttgcatatgaatacacaagaatgtaatgccacattcaactttctgctctttgtttgcgttatctgtgccttcgtcttggatggctttcactcccatagtcccatgtgatgcacaacaatgtaccgagtttgactgattcatgagttcattgtacttgaatttccagattatgctgcgtttgaagcagacagaaggagcatttttttttcactgcgagtttcctatattccatctcttctgctcttgataagcagacacttggtatttgtaatgcaattttttccagtgttgcttgggactagagaaaaaaggtaagaga

SEQ ID NO: 138529 - DNA, 177 bp, Zea mays
  Clone ID: MRT4577_57820C.1
acagccttggttttctttttttttaaaaaacaccaaacatgctcatccacttgtgggcgagaccagagatgtcctcctaggagaaaacctaaacaaaagtccactgcccactaatcggaacacctaaccgtaagaatgagccccaggctcacttcccctggaaaaagacggtgccct

SEQ ID NO: 138530 - DNA, 174 bp, Zea mays
  Clone ID: MRT4577_57821C.1
aactcatgctagaagtcgacacttttatgatagagcagatggtccgattcacaataagatcacatgatggaatggtcgtgaacattctcttaacatgataagaaatgcacataaaatacaggctcatgtaataggccatcaagtgagaaagaaatacagaacaattgctagcac

SEQ ID NO: 138531 - DNA, 342 bp, Zea mays
  unsure (1)..(342): unsure at all n locations
  Clone ID: MRT4577_57822C.1
gaaaagngggaaaagcaagangggaccaaaanaaaaganaaaagngcacangcnaacagancncaacagnncacacganaacagcaacgancacaaacaaggcgngggangangaaaacnaggnanngcnaaagcaggcgcaggaacgcancaaaacnncngggcagccgccnnggacaccnnggcgccggacgggncccccnacnccacacncnnganaacaccaacagcaaccgncggccncangncacggacagcaaaccaaccaaggggagganacgcggagaacgncnccaccaccangggcnnggncggnancaacnncaccanaccagcancacc

SEQ ID NO: 138532 - DNA, 405 bp, Zea mays
  unsure (1)..(405): unsure at all n locations
  Clone ID: MRT4577_57823C.1
gacagctgaaatacagggttcgtggctttggcagtcgcatgacaaatgttgtgctatgacgctgtctctggggggaccaagctcagggcatggtgatattctatgcgcggtgcgcctggagctaatattgttgctggcctggtggttgtctgacggtgatcgtttgcctatgccacaaattcttctttattgatgaacacatgccgaatatgttcacaacacctatcacctttactatgagtgtgccgatatacttatgctcatagtggcaggatcactgctagatgtgcactggagttcatctagcattgcccttctggtgttactggcatgggatatgaagcatatacaaatgtccgtctgtatctatctacagatggntataactacccgctgtcaacaagg

SEQ ID NO: 138533 - DNA, 132 bp, Zea mays
  unsure (1)..(132): unsure at all n locations
  Clone ID: MRT4577_57824C.1
atgnctggatccctctactgatcgctagccgtgtagaggcgagcacacacgcccgcgcgagagagacaacacttcgatatgctctgccctttcgactgtggcgagcgtatcatgcgcgcgcgcatctcggcc

SEQ ID NO: 138534 - DNA, 734 bp, Zea mays
  unsure (1)..(734): unsure at all n locations
  Clone ID: MRT4577_57825C.1
aattcggcacgaggtcttctcccttgcttatttttagctttagttcttgcgtcgagtttcttgcgcaattgctcgcccttgctgacgaggagcagcacctcatactgaagcagcacccagcaggaggggcggaggcggcaacaccaacaccaacaccacaggccgccgccgcgcctcgagctggctatggcgcacgcgcggggcggcgggggccacggccacggccacgaggaggaagcggaggcggccgtctgcctggacggcgactccgaggcgggcgaagcgcgcagcgcggggcgcgcgccgccgtggcgggaccagctgacggcgcgcgggatggtggcgagcctcgccgtcggcgccatgtacagcgtcatcgtcatgaagctgggcctcaccacagggctcgtccccacgctcaacgtctccgccgcgctcatcgccttcgtcatcctccgcgggtggacgcaggcgctcgcccgcttcggcgtcgctacgcgcccgttcacccgccaggagaacaccgtcgtccagacatgcgccgtcgcctgctacagcatcgccgtcggaggtgggtttggctccttcttgcttgctctgaacaagaggacctacgagatggctgnngaggacacggaaggcaaccttccgggaagctacaggagcctggcattggctggatgaccggcttcctcttcgccgtaagcttcgtcgggattgttgcgctaatacct

SEQ ID NO: 138535 - DNA, 476 bp, Zea mays
  unsure (1)..(476): unsure at all n locations
  Clone ID: MRT4577_57826C.1
tcgagggcctgccggggcaatagctcgcccttgctgacgaggagcagcacctcatactgaagcagcacccagtgctgtgtgttgtccttctggctggagcaagcggagcccaggaggggcggaggcggcaacaccaacacgaacaccacaggccgccgccgcgcctcgagctggctatggcgcacgcgcgggacggcgggggccacggccacggccacgaggaggaagcggaggcggccgtctgcctggacggcgactccgaggcgggcgaagcgcgcagcgcggggcgcgcgccgccgtggcgggaccagctgacggcgcgcgggatggtggcgagcctcgccgtcggcgccttgtccagcgtcntcgtcttgaagctgggcctcaccacagggctcgtccccacgctcaacgtctccgccgcgctcatcgccttcgtcatcctccgcgggtggcccccggcgctcgcccgcttc

SEQ ID NO: 138536 - DNA, 175 bp, Zea mays
  unsure (1)..(175): unsure at all n locations
  Clone ID: MRT4577_57827C.1
tacccaatggnacggntgggctggcttgaggccgncctgccgctggggatcatcggcggnatgctctgcatnatggggaacgncaagnattnaattcacaaggncggnnacggcaggccgnagnacatnnnnaacgatatgtgagagggggccatggagcgccgcgacaagaagc

SEQ ID NO: 138537 - DNA, 345 bp, Zea mays
  Clone ID: MRT4577_57828C.1
atgctcgtcgtaggagccacgccgtcgtcagctcgcaagtctgcatatgagaaggtgtggcctcctctagtttgagctctcaggtacattctagtatcagtgtctgctgtcaggagcagttacaaggatgctacccttgtaaccaacaattgaaacgtcgatgacgaatacagttcatagtttctcagaactaggcaccataggagcttgcatgcattcacaagtcatagatcagcgtgcgattatgatattatgcatggactgagattgagaatatcagatgcgacaagagtgggtgcagatgcttgggcccttatgcattcggctattcctgataaactacaa

SEQ ID NO: 138538 - DNA, 407 bp, Zea mays
  Clone ID: MRT4577_57829C.1
cccacgcgtccggtcgtctcctggctgcaggctgctcgctcgctcgtgtggactgctggctcatcgttgatcaacaaagcaagttgcaagcggtgaaagcgactgcgccggtgtctctgtccggctagctcaagctcctcgctcctgcggctacaagtaggaccatgacagggagagatgaaagctccgaccgtagttcggcgtgcttgttgttgggaacaccggctctactagctgctcttagaactgctgctcacttctggataaattatcagttaattagtatgtttgtatgtgacatgagtgtagatataatttctcactcaaataatgtcactatgtaattatgttgatgctataaacttaatatatattaatgtttgaattaaggcattcagtttattgtt

SEQ ID NO: 138539 - DNA, 1983 bp, Zea mays
  Clone ID: MRT4577_5782C.1
atgccgacctcttctttttccgctgccgctacgccgccggtcgacgcctcgccgccggccgacgcctcgtctgaggggacgccgagtactctggtggcggaggagttgcgcgccgacgatacggtggtttttggtgtgtcgcggatgtcatcggtccgcgtgcaagatatgcagcggctgggctactttggcggcggagttgcccgcgtcccggggacggaggaagttcccgagccggaaggagagttggttgtgttcgaggcgttcttcgccgcggtctccgcctgcctgcgcaccgattcgttggcgaaggtttttgaattgaatcgactgccgtataacggctatccgggccaagatgatgtggaccgccgcgggaagaagccggtggtagagtctggagacgaccctgcgccggcggtcgccccatcctctaagaagaggaaactagtgatggacaaggatggccagggagctgcacagaagcgccaggcggttgtcaggcttcatgaagccaggccgaagaggcagtggggggctgcgaaggctgcggcccccggcggaggcaagccgccgctggcggcgaagtcgggcgtccctgcatctagcaaggcgccggaggcagcggcaggcgccggtggttccaaatcgacgaaggctgtgccgccgtccagcagggtgccggaggtcgcgaaggcggcccgagtgttgccgtcggcaggcaagcgcgtcgccgacttcgccaccgatattagtgtggacgactatcttggtggccaacttgctattgttgcgcctgccgcggcgaccacggcggctgccgtagtgccgaaggcgaagggcggtgcgcttagtgccggaggcgagatgccggcactcgcggctgtcagggatgaggcgggcgctgtgtcccgtcggctgaaggaggtgaaggaggcactaagtcaggcggctgacttcgccgtccgcacagcgtcgggggccctcatggcagttgtgtctgccgaagtcgagagacttcggacgcaacatgctgacgccgttcgtgaaaaatcggccgccgacagtaagtgccgcaagctggcggacaaggtggccgcactggagggggagaagactgatctccggcgccaactagcgggggagaggagggagaccaacgaggccctcgccaaggcgcaggctgcgcaggcggaggccaatctggcgcgggcagagggcaatcttgccagggagcgcgccgagcagctgcaggagcggctcagcgccctggagagccgtgtggagagggccgaggccgcgacgcgcgcggaggctgagcggacgcgcaaacagcttatggattcataccatgagctgggcgcgtggaccagtgacttcgaagtgccggaccgagagcccggacttcgctgcctagagtggggggtgatgaacgcgctctcccgcgaagggtgccggcactttgaggtcttcgaccaagctgatgaagattttgagcgagatgtctataaggttgaggaccccatagtgaaggaatccgccggagccatctacgaccggatgtggggtccgcacgatcgtgaggtggtcagggagcgggccaagacgatgagggctcaggcggcgcgtggcgagagggtggatcacttcggggcgttgaacagtgcgctgcctgacccggagccgatcccggcggaggccatgtccgggtccgccctggagccgcccccggagactacggaaggcgttccggatgctcccgcagctgctgcggccggcggagacccgcccccggagactgccgaaggcgctcctgacgctctcgcagccgctgcggctggcgaagatccgccctctgagaccgccgaaggcgctcctgatgcccccgcagccgctgcgccgagggctgaggatcctgcgatggtggcggcggaggcaacagcggaggctcccgcgacggctgggtcctcgcaggtggcgtag

SEQ ID NO: 138540 - DNA, 660 bp, Zea mays
  Clone ID: MRT4577_57830C.1
gcaaaggcgagtactagagcaaggccatgggcaagcttgatggcttcggcgccttcagcatcccacttagcacggacctccacggcgctgactgcgttgcacagctccacagcgctgcggggaacccgtgccccggtcaagaaccttccagaattgtgccacaatcgtcaaagggcaacttcgtcgtggtccctggaaagacagactacccatcgaaggaatgtgcgtccgcaaccctgtgtgggtcgatcaagaagcacctactagaccatttccacaagaaacctgtgcaccaccacaaaccacagtatgaatttgctggacccgttgggtagctgtagcttagagttggtggatagatacgatgcatgcgacacgaagaacagccgaactaactgacgcatgaatgaaagtgacagagagctaccaaaccaaggaagaagaaagagcgtcaggcggatatgaacggcgtatactttttctgagggaagatcttgggcccgttctcgaggtagaacgtgttgaggtcctttgcgaagaacagcggccggttgttctggtccggcgccgccagcatcgacgtgagaagggcgccggtgctcgtcccggcgatcacgtcgaagtagtcggcgatccgagcatctgggccggccagctcct

SEQ ID NO: 138541 - DNA, 1155 bp, Zea mays
  unsure (1)..(1155): unsure at all n locations
  Clone ID: MRT4577_57831C.1
tgggtacctcgaggccggcgggcctatccgttgaaaaaaatccggcacctccatcaaatcagatctcacgcccctgcagccaaaacaaaatcagcatccggatctccacattccccaccaaaaatcatcctccggacgaaatcagcggcggcggagatgggagcggagtgccggtacgaggtggcgcaggcggcgtacatcaagctggcgctgcacgcactgaagcacccggcgaccgccgtcaacggcctcctcgtcggtcgcctcgtcgagccttcgtcctcaccggccgtcgtctcggtcattgacgccgtgccgctttctcaccacccgcaccatctgccgctgctccccacgctcgagctcgcgctcaccctcgtcgaggaccacttcgcaacccagggcgaaggcctcgccgtcgtcgggtactatcacgccaacccgcgctgcgacgacaccgagctcccgccagtcgccaagcgcgtcggagaccacatcttccgatacttcccccgctccgcggtgttgttggtcgataacaagaagcttgaggaggccgtcaaggggaagttttctgatgcggtgattcagttacacaccagggattcatcaaaaagttggcgtcaggctggatcagatggaagcagtcagctgattctaaaagaaccttctaccaatgttgtcctagctgatcatgttacaacaaagaaatgggagaaaattgttgatttcgatgaccaccttgatgatattagcaaggattggtcgaacccaggcctccttgactgaattttcatgattgatctcgctatactgttttggaacttcgctagaaatgaggtggtgaagctcgtcctgctgtgctatggatttctctcagtcgcaacgagttgtaagcactaagcacggatttcattttaatgtaaatgagtgattttgtaacaattacagttcaaaatgctaaaattatgcagagaccatgagattgtttcaaggtcatgacaattattacgagttgtcacaaacaatttttgttcgtacatgactcttattttaaagaatgaaagttcacataaatttaagtgaaaagtagtaaaagaaaaaaaaaaaaaaaaaaaaaaantcacataaatttaagtgaaatggtgtagacaa

SEQ ID NO: 138542 - DNA, 1368 bp, Zea mays
  Clone ID: MRT4577_57832C.1
cattgggtacctcgaggccggccgggacaaaatcatcctccggacgaaatcagcggcggcggagatgggagcggagtgccggtacgaggtggcgcaggcggcgtacatcaagctggcgctgcacgcactgaagcacccggcgaccgccgtcaacggcctcctcgtcggtcgcctcgtcgagccttcgtcctcaccggccgtcgtctcggtcatcgacgccgtgccgctttctcaccacccgcaccatctgccgctgctccccacgctcgagctcgcgctcaccctcgtcgaggaccacttcgcaacccagggcgaaggcctcgccgtcgtcgggtactatcacgccaacccgcgctgcgacgacaccgaactcccgccagtcgccaagcgcgtcggagaccacatcttccgatacttcccccgctccgcggtgttgttggtcgataacaagaagcttgaggaggccgtcaaggggaagttttctgatgcggtgattcagttacacaccagggattcatcaaaaagttggcgtcaggctggatcagatggaagcagtcagctggttctaaaagaaccttctaccaatgttgtcctagctgatcatgttacaacaaagaaatgggagaaaattgttgatttcgatgaccaccttgatgatattagcaaggattggtcgaacccaggcctccttgactgagttttcatgattttgtaacaattacagttcaaaatgctaaaattgacgttgtgatgatatttaagtagattcatcccagccgcatattaattatgcagagaccatgagattgtttcaaggtcatgacaattattacgagttgtcacaaacaatttttgttcgtacatgactcttattttaaagaatgaaagttcacataaatttaaaaaaaaaaaaaaaaaaaaaaaaaaaaaaaaaaaaaaaaaaaaaaaaaaaaaaaaaaaaaaaaaaaaaaaaaaaaaaaaaaattcacttcttttccaactttattaaacttagggcaaaaaaaaaaaagggtttcccccgaaaaagggaatttcaaaaaaaagggtttggggggttcctcttgttccccggggtttttttgcttttggggggggattttggccggaaccccaatcccgaaaaaaaaatgggcaaaataaagggccaaaataacggaaacccgccaaaaaggaaaaaaggcgggaaaaagtcccaaacccggaaccaccataaccttaaaaaaaatttttggaaaataaagggtaaacaccaccagaaccctgaaagaaaaaaaatttgggaacaaaaggcaataacctatggtttaagccaccgtccaaggccaaggttttttaatgagggaaaaa

SEQ ID NO: 138543 - DNA, 290 bp, Zea mays
  Clone ID: MRT4577_57833C.1
aagacactggcaggggcgtgttcatattgaactctgaatatacgccgctggaacagacttattaaaaagaaacagtataagagggagcaaccgaattgaacattttataagctccaaccataaatcttattagaggtaactgataacccaggctagggcaaatcttataatcgtagctcttctacataggcatatatctgattaacgcctttacatcgttcggggatgtacatcaggcaaggaatgtacgtggatgatgggcacaagggcagatttagggctgttacaac

SEQ ID NO: 138544 - DNA, 895 bp, Zea mays
  Clone ID: MRT4577_57834C.1
tcagatctcacgcccctgcagccaaaacaaaatcagcatccggatctccacattccccaccaaaaatcatcctccggacgaaatcagcggcggcggagatgggagcggagtgccggtacgaggtggcgcaggcggcgtacatcaagctggcgctgcacgcactgaagcacccggcgaccgccgtcaacggcctcctcgtcggtcgcctcgtcgagccttcgtcctcaccggccgtcgtctcggtcatcgacgccgtgccgctttctcaccacccgcaccatctgccgctgctccccacgctcgagctcgcgctcaccctcgtcgaggaccacttcgcaacccagggcgaaggcctcgccgtcgtcgggtactatcacgccaacccgcgctgcgacgacaccgaactcccgccagtcgccaagcgcgtcggagaccacatcttccgatacttcccccgctccgcggtgttgttggtcgataacaagaagcttgaggaggccgtcaaggggaagttttctgatgcggtgattcagggattggtcgaacccaggcctccttgactgagttttcatgattgatctcgctatactgttttggaacttcgctagaaatgaggtggtgaagctcgtcctgctgtgctatggatttctctcagtcgcaacgagttgtaagcactaagcacggatttcattttaatgtaaacgagtgattttgtaacaattacagttcaaaatgctaaaattgacgttgtgatgatatttaagtagattcatcccagccgcatattaattatgcagagaccatgagattgtttcaaggtcatgacaattattacgagttgtcacaaacaatttttgttcgtacatgactcttattttaaagaatgaaagttcac

SEQ ID NO: 138545 - DNA, 484 bp, Zea mays
  unsure (1)..(484): unsure at all n locations
  Clone ID: MRT4577_57835C.1
aaaaaaaaacaaagaaacaagcaaaaaaaaaaatacacacatgaataaacaaaaaaaaaaaggcttgtacctaacccgggcggcttgctccaaaggccgggccccgctatggcctttttcttgggggcccctcgcgctggggggggggggcccttttttccctgggcgcgtcggtcccatttgggggccgtgcttttccctgccccggcggtgggcaacccctggggttgcccnccttagttgccttgccccccttccccctttcgcccgctggctttttggccccggggccccccccgggggcccttcccccttttcccccccctgnttggcnnctggcccccccctgnnccggggcttttnccccggggggcggggtggcccccccccccgtgcccgctccctttgccngcgccctttggccccccccctttcggttttttccctttttttttttccccccgttggccctttttcccccccc

SEQ ID NO: 138546 - DNA, 744 bp, Zea mays
  Clone ID: MRT4577_57836C.1
ggccgcttttttttttttttttttgcgtgaactttcattctttaaaataagagtcatgtacgaacaaaaattgtttgtgacaactcgtaataattgtcatgaccttgaaacaatctcatggtctctgcataattaatatgcggctgggatgaatctacttaaatatcatcacaacgtcaattttagcattttgaactgtaattgttacaaaatcactcgtttacattaaaatgaaatccgtgcttagtgcttacaactcgttgcgactgagagaaatccatagcacagcaggacgagcttcaccacctcatttctagcgaagttccaaaacagtatagcgagatcaatcatgaaaactcagtcaaggaggcctgggttcgaccaatccttgctaatatcatcaaggtggtcatcgaaatcaacaattttctcccatttctttgttgtaacatgatcagctaggacaacattggtagaaggttcttttagaaccagctgactgcttccatctgatccagcctgacgccaactttttgatgaatccctggtgtgtaactgaatcaccgcatcagaaaacttccccttgacggcctcctcaagcttcttgttatcgaccaacaacaccgcggagcgggggaagtatcggaagatgtggtctccgacgcgcttggcgactggcgggagtttcggtgtcgtcgcagcgcgggtttggcgtgatagtacccgacgacggcgaggccttcg

SEQ ID NO: 138547 - DNA, 881 bp, Zea mays
  Clone ID: MRT4577_57837C.1
cgctacaagaagatcctcatcgacatctttcccgcggagcaggaagacggaccaaatgccaggaggattggcaggctttgcgagtatgttgctagaaatcctcatcgcgtgccaaagatcacagcttacttggcgaggacgtgttacagggagttgagaaatgagcagtatgacattgtgaaagttgttgtgctaatataccgcaggctattggtctcttgtaatgaacaaattgcgccgttactggcaaatagcttattaagcatcatacaaacacttttggatcaatcaaggcaggatgacatgtgcatcattggctgtgaaaccttgtttgatttcatagtcactcaggtggatggtacatatcagttcaatttggaagagtttattccaagactctgcaaactttctcaaatagtaagggacaaagagaaggctaatgcactccgtgcagcaactctgcaatcactctctgctatgatctggtttatgggtgagctctctcatatctccttagagtttgatagcgtctgccaagtagtattggaaagctatgagcctcgacaggtgcaaagtgacaatagtgccactgaaaatccaggttgtcagttggttgaagaggtccttaaacccgagggtcatgcctctccatcgacatttatattttctgtgataccttcttgggacagcatagttagtgactatggaggaattcaactgctattgatgatgccaaggatccttatgtttggtcaagggtctgtgtgcataacatggccaagctgtccagggaagcaactacattccgccgtgttatggagtccctattttggcacttcgataatactaattcatggtcatccgaaaattgtcttgcactt

SEQ ID NO: 138548 - DNA, 249 bp, Zea mays
  Clone ID: MRT4577_57838C.1
cagagattgaggcagtggattttacaggggaagaaacacgccttgtgtgaatgctagcagtaaagaagggtgacagactggagaaatgataacggccattttggaagcccacagggaagtggtcttgggatacctgaagacactgggatattcagaaggccaaggggatccagcttatcctgttgcacatggcgctggtagtgaaggcaggtaagccatgtcaagggcctgggaagcaaggtgaatact

SEQ ID NO: 138549 - DNA, 367 bp, Zea mays
  Clone ID: MRT4577_57839C.1
cccacgcgtccgcggacgcgtggggacacccacgccaagagaccagaggcaacccggtctccgtctcgctcctttcaccatggatcaatcggcagctgcacctccccggcaagacgctgctgcgacgaagaagccgacgacgctcctcgacgcgtacgaggtggagtgcatccgccgggagctgcagcggctcgtcctgaagcacaaccagagcgctgccgccgggggcgacaccgccgcggcagcgcttgcgcacggccaccgccgcagcgacgacagccacctccaccaccagcagcatcgcgcgagcagcggcgcaaagaaggcgacgagcgccaagagagtcagtccgtcgccgtcgtcgctg

SEQ ID NO: 138550 - DNA, 1860 bp, Zea mays
  Clone ID: MRT4577_5783C.1
atgccgacctcttcttcttctgttgccgctacgccgccggccgacgcctcgtctgaggggacgccgagtactttggtggcagaggagttgcgcgtcggcgatacggtggattttggtgtgtcgcggatgtcgtcggtccgcgtgcaagatatgcagcggctgggttactttggcggcggagttgctcgcgtcccggggacggaggaagttctcgagccggaaggagagttggttgtgttcgaggcgttcttcgccgccggtctccgcctgcctgcgcaccgatttgttggagaagtgctgcgcagattcaacgttcagatccatcagctgactccgaatgccgtggtggctctgtcgaagccgaagaggcagcgaggggctgcgaaggctgctgcccccggtggaggcaagccgccgctggcggcgaagtcggccatccctgcatctagcaaggcgccggaggctgcggctggcgccggtggttctaggcctgcgaaggctgtgccagtgtccagcagggtgccggaggtcgcgaaggcggcccgagggttgccgtcgccgagcaagggcgtcgccgacttcgccaccgatattagtgtggacgattatcttggtgggtcggacgagggccaacttgttattgttgcacctgccgcggcgaccacggcagctgccgtagtgccgaaggcgaagggtggtgctcttagtgccggaggcgagatgtcggcactcgcggctgtcagggatgaggcgggcgctgtgtcccgccggctgaaggaggtgaaggaggcactaagtcaggcggctgacttcgcagaccgcacggcgtcgggggccctcacggcagttgtgtctgccgaagtcgagagacttcggacgcaacatgctgacgccatccgtgaaaaatcggccgccgacagtaaatgccgcaagctggcggacaaggtggtcgcactggagggggagaagactgacctccggcgtcaactggcgggggagaggagggagaccaacgaggccctcgccaaggtgcaggctgcgcaggcggaggccaatttggcgcgggcggagggcaatcttgccagggagcgcgtcgagcagttgcaggagcggctcagcgccctggagagccgtgtggagagggccgaggccgcgactcgcacggaggctgagcggacgcgcaaacagcttatggattcataccatgagctgggtgcgcggaccggagacttcgaagtgccggaccgagagcccggacttcgctgcctggaatgggtgcaggaggagttgcaggcactccccactatcgtggaggggtttatgtcgtatgcctccctggtcacctgcgagggggcgatgaacgcgctctctcgcgaagggtgccgacactttgaggtcttcaaccaagctgatgaggattttgaacgagatatctacaaggttgaggaccctatagtgaaggaatccgccggagccatttacgaccggatgtggggtccgcacggtcgagaggtggtcagggagcgggccgagacggcgagggctcaggcgccgcgtggcgagagggtggatgatttcggggcgttgaacagcgcgctgcctgacccggagttgaacccggcggaggccgtgcccgaggccgccctggagccgcccccggaaactgccgaaggcgctcctgatgcccccgcagccgctgcggccggcggaggccctcccccagagaccgctgaaggcgctcctgatgcccccgcagccgctgcgccgagggctgaggatcctgcgacggtggcggcggaggcaacagcggaggcgacagcggaggctcccgcgacggctgggtcctcgcaggtggcgtag

SEQ ID NO: 138551 - DNA, 359 bp, Zea mays
  unsure (1)..(359): unsure at all n locations
  Clone ID: MRT4577_57840C.1
cctcaaaatgagcatctcancagnactagcagtgacaaacncgaagcttgccttctagcttgcttacaccccaaaactaaaactacagtcggacggcgagagcaccagctggacgggcgtgtggacctgcgacgatctcctcaccaagtgcgncgccacctgcaagaactgcgtacccgcctccacggatacggtagccaaaaagtacatatgccgcgccttcctccccgaagagtgcggttgccagatccactacacactcctccaaccaacaatggccacacccgacggacccttcctccctatggatgatctcctccgtccgtccgtatacattgctacaaccaggtgcctactaa

SEQ ID NO: 138552 - DNA, 774 bp, Zea mays
  unsure (1)..(774): unsure at all n locations
  Clone ID: MRT4577_57841C.1
gccggccggttcgggtaaccaatgagtcatttcagttattgacctcatgtagtgaatcagcacggtaaaaggcaagcaatttgttctcctctttcgtctagtttgcacctctctcttttatcttccctcttgctacctgtaaaataataaaaccagagtgggatgcctcataaacggccagatttgcataaacaatttgataacccccagcactgctaaatagtgattttgccttcacaaagtcaggacgattatggttttcagtatagggtatagtttgtactagttgtcgttttagctcttttttatgtctatattcaaatacatgaagatgaacctagacacatatataaaacacatacatcaagtgttgtatgaacctactaattaattaaaacgaattttaatctgggacagagggagcattggttataccctattttttactatgattcttctctatgtttgatttgtgccaaacatacatgaaataaaccttgtattttttgtcaggactgttttattgctttcgactctgcttactagtggattgggtcttctaagtgctctatctattaactacttgtgcttgctggttcttcggttttttgtcggcataggagtgggcagtgggcatgtattttcatcttggttcttggagttcgttcctgcanngaatcgtggcacttggatggntattttttcctttttttggactattggcacagtcttggaggcttcacttgcatgggtatgacattttgctccttcgct

SEQ ID NO: 138553 - DNA, 685 bp, Zea mays
  unsure (1)..(685): unsure at all n locations
  Clone ID: MRT4577_57842C.1
gtggtatttgagttagagcttgtatatttaagttacttggtgaccccttcttgtgatgtgcatgtaattaaatttgcatctgtttctctattcggcacgaggttccttccgaagggggtgcacaatgtttaggaatttttattatggtttactgtaatgcaactctaaatcactatcgtaatctgatctactaaccatttgggaaatgttctgttttcagggtagtccgtgttgaagctgctgaagagttccgctggattgaggaccgatttcgaggctgcagaggaccctttaattaatccatcatgatcctatgttttgaaggagaaatgtcgatcctagcgtgttgtcttaatattagacgttggcacgttctgtgttcttgaactttttgtaatagccgtggatgttgttattatatataggtgtggacagtggaacattgcaaacccctctgtgaccttgattcctcgctgtattcctgagatggctgttattagcgtgccttgatcaaaaaaaaaaaaaaaaaaaaaaaaaaaaaaaaaaaaaaaaaaaaaaaaaaaaaaaaaaaaaaaaaaaaaaaaaaaaaaaaaaaaaaaaaaaaaaaaaaaaaaaaaaaaaaanncccccagggggggggcccgggccccaaaacccccttatagggggggaatttccccccccc

SEQ ID NO: 138554 - DNA, 124 bp, Zea mays
  Clone ID: MRT4577_57843C.1
gatgaagtccgtcacacgcgtgaaggaggccacttggaaatgcatcttcgtgcaggttcatctgcacagctctgtaccaacattcacacggcgagcgtcggacgctgttcaaaggcaattcaga

SEQ ID NO: 138555 - DNA, 681 bp, Zea mays
  unsure (1)..(681): unsure at all n locations
  Clone ID: MRT4577_57844C.1
ccggccgggaaacccgccaccggcctcgcgcaacagccgccgcgccttcccgacccgacccttgcacctgtcgtccccaccgtccgcgacaccggcctcacgcaatatccgccgcacatgccaggcccggcctcgcgcccgcggtatccgtgcccggctgttgtgggaggcgccgtcccatccgaatctccccctcccttagatataaaggttcatcctcctcagcagtcctcttggacgcgactcctccaggctccagcggcgcctcggtcgcgtgccccctggtctccagccatcgtgcgttcaaggcgcgggtcaccatggacatgaagcgccgcgtcgtccgcgccatgatcgcggggagcatgagagacggtgatggcgcacccgtgcatgtccaggataagaccgagtcggtacgtgacgcgacacggcgcgagcatcatcgtcttcctcttaccatcaaatatgatgattgtatgccgtcgtaatgcacgggcattgtactagtttcttatataccaccttactagcattctggtatgtttgatgtcagatgactgctattttttttatcttactggtgggtgcctcaggtggttgtgcatatcggttgtcatgctgcaagtctgcagctgcatttatgtcctaattcatatatgtcttcgncttcattgtggc

SEQ ID NO: 138556 - DNA, 208 bp, Zea mays
  unsure (1)..(208): unsure at all n locations
  Clone ID: MRT4577_57845C.1
ggcgggggcggaagcaaaacccggtgctgacgtacaatgtcgtgccggtccatggaccccgctgccgcggtggtgcacccgtacccgcacagtcacggccacggccggcggcgcgcgccgtcgaggtcgaggtcgaggtcgaggctcgcggacccgtcgtcccttgtcgtgcccggtccttggaacccgncgcccgccgtgcgcagca

SEQ ID NO: 138557 - DNA, 1059 bp, Zea mays
  Clone ID: MRT4577_57846C.1
ccggccgggaccggcctctcgcaacagccgccgcgccttcccgacccgacccttgcacctgtcgtccccaccgtccgcgacaccggcctcacgcaatatccgccgcacatgccaggcccggcctcgcgcccgcggtatccgtgcccggctgttgtgggaggcgccgtcccatccgaatctccccctcccttagatataaaggttcatcctcctcagcagtcctcttggacgcgactcctccaggctccagcggcgcctcggtcgcgtgccccctggtctccagccatcgtgcggttcgaaaagctgaacggaataggacgagtcgctgctttctcttcaaggaaacgtcacgtcaccaccacacacctcttcggctcttcctcttctcctgcgtatagcggcgggcctccgtcggcccccttccaccccgttttgccgccccacaggccacagcccaaaatcctcctcgtcgctggtgccctctccgcggcctcctccgccagccatggccgccgctgggcccgggctctactccgacatcgggaagaaggcaagaggtctcctgtacaaggactaccacactgaccggaagttcacgctcaccacttacgccgccaacggagctttcaaggcgcgtgtcaccatggacatgaagcaccgcgtcgtccgcgccatgatcgcgggtagcatgggagacggtgatggcgcacccgtgcatgtccaggataagaccgagtcggtacgtgacgcgacacggcgcgagcatcatcgtcttcctcttaccatcaaatatgatgattgtatgccgtcgtaatgcacgggcattgtactagtttcttatgtaccaccttactagcattctggtatgcttgatgtcagatgactgctaaatttttttatcttactggtgggtgcttcaggtggttgtgcatatcggttgtcatgctgcaagtctgcagctgcatttatgtcctaattcatatatgtcttcgtcttcattgtgacatttcaaaaaaaaaaacttttggatagcaaaaaaaaaaaaaaaaatttgcggcc

SEQ ID NO: 138558 - DNA, 1499 bp, Zea mays
  Clone ID: MRT4577_57847C.1
cccggttccgcctcgactcgccggccggaaaaaaacaccagaaaaaaaaaaaaaaaaaaaagcagcgggcctctgtcagctcacagctcagtcctcttcaaccccgtttcgccgcccctagcccaaatcccccacctactcgccgccggcgccgtctcagcctcatccttctccgctagccatggccgccgcgggtcccgggctctactccgagatcgggaagaaggccagagatctcctatataaggactaccacacggaccagaagttcacgctcaccacctacgccgccaacggagctgccattactgctgcaagcacgaggaaagatgaagctatctttaatgaaatccagagccagctgaagcacaacaatgtgactgtggatgtgaaagcaacttcagaatcaaatgtgataactacaatcacagttcatgagctgggcacaccaggcttgaaggcaattttatgtgttcctttcccgtaccagaaatctgcaaaggctgaactccagtatttgcaccaccatgctggtgttgctgcaagtgttggcctaaatgcaaaccctgttgttaacctttctggtgtattcggaactaaagctattgctgttggcgctgatgctgcatttgatacttcttctggggacttaaccaaatacaatgctggactgagctacacgacgcctgactttgttgctgcagcgactttgaacaacaaaggagacaacattgccgcttcctactaccactcggtgagtccaaccacagccgtcggaggagaactgagccacagcttctcgaccaacgggaacaccatcacctttgggacgcagcatgccctggaccctctgaccactgtgaaggcacgcttcaacaactacggcatggcaagtgcactgatccaacacgagtggaggcccaagtcactggtcaccatctccacggaggtggacaccaaggccatcgagaagagctctaaggttgggctctccctggtcctcaagccctgaggtcaccagcttctgcttttgggatgttaggtttatttttatttttatcagcagctgaagtccagtaaacaagcttggactaaacttgtcaactttggtgcccatcccataaactcaattcgttgtctgttaccatatcctaaactacctgagaggtttatgttacaatttacgtcgtgcttctgattctaaaaaaaaaaaaaaaaaaaaaaaagaatggctcaccccttggtttatttttatttttatcagcagctgaagtccagtaaacaagcttggactaaacttgtcaactttggtgcccatcccataaactcaattcgttgtctgttaccatatcctaaactacctgagaggtttatgttacaatttacgtcgtgcttctgattcttttcgctgtctaatattgggtgttgtttggctcaccccttaaatttggagaaacttcggtatggttcaccattacccagattttaactatttgatc

SEQ ID NO: 138559 - DNA, 1900 bp, Zea mays
  Clone ID: MRT4577_57848C.1
ccccgtttcgccgcccctagcccaaatcccccacctactcgccgccggcgccgtctcagcctcatccttctccgctagccatggccgccgcgggtcccgggctctactccgagatcgggaagaaggccagagatctcctatataaggactaccacacggaccagaagttcacgctcaccacctacgccgccaacggagctgtgagtttccactcgactctccggtatttgtttttgtgatgtcgccttgttactcttggccttgatttgacatgatgcataggtaggctttttttagtggcggtggagtttagatggctaaggactttgccggtggctcgattttttagttgtcaaggcaagatttgcttgtgcgtgtagttgggaacttgcggcagactttagctgtgctgcgtttgatattgatgctgcagttatatatatttttcgtcttgtttctacgtggatctttgtccaagtattaggcgtgatctggcagggcaggcggtgtcagcacccagcctgacagggagcacagggactcttccacggcagcggatacacctccgctgggagctccggtgttgggccggcgacggaagaagcccaatgccattactgctgcaagcacgaggaaagatgaagctatctttaatgaaatccagagccagctgaagcacaacaatgtgactgtggatgtgaaagcaacttcagaatcaaatgtgataactacaatcacagttcatgagctgggcacaccaggcttgaaggcaattttatgcgttcctttcccgtaccagaaatctgcaaaggctgaactccagtatttgcaccaccatgctggtgttgctgcaagtgttggcctaaatgcaaaccctgttgttaacctttctggtgtattcggaactaaagctattgctgttggcgctgatgctgcatttgatacttcttctggggacttaaccaaatacaatgctggactgagctacactacgcctgactttgttgctgcagcgactttgaacaacaaaggagacaacattgccgcttcctactaccactcggtgagtccaaccacagccgtcggaggagaactgagccacagcttctcgaccaacgggaacaccatcacctttgggacgcagcatgccctggaccctctgaccactgtgaaggcacgcttcaacaactacggcatggcaagtgcactgatccaacacgagtggaggcccaagtcattggtcaccatctccacggaggtggacaccaaggctatcgagaagagctctaaggttgggctctccctggtcctcaagccctgaggtcaccagcttctgcttttgggatgttataggtttatttttatttttatcagcagctgaagtccagtaaacaagcttggactaaacttgtcagctttggtgcccatcccacaaactcaattcgttgcctgttaccctatcctaaactacctgagaggtttatgttacaatttacgtggtgcttctgattcttttcgctgtctaatattgggtgttgtttggctcaccccttaaatttggagaaaaaaaaaaaaaaaaaaaaaaaaaaaccatttccacggaggtggacaccaaggctatcaaaaaaagctttaaggttgggctttccctggtcctcaagccctgaggtcaccagcttttgcttttgggatgtaaaaggtttatttttatttttatcagcagttgaagtccagtaaacaagcttggactaaacttgtcagctttggggcccatcccacaaactcaatttgttgcctgttacccaatcctaaacaacctgaaaggtttatgttacaatttacgtggggcttctgattcttttcgctggtcaaaaattgggggttgtttggctcacccctt

SEQ ID NO: 138560 - DNA, 358 bp, Zea mays
  Clone ID: MRT4577_57849C.1
acggttgacgtgtgtggaactagttacatctgtatacttatatcgtcatgtgttcaactgttagagccacttatctagcaatgttgaaaattggaaatagtgagtgatctgatcctcgtaagcatatcacacaaaatcaagatatggtacatgacgtacatccttgactggattattttttgatgccctatacagcgctaagtcttcttgctgcgagacaaaaagctatatcacgctcatacaacatggtggtacaagatataacatacgatcattgctcgttcaaatacaacccttagatccaatcctatttacaaacatacagatacgtttttccgactaatcttgcctacattga

SEQ ID NO: 138561 - DNA, 275 bp, Zea mays
  Clone ID: MRT4577_5784C.1
gggaacaaacccctccctttacagttactacccaaggggcacacccattggggaaccatgtttacccttggatataaaccgctcctttgcaaaaaaggaaaaacagatctggcatttgggtttctaaactctttttgccactgagtacttacgtgctttccacccaacgaaaagggtaaagggcttcccttaacaaacgggtcctggatgaagtccaaattcataattaatgaacatttttgccactcctgggcttgaaaaatgcaaacttttgc

SEQ ID NO: 138562 - DNA, 171 bp, Zea mays
  Clone ID: MRT4577_57850C.1
catgcatatttagaaattatttttcctcaaaacgcgctcgcaagcatacatgcattatcggggaccacacagggacccgctcaaacggtctatgtggtgacaagcataaacacggagttcccaaaatatcaggggcactcgtacagcttcccccaccccaccatgcaaggg

SEQ ID NO: 138563 - DNA, 123 bp, Zea mays
  Clone ID: MRT4577_57851C.1
tttattcgttcgggattgagagccagacgaagttggggatctaccggtggatcctctaaatgattccactctgtggtagagatatgtctagtgataagggctatggcgatgtaagtgtgtgac

SEQ ID NO: 138564 - DNA, 1228 bp, Zea mays
  Clone ID: MRT4577_57852C.1
atatattggcgggcctccgtcggcccccttccccccgttttgccgccccacaggccacagcccaaaatcctcctcgtcgctggtgccctctccgcggcctcctccgccagccatggccgccgctgggcccgggctctactccgacatcgggaagaaggcaagaggtctcctgtacaaggactaccacactgaccggaagttcacgctcaccacttacgccgccaacggagctttcaaggcgcgtgtcaccatggacatgaagcaccacgtcgtccgcgccatgatcgcggggagcatgggagacggtgatggcgcacccgtgcatgtccaggataagaccgagtcgggccagctggagcacaacaatgtgactgtggatgtgaaagcaacttcagaatcaaaagtgacaactacaatcacagttcacgagctagccacaccaggcctgaaggcatttttatgcattcctttcccgtacaagaaatctgcaaaggctgaactccagtacttgcaccaccatgctggtgttgccgcaagtgttggcctaaatgcaaaccctgtcgttaagatttctggtgtattcggaactaaaactgttgctgtggcgctgatgctgcattgatacttctctgggacttaacaaatacaatgctggactgagctacacgacgcctgactttggttctgcaaccgcttttaacaacaaaggagacaacattgccgcttcctactaccactcggtgagtccaaccacagccgtcggaggagaactgagccacagcttctcgaccaacgggaacaccatcacctttgggacgcagcatgccctggaccctctgaccactgtgaaggcacgcttcaacaactacggcatggcaagtgcactgatccaacacgagtggaggcccaagtcactggtcaccatctccacggaggtggacaccaaggccatcgagaagagctctaaggttgggctctccctggtcctcaagccctgaggtcaccagcttctgcttttgggatgttaggtttatttttatttttatcagcagctgaagttcagtaaacaagcttggactaaacttgtcaactttggtgcccatcccacaaactcaattcgttgcctgttaccctatcctaaactacctgagaggtttatgttacaatttacgtcgtgcttctgattctttaaaaaaaataaaattgggtgttgtttggctcccccctt

SEQ ID NO: 138565 - DNA, 270 bp, Zea mays
  Clone ID: MRT4577_57853C.1
acgggcactaacaaccaaaaaaagtttaaaattccaaaaaaggggatcatgcacactgcaagtcaaaaaacactcatggcaccacacctactttcataactggaacaacaacaagcttgctggtttcctgcaacaaaatgaccctctgtcaatctaaaaagcgtcaacaagtgccttaaccttactcttactcgcctaaacaactcggtcacgttgttaaacaaccctggctcctgctttttcgttaccttcctgtcctgccaccaccga

SEQ ID NO: 138566 - DNA, 368 bp, Zea mays
  unsure (1)..(368): unsure at all n locations
  Clone ID: MRT4577_57854C.1
agcagccgtgtcttgtgtacaggtgtgttttgctattgttgatcgatgaagctgtaggtggacatgttatgatgcccattatattattctgttgtcggccaaaaaaaaaaaaaaaaaaaaaaaaaaaaaaaaaaaaaaaaaaaaaaaaaaaaaaaaaaaaaaaaaaaaaaaaaaaaaaaaaaaaaaaaaaaaaaaaaaaaaaaaaaaaaaaaaaaaaaaaaaaaaaaaaaaaaaaaaaaaaaaaaanggggggggcctttttaaaggaccaaagttaacttccccgtctttcaaaaaaaaaaccttttttaaagtgcaacaaaaataaaattaacggccccggttttaaaaacgtaggaatgggaaaa

SEQ ID NO: 138567 - DNA, 190 bp, Zea mays
  Clone ID: MRT4577_57855C.1
attaatagagtatgggtatttggttgccttttcgttattcattacatgtaaaagaaaaaaaaataagagtcaaagtaaaaataaaacaattcgtcaatgtaaaacttccaaatcgtcatcaagcattcatcgatcggtagacattggggaaatcaaaaagggggaatcaagaaaaaaagataggccattc

SEQ ID NO: 138568 - DNA, 495 bp, Zea mays
  Clone ID: MRT4577_57856C.1
gtaatactcttgttttttactatcttcggattcggaaattccgaaatctaaaatcggtaaattccgattaaattcggtaaacgaagaaacggtcggtaaaaggttgtaccgatttcgataccgattccggtataaaattccgataaccgatttcgatttcgaaaacgatattcgaaaaaccgaaaaaaaccgaaaccgttttcaaccctatatatggtaatatggattggccaatgcgcaggccaaccaagcaaataaatggtagccagagcacagaagagaatcattaggcccccaagcttgtttccattattattccagcaatccagcttggtggcacaaaagagtgatatgattcttcgtttggggaattcctgaaatcttctccccctatatttccgtagattctttcgcaaaaaagccgatatatcgatagatcgatttgttcttcaattgtaaccgtagatttcaaggtggctaatgagtaatgagcct

SEQ ID NO: 138569 - DNA, 288 bp, Zea mays
  Clone ID: MRT4577_57857C.1
tcggctcgcgcacctccctcgctctcccacaccactggcaccaggccccggacacccgctctgctgcaggagaatggctactcatcacacgctgtggatgggactggccctgctgggggtgctgggcgacctgcaggcagcaccggaggcccaggtctccgtgcagcccaacttccagcaggacaagttcctggggcgctggttcagcgcgggcctcgcctccaactcgagctggctccgggagaagaaggcggcgttgtccatgtgcaagtctgtggtggcccctgc

SEQ ID NO: 138570 - DNA, 468 bp, Zea mays
  Clone ID: MRT4577_57858C.1
ggatttgtcttgttacttggtctgttttttttttttttttttttttttttttttttttttttttttttaaaaaaaaaaaaaaagggtttttggtttttggggggccaacccatcggcccgggttttttggttgccccatggtgtttttagccccccgtttttgcctgcgccatgaatgggtccacccatcggggatggaatcttttgttcctgtcaatgggggctttgagggcctccaccttggggccaaccaccctttttttttgtttgccgttttttgacaaaacaaacgtggggaggccctccccttggaactggtgggccccaaattttttaagcttggggatggcccccaagcaaaaaacgggctggttttttttagccctgggcatgtccctgaacgggtttttcatccccttgggggggttggtcccctccgccgggaacctgaaccccccccgggggtcc

SEQ ID NO: 138571 - DNA, 395 bp, Zea mays
  Clone ID: MRT4577_57859C.1
gcaacatacaaagtggaaactattagcatcaacatatcatcaatattgaccgggacggttaccatccatacggtccttgctctttctagcatgtagcagctaactgcgacaatactaactaaatgcttacaagcttctatagcttccattgtttccccataccttacataaatgatcgctagatcatttgaaaacctaattcttcatcgactatacgctccaacaagcaatctctaccatgcagcatatcttaatcactctagctgtttcaacaatgcgacagccgtatctcattgagcacatcattggtacgacaccatcaagccacagcataccgacaccacatcagctacctgtcactaaccaatgatgtctagcaaacctatctcactact

SEQ ID NO: 138572 - DNA, 265 bp, Zea mays
  unsure (1)..(265): unsure at all n locations
  Clone ID: MRT4577_5785C.1
ccggccgggacggccgcactgacacagccactggccgtgggacggagcgccccctcccgttccgcatggagtcacgcgcgttcctggctcggcgaccaccggaagccggcaaccgcgaccggtcccggctgctgttggtcagtacgtcattcgatgcccctgacaactgctttctcaagatttgagggaacaaaggcggggggggggtcanctgccctctttcccactgcanntgctttattgttgaaagtcgacacgcacggct

SEQ ID NO: 138573 - DNA, 388 bp, Zea mays
  Clone ID: MRT4577_57860C.1
gggaaaggggccaaatatttgggggcccaaaaacccaaaaacccagaaaaaaacttggccccccccacggggggaaaaaagctaaatttggggcccattttagggagggggtcttccaaaagggggggcgggaagggaaaaaaaaggggaaaaaaaggccaaactcataatgaacctggggacccaaagaaccccccatccaaatttatttttgggataaaaaagcggaaaccccccttgaaaaggaggggggaaaaaccccccctggggtttaaaaatggggggggacagggtaaaaaccccgttgctttagccccacttgtggtcgacccccgagaaaaaattaaaaaagggggaattaaaagggaaccccgtcttgggggaaaaa

SEQ ID NO: 138574 - DNA, 666 bp, Zea mays
  Clone ID: MRT4577_57861C.1
actcatccctggcctaggccttcctctctctagtctctcatcgccacctcgctccagcagcagcttctatctcgatctagggagagatcaagtgaggagagggtgcagccatggcggacgcggtggatgctcgccgggtctgcgggatgccggagaaggcgcagctccacgtggcgatgctggcgctgcagttcggctacgccggcttccacgtcgtgtcccgcctcgcgctcaacatggggatcagcaagctcgtcttccccgtctaccgcaacatcatcgcgctcttcctcctcgtccccttcgcctacttcctcgagaagaaggaccgccccaggctcaccctcggcctcgccgtccacttcttcttcctcgccctctgcggcatcaccgccaaccagggcttctacctcctcggcctcgacaacacctcccccaccttcgcctccgccatccagaactccgttccggccatcaccttcggcatggccgccgcgctccgcatcgagaaggtgcgcctcgaccgccgcgacggcgtcgccaaggtgctgggcacgctcgcgtgcgtcgcaggcgcgtccgtcatcacgctctaccaaggccccaccatcttcgcccctaccggcgacgacaagccgtcgttgcagcaggaggtgccgtttctgg

SEQ ID NO: 138575 - DNA, 191 bp, Zea mays
  Clone ID: MRT4577_57863C.1
aataaaagtggcaagaaacaggcgttcgtcgccggagggaaaaactactgctcatcttctttgcatctgtgagtgttgttgggtgaaggccggttccaacagtagaggcgtgtctccacgagcccgttctccctgacaatctccgcccacaccgcctccttcccggccatggcctccgacaccttgaactg

SEQ ID NO: 138576 - DNA, 438 bp, Zea mays
  Clone ID: MRT4577_57864C.1
aaagagaggaaaacctttttttttttttaaaggggaaactttccttatatggggccaagggggggagatcatttttaaaaaattttttttaaccttaaaaaagggggaaaaaaaaggggggaaaccccacccaggggggggggggctaaaacttccattaccaaaagcacttagggcggtagagaataaaaggggtgtttattaagggggaggggcaacctttacctatgggaaaaagcttaaggatctgaaaatggcgttgacccggtcttggaataaattggatccccgacgatccttttttgagggttttccaggctagaaaaacggggaaaaaaaactgggtgggtcctaaaaaactgggtgggttggggagaaccccacttgttttaaaggggccccgggaggaaaaagcttaacgcctgtttttaagggggg

SEQ ID NO: 138577 - DNA, 312 bp, Zea mays
  Clone ID: MRT4577_57866C.1
acggagtgaaatgtcaaacaaagcattcattaacaaatttttaattttcatagcaaaacggaaatatgctgttacgctttatgaaaaagggaacgggttggggtttaaacccccgcaaaaatcatcggtcccaaccattattgaggggccccccttgctcgatccgtataccaaccgccattccccgaccgcttccccccaacgttaactaactttacgggggggcaaaaaattctgaactcaatgccccacaaaaaccctgaaaaaaaaaaaatcttttgagccccttatattaagaaaacaaaaccggcc

SEQ ID NO: 138578 - DNA, 616 bp, Zea mays
  Clone ID: MRT4577_57867C.1
gcggccgatgccaacccacaatggcatcgaacggcagaacccgaccgagcgcggcagctcaaacctccgatccctgctgcgagcaatgatggcagcgccatggccagtgctgcaggcggtgctcgtcaagctcaggtggcgtctgctgcgccgatcactgagccagcgctcctctgagcgcccaataactaccgttctcgctctgatgatgctaaagacgaatgcgattatcaaacagtctcaccaaaaaacttacctaaatcctgctattgaggaaggtgtggtgagcaacctttatgtgttcaagggaggattctgaccaagcttgttgaagctgccattgtttttattggcttaaagctccaatcataagacatatcatgaagataagctcggagatccacctttagcatatacattgatagctctccttcacaaaatcagaggttttcatgatattgcactatgttctcacataaaacaacgagaaactaaacgagtcattgctatcaggcttccctgagaacatgcaaagtggttttggaagaaaccgtatcgcctacacaaacacgtgcgccgatagtgaccaatatctgaacacgaatcacaacatgta

SEQ ID NO: 138579 - DNA, 600 bp, Zea mays
  unsure (1)..(600): unsure at all n locations
  Clone ID: MRT4577_57868C.1
ccccacccaccccagccgccagcccacaacccctgctccctcctccctgttcccttctgcagatctcgcctccagtgcgtggcgccgccacgtgagcccaggcaccgagctcctggccggccacggcgcatgcagccgcgcagatcgttgcacaagcgctcagcgtctgctacatggtggtcggccgtctccgctcctccaccgtggagctctgggccaaggtggtgttctcccagatccaagcgctagacccggaaggacctcggcctcctcctggcctcgccgacctccgtcgcggccgccgaccacgcgccgttcctgcagctcccacgccaaagcttcgagcgcgccgacgccccatcgccggtccgggcgcgcctctgggatgttcgcgttcggcctcgggtggcccaacggcgccgatggtttcgggtggaagccctgcctctactacgcgcggccgccgagatcatcgccaaggcgagcttttacttgcgggctcgggctggcacgggccactaaatggaccgggctattcgggncagcccgggcacggncgggcctacaccgtgccgtgctccggnaagaggnttgagcccg

SEQ ID NO: 138580 - DNA, 552 bp, Zea mays
  Clone ID: MRT4577_57869C.1
ggcccgccggcgacgtacatgaggccatccggcgagcatgttactggacttagcatgatccctcctacaactatatgctatattgcagcagccatccctagtgcatctagtagtctcctgagaatttgcggcacaactgctaccacaccagttgctaccaacaatcaatgcaagaagctgcagggaaccttgttgcttacttcaagcacacatcagatacttccattctgtcaagtagctgaagtgaaccgtgctttctacttgcacgcacaacagatactaccatttaaccaacttcgtcggaagcacttatgccttattactggcacaaccgcttctgccattccatgtgccagctggggcaaacattgctgctttcttgagacatcaacaattgatgccattttactcacaaggtgagggaaacaataatgccttcttgcctcagccacaattgctaccattctaaccacagaatgcagcaaacattggtgacttcttacagcaacaacgattgctgacatttatccaacatgctttgacgaagcctac

SEQ ID NO: 138581 - DNA, 313 bp, Zea mays
  Clone ID: MRT4577_5786C.1
agactcattagttacagcggcgcgtcccggctaattacggagccggtgctctgcaggacgtaccagtctctacctataagtgagtatgcattaaacgcttgtcttaatacatggtcatcagctgcttttcagagatgatacgaggagtctcctgtcacgcaaaacaattcgatttctgccacaagattgaaacatgtagaaaagtttagaatgcgcttaggcggattgacaggaatgcctcgcagatcaaagttctccccttacatgctgagctggatcaggcccagcgcatcgcatacatcaaggagtttct

SEQ ID NO: 138582 - DNA, 351 bp, Zea mays
  unsure (1)..(351): unsure at all n locations
  Clone ID: MRT4577_57870C.1
acccaaacgtccaganataaaatgtaaaaaaaaaaaaaacaaacaaaaaaaaaagataaaaaaaataaaaaaaataagaatgaaatgaaatcaaaataacagcaataagctaaaatatgtaaatagcttccatcttgctacagtacttcatggaatgctggtgaagttcttgtgcctatggtttgtttcggtgcatgattagaatcttccttcttggtcaatctggaggatactgaacattattatcctgccacatgagcgtgtgtacttgggtgtcgagacctcgatgcttagtcacagtgatatgtaagttctaagttcgggttggttattgcaaaaatgggatgccac

SEQ ID NO: 138583 - DNA, 356 bp, Zea mays
  Clone ID: MRT4577_57871C.1
aacataatcaattcatattcctccaaacggaggcaaatcagactatgtggatgtgtcaaactctaaaaactacactcaataccagaaccaaactaaaatctcccctaaaaaccgagcacgaaaatcactataggtacaatgcggactagaaaagagggtgcagtaagaacatcacaacaccaaccatgatcaacgcctctcaaaatcccataatggatcaaaaccaccaataatcccctacctcaagaaaagagcagaacacgatcaacaaccccattgcctcccaccgtttaccatcatctaatgagcgcttaaccgtatgcggggtccgccaaccaaacgccaccaacatctaa

SEQ ID NO: 138584 - DNA, 603 bp, Zea mays
  Clone ID: MRT4577_57872C.1
gcacattgctcttagatggtggcttcaaacaggcacttggcgcaacaacagaacccatccttggacaccagtgatcaattagtcatcagttcatagatagcaatgaagcgagcctgtgaaccacacacgtacaaggaccatggggcctttgatatagacgtgtttatataggtagtatgtttatgtactagcctactaacgtacacaattgcttgttgattttgattaataattataccatagggaaaacccttaaatttaatgatcacatatgactaactatataaagctatcggaagcattatacaaccattggttgcaaaacgcatattaatatgaacgtgggggattcaaaattgaacagcttgggtaacactatagaacattctattacatgttagctaacatgggatgttgcaaattatttacagtgtatggataaaaccaataactacatttattttgtgaatgacgagacaaacattacttctaaatcatctgactccggcttaaaataacaggaaactgcgagtcaccgctacaaaaagtgacaatctcctaacgtatcatgcttgtgatacagagaatcaccatacctgaaat

SEQ ID NO: 138585 - DNA, 443 bp, Zea mays
  unsure (1)..(443): unsure at all n locations
  Clone ID: MRT4577_57873C.1
ggtgcgcgtgcgcatccgcaactacgatcctgcgaagctggacgcattctggacgtcgtaccggcagaacgtgacgtacaacctcacgcaccggaactgctcgagcaccgtgtcgaacgcgctcgaagccgcactcgacggcgcggtgtggcgcctgaagggcgcgcgcgccggatggggcgcgttcgtgcgcttgttggtcacgcccgagctgtgggtcgccgcgcagatccgcaagcgcgcggtgacgatggcatggacgcccggtctcacgctcgactatgcgcgtgcgctcagcatgctcgccgatccgcggccgttcgcgtggtggaaggtcgcgcgctcggcggtgaaggcgatcatggcgtcgcgccgcgcgtggcgcgagcaggacagtgcggcgctgtcgtccggcggatcggaagccgcantcgatgaagtga

SEQ ID NO: 138586 - DNA, 240 bp, Zea mays
  Clone ID: MRT4577_57874C.1
aagtaaaaattggaactttttggggcaggaaaaaaaagggaccggggcaggggccccccaccagggaacaccgtttccacaaggcccaaagcaagggaggctttttaaccagacgcatggcctaatggcccaaaacaagaaacaactggcccttagcaaccgaatacaagggtccaggcccgccctttactgaaataaagcccgaaaatttactgggggcgagaccatccccaccgggaa

SEQ ID NO: 138587 - DNA, 349 bp, Zea mays
  Clone ID: MRT4577_57875C.1
gacactcgactatggtgcccttctacgggcgtgagcccactacatcaaccctatagagatgcatcagacatatctcgctgacatcttacctttatcacccttgttcctccaacaatcatcaagcctattacagcagtaacctttggagcgggggggggagcaaaacatcagagcacaacctcgaccacaacctgccctaggacaactttgtgactactcctaccaacagcggggtcttccattcgaccccctaggtgcactgaactccgcttggtatttgcaataacaacaactaccattgagctctctatccggtgactaggaaaaaccatttcttccattcaaccaa

SEQ ID NO: 138588 - DNA, 869 bp, Zea mays
  Clone ID: MRT4577_57876C.1
gcacgaggtaattccgcacgaggcccccacccacactccacccatcggctgccatggcgaccagggcggcggcggcagccacgctcacggcggctacgtcctctcttcttaggcgctctacctcgctgcggccgcagggactccgggtcccccaccgcgtgcctccccaaaggtttgtgcgccatattgcttcatcatcaaacgaggaagctgctgccagagcagccgccgccactgctgacgccggaggaccaaccattttcgacaagatcattgcgaaggaaatcccttcgagcatcgtatatgaagatgaaaatgtgctggcatttagagatattaatccacaagcccctgtgcacgttctagtcatcccaaaagcgagagatgggctaaccggattagacaaggctgagccaaggcatacagaaatcctgggccggcttctttacgcagcgaaagtagtggcagagaaggaaggtgtagcgagtgggtaccgtgttgtcatcaacaatggagctgaaggatgccaatctgtctatcatctgcacctgcatgtacttggtggaaggcagatgaagtggccccctggttaaaattactaagggtgacatgtttgatttcttgtacccctctctctgtgagttgagtttgctgcttgtatgactgttgttgcaaagggagaaagagtggttggtgtactagtatctgcccctgtgatgatggcccctttgagcactcatctctggaattactgagcttatgcagcattttgctaagggaaaaaaaaacttgtgcagtagattctctgagatattaaacaggttttagaattatcatggcaaacaattagccgtgcacaaaactagggc

SEQ ID NO: 138589 - DNA, 739 bp, Zea mays
  Clone ID: MRT4577_57877C.1
aatccgcagtcactcctttaggtctctcgggtctctagtcgccatccactccacggttccgccgccgtcaatgctgccatcgatctctacaccaactcatccctccacccgcagtcccaggagagggtggttgtgctagctccagtgttgtagacctggacgtcagggactccagcctcaccttcttgtgcccgtcctcgagcctccacgagatactggggaagagattagagccggccctaggtgcgcatgctgctgcctagattcatcgctcggccgctccacgctcgtatcagccgccagcgccctgatcctccctctccctgactccctcctcacgttctccgcacggctagatctacacctgttcattcctctctagtccctagcgagagattcagtctcgcttggcaaccggcgccgccgaagccgacaagggaggcacgtgcgcccagcgaacaccaagctcaagtccgcgaattctgagctcttactccatggcgccctcgtctgcggaggctgactcggcggtgtcctccagcggccgtctcctcgtgctctacgcgtcacaaactgggaacgccatggacgccgcagagcgtgtgggccgcgaggcagaacgtggcggctgcccgttccgtcgacgtgctctccatggacagcttcgatcccagtcgcttgccgagcggagcgggttcgtgggtatttgtcgtgtcacccacggggcagggcgaccccc

SEQ ID NO: 138590 - DNA, 401 bp, Zea mays
  Clone ID: MRT4577_57878C.1
gatgactggctccccctgcgaagggacgcgtgggaagggggattgtgaggctaccgggggcgctcccaccggttaaccagtgtcgagatccgcactgcaacagagctttcggtgaccctactcgctactcccactcgcactcgccggattgatgaagcctctgcatgcattgaatgcggagtctacaaggggatttcagctggcacttatgcattcaagcaaaggctccaattcgtgataccggtgcgtctcaataagcagggtccaacagaacctttcggtaaaaaaaacagctctccttttcaggcggcagaaatgccttactgcacagtgcggcgtagcccaacgatggcaacctaatgccttaaaaaaaaacatacgtgcatattgaaaccactgat

SEQ ID NO: 138591 - DNA, 1279 bp, Zea mays
  Clone ID: MRT4577_57879C.1
acggttttgccgccgtcgatgctgccatcgatctctacaccaactcatccctccacccgcagtcccaggagagggtggttgtgctagctccagtgttgtagacctggacgtcagggactccagcctcaccttcttgtgcccgtcctcgagcctccacgagatactggggaagagattagagccggccctaggtgcgcatgctgctgcctagattcatcgctcggccgctccacgctcgtatcagccgccagcgccctgatcctccctctccctgactccctcctcacgttctccgcacggctagatctacacctgttcattcctctccagtccctagcgagagattcagtctcgcttggcaaccggcgccgccgaagccgacaagggaggcacgtgcgcccagcgaacaccaagctcaaggtgggcgatcgtactgacgaaccgctgcagcgggggcaggagcttgcgtggcctgggcggaatgagccgattgaggcgcctattggctgtgcttgttggccgcccctaggttacctgcagtccgcgaattctgagctcttactccatggcgccctcgtctgcggaggctgactcggcggtgtcctccagcggccgtctcctcgtgctctacgcgtcacaaactgggaacgccatggacgccgcagagcgtgtgggccgcgaggcagaacgtggcggctgcccggccgtcgacgtgctctccatggacagcttcgatcccagtcgcttgccgagcgagcggttcgtggtatttgtcgtgtccaccacggggcagggcgaccccccagattccatgaaggggttttggagatatatgcttcggaaggatctggatagacaatggcttgaggggatccatcatgcagtgtttggactcggggattcaggctaccagaagtacaattttgctgcaaagaagcttgatagaaggcttttacatcttggtgcagaacctgttctagagataggtcttggagatgaccaacacccttcaggatatgaaggggctttagatccttggttgctatctatgtggaagtctctgaatgaaattaatccgtcactcttacctagagtgtctgatatcaatgatcctaatttgagttttttgggggatccaaaagttcatgtcatttattactcttccaatgaagttccacaagatcctatacttttggactccaataaaataataagtagcgcaagatcaatgtcccctgcctactgttccatgctgatggatagccaccttacatgcttc

SEQ ID NO: 138592 - DNA, 588 bp, Zea mays
  unsure (1)..(588): unsure at all n locations
  Clone ID: MRT4577_5787C.1
gattagacatacaagcctgagcaattatgttgacgctggatagactataaaacaatgtgggtaaaggctggaaagaaacaacaagtagtaatagtaacagaccgactctgacgatatcaatagcacatttccaacagttgtacgccgacggaacaatcaaaagggccaagcaaacgagtgacacggtataaagagtggtatgtagatagacaaagaacacaaggctggtcgtaaacatctcgcggcaagaatcagcatgcacaaccgtcctttggcgtagcagccgcacggtcacccaggttgactcgagaagaatcatcgcctgaacgaccaccaccaagattggtttgaccgcctccaggtccagacttggcacctttcaagctcttctcggggatagcgttggcgatagcagtaaaaacttctgcgacattgtggcccgtcttggcacttgtctcgaaaaagagaagaccttcctcctcagcataagtgctngcttcccgagtagagatttttcgcgcatccgtcgtcgtggagatatcattgttctcaatctcctcgtcgccgtcagcatcggggcccggtgcg

SEQ ID NO: 138593 - DNA, 860 bp, Zea mays
  Clone ID: MRT4577_57881C.1
catggtcgctgcagccggccggggacacgaaaatagccaaaggttattccccaagcacaaacctctgagtctctgacacaccgccgccgcgccgcatccgctacaggctaccctcaccaccgcgcacaccgaagtagtagcaggcggtgccgcccccaatggcggcagactggttgtgggcgcgtagggtgtgggagaagtgggccgcgaagcacatcggcacctccgggaagccggtccaggctgcgctcctgctcaactacgacccctccgggccatctcgcctccttcccgtcgtagcagagcaagagggaacacaactttcagctcttgatatgcaaccactcctggactttgtcaagaggggtaatctgcagactgaattgttctctgttgggctgaaccaacatttggtcacctcaatccatgaaaactggttttgcgcccgctgcattaacagcacaaaaccagaaggtgaaggagtaatagttatgcagattggagcttgcttattagtcactatgtatgctggttctcttgctgcagcttcgcaagcaatggtggctgctgatcagtttgcaatacagtttaaccggaggagtcactaatttccagtatagtttcatgagtgatgttgatcgcaatttgttagtgtttgggatgatagtgctggaatgccgtagatgaccttatgtaacttgtaatgttacgatattctcggccgtagttatgctaatataatagcgaatattgactaatactgatgttcctagtgtgaggttgaagaagctcatgttgaatttgtggaacgtttcccaagcatccaaaagcttaaaagggacattagtttttcatcattt

SEQ ID NO: 138594 - DNA, 367 bp, Zea mays
  Clone ID: MRT4577_57882C.1
cttaccaaacaactttttattattataatcaaaattgggctcattaatccgaaaccaaaaaggggaccaaaaaaaaaacaaggcccccccattaaacaagggaaaaaggggaaaagggaaaggggggggccaaaaaaaaaaggttgggccttttgggcccatattttacttctacacccccgcaagggggcagaacccctctggacaagcagatattaacttccccacaccgcattccgggattcgctcatcctcgcctttttggggttcctcccccccctcttttccgcccggcgcctgctcctgcaatgccattgccaccacctccgacacagcaccaggcgagctacaggacctccaggcctat

SEQ ID NO: 138595 - DNA, 256 bp, Zea mays
  Clone ID: MRT4577_57883C.1
aggccctctggaaaacaggggaaccaaccggcttttttttttaaagaaaaaggggcggccaatttccaccttatttggaaccaggccagggttgcccaaaaacgcttaaacagggaaaaaaaacgggaggggccccatttttttggaaaccaagatcccataatttctattcacggctaacaatgggaattggggggaaacaaatcgaattggcggggttggttttccggccgggggttttatttttttttttttt

SEQ ID NO: 138596 - DNA, 505 bp, Zea mays
  Clone ID: MRT4577_57884C.1
cgcgtgccttctgcgcctccgtttcggcctcggtgccttgcgagtcaatctctcctccgaccatgctgaaagacaacgcccacatccacattgtgctgattggccatgtggagtctggacaagtctaccaccacaggacaccttatctacaactattgaaagaattgacaagcgcgggatctacacggttgagaaggaagctgctgacatgaataagcgccccttcaagtacgcgtgcccgctcgactagttcgagggtgcgcgtgagagatgcatgcccattgatattgctctgtgcaagtctgacatcactagttactactgcacggacattgagcccctgccaccgagagttcatcaagaagcatgatcactggctaccctcccaggtctgactgtgtgtgaccttatcattgactccaccactgtgggctcttgggctgctatctccaatgatggtcccacccatggacatgctctccttgcgttcacccttgaaatgaag

SEQ ID NO: 138597 - DNA, 204 bp, Zea mays
  unsure (1)..(204): unsure at all n locations
  Clone ID: MRT4577_57885C.1
gattcgggcctctcgcttttgcttcgtactcaaatagatatatcgggcggggcatgcgccgctacttgggcgggggctggatccacgggtcgccgaggacgnagggggggccgacgaagggcttggcctgcgcctcggggaggcccagcgcccaccccaccctcttcttcttcttggggtcagcgccggggccaaagctcgggc

SEQ ID NO: 138598 - DNA, 362 bp, Zea mays
  Clone ID: MRT4577_57886C.1
aagaaggcttttccaaatttttttttctttttgggggcaacttaacaaggggaaaaaccccgagaagcagaaaagcctctttttcccccccccaaaaaagaaacggagggctaaaaatcccaccacaaaaacctccctttgggttcccaaaaagaaagggggcccctcttttttcccccaagcaggaaattgggccaaaaagccccaacaagccctcaacacaaggtttaaaaaaaaaaaaggggtaattttttggaggggagaaaactaccccccaaccttattgtgcaacttgcggttattaaaaaacaccaggggggcaaaagccagtttgtgaaaaaacccgaaccgattcctccttt

SEQ ID NO: 138599 - DNA, 456 bp, Zea mays
  Clone ID: MRT4577_57887C.1
ctttacttcttttcttttttcttcttttgtttttttcttcttttttcttttcttcttttgttttattactctttttttttcttttttttgtctcaaaggcgttcctttcttgttttaaaaaaagtgccttctttttttggggaagcccccaacctgaaacaaaaaactcttttatcggaccccacccccaaaaaaaagctaaaaagggccccccccttggggggttcggtggaaaaaaggtgggggggttgtaaaaaaacggggggcgaaaggcccacattgttccacttgcaaaaaggggccccctcttacccccaccaccctggaaaaccgaaacaactggggtcgtgtcaaaaaaggaaccgggcccccacccactaggccggaaaatggggggacatgtccccccccaaaataagccagaaaacccaaacccccactgggggaaaaggaaaa

SEQ ID NO: 138600 - DNA, 820 bp, Zea mays
  unsure (1)..(820): unsure at all n locations
  Clone ID: MRT4577_57888C.1
gcccgggcttctatgactaagagacaagctgtggaggcactagacaatagcatgcgcgatataatgggtcggcctggattgccattcggtggtaaaaccattgtcttcggtgggggtttcagacaagtcttgcctgttgttcgtaaaggttcaagggctcaagtagtcgcttcttctctacggatgtcttacctatgggagtccatgtcccacttaaagcttgttagcaatatgagggcaaaaaacgacccttggtttgcagagtttttgctacgcataggtggtggaactgaggtcacgaatagagatggtgacatccgtcttcctggcgaggtatgtgtgccttatagtgggagtgacagtgatcttgacaatctaatagactacgtgttcccaaatctcaaaaaaatgtatatcagattccacctacattacttcacgagtgatactatcaacgcgaaacgattgggtggatatgataaatgttaagatgatcgatcgttttcaaggtgcacatacggtgtaccatagtttcgatagcgccatggatgatccccataactattacccacctgagttcctaaacacactaacgcctaatgggctgcccccgcatgttttgaagctcaagattggatgccctgttatattgcttcggaatatagaccctgcgaatggactntgcaacggtaccaggctggtggttcgtggtttccaaagaaatagcattgacgcagaaattgtactgggtcagcatgctggaaaacggattttcctgccacgtataccctcttgtccctctgatgatgagatgttccct

SEQ ID NO: 138601 - DNA, 383 bp, Zea mays
  Clone ID: MRT4577_57889C.1
gtggttgggtttttttttttttttgggcccgggcaaggcatggaaggacattctgggctggggttagaaccctaaacatgtgcccagggtggcccggggttcaacattgttccccccttgtccaacatgacagcccttttggtaaaagtgctttataaagtccctaaaaaaacaaattggccgggggcatcggggtttgattgtttaaaaacccaaggtttttttacgggcgcaccccaggggggggtttgtttgcagacgtcccggagcccagctgattggggccccccgcgtgttcaacccgtttttgggaataaacaggctcagccggggaagaaaatttttcggtttggtctaccaaattttcgtggggcttggggggt

SEQ ID NO: 138602 - DNA, 422 bp, Zea mays
  Clone ID: MRT4577_5788C.1
cggcggttttggcgttttcgagagctcaacccaaggcgggcctccgctccgggcacccgacgttccacgcaaccatgtcgaggaggaagaccagagagcccaaggaggagaacgtcacccttggacccacgtgagcctgagggtcattctgcatgatgatgagcccacatctttgcatccttcaatgacgccttcattcatatcactgattaggctgggagggaaactctgggacggatcaccggtggcatgaaggcgaaggctgaccgagacgaggcgtcgccttacgccggtatgcccgctgctcaagaagccgcacagagctgcaaggagctaggcactactgcactgcgcattaaggcgtcgcgccaccggaggcaacaagacccagaccccgggacctggtgcccaggctgccctca

SEQ ID NO: 138603 - DNA, 603 bp, Zea mays
  Clone ID: MRT4577_57890C.1
cattgggtacctcgaggccggccggggaagttctgcggcggcgtaggtagcggcggtctcaaccccaggcgagctcggctccggtcacccgtcgatccacgcaaccatgtcgaggaggaagaccagggagcccaaggaggagaacgttacccttggacccactgtccgtgaaggagagtttgtctttggtgttgctcacatctttgcatccttcaatgacaccttcattcatgtcactgatttgtctgggagggaaactttggttcggatcactggtggcatgaaggttaaggctgatcgtgatgagtcgtctccttatgctgctatgcttgctgctcaagatgttgcacagcgttgcaagaggatgttaccccggttcccactgacagcactcgcagaaagggtggtaggaggggaaggaggctgtaggcgtgtatccttgctatttgccatcactttgcactggcctctgggtagcgttgctgtttattagcttgccaaaaggagttttaattttgctcattttgctctatgtcgaggatcatttactgttagccgaatctatgatgtgcattgataaaaaaaaaaaaaaaaaaaaagaac

SEQ ID NO: 138604 - DNA, 203 bp, Zea mays
  Clone ID: MRT4577_57891C.1
cgagtttcttgaaggtatacaattctacccattgttgaagatatcccacgggcagaattgtataccttcaagaaactcccgggttagaacttcagaccaggagtttcttgaaggtaatacaattctacccgtgggcgttcttcgataatgggcttttcgccctcatttatgcttaccattcaccctggttaatgtcttgaatc

SEQ ID NO: 138605 - DNA, 485 bp, Zea mays
  Clone ID: MRT4577_57892C.1
gtcctcaccatcttgcccgcgccctggacttgcacactaccatcgcaagctagctcggtgggggcggaaaacccgattggctgccattattttggctagccaattgcctctgctcgggcactccagcgaatcgcttgagttggggactggtcactactacttctaccgacggggggctgcaaccggtcgacgcatgagacatggcagcgtcaccgcccgaggggccctccgctcactccgcctgattacggaccggagcactgctcaaggccattatcggaaagggaattctgcagctgcgcaggcagcatttctaggcaaacgttctctgaaaacaagcagtatgcttcaggagacaataccctacagcactgggaccattcacgagctcctgagaatttacagaacttaaaggcgaggttctgggctcactaccatggacaaccttcggatattcccgtgacggaccctgatatgggcatcca

SEQ ID NO: 138606 - DNA, 827 bp, Zea mays
  Clone ID: MRT4577_57893C.1
cggcctagtatataaatgagcaccacgcgtctgtcgtccttctgaagtttcggcggcggcgtaggtagcggcggtctcaaccccaggcgagctcggctccggtcacccgtcgatccacgcaaccatgtcgaggaggaagaccagggagcccaaggaggagaacgttacccttggacccactgtccgtgaaggagagtttgtctttggtgttgctcacatctttgcatccttcaatgacaccttcattcatgtcactgatttgtctgggagggaaactttggttcggatcactggtggcatgaaggttaaggctgatcgtgatgagtcgtctccttatgctgctatgcttgctgctcaagatgttgcacagcgttgcaaggagctcggtatcaccgcgctgcacattaagcttcgtgcaactggaggcaacaagaccaagacccctggacctggtgctcagtctgctctcagggctcttgctcgttctgggatgaaaattggacgcattgaggatgttaccccggttcccactgacagcactcgcagaaagggtggtaggaggggaaggaggctgtaggcgtgtatccttgctatttgccatcactttgcactggcctctgggtagcgttgctgtttattagcttgccaaaaggagttttaattttgctcattttgctctatgtcgaggatcatttactgttagccgaatctatgatgtgcattgataatgttttggttgaggaattgacaattatgctagttttgctgtcccgcggatctgagcatgctttcgaaaggggggggcccggtacccaattcgccttaag

SEQ ID NO: 138607 - DNA, 911 bp, Zea mays
  Clone ID: MRT4577_57894C.1
gtgcggcgctcgaggcggccggttctccaaccctagcgagctgcggcctagtatataaatgagcaccacgcgtctgtcgtccttctgaagtttcggcggcggcgtaggtagcggcggtgtgcttgtgatctcaatctcaaccccaggcgagctcggctccggtcacccgtcgatccacgcaaccatgtcgaggaggaagaccagggagcccaaggaggagaacgttacccttggacccactgtccgtgaaggagagtttgtctttggtgttgctcacatctttgcatccttcaatgacaccttcattcatgtcactgatttgtctgggagggaaactttggttcggatcactggtggcatgaaggttaaggctgatcgtgatgagtcgtctccttatgctgctatgcttgctgcccaagatgttgcacagcgttgcaaggagctcggtatcacagcgctgcacattaagcttcgtgccactggaggcaacaagaccaagacccctggacctggtgctcagtctgctctcagggctcttgctcgttctgggatgaaaattggacgcattgaggatgttaccccggttcccactgacagcactcgcagaaagggtggtaggaggggaaggaggctgtaggcgtgtatccttgctatttgccatcactttgcactggtctctgagtagttctgctatttattagcttgccaaaaggagctttaattttgctcatttcgctctatgtcgaggatcatttattgttagccgaatctatgatgtgcattgataatgttttggttatggaattgacaattatgcttaaaaatgcattttcactcgataaaaaaaaaaaaaaaaaaaaaaaaagggcggcgctcgcgatctagaactagtcactagttctagatcgcga

SEQ ID NO: 138608 - DNA, 217 bp, Zea mays
  Clone ID: MRT4577_57895C.1
tttacacgtacgcgcttccaccgacataggagcacatatagaactattacctggcccaatcagactgacgcttgtactgtgaaccgctcgaaaatatggaacatggcgggtgtaaggaaagcgtatctcgggccatgagactgaggagtattggaaggtgaagaacaacagatatcatgagccagatacctatgctagtggacatgaacgtaggtga

SEQ ID NO: 138609 - DNA, 252 bp, Zea mays
  unsure (1)..(252): unsure at all n locations
  Clone ID: MRT4577_57896C.1
tttccttcagccatggntaaggagaagactncacatnaacaatngtggtcantgtgccatgtcnacgctggngagtcgaccaccactggccaccngatctacaagcttggatgtattgacaagcgagtgattgagatgttcggnaaggaggctgccgagattaacaagcggtcattcaagtatgcgtgggtgcttgacaagctcaaggctgancgtgagagnanggtattaccattnanattgcncngtgga

SEQ ID NO: 138610 - DNA, 976 bp, Zea mays
  unsure (1)..(976): unsure at all n locations
  Clone ID: MRT4577_57897C.1
cattgggtacctcgaggccggccgggccggcgccgttactttgaagaaattagagtgctcaaagcaagccatcgctctggatacattagcatgggataacatcaaaaaaaaaaaaaaaaaaaaaaaaaaaaaaaaaaaaaaaaaaaaaaaaaaaaaaaactgaagtttcggcggcggcgtaggtagcggcggtctcaaccccaggggagctcggttccggtcacccgtcgatccacgcaaccatgtcgaggaggaagaccagggagcccaaggaggagaacgttacccttggacccactgtccgtgaaggagagtttgtctttggtgttgctcacatctttgcatccttcaatgacaccttcattcatgtcactgatttgtctgggagggaaactttggttcggatcactggtggcatgaaggttaaggctgatcgtgatgagtcgtctccttatgctgctatgcttgctgctcaagatgttgcacagcgttgcaaggagctcggtatcaccgcgctgcacattaagcttcgtgcaactggaggcaacaagaccaagacccctggacctggtgctcagtctgctctcagggctcttgctcgttctgggatgaaaattggacgcattgaggatgttaccccggttcccactgacagcactctcgtttgtgaataccttgtggatccgacagtcaattttgtgccgtaaattaattgttaatttgctgcttcgagtnaaaaaaaaaaaaaaaaaaaaaaaaaaaaaaaaaaaaaaaaaaaaaaaaaaaaaaaaaaaaaaaaaaaaaaaaaaaaaaaaaaaaaaaaaaaaaaaaaaaaaaaaaaaaaaaaaaaggggggggccgttttaaaggatcaaagtttacttccccgtgcttgcaagggtatactttttttttggggccccctaaataaaattcacgggccgccgtttaacaactttgggatgggaaaaacctt

SEQ ID NO: 138611 - DNA, 410 bp, Zea mays
  unsure (1)..(410): unsure at all n locations
  Clone ID: MRT4577_57898C.1
cacgcgtcgtattcttggtcctctanacggccggcgggggggggggttttttaattttttttgtggtgtgaggaagaattccacagagaacaagagcatccactgcgtccatatctcgaatcaaaacaaaacatttgggcaccatgggtttggtctttttttatacacaagtttctttgggcttttggggggggggtggctaccaggcgtatgtatgcaggccccattaggggacctggtcgatattggggaagaagggcttccagtagagcaggtgatttcacgtgtcccggacgccggggaggcaccactgcgggcagtcagcttatctccttaaggctgcgcgctgcctggcctagggttacacgcactgcttattctacgtctgcgagagcacgctacctggggtc

SEQ ID NO: 138612 - DNA, 331 bp, Zea mays
  unsure (1)..(331): unsure at all n locations
  Clone ID: MRT4577_57899C.1
attgtgtacctcgaagccggccgggacgggatttcanacagagactgcgccaganncagttttccccacccaccgcaaccaggagcggagccaaggaaggagggggcagcgggcgacgacgaagcagcggcaatccgacggcgcaatggcggcggcgagggggcgaggcggcgccctgagccgaaaaggagccggctatcgaagctcttcctgggagtgaccttctccgacgatacgaattggcccatccaggaccagcagtgcctaagtttggtagctgttatgatgagggcgatcacccctacacaccatactttaaaaacgctcgtta

SEQ ID NO: 138613 - DNA, 601 bp, Zea mays
  Clone ID: MRT4577_5789C.1
ctatctctcctcgacgcacatctgaaagttcgaagactccggcccgtccgcctccctctccgcctcacgacacctagatcaatagttttcaagcggaaatggaagacccatcactacccaacccactgaccttcataaccatcggagatcagttccacctgatctcgatcatctctgaaagcgcaccggaccataacatatgtccatctgtctcatcttatgaaagagagatgtgccacaacgaactacatagtacccatacacttttgggtacttctatgcccgtgattagggtcatcaatgtcccaatgatgcccaccccgctctgtgtcaatgctcctgatgacaaagaaggcaagaactgcctgatctattacgtgatactggacgctacagctgctgactgcaacactgataatgctcccatcagaagcgtgaagatgctcattcagaacctcagataacatgagtaatgctgctaggctatcacatgcacacaagggtattgtatactgcttcaaacgcaccatcaaggatgaggaccccacttccgtgccgacgggtaacactgacaatgttatccatgacttcccaacatcat

SEQ ID NO: 138614 - DNA, 367 bp, Zea mays
  unsure (1)..(367): unsure at all n locations
  Clone ID: MRT4577_578C.1
ttggatgggtacccagcgttcgcgctggtnaacgatntcaccgtcgaagccgggaagcactctctgggacagagccacccggtacgccttgtgccctacaaccccgagtacgttgacgagtcggtgctgtggacggagagcctcgacttttggcacggctttcgctgcgtgcgcatggtgaacaacatctacctcaacatggacgcctttcacggcgacaaggaccacttttgttttcacgacggcaccactcttgtgcttttggagtgtgccatggggtttctctatcgctttatgatcctttctttgttattcttggtcgttctatatgtatnctttgtatccttttttatnttttttcgttttt

SEQ ID NO: 138615 - DNA, 832 bp, Zea mays
  Clone ID: MRT4577_57900C.1
tatcagacatgctgcatccactaaagtatggttcatcatctggccagtcagctgtgacttcatccctacaataggatctagtgttggatctgggagccaatccactatgccggtaaaccctgaggaaccttcagctgtttgtgctgaagatattgcagcaaccattgaagttacgaaaagttctagtctggaccagcatgagcgcaagagaaaacacagttcggaaagatgcagtgatcaaagatccaaaagatccaggtcaacctgtaaaattgcaaaaagtgagatttcttctttggccattcgtgagttgaagctactcaagatagacaaaaacatggttctgacagattcaaggaagttgctcggacagcaacacattccatcttggctgcctgcagatttgagcattcgccatcgcaatcccttgcactctcaagacctgtctgcaagcacagccccaaagtcaaacagctgaactcgtcagcaattactgatttttgcagagaatgcttgcataactttgttaaagaagctgtcagtttggcattgtctggcgggcagatggatcaaactggtaccccctgttagattgtagacaaatttgggattctttcttgtcttatcattgtgaatatctcaaagcacaaactagggacaagttgtacaatttatggcatgttaatgcctgtcctgtagtgtagttgccaggtctaatcagtactgtaacaactaacaaaatattctctttaatatgccacgaccatggctgaagtattggagcctaacattggccggctactgaggtgtggttggtgtacctggagcacct

SEQ ID NO: 138616 - DNA, 495 bp, Zea mays
  unsure (1)..(495): unsure at all n locations
  Clone ID: MRT4577_57901C.1
gaaagactcagcaactgtgccgttatccttagctgcagctgtgatccaagcaaacgcgagtactgatataatgaggttgctagagaaggccactacggagtaacttcttcggtgcccataagcaccttttggctctcatgtgttaactgaatctattcttacggctagatttaaaaactggaagtgcactacagatgacgatcgcatgggactgcacactcagataaatgctaacggaacctcgtctttgcatacctggacagatcttgattaaaatactgatacaacttcaatgctaccacagaatggcgccaccaagggagctatcaacaatcaggacttctcttctggcaccatatgttttggggcacccggactgagcatcattggcccaactgtaccatcgaatgtggtcacgacagtatgtgctataaacatcggccctgcctcgactgcctttattactctccnctctcaagctggcactgactatga

SEQ ID NO: 138617 - DNA, 694 bp, Zea mays
  Clone ID: MRT4577_57902C.1
catgtgccaagattcatcatatgtgtgagatttggtctcagcacacctgataattatgttcacgcccgggctttggacccttaaaacccgggtgtgacactttgtttgtttaccggccacaacaaggtctgtaaactgataatggcggggaggaccgtatcgctgctgctactagatcgtatccgatccctccgctactaattacgttatggcccaaccaaacatagagtaatgagattggatggcattgggagcgatcacggaagaaaagcaaccaaccaaacagctccctaaataaaatgtgtttacactgctacagggggcaaaaagattcatgtgcgtgtaaactgtgagcaagcgaagtagagatctagtagacattagtggagatacaaattgaagtgttgcagaaccacgacaactatggagctctatatatggatcaattggccgtgttggagatacaggaaaaacacatgagaaaatcacacgagaataagatgatgcgctaaaattaaggtgtagaaaagactctacctagtcatatggagtctcctcgcactgctagtaggtttccacagacagttaaaagcatgttgaatataggactgccatacttgtgagacagaagcggtgatgactagcttaaaaaaaaaaaaaaaaaaaaagagggcggccgccgaaaaatgagctc

SEQ ID NO: 138618 - DNA, 617 bp, Zea mays
  Clone ID: MRT4577_57903C.1
ggggcccaaaatacaaaaaaaggggcttttatttgcccaaaccattacgggccaacagggggaaccccccaaacccatttttcattagcccaaacatttttcccaacaaaaaaaaaacggcaggggcctcctcaatttaggagggaaacaccaatttttggtgtcaaaaacaacgggcaaaaaaaaaaaaaacttggggttggaaaccctaaattaaaggcctaatttttttaaccaacagcggggagaaaaccacccgggagggttttgaaaaatgtttgttcccaattagctgttaaacctaaagtttaaggggatgtttgggcccccccacttttttaaaaaactttcaaaactttttttccaagggccccaaaaggggcaaaaaaataatcctgggatccaaaaggaggggttttttaaaaaaaaaaggctggaggctgcccatagtttgccctaccaaaagcatccccaaaaaaatggtggtggccaaaaccctgggggtttgcaaggggggcaccaaggaaacctgggggggcccccaaagcaggttggttgtaaccatactgcccgaaaccagcctgagcaaaaccaggaggcaaaccctttccataagg

SEQ ID NO: 138619 - DNA, 171 bp, Zea mays
  Clone ID: MRT4577_57904C.1
aacccggcgactgtgagtctaaaaaagccacagcatttcggtttcactcattttgcgatacagatcgacacctacctgaggcgtctcgttaccgtcctcggcagcatggaggaagccaagaagaacatgttcgccttcagcacgaccacctacaccgggttccagtgcacc

SEQ ID NO: 138620 - DNA, 340 bp, Zea mays
  unsure (1)..(340): unsure at all n locations
  Clone ID: MRT4577_57905C.1
cttaaaaaacaaaaaaaaaaaaaaaaaaaaaaaaaaaaaataaaaaanataaaaaaaaaagaatttgaaaccttagaaccaaaaaccacccttaaagggccaaatttatggcagattttccctttacacttgggggagccgtttcgagccttgcctttaaaggggccccatttccccctttttggggagccccttttctccaatttcacctgggcgcggccgcgtttttaccacacccctcgctggaccttggggataaacacccttggcggtttaccccaacctttaattcccctttgggggcaccttccccccttttcgcccgggtggccctattaac

SEQ ID NO: 138621 - DNA, 306 bp, Zea mays
  Clone ID: MRT4577_57906C.1
tcgatttttcgaacagtgtctgttggaaacgtaaaccctaatgacacagagagccttttgcatgaagtacatcagagagttggcctaggggaatgatgcaagctcatacacaaagagaattctcactttggctttgaggactactatgcacaatggcctgctgatctagcaataatgactcttcatggcctggacatatatcgacaagctaataaggtgaactgggcatacccaagtccacatagggaggatacgtgggggcattaacatatttttgctggtgactgaagttgtgagacgaatgat

SEQ ID NO: 138622 - DNA, 545 bp, Zea mays
  unsure (1)..(545): unsure at all n locations
  Clone ID: MRT4577_57907C.1
ttttttttttttttttttttttttttttttttttttttttgttttattgttttctatatttccatttccctttgtttgattggctacaggtcagcgcgggccggagccgccccgcccgaacggggacgggaaagggggggggggggggggaggggggtaaacggaaaggggagcgccaaccggacgggccccggcccgggggggggacggggcaaccagccccgtttgccctggcctggcggcccgcatctgaaccgagggcgccgacccctggttttctgggagggcccaaccccctaaggccccgccccttggggtngggaggggccccgggggggccggccttaggaatcccggccggcccgacacctgtccctgcccgcgtgggccacggggaccccctcggtccccgggggccgtgggccccgcgccgggcccggcccgcctcttgggggcgggggccccccccgctgccccccgctccgcggggggcccgggggcggtgcccccccccggggggggggggtgcccgggggccggtacgg

SEQ ID NO: 138623 - DNA, 466 bp, Zea mays
  Clone ID: MRT4577_57908C.1
gatggaggaagaagcccgtggcgccgctgccgacctcgccaaacgcctcgctcgggagctccacatcggtgagtttctcgcgaggcgctcctcgtcctatttctgaatattacattacggaccgccttccatactatagtatattagtatttccggtgacgtgaccagacatttggttctgccgtattacctgttggtcactgccttcaattctagaggactgcgtagtggtagtggtagtggtaccagtagttcagagtccaggaatcaggattgatgttgtggagtagccccatgagagagtttgagggtacctggtgtctctatgtatggttattatagttcattgtaaagggtataaatgtaattatatacaggctgtgaactgtgcctataaataggtgaacagtaccccctgtactgttcacgtgctctcctgtaatcacgcattgggcatttgtttttg

SEQ ID NO: 138624 - DNA, 880 bp, Zea mays
  Clone ID: MRT4577_57909C.1
cattgggtacctcgaggccggccggggagacttggcttgtactgcatcgcaaaccgcaatcgcacgcggcacttgcccccgcgatcataacctcaccgcccgccaccagctgcagccacaagcgcagcgctcgacagcctcaccagccgccatcactcgcggcagtacacggccgctgggactgggagagtggggagtgagacgctgctgttgccgagtgcgaggagacactactactcttaagagtcaaaactcaacagcagcaggggcgaccgagctctgcgtgcgcggggagagctcggagaaggcagcagcatgggcgccgggatcagggtcctagcggcgctcttggcggcgctcgcggcagccaccgccggcgtgacggcgcagctgcggcaggactactacgcggcggtgtgcccggacctggagagcatcgtgcgcgccgcggtgtccaagaaggtgcaggcgcagcccgtcgccgtgggcgccaccatccgcctcttcttccacgactgcttcgtcgagggctgcgacgcgtcggtgatcctggtgtccacggggaacaacacggcggagaaggaccacccgagcaacctctccctggccggcgacggcttcgacaccgtcatccaggccaaggcggccgtggacgccgtgccggcgtgcgccaaccaggtgtcgtgcgccgacatcctggcgctggccacccgggacgtcattgagctggctggcgggccgtcgtacgcggtggagctggggaggctggacgggctggtgtcatgtccaccaacgtcgacggcagcttgccgcgccgtccttcaactggacagctcacgagcattttcgcctcaacacctgtcgcaggccgacatgattg

SEQ ID NO: 138625 - DNA, 1621 bp, Zea mays
  Clone ID: MRT4577_5790C.1
aacacagggaagacacggtgatttatcccgtggttcggccaagtacaaaacttgcctactccatgttgtggcgtcctaacggacgagggttgcaatcaacccctctcaagcggtccaaagacccacttgaataccacagtgttttgccttgcttatctttatcccactcgcgaggaatctccacaaattggagtctctcacccttacacttaagattcacagagaagcacggagtaagggagggaagcaacacacacaaatccacagcgaaacgcgcacacacacggccaagattcgagctcaaagactatctcacagtttctcacaagaacggagctcgaatcacttagaataacaaacggatgcgcaaagacttagtgtggatgatcaagaatgctcaagagttgcttggtgtgcttggtgttctcctccatgcgcctaggggtcccttttatagccccaaggcagctaggagccgttgagaacaaatctggaaggccatctttgccttctgtcgtcgggcgcaccggacagtccggtgcacaccggacagtgtccggtgcccgattcctttccttaattggcgcggtcgaccgttgcagatccgggagccgttggcgcaccggacatgtccggtgcacaccggacagtccggtgcccccttccgaccgttggctcggccacgtgtcccgcgcagatcgcgcggccgaccgttggccctggccgaccgttggctcaccggatagtccggtgcacaccggacagtccggtgaattttagccgaacgccgtcagcaaattcccgagagcggcctcttcggccgaggcagcctggcgcaccggacactgtccggtgcaccaccggacactgtccggtgcaccaccggacagtccggtgccccagaccgaaacagcctgttggttgtacacagccaactttcttctcttcttcttcttcctgtttctaatacttagacaagtatattagtacaaaaaaccaatgtactaagacttagaaacatacctttgctcttgatttgcactttattcatccatggcataaattcacatttaagcacttgtgttggcactcaatcaccaaaatacttagaaatagcccaagggcacatttccctttcaataagagcttgccagatgcccccgttcttgtcgaccacgaccagcacccaacataagacttccctagttatttagccaagaccagagccatgatagttctcatggtagcactgttttcacgggtggtcactccatgttccaattaatatgcaataatcttgtttaaccatcgggttaacaacaataacgtaaacttaccattttggaacattaatatcataagcgggagtgactgcataaagttaagttgtagcaatagcatagctacgaaggtaaagtataattcccaggtttgatcaaggaataaggttggaaaggttatataaataggtaacccgtcaaattatgcatatatatccaaaagaataaactttattaaatgtattgtttgggatcaaacagagtatgcagagggagaagtccacttgccttgcttattgaaaacttaaggttcttccacgaaatatcttgattctcaacta

SEQ ID NO: 138626 - DNA, 171 bp, Zea mays
  Clone ID: MRT4577_57910C.1
atacatatcagtttcaatccgtatctggattatttctaggtaacactcatcggtttgaggacaccacggtggactacatgtcatatgtaagatgaaacacggggcctccaccgatgggatgctgcctcgacaagacagggttcatattaaataactggttagatgagcagc

SEQ ID NO: 138627 - DNA, 1807 bp, Zea mays
  Clone ID: MRT4577_57911C.1
ccggccgggaaaaaaaaaaaaaaaaaaaaaaaaaaaaaaaaaaagagacttggctttgtactgcatcgcaaaccgcaatcgcacgcggcacttgcccccgcgatcataacctcaccgcccgccaccagctgcagccacaagcgcagcgctcgacagcctcaccagccgccatcactcgcggcagtacacggccgctgggactgggagagtggggagtgagacgctgctgttgccgagtgcgaggagacactactactcttaagagtcaaaactcaacagcagcaggggcgaccgagctctgcgtgcgcggggagagctcggagaaggcagcagcatgggcgccgggatcagggtcctggcggcgctcttggcggcgctcgcggcagccaccgccggcgtgacggcgcagctgcggcaggactactacgcggcggtgtgcccggacctggagagcatcgtgcgcgccgcggtgtccaagaaggtgcaggcgcagcccgtcgccgtgggcgccaccatccgcctcttcttccacgactgcttcgtcgaggtgcgcgcttcctcttcctcttcctcgacgactgcctgtgtttctgacggaccggggcgactggcgatgcttcaacttcccgcgtgcatgcagggctgcgacgcgtcggtgatcctggtgtccacggggaacaacacggcggagaaggaccacccgagcaacctctccctggccggcgacggcttcgacaccgtcatccaggccaaggcggccgtggacgccgtgccggcgtgcgccaaccaggtgtcgtgcgccgacatcctggcgctggccacccgggacgtcattgagctggctggcgggccgtcgtacgcggtggagctggggaggctggacgggctggtgtccatgtccaccaacgtcgacggcaagctgccgccgccgtccttcaacctggaccagctgacgagcattttcgccctcaacaacctgtcgcaggccgacatgattgctttatctgcggcgcacacggtggggttcgcgcactgcagcacgttctcggaccggatccagccgcagtcggtggacccgacgatgaacgcgacgtacgcggaggacctgcaggcggcgtgcccggcgggggtggaccccaacatcgcgctgcagctggaccccgtgacgccgcaggccttcgacaaccagtacttcgccaacctggtggacggccgggggctcttcgcctccgaccaggtgctcttctccgacgcgcggtcgcagcccaccgtggtggcgtgggcgcagaacgccaccgccttcgagcaggccttcgtcgacgccatcaccaggctcggccgcgtcggcgtcaagaccgacccgtcgctgggggacgtccgccgcgactgcgccttcctcaactgaaaaggatggacatggagagctggtttatatctcacacaagtgttcatacacaatctagagtaaagtttttttgttgttgttattattatcatgtcaggtatgagcacaaggttgaattaatggttaatgcgattgatatactgtaagtggcacttgcattggtaggccaagaccgagatgtattccttttccttgttgattttgttcggtctcggagcaatatttgtttcagtgttttcaaaaaaaaaaaaaaaaaaacgaaaaagcggccattatgaaacacggtgcgggcggcttccccgaaatggaggctaaggagagggattcgctgttatgaaaaggcagagcaaagcctaccctctgaaatggacatgaagcctccgttaataagttcaggccggt

SEQ ID NO: 138628 - DNA, 346 bp, Zea mays
  Clone ID: MRT4577_57912C.1
atcccaatccaaatggaactaaaaaacccccccggggggcccaggggggcggggggggggcgaaacagcccgcccggagggggggggggggcccaactcaacgaaggtctcacgcgttcccgaggggggggggcaagaacaggttgatccccccccccgggggggggacgagcacaaagtcaacggggctcgccccggggagcccgagggcggggagcaccccgtcgagcgcgagggggaacttgcccaccaacgggcccccgggggggttggaactgggcacggggctaaaactgccggggtaccccctggccttaggccccaccctgggggggtcctcccgggc

SEQ ID NO: 138629 - DNA, 1209 bp, Zea mays
  Clone ID: MRT4577_57913C.1
gggcgagatctcctctctacaggcagccagagttctaaacttgaagctgggcagcaaaagattgcagcaaattcgtgagatataagattcgccacaccgacacctagatgtcacacgccagcccgcaggtggtatataataatagtgaaaaaaagagaagctgctgctgggatggctgcatttatgcaggcacaccgctgccggcagccacgactggttgggtagtagtaaaaccaggtaggtgtggctggctcgtgcagcggcggcaggcggcagtgagagcgatgagcgcggcggcggcggcggcgagctcggtcaccaagttcatcaagtgcgtcacggtcggcgatggggccgtcgggaagacctgcatgctcatctgctacacctgcaacaagttccccacggattatatccccaccgtattcgacaacttcagcgccaatgtctccgtgggtgggagcatcgtcaacttgggcctctgggacacggcaggccaggaggattacagcaggttgaggcctctcagctacaggggtgctgatgtgttcatcctctccttctccctggtcagcagggcgagctatgagaacgtcctcaagaagtggatgccagagcttcgccgattttcacctactgttcctgtagttcttgttggaaccaaactagatctccgtgaagacagatcttaccttgctgaccattctgctgcttccatcatctctgctgaacagggagaagagctcaggaagcagataggtgctgtggcgtacatagaatgcagctcaaagacacagaggaacgtaaaggctgtgttcgacactgcaattaaagtagtgctgcaaccaccgaggagaagagaagttaccacgaagaaaatgaagacaagttcgaaccagtctctgagaagatacctctgtggaagcggatgtttcacatcgtaaagcacagactcttctgcgactgttgtactggacttgctagatggttgcagctctatgaatgagtagtcccctccgcagccactgggaacttctggttctctgctaccttccgatagagtgctctttgcgttcaccagctgtgcaaaatgaagtgaggttctagtttctaaattccctacgaggtgtaccttctttagtatgaatggtgggctatttagcagttcagcaaagtgtgaagtgacccttctatgcatgttttgtttcc

SEQ ID NO: 138630 - DNA, 1277 bp, Zea mays
  Clone ID: MRT4577_57914C.1
cattgggtacctcgaggccggccgggatatataagattcgccacaccgacacctagatgtcacacgccagcccgcaggtggtatataataatagtgaaaaaaaagagaaggtgcttctgggatggctgcatttatgcaggcacactgctgccggcagccacgactggttggaaggagggaggggtagtagtaaaaccaggtaggtgtggctggctcgtgcagcggcggcaggcggcagtgagagcgatgagcgcggcggcggcgagctcggtcaccaagttcatcaagtgcgtcacggtcggcgatggggccgtcgggaagacctgcatgctcatctgctacacctgcaacaagttccccacggattatatccccaccgtatttgacaacttcagcgccaatgtctccgtgggtgggagcatcgttaacttgggcctctgggacacggcaggccaggaggattacagcaggttgaggcctctcagctacaggggtgccgatgtgttcatcctctccttctccctggtcagcagggcgagctatgagaacgtcctcaagaagtggatgccagagcttcgccgattttcacctactgttcctgtagttcttgttggaaccaaactagatctccgtgaagacagatcttaccttgctgaccattctgctgcttccatcatctctactgaacagggagaagagctcaggaagcagataggcgctgtggcgtacatagaatgcagctcaaagacacagaggaacgtaaaggctgtgctcgacactgcaattaaagtagtgctgcaaccaccgaggagaagagaagttaccacgaagaaaatgaaggcaaggtcgaatcagtctctgagaagatacctctgtggaagcggatgtttcacatcgtaaagcacagactcttctgcgactgttgtactggacttgctagatggttgcagctctatgaatgaatgaatgagtagtagtcccctccgcagccactgggaacttctggttctctgctaccttccgatagagtgctcttttgcgttcaccagctgtgcaaaatgaagtgaggttctactttctaaattccctacgaggtgtaccttctttagtatgaatggtgggctatttagcagttcagcaaagtgtgaagtgacccttctatgcatgttttgtttccaaaaactgatgttgctaaatagctaatgaatggttatggtcgcaccggaagaaaagaagttattgtagactattaattccagtttttactgttcctcgtc

SEQ ID NO: 138631 - DNA, 1273 bp, Zea mays
  unsure (1)..(1273): unsure at all n locations
  Clone ID: MRT4577_57915C.1
gcgttctggaggagggaggggtagtagtaaaaccaggtaggtgtggctggctcgtgcagcggcggtaggtggcagtgagagcgatgagcgcggcggcggcggcgagctcggtcaccaagttcatcaagtgcgtcacggtcggcgatggggccgtcgggaagacctgcatgctcatctgctacacctgcaacaagttccccacggattacatccccaccgtatttgacaacttcagcgccaatgtctccgtgggtgggagcatcgtcaacttgggcctctgggacacggcaggccaggaggattacagcaggttgaggcctctcagctacaggggtgctgatgtgttcatcctctccttctccctggtcagcagggcgagctatgagaacgtcctcaagaagtggatgccagagcttcgccgattttcacctactgttcctgtagttcttgttggaaccaaactagatctccgtgaagacagatcttaccttgctgaccattctgctgcttccatcatctctactgaacagggagaagagctcaggaagcagataggcgctgtggcgtacatagaatgcagctcaaagacacagaggaacgtaaaggctgtgttcgacactgcaattaaagtagtgctgcaaccaccgaggagaagagaagttaccaggaagaaaatgaaggcaaggtcgaatcagtctctgagaagatacctctgtggaagcggatgtttcacatcgtaaagcacaggctcttctgcgactgttgtactggactggctagatggttgcagctctatgaatgagtagtcccttccgcagccactgggaacttctggttctctgctaccttccgatagagtgctcttctgcgttcaccagctgtgcaaaatgaagtgaggtcctagtttctaaattccctacgaggtgtaccttctttagtatgaatggtaggctatttagcagttcagcaaagtgtgaagtgacccttctatgcatgttttgtttccaaaaactgatgtagctaaatctctaatgaatggttatggtcgcaccggaagaaaaaaaaaaaaaaaaaaaaaaaaaaaaaaaaaaaaaaaaaaaaaaaaaaaaaaaaaaaaaaaaaaaaaaaaaaaaaaaaaaaaaaaaaaaaaaaaaaaaaaaanaaaaaaaaaaaaaaaaaaaaaaaaaaaaaanggggggggccccttaaaaggaaacaaagntaaanacccgggggaggaaaagaaaaagncttttaaagggccccccaaatt

SEQ ID NO: 138632 - DNA, 401 bp, Zea mays
  unsure (1)..(401): unsure at all n locations
  Clone ID: MRT4577_57916C.1
aataacgaaaacgtgacagcaaacagttccgtaccaatctcctccactggtcaatccccatcccctgttccgttcatacacctacctcctccgccgccgccatgccgccggccggnagcctcaccgccgaccagctcagcttcctcgagaagaacggctacctggtgctggagtcgttctccagcgcggaggaggttcaggcgatgcggggccgnatggncgagntcgtcgagggcttcgacggcgctgactccagtgtcttctccaccaaggatcatcggnagntgaaggacgactacttctttaagagtgcggagaatatatntttcttcttcgaggaaaaggnatttggagatgatggatggttgagacagnnaaaggaactttcaattaataaagtt

SEQ ID NO: 138633 - DNA, 1133 bp, Zea mays
  Clone ID: MRT4577_57917C.1
gacgctgctgctgggatggctgcatttatgcaggcacaccgctgccggcagccacgactggttgggtagtagtaaaaccaggtaggtgaattcggcacgagctggctcgtgcagcggcggcagtgagagcgatgagcgcggcggcagcggcggcggcgagctccggtcaccaagttcatcaagtgcgtcacggtcggcgatggggccgtcgggaagacctgcatgctcatctgctacacctgcaacaagttccccacggattacatccccaccgtatttgacaacttcagcgccaatgtctccgtgggtgggagcatcgtcaacttgggcctctgggacacggcaggccaggaggattacagcaggttgaggcctctcagctacaggggtgctgatgtgttcatcctctccttctccctggtcagcagggcgagctatgagaacgtcctgaagaagtggatgccagagcttcgccgattttcacctactgttcctgtagttcttgttggaaccaaactagatctccgtgaagacagatcttaccttgctgaccattctgctgcttccatcatctctactgaacagggagaagagctcaggaagcagataggtgctgtggcgtacatagaatgcagctcaaagacacagaggaacgtaaaggctgtgttcgacactgcaattaaagtagtgctgcaaccaccgaggagaagagaagttaccaggaagaaaatgaagacaagttcgaatcagtctctgagaagatacctctgtggaagcggatgtttcacatcgtaaagcacagactcttctgcgactgttgtactggacttgctagatggttgcagctctatgaatgagtagtcccctccgcagccactgggaacttctggttctctgctaccttccgatagagtgctcttttgcgttcaccagctgagaaaaatgaagcgaggttctagtttataaattccctacgaggtgtaccttctttagtatgaatggtgggctatttagcagttcagcaaagtgtgaagtgacccttctatgcatgttttgtttccaaaaactgatgttgctaaatggctaatgaatggttatggtcgcaccggaagaaaaaaaaaaaaaaaaaaaaa

SEQ ID NO: 138634 - DNA, 694 bp, Zea mays
  unsure (1)..(694): unsure at all n locations
  Clone ID: MRT4577_57918C.1
ggtacccgggcccccccctcgagttttttccccccctccccctcctcccccctcttccccccccccttttttttttcttttttttttttttttttgaaacacaaaaaccttttttttgggggaacggaaaaaacccttttaaaaacagccctaacgaagcaatttttgaaaggagaccttggttttttgcccaaacccgcccaggggaaacccacctttcagggaagggaaggggaaaacccaaacaattgggggaacaaccgtccgtccttagttaaaaaaaaaaaaactaaaagggaaatccttttggaaatccccttggggggaatcccgggggggcccccttttgggtgggaggggtgggggaaaaccaccgggaagggaaactcgcccggcccgttggggtttttgagggaagggccccgtttaaggggaacaaccctttttttaatttgggaaagcccccccccaaaccgtttaaacccctcctgccccttggggtccaacgcccactctcttggggcccccctgcccaaggaaccccttgggggaggaggggctggacaggatctccaccaccaaaatcccaacaagggcctgaaacgggttggggaggggccccacaaacaccttttccggtttggcccccagttccgggaacttgtngttgcccggggccggattgggtttccgg

SEQ ID NO: 138635 - DNA, 410 bp, Zea mays
  Clone ID: MRT4577_57919C.1
cggacgcgtgggtctaaatggagagtatgcgaaatctgggctttgggtgctggaaaaatggattgcggacactgaacagcatgcaggtgcagttggggatgtactgaaaaaaataaggcgagcggtagactttctgatcattccggggaaaagcaaatagactcattgagcagattaataaaaatgttttgccggcattaagtgcgagacagatatagcgcttatgtacgaggtactgggactacaaatgtgggactcatagtgtattatttgaggatgccgccagaatgaaggacatggggagaaatgacatgcagaatgctgtctctaattcatttcttttagatgatgacttaagcattactttcacaaccgaggaaattgcacatgaagtaccatatgttgacatg

SEQ ID NO: 138636 - DNA, 1787 bp, Zea mays
  Clone ID: MRT4577_5791C.1
gcactcaactcctctcaagtgatccaatgatcaacttgaataccacagtgttcttgtttttctttcttcaatcccgtttgcgaggaatctccacaacttggagcctctcgcccttacaaaagatgttcacagagaatcacggagcaagggagggattagcaactcacacacgacacaaaaatcacagcgaatacgcacacacaagtcccagacttgagctcaagagactagcacactagaacggagctcaaatcactagaatgtcaaacaagtgcgcaagattgatgtgtgagtgatcaagagtgctcaaggaatgcttgggggtctcctccatgcgcctaggggtcccttttatagccccaaggcagctaggagccgttgagaacaaatctggaaggccatccttgccttctgtcgtcgggcgcaccggacactgtccggtgcccgatttctttcctgaacaggcgcagccgaccgttgccgaccgttgcagatctggcgcaccggacagtccggtgcacaccggacagtctggtgccccctcccgaccgttggccagaccacgtgtcgcgcgcagattccgcggccgaccgttggctcaccggacagtccggtgcacaccggactgtccggtgaattttagccgtacgccgtcggcaaattcccgagagcggcgtcttcgggtcgaggcagcctggcgcaccggacactgtccggtgcaccaccggacagtccggtgccccagaccgaaacatcctgttggctgtacacagccaacattctccttttcttcttctctctgtttctaacacttagacaaatatattagtacacaaaaccaatgtactgagacttagaaacatacctttactcgtgatttgcaacttgtccatccatgggcatagatttacatttaaacacttgtgttggcactcaatcaccaaaatacttagaaatggcccaaaggcacatttccctttcaatctccccctttttggtgatttatgccaacacaacataaagcaactagaacaagtgcaaaatcacttcaaatagaataaatttgagttctatttaattttggcatatatggatcatccctttgccaccacttggtttatttttgcaaatcaaactcaaatctctatctctaagtcaaacacacatgttgaagcataaggagagtcattccaaaagatattgatcaacgatttcaaaaactcccccttttcccataatcactacttctccccacaagaagccgtcttttgacaaaagagacaataagagagttttgacaaaacaaaaagctctatttcactattttcaaaatttctcaagtggtagctgatccatttattgctttggcctttattttctccccctttggcatcaagcaccaaaacgggatcaaccttggcccattaaccccattgcctcaccaaaaatcatcaattaagagcaaatggcaataagagtttattagatggacttggaataagttaccctctcatcggagtgcagtggaagtctttcatggtccaagtccaccttttccctatcaattctccttcgagactaaatcaagcaaactcaagcatatggttagtctcaaagggtcaagttgtaacacagctccccctaaacttgtgcatcactttgcaccggacttctgaggtccaggaagtgtttgtacaacttgagcaccacaataagcaacaaaatgcagaatgaacatgatcaaaggcataaacacatgtatgctacagttcaatccaagttccgcg

SEQ ID NO: 138637 - DNA, 674 bp, Zea mays
  Clone ID: MRT4577_57920C.1
gtggactttttttttttttttttttgttttttataataacagagtgtatagagataaatgtcacaatataatcagagtacttattacatagcgggagacttacaaaataaattataaatataaaacgaactaaggatcgtccttggcgcaagtcaactgggagacgccacctagatcgaatcgaactcctcgttacgtagctccacttgaaccacctgtacttctcctggcacttgaaattccaggtaccagggtgattcttcagatcctcgtgacctcccgcgaaggcgctgatgggaagagtgctgacaacgcaggatgatcggacggcggttcttgcggatcccggcgagcaatcgccgccgcaccgaccgtcttcggccccacggaccgatgcacgcgcctctagtgagcccctatgatcacgcctgaccaactattatgccccgagcgccgttgtaggcgggtacccccgttcccatcgtccctctctgcgtcagcctccccgaccacgaggccttctggcttcgcgtcgtcgaacaggcgcagtggcgtctgagagaatcatgggtccatggggatcaatccagttctatctatagggattgggaagcacgagatgacgcgaggaaagtcggaggcaagcagcgccattgctgctaccgacagcaacg

SEQ ID NO: 138638 - DNA, 318 bp, Zea mays
  Clone ID: MRT4577_57921C.1
aaggtttctattgtaacacaagaacttagtagggcagtctgaatatatccggttacaactaaaaaaaaaaaaaaaaaccaacaaaattttgaagtccaaaaaaaaaaaaaaaaaaaaaaaatcaatattttattgtgttgggccgcccccagactactgatctcctcccccagtaatttaattccgaaccgcaccctgcagccaaaccatccttacataagtgagataaaataaagccagactcaaacaaatccataactgcttcctgaaaaaaattgtcacccccaaacaatcccaaaaaacaaaccagccgcatac

SEQ ID NO: 138639 - DNA, 1188 bp, Zea mays
  Clone ID: MRT4577_57922C.1
gcaagatatcgggggtaaaggtctgctttgatactgaaaatgctcgtgattctttctacagagcagcagtgaactttgttttagatgattgcagcagagcagcaaaagacatcggtgcagcaaaacttaatggtgaggatccaagggattttctcgccggccttgctagcaatattggattagacaagtttcgtgctgccactcttgtatgtgcatcagttgctactcgtacacggacatgcttcttgcaatgctgggctctagagattcaaggaaaacggccagaagcactggatgaactcgtgaagatttgtagaattcattacatatttcctccagaggacaattctgcagagatggaaatggtggctgctggactagaaaagaatttgcatgttgccgagagggttcaccttctatatctatacaggagcgtttgtactgctggtaacttaaaaacagctgcacaggctcttggtctgagtttgccaaatgagaatacagaaggatttgcaatgcccattcgtcaaccatagatgaaggctttgaagcccctgacgcagttttggtattcctactttcttaacatgcattatgcagtatgctaccaagacaagaatcaagcatactgcagattcccttctcaacagaatcttagggacagatctgcacgggccccccagacaaatgctgaatcaattgttccgttcatgtgcatttgatagaggggtgctctttaatatgtgcaatgtcatcaaaacctcgtatattcagatgatcgattctgctcaccaaacgcgcccaccgccatgcctaatatcgtggccgtattgggagtatcatggccgtattgggagttctcttctgcagctgtagttggttaggacatctacaacctgagtctttgaattgttattttaagagctacaaaaactgtgcgatgagaattggttttttaagagctaaaaaactgtatgatataatgagatgtcttcaatattaatcacataataaatatagttaatagacaatgtgtagtgtagagagactctttgcaaagagatctctcttatattttttatttaacccttatttctgaaaaggctgtattaaatgatattgtatatgtcattatttcgtggtcgtattgggagtcctgctgttgcgtggtaataaaaaaaaaaaaaa

SEQ ID NO: 138640 - DNA, 580 bp, Zea mays
  Clone ID: MRT4577_57923C.1
ttgtccaggttgttttgaatatggaggactggacggtcatctaagttttgtaagggcttgcaaggacacttatcatgttctgcttcacaaaaggttttggaaatagcaaagaaattcccttctaaaatccggcttgagcaacttcctcgccggaatatatggcccccacagatccatggaaatggcctttcgtatgacagtattggtctttttttctttgcacaagatatccagagttatgagaggcattacagtaagttagtagaatggatgctgaaaggcgatttggcactcagaggaaacattgaaacagctgaattgctcatatttccttccaatatcctgccaaaaagctttcaaagatggaacatgtcctattatctatggggtgtatttagagtcagaagaaaagattctaaccttccatatcatgtacctacaagaaaacattgtaatttcaatggaaatctcttggacgtgggtcgaagaactcatgcccacgcttcttctggccccagtttctattactcacctacttgtgaagactctccatctatcatgcccttggaagctaatcatg

SEQ ID NO: 138641 - DNA, 375 bp, Zea mays
  Clone ID: MRT4577_57924C.1
aaaaccccgggcgacccacgcgtcctttgactcgcgaacttagttctgtgtgttttacccgacaccgggcaggggcacgtctggttttatcttgcgctcgttcactccatcttaggtttttactttgacatgcacattagctactactgctgttcctgttggaggatttttcaggcttacttgttttcttattagtaattgttttatctgtggtcttaattatattttttttttgtgtcagtttttttttttttttattattcttctattcttatttgtttttttttttatttttcgtatattttcttttattatttttatttttttattttttattttttttttttttttattgactttttttttttttttttt

SEQ ID NO: 138642 - DNA, 243 bp, Zea mays
  Clone ID: MRT4577_57925C.1
cgcacacgtgcaccgacagaccagtgcgggctagtctatcggcagaactaacaggtgttccaattgccttccgccaaggatgaagctccagggaaatgcgctgactccagtgtggtagtgcatcacggttcacgtcctccaagcggcgattcatgtcagagacgcctgctgcaatgcgcactgtatcgagccttgacatgaagatgcatgtcgtatacaaaacaacacgacgaccactagtgg

SEQ ID NO: 138643 - DNA, 1016 bp, Zea mays
  Clone ID: MRT4577_57926C.1
cctcgaggccggccgggcaggggcagttccgtacttgcgcgagctccacgcgcccacgcctgattctagtggtctacaacagaacaaccggggtccctccctgcgaattcgccgcaagtccaaaggcaaagggcaaagcggaagttgcggttggcctcgtcctcctcttctccgtcgcggctcagatctctgcttgcggcgatggcgtcgttctcggaggctccccccgggaacccgaaagccggcgagaagatctttaagaccaagtgcgcgcagtgccacacggtcgacaagggcgccggccacaagcaaggtccaaacttgaacggtctttttgggaggcagtctggtaccactgcaggctactcctactctgcgggaaacaaaaacaaggctgtagtctgggaagaagacactttgtatgagtacctgcttaaccctaaaaagtacattcctggaaccaagatggtcttccctgggctgaagaagccgcaggagcgtgctgatctcatcgcgtacctgaaggaagcaactgcatagttcattgacatgccttttgccatgaagagaaaaattgttttgcagtttaataaaaaacattttagacaatttgggtcaccctgtttgaacagggtgcaaccacgtctcattattttcgttcttatggtgtccgtatggaatgcctaggtgtttagctgtgcacaaataacagttaaactttgacggctcctatttcaactgctggagaaatgccagtgccctatttttgaccaccagggtgtggaatggaaatcggtaatgcatccattttgaagggcctgagatgtttatatatgttctgttgaccgactgttcggctgctagtttcagcatctgtagtgcaactaaatcagctagccgaacagagagctgcagcgcagtagctgctcttgcagccgaacattcgagcagcgatggattattttatttatttaatgatattgcgtatggatgttaggataagtttctgttcaaaa

SEQ ID NO: 138644 - DNA, 985 bp, Zea mays
  Clone ID: MRT4577_57927C.1
ccggccgggccgggatgcagtgatgaaaaaagctaggtgctggagggtccggtacaaacctcccaatgttcttaggatatgctacctgccagggcgtggcaagtccaaaggcaaagggcaaagcagaagttgcggttggcctcgtcctcctcttctccgtcgcggctcagatctctgcgtgcgtcgatggcgtcgttctcggaggctccccccgggaacccgaaagccggcgagaagatctttaagaccaagtgcgcgcagtgccacacggtcgacaagggcgccggccacaagcaaggtccaaacttgaacggtctttttgggagacagtcgggtaccactgcaggctactcctactctgcgggaaacaaaaacaaggctgtagtctgggaagaagacactttgtatgagtacctgcttaaccctaaaaagtacattcctggaaccaagatggtcttccctgggctgaagaagccgcaggagcgtgctgatctcatcgcgtacctgaaggaagcaactgcatagttcattgacatgccttttgccatgaagagaaaaattgttttgcagtttaataaaaaacattttagacaatttgggtcaccctgtttgaacagggtgcaaccacgtctcattattttcgttcttatggtgtcggtatggaatgcctaggtgtttagctgtgcacaaataacagttaaactttgacggctcctatttcaactgctggagaaatgccagtgccctatttttgaccgaaaaagtaaaaaatggaaatcggtaatgcacccattttgaagggcctgagatgtttatatatgttctgttgaccgactgttcggctgctagtttcagcatctgtagtgcaactaaatcagctagccgaacagagagctgcagcgcagtagctgctcttgcagccgaacattcgagcagcgatggattattttatttatttaatgatattgcgtatggatgttaggat

SEQ ID NO: 138645 - DNA, 352 bp, Zea mays
  Clone ID: MRT4577_57928C.1
ttttggtggggttttttaaattgtcctaggggtcccaccccgggaaaaaagggggtacagggggctcgggggggcaacagagaaacagggcgcatcgcgggagccaacagggcacaaaaaacaaaaaggaaaaaccgagggacaccagggccgacaggggccaagagggaacaaaaagcgacccggcgagcccgcggggcccaaagtgaaaaaggggaaacaggggaaaaaaaaaaaagagggggaaaccggaggagcccaaaaaaaattggaagggggaaagcgcagagaaacgggaactaccaccacgaggccccccaatcaaaatgcccggggaggggggggccccaac

SEQ ID NO: 138646 - DNA, 641 bp, Zea mays
  Clone ID: MRT4577_57929C.1
gtctttggcagaccagaagttgcggttggcctcctcctcctcctcctcctcttctcctccgtcggctcagacttcagatctctgcgtgcggcgatggcgtcgttctcggaggctcccccaggcaaccccaaggcgggcgagaagatcttcaagaccaagtgcgcgcagtgccacacggtcgagaagggcgccggtcacaagcaaggtccaaacttgaatggtctttttgggaggcagtcgggtaccaccgcaggctactcctactctgcgggaaacaaaaacaaggctgtggtctgggaggagaacactttgtatgactacttgcttaaccctaagaagtacattcctggaactaagatggtcttccctgggctcaagaagccacaggagcgtgctgatctcattgcgtacctgaaggaagcaactgcatagtgcaatgacatgtctttgccatgaagagagaaattcgtttttgcagtttaataaagacattctagacaatttgggtcactctgtttgaacagggtgcaatccacgtttcagtattttcgttcttatggtgtcggtattgaatgcctaggtgtttagctgtgcacaaaaaaacagttaaactttgacggctcctatttcaactgctggag

SEQ ID NO: 138647 - DNA, 1412 bp, Zea mays
  unsure (1)..(1412): unsure at all n locations
  Clone ID: MRT4577_5792C.1
cccaaaatatgttctttctagttgagttttgagttattgattacattgaattctttaattttatttttacgaacttgtaaccagtaacgtagaaaactagttagtccataatacgatgacagtcatcaaacaccaaaactaatatagaaatggcatggtgtccatttctcgtttcacgggtgcatgcaggaaatgccaccggcgcccattgcgaagagggctagaacttgggcatggccatgctggcaccgctaactcggtgcgtgcgaattatgtcactgctggtcaggtgtacaggcgtggcggccaccaacctgactgtccggtacagcaagaccaaactgagagcacctagagggggggtgaataggtgatcctgtaaaaacttaaaacttaatgccacaaacttgattaagtgttagagcaataaagctaagtggctagagaggagttcttgcgaaacacaacaaccacaaaaagatcaacacagagagacacagtggtttatcccgtgattcggccaagtccaatacttgcctactccacgttgtggcgtcccaacggacgagggttgcactcaacccctttcaagtggtccaaagacccacttgaataccacagtgtttcttttcctttcactatatcccgtttgcgaggaatctccacaacttggagtctctcgcccttacaaaagatgatcacaaatgaacacggaagtaaggatgggatgaacaacacacacaaaaccacagcaatacgcacacacacacggccaagacttgagctcaaaagactatctcgaagttctcactagaacggagctcgaatcacttagaatgacaaacaaatgcgcaaagactgagtgtggatgatcaagattgctctaaggttgcttggtgttctcctccatgcgccaaggggtcccttttatagccccaaggcagctaggagccgttgagaacaaatctggaaggccatccttgccttctgtcgtcgggcgcaccggacagtccggtgcacaccggacactgtccggtgcccgatttccttcctaaaatggcgcagctgcccgttgcccgccggagagccgttggcgcaccggacatgtccggtgcacaccggacagtccggtgcccccttctagccgttggctcggccacgtgtcacgcgcagatcgcgcggccgaccgttggcccggccgaccgttggctcaccggacagtccggtgcacaccggacagtccggtgaattatagccgtacgccgtcagcgaattcccgagagcggctacttcggccgaggcagcctggcgcaccggacactgtccggtgcaccaccggacagtccggtgccccagaccgaaacagcctcttggctgtacacagccaatnctttctttcttttttctncctg

SEQ ID NO: 138648 - DNA, 158 bp, Zea mays
  Clone ID: MRT4577_57931C.1
gcgcgagtgctgccgaaggcggtgaccttcgtgacgggcaacgccaagaagctggaggaggtacgagccatactagggtctaacgtaccattaacagtcgttaaagctcgacctgacaaaactgaaaggggagccagagatcatataacaaagagaaa

SEQ ID NO: 138649 - DNA, 1160 bp, Zea mays
  Clone ID: MRT4577_57932C.1
ccgggtcccctttccccattctacaccttctccacccctcggccctcagccctttttaggggcagttccgtacttgcgcgagctccacgcgccgacgcctggttctagtggtctacagaacaaccggggtccctccctgcgaattcgccgcaagtccaaaggcaaagggcaaagcggaagttgcggttggcctcgtcctcctcttctccgtcgcggctcagatctctgcgtgcggcgatggcgtcgttctcggaggctccccccgggaacccgaaagccggcgagaagatctttaagaccaagtgcgcgcagtgccacacggtcgacaagggcgccggccacaagcaaggtccaaacttgaacggtctttttgggagacagtcgggtaccactgcaggctactcctactctgcgggaaacaaaaacaaggctgtagtctgggaagaagacactttgtatgagtacctgcttaaccctaaaaagtacattcctggaaccaagatggtcttccctgggctgaagaagccgcaggagcgtgctgatctcatcgcgtacctgaaggaagcaactgcatagttcattgacatgccttttgccatgaagagaaaaattgttttgcagtttaataaaaacattttagacaatttgggtcactctgtttgaacagggtgcaaccacgtctcattattttcgttcttatggtgtcggtatggaatgcctaggtgtttagctgtgcacaaataacagttaaactttgacggctcctatttcaactgctggagaaatgccagtgccctatttttgaccaccagggtgtggaatggaaatcggtaatgcatccattttgaaaaaaaaaaaaaaaaaagcggccctagggccaaaagtccggttcgcagatagtttcaagatctaatgccctactaaatcggtgcggtagtcaggccacatctagcgctccatattttgtcacggctggcggcgtgtgataaagttatgtgtgatgaagtagaattatagagccataatttggcaaagtgtgggtaagtagatcttctatacctaagttgctaaaaattgccacatatttttatgccatacttgtctaaagtgtataatgttaaacacttatgttgcctaacttgccatagtttgctacgcct

SEQ ID NO: 138650 - DNA, 218 bp, Zea mays
  Clone ID: MRT4577_57933C.1
cacagaggatctcggccggcagggacgttgcctagggcatacagctactgtacgtatctatcatacctcgcctggatcgaaaccataggcgcatgacgaacgcacatgctcaccagaaccacgtcaacccaattctgctctgcgtccacattaacctggccatggcaatgtggcaccagcactctggacgagcatggcagaactgggactgcacacat

SEQ ID NO: 138651 - DNA, 1213 bp, Zea mays
  unsure (1)..(1213): unsure at all n locations
  Clone ID: MRT4577_57934C.1
attacaaaaggaaggcgtcttgttttcggtgcctggccacccttccctcttcgcacgcagtcgcagactcgcagccccccttctgatcctcttcctctcccacgcggccgcggccacgcccccgccccccgctgactcacgcagcgcgcgcgacgacgcggaggagaaaaccaggaatcccataaaggtttcagtttcggaagccaagccactccgacaccctccaggctcgagcgaagggagccagcaatggcgcgtcgcgggccgtgagagacgggaacaagaatggctgccatggtgcgcgggcccgcgatggcctctgcggctgggccgggtgcgacgtcggcggctgctgcggccgcggcggaggagatgcggtggcggcagctagacagcggcgtgagcgcggtgtcgttcgggttcgtggccaccgccatactcgtgtccatgttcctcgccatggccatcctcgagcacttcctccgccccccgacgacggcccacgcgccgccccggggccggggtgtcctccgccgcctccgcctcttcctcctcggccgcggtggcggcgcccccggcgggacggatctcgaggcggcgaggaagctccacggtcacgcgcccctcgagatgcctgtttaccccagaggcgtgtcagttctgatgccagggcaagacgtgccaacgttcatcgcgcatcctgcccctgcaccgtgccccccagagaggatccggtggccgtcacaccagccgcctcctttcactggctcctcgccaaaccctagctagggctgatgtagcgcacacccaccacactgagaacgccggttgttgtcagccagtcaaccatctctgtagaggaggcgaggagcagccgtgcgctttgcgggcgtgttggtgttgccgatgaatcgatgatccactccgtctccagggcatgacagccaggacaggcgggctctctctcctctttgtgactctgtatctgtacaggtttaggtcttgttctgaagcattgcaaccttgtactgctgccccctgctgcgttgtggctggcgagcggcggctggtggatccgtagagttgttgctgctgatccctgttgatgtgtgtcagtagatgcctgatggagcatgtaaaaactacttgtaaactcgcttggcaaatgtggtttgatttcaggaaaaaaaaaaaaaaaaaacccacgcgnccg

SEQ ID NO: 138652 - DNA, 412 bp, Zea mays
  unsure (1)..(412): unsure at all n locations
  Clone ID: MRT4577_57935C.1
gcagaggcaaagacaaaggcaaaagcaacccccagcagggcgatgcaagtgccttaaagcatgctggcgaaatatgtttcaggtgcgggtctcagcagcactggtcccgtacatgcaccactgagaaatacctgattgacatatatcaggaatggaagaaacgccagaactcagaggctcactttatccaggcgcctgtagacgccacaactggagagcaccttgagttgcctcagcctgctgcacagtttgagcatgctgccataaatgtcgatgccacagctaagagcgatactccgttaggcaaagtcgacttcgatttcgatactgatgatctcctgttaaggcgtcgcttaagcganaatagacggtaaggcgaggatctgcgataacgcatccaggtcgccttacc

SEQ ID NO: 138653 - DNA, 339 bp, Zea mays
  Clone ID: MRT4577_57936C.1
ggcaacaacaaaaacccggggggttgggtttggttttgaccctttcccccagggggaccgtgggggaaatttttgattctataggaaacggggcctccaaaaaaacacaccggggggaaaatcccttatggggcaccattcctgggggggtcaaaaggtaacccccctcaggatttttcccgccccccccattaaaacctctgttccaaaaaaccccaaaggcaaatgggcccaaaagtttataataaagccttttccatgttttgagggacttgaccccccgccattcaccggtgtttgttttttaaaggtggaaaaacaggacccttgttttttttg

SEQ ID NO: 138654 - DNA, 293 bp, Zea mays
  unsure (1)..(293): unsure at all n locations
  Clone ID: MRT4577_57937C.1
gcctgcgtaccgtccgnattcccgggggcttttttcttaagttggttaggtggtcgtctgtcccacgctaaagcacaggcctaaggcccggcatcggttgcggtcgttctcacatgggcttcgatgccgctatgtatgggaagggtagaggttcgggggaggtgtgagaaagtatttttcttaatacaatactcgagggttgtcttatccctgcaggtcgagtttttatgttgtagacatgaaagaccctttaatggaaactaggcatacttttgtttcttttgtcaaaaaaa

SEQ ID NO: 138655 - DNA, 371 bp, Zea mays
  Clone ID: MRT4577_57938C.1
actacagtatccatcggttgatgatggggacgacgttaacccaagggtgggcgcggggggggacacccctgcaaagaggggggggggggcaaaaaggttggggaaacaggggggcaacactgggatcgggaggctgcccacggaagcaaggaacggaacttttggtcccgggatggaatggcctggacccggggaccaggtggacgtacattcgaccccacaggcccaatggacaactggataacaaaaaacccttgaaataactggatgggtgaatgggcccgagccaacccgggagattacatatgggcaagcccacattgcgattccctagggggaccctactttacttgaagtacccaaatttctgg

SEQ ID NO: 138656 - DNA, 543 bp, Zea mays
  unsure (1)..(543): unsure at all n locations
  Clone ID: MRT4577_57939C.1
atattatattttttttttcacacccncttttttgggttttgtttttttttttttttcgaaaaaccaacccccccaattttcattaaaagtaacatacacaaatccccctcctttttaaaaaatttctcaagacggccccccccctttaaaaataaaaacaaaatacttgaggtgggcgaaccaaaccccctggatcttgacatccttgggccccttaacccccaggggggggtcccacgggtgcccccttttaaaaaccccaaaaacctccccggggtccgggattcttttggggacccccaaagggatatttcccctggacaaagcggctttcttaaattacttcttttggaaatcctttctatacccttttccctccggggggaaccccaacgttgtttttaattcccgtggaaccaccccccccctttgtgctaaaaaaaaaaaaaaccccttatcttggcacaaagaaaggcccccccaaactttcccttttcccggggcgaaaatttttttaatgaaaaaaaaggccctccccccccc

SEQ ID NO: 138657 - DNA, 216 bp, Zea mays
  Clone ID: MRT4577_5793C.1
ctgcggccgagccgctctaaccggagctccgttaagactccgcctccccaaatctcagcgcctgagtgcgccgctctcctccagtgctcgccagcactggtttccgcgccgggacttgggttcggaggggcgacgtgaagcttaaggtttccgcaggatgagctaccggaaggggttgaaagtttgggtggaggagaagggggaagggtgggtgga

SEQ ID NO: 138658 - DNA, 381 bp, Zea mays
  Clone ID: MRT4577_57940C.1
ccttttaataattttttttggtttttattttttccaggggggatttttttttttttttgtgtttattgccgggagcaggcaagacacgagcactgcattgaaaagtaaagggtgtagaaacaacgaccaatgaaataccgaatagggggaaacagggaccccggagaaccaaggaccgggacaagggcggaacccaaggagaagggagaagacacctcccgaatgctaaatggggggtggggggggtactgggaactcaccgggttcagtacccggttcctaccaaagaaccaggccccaagagccaatggaacaggcaccaaccggagccccgaggaggggggaggagggcaccagccgcccgacgggggccgggagatg

SEQ ID NO: 138659 - DNA, 866 bp, Zea mays
  Clone ID: MRT4577_57941C.1
ctcgaggccggccgggatcatatggcatagccccaacggatcgagcgcctccccgagtccccgttcccctgccccagctgaccgccgccgagacgtgccacaccgcctccccctcccgccgccacaacctttcgcctccacgcaattggccgcactcctttccacctcccgctacaggatagcgtgggccggtcggcggcgccgacgggtggagaactggagatccgcccgcacgcggactgcttccttcgctaggcgatgggaagtaagcgttgttaggtctcatgatttcttttgggagatccggagctgtggtgcctgtctgactcatcatctctgggacactgccaagtacgattaaggaaggatttgtaaatgccactttttggagtttctggccttttggtttagtcatcaagactctagctagcaattatctaaagaaacaaatgaaatgctaattgccaccaagatggcaaaattgccggaaaacagcagttgagggagaaacttcattgcaatgctaacaataccagtgcccagatcatgacaatcagagccagtagcaactgaaccttaagtagccaccaagtttggcaaaacttctgcaactctagttgagggggaaattttttgatgcgacttgttgatgcacaagctgaacggcccaagatttctgtagttgctgcttgaaatattcttgataggaagggcaattttgtagatgtctcgagagtgtaaaaaacatgcactgtagttctctttttacctgtaagataagattgtatgcagtatgcactatttgagttgtaacgggataagttcacgaaagtatattttttttatttgacgtggtcttgattgac

SEQ ID NO: 138660 - DNA, 262 bp, Zea mays
  Clone ID: MRT4577_57942C.1
tcggaataaaactgccagcttagccaagcttagctgacgaccccactactcggtcgaatttggtttgggattgctaccgcacatgattaccaaagtaagatgatcttactgaggaacgtctttatcagaacattggtgattttcactatgcgctgtaaggactaatctttctatgggacttgccggaaatctctttcttgtggcttggggaggaaattttcaaccatagacactggatcctttacacctaagacctattgct

SEQ ID NO: 138661 - DNA, 870 bp, Zea mays
  Clone ID: MRT4577_57943C.1
cgcgtgggccaaccttatcctctcagctgctcaacaccgcagacaagtccagtcctctccctcccctcaatctagcgccgccactcgcgcccaccacgccgccgcaccgccgctggtgaacgaatccgtccatcccgtacaccagccatgtcctgacacactgacacacacctggtggaggaggaggcgccacctccgtccgccggcggtgcaggggaggagctggccatcctcagggtggcgttgggctccggcaagctgcgcatcgaggggtcgctgagcttcaagcgggcgcaggccgcactgcaggtggagaccgagatctccatccggaccgctgccatgcccgcgccgggaccgggacccctacccaggggaacccccgagaggaacacacaacagcgtctcaccagccagccaccaccgcgctccatttcctttctctctctctcggctcctccgctctcttgcccgagtcgctagcttccctgccccgcctcctcccgtccccgtggacagacagctccccccacctccgcttccatagcatccgagctaaggtcaactcctccgtcggcggagcgagagcggggaagagacgggagggtcccggatccgagccgagctgcgctccccgcgcgaccgacacccaggtctcgtcgtcccatgcagatctgctcctcctcctgagatctaaaccgaagcctgagctccggttgttggtggttggtcggcggcggcggcggcggcaggggaggctgcgaagatgtcgtcgagcactatccgcaaggcccctggcgcggtgaaggaccagaccagcatcgggctcgccaaggtcaccagcaacatcgcgccccagctggacgtgct

SEQ ID NO: 138662 - DNA, 1118 bp, Zea mays
  Clone ID: MRT4577_57944C.1
aacaacccccgagtggaacacacaaaagcgccccaccaccgcggaccattcctcgaggccggccgggctttcctttgtatctctatctatccctcctcggctcctcgccctttcccctcttgcccgagtcgctagcctccctgcccctgcccctgcccctgccccgcctcctcccgtggaccacttcctccaccttcgcttccatagcaggctagcagctgagcgaggtcaactcttccgccggcggagagagagggagggagcggggaagagacgggagggtctccgcgcacctgccatcagccaccacccgatacccaggtcttgtcccgcgcagatctgctgctgcccttgagatctaaatcaaagcttccgctccggttgttgtcggttggtcggtacctgggcggcggcggcacgggaggacagcgaacatgtcgtcgagcacgatccggaaggccctgggcgcggtgaaggaccagaccagcatcagcctcgccaaggtcactagcaacatcgcgcccgatctggacgtgctcatcgtcaaggccaccagccacgacgacgagccggccgaggagcgccacatccgcgagatcctccaccttacgtccggatcccgcgcccacgttgccgctgccgtggcagggtgctcccgcaggctctcccgcacccgcgactatgtggtcgcgctcaagtcgctcatgctcgtgcaccgcctccttgtcgatggcgacccgtccttccaccgcgagctcctacatggcacacggcggggcacccgcctgctgaacctctctgattttcgggacgaggcgcactctggatcgtgggatcactctgcctttgtgcgcacctatgcgctctaccttgaccagcgcctcgagttcttcctcatgagcgcaagcaggggttaaatgacagcagcagcacaggttccttgcttgaccacctacagcagctgcttgacaggttccttgcttgccgacccactggtggcgcaaagcaaagcaggatggtgctgcgtgcgctgtatcacattgtgagagaaagcttccagctctactctgatatctgcgaggtgctggcggtgctgctggacaggttccttgacatgg

SEQ ID NO: 138663 - DNA, 509 bp, Zea mays
  Clone ID: MRT4577_57945C.1
gatcccctgaactaccgtcatggcggcactgcctgaagagctgatctggatatcttgttgggtcaacaatacactaacgtgcagcacatcactcgtcagattgtgttcatcggcgatgggggtgtgttctccgaacatcaacacagatggaaggatgagaaagattgaagaataccttcgcactaccacctgcagcactggatacctaactacgaaggatgaattgactcgcgtactgttggtcatctgcagctccatcggctacatatatgaacggataaaggtggcttaatcgcattgagagggatcgggacgctgaaccgaattactgaatagcacgcaaggagtcaaggtccgcaacatcaggaggagcctcagaccccagactccacgatgcatgtgaagcacaggccccggatgctcgacggaggatgacgaagatgaagttgtacgttttagtgaagagacttgatatgagaagaacggtgcttgacatactgctgcagcta

SEQ ID NO: 138664 - DNA, 2682 bp, Zea mays
  Clone ID: MRT4577_57946C.1
cattgggggccccgaggggggctaccggccgggatggtactatccctccgggcgccgggatctatctatccctcctcggctcctcgccctttcccctcttgcccgagtcgctagcctccctgccccgcctcctcccgtggaccacttcctccaccttcgcttccatagcaggctagcagctgagcgaggtcaactcttccgccggcggagagagagggagggagcggggaagagacgggagggtctccgcgcacctgccatcagccaccacccgatacccaggtcttgtcccgcgcagatctgctgctgcccttgagatctaaatcaaagcttccgctccggttgttgtcggttggtcggtacctgggcggcggcggcggcggcggcacgggaggacagcgaacatgtcgtcgagcacgatccggaaggccctgggcgcggtgaaggaccagaccagcatcagcctcgccaaggtcactagcaacatcgcgcccgatctggacgtgctcatcgtcaaggccaccagccacgacgacgagccggccgaggagcgccacatccgcgagatcctccaccttacgtccggatcccgcgcccacgttgctgctgccgtggcagggtgctcccgcaggctctcccgcacccgcgactatgtggtcgcgctcaagtcgctcatgctcgtgcaccgcctccttgtcgatggcgacccgtccttccaccgcgagctcctccatggcacacggcggggcacccgcctgctgaacctctccgattttcgggacgaggcgcactctggatcgtgggatcactctgcctttgtgcgcacctatgcgctctaccttgaccagcgcctcgagttcttcctcatgagcgcagcaggggttaaatgccggcagcagcagcagcagtgctaatggtccatcaccacgtgaccgtgatcgctggggttcacctgatccctatggccgccgctctccctcctactcgtcaccccctgggtatggcggatatgatgattaccgcgagaggaatggtggaaacaatgatgacaagaggccgcccaccccagtgagagatatgaagcctgagcgggtccttgctcgtatgcaccacctacagcagctgcttgacaggttccttgcttgccgccccactggtggcgcgaagcacagcaggatggtgctggttgcgctgtatcagattgtgagggagagcttccagctctactccgatatctgcgaggtgctggcggtgctgctggacaggttctttgacatggagtatgctgagtgcgtgaaggcttttgaggcttatgctagtgctgcaaagcagatcgatgagctctctgcattctatgcatggtgtaaagatactggagttgcaaggtcatctgagtacccagaggtgcagcgtgtcactgataagttgctggagacgctagaagaattcatgagggaccgggcaaagaggcccaagagcccatcaccggagcctgaacctgagcctgtcaaggaagaacctgagccggatatgaacagcatcaaggcgcttccagcaccagaagattataaggagcctgaacctgttaaggtggaggaagaggtgaagccagagccacccccacagccacagggtgacttggtggatctcagagaagatactgttagtgcagatgagcaaggtaataggcttgctctagcactcttccaggggccacccgctgctggtggaaacaatggttcatgggaggctttcccttcaaatggtggcaacgaggtgacttcggcatggcagaatcctgcagctgaacctgggaaggctgattgggagcttgccctcgtagagacagcaagcaacttgtccatgcagaagccagcaatgtcaggtggtatggacccgctgctgctgaatggtatgtatgaccagggtgttgtgcgtcagcacgttggtgcacaggtgaccaccgggagtgccagcagtgtcgcgctgcctgctcctggacagaagactcagatgcttgctctgcccgcaccggatggttcgatgcagactgttggtggtgatcccttcgcggcgtcccttgccgtgccaccgccgtcctatgtgcagatggcagatttggagaagaagcaacagctcttgacgcaggagcaaattatgtggcagcagtaccagagagacggcatgcaagggcaatcgagcctgaacaggctcgaccgcgcccccaacccggccatgccctacgggatgcccatggcatacaacacgaaccccatgccaatggcttacaccgggaacactgggtattactaccctacttactgaggaggcctgttctttaatcatccttacagttgctgtgaatttttgttctgtgttgtgatcttccccgccctgcggttgtgtccagcatcagctgttgttcccctgtccctggatcaaaccttttggtctgatatatgtaatgtaattttctttgtttggaaccaaatgcagcatccgagggtggtggctatagttgattacataatctcatattgatctttacactgtttttactgatcctccgcatgttatcacttctcttcacacgattttttgtcacctgcttgtagatgttcctgagagagtggtactgagtgtctctcacctatgaatacatgatctacttgctgtggttag

SEQ ID NO: 138665 - DNA, 1067 bp, Zea mays
  Clone ID: MRT4577_57947C.1
tctatttattattttataattaattattaatttttttttttttttttttacacaattccagcacactagttcttccacaacagaggttcaacatacaaaggtttcaccacaaaggtttgaagcattcaaacatattgcacatagttctgacaaagttctaaccacatatatgttctagcaaggtagaaaaaccttaagcaaaggcatcatcctcaaacttggtatgcatccctacctcaatctttctgaagtttcaggacagctcatagcagtgcattggtctcttcaaacttggtatgcatccccttcacttcctcttgggcctggcgcagcaaactttggttttcttcaagtgcggcctgttgagcttgtagttgtgcttgcaactcttcctgcttcctagcagcttcctctctttcagcttggagtttttcctcaaactgatataagatttcttcaagtgcagccagtagaagaaaggttgcttgctttcggagtggagccagcagttgtagtagcagtgaaggttgtggccgtaccgctgctgtgggtcaatctgctcctaaaaacaaatctcagtttgaaaagcgcttccagccagtgtaaattctcgtcctttagcattctcgtcctttagcaacccctttccaacctttccgttcatttgcgaaatagatccctgatcgctgtgccaaagattcggtacacctggctacgttctcattttggttaaaagttatttgacatgtttgttaccatgatatcatagaagtttgatatgggctgccactggggggacttctggtagtaccgtgccgcctgcttcctcttcctcctcgcccagacttgttccccgcaggagcaaggccatggcaacgctctccatgggagcttcgtctgctgccccgcccagcctgcctcgttgcaaacttcagcagcgcgaagtccaacagcttccgccagctctgctccacgagcacggcgcaatcggcgagctggcgccgcgtgcggaagctcttgtacaccttctgcagcctaagcgccgcaccctcggcttggggctgccc

SEQ ID NO: 138666 - DNA, 921 bp, Zea mays
  Clone ID: MRT4577_57948C.1
aaaaaaagaacataaaaaaactcgaggccggccggggagacagcagcgcctcaccagccagccaccaccgcgctccatttcctttctctctctctctcggctcctccgctctcttgcccgagtcgctagcttccctgccccgcctcctcccgtccccgtggacagacagctccccccacctccgcttccatagcatccgagctaaggtcaactcctccgtcggcggagcgagagcggggaagagacgggagggtcccggatccgagccgagctgcgctccccgcgcgaccgacacccaggtctcgtcgtcccatgcagatctgctcctcctcctgagatctaaaccgaagcttgagctccggttgttggtggttggtcggcggcggcaggggaggctgcgaagatgtcgtcgagcacgatccgcaaggccctgggcgcggtgaaggaccagaccagcatcggcctcgccaaggtcaccagcaacatcgcgcccgagctggacgtgctcatcgtcaaggccaccagccacgacgacgagccggccgaggagcgccacatccgcgagatcctccacctcacatccggatcccgcgcccacgtcgctgctgccgtggcaggctgctcccgcaggctctcccgcacccgcgactacgtggtcgcgctcaagtcgctcatgctcgtgcaccgcctcctggccgatggcgacccgtccttccaccgcgagctcctccacgccacacgccggggcacccgcctgctcaacctctccgattttcgggacgaggcgcactctgggtcctgggatcactctgcctttgtgcgcacctacgcgctctaccttgaccagcgcctcgagttcttccctcatgagcgcaagcaggggtcaaatgctggcagcagcagcagcgctaatggtccatc

SEQ ID NO: 138667 - DNA, 2186 bp, Zea mays
  Clone ID: MRT4577_57949C.1
ggccggccgggaaaaaaataaaaaaaaaaaaaaaaaaaaaaaaaaaactccaaccttttcctctcggctgctcaccaccgcagacaagtccagtcctctccctcccctcaacctagcaccgccacttgcgcccaccacgccgccgcaccgccgctggtgaacgaatccgtccatcccgtacaccagccatgtcctgacacactgacacacacctggtggaggaggaggcgctacctccgtccgccggcggtgcaggggaggagccggccatcctcagggcggcgttgggctccggcaagctgcgcatcgaggggtcgctgagcttcaagcgggcgcagaccgcactgcaggtggagaccgagatctccatccggaccgctgccatgcccgcgccgggaccgggacccctacccaggggaacccccgagaggaacacacaacaacgtctcaccagtcagccaccaccgtgctccatttcctttctctctctcggctcctccgctctcttgcccgagtcgctagcttccctgccccgcctcctcccatccccgtggacagacagctccccccacctccgcttccatagcatccgagctaaggtcaactcctccgtcggcggagcgagagcggggaagagacgggagggtcccgaatccgagccgagctgcgctccccgcgcgaccgacactcaggtcttgtcgtcccatgcagatctgctcttcctcctgaggccatccatggatccgtggcacacaggaagttaagattaatctagacatgataatctacaggcttatgagggcttacataagttcatcttctctacggaaatctgcattgagggctcttgcaacggcactgacgacagatcaactcttcaacctaagagagcagtttacattattcggtccaaacaagagtggccatatatcattgcaaaatatgaagacggccttgatgaaaaattcctcgggtgcaatgaatgattctaggattcttgactttgttaactcaatatgcaatatccaatatggcatgattgattttgaagagttctctgctacggccattagtgtatatcaaatggaaggcctggagacctgggaagaacatgctcaacaagcatatgaattgtttgacaaggagggcaaccgaccaattgtgattgaagaacttgcatcggaacttggacttggcccttcgatctcatttcatgttgttctcaaagattggatcagacattcagatggacacccaggaagttgagttgcccccttgaccaggaggaatccacctaccatctggacgaaaaatgatcccatccatggggcagcgccaggtgtaccgaatctttggcacaacgatcagggatctatttcgcaaatgaacgaaaagatagcacaatttttttttatttttctttttgtgctagtgccagtattgtggaacgaatttataaggtttgtgggttgtgctgctaacatttatgttcgaatttggacgcctctctctctctctctcaggttggaaaggggttgctgaaggacgagaatgctcagaagcttgcgttgcagcactggccggaagcgattgacccgcggcaccggtacagccacaaccttcactgctactacgactgctggctccactccgaaagcaagcaacctttcttctactggccgcacttgaagaaatcttatatcagtttgaggaaaaactccaagctgaaagagaggaagctgctaggaagcaggaagagttgcaagcacaactacaagctcaacaggccgcacttgaagaaaaccaaagtttgctgcgccaggcccaagaggaagtgaaggggatgcataccaagtttgaagagaccaatgcactgctacgagctgtcctgaaacttcagaaagattgaggtagggatgcataccaagtctgaggatgatgcctttgcttaaggtttttctaccttgctagaacatatctgtggttagaactttgtcagaactacgtgcaatctgtttgaatgcttcaaacctttgtggtggaacctttgtatgtttgaacctctgttgtggaagaactagtgtgctggaattgtgtatgacttgtgatgagaatgttgtgtatgatggcttttctgtgtattatgattctgtgagctgtcatgagagctcagtgtgttgtcaaaa

SEQ ID NO: 138668 - DNA, 375 bp, Zea mays
  Clone ID: MRT4577_5794C.1
atggggataaatctcaatcaatttattggttttttttaggaaacacatgttgggttgagggccccattggcgagcacatttcatatggaatctaaaagagggccccttcaaccatgggttgctgcaaggcagggttcatcaaaaagaactggttgtttggcaacaattgttgttgctgctgcaggaagggagccaccaatgggttagccactgccaatggattaagtaactgttggccctgttggaggtacccaacaaagtttgacacaacccgttggttgaatggaaacaactgttgtaaggaggcaccagggtttgccacaactagctgagtcagagctggtacaatttgttggagcaacttggacccgtggg

SEQ ID NO: 138669 - DNA, 408 bp, Zea mays
  Clone ID: MRT4577_57950C.1
aaagggaaacaaaaggggggggggaagttaattttgggttttaaaaacccaaatcccaccaaacaggggtccatagatatgggggggggttaacaaagcaattttgggttaaaactatcagcttttaaacccccacccaatcaaaccagggggggtggccaccacctaatttcaaaaaccgggggaaacaaaaaaacccgctcgcacggggggccacaaaaaaaaagggggggggctaaccccgaaaaaacccagggcccaaaaaaaaaaacgggggaggaaaatttgccccacatattttgaaaaaggaggggggcaaaactggggactagaaaacaagggggaacttggaaaacctaaaaacccttcctggggaaaatggccgggccaaactaaaaaaaccccccc

SEQ ID NO: 138670 - DNA, 127 bp, Zea mays
  Clone ID: MRT4577_57951C.1
cgtgatagtactaatttggtttcttattttaacatatcatttaggaatcataccatagtttgcataatggttaattttatgcctgcttcttctattatttactaatccctttagtttgggctgtgaa

SEQ ID NO: 138671 - DNA, 259 bp, Zea mays
  unsure (1)..(259): unsure at all n locations
  Clone ID: MRT4577_57952C.1
gggggagcaaaaccaaaaatattttttcactggatttattaaaaaagaaaggaggtgggactattatttttatttttgggaaacagattgtttcaccaaccaaaaaaggggggttggagtnaantcaaattcttgcaacaaaancgnncaggaaccagaagggagatgaacggagcttcttgacttttccccgctttgccccatccaccgggttctttaaaaagattggcaccgccattgggccaaacccttcgggaac

SEQ ID NO: 138672 - DNA, 921 bp, Zea mays
  Clone ID: MRT4577_57953C.1
acaaggatgcttctgccgtgctgctctccgaggaattccatgaggttttcccgttgtacctttatactggaacctcagatcaagcggacgatgagtactcattggattcaattgttaaatttggtatcaatgggaagaagacctccggtgggaaaccgggcttcttgtacagctctctacggaattcacagtcggcacaaggcactatgagggtgaagaagaatctggtggtcagtggattggggaagacccatcaggtgtacaagtatgtgggaactgatggatgctacttcagggatgtgagcagcaggaactatactatagtttccgaccgctccgatgattcttgttcaaaaagagcatatagctctgtcagcgcgaagttgaatgatcagccagcaagaagaaagttgctggcgaacaaattgtaaagcacggaaaaggatctagttcgtccacgtttcagttttttactttgcttcttgaataaaagctgtttggcagctcgtgcttcagaaagtaggtaagaaacttgaatgtccctttataaacacgccaattcggatctagtggcaaggtattgttatcagtgactatcaattgcatcaccatcaaaaaaaaaaaaaaacaggatgatgcaggacaggacgagggatgaccactttatactggcagccaatactagttagtactaatcaagattctgacacgatcacactattaatttatgccagcattgcttactccgcatagattggatttgttccggatttcgatctccttcaaggcatcagcagattcttgttgctcttctctgtcctctttgcagatgtgtgttttggaagttttttttccctttcgaaaagctctttgcagatgtgtggtggtacttattttttatgtcaagacatacttggacct

SEQ ID NO: 138673 - DNA, 270 bp, Zea mays
  Clone ID: MRT4577_57954C.1
gaaacaccattacagggtcgcttgaatggtgttgcaacttgtattggtttggtgtgcttgtctgttgctgttgcagtacttgatgtgctttggataagaatttactgacatccgaaatctgaggacacctaattgttgctggaactactggagtgaagtcaaggatttattggtggcaacttagacttttgactatcgctgtgaccattgtagtcgctgctgtgcctgagggactcccattggcataacactgacgcttgatattccatg

SEQ ID NO: 138674 - DNA, 1851 bp, Zea mays
  Clone ID: MRT4577_57955C.1
aaatacaataacatggcctcatgcgctgagaagactagcagcctcgaggcagtggtcgcactttggcagaggttcgaggcgccgcgaggaaatggagcagacgatgccggatgtgcgtccaccacctccggtcacccagatctgaccggcgtcggccatgaagcggctccccatcctggtcgtccccgtcctcctcctcctactctccatctccttcttcctcttccggcctaccaccccgcctgtcctcagttcgcggcaagccttcgaacccgaccgccgtctcagggtctacgtcgcggacctcccccgcgcgttcaactacggcctgctcgaccgctactggtccctccgcgcagcggactcccgcatccaggcctcgtccgaccctgaccacccgcccccgcacgaccacccgccataccccgagaaccccctcatcaagcagtacagcgccgagtactggctcctcgcctccctccgcgccgcggcgacggcgccggccgccgtgagggtcgtcgcggactggagggaagccgatgtcgtctttgttcccttcttcgcgacgctgtctgcggagatggagctcgggtggggaaccaagggggccttcccgaagaaggacgggaacgaagactaccggcggcagcgggaggttgtcgaccgggtcacctcccaccccgcggtggcggaggtccagcgggcgggatcacatcttcgtcctgacagggtatgttaaatactgaagcattctttggaagaccctgtggctatgtggcatgtccgtgctgagattgctcctgcaatccttttggtggttgattttggaggatggtataaggttgattcaaagtcttcaagcaaaaactcgtctcgggtgatacagcacactcaagtgtcattgcttaaggatgttattgtgccttacacgcatttgcttccgacactgctcttatcagagaataaagatcgtcgcacacttctctacttcacgggggcgaagcataggcatcggggtggtttagtgcgagagaaattatgggatttgctgggtaacgagcctgacgttatcatggaagaaggcttccctaatgccaccggacgtgaacaatcaataaaagggttgcggacatcagaattttgcttgcacccagccggtgacaccccaacctcatgtcgcctctttgatgctattgccagtctatgcataccagtcatcgttagcgatgaggttgagctccctttcgaagggataatagactacacaaaaatctccattttcgtgtcagttagtaacgctatgagaccgaaatggctaacaagctacttgaggaatatttccaagcagcagaaggacgagttccgaagaaacctggctcgtgtccaacctatctttgagtatgacaccagctactccagcagcagaggctctacctccattgatggtgctgtgagtcacatatggaagaagattcagcagaaactgccaatgattcaggaggcaatcatcagggacaagcggaagcctgatggcgtgtcaatcccgctccggtgtcattgtacatgaacttaccatagctgctgcggaacgccggtaccaccatggcaccatgggaatggcttataatgagcaattactccaagctaattcctttcttgttttttgttggtaattgcaaatatgatcatgtaaaggaatggcttatgtttttaacccaatttttgtaaacccctttagtagtggttttgcacgttgttgtgtcattggagtggatttgcatgttgggcaatgatgatttatttgcttgttcggcaatgatgattcatacgggaaaaaacccacttggattg

SEQ ID NO: 138675 - DNA, 280 bp, Zea mays
  Clone ID: MRT4577_57956C.1
ccggtccgaatcccgggcgcgcacccgtcccctgacgaaccacttccatggcggaccactcagggcgagcagatcgcggattgaggaggcctcagcctctcgaaaggaggcgacgctgcatcactaccaagggcttggaactggatgcgctcccttggcagaccccactgaagcagagctgaggacatgacaacgagttgatgctgatggaatgggacattgacttccagagtcctgacctgatggcaggaagatgaggacaccgcctcgaggaggagct

SEQ ID NO: 138676 - DNA, 457 bp, Zea mays
  Clone ID: MRT4577_57957C.1
ctcgaggccggccgggatccgctttctccccactcacatacccagacgacgtcgcatcggactcccaggtaagcagtatcgtccaccccatccgccgtcatgaattgcaacccccgtgtttcgatctcccgtcgctaagtgccggaaggcgcacttcacagccccgtcctccgtccgccgcgcgatcatgtccgcgttgctatacaacgtagctccgccacaagtacaatgtgcggtccatcccgatccacaaggaccactatgtgcacgacatgcgcggcacctacaatggccgtgaggctatagtgctgcaggtgtaccgccggcgctggtcatccacattgagaggatcacccgctagaaggtgaaagactccaccgtgaacgtggggatctcacccttccaaggtgatggtcaacaagttgaagcttgacaacgatcgcaaggtgatcctcga

SEQ ID NO: 138677 - DNA, 384 bp, Zea mays
  Clone ID: MRT4577_57958C.1
catgcgtatgcatgcatgttaccgtgtccggtaattcccggtgtcgtacccatcgtcgtccgctccacgcgtgccggtagcgacttagtgtgtcagttgtagttcttcgatatgatgatcgtatgcttgcggttttgcatccatcagatgttcgtatgtatgttctttgcaatctgtcggtatcatagctgtcggctgcggtctcatagctgtcaatgtgcggtcaagtaagtaccctcgacctggtaggagacgagcaccgccgcgcaggccaccgtcgtcctcggcgtggccccggagaataaggccgcgcccgagttcgtcgaggccgcggcggagtccgtcgatgtccgccacggctgcagctgcggtggcaactgcaag

SEQ ID NO: 138678 - DNA, 355 bp, Zea mays
  Clone ID: MRT4577_57959C.1
gcacatagaagtaatccgagtggcgatcacacgagagagccacagtgtgtgaggggagggtatggtcggacggatgacaggagaaatgggagggctcagatcgaggatcctcaggaccttgcagtccttccccaccgccgctcccgcgcagtcgcccaacctcctcctcgcgccgctccctcccggcgccggcccctcgcctcaaccgcccgcggcgccgtgcgtccgcctccaggaaccggctccacaggagccgccgctgggcgatgaagcgcggtccgcgcccggcggcggaggcgatgacgacaaggagaacgtctcgccaggcgccaccccgcgcaaggccaagaagatg

SEQ ID NO: 138679 - DNA, 130 bp, Zea mays
  Clone ID: MRT4577_5795C.1
cggacgcgtgggcaaaatgctccttgagtaaaacaacatactgcaagtcaatgaagtcgaatttattaacatggacaccgacacaaaacatcctgatcctcatcacaactaccttctgactagcttatta

SEQ ID NO: 138680 - DNA, 447 bp, Zea mays
  Clone ID: MRT4577_57960C.1
tttgcaaaattcgccttttcgagcggccgcccgggcagggacaagcaaattttacttggaaattgtagtatttgagcggagtggcccgggcggccaagtgtagattaaccttggacacaacaataccttgttattggggctattcttcctcaacaacaacagaaagacacaattttgaaataaattaatctggccgccacaagatcggagagggagagactataaagatagggtaaaggataataggaaacaaatctatctttttaacaacaacggaaaattaaatagagacacggcgtgaaatgaggtaagcacctgatctgaagtgaattaaacctgctgctaagcgtaggaaagaaggggggtcatcattcgtcatggattccgctagagatctctggcatgatacagctttctggtgaacctagtgaggatgagcctgacgtt

SEQ ID NO: 138681 - DNA, 212 bp, Zea mays
  unsure (1)..(212): unsure at all n locations
  Clone ID: MRT4577_57961C.1
ccacgcgtccgcaatttaacttagtttatttcctgttgtcatgtgttcgtttagagtaagatgaactaccaaacgccctacatcactgtgctgacacatcaaacagaccacgcacatctgagagaccggctgtcgcacacactactatctagtgggggggggggtcncacttatcnaaccntgaatacaggaaattaaactaagtttaaatt

SEQ ID NO: 138682 - DNA, 675 bp, Zea mays
  unsure (1)..(675): unsure at all n locations
  Clone ID: MRT4577_57962C.1
atcagagacttccgaatacaaagtttttattctagtcttcctataaaaaaattcagagcattttgaaagaagaattactatgtcacttctatcgtcgttttttacatgtcaagaaatatacagaattganagagagagagagagagagagagagagagagagagagagagagagagagagaaggaagggtcttcaaactgacacgggttcagcctacaaggtncagacagaataaattatgaatgctaagttaacaggttgccaactccacatgatgaaattcagttacttctatattggagatttggaaatgacaattcatcttctttcattatcaaattttccggtgtggattgatagatttgttttggtacctgatgacacttatgttgtgaactgcgatgcactcgcaagatagtcctggtactcagccctcccgtaggaggccctaagagtaaaccagatctattcttcttgcctatccctactaacaccctgcccctccttatgtagagaggtagccctaacttaatagctaagcaacataacaaaccttatttggctagcactgttcacgcgctaatggactagtttcacacagctacagtactgttcacgcgctaagcaacgtaaccctacagaaccgcacgtgaacagtgttcacggctaacctaa

SEQ ID NO: 138683 - DNA, 170 bp, Zea mays
  Clone ID: MRT4577_57963C.1
ggaccagcaagcagccgccgcagtcggtccccaggcgcctctatatacggcacttcgacttcgatacattggcgacatcacacattacacacacttgggaactccatttcgaatctctttgtaattaacccattctttgtttctccgtctagcatgcttttactcttatt

SEQ ID NO: 138684 - DNA, 183 bp, Zea mays
  Clone ID: MRT4577_57964C.1
atgtataattacgggttaacaaccattcatgcttttgcaaccgggccggaacgaaagaaacaggaaaaaacaaacctcggcactgaggggtaggacgaccacaaacaaacaccaccgaacaaatcccaaggggcccaaaagaaaagtacgggtcattaatggtgcccaatcacccctaggaga

SEQ ID NO: 138685 - DNA, 596 bp, Zea mays
  Clone ID: MRT4577_57965C.1
caatcggatatatagcaaggtcatccctcctaagtaaatgggctagtttatttgcatctttcattgggtcactccgaccttcaataacaaggggcattgtgagaaggttccttggaccttcatggtctgtaacagctgttgatgctgcatgcagccatctcttaaggtacaacacaatgcgcaatgtccttttcatggcaatgacagagttccaaaagcttactgaagaaccagactggactttcatcagagcacaagaggacaaaatggcctttttgttcggtgtggatgatcactggggcccactatctcacttagaagagatatcaaagcacgcaccaagggtcaccctgtcggttgaaacagaaggtcacacacatggttactgctgtacagaggctggatctgtctgggttgcagactacatcgcaaatttgattaaaaaccaaatgctcctttggaacaactgaggttcatttggcagatgtatcataagactcttttctccgaaagaagtgaatagctggagtgtggtggaacttattgaggttccggttttgataatctagtccacatttttttggcttacgcgaccg

SEQ ID NO: 138686 - DNA, 433 bp, Zea mays
  Clone ID: MRT4577_57966C.1
cgaaaataaaacgggttaaccgcgggggccggaaaaacattggttacataaaaccgggggaatttccccccagtagggggaggacccaaaccaaagcccttgggggtttgtttttgggtggcggggcccccatgcggggtggggtttaagggcccttcccccccccgttgggaaaaggccggcgcggccccttggaaaaattcctccagggaaaagctgtttgaaaaacccaaacccccagtagttatttttatactggccaaaccgaaaactaccccaggggcgcaaaaaagccgccgttgccctcgggggggaacctcccccggttgaacccaaacgggctgggtccccggttgccttttttcaatgactgaaaaaccggggcccctccgccgccgaagctaaccagggggcccccctggccctaaggggg

SEQ ID NO: 138687 - DNA, 766 bp, Zea mays
  Clone ID: MRT4577_57967C.1
tactgcctcaagctaggtcccaagaaaggaggggtcacggccactgttgatgagcgcccctatgttgagctgtttttgtcaacttactgcaagattgctgttgctggctcagatttcacaagcggtggatggggctttgcatttccaagggactcccctctgcaaatagacctgtccaccgcaatcctgacactgtcggagaacggggagctgcagcggatccatgacaagtggctcaagacaggcgactgctcaacggacaatgctgagttcgtggactcgaaccagctccgcctcgagagcttcatgggcctgttcctcatctgcggggcggcatgcgtcctcgccctgctcatctacctcggcatcacgatacgccagtacctgagacacgaacagccgggaccagcgatctccgtggacgcagggtcgtctacgtcgaagcgcagtctccgaaaattcatctctttcgccgatgacaagcagccgccaccgaagaaaaagcgggccatgagcctctcgagaagttcaatgccaacgatgccgatgagtaaccgtcctggggctgatattgatgtagaaagctagtgcttgtgtatacgttttttttacctgggatacatcatctttgggccaatctatgcgtccttcatatatattatgtataggaaattagagccaaaggctgtgtagtggattgtatttgttggtttttagcatcccaaccgcccacggttaacaagtcgtacgagtttggcagaactgt

SEQ ID NO: 138688 - DNA, 504 bp, Zea mays
  Clone ID: MRT4577_57968C.1
cgttctgtgctttccacccgtcgccgacgagcagcgcgatccggggggagaaagggaggagaaggagaagatgggtggcgggatggaggtgcacaagaacaagtggatcgaggagtggaacgccggccgggagaacctcgagttcaacttccgctggacgcgccgcagcctcgccgtcgtcggcctcttcggcctcgccgtccccatcctcgtctacaagggcatcgtccgcgatttccacatgcaagatgaggatgcaggaagaccaccgaggaagttcttgtaacctgcaggttcatactcgtttgtttcaagaaataagcaatactgccagatgtggtaatgtcaacctgacaaacataatgctactcggttctttgtaagcactttaagttgctatgtatgctatgttccagatgttcgttcctttgaggaatctatgtaacgtcttttatatgaataactataactatgttttattgacatccgatatatattttgtat

SEQ ID NO: 138689 - DNA, 1319 bp, Zea mays
  Clone ID: MRT4577_57969C.1
cggaagccgccgccgccgcctctcttatcgcaacagttcatatttgcgaacgtggcccctgctttgcgttctccaaaccgtaccagcagcgtgccctgatcgccgccgcttggagtcctgatctggtcctcgttcgtcgggacttaggaaatccaagtaacggatagttcccaccggcagaccgagccgcgcctccattcttgtacgaaaccatggctcgcaaaaaggcaaccgtggagcagctccggacgctgaacaaggttcgtgaattcaagcgaaggagaaacatgcacaaggcagcaggagcaggaccgggcaacaagggagaaaatgtttgtgcaatttgtgacgatggtggtaacctaacttgctgcgaaggttgttgtcagaggtctttccaccttgataacgaacataattgcatcaagacacttgggctgactatacaagaggcaaagaacataatcgagaagggagattttatatgcaagaactgccagtacaagcaacatcagtgtttcatttgtggatcgttagggtcttctgatgacactgacacagcgtcacagcaggtattccaatgtgagcatgacgattgtgcacgcttttaccacccaaaatgtgttgctcaaatgctatatccagatagccaagaactgttcgagctccacgtggctgccggagagagcttcacttgtcctatgcatgaatgtattgtgtgcaaggaagtagataataagaaagataagagtatgcagtttgcagtatgcagacgctgcccaactgtttaccaccggaagtgcttgccaagagatatcattttcaaaccgaagaaaggtcgcaggggtcccatgcgaagggcgtggaagaacatgcttcccgatcgaattctgatattctgcatgaagcatgagatcgtaagagaactacaaactcctgcaaggaatcatatcgtttttcctgaatccaatgtgctgaaaacgtttcaagctctttatgctcaaagagaggcgcctgaccactcgtcatcgaagcaaacccactcgtcccctccaccggctgcaagagaccagaatcagtgctactgttctagccctttatgctcatttgctccaagttccgtgttcatgcgtccgcatccaggctcctctggttggctcgatgactgactaactaattaactatacggcccatctgtcccctgtagagagaaaccccctgttacaagtccttttgcaaataattggatgtagacaagctagtgttagccaaacgacaaaatcctattttttttaatataacctgatttttttattgcg

SEQ ID NO: 138690 - DNA, 511 bp, Zea mays
  Clone ID: MRT4577_5796C.1
agacaagagagagaagatgataacctgatgatggttatttacaacgagctagcatagcactccatccaatataacaatgaataattgtgtatttgccggtcctgatgaccgatcgcgatcgattaatcataagcagaagaactagaatagcttgatgggtttctgcatgcatgtatctactcccacaaaagggatgtgcagtacgtgtgtgggggctacactacactagtaccacataaagtacgcgctagctagctagttcattcgcccacatgtatggatggatcgatcttgctttgatgagctagctagctgaagccattttgctttgttcttgtgagatcagcctgacttgagtgtgtcgatggcatgcgctagctcctcaatcttggcgccgggcaccttcttgacgacctttccacccttgaagattttgaacgttggcacaacctttatttccagttcctttgaaagcggcttgttgtcctggttgcagtcgagcttgaagaaa

SEQ ID NO: 138691 - DNA, 273 bp, Zea mays
  Clone ID: MRT4577_57970C.1
gggcatttattgccagctgtgctcgagaggtatactaccctaccctgctgctgcctccgccaacctcggtgacccgtttccgcacgcccctttcctcggtggagagcgcgtcagcgctgcaacctgatctcgggggagatatagcccctgtagaaacacctggatcgcttcaccggcaccaaagagacatgccctctgggcgaccctggcagagcttaatgataacgaactcttcccggaaccactgcacgcccatgcgggtcttgtatgggc

SEQ ID NO: 138692 - DNA, 898 bp, Zea mays
  unsure (1)..(898): unsure at all n locations
  Clone ID: MRT4577_57971C.1
tcataaaacaggtatcaaggaatgattattcaaattctcaaggttggtaatgcatcaattgtttgatcacgcaattcctatcacctaatgcatcatatcaagtgataaaagttttgtaaacaacaaggaaangtggtggatgcaccggggcttgtctttgttgcagagaagagccgaagactaagaaaataaaatgtcacgagtcttcagggtgatgaccggtctctagaaaattactccaccaagtgattgatcaacagacaacgtgatcagtgtgttccacggaagctgatggttgaagagatggaacacgagcaggcggcttgctggacgtcgagttcggccgagatgaagggagcagttggatgaagtgagcagggacgacgacgttaggacacaggaggaagaggccgacggcgcgcaagcttgggactccaccaaactcgaagacgggcctgacaacttggcgagacgttcgcgaaggatttccaaaggagccgagatgagcagtgcgccggaccgggcgagttcaccagcgcggttggcagcgcgcagctcggcgaggaggcggcacagagaagacagaggagagtcgtgcgtctggtgctgcgtggaagaacagagaggcgagttgcttcaggtgcggcggctgaagacaacaccggacacagctggaagccgagctcgcgagaggatcaacagcggtgagatttttaccacgcactaagacatgcgtggagtgatttggatgggaagagcggctagaaagctacgtgtcgtgagaatgccggatgagaggataagctagccgtgaaaaaaaaaatctcctggaaagaaaagtctccggagaatgccagatgagtggaagaaagaaaaaaaaaacaatctttcttttccc

SEQ ID NO: 138693 - DNA, 493 bp, Zea mays
  unsure (1)..(493): unsure at all n locations
  Clone ID: MRT4577_57972C.1
gcggctggatgtccagntcttctatgccacagatctagtaagctcttctctgtcatcaatgctaagctcttatttgggaatatgtagagaccgtctcctacatctgcctcttagagagaattgcttcgtggtttgatccttaacaaagaaatgagtagcatgataatgaacaaaggcattgttgtacagaattaactttctaagggaaagcaagtgtttgttagatcttgggtacatatgagatatgggtgaggaacaatggagctaactgaacccgaaatagatgaatgaacaacatgggtgaaagacaaacctgctccattatcaagttggacttgatctccaccattgtagaggatccttgaaggtcagtctttcaagatcatttggttatatggtctgtggcaccactatccatatccaatntggatcaacgttgtattcatgagttgctgctgctgcctgtttcacagttgcttcaagcctgaaagct

SEQ ID NO: 138694 - DNA, 320 bp, Zea mays
  Clone ID: MRT4577_57973C.1
ctcgtacgaagcttcgatttcgcctcgagctgtgctgaaactttgaccatttgaattctctgtgctgacgtgaagcgaacacagagctaacattcacttgcgctgtctttcgtgtggagatgcataaactggcagagctcctgagtcagcaatacattcgggctatgccaagatacagacttcacttttgtcagtgctgaatctacatagaaacttaagtggtaatgcttttggaaaacacttacttatggaacatttgaaaagcgcttaagatggctttgaaatttctgaaactaaatcctgcatttgtaatccatggg

SEQ ID NO: 138695 - DNA, 299 bp, Zea mays
  Clone ID: MRT4577_57974C.1
attttcttttcttattttgaaaatgaacttgcaccatcttagcccaccggttatctaaactgtataatagctaagctgagattacgcagagttccatccaatttgacactaaaatgatggatttatactgaacccttaagtgtacagacaattttaatattagaagtcttgtcttcttgcttgtatctgacagttgatactcatccacgatagcagatgtctcactcttctgtgcttccttcatgctcgtttcagatggaaccaccaataacctcaatgagtacatcatgatgtctgtg

SEQ ID NO: 138696 - DNA, 631 bp, Zea mays
  Clone ID: MRT4577_57975C.1
attgtatagagataaatgtcacaataatcagagtatttatacatagcggaagacttacaaaataaaatataaatataacaggatctgaaatatatccttggcgccagaaagtcaactgggagacgacgacctagacctcacacgaacacatggcacatccaccatgcgccttctccagtgatacctgttcttgaccttcaatgagctcctgctcagctacttctatctgctggtcactatgatcctcactcacaggttctcctcaacggcggaggaagcagcgacgctgatggtctaggactcggtcgaatcggtcatgagtcttaatttcgagagcgaaacctcaaccccgcttcccaatctcccctggcgaggctgtgattcccgccccgttgacatcgcgaagcccaacagctaatgtcggcgcattgaacgacggtgaggaggatgtacagcgccagcggcgactttctttcggttcttcgctcggtgttcgcgccaacggtggggttcaagtggaggaatagggtctagattagaggggatgggttcgccctttatgcgcgctgaagattccgccacccggtcaatccccccatcacggaccgaccgaatcgaacagactccggtc

SEQ ID NO: 138697 - DNA, 246 bp, Zea mays
  Clone ID: MRT4577_57976C.1
ccctttagctcgtactcgcatcgctcactacgcgcgctcgaagagtgtctcgcgcgagactgactacgactcccggggagtgctacagcgcacgtccactcgacgatctcgcgagagcacctatatgtgagtgtgagagcgtcagtgtgtcgatacagactagtggaagagtaacgagatacgcagatcgtaaggcgcagtgtcctcaatagtcactacaggttagcgctatcacgatcttgtctc

SEQ ID NO: 138698 - DNA, 285 bp, Zea mays
  Clone ID: MRT4577_57977C.1
ctcagcggcccgcagccgtgactatgcactacgcgcccacccggcctgtagggtgagtcggcttcatcccaccggcaacgcgtcttcgctggtcgcctccatcaccatcgctggatccctctacgtcggttcccctccgccgtcactggatgtcgtcgtgaatcgtgaccgctgctactagtcgcctacgcagctgtcgtccatacgcagtcgtcctcctctacatcgtcaaaccgtaaggattcaactgtatcagctcaagatcaatattcttgtagatgagta

SEQ ID NO: 138699 - DNA, 459 bp, Zea mays
  Clone ID: MRT4577_57978C.1
caatccgatagagagagcatacccaatgatgaaggccgctaagaaggaactgccagggcgaggcgggccatactgctgactctgcatctcatgagagttccaccgacgagcatggccgaccgatcgacgcgcggagacgggacggatgggtccctcagcacgacgcccaaggtgacaatgctgtcggggcacgcatgtgctacacgggggagacatgtaaatacactccctgcttcactcctgattgctccggcagctttagtgagcacctctgatacggcatatatactcgtgatggttgagttgaagccattccgcgaagacgcaactctgacgtgaatgaggcggacgacaacgaccaggttgcctactatgagcttccgtctcaagtgaggtgtgattcaaggcatccatggatgctatacgaatatgcgtattaattatccgcgccagggaagc

SEQ ID NO: 138700 - DNA, 668 bp, Zea mays
  unsure (1)..(668): unsure at all n locations
  Clone ID: MRT4577_57979C.1
cctgacgagtgacgacgantccaacgcctgcccgggccgggcattcgngtcaatggccngcacaggaagacagcagcagaacgngctccggccnccccgcttcagcagnttnttcctcctcctcctgggccggctcgccgccgtcttcacgcagccatccagctgcaggcctgtgcttcttgtcgacaagaccgacgccaccgacgtcatactgctgcctgtacccgccgacgccgagaccacagcgacggtcgtcttcgcggcaccgtcggcgaccgtgcccagagaggacgacgacgagggccggcggcatcatcggctcgccggcggccgccaccagtggctgctcaacaagaagccccggggcaaggcgccgccctccgcccccagcaaacgcaccaactgatttcatttcatctcgatcgacatcgaccgtgcgtgctcactctccaacgacggaaaaacgacacgctgatactagttctcctcgtcttccattcaaacttcttcttcatttatttcttctttttcttttttttcttttctttggcttgagtacatatatattacagtctacaggatgtaaatgtagataccgatcgatacatgctacaattcagttccaagtgtttcgcgatcgcgtcttcattgttaggcaacgtacgcca

SEQ ID NO: 138701 - DNA, 679 bp, Zea mays
  Clone ID: MRT4577_5797C.1
aaaaaaaacggggggggccttcttaattttaggggggaaccgggggttttggggtaaaaaaccccgggggaaaaaaaaaattctttggggttgggacccctaaatttggggggttttttttttaaacacccgggggggggaaaccccccgggggggttttggaaaatgttttttcccaatttgttggtgaacccaaattttcagggggtttttgggcccccccctttttttaaggggcttgaaaaattttttttccaggggccccaaagggggccaaaaagttttcctgggtttccaaagggggggtttttttaaaaaaaggggggggggggtgcccattttttgccctcccaaaaacctccccaaaaaaatggtgggggccataaccctgggggtttgaaagggggcccccagggaaaggtgggggggcccccaaaggggggtggttttaacctttttggccgaaacccgcctggaaaaaaccaggggggaaaccctttcctttaggggacaagggggggggtttttggcccttgggaaaaggggtcccataaggcccctgaccatttccccttttgtgggggggggggggcccctaccccaacggggggggggggcccccttttcccaagggggcttaaccttggggggggaaaattgcttcaacatttgggggggg

SEQ ID NO: 138702 - DNA, 225 bp, Zea mays
  Clone ID: MRT4577_57980C.1
gaactgtagcacacaccgactgtaaaaaccgatgccgtcgccgcattcttgactcgtatagaggatccaaaggtgacaagctacgcgaaaacagaaaaaaacccttgcaaggaaatacaagactctggtatgcgcaaggtatgcggacctatgatgagagataaaaaggctgtagtcaaggccggtcttcataatgcagcaaaggcgatcaaatgggattataag

SEQ ID NO: 138703 - DNA, 344 bp, Zea mays
  Clone ID: MRT4577_57981C.1
gggggggaaaaaaacctttaaaacccaaaataccaccgggttttaaggatttaactaaaaacaaaggggccgggaattaaaaattttcaattaaaaccccggggtttttaaaaaaaaacccaggggggcatgccttggcatttaaaaaaaaaacccctaattttgaaaataaattttggccttaaggcaaaaaattgcaaagggaaaaaaaaaatccttagggcttaaaccccttttaaaaaggtttaaaatcctgaaatggtttaaaattttccaagggtttttccaaaaccttaattaaaaaaaattttttgaaaaccccatcctttacttaaaaagggaaa

SEQ ID NO: 138704 - DNA, 262 bp, Zea mays
  unsure (1)..(262): unsure at all n locations
  Clone ID: MRT4577_57982C.1
cgcacatctcaccagagctgtggttagaacaattgctccagttcggttaaggtggcctggccggtatctcagttccaaagatctaccccgataagtagtactagtatagttgtaacctggcgtagtgctgaaatcccactgtcgtcaagacacactgcgaactccatgcaggctttgacaagacagagatcctnctgcattnctntnctattcaccctcaccaaacatgcctatgccattagttcccatttagttataagct

SEQ ID NO: 138705 - DNA, 1657 bp, Zea mays
  Clone ID: MRT4577_57983C.1
cattgggtacctcgaggccggccgggacacatccatactgaagcctcaaatcctccgcctcactcccatcccatgccctcctctcaaccctagtccttccccatcccttactcatggcgctctcttcccacgccaccaccgctgctgcggcggcggccgtcggcacctttccccaatccactcgctcctcttcccggcggggacgtcgccgacgttgctgcgctgctcggggagatggactgcgtcgggctgcggcccgggttcagcctcgtggagaaggccgtcgcgctctactgggaccgcggggagaaggagctagctgtcgagtttgtcagagacgtgctcaggagagggggactcggagccggcgcgggaggggagcacagctctgccagtggcgatggtgagcggggagggcccgttggctacctcgcctggaagatgatgatggatggagactatcggaatgctgtcaaattggtcattgaatttaaggagtccggtctcaaacctgaggtgtatagctatctcattggcttgactgccttggttaaagagcaaaaagaattctcaaaggctctgcgaagattaaatgcatcggtgaaggatggctcaatttctaaactggatgctgagagcatgcatagtatcaacaagtatcaatcggatttgttaagtgatggtgttcttttatcgaactgggtagtacaagagggcagcagcgaagttctaggacttgtgcgtgagaggctcctatcattgtatacttgtgctggttgtggcttggaagctgagcaccaactttgggaaatgaagcttcttggccgagaacctgatacacagctctatgatgttgtattggcaatttgtgcttctcaaggggaagctgctgctgttcgacgcttgcttgcaggagtcgagtcaaccagcgccggaagaaggaagaagtctatgtcatggctactgcgaggctatgtcaaaggtggcttcattctagacgcctcagaaacactcatacagatgctggacatgggcttgcttcctgattacctggatagagctgctgtactgactgcactgcggaggaacatacaggaatccggcagcctagagtcctacttgaagctttgcaagcgactatctgagacagatctgattggaccatgtattgtgtatctatatgtccgcaaattcaaattgtggatggcacacatgctttagagttctgatgaaccctttcgtcatatatccactcatggcaggtacaaaatggagatctctaaaaaatgtgtgtggctcaaacgcttgtccctgatgaacaagacatagaagcttcaatttcggtgaaccggttggtacataataatggttccttgtatatttttgaccgaagtagaggtatcaactggttgtttgttgtaaacagggctgttgtagtactttgaacagagtccatatcgtacatgtaaattctctgtgttactgttttcatatgcagtcgctgttgaaatctgtgcgttactgcagcctgtaggggataggcaagatggaaacttttgttgatataatgtacagctctgtcgggactgaacttctaaagttgtaccgagattacacgatacatctctgttttcctgttaaaaaaaaaaaaggccct

SEQ ID NO: 138706 - DNA, 187 bp, Zea mays
  Clone ID: MRT4577_57984C.1
ccaagctttctttttttttttttttttcttttttggtgactgacaattgaggcgatagttcaatttttgacattggggaaatcataaaacccataatgtctttgttacaaaatatatcatatgcacattctgttcgtcccgggacgacatgcaaaatgtactatgcaacttgcgcgaccacgcaagt

SEQ ID NO: 138707 - DNA, 1072 bp, Zea mays
  Clone ID: MRT4577_57985C.1
gccggccgggtcgcgagtgaggtactgggtggtactgcatgtggctatccccggaggcccggaggccaggacactcatctgcccttcctctcccccgcccccgcccgggcgtccgttcagccctcccttccttggcttgggccacgtcgccccttctcctccccacacatccatactgaagcctcaaaatcctccgcttcactcccatcccatgccctcctctcaaccctagtccctccccatcccttactcatggcgctctcttcccacgccaccacagctgctgcggcggcggccgtcggcacctttccccaatccactcgctcctcttcccggcgattccccgcgtcgtctgtctccccccgtcctccgccgcccccgcgctccctacgcctcgaccatgccgtggcgccgtccctctcccccgccaccatgcccgcgcccgacggtctcctcgctgcagccatcgaacacctggagcgcgagccagcatccgtcgcagccgacgaggctccgctcgcggcgctgtccccgcgggagctgcagctggtgctcgtctacttcgcgcaggaggggcgcgacacctactgcgcgctcgaggtctttgactggctccggcgcgccaaccgcgtcgacggggagaccatggagctcatggccgccatcgcctgcggctggatcgagcgcctcgtgggggccggcggggacgtcgccgacgttgctgcgctgctcggggagatggactgcgtcgggctacggcccgggttcagcctcgtggagaaggccgtcgcgctctactgggaccgcggggagaaggagctagctgtcgagtttgtcagagacgtgctcaggagagggggactcggagccggcgcgggaggggagcacagctctgccaatggcgatggtgagcggggagggcccgttggctacctcgcctggaagatgatgatggatggagactatcggaatgctgtcaaattggtcattgaatttaaggagaccgggctcaaacctgaggtggatagctatctcattggcttgactgcctgggttaagagcaaaaggaatt

SEQ ID NO: 138708 - DNA, 643 bp, Zea mays
  Clone ID: MRT4577_57986C.1
ggtcgaccacgcgtccgatcaaaggagtgattgatgcaatggcttacagcaaattgaatgttctccattggcatatcgtggacgagcagtcgtttcccattgagataccctcataccccaaactgtggaacggttcatactcttattcagagagatatacgatgtctgatgctattgacattgtacggtatgccgagaagcgaggtgtaaatgtgttggctgagattgatgttcctggccatgcccgctcatggggtatcggctacccagcattatggccatcagaaagctgcagagaaccacttgatgtcagtaaaaacttcacgtttgaagtcatcgatggcattctttcagattttagcaagatttttaagttcaaatttgtccacttaggaggtgatgaagtcaacacaagctgctggaccagaacaccccatattgaaggatggttgaataataaccatatgaacgtatcagacgcatacagagattttgtattgagatctcaaaagatcgcgatatcacatggctacgatgtcataaactgggaagagacatttaacagttttggagacaaattggaccctaaaaccgtggtgcataactggcttggagaagatgtagcgcccaaagtggttgctgc

SEQ ID NO: 138709 - DNA, 560 bp, Zea mays
  Clone ID: MRT4577_57987C.1
ggccgcttttttttttttttttttctttttttttttttttttgaaggaagaggagggttgcccctcttgttaataaacaaccgggggggtcataccacattcaaaagatcatatcctgctttttattatgccgaaaaaaaaaaagacatgatgcagcacagcatgagtcgttgttggtctgctgggtggccgcccttcttacatgcgaggcctcttctcggcgccgccgaagatgacgggcagcaggttgtcgaaggaggggttgatgtggtggtcgaggaggttcacgggggctccttcggcgacgaaggccggctggatgaaggcggccatggtgaacatggtgggccggccgccgttgatgaccttcatcaccaggaggacggccggctggtgggcgctgctcaccaccacgaggtggaaggaccgaccggggtgcagctggttgtcatggaggaccacatcattgatgatccggtactactcgccgccgacgaggaggatcacctccatgaccacggccaccacgaggatggtggtgctgctgccgaagaagtaga

SEQ ID NO: 138710 - DNA, 228 bp, Zea mays
  Clone ID: MRT4577_57988C.1
agattgggggtttttaattatctgtgagaacacttgagcgagcaagttgaccaaaacagatggaaaaccaccagattctgggggtcccggttcaaaaaatgagtggcgtggaattctaacgaggttggagtagggctccgatgctggggacagaactgtcctgctttggacaacacttgttccagggcacctggccggattgggccagataaaaagactcggttgcag

SEQ ID NO: 138711 - DNA, 565 bp, Zea mays
  Clone ID: MRT4577_57989C.1
ggggttggggtttttttttttttttaagggaccggaattttttgcatccccctaacaaagtataaggagcatcgcaaactcccagttttgcacatgccgctccacaaaccctatacaggatccccaaataatacacccccaaaataaaaaacccccgggaggtgggggcaaaaaaaatgccttccccttcaaacccccccctaaaaatcatcaaaagagcggggggaaaacaggacccccttcaccctatttttgagctaagggagggggccattctgaaagggcccccccctgaaaaaaatcgcccggccggccccccccaaaccccacctttaaagggacagccgccctttgtacccggccaggggcccgaaaaaccccgggggaacaagggacacgggcttggggccccgggcaaacgggaaaaaaaggctgggaataaattggggaatttggggggacccaaaaccgttttcgccccacaacacccggaaaggcgtcggcctggccccccccttggggccccaggggctgcccaggaaaaaaccaaacccccttggaggcg

SEQ ID NO: 138712 - DNA, 1432 bp, Zea mays
  Clone ID: MRT4577_5798C.1
ggcttgccggggccgcacgcacgcaatggccatggccgccccgcctcccacggctctctgcgcccgccgcttccggccccaccacttcgcatactcctcccccgccacgctccgcctacccacggcctcctcctcctcacagctccggcgccgccgccggctagccgtctccccgcgcgcggacgcggcgaccgggacgggggatgtggaggcgctcagggccggggtgtccgtgtacaagccgcggtcctacgacgtgctcgtcaccgacgcggctcgctccctcgcctgcgccatcgacgacggcaagacccggctcgagatcgaattcccgcctctgccaagcagcatctcttcttacaagggctcctcagatgagttcatcgatgccaacatccagtttgctctcgttgttgctaggaagctcaaagagctcaaggggactaggtcttgtatagtgtttcctgatcaacctgaaaaacgtagggcatcagagttgttcaagacagctatagacacgattgagggtgtaaccatcagctccctggatgatgtacccactgaccctgtcaacagcttcttcaaatcaataagaaacaccctggattttgacttctcagatgacaatgaaggtagatggaaatctgatgaaccaccatcgttatatatcttcatcaacagcagcacgcgtgaccttgcttctatagagaagtatgtggaaaagttcgccacatctgttccagcccttctattcaatctcgaactagatacattgcgttctgacctggggcttctcgggttccccccaaaagatctgcactaccggttcctttctcaattcaccccagtattttatatcagacagcgtgactattccaaaacaatcgcagttgctccatacatagtgaattatagtggagctgtattccgccaatacccagccccctggcaggtcatgctgaagcaggctgatggttcctatgcatgtgtcgctgagagcgaagctcggttcactttgggacaggcgaaagaagaactattgagagttattggtttacaagaagaagagggaagctcccttgaatttctcagaagaggatacaagaatgctacctggtgggaagagaacgttgatcaggagacgtcgtctgcctggcgaacttgagatgctatacttgctggatggatgcttttctaacctggaactgggaatggataatttggccaacgagtgtccatgtcttgttgtatggaactaaaaaatctgaaattacagaaagagaagtccatgtacagcgtaataacattgcctgtgatgatcgtattattattattgttgttattattatgcgagtacacagagcttgtgagcactaagaatgtttttttacaatggtgatttgtacatttgttcgaaaaaaaaaaaaaaaaa

SEQ ID NO: 138713 - DNA, 432 bp, Zea mays
  Clone ID: MRT4577_57990C.1
atggctagagtgcgatcgactgctagagtgtctcgcgagggaggcgaggtcgaagtaactgagatgacaccaatatcagaggtgatgaggcagtcgggtcttgttctattagaagagcccattgccgaaggtacttcgactgctgaagctgagggaatcacagttggagagggaagtggtaatgaagacgaagaagattacaccatcttgatcccagaaaaacctagtcaccttgactttggtagatctactgtgacggcagatgatatggttataatgaaaaaattgggttactttggagaaaccgagagtaggcttgtttgttttgctggcgaagaagtggttccagagccgaaggatgatgaagttattgtgtttaaaagcttcttcagagcggggcttcggttccctctctatgatataataggatag

SEQ ID NO: 138714 - DNA, 161 bp, Zea mays
  unsure (1)..(161): unsure at all n locations
  Clone ID: MRT4577_57992C.1
cggacgcgngggccagcggccacggacctggngaagccggccgaccaggacggcgggacgccggacanggaggcgnnggncgngggccaccncgacacgacggagaggagacccagacacccanacacgggggcgcacagncncaagccaggggacgacgc

SEQ ID NO: 138715 - DNA, 473 bp, Zea mays
  Clone ID: MRT4577_57993C.1
gtgacccgtgcacgatactcgggaaaggccgtctatatcccccatcactctctgctgccgtaatggaaatcaacgcacagacaggaatgccttatttccagtagggctcaaacagactcgaggagacaatgcaaaccaacggcgctcacgcacccaactccacacaaatggacggaccattctttgaggtatcaacaaggcggaaatgtcccgacagcctaaaggatccacgaaaatcggatatcaatggagaggaaagacttgagactggatctaacaacattaaagcgatacgatggcttgtgaaatgctcagacttggcatgccatacttactcaccacaccaaggataaaaatgacttatatagaatagcgacagattaagatcttactgttgatcactggaaaacctatggaaagaatttctttactagatacgactatgaagcgagtgaatcacacactgcactacc

SEQ ID NO: 138716 - DNA, 345 bp, Zea mays
  Clone ID: MRT4577_57994C.1
cgccttgggcgcggcttgaaacgccgttatgacaggcgggggcatgaaaacacaggcacgccacctctctatcgaatgaatcagtcgcattctaatttcatacggactcgagctaacctaggtaccagggtcctttctttaacttgttcgttcgctgactatcaattaattgacagctcgacaaaaaatgtcaaggcaatggggcttcatgaatcatgatacaggcaggcatcctaccagagtacagtgtacgcatatcgcgaggtggtcacagacacagaggaggagcctctctctatatagccgccacagtacttctgaaacgcgcctacgcaaaagggcaat

SEQ ID NO: 138717 - DNA, 347 bp, Zea mays
  Clone ID: MRT4577_57995C.1
aaagtgtgttttaagtaaaccataatcaactcttcagagggtacattttacatcctaaacaaccataccgacggatatgtcaaacaaacaaccctaagaagaaaacggagcaacgcctcaccaaacctatccaggaccaacaaagatcctctttctgccgggggaaaagaaacatcagcaatcaccaccgaatgacacgtccctaaaacaaaacagaagaagacacctaccacgagatgttagaccacaaagtagatacatccgtgccaccacgagatcgtaggcagaagaggcttttccgctgctgccatgttttccaagacactgatagcgtccttcccaccccc

SEQ ID NO: 138718 - DNA, 552 bp, Zea mays
  unsure (1)..(552): unsure at all n locations
  Clone ID: MRT4577_57996C.1
caattttgtttagttacaatgactatagcatgacctttaatatcatgccctcaagcactcagttttttaacatatggatatgtgtggacacaatagcaattagttttattgtctatcccaattaaagaatggccacaatgtagcatttgattgacatacacctctaatgtatcgtacataagtaagattacgtgaatacaacagcagtttgtttcattatctgaatttatttattaagaatgaccataaaaaagggtgtttcgttacctatatatatgaacacatacttcactatatacaaattgaaaccaagtgtaactcggcatattgtttctaaaaacactaaccgttagtttatgtgatgttcatcctctntgagatttcatcagactgcgtttctaacaatggacaaaaaaaggaataactaatgagttcaaacaatactattatgtccttcactaggaaactggtcagtatatagtttgcctcctttatatataatatacatttaacaatgtattttatagcttctttcttcgatatttacaagct

SEQ ID NO: 138719 - DNA, 635 bp, Zea mays
  Clone ID: MRT4577_57997C.1
aagcggagcactattcatcccccatcctttccttctggaggatggcagcgagcgcgccttggcaaagaaacctcccgctccgttgcggtgggtttggacccgagcgcggaggaaggccgacttggatccgctcgatctcgccgacgaccaggcccaacagcaggacattgcggcgctcattcccgtcgatgtactccgagcaggcaccgcaataacaaccctcactgccgcaggtgttcttcatcgccacatccgacgtccttgattcagtcaatcgatgctgctctcaaatctagttccccctcccatcgccgctccatctcaaagcacagatcttgacgtactccatcaggttttgtagttcttcaatagtacattgtcttgcagaagatccgtagaaccatgtacaggtttttaaactacgatttggtgaaatacttgcatgctttgtggaagacgaatgtgtccctggggaagtagaagaccagctcgaagagtaggaggcgtacctgctcgattcagtcaatcgatgggaagacgaagagtagaaggcgtacctgctcggttcagtcaatcgatacttaattatgttttttctaaaatttagaaattaaataataccgaaattaatacat

SEQ ID NO: 138720 - DNA, 389 bp, Zea mays
  unsure (1)..(389): unsure at all n locations
  Clone ID: MRT4577_57998C.1
cggccgcgtgggtgtaaatgtcctcaacatattcagattctacaagagcactgagggcacctgccttcctctcagcagctacatgagctcacaggctgaaatcagtgagagaatgagagctatccttacgctggattatcgaggacaattacaggcttactctaatgccanagacactttactggtcnntgatgtnnaccgtcaantaaagtgtctctggcattagagtaagcctgtcctgtccctcgatantccagtcgataaggatagctctcattctctccctgattncagcctgtgagcctctgtngctgccgagtgganggccggtgccctcagtgctcttgtagaatctgaatatgttgcggacatttacacccacgcgtccg

SEQ ID NO: 138721 - DNA, 602 bp, Zea mays
  Clone ID: MRT4577_57999C.1
accccttcctcctgcatcgcctctccctgcagtgccctctacctgacgttccccttctctctcactctagatcaagcggagcactattcatcctcaatcctttccttctggaggatggcagcgagcgtgccttggcgaagaaatctcccgctccgttgcggtgggtttggacccgagcgcggagaaaggccgactcgaatccgcttgatctcgccgacgaccaggcccaacagcaggacgttgcggcgctgaggaagcattcccgtcgatgtactccgagcaggcaccgcaagaacaaccctcactgccgcgggtgttcctcatcgccacatccgacgtccttgattcagtcaatcgatgctgctctcaaatctagttccccctcccatcgtcgctccatctcaaagcacagatcttgacgtactccatcaggtacgaagcgcttcgatgacgagttcttttttatttggtttgtactccatcaggtaccttcgttcttaggttttgtagttcttcaatagtacatgtcttgcaaaagatccgtagaaccatgtataggtcttaaactatgatttgctgaaatacatgtatgctttgtcgtc

SEQ ID NO: 138722 - DNA, 660 bp, Zea mays
  Clone ID: MRT4577_5799C.1
ctggccgggttcagcagtgactgaactacaagaattaatgtaagtaacctgattcgttgattctctttttttttaaaaaaaaaaaaaaaaaaaaaaaaaaaaaaaaaaaaaaaaaaaaaaaaaaaaaaaaaaaaaaattcctggtggccgggatttggatcaaggaaaaatttgggggatttggcctcacgtataggctaaaaaaccctaaattaaaaaaaaggggaaacctggtggtttttaaaaaaattggggggaccctaaaattagggttttaggggcagggcccctatgggggattaactaccctttataaaaaccgcagccttgaataaaaagggaccggttcgggtggtttccacaaattttcccgaaaccatggttaaaatccttttacgagggggttttatggaaggggttgggaaccatcgggaaggtaccagatttttttgggtttaaacttggggacatcaagggggaaggcctggaaggggattttttggacctggaccctttttaaggggtataacccgcccgggtttacaaatttatgccacctttcagggattccctagggtttggggcggaagggaaatggttattttttctacttctcggggtataaggccagatcgagaagctcgactaaccagaatgggg

SEQ ID NO: 138723 - DNA, 208 bp, Zea mays
  Clone ID: MRT4577_579C.1
tcgcggggtatacgcactcaagcttatttagtttagcacacaccatcagccaaagcatactatggatcatatgcatgccaagaggaaacaacagcaatcttatacacagcttcctaagaccaaagcgcatatatgctcgaggcttgcacgtggcctcccacaggagggttttagacagagtgagcaccccgcccgaaaacatgaagat

SEQ ID NO: 138724 - DNA, 3213 bp, Zea mays
  Clone ID: MRT4577_57C.1
atgactgggcactttttgaaacggtatctagctcgagaatatcccataagagctgcacttttagcctcctttgctttccgtgccctagttcttgctttcccgcttccgaatcctctccgccattcgccttccgctctgcttgctggtagaatcgagatggcacccaagaggaagaccgcgagctcgtctgctgtggtgattcctccaatcgaccccaacagccagttgcctttcgcaggtaaccacatgtccatcatttctgaaactgagcttcttcacctcgtatctatcggggttctttctccgcaagaactctgttcttggcggatttgccatgggtttactgttccgacggaggatacccatgagtctgttgtttacgccccttttcttcttcgcggcctcggccttcccatctctccctttttccgtggcctccttgatttctaccatattaacttgacccatttgaaccccaattcaattctgcaaatcttcattttcgttcacttatgcgaagcctttcttggcgtgctgccatatttcggtttatggaaatacttgtatcattgtcgccctgggatggccgggggacaacatcagttggtcgggggtgccagcttggagatgcgccgcgggaggaaaactgaatatcttgagatccccctcaaggacagtattaagggatggcgcctagagtggttcatacttgagaattatgggaattctctcccctcccggtcgggaaggcaaccggacgttcgcaccacaagctggaccgagtctcccacagatcaggaggtagctgaggcaggtgtgttgctagctgaagttggactgctgaaagagaggggtctgactgctgaagctgtggttactgactttgttttcaagaatattcagccactgaaagatagggcctatccagcttatctgtatcgagggctagccgactcaactcgggttaccaacaggagaattccttctgcagacttggtgagccgacttgaaatgatcctcaggggcaaggtgtcaaatgttggtgctccagtggcgtactcggcctggaacttgcctcatcctaaagccttcacccttttcgtgtcgaatccgcccattactgatggcggtttgggccttagagtgcgaccctctgctgaagaagtcaatgctttggttgcttcgcttggggagattcctgatgatgaacggcaggttcattttgaggtgcctctgaaccctagtgatgcagatataagcgctatgcttgatttgctagatgaagattcatccgatgctgctcctgctgggacgtcggcagtggtgcccctcccagaggttgatacgactttggatgctcagaaacctgtcaatactcgcccaaggcgcccttgccgagccaatcagcctgatccttctgttgatgagcagaagaagaaaagaagacgcctccggcgagtatccagctttgatcaggacgttggtacctcggttcctgctactgaagaaatgcctgcgactggacttgttgatgctgaccccaatgggtgtccccaatctgctgctgatcccaatgtgggtgctccatctgttgctgaccccaatgggtgtgctgtttgtgttgccaatgtggatgatgaggaagaagagactgaagctcctttgactcggaaaaacagtcggcggttcatcgccagcggcgaaagtagtggagttccctctcctgctttgtctgccctcattggtctgcaagaactgtccctagccaactttgatcagactctcgaagatatggttccagaagacttgttatcggagccagtggatgatggtgcaatggaggcttgcgtcgacgtgcctgatgctgggttgaggtcatcccgtgcctcgtcgaccttagagcgcgatctcgagggtcgggaagctgacttggattgtcctggtcctatggaagtggctgagggcccgtcaaccttagaggtggttactgcggagagcttggacctcaagaatggtgctgacactaacccagcccccgaggatgtcgtcggggatgacttagctcgggtgaagagtgtaagccactgcccagcccccgagggtgctgccggggatgatccggctcaagtgggcagtgccaactatgacccagcccccgagggtgcccaagcagggtctccttcctgtacttccatggacgttcacgcgggatctcctccacactctggctgtatggtggtagcccaaactttggatcagggagtcgctttagagggcagcgtccccgctgaccgagtgttgggctctgttgaaggtactgagctgatctctgctggttcgttgcaagctgcttcgggtggtggctttacgcctgcttatcaactgatctcccctgatttggggatcccttcgttattttccaacctccaggctttggtggatgggatggccagccagttgagattgcagggtgcttccgtcccagaagtggtttcgtctcttgcatgttggaatccagtgtcacttcaacatcgcgtctctgaattggaggcaaccaacgctggaatgactcggcaaatttcaactcttgaggaaaaacattcccgagatcaggctgaattggtccagcagtgtgctgacttcgaggagaagtactctcagagccaaactgaactgggtcaagtctctgctgccttggatgacgccaatgcactgagttcttctcttcatgctcagctcgattctgaaaaggaagaaaagtgtatcattgctgcttctcgtgacaatcttgacagattgtatcgtgattctagcaactcgctgaccatcttggagaggagtcaccgctttacaatggaggaattggacaaccaacgttgtaggttgcaggaatctgcggacgaagtgacccgcctcaagcagttgatatcagcaaaggatgccaccatcaaagaactccgagcttccaagaaatccattgcccaggagttagagactgctcgactggctgctaaagttgccgaagaaacttctgttactctcaaagcccagcgtgacagagccatggacaaggctattcgggcgggacgaatcttgatgaggagacccggcgtggttgttcctgaagacataagggctgacgtgaatgctgcccccgattcctcgagtcgcccttcttcgtcggtcgcccctgagaaagacattgcgaaatag

SEQ ID NO: 138725 - DNA, 1855 bp, Zea mays
  Clone ID: MRT4577_58000C.1
cctcgagtccggccgggatccccttcctcccgcatcgcctctccctgcagtgccccctacatggcgttcgtcttctctctcacgctagatcaagcggagcactattcatcccccatcctttccttctggatgatggcagcgagcacgccttggcgaagaaacctcccgctcctttgcggtgggtttggacccgagcgcggaggaaggccgactcggatccgctcgatctcgccgccgaccaggcccaacagcaggacgttgcggcgcaggaagcattcccgtcgatgtactccgagcaggcaccgcaagaacaaccctcactgccgcaggtgttcttcatcgccacatccgacgtccttgattcagtcaatcgatgctgctctcaaatctagttcccctcccatcgccgctccatctcaaagcacagatcttgacgtactccatcagacgaatgtgtcccaggggaagtagaagaccagctcgaagagtaggaggcgtacctgctcgattcagtcaatcgatggaagacgaagagtagaaagcgtacctgctcgattcagtcaatcgatacttaattatgtttttctaaaatttagaaattaaataataagtaattatacacattatgtgcacctcaatatttcagggagattatatgtcacataggaacaggaacaaaaaaagcatatgtcctcagctgtggagagtagcaatccagtgggtttggcaccctcaccggctcggctctctgtgtgtgttcattgtttgattttgggatggcggttgattttcagttggttcgattcacaaatgcccctgcacttttttaccgactgcgattgcgattgctcatcaatttgagttctaagagattcccagtaatgctattcaaaaaaaagctgagcttggacagcaagttcatgttgcagtcgcccggggtcgaacacggcaataaaatcattgggccgtcaacacagagcaaggggagggagggggtctactttcctctaatctgtgaggactatcggtgaccccgtcaagtggaggcaagagttaggaagctttgattaacaaatactaggtgtatgttcagagagagggacagcaacaacatcaaccaaaaagagagagagagagacaaagacaagtctaggttgttttagctctaggccctaagtatatgatgatagcagtcgtataaataacagtgttttagtaagtatctcctgccgggtatgaagactcaagaacaaaggtcagatctcgcgtatgctcgtttgtagcagtgtggatctgatacaggtaattgaaacctttagatggtggtagggctagtagtgagcagtagacgacaactagtcctggcagccagttgtagtgaggtgacatggctgcatacagacatccaaccaaaggaaacagagggtgtggtgtggaaagaaggggagagtggacaaaagccagacatggctggcgctgctgctgcataggcacaggcacaggcacagggaaaggtgatgagacgagaggggtggggtggtactctgctgggaccggcgcactcacgggtgcggagaatcagcttcgcctcacgagcgatgcagcagcggagacacagacacctctcgtctgcgtactgtttcgcccatgctcttgtcttgtacgcatgcagcagcgctccttgtcctttggctccatcgatgtattacctgctcttcttttcaactaggagtttagcggacaaagaaatgaaaaagtaattagcagtcatttatcttggtcaataaaaaaaaaaaattggttaattcttaaataaaaaaaaaaacaaaaaaaaaaaaaaaaaagaagaaaataa

SEQ ID NO: 138726 - DNA, 283 bp, Zea mays
  Clone ID: MRT4577_58001C.1
ccacccacgcgaccgcaaacgcgtccgcggacgcgtgggcgacgtgcggcatgggtgggaggcgcagcaacgggcagttgaagttctggggcttcgacgcgcacaacgaagccgtcgagcaacgacgcaagcgatctgctcgtctgcaccggtatcgacgtcgaggtctttacggcggaggtggtcgattccagcagcatcgctgagctgaggatctactgcagacttctcgggaacgacgactttgattgcgtgagcctccactctggccccgaaatccggc

SEQ ID NO: 138727 - DNA, 399 bp, Zea mays
  Clone ID: MRT4577_58002C.1
ttccctttttcgttctacgcgtccgcagtaatgtcgaggcagcaacccatcgttggaggggcctttttaaagattacgtagtcatatatactccataatggtgccctcataccgacgtgtgtttcctagaaataatcaatatattgattgagatttatctcgatcaaaaaaaaacaaaaaaaaaaaataaaaaaaattaaaataaactcggccgtcctcctaaacaatccaaacttcattacccttcctcctaactcataccttttaattaagggccctaaatttttattcactctccctcctctcttcaactatcattattctggaaaaacctttttcttatcccaacttaatcatcaatctaactgcatcccctctttaaacaactctgacattaat

SEQ ID NO: 138728 - DNA, 328 bp, Zea mays
  Clone ID: MRT4577_58003C.1
ctatgaaccctcccgaaacaaaggaaagaaaaggacctcacgcgcaggcgaacacagaacacagccgggagaaaacaccatcaaaacaaggggaggcgacaccgccccccgggggggcacaaacaaagggcgggggagaaaaaaaaaaagaggccccgggggggcccagagaccaccggggccccccccactggggggggcccaccgggggggggggcccgcccacccccccccgggggcaggggagccccaagcccccatacgggggggcctgggggggaaacaaaccccggccaccgtaaaaaacaccacagaaagggggaggaaa

SEQ ID NO: 138729 - DNA, 502 bp, Zea mays
  unsure (1)..(502): unsure at all n locations
  Clone ID: MRT4577_58004C.1
atgcggccttagacgtgatcaaaaaacgaggtacaaaacttttttttttttataaattactaaaagaggatctataagtatctctttagacatttgtttttttttttttttttcaatatattaaaacttttttttttttccctcgcccacgtgggggggcggggtttcttttttgctccccacggctggccgttttggctttcttttgaggggtcacattgcccttatcagtggctattttcactttcggcgggcctggtttttaaaagcgccctgtctggaaaaacttttgcgcctcgcctgttttggntccgggcagcgtggccgcttctctcccctgtgctgttttgtntgatcctttctctttcttcctttcctttcttggcccttctaggtctttgccggtcccgcccttaattgggtgttccttttgggggttttgtgtggttttttttngtcctttcncccccaatggcttggttttggtgttgtttttcgtttt

SEQ ID NO: 138730 - DNA, 385 bp, Zea mays
  Clone ID: MRT4577_58005C.1
ggaaggggggaccaaataagggaaagggttataaaaaacagtttgaaaaaaaaaattaaaaaatgggaccgacccaaggggggccggagggttttctcaattaatttttggaccaggcaaaaaaaacagcttgggaaaatgggaaaaagccatttaaggccggaggggtttttaaattaatttttggagcaggcaattaaaaaccaaaaacggggaaaattggggggctattttaaggccttaaccttccttttttggccctgggtttggcttttttaaaaatgggcctgggggggggctttgcttttggaacaaggagctttgacctggggcacatgggaaagccccagttttgaaaaaacaaaacagaaaaagccccagcccg

SEQ ID NO: 138731 - DNA, 200 bp, Zea mays
  Clone ID: MRT4577_58006C.1
tgttctagatcgcgagcgccccctttttttttttttttttttttttttttatttttccaaaagcacggaaaatattaatctaaacgcagcatcgaaattggagtgtacatattgcttgctctgtccgtttccaaatggggggggaaggccttgtttttggaagacataccggattttgaaaattactgcctttttatatc

SEQ ID NO: 138732 - DNA, 511 bp, Zea mays
  Clone ID: MRT4577_58007C.1
atcagcgactcgttagactacttgtttgattgatcctgctagatatgcaccacatgttgcacgatgatggtgcaagttgtgttcaagctgcggctgaagctgaagctgcaggtgcagctggaagtgccctgacctgtacgatgaccaggaccgacgcgcacgccaccgtgcaggtcagcgtggtcctcgggaagaacgccgagcaacaaggtcgtccacgacttcgtcgagtccggcgaggactcccacgagtgcagccacggctgcaactgcaagtgcaaccgctagaactactgatcacattgctcgacaaccatggctacgaccatgatttatataactatctatggagcttgaacagttataagcacagtcatactcgatgccatacatacttctatacatatgtattgtgtagagagagaaacagagatattaaaatagctatctatctctgtatgtttgtctgcatgtttggcgctcatgttcgtacttgtgtccacccgcatgt

SEQ ID NO: 138733 - DNA, 304 bp, Zea mays
  unsure (1)..(304): unsure at all n locations
  Clone ID: MRT4577_58008C.1
tggacctcacaccgaggcaatgcatctgttatgtactgagagacggggatggcgccgtcgaggcacagtacagttgccagatttgcttgaagtgatctcggatgtggtctatgatagaaatcacactgcaacggtggaacgattgtggtgtgggcatcactaccatgaggnagtgtgcagtgagcactgatgacacgcgagggagctttgtggaattacgtacttccagtcactcaaaggacacatggtcgtagacattgtacactcaatggaacacggatcaactgacctggagcaacattag

SEQ ID NO: 138734 - DNA, 400 bp, Zea mays
  Clone ID: MRT4577_58009C.1
ggcaaaccggccatttattcgatattatacatagatggacatacgtaattaatataagggttgggttgggggggcatgcatgcaacaaagaagcaagcaagtttattactagctagctaggcagctagtagttggtatcccaaaactgaaactggagccaggcgatgagtttcttctccacctggaacgccttggccaaaacgtcttccgaaatgggtggcttggaaccaaaaacggggctggcaatggggatgaccccagggttctggctgctgagcgacaaaagcgccccggcgggcttgtcgtggtcgagggtcatctggaaggggatcatagccttggggaaaacgaaaacatcccccttcttgaccaccttggaaaaaaggcggttggggttgga

SEQ ID NO: 138735 - DNA, 329 bp, Zea mays
  Clone ID: MRT4577_5800C.1
atccgcagtgcgcgctgggagacgtcagatggcaggcttcggcacgcggcagcgagcgggcggcaacaccgcgtgacgccgacatgaggggacgggtgatcgcgatccacagcctgtgatgagtggagcatccatatcgaggaggccaacagcgccaataagctggtggtgattgacttcactgcatcatggtgtcctccgtgccgcgccatggctccaatttctgctgatatggctcaagacatcgccaaatgttgttttcctcagatttgatgtggatcaactcaagaccattgcggagcaattcagcgtataggccatgccaacat

SEQ ID NO: 138736 - DNA, 373 bp, Zea mays
  Clone ID: MRT4577_58010C.1
tctcggaatttcggttctgcgccgcagtttttgcatttacggtttgttgacctggtgcaccacgcgtataaacagtcctgatttgagacatccactttctgcgtgacatctgctaacaacactggtgacacaaaaaccaccttgaattgagtttattcagcgcgcaattgtgcaataccgactagggtattgcgcttttgattcgcttacacgaagatgccccttcgactatgggcactacgaggatgatgtgcatgaaagaattgctaaacctacgaagagagactcgtagagtgtttcatgctctttcgcttgcttgctctctaactcaatgtattctttcgttcagtcacgggaagtggttacagatcat

SEQ ID NO: 138737 - DNA, 432 bp, Zea mays
  Clone ID: MRT4577_58011C.1
atcccgctcgacccacgctccgcccaccgtccgcccacctccgatcagttttagcatggattgctgataatctggctatggactgttattggaatcaaccatttgcatctcttttattctctaaagatattataactcattttaaagatctacctactattttcatcttttttttatttttttttattattttttttattttttttatttttttttatcctttttttttcatctttattattttttatttattttatttttttattttttttatttattattttatttttttttattaatttttttttttttttttttttatttcttttttttttttttttatttttttttttttatttttatttttttttttttttttttttttttttttctttttttttattttttttattttttttttatttttttttt

SEQ ID NO: 138738 - DNA, 344 bp, Zea mays
  Clone ID: MRT4577_58012C.1
tcgaaaaaaaaaaaaaaaaaaaaaaaaaaaaggggaggggagaaaaaaaaaaaaaaaaaaattaggagaggcgttctaaaagaaaaaaagcttacttacatcgggcgggcccactttttaagctccctgtttcgtcggccccctaacttccacttccttggttcttcttttttcactcccgcccccttctgtgcattgttgggggggcgtggcccattgtgactccccttgggggtaccccccttttttcgcccgcttgtcgttctttcccgatggggccccccccttttcgtccctttcccagtcactcgccgcagtcgtccttgccttaatgggctcccccc

SEQ ID NO: 138739 - DNA, 227 bp, Zea mays
  Clone ID: MRT4577_58013C.1
ctcgagccggccgggaagccttctctgattcagtgaatcagcctaatttcccttcaacaattgtgacaccagaaaagccttacaagcattatatgctttttaagttttccaccaaaaatccctacattagttcaaagtgagataggaggagtgagctttcccccatttctaacgtgccacgctaagtcagcgcaccattctataactttggatttcatccaaacttg

SEQ ID NO: 138740 - DNA, 192 bp, Zea mays
  Clone ID: MRT4577_58014C.1
gtgcggcgctcaggcggcgggtccgagaaggatgtgagtctctacaggaagtgctggattttgttagtgagctagtcttgtgaacatgcacaacggatactgcaccctgacagggaacgagtccttcatgagcatcattttgcccgctatggatgatacatgatctctcttgcggaaaaaaaaacgatccat

SEQ ID NO: 138741 - DNA, 313 bp, Zea mays
  Clone ID: MRT4577_58015C.1
cggacgcgtgggaaaaaaaaaaaaaaataaattaaaaaaaaaaaaaaataaaacaacggaaaggtaacataactaaagatagaacaaaaaaaatctaaataaactactactaaatacatacccctattcacacactacgtcatcaaccatctattccacaccaatgccaattaccttccctttatcctattattactcaacgcctctaactcacaatccaagctatctaccactgcctctgctcggaccacgaccacaaccaccttaaggcgttcgcgcttcacgtgcccttaccattacctcattccttcct

SEQ ID NO: 138742 - DNA, 2487 bp, Zea mays
  Clone ID: MRT4577_58016C.1
caagcaccagttcaaagtaaatctatcaaaatgttcctttgctcaaaccagcctgcattacctcggtcacataatcagtcaagaaggtgtggccactgacccagagaaaatatcagcagttaaatcttggcctacacctcgttcagtcaaggacattcgaagttttttgggacttgccggatactatcgtaaatttgtaaaaaactttggcattatgagtcgccctctcacctctctcctaaaaaaaggccaattgtttgtttggaccgaggaccatgatcaggcttttcaagctctgaaaaccgctttagtctcggctcctgtgcttgccctgccggatttcactaaaacatttgagattgaaactgacgcttgcgattcaggcattggggctgttctccaccaagctggccaccctatcgcttttgttagcaagacattgggtcctagacatcaacccttatcaacatatgaaaagaaatgtctagcaattctcatggctgttgatcactggcgatcttacttgatttgtggacagtttgtgatacacactgatcagaaaagtcttacccatcttgatgaccaaagactaacaacaccatggcagcaaaaagctttgactaaactgcttggtttgcagtacaaaatttgctacaagcaaggtacctcgaatcgagtagcagatgccttgtctagactctcaagtgagcagatgttggccttatcagtgatacaacagtcgtggcttcaggatttagcagataaatatagttcttatcctgatacagcaccaattctccaggccttgtccctaaaatctccttccggcccttaccagattacacaaggcattattcgatatcacaacagaatcttggttccagcaacatctgaattccctctcaaaattttcactgcactccatgctgctccaattggtgggcattctggtttcttggtcacgtaccataagatcaaaaagcagtttgtctggcgaggcatgaaaaagatgatcgctacttggtgcagccactgttcaatctgtcaacaggctcaaccagaaagagtaaaatacccaggcttattacaaccaatccaagttcctgcagccgcatggcaagttatctccatggattttatcgaaggcctacccacatctgataagtataattgcattatggttgtcgtcgacaaattttcgaagtacagccattttgttccacttcgtcatccgttcactgccctgaaggtagctactcaattcatggaccatgtttttaaacttcatggatttcctcaggccattataactgacagagaccggctgttcacaagtgccttttggaaagaactattcaagcttgctggtgtggatcttaggatgactacagcttatcaccctcaatcggatggtcaaacagaacgtgtgaaccaatgtttggaaacgtacctccgttgcttcatccaagcttgcccaacaaaatggaaaaagtggttatccttagcggaatattggtataacaccagttaccattcctctcttcaaagaacaccttttgaagtgctctatggccatattccgcggcagctgggcattgacctccctgggcaatgtgatgttccttcactgactgattggctgcatgaaagaaagctgatgcttcaactggttcagcagcaactcatcagagctcaacagcggcaaaaacatcaggccgataaactacgttctgaaagagtattccaagttggcgattgggtctatttgaaattgcaaccttacgtccaatcttccttggtgaaacgcgccaaccacaagcttgcatttaagtttttcggtcctttccaaatcgtggcacgcattggacctgttgcttataaattgcaattgccagctacatctgctatacatcctgtgttccatgtctccttgctcaagaaagcagtgggctctactgatcaggttagctctgttttaccttccatttcagactccttacaatggccagagcagattttgcagcgtcgagtcgtccacaccccctccggcgatgttccacaagtgctcatcaagtggtctgcatggccagaagaactcgctacatgggaagatgaaccagtggtcaagcaacgctttcctgaagctgaggcttcaaggaggggagaatgtcaggaccatggtgtcaagcaaacaacagatgaaggagaagcgagtcgttcggcccaacagccgtgtctttgggccagattggacccagtaggcttccagccttgtattgtttctgttggcctgttggtcgttttctgtcgtgttaataagggagactgaaccgtatgcaagagagggaggaggagaggacggaagtgttaggagtgaacggcggttgtgccggccggtactggcctgaactcctgtaaaccccaactctgtatcgagtgaatacttcgtgagaggtggagagcaccgggagcggtgctcgcgatctc

SEQ ID NO: 138743 - DNA, 424 bp, Zea mays
  Clone ID: MRT4577_58017C.1
cgtcgtccgctgccagcatgagaatccctgctccccgaccaaaccctacctgtacccgccgccgccgctatcagcagcaacaaccactgccggccaaattgacacccctctcaggtggcggaggtcttcgtccgcctgacagcaggcgaggtccgcgacgcttcatcactgcaccctaaaatccgtccactccgtctctcccaaaataaaataggtgaggacatcgccaaagacatcgctcaagactgaaaaggtctccgaattaccgccaagctcaccgtgcacaaccttcaggacaaggtatctctcgtcccctccaccgggacgttcgtcatcaaggcgctcaaggaacccaaaaggtactggaagaaggtatagaacatcacgtgctgcggaaacatcagcctcgacgacctcatccata

SEQ ID NO: 138744 - DNA, 597 bp, Zea mays
  unsure (1)..(597): unsure at all n locations
  Clone ID: MRT4577_58018C.1
caccatagacctgactcttagtaggcgagacttcttttgcttaaaacccttcatcgttctaatctctgtaagaggactgacaccggataactgaagcatattctattcatcataatcaagctgtagttgacatatccttcttgccagcttcatttgtatatttgaaagcatacatagtgaaagcacttgttcttgctcttgcacccgatcttggagaaccttctcctcacttattcgttaagatattggacccaaacagacctgactgtgcggacgccacgatgagcgcttacatatgccacgagcccaacagtgacacgatgaagcatgccaatgaagggaacagcctcacatattttcttcttatggacaatggattctgccttctcaaactcacggacaatgggagacatgccagccttacagccaatgaaggcagtgagatggaaaggcttcttggcgtcatccctgataaatgacatgaccttgccgaggtggcttgaggaacgcttcctgcgcaggaagccgagtgagccgtgcctggagtgctcgaacttacggtgcgacatncctggcctactcctcttccttacctgt

SEQ ID NO: 138745 - DNA, 764 bp, Zea mays
  unsure (1)..(764): unsure at all n locations
  Clone ID: MRT4577_58019C.1
ttgggtacctcgaggccggccggggatttctttccctttccctttcccttccccagtcagccgcgagcctcgtaccggcgcagccatggcggaggagcccgccatcgtcgtcgccgcctcctccagctgcgaggtcgacctcggcaacctcatggcgtacgacccgtgtcaccacgtcgcagccgccgcctccgcctccagggaggagctgaggcaggagtgcctgcggaaggggacggagctggcgcaggcggtggccgacgccctcttcgcgctgccgcccaccgaggaccgcgacggccccatcgtccacctcccgccacacaccgttcgactcccgcgcgagaagcatctacccaagcccaagccaccgaccaagtgggagctgtttgcaaaggcgaaaggaattaccaagcgcaagaagaacaagcgtgagtgggacgagcaaactcaatcctggaagcggacttatggctatgaccgtgtaaatgatgataaagacgttccgattcttgaagccaaactgactgacgagcctggtgttgatccctttgcacagagaagggatgagaagaagaagagggttgaaaagcaagaaaaaagcagattagagaatttaaagaaagctgcaaaggttggtgctttgccaagtcatatacagcttgctgcgaaggcgttgcccatcacaggaactaaagctgaccttccaaaaaaaaaaaaaaaaaaaaaaaaaaaccaccntgtccgggttgcttaccactgct

SEQ ID NO: 138746 - DNA, 359 bp, Zea mays
  Clone ID: MRT4577_5801C.1
cggaaacctctcaaaccctattcgcctcctgcaagattcagagttcaagaatctgcgccatggagagagatacgtataccttcgcatttcaggctgagatcaaacagctgctctcactcatcatcaacacctactactccaacaaggagatcttcctccgcgagcttatctccaactcttccgacgagctggacaagattacgttcgtagagtctcattgacaataccaagctcgatgcgcagactgagcttttcatacaccttgccccagaaaaggacacgaacacgctctccatcatcgaccgcggcgaagaaatgaacaaatccgatcttgtcaacaacctcggtactatcgccag

SEQ ID NO: 138747 - DNA, 1514 bp, Zea mays
  Clone ID: MRT4577_58020C.1
ccggccgggatggaaacacgcttcccatgtcacttgggccacccagaccccagtaaaattgctagcctcgtccccggccggcgggctcgcttccttttccttccctatccgcgagcctcgtaccggcgcagccatggcggaggagcccgccgttgtcgtggcctcctccagctgcgaggttgacctcgggaacctcatggcgtacgacccgtgtcaccacgtcgccgccgccaccgcctccagggaggagctgagacaggagtgcctgcggaagggtacagagctggcgcaggcggtggccgacgtcctcttcgcgctgccgcccaacgaggaccgcgacggccccattatccacctcccgccgcccaccttcagactcccgcgggagaagcatctacccaagcccaagccaccgaccaagtgggagctgtttgcaaaggcgaaaggaattaccaagcgcaaaaagaacaagcgtgagtgggatgagcaaactcaatcctggaagcggactcatggctatgaccgtgttaatgatgacaaagacattccaatcattgaagccaaattgactgacgagcctggtgttgatccatttgcgcaaagaagggatgagaagaagaagagggttgaaaagcaagaaaaaaacagactggataacttaaagaaagctgcaaaggttggcgctttgccaagtcatatacagcttgctgcgaaggcgttgcccatcacaggaacaaaagctgaccttccaaaaaaatctagaaaagaggatcttgagagtgttgtcggcatggcttcatcagcaacagcaagtggtgggaagtttgatgagaagttgcctggcgagaaacctccaaagcaccctggcaaacacagaaagttcctcccagttgccgaggggaagggaatgggcagcctggagaaacagcagaatgacaaaatcctgagctctctacttgccagaaactctgatgaaccgcttgatgtcagcaaggcaattacaatgtacaaggtgaaaaaggaaaagcagagaaggaaagagaaaaatatgccatcaaaatctgataagcttaagccccagaagaaaccccacaagaaatcatcgaagaaaagggcttaggtccacgtctttcagttgaccacagttttgaaagctgaagcaaggaggcctgtcacatattggattgtatttgtgagctttgaatctctgggagaaatattgttattccgtctaatggttatgatacaaaaacctgaatgctttgccatggtatgcgcccatcttgtacttttcaaattatgtttgggatgtggtttgtagcttggtaagagtccctccctttggttctgaaacctgttcaaaggagctgtcctggaaacagtaccaatgaagctactgtctagtgtcgatggtactgatctgttgttggcctctgagtttactctacgatgtggtgtgagattatacattttaaatctttcctccgaaaaaattgtcaaaaacaaaccccccc

SEQ ID NO: 138748 - DNA, 147 bp, Zea mays
  Clone ID: MRT4577_58021C.1
ctccctcgccacggcagcccccccacagaccataaaactggcaggcgggagtcactgggctgggaagcagacaaggagaacagggaacccccgctgtccccccggagcgacaagggcctccccgagcccatggccgtgcgaagggac

SEQ ID NO: 138749 - DNA, 282 bp, Zea mays
  unsure (1)..(282): unsure at all n locations
  Clone ID: MRT4577_58022C.1
tcttactcaaatcctctctcttacattaatatccttctttaaagtattcatccaanaacacctccccagcctttttatatcaaattacacccccaaaaaatcctccaccaccaatatctttttacaacacttcatctttaacttcttctcttcttaccttctcccttacatttttttccttcctctccattaaaataaacacctctctttttcaatatccctccataaccattatttaccacaatttctcactcctatatatccccatctccttcaacttca

SEQ ID NO: 138750 - DNA, 394 bp, Zea mays
  unsure (1)..(394): unsure at all n locations
  Clone ID: MRT4577_58023C.1
ccttgttgcgttctgtgttgttccgtggnctcggntggtgttgtcgcngcnntggtggctggtgtgtctcttcnccggcttcctgttgtcggcgccgtgggcnnggccgggntgtctgttctgctgctgctgtccgtcgggtggcggctgcgggctttttttttgctgctgcgggcccccgcggtgctcctgttgcgcctggcgntctcgtcggtgtcggtgcgctttgtttncctctgtcggtgtgcgtctgcgtctcgcggtcgtttgggcttctcggcggttccttggcggccttgtcctcgttcgngcgttctggctgtgcgtggcgcctcgtcgcccggggcttgggcttcttcgtcgtcttctgtcctttcgcgtgcttgcgtgtcgt

SEQ ID NO: 138751 - DNA, 281 bp, Zea mays
  Clone ID: MRT4577_58024C.1
gcgaccaacaaaaatttttttataaaaaatacaaagaatcaacagtgacaggcaaaatcaacacaaaccacccatccccacaaaaaaacccaagaaaaaccaagccgggggtaacagaatcaaccaagccggaggcaccgctgatagagaaatggacctgacgaaacccaaggagaacacagcacaaagaactgacacaaagcaaccatgaaaaaaaaaacaaataagggtaacaacaaacacgacacgaagcaaaataaacccatcagacaaggggaaac

SEQ ID NO: 138752 - DNA, 365 bp, Zea mays
  Clone ID: MRT4577_58025C.1
aaaaaatcacacaacacccttgtccaatttttgaaagggagacttttccccaaacttcagattccagggaacccaacaatttgaaattcctaccccctaatccctttgcagtttccaaattttttttttttgcctttcaaaattcacattttctgcactgcctttggtgtgtttcagcattaacttaaaaaacttttgaacaatggtctttcctgaattcctgaacaaattttaagcttttaggcaaattttataggtccatcacaaaccaagggcccttttgcccaaaggacctacaaactttaccggaaaccccaagcttcaaaactttttgggggattaacaaaaaaggtttaaacaatccg

SEQ ID NO: 138753 - DNA, 461 bp, Zea mays
  Clone ID: MRT4577_58026C.1
ccgggcaccaacgttggttttaatggcatcaacacccaggaggtcacacgtcagttctggttggcaacgtctaggggtgaggggctgtggcctccattcggccccacagcctttgagaactggctgcccggtcccacccgcttcccgccccgccccactgaaaaaacactaaacgattgcactgacagacagaccccagagcgcccggtctcccacacacccacggggctgtcagagtcaaccagggctttggcgtcactcggcggtggcccggggctgcgcccaggatagtgtttatcaaatgtgacacaggttcatttacaaactggggctctggaaggtctacttctgtggctctaagagacttgtctctcatggcttctctcggagtaccggaagttgggcctggataacgctgtgtaggttggttggtttattttgaaggaatgtgtaaggcattt

SEQ ID NO: 138754 - DNA, 436 bp, Zea mays
  Clone ID: MRT4577_58027C.1
ggttttgtttttgtttttgtttttttgtttttttttttttgtttgaacttttatcaagttcccaccgccccttgtttttataaatgtgttgaagaaaaaatatggggataaaactgaggcaaaaaaaccccaaagattgttttttggcttttttcaaaggggggttgtaaaagaaaaacgcaagaaataattgggcggggttggtgatgtctggcacactttaaaaataaaaaaaaaggggggcggggggggggtcccccaaacgggggatgttttttgtgccccaggggggtttttcttgagcccccaaaaaaaatacccccgggaaaaaaaggaaatcggcgggctttttaagggggagtgtgagtggttattgaaagggaacaatggggttcctactgatcccctcctgttcttcccgcccgattgggacgca

SEQ ID NO: 138755 - DNA, 442 bp, Zea mays
  Clone ID: MRT4577_58028C.1
aaacttaacaatctttattaactcttttcgttttaggagggggtggggggtcatcatcccagatcccagtaatccctgggggcggaacactactggttatactaggataaccatcagggcctatttttccatgaccatgaggggccatgcctgcccccctattggctaaccccgctgggtcatttttaaactaaaacccgataaataaaaacgaaagggggggggggtttaataaggaaatcctccccccctaaggatattatattccccttattaccaccactacagatcatactcgggggatagaagggggctactcttcgggggcgattcaatttcaggctgcctaaatacccccgatcatttgctagctcctgcatcctcttttttgtacacgtgcaacccccaggggccaatattttttgcatatgacggggctgaa

SEQ ID NO: 138756 - DNA, 294 bp, Zea mays
  Clone ID: MRT4577_58029C.1
gctgtaaataaggtagcaaggctcacaccagctagctggctgaatggtactaacaattgtgggtctcactatatgtgcggctgcttcaaccactctccctcaatactcacactctcatatagctgcccttcttcctccataccaccaatcaatgacctattcacttcgtgaaatcttcaaccttcaacctaactgcctccaacacacaatcccaacacacaactttacttcactaaaccacctcatttaacacccgccaaccatatctgatcctcagtcattggcacaaaccat

SEQ ID NO: 138757 - DNA, 218 bp, Zea mays
  Clone ID: MRT4577_5802C.1
gacatctgctgacttacaagttcgcattctggatagggctaatgttgcttctagttaccgcgggttacgaaggtcaattcaggtctctgtagcattcacaccgtatggatatcacattattgctgctagcgaccactctagtatctatatgtggaattatgcagaccaacttgcccgattcacgagccgctagaaatccgtatggtcatatgatcact

SEQ ID NO: 138758 - DNA, 257 bp, Zea mays
  Clone ID: MRT4577_58030C.1
atggaataatcatccatcatctatttatcatgctggatctaataattaatataaaccgaacattacaatggaaaaaacaatgcaggctcccattgttttttgcgctgacatttggcacagccacacaggcacatgcatgcagttgcagtgtagtaatttacatacatatatagcactataaggtgtttaccttcttagcagaggtctattatagggagaattgaccgaagagagttttattagctcccgtaagcgct

SEQ ID NO: 138759 - DNA, 2244 bp, Zea mays
  Clone ID: MRT4577_58031C.1
cattgggtacctcgagggaggcaggggggacgaccctttttctggccgtccgtggtcccttcaatctctctgcgcaatcaaactgcggtggccaaccccggaagcggcggcgggcaaagcgcgcgacgcagagaagcgtaacttcaggccgccggtcgctctacgcatcctgctccccgttctcgtcggagatccaccggggcagcctttctttccccttcctcaatcaagtcgatccaatttcgcgcgcgggtcgggctcgccttctcctccagtctccacctccaccagcgctcgaggtcgacggacgctactcgcagcagttcttctttgcggtgcggccgagaagaagctaaggctcaggcatgagcttccgggaccaggagagtggcggggaggatgggggcaggacgtcctccgcctccgacctgcggaagccgctcatcaacaccgggagctggtaccgcatgccgccggcgggtggcgtgatgggctcgcggcaatctagcctcatggagcgattgggctcctctgcgttctctctccgcgacgtcgctatctcggcgacgctctgcacgctcattgtcgcgctaggtcccatccagttcggtttcacatgcggctactcctcgcccacgcaggacgccatcattgctgatctcggcctctccctctctgagttctccctcttcggttcattatctaatgtaggggcgatggtaggcgccatctccagtgggcaacttgcagagtatatcggccgcaaggggtctctcatgatcgctgcgattccaaacataattgggtggctcgcgatatcattcgcaaaagattcctctttcttgtttatgggtcggctgctagaaggatttggagtcggtgtaatatcgtatacagtaccggtttatattgcagaaatcgctcctcaggatcagaggggagctcttggttctgtcaatcagctctccgtcacgattggtatattgcttgcctacttgtttggcatgtttgttccctggagaattcttgctgttctaggcattttaccttgttcaatcctgattcctggactgttctttgtgcctgaatccccaaggtggttggcaaaaatggggaagatggaggattttgaatattcattgcaagttctgagaggatttcagacagatatcacagcagaagtaaatgaaataaagagatcattagcatcatcgaggaggaggacaaccataaggttcgctgatatcaaacagaagagatacagtgttccccttgtgataggaatcggtctccttgtcctgcagcagctaagtggtgtcaatggcattctattttatgctgcgagcatcttcaaagctgctggtattacaaacagtaatctagcaacatttggtttaggggctgttcaggtgattgctactggagtgacaacctggttgactgacaaagctggtcgaaggcttcttctcattatttccaccacaggaatggtcattactcttgttattgtttctgtgtcattttttgtgaaggacaacatagctgctggttcgcacttatactctgtaatgagtatgctttcactggctggacttgtggcatttgtgattgcattttctcttggcttgggagcgattccgtggatcattatgtctgagatccttcctgttaacatcaagagccttgctggaagtgttgcgaccctggcgaactggctgacagcatgggccattacaatgacggcaagcctgatgttgaactggagcagtggaggaacctttgctatctacgccgtcgtgtctaccatggccctcattttcgtgtgcttgtgggtgcctgagaccaagggaagaacgctagaggaaatcgccttctcattccgctgacacgtcgtcatgatctaggtatgggaagccacaccacaccatgtgtcattgagtctgccgcggtgcgttcagttcatgaatcccgcagggatcttgcagccattctcttgcttggatgtaccaccatcttcagtgttcataccaatgtacattgtacaatatgacgacgacgccatagcagaaaggcaagtgggtttatgtttgtacgatggactagtagcagaaagcactcaacccctgtacgggttgcggaggagagcaatttatttgctgtatttgcctggttcaataccggacacaagttagaattttgaaaaataaaaatctgagcaaatttatcaacggtaaaaaaaaaaaa

SEQ ID NO: 138760 - DNA, 302 bp, Zea mays
  Clone ID: MRT4577_58032C.1
gggaaaaaaaatttgaactttcacaaaatatctgggccttgagcacaagtttttttttttttgtttaaaaaaaagggggggactaaaaacagctaattgctacaaaaggatttttcccataaaaaaaaatttggggcccctttttgcgggggatttaaaaaaacacacaattggggccaagggaaaaaaacatgggccctaatttttgaaccatcggtggttttttaataaggtggtggggcaaaatttggaaaagggaaaacccctttttatcaaccattttggaaaacaatttcaggggt

SEQ ID NO: 138761 - DNA, 425 bp, Zea mays
  Clone ID: MRT4577_58033C.1
gcctgcgctgacgacccagcccccgactcgatccactactgtctcacgctcttcctccccgatgtgcgcctctacggagttctcgccatgcacaccagcttctccgtccacgtcctgggccattcctagcatctggaggacacagtgcgcgacaaggactaagccgccgcctactgtactggcgtgacgccctacacggaggcgtacggaggcgcggtggacaggaccatcggcacggtccccgagcaccatcccaaggagatactgtagtacgaagaggtcacggtggagagcctccgttgggtgaatgacgtcctcatgaggaggatgcagcccgaccacaccaatgccgatgtcagcccctacatgcttaggcgaatcacaaggtctcaaagagtgagccaatatctgagaaagcggcaact

SEQ ID NO: 138762 - DNA, 2765 bp, Zea mays
  Clone ID: MRT4577_58034C.1
tgcagtttgccatcaactcatgtatactctggcagattgactgacaagataccactgggaaagattgaacgttctgttcaggctgtagaagcagctttaaaaaagctggaaaatggaggtagtgtcaatgatgctaaagcagtatgtgaacctgaagttttaaggcagcttgcaaggtggcatagtaaactcagagtgtatatatcaccttttattcatggcacaaggtacagttcctttggtagacattttacaaaggtggagaaacttgttgagattgttgatagacttcactggtatgtggaaactggtgacatgatagtagatttctgctgtggggcaaatgattttagccgtcttatgaaagaaaaactcgacaaagttcagaagaagtgccatttcaagaattatgatcttatccaaccacagaatcgcttctgctttgaaaagagggattggatgactgtgcagccaaacgagctgcctcatggatcccaactaattatgggtcttaatcctccttttggagtcaaagcaagtcttgcgaacaaatttattgacaaagcattgacattcaagcctaagctcattgtactaattgtccctaaagaaactaaaaggttagatcagaggagaacaccttatgatttgatttgggaggacagtgagtgtctttctggcaagtccttctatttgcctggttctgtggatcttaatgataaaatagttgaagggtggaatgcatctgcgccacccctctatttgtggagtcatcctggttggacaaagaagcacatgcaagtggctgaagagcatggtcatacttgtatggggaagatagcttgccatgttgaagagagtaatctatcagatgacctgtccgtgaggaaacaatctgatgctacaaacaaactgaactcgagatcagggaaagagactccattcaatgacagaatgtccaatctacttgatgatggttctgctaggaagcaagcaagatctgaagaagagaagagaactctagggaagatagaacaccatgtgaaaaaggctaatataccagataacctcccagtgaagaaagaacctgaagcttccagcaaagtcatgtcgcattctggaaaagatagaaagattggcagatacaacaggaggagacatgacaacaggagcagcaaggggacacctgatcacacagagagcctcccccctgaaaagcaagtggaagttgcatatgaggaaacaagagttattcctagcaaaaagattgctcataatgaaaaaaagagcgcgcagtacaactacgagcaaactgcagcagggatgccaaacatgaggtctagaggaggggattctgacatgagtatctcacccccagtcagttgcaatgctcgaagcaaacccatgagctattccctgacgagaccaattgaacacttggatacgaatgctcaccttttggcagaagaacctagtgactctgtgctcaatagggttccaaatcatgacagttatttggcaatcaaagaggaatactgtgatggatttaagaggaaaaatgatcctatcttcagtcacattgatgatagctcaaggatgaggggctccagcatcgaagaagtgaccaagccgtatattactgctccaaacagtgatccgtggtctaaaggagatggcagcttttacaggcatccgagctcagaagatttaaacgctaatgctgatgtgcttatgccaggatacagtgcaagatatggacaaattggtggtgacagtaacccacaagctagtatggtcccactagcaacagattcaagactgcatggtggaacggttgctgataattacctctcggcaagatactcccttggatcttcaggtgctcgcgttagccaaccagctccaactgttcccccttttgggctctcaggtgcaagttcacaacgaggctcagtaatggacaggtattcgtatgggctttcgggtccgactggaacacagcgctcagttattgacaggtatgcgccgtccctcgatggaacgaacacaacaagatcgaggagctccttgcctgagcagtacccgttcggacaacctggctcttccggtggcgggtggcctcatcactgatcgctggaacttggtcctcagatttgaccagcaaaagtgcaaccgatttcttgagtccggtggagcctacaacctatctacggcctaactttttggatcctactagtcgtttcttcctggcgccttcgacgaagacatcacctgtgtctaccaatacagaagtgtagacttcaattcctacaaatacagaagtgtaggcttcaatcctattgtttgctctggatttctgtttatgagcgtatttacaagagtatgtttggtctatgttagtatattaggaatacaattccaaaaccgttgtaccgtgccaaagtttaatactatacgtttgggtctgtcgatgagaaaaaaggacgagtgggtgagaagatgctgccctccgcagaactcgatcaggccggttcctctgcgcgtcctgctatgagaggctaacctgagcccgacagaaccggcttggtcgatttgggacctggtaggccggtatttttttattgaagtgtaactttctaaattaggtcttgttggtttgcgttggattgcgtccggaatcgtttcaagtttatataaattagagaagcaatccggttagaaaaaaaaaaaaaaaaaaaaaaaaaaaaaaaaaaaaaaaaaaaata

SEQ ID NO: 138763 - DNA, 417 bp, Zea mays
  Clone ID: MRT4577_58035C.1
gtaaaagcaagtcttgcgaacaaatttattgacaaagcattgacattcaagcctaagctcgttgtgctaattgtccctaaagaaacaaaaaggtatgcaacatattcctgttgtcagagtattttgttcgtagcatcttctcacatttttcttctgggaaaattgaatacccaggttagataagaagaagataccttatgatttgatttgggaagacagtgagtgtctcgctgggaagtccttctattcgcctggatctgtggatcttaatgataatacagttgaagggtggaatgcatccgcgccacccctctatttgtggagtcatactcattggacaaagaagcacatgcaagtggctgaagagcatggtcacacttgcatggggaagatagcttcccatgttgaaaagaaaaa

SEQ ID NO: 138764 - DNA, 653 bp, Zea mays
  Clone ID: MRT4577_58036C.1
gccggccgggtcgggaacggtgcacggttctgccgtctctcctctccgcgatcctccgcagtccccaaacgcgtagatcccgtatccatgccgcgatggccgcgcggccgcgccccctctccctccccccggcgtgatacccgcagcacccccctcgatgccatggtgccctcgcgttcccttcttcccccgtcgccttttccctccctactcctctgcattccttccccaaccacggcatggcatccccaccggatccgacagccgtgccattccatcccaccagagaccacgcccttccccaccgcggcatggcgtccctcctgcgcctatcatttcctcccagccgccttcttccctcgctcctccatccaccattacggtcgtccgtggcccaaatgctccgccctcgccctccaacccctcgccattctcgcgtctgcgcgccgctcgcattcccagacccggattttgtagatctcgcgctctccctctcctaaaatggcgcgccgtcgcaaggcccgcctactatggggcgccgtcgcgtccgccctcttccccatatcccgcgcagtcgatggatggtccgcctcttcaccggtcatggaaatgcatgccttcgtcgccccccttccttatgaccttgatctaac

SEQ ID NO: 138765 - DNA, 749 bp, Zea mays
  Clone ID: MRT4577_58037C.1
ttttgggtacccgcggcccctcctcgagtttttttttttttttttttttttttttttggaattgtattcctaatatactaacatagaccaaacatactcttgtaaatacgctcataaacagaaatccagagcaaacaataggattgaagcctacacttctgtatttgtaggaattgaagtctacacttctgtattggtagacacaggtgatgtcttcgtcgaaggcgccaggaagaaacgactagtaggatccaaaaagttaggccgtagataggttgtaggctccaccggactcaagaaatcggttgcacttttgctggtcaaatctgaggaccaagttccagcgatcagtgatgaggccacccgccaccggaagagccaggttgtccgaacgggtactgctcaggcaaggagctcctcgatcttgttgtgttcgttccatcgagggacggcgcatacctgtcaataactgagcgctgtgttccagtcggacccgaaagcccatacgaatacctgtccattactgagcctcgttgtgaacttgcacctgagagcccaaaagggggaacagttggagctggttggctaacgcgagcacctgaagatccaagggagtatcttgccgagaggtaattatcagcaaccgttccaccatgcagtcttgaatctgttgctagtgggaccatactagcttgtgggttactgtcaccaccaatttgtccatatcttgcactgtatcctggcataag

SEQ ID NO: 138766 - DNA, 112 bp, Zea mays
  Clone ID: MRT4577_58038C.1
ctttctcatacgggcacgcaatgctgtcgaacagcgcactcttgttttcgatcgtgtacctctaggttgcttcaataatgtcaccattctataaacaggatttggtggagta

SEQ ID NO: 138767 - DNA, 251 bp, Zea mays
  Clone ID: MRT4577_58039C.1
ggcaaacacaagcttccaattagttattaataccagacggcagagggagcgcgcggggggtgacaatggttcatacgtacggcggaaggaacggtcatttgacgctgctgggcgcgtggccgagcccattggagaaccgcgagcgcatggcgctgtacctcaaggggctggagtacgagaacgtggtggaggacctgatcaacaagagcgacctgtttattgtctttaacctcagctacacgctcgttatg

SEQ ID NO: 138768 - DNA, 187 bp, Zea mays
  Clone ID: MRT4577_5803C.1
ggcttttctatttcatttctctcacaccatgtatgggtacaatgatagcaataagcttgcatatgtaccatgcttaaagaaaatgcaggctgggacaaaatagggggtatactggatgcccacgtaaaccgggcaaacgaacagcactggatgctacacttttttacttttttagatatgtttttac

SEQ ID NO: 138769 - DNA, 163 bp, Zea mays
  Clone ID: MRT4577_58040C.1
ggatgccataacatttgcatcaatcccatcttctctatttgttgtcgcatccagttgtcccttgctgcgagaacaaatagagaagatgggattgatgctgctgttatggctaggctgagaattttgaagtctcgacctgataatgaaacctcaatgggcgatg

SEQ ID NO: 138770 - DNA, 406 bp, Zea mays
  Clone ID: MRT4577_58041C.1
tcgcgggtcgacacacgcctctacagtgcgtcgatctagagggcgagcgatggcggggcccctgtgcgggcaagcggcggcatccccggggccctgaggcggcgacactcccaaggctagcgagcaagcggcgctctccgacatgcgagtagctacggcaccgcacaaggcacgaggtttgagcagcgtcatggaaggcgcgaggtgtgtgcagcgatgatcgcgcgtgacatcctccgatccagcgcagttccggcggcctgagtgacgacctccatctgttcttgtgtcatcaacgacgtcctccgatgactacctcctctaattcgtgttgtctttcgattattatgttttatgcctaccacatgcactatttacgctaaaaactataacgattttatgcttg

SEQ ID NO: 138771 - DNA, 402 bp, Zea mays
  unsure (1)..(402): unsure at all n locations
  Clone ID: MRT4577_58042C.1
aacaaaccacacaccccaccaaccccggccggaccggcaggcaggggaggaagggccacgcccaccaggagaacgccgggggggaccaaccccccgaggcaggggaggacaacggcgggagcaagccgagcggcaagcggaaccggncgcccaccggggcccccggacgcccccgcggcggaaaacagacnagaggcggggggggggggggaccaccaaaaacnganggccanggcgaagaaagaacggcgacaaaccccagcagcgcaggggcgagcgcaaccggccggaggggncgaccccgaagcaggccagagaggggcaccacacgcagaaagcggagaaagggacccagacccgcaaagggggggacggcaccaagacaagcaaggggcagaacaa

SEQ ID NO: 138772 - DNA, 298 bp, Zea mays
  Clone ID: MRT4577_58043C.1
ccggtcgacccagcgtttttttacaaccttttttttcagtcgcgggctgggggggtctaactaaaaaacgttcctacaccagcgtactctgcctccttaatccattggcagtggcctaacccattggtcgctcccttcctgcagcagcatcaacaattggtgccttttatctcagttctctttgatgaaccttgctttggtgttacccgtcgttgggggtgccatcttttagattccatatgagatgtactagacaatggtgccctcataccgacgtgtgtttcctagaaatgatcaa

SEQ ID NO: 138773 - DNA, 261 bp, Zea mays
  unsure (1)..(261): unsure at all n locations
  Clone ID: MRT4577_58044C.1
cgacagataattcccaagagaccgaagctgatgttcaggaagttgtggaatgaagagggaagatggaaaagcaaatggcctaatggttcagaagctagatttagtagtagggttacttagttaagattgttgtaccgctaaaaataatatcagtcttatgtgtgtgcattttagtgattaatctatatgtaaggattgtttgatgagagttatgatggtaatgaatgaaatgagtactcagattcattaagncatttgtaa

SEQ ID NO: 138774 - DNA, 146 bp, Zea mays
  Clone ID: MRT4577_58045C.1
cccacgcgtgcgaactaccttgggagttctccttgatcctaatttctctcccacatgtctattatgaccactagcctgcatcttggtcttctcctccactaccgaccttctgaacattcggagccggacacacccttgactcccga

SEQ ID NO: 138775 - DNA, 218 bp, Zea mays
  Clone ID: MRT4577_58046C.1
ctataacctatatggcatggctccgaactgcgaagggcgcatagaaggtcttagcattatattctacatacttcacggtactaattatgcgctctgatgtacaaaaaccagggtgccgggtagatagattgccgagatccggagtctttgatgcacaccaggcctggtaaagagtcgttgaatgaagcacgttcattgaaagccgtattatataccat

SEQ ID NO: 138776 - DNA, 596 bp, Zea mays
  unsure (1)..(596): unsure at all n locations
  Clone ID: MRT4577_58047C.1
cgagctagcanctcactcacgttcgtccccagagacaacaatggccatggagacgtgcttcagagcgtgggcgctgcacgcccccgctggcagcaaggacaggctcctcgtcggcaatgggtctgtatggtgagcgtgtgggtgccttctctgttgtctgcgaatctgccgaagagaagaagcgcgtcgactcacagatcaagatccttgtccgcccattgtactctaaccccccagttcacggtgcccgcattgcctctgagattctgaacgacgcctcgctcaacaagcaatggcttggcgaggtcaagggaatggctgaccgcatcatcaccatgcgtgctctgctcaaggagaacctcgagaagctcggaagcaagcatgactggagccacattacatcgcagattggtatgttcgcctacactggtttgacaccggagcagatggacaagctggcaaaggagcactctgtatatgccaccaaggacggccgcatctncgtggctggtatcactagcgagaacgtcggacgccttgcagaggctattttacagggtcaggggtaaagcaggtgatgatgggctctttggtcg

SEQ ID NO: 138777 - DNA, 774 bp, Zea mays
  unsure (1)..(774): unsure at all n locations
  Clone ID: MRT4577_58048C.1
ttttttttttttttnnnnnnnnnnnnnnnnnnnnnnnnnngatctgttctgttctaatattatgtatactatctgccagtagatctgggtttttcgttttatgctgcattatcaaattaatcttaggccctgttaattttccaacattaattaggtatggagaaaaaagtacacttttacactcttgcaagaaaattaggatgctaaaaaggaaaaaaaggtaaataggcaaagaagttagcaactagcctttgcagtagctagattgcagccatgcacaaacctgcatatacaagctagttatctattaatctttgtgatattgcccatgggctgtttcatagaggaggatgtcttgcgtgattaggcttgctatctgtgtgggtgtttgttctttgttgtcgaaaactcgtctgcgtcgctccccatactgctcagtccaaacatagcagaccataccagaccttaatccttgtacttcttacgtctgaacgaccagggttaatttttgaactaaggaccaaacaatacatgaaaagggctagattttggatttctcaaacagcaattggtagtgttcaatgtcgtgtaaaatatggtggtgagaataagggctatggtactgaataccagctaatttcctgctaatataattggataagacgttcctgggaaaggattcttgggtttgttcagattccatctaagcacttgttcggttattctcattacatttangtgccgtttggttcatatattggtaacgcaatgagt

SEQ ID NO: 138778 - DNA, 474 bp, Zea mays
  Clone ID: MRT4577_58049C.1
gccaaccatacaacacaaccttcttccccatctcctggagttggttcttcttcaagccccatggccgccgtggctttgagcttggacagtggcagcggtggtaggaggagacggtcgtgccgaccggcgcgcaggggggacggaggaggggcaggggcaggggcaggctgccgccatttccacgtccactaccacatccctcgccaggcagtgtgggcatcctcgcctcctgctgttgcccccgtacggtacctgctgatccttccggtgcttttcttggcggcgcttgcctttctcgtgtgcttcggctggctcaccctggtctaccttgcgtcgtcgtcgctgtggagccgtagcgtggcaccctggtctaccttgcgtcgtcgtcgctgtggagccgtagcgtggaccgcgccggcgacgccagtggattcgccggagaagacgaacgggaggagagacctgtggagcctg

SEQ ID NO: 138779 - DNA, 566 bp, Zea mays
  unsure (1)..(566): unsure at all n locations
  Clone ID: MRT4577_5804C.1
ccccgcgtccgcaanaacaatggcgggatcaggtagacttaaccaaataggacagttccaggcattcgtccctttcctccgtaagtatatagttcacttgtcacacttatatgaatgaagaacttaagctaaagttcgtgttttatatagtttcacgttatttgatgatgttcaagatgtcaatagcttaccacaaataaagagtgtctttgcgagggtagttgttaagttccctaggcgtcatgatagtcaacacttcatcctacaggatatctgttcgagctgcgacttctaagaaggtatgagtggtgagaagggcgaggctttggaccacggcgtttgggcgccgttgtcctagggttagggttgctggctggaaggggtgcggtatgaacagtacccacggtgaacagtagaggcaggaaagggggaaaattatgaactggtcttttgcgctttctttgctggagaggaacattagagcgatttccagaatgatgggatgctattatgtgatttcatatgattcagaagcagtacaataactccctagatgagctgtcata

SEQ ID NO: 138780 - DNA, 384 bp, Zea mays
  Clone ID: MRT4577_58050C.1
gcaaaaactccgcgggggcagtcaatccatccatggtttattcattcattgggggtagtggattatgcgcaggagtacacagtatgctttgcggggggggtctagcagtaaacgacaacaactgcatgtctgcacaaatgcctccactccaccgagatcatgcgttgaacacggggctgcaacccccggcacagcctccgccgccgcagccaccttcgccaccgtaaccgccgccacagccgccggacttggcgtgcccgccgttggagcctttagcgaccatgctgccagtgccacagccttcaccaccgcaaccagagccttatccgccggatctggactggccttggccggccccaactctggaggctgaacagggtggcc

SEQ ID NO: 138781 - DNA, 428 bp, Zea mays
  Clone ID: MRT4577_58051C.1
gacaaaaccgaacctaaactttgtttaatctgaaacatcacagcagaaaacaaaaaggcctaagcctttaagggggggggggccctaaataaaaaattttggtcaaaaacaggggcctttgacacctaaaccaaaataaaatgttgggggcctggtttttacaggggccgaatgggtgttaaacccggggggtgaaacagtttcaccaacagccaaaaattttaggggtggggccaaaacaaaaaaggggggggaatctggtccttgggaccctttttttgggggaagtcccacccccgctgggcaccttgggcgccgcccctaaaggggtctggggccataatgtcccaaggggaaaagacaccctgggggcacccctgagcagaggggggggccctaagaggggtggggaaaccaaagatttcttt

SEQ ID NO: 138782 - DNA, 797 bp, Zea mays
  unsure (1)..(797): unsure at all n locations
  Clone ID: MRT4577_58052C.1
ccggccgggatcatcatcgatcctcttgtaccagccctctttggagtaacgacgctgacaatatcgttgaacgaaccttggccgaacctctctcactcgaaaacccgaacacataaacctcgccacgatgctcgctcaacgtgttggcgtcaacgccctccgctcaggcgcggccaagcctttcttcgctcagaacatctccaagagtgctctggctgctggaatctctacctcttctcccactcgcgctactggttccgtcaaggtctcccaagaggacggccaccagatcctcgttaaccagcgcctcaaccgacccgtctctccccatctggccatctacaagctcgagcagacatggttcggtagctccgcctggaaccgtatcaccggctgtacactctccgccaccctctacggcttctccatcgcctacctcgccgctcccgtcgtcggtctccaccccgagagcttgagcatcgctagcttcgtcgccggtcttcctctcgctgtcaagggtggtctcaagttcactctcggtttcccattcgtctaccacaccatcagcggtgtcaagcaccttctctacgacgccggcaagggtttcgccaagtcaaccattatccaggctgacaagtacgtctgggctgccagcgttctcggcgctattgggtctggttgctttcctgtaagataccanatatcgaanaatagaagagcggaatagaaggaaaacgagcgacatgcgcaggggatgatacaagttgcaaggggatatagggaaaggagtctggacg

SEQ ID NO: 138783 - DNA, 375 bp, Zea mays
  unsure (1)..(375): unsure at all n locations
  Clone ID: MRT4577_58053C.1
ctcgagccgccggggannctcatcccagtgtgcgcacttcacccccctctcggtctcaccctcctggcgacgactgggcggccgaccgtacgtcgccgacaccccacgccagggctcctgtttacgatacccatgtgcctgggggccccctgagacgactgcgccgcatactgtacccgaatttcgcgtgaagtttcccgacgaaccacgtctctgtgtgtgcctctgcagcacactagtctctctctcacacacgggcgctggcgcacgtgtgaggaggtttgatactccggagtgggagactagtgctcgaaatctctacttgctgatgatgtcggcgcccaaacagagctctacaacgcaggaagaagacgc

SEQ ID NO: 138784 - DNA, 391 bp, Zea mays
  Clone ID: MRT4577_58054C.1
atactgcggacggcccgtccatattttttttttttttttttttgaccaacagggtggctttatttttgggtagcctgttattggaaaattacaaggatccctggcaacaagtggttaccgccagcaccagtacaccaaggaattcacggtgcaaatgtagctacaaacctttcatggccatgttttttattcatgccaaaaattaagcgggtgacatccgggtattaccgctaggtttgcccctttgggaggaacgctggccaggacttgatcgtacccgatggaaatgccggtgggggatttcttgggcgagccaccagttaaacccgggcctccggagggggtgttgcatgagcctttattgggggagggggttcacagttttacccca

SEQ ID NO: 138785 - DNA, 429 bp, Zea mays
  Clone ID: MRT4577_58055C.1
ttcgggagaacccgtcttcaacaaacttccatcagaatgtcttccaccaaccagcacggccagggcgcttcccacgccaccggacaaagcgctgtccccggcaaggtccaagaggctgcccccaagggccttgaggagtccctccccgagagcgttcaccccaccggcagcaacccaaacagccagtccacaagcaagacccacgccctcaacgacggcgatgactcaatcgtccccaagaagattcaggagatcgttcctgagtccgtcgagaaggccctccccaacgccatccacaacactggcaacaagtaaactcttaatacctgtatactccaagaagggcgaaggaccgcgttaatgcgatgagcttataatgccaccatatatcatctgtatatagcctgaatgaattaaagaatgttggac

SEQ ID NO: 138786 - DNA, 1490 bp, Zea mays
  Clone ID: MRT4577_58056C.1
ccacgaagaagcaggcttccgctgctgcttcccccactcgaatccaagcaaccacgcccccacgcccagtccaaccccaacccgcgaagctggcgcgcgaggcggccgacgcgagcgcccgcaagcgcaaggcgggggacggcggcgaggtccccgacgccaccgcctcggcagaggtggccgcagcgccgacccccggagaggacgcggccatgggcgacgttccacaggcgccgcacgctgcgggaggtggagaagagtgggcggggccggaccctaaccctagcccgagcctcggcggctgctcggaccccgtgtcggtggagctctccatgggcggggactactaccgcgcctgctgcggcgagcccgatcccgacatccccgaggggcccaagctgccgtgcgttggggacaaggaacctctctcctctttagcagctgagtttcagtctggcagccccattttacaagagaaaattaagttgcttggcgagcaatatggtgctttaagacgtacacgtggagatggaaactgcttttatcgaagctttatgttttcctacctggaacacatcctagagacacaagacaaagctgaggctgatcgcatcatggtaaaaattgaggaatgcaagaaaacactcctctctcttggatatattgagttcacttttgaggacttcttttcgatattcattgaactgctggaaagtgttctgcagggacatgaaactcctatagggcctgaagagcttctagaaagaaccagagatccacaagtttctgattatgttgtcatgttctttaggtttgtcacttctggtgaaattcaaaggaggtctgacttctttgaaccgttcatatctggcttgacaaattcaaccgtggttcagttctgcaaggcttctgtggaacctatgggtgaggaaagtgaccatgtgcacataattgccctatcagatgcactaggcgtaccaatccgtgttatgtacctagaccgaagctcgtgtgacactggcaacctgagcgtgaatcaccacgatttcatcccgtcggccaatgattcggagggtgatgcggccacgacacctgctcctgccacagagaaaccgtacatcactttgctctaccgtcctggccactacgatattctctacccaaagtgaattttgcgcatggttagtttcacgacttcggttgagaaagcacactgcccagaaaactcgtcatgtttcgcctgtgtgctgccaaaggtggcaaacttgcttttgagtgcttaatgccaatgccctcgttcaatctagatgttctctacctgctgtaagtcttactctggtacaaggatttaacattgtgttgactgcagagaagttcccgtggatatttgctactcatcagttattcgttcatgtttttttttttcttttaccttgatctgtcgttgcaaaccaagttcaaaaagtttaaacctcgaaaaaaaaaaaaaa

SEQ ID NO: 138787 - DNA, 616 bp, Zea mays
  Clone ID: MRT4577_58057C.1
gctacacagtccgccgtggctctctgcaattaatggctgcctccacagcgtcgtcgtcatactctgccggtgtaagcgccgcctgctgtgtgtctccgcgccatggcagcagcttcgtcaagccgcagcgctctggacggccggcggcggcggcggcgaccctacctgcgtcaggcggcgaccagccgaacctatcgttagactgctgtcgtacgtgcatgcgtgcgtgcgtgccttgcattgccatctcacatatattttccgatgaacgtaacgagcggaacaactcaccattgatctgtaggtaggagtaagagtagggctagaagaggcgagcgaatcagggcttcagatgatgctgcgaccatcatggacgcgggcggctgggcagcacggcttgaagccccgccgccggtagccgtcgtcactggagcgtctagagggattggcagagccatagctgtagcacttggcggagcagggtgcaaggtatctttttgttattgctgcgctagctgccatatatactgtattgattacgataagcaagaacactcgtttacattaaaaaaaaaaaaaaaaaaaaaaaaaaaaaaaaaaaaacacacacccaaaa

SEQ ID NO: 138788 - DNA, 291 bp, Zea mays
  Clone ID: MRT4577_58058C.1
ggcgcaaagcacccgtacgaaagctcggaattcggctcgaggggacggaccgggtagtactgcggcaactttgctaatgccatccgggtagccctattgcaaggcaatcgcgctttttgctctcgatacagctaacaagttcttgacccccaaacctggtgaggaacggaagaacccagtccctccctcaccatcggcttgggcattcgcccgtgctagctcaacactgtgtacaaacccctctgcaactgctttatacacggctcactcttcacaataggggtgtaagac

SEQ ID NO: 138789 - DNA, 478 bp, Zea mays
  unsure (1)..(478): unsure at all n locations
  Clone ID: MRT4577_58059C.1
gagcgcttctatgagccgctgtccggctccattctgctcgatgggcacgacatcaaagagctcgacgtcaagtggctccgccgccagatcgggctggtcaaccaggagccggccctgttcgcgacgagcatccgggagaacatactctacggcaaaggcgacgctaccgcggaggagatcaaccacgcggcgaagctgtcggaggcgatcacgttcatcaaccacctccctgatcggtacgagacgcaggtcggcgagcgcgggatacagctgtccggcggccagaagcagcgcatcgcgatctcgagggcgatactgaagaacccgtcgatactgctcctagacgaggcgacgagcgcgctggacgccgagtccgagaagagcgtgcaggaggcgctggaccgcgtcatggtcggccgcnccaccgtggtgatcgcgccccggctgtcgaccttccggaacgccggttcgatcgcgg

SEQ ID NO: 138790 - DNA, 286 bp, Zea mays
  Clone ID: MRT4577_5805C.1
catgagcggttttttcgcgatttttgtgaattttcttaagccggagacgtaaattgaacattgatcaatccagtcggcctccagaaccaaacattcgacgccacacgcacaagatacccgagagcccccggactaaaaacgaataagttttgatggcaatacgaaaagaaacatagttgggcggggggcccatacacaaaaaaccgaggggcaccatttcggacacgcgccaattaaaatcggaaactggaaaaaaaccacgcgtttttgccggactttaaacttt

SEQ ID NO: 138791 - DNA, 475 bp, Zea mays
  Clone ID: MRT4577_58060C.1
gctgccatcggcggcagcgtatcctgggacgggctcttctttatcatgtggctgtagctccccttctccttgaacagctgcgcgaagtggatcttgcagtacagatcgccgttgagcgcggggtacgaggaggtggtgaggatgcagcccccgtctgaggcttgaagacgctctcgctgtcggactcgccttccagaggtcacttgtccagaccgtacactgccttctcgcaagctgcacacttatcctgtgtacctgtaaacacagatgatagatcgctgggggcccttggcagttcacccttgcttgaagacttgccacctcgcgcgcagttctaggagaagttcccggcctacttgtagagctgctagactggggtgtcgcatgacagaacaccctcccttgaagagtagctgcacatctggccgatccctatgcagggaatctacttgaacaatgtcttatgggaggcgac

SEQ ID NO: 138792 - DNA, 362 bp, Zea mays
  Clone ID: MRT4577_58061C.1
gttggggggcgcttgatggtttttttttaaaaaaaacggggacaaaaaaggcctaggtacccgccaaggcggccgtgagggggagaactgaaagccccccaatgctccacaatgctgggaaagccaccctgagtaacaaagcggccgtatcggggcaagggctatatcctggataagccacccaaagagttcgaaaccaacccccggggggggggatgttgagcacaaaaaggacgaagtacgcccccccccccccggagaggccccccaagaagaaccctggggtgaaaaagccccagccgcaggaaatctggaaaatcccgggcttcataatccggcccaagagggagagcctgggcgcc

SEQ ID NO: 138793 - DNA, 755 bp, Zea mays
  Clone ID: MRT4577_58062C.1
gtgtgtttttttttttacaacaaaacaagcatacagtatctcaataacctcaggcaaatatctttgggagcctaccatcagattttctgagtggcaaagaaacacctatccattctcagaacagagtaacagaccaaacacagatagattcgacggccctgcctgttggtcatgacacctcgaccgtggagcagaccttgaggaactcgtcgatcttggcggagtacacgtgggggaagctccggtagtggtccacgtgcggcgacgagacgaagtcgtgggcgaacacgctgcgcccgagggacctttgcgactccacgaagcgctccacgcactcccccgggatgactcggtcggccgagctgtacaggtagaactgcgggcaaggaggctgctgctctgaaagcaccgagagaaccttgcatagccgcttgtttacatcaggtacgtaaagaacgatctcgaagaatttccgcagagttgacagaagaaaacattcaccccatgaaggttgggtcacattggagccaactctgttcaaggtgccatttacaacaggcccatcaagagattcagtcgtaggaccagtcatggacctgcttttctttaacattgcagcagagaacccggccgcccagacctctggtcttatctctagaactgggcagagtctacaatacatcctcttattctctcagttaggtcagctcttgattgtaaattctccagtacagcaccataggcgagccatccgg

SEQ ID NO: 138794 - DNA, 449 bp, Zea mays
  Clone ID: MRT4577_58063C.1
gtcatatctagctatagtagctaccttgcagaacatttgagggaggagccatgtctgaggagaagcaccactcaccacctgtttcaccaccgccagcgcacaggagagggctcctgctgatgaggtacgatatctacaagaagaaaagcaccacaagcacatggagaagctcggcgagctcggcgccatcgccggcagcgcgtacgccctgcacgagaagcacaaggccaagatggacctacagaacgagcacgggcacactggtcaaggaagacgtgaccgacgtcaccgacatgagcttcgtcgtgttccttttgcatgagcaccacgagcaagaacgacgccaagaatgacgcccacaactgaatctgctgctgctgatgatctatctgttctatccagcctaagcttcttctactgagtgtcgtgcagcccatgattcggcctac

SEQ ID NO: 138795 - DNA, 250 bp, Zea mays
  unsure (1)..(250): unsure at all n locations
  Clone ID: MRT4577_58064C.1
gtccagaggaagacgcgcggggggggggggggaagtccttgtggctcagcagacatgtgtgcgcagctgcttcctctcgctttgcccgccccgccaatgcctggggtgggtgggcctccacctccgatgggcggaatgggcttgcctccgctgggtntgccgccggtgggggggggggggttttctcctgtgggaagcgtctgctttggttttgcggcgtgtgtggggcttcnttggggttgtgggtggg

SEQ ID NO: 138796 - DNA, 109 bp, Zea mays
  Clone ID: MRT4577_58065C.1
agcatgtgcctgtgctagcggagaaaacaacggattgaggcttgagaccatgcaagaactagaagcggtaaacacagaagacgatacttgtctggaaagttaaacagga

SEQ ID NO: 138797 - DNA, 293 bp, Zea mays
  Clone ID: MRT4577_58066C.1
tcgcttactcttgggctgactcaacacctggcccggtgatatctaaaacacgtaggggttacaaaatactctaccaggacctcaagatagactccgacactctagcgctcaatagagcttaccacatggactctaaccatcagtcctactaccgcgatcacctgcaactccaacatcaggtaagtgacatttacttcagacatctccacaatctaaatcaatcagcttatgcatttcatcgaaccgctcttttgccactgaactaacaccctaacctcactacgcctgctcac

SEQ ID NO: 138798 - DNA, 792 bp, Zea mays
  unsure (1)..(792): unsure at all n locations
  Clone ID: MRT4577_58067C.1
gccggccgggctccggaaaagagggnnnaaaaaaaaaaaaaatttacaaaaaaaaaaaaaaccccccctgatcaagcaataggacgatcgagcaagaagcaagcagcagtaacaagaaaccatcatcgatccatgtatccaccaatggcggcgctcggaggacggcggaggagggcgtcgtcagcggccctcctgctagccttgttggcggtggccctggtctccctggccggcccagccacggccgcggggaacaagaccgggcaggtgaccgtgttctggggccggaacaaggccgagggcacgctgcgcgaggcctgcgactcgggcctctacaccatggtgatcatgtccttcctcgacgtctacggcccgcagcgcggcggctaccaccagtaccacctggacctgtcggggcacccgacggccggcatcggggacgacatcaagcactgccagttcgtgggcgtgccggtgacgctctccgtcggcggcttcggctccggctactcgctcccgtccacgcaggcggcgctggacctgttcgactacccggccaccaggttctacgtcggcctcacggcgtcggagatgacgcacggctgggtgcaccccaagaacgtctactacgacgtcgcgccgtccgcgcagaaggcggacaactacggcggcttcatgatctgggaccgctactacgacanactctccaactacaccagcatggtcaaggactacgcttgattggatttctcgactcagttcagagcagacatgcatgctagctgcgtcagc

SEQ ID NO: 138799 - DNA, 1759 bp, Zea mays
  Clone ID: MRT4577_58068C.1
agctgttgctcatcagtgtcgttgtatagtgtgcagtgcatataatatatgtggtttgtgtccttgctatttaggtgtttgtggcacgaaactatatatatagagaaattttctctcgttaaaaaaaaaaaaaaaaaaaaaaaaaaaaaaaaaaaaaaaaaaaaaaaaaaacgctccttaattggccggaacctagctagctggctgaaaaacgtactctgctctgcccagctgaattccacgcatctctccctcgaatgtactctgctcctccgatcctatatatagctgactcgattctacctaattcttcacaccacggatcaagcaataggacgatcgagcaagaagcaagcagcagtaacaagaaaccatcatcgatccatgtatccaccaatggcggcgctcggaggacggcggaggagggcgtcgtcagcggccctcctgctagccttgttggcggtggccctggtctccctggccggcccagccacggccgcggggaacaagaccgggcaggtgaccgtgttctggggccggaacaaggccgagggcacgctgcgcgaggcctgcgactcgggcctctacaccatggtgatcatgtccttcctcgacgtctacggcccgcagcgcggcggctaccaccagtaccacctggacctgtcggggcacccgacggccggcatcggggacgacatcaagcactgccagttcgtgggcgtgccggtgacgctctccgtcggcggcttcggctccggctactcgctcccgtccacgcaggcggcgctggacctgttcgactacctctggaacgccttcctcggcgggtcgaagccaggcgtgcgccgccccttcggcgacgcgtggctcgacggcgtcgacctgttcctggagcgcggctcgcccgccgaccgctacgacgtgctggcgctcgagctcgccaagcacaacatccgcggcgggcccggcaagccgctgcacctgacggccacgccgcgctgcggcttcccgcccgccggctacctgcgccgcgcgctcgacacgggcatcttcgagcgcgtccacgtccggatctacgacgacgccgactgcgaggccaggtggcacctcgcgtgggacgagtggacggcggcgtacccggccaccaggttctacgtcggcctcacggcgtcggagatgacgcacggctgggtgcaccccaagaacgtctactacgacgtcgcgccgtccgcgcagaaggcggacaactacggcggcttcatgatctgggaccgctactacgacaaactctccaactacaccagcatggtcaaggactacgcttgattggatttctcgactcagttcagagcagacatgcatgctagctgcgtcagccgcttcgatctagctcaccgacctatataagccgaagtactgtgtagtgtgtttgcattttattgtaagaaactaagaaggaataaattggcgaataaacaagagtaaaatacaccgggttgttgagtgaaattcagcattaagggtgtgtttgtttcagcttatagattatataatctggattataatttaaattatataatttagattataatctagatatattataatctatatgtagttgtttgctagtctagattatacaaatgtagattattcataaagacagcagtacccttgtttgtttatgtgaggtgagaaaagaaggatggtatatattgtaatttctatttacataacaatgggtagtgggacttttgcc

SEQ ID NO: 138800 - DNA, 952 bp, Zea mays
  Clone ID: MRT4577_58069C.1
aacctactcctgctaattgaacctagtgtttttgctggtgatgagttagcaagtatcagtaatgaaaatacctctgaacatggcggactgaaatcaaggatgtttattccccatcaatcaccagaagaactatcagataatgaattttatgaagagtatggttttgaattaagtgaatcagatgaatctggtacagaagatgaggagacaacaatcaagaaaaatagggatgaatcattgaagtctggtggccaaagatcaagaagaacctcagcacttgaattggatgatgctagtctcacaccttataagttaaagtttaagaggggtaaaattgtagaactcccactagacagcatgggcccaaggaggctgaaatttagaagaaagtctgcaaatgaagcttcaaatcgtgaaagccaaccagctagaaggatttatagaaggaacagcaccagtactgctgttcctactgatgtggaatctcctggtgtgaaactgagacatcaagatgcacaagagaagaaagatgcacaaggattgttcaataatgtaattgaagaaactgcaagcaagttagttgagtccaggaaaagcaaggtaaaagctttagttggcgcttttgaaacagtgatttctctccaggatggcaaacccacatcatcgacagcgcaagctggtaattcacaagatttaattcctgatgacgggggaaatgcacctgaggaaactggatagaatttgcatgcctctgaaatgttgcaatctttgcactcatgtttgggtctcctcctttatttggttccagaatcggatctgattggaagcattttgttcagtgtatacaacagatttcttctgtagaacgacagttgcggaagtggttttttcagacagtatatagtaatgtgttcaatggaacgagtgctttgaagtctacttcactgtaaat

SEQ ID NO: 138801 - DNA, 498 bp, Zea mays
  unsure (1)..(498): unsure at all n locations
  Clone ID: MRT4577_5806C.1
cggaatnncccgggntcgagcccacgccccgtccgagcttcatactttggtcttctttgttaaaactatttgtacaatgtaantcttgttttttggttgaaagagtttagtactttgagtgtcaantcataccgtagttcgcttgcttaaactattcgacagatgtatctctgcttctttggttggaaaagtttagtaccttgagnntgtcaatctatatttcaagagtacattgtcgatatatttgagacttggagggttcttggccatatganntctgcagaacgttcatatanncaattggaagaaattaagttacaaaaaaacgtcggtctcaaagtaactcttcaagcagtacatgttctgtgtcgctacaatgctactctccggagaaaattgtggtgaatgcaaaaccttagtactcaactgaatattactgtcaaatctgctatctgtttccgtggctctctaactacttagagctgtgtttggtttgag

SEQ ID NO: 138802 - DNA, 489 bp, Zea mays
  Clone ID: MRT4577_58070C.1
tcggtcttacactaacaaggacacagattcccaaaggtgtataggtgatacgactgagcatgcacccgtgcttctgtctagactgctaggacgacccacacaaggtacgagcctaccctgtgcaaggtatcccaatgatcgaccacatattcttatgtttgtaagcgacctacgcgcaagccccggaggcaacctatgcaatctaggaatactagaactaatagaaacgcttgcctccacatacaggtggcacagagtggggtagaactagcattgtgtacctgacacgccgactcggacgatcctctaacacgtgtctgtggcgaggctcagcaggctcaccagcctatgtatggtctgggtgcttgcgcgcatgctttgcattttaggaccagcaggtacttattattagtagctgctgggaccacaatgtacagcatgcacccaagcgcccacgagagagctagccgcggtaggcctgatgagact

SEQ ID NO: 138803 - DNA, 259 bp, Zea mays
  Clone ID: MRT4577_58071C.1
cgctacataggccccacttgcttttatgcagcagttctctagtcagcttatcggagctggtagtgcctgacaactgaattctgctgtgctcgataagagagagttagcgcgagccaaaaccaaaaagaagctttgtacgaccgggttatatatattgccggacatggagccagacagcattgcttctgctcggtagctgtacggtactactgcccccaccagcccgggtacaagcagctccatctgtcttccacgaagg

SEQ ID NO: 138804 - DNA, 560 bp, Zea mays
  Clone ID: MRT4577_58072C.1
gtaatgaaaataaatatgcttttagcgagcgatacacaataaattctggcaatactgatcgctaccacatgttccttgacacttggccaaccatactttgcttcttgtgccaaaggacaacatctttgtagggtaaatctcctccaaatatatctagagcactcccaacagttacatctactcgacttttgcctgccttctttatcctctctaggtcatccattgttgacacacccccagcataagttactgggatctacaaagtcaaagaaacagcggtgagcttagaaacaggaacagaaacagaaacactaaaacataaagatatctgcacacagatatattaaaatttcatttgttgataatcttcacgagttattgcatatgatagttatgagctcaatagaaataagcatggaaagatggctaatcaactagtctttgatttgactggaccaagacctgtagaaagactgaagagaattttaaattatgaccgcagtcaagttagtttattgcttttgaaataataatcaccatcacaaaatatttgttataac

SEQ ID NO: 138805 - DNA, 570 bp, Zea mays
  Clone ID: MRT4577_58073C.1
gcacgagccggtacccgtcgtacccgccggggagcgacgcccgcaagttcacggggatgggcgagttccagtgctacgacaagtacatgctgcagcagctgaggcagcacgccgcggaggagggccacgccaggtgggggctgtcgggcccgcacgacgcgccgcggtaccacgactcgccggacgcgtgcggcttcttccgggagcgcggcggatcttgggagaccccctacggcgacttcttcctgtcgtggtacgccgggcagttggtggggcacggcgaccgcgtcctgggcacggccaacgccgtgttcggcggcaagcccgtggcgctgtcggccaagatcccgttcatgcactggtggcacggggtgcggtcgcgccctgccgaggccgccgcgggcttctacaagagcaacaagaagaacgggtacagccccgtggccaagatgttcgcgcgccacggctgcaccatggtggtgcccggcatggacgtgtgcatgaacaagcagcaccacagcacgggctccagcccggacaccctgctggtgcagatgaagaacgcgtgcc

SEQ ID NO: 138806 - DNA, 268 bp, Zea mays
  Clone ID: MRT4577_58074C.1
caggaaaaggggtccaagggccctcccattttttttcaagggggggggggggggcccggaaacaaaggggggcccccccctggttgggcaaacaccaccccccccaaagtttccttttaaccggggcaacggaaacttttaaaaggcccttagacttctaaaaaaggggcccccgggtcaatggggggacaagaccttggcaagggggggaaaattaacttttggagcaaaaaggagcaacaaacccccccccccttaaaaaaacaag

SEQ ID NO: 138807 - DNA, 250 bp, Zea mays
  Clone ID: MRT4577_58075C.1
acaatcatcctagaaaaatgctaatttattgatatctgatccacttcaaaccaagtgtacgcggttattcccgcttaaaataccgccaataaaactacaattcatcccaaacctctaggtcaatttaacgcccaaccaacccacaacccaggcccagaacacagtctctagcccaatctataccccgaaatgcacgccgctttaaccccccctttgacaaaccccatatacattttcttatacgcggttt

SEQ ID NO: 138808 - DNA, 691 bp, Zea mays
  Clone ID: MRT4577_58076C.1
aaatcccggacgaacctcacagtgctgagacggcgctcgccgactggacggggacctgctactaaagagcaccaacgagccaagggcgccgacgcaaaacggcgtgcgacgacacacaaataacaccgagcgcagacaccataaacatcgggaggacgcccaacacggaatactacagaaaactcaaagaacaaaaaccgaaccagaacacgaacacacacgaccccaatcaacaacgctacaaaaactaacaacaaaggaaaaaaaaacaaagacaagaacaaagaaaacaaaccgaaataaaaaaaaactaaaataagaaacgaaacaaaaaacaaaaaaaaaaaaaacaaaaacaaaaacaaaaaagaacaatgaacaagaacaaaaaaaaaaaaaaaaaaaaaaaaaaaaaacaacaaaaccaagaaaaaaaaaaacaaaaaagaaaaagaataacaaagaagaaaactaaaaaacaaaaaaaaaagaaacaaaaaaaaaaaaaaatacaaaaaaaaaaaaaaaaaaaaaaatgaaaaaacaaaaaaaaaaaaaaaaaaaaacaaaaaaaaaaaaaagaacgaaaaaaaaaaaaaaaaaaaacaaacagaaaacaagaataaaaaaaaaaaaagaaaataaggaaagatgagagagaaagaaataaaaaaagaaaaaaaaaataaaa

SEQ ID NO: 138809 - DNA, 162 bp, Zea mays
  Clone ID: MRT4577_58077C.1
ccggggaaaaccgaccacagccaaccccacggagagccaggaccgaacccaaagcaccagacacctatcccgcgtcgccgacagcaccggccgacgacggcgagcgccacggcagacacaggagagaggctcgagcgccgcgccgagcaccgacgcagccac

SEQ ID NO: 138810 - DNA, 828 bp, Zea mays
  Clone ID: MRT4577_58078C.1
attgggaccctcgaggccggccggggatccccctggagacgtcatgctgccccagtctccccgggcccgccggtggccggctactactgagatgtgcctccatcacagcacaccatgtgatgcgggaggagcctgctgttccgcctctcatccccctacttcttccaagatgcaatcatgctgccccaagctcctcgggccctcggccgccatgattgcctcaccgcctctcaagagtcgcctccacctacttccaagaggaagaggccggagaagctatagtccgtgaagaaatcaagcggaggggcggcggtgtaggaggggccggcggaggagagagagggccgggggaggtgacagaaagctagagagagatgcatgatggagcatgatgatggcgtggttgatctcttcgatctagcacttctatcattcgagtcaagaagccatcatcagatcggtgcagtcctccctcctcctcctcctcctcctccttccagctcctctttatcagcttctctgtaacgctgcgccgccatggctttgggggaatcaagcgccttggtccgaagaaatccgtcttcttttcctagctaggatctacgtacttgtgcaagagtatgtcatgcatgctacgctatatgttattcctacatgttcttggtcgatctgtcgctacatatggtttgtgcagacatcaatactcgtctgtctttgattgatttgttttgacaccactctttgatccggagtttggttcatgtaatactatttcattagatatgtggatttcttctttaagctaaaaaaaaaaaaaaaaaagcggcc

SEQ ID NO: 138811 - DNA, 164 bp, Zea mays
  Clone ID: MRT4577_58079C.1
gtgaaactgaacctcacaggattgcttgcgacacatgtgagcatccccactgtaggcacgcgcaggacttgtgaccagaaaccttttcctatagacagaaaggcctgctactgataactgaaacacacgtactcatggatcagtcgatccaataaataacttcg

SEQ ID NO: 138812 - DNA, 822 bp, Zea mays
  Clone ID: MRT4577_5807C.1
aaattcattccacttcatacaggcatttcctccttctagtaccatcgtgtgtgctccaagcctcaagtgctgtgtactagtactactactactacgtgtgtgtgtgtgtgatacactagtgagtgtgtgagtagtacgtgtgtgtgctcatccaccggtcatctatcagtgtactcgagtgctagcgagtagttctgggctgacaattggcatcagagcctctggttgtggtagccatggccggtggtaaaggagtgcagcaacgcaccacctcggatggttcccagtcgccggctccggaggagcggcgagggcgcagccgctccaggcgcggccatcgcggtgaggtcgtggttagggagatcgtgcgcgagaccgcaatcagcggtagcgtgcccatcaccttcccgatgctcacgcgctcgaactacagcgagtgggcgttgatcatggagtgcaaccttcatgcggcgagcctttgggctcccatggaggacgacctgatcgagagaaaggaggacaggaaagccgtggcagccctcatgcgcgccacgccaccggagatgcacggcatgcttcgcggcgaaggcaagcgccaaggaggcgtgggaagccatccgtacccagcgcctcggcagcaaccgtgtgcgcgaggcgaacgcgcagaagctgcgggcggacttcgagaacatcgtcttcaaggagggcgagctcgtcgacgattcgccatgcggatctcagccttgcgtcacagctccgcgcgctcggcgacccatggacgacgcgagagtcctgcggaaatttctccgcgtcgtgccatct

SEQ ID NO: 138813 - DNA, 619 bp, Zea mays
  Clone ID: MRT4577_58080C.1
ccctcgagttttttccttttttttttttttttttttttttttttttttttttttttttttttttttttttttttttttttttttttttggaaaatgcccatgggcttaatcaaaggggcttccccccccccaggggttggtcccccccctacggggggaaaaagtgtcaacggggaaacaaaagtaacccgaattccaaaggaatggcccttacaggggtaaccccaacggttcacaggaatgaccttttgtaataaaagcaatttttttctttttccatttaattttttttaaatccctccttttttttaaatttacatggggggcactgtttacatataatatgggggccaaggttttggaaacaacattgcgggacctttgggcccggcccttcaaagttggggaaacctcccccaaaacctgggccccacaatacagtcccgggatctttttttgtttcggggtttttggttaaccgatgggggggagcacttggtttaaactgccaaatctttgacaattttgggggatggatttccaaatactttgttggaaacactgatcgcccatttttttttgcctttgaaggcctttacccccaagtttaaagaagtcg

SEQ ID NO: 138814 - DNA, 305 bp, Zea mays
  Clone ID: MRT4577_58081C.1
aggaaaatctactataatagtcatgccctctttttcacatcttccaatccttcacaagcatagttcatcccacatgtcaggcatcatatctagcttacctagtcatcgttaccacccttaatccacattcaattccatattttactcttattattgctacattatacattctaatattatactgttattaagctttactccatatacacatctctcacacactatatctccctattcatatcctgtcaaccaacacaaacacacacattgattatcgtctatcatacttccaccaacaaaataca

SEQ ID NO: 138815 - DNA, 149 bp, Zea mays
  unsure (1)..(149): unsure at all n locations
  Clone ID: MRT4577_58082C.1
taagctcggaattcggctcgaggggaatttccctttcggcttctgctaaactgcagccaaccaaggagtgnagcagggttagtattggcagncaaagcgtgccccccccacggtcatacaagctggaacccgttgaatcattagaatca

SEQ ID NO: 138816 - DNA, 397 bp, Zea mays
  Clone ID: MRT4577_58083C.1
gcagccgccgtcggcggcggaccctctgcacagcaagtgccacggggactctcgggaagctgacggactgcatggactacgcgacggggcacgcggggtcaccctcatccacctgcatgggcgacgccagcaaggcggaaacagcgcgccccgagtgcctatgctacattatccaacaggtgcacacggagcgcagccaggtgcactcgctcggactgcgcttccaccgactgatggcgctccccgccgcctgcaacctccccaactacgacgtctcactctgcataagagagtgctatcgactacagctccctcagtcactgaccatggcagagctagctctgattaaagacgctgatcacttgcaatctttaaatgatgaaaccatactgggctg

SEQ ID NO: 138817 - DNA, 209 bp, Zea mays
  Clone ID: MRT4577_58084C.1
agctagctcaagaggcgcgaaaccggcgatcaataggggcgccctggacgagccaccaccaggttgtacgaggggcgagccctcagggcatccttggcggaggacatctccaccctcatcttaggcttccccgcccaaggctcccgaatggcctgcagcaagctgggcgcggaggcaacccacgaccccggggggcctgatcgccgggg

SEQ ID NO: 138818 - DNA, 530 bp, Zea mays
  Clone ID: MRT4577_58085C.1
ccggccgggacacagtaaacgtacccagccttctaaagtgctccctttgacaacaacacgacacgcccattgcttcctccgactcctcggcgtcgccgaggagagggggagcgactgccgtcatgggcgggcgccgaagctcttgctgacttgccactcgccgccgtgggaggcttccctagggcgcgacgggcgacagggtggacaaccgcagacgcgccttgacggccactcttgaggcctacgccgcggcagggccccactaagcctgcggcgtttacaaccagagctgctactggcttcgctgccacgaccaagatgaccggaaagatagccgccgaccagcggagctacctggagggcggttgcgggaaggcgcttttcttgtggatgaacatggcaagggcaacctggcgcggcgacaacctctagttctccgttggggttgtgtccgcggacttggcgattgaaaactccctggagggccgcacctgtggttgaggtgtcgactgcaacaccctgctcatgct

SEQ ID NO: 138819 - DNA, 249 bp, Zea mays
  Clone ID: MRT4577_58086C.1
aattcggcacgaggaaaaaaactgccacccaccaccgcgccgccgggccatggcttccccatccccttactcgcccctacacccgtaccagcacccagctgctccgaatgagtcaccaccaattccaatccctaccgccttgaatgccgccgccgccgacaccaacgaagctgacaatggcgctcgaacataaagttacagcagtctgcacgaagcacctcaagaacgtcaaactggcagccgaggcta

SEQ ID NO: 138820 - DNA, 262 bp, Zea mays
  Clone ID: MRT4577_58087C.1
ccctccccctttcttcttctttctattttttttcgccaactcctcctttattaaaagacatgtttatttttcatacataaggctcacacaaaacaaaaccgtattaaaacaaaaatccaaaaacctttactaaaaccaacaatcaatggttgcctcacaaaccaacaaaattcaaacttacctacaaaaccgaatagtaacacttcgcgcatacatgcaaatctaccgaccacgaaactataccatataaaatatacgaacc

SEQ ID NO: 138821 - DNA, 1420 bp, Zea mays
  Clone ID: MRT4577_58088C.1
taccctcgaggccggccgggcccaggagcaagaaacactcagaagctgcccagagctaccacccctcttatccccacccctcctcctcctaccttttctccttcagacctcaaaatctgtgtgtctcctgccgcggctagctgataggaacaagagcatgcacatccgagaagaggaggctacaccatccacagtaacaggcatcatgtcgaccctgacttcggcggggcagcagaagctgaaggagcccatatcccctggtggcggctccgcgtcggtcgctgggtccgctgcggagaggaacaacggcggcaggggcaagggcaagactgagatcaagcgcatcgagaacacgaccaacaggcaggtcaccttctgcaagcgccgcaacggcctcctcaagaaggcgtacgagctctccgtgctctgcgacgccgaggtcgcgctcatcgtcttctccagccgcggccgcctctacgagtacgccaacaacagcgtgaagggcaccattgagaggtacaagaaggcaaccagtgacaactccagcgcagctggtacgattgcagaggtcaccattcagcattacaagcaggaatctgctaggctgaggcagcagatcgttaacttgcagaactccaacagggccctgataggtgattctatcacaaccatgagccacaaggaacttaagcacttggagactaggttagacaaagctctcggaaagattagagcaaaaaagaacgatgtgctgtgttctgaagtcgagtacatgcagagaagggaaatggagttgcagaatgacaacttgtacttaaggagccgggttgatgagaatgaaagggcacaacagacagcgaacatgatgggggcaccatcgacaagtgagtatcagcagcacggttttactccttatgatccaataaggagcttcctgcagttcaacatcgtgcagcagcctcagttctattctcagcaggaggaccggaaagacttcaacgaccaaggtggaagataaatattggacctctcaagcttcagtacttatccgtgatgatgcatgactgccagtgagaaactgagctacattactgtggaattatatgtaaagactagtactactgcttcatatatgtgcatgtgcgcacacgcgcacgtagtatgcacaatttcatcccactattatggcttggcaccaactatgtctccttaattatcataggagaaaaataagtcacgcacaaaaaaattctaaagatgaggcgcagtgttggatgactgaaactgaaagataggattctcgtggatggcggtggtcatatacggcctgttttggttgatgtacccgagcgcacccgcggaatcttaaagcaagttgtgtttaattgactgcactttatatacgggttgaacagatgta

SEQ ID NO: 138822 - DNA, 194 bp, Zea mays
  Clone ID: MRT4577_58089C.1
gccgctgtgcctgcggtgcaggaggcgttattcgccgtgccgcttgccctgtttgctgctctccgcggtcgtggtgtccctgccgcttcgccatcgtgtttgtcctgtgcctactcctgtgacgagtgttcgtaattgtttcttcgctacctttccatcgccctcctccaaggccggggtgcccatacaattgg

SEQ ID NO: 138823 - DNA, 486 bp, Zea mays
  Clone ID: MRT4577_5808C.1
ccgggccctcttccgctttcgcttcctgagatccacatccggtcacccccatcctcccatgccgcactagctcgcccgcccactaaccacccagcacccgccgcgcacgagattcattgcgccgtccctacgtgctgaggatgtcactgcccgccggcgccaatgccgtaaccctctcggacgcctctttcaccatggagctaagggtctcaaacatcaagccggacacgctgcccccggggaggctttcgaccgtctacacagttgagctctcctacatgcacggataccagcacctgatgcccagcatctgctagggctcctccggcttctactcaggcaagccaatactgcgcgcctgcggcctcgactaacgccagcacgactccaccgaggatcccaggtccttgctgctcccgctcgctccacctaggcacaggctctggcctactctgcaccaactgcggagcgtgcctgcagctctga

SEQ ID NO: 138824 - DNA, 338 bp, Zea mays
  Clone ID: MRT4577_58090C.1
tttttggggggttttatacatgttttggggggaaactatctttgcttgctttcggttcttcttcgaaccgggaaaccaggtcggtttaaacattttagccccaatggacatccaaagggtaatcgtccaaaacagaaccttaaaacaatgccgatccacaagtgaaagggcagcatgctagaatttagcgaaaaatttatcaaaaggcctcgggcctataaatcaagtctacaaaggcaccctatttgatagtgtggcaaacccaaaaacgtggattataggaattttcggggggggatctcgcccgcaatcattggtgggggttgggaaggggtttt

SEQ ID NO: 138825 - DNA, 774 bp, Zea mays
  unsure (1)..(774): unsure at all n locations
  Clone ID: MRT4577_58091C.1
attgggtccctcgaggccggccgggaagatctattgcaaacgattttctgttaggattaatctcgggcaccgcggctcctcgtcctcccaagccaaggcgccgtgggagctcgggatctcatgtcgtgctgtcacctagcagagagaagggccaaccatgagcaattcgccatgtcatcgccaagattcccagagggtagccaagggagttcacgagcgagggtcgagcctaatcccagctgtcttaggggcaggggagcatccgaaccatgggaatttccccgccggagttcgtgggcagaggaagatccgcaccacgcctacatcatcgctctgggtatacgatgtggtcgaggatattcgccattgcatgtggatgttcatcgtagcagcgcctaggcggaatcgctctccgggccatcggaattcgtcgccggagatgggccccgccgcggagccgcgacgaggatgggactctgcatagtgcaatcatcgcgaggtgacgtggaacctgaagcttcaattggagaagtatctggagttacataaaaaggtcaagcataggtaccataaaatgaggagcatgcaggatactacaatgagtacggaaaggtctagaccgttatctctcagtcaactatggttgcagggatcgttgtcgttatataatgtatttatttagctattttgtatagaactcctattatataatatagatgtgacattgatttctatatcatgangtatcataaaaaaaaaaaaaaaaaagcggcc

SEQ ID NO: 138826 - DNA, 324 bp, Zea mays
  Clone ID: MRT4577_58092C.1
atttttatttttttttttttttttttttttttttttttttctttttttttttttttgttattttttgtgtttttttttttttttttttttttttattttttttttagacgccccaagcaaacaagccccgaaaccgtccccaaagacacacaagggaaagttacaggtaaaattacattaaacaaaggttccaacaactttcttaaagtacaggaaagcttccatttccaaaatggccaaaaacccccaacaaagcaagcacctccgacaccaaaagccatccatgtttcccaagttgttaaccaagcgcccaacacggcaaaa

SEQ ID NO: 138827 - DNA, 721 bp, Zea mays
  Clone ID: MRT4577_58093C.1
cgtgtatttggccccctttccggccagagccaactcggtctgctgtttgttgccccagaggaggacaacatggagacgatcgtcgcgcaggatgcgcttgtaatcacgtggaactcgtcgccagacaccgcagatcttgcccgtggcattctgatagacactgagagtgcccgccaaggtggtctccagttgatgctcctccaggattacacccgcatcatcaacgaattgaatggcacgcggacgaccgattcgcgatgaggtgtagaaggagtagtatagattcttcttgtggaacaggaaacgggcggtggccaccacattctgcggattgtaggtggtgtacatggacttcatttcctcacccttgaggaaataggaggtgcggcccgttagcaacgcagcgtaatctataaatagggatcaaatgaaaggtggagataatccaggtgttagataaatacaatagttctcttgttaattaaatgtaggagctggtgaatgggattacaatttcccgcaggatttggcggattctattgggatctgggtgggtgtccggtacttttgtacttacgtttcatgttgcgctcttcctcttcattgggcacgggcacatcccaagctacatccgtatctgaaagatggaggggatacaaatagagaataagatgatgctgggcgataacgtaccacccttaatgggatttagatagcaaca

SEQ ID NO: 138828 - DNA, 680 bp, Zea mays
  unsure (1)..(680): unsure at all n locations
  Clone ID: MRT4577_58094C.1
attgggtccctcgaggccggccggggcactttactaccttttaagcaactccttttgctttattgatgtattcttcattttaagcaccatcatcttcctattttgttttccaatattgctgtttgttgtggtaaatttttctgtagttcatcatcatgctagaaggcaaggctgtgattggtgagactgacatgcttcagaccatgcagcaagatgctatggatttagcatccaaagcactcgatttctttgatgtcactgaagccattaagattgctcgatttataaagaaggagtttgataggatgcatggacctggttggcagtgtattgtaggcactgattttggttcgtttgtgactcactgttgtggctgtttcatctatttctgcttaggcaacttggcaattttgctattcagaggctcagctgctccagaggcacatgaaaatcggttctcagcactagatgcagccaaagcataatttcattgcctaattaattttccctctcttttgacttttctatatatatttttgttcattccatgtaatgtaatgataatgtagaaagaaatggaaggttttagagaaaagcnnnnnnnnnnnnnnnnnnnnnnnnnnnnnnnnnnnnnnnnnnnnnnnnnnnnnnnnngaaaaaaaaaaaaaaaaaaagcggcc

SEQ ID NO: 138829 - DNA, 437 bp, Zea mays
  Clone ID: MRT4577_58095C.1
gccccgccgtccgtgaacttaatttaatctgtaacccatggcttttttcaccactttccaaggtttattctgggggggttccataatttttttggcgtgctttattcttaatccccccccaccaggtggccaacccaaaaaggccagcattgttgggaccttgccattgcccaaaacagggccttcggccaccatacttgttagccgtattgccaccggcccttcctttttaaattccggttttaatgagtccttttgcaaaaggactaataagtcttttaaaaccttgttcttttgcttggcaagttgtcacccataataatgaattcatgatcctgcgaaaccttaatgatcctgcgaaaccagacggcaaaagataaggttagttaaatcctgtttaaccaaatttttttttaccacccaattttcccatttta

SEQ ID NO: 138830 - DNA, 768 bp, Zea mays
  unsure (1)..(768): unsure at all n locations
  Clone ID: MRT4577_58096C.1
ctccaaacaccctagccctcgcagccgcagcggcgcgcacccctctccctccttcctgaagacagcgccgccgtcggccagagcacaggatggcgaccgtccccgctcccgcagccgagaccgcggcctccaccgcgcgcacggtgaaggatgtcaacccccacgagttcgtcaaggcctactccgcgcacctcaagcgctccggcaagatggagcttccagagtgggttgacattgtcaagactgcaaggttcaaggagctgccaccttctgatgctgactggtactacatcagggctgcctcgatggcaaggaagatctacctgaggcagggaatcgggatcggcggcttccagaagatctacggtggccgtcagaggaacggttcacgcccaccgcacttttgcaagagcagtggtgctgtttcccgcaacatcctccaggagttgcagaagatgggcatcattgatgtcgaccccaagggtggaaggctcatcacctcccagggaaggcgcgatctggaccaggttgctggaactgttcctgccgaattctgatcagatgaagtcccctctatgcaatcgtgttcggtagtagaatttggctacagttttgaattatgataccctccctgtgtttgttatgcaagacttcgaagtagatcgcatgctattatggtacaatggttaattgtctgagcttttaaattatctgcccgcctgggagaatcttatgcttngtcttgtgaaaaaagttggatttttctcc

SEQ ID NO: 138831 - DNA, 656 bp, Zea mays
  Clone ID: MRT4577_58097C.1
cgtactttttttttttttttttttttttttttactttttttttttttttactttttttttttttttttttttttttttttttttttttttttttttttttttttaaaaacccaaacccagggaagaaattaaaccagttaaaaaaaaggaagcaaaataccccaaacaaaaaattccaaaaagccccccacagggaaaaaatctaaaaaaaaagttcagggaaaaagacccaaaggccccaaccacccttttaacaggcaaaaaggaacgggaaaacccccccccttggacccaggggaaaacggcctttaacaaaagggggggaagaacaaaacctttcccaggcacaaaaccttttaaacttcctgggaaaaaaattggcaaagggagggaaaatgggcccttttccacaaaaaaaaaaagggggccgaggggggaaacttggggtccgggggaaaaagcaaaaacgggtggccctctggttaaagggctcccggggttgggacaaaaccaggagccgggggggcccctaaaaaagcgggggcagggggcaaacccaaaaggagtttggccaggggaaaaactccaacgggggacggaatttttttggcaaagggaaaatgagggccaatggggaacaccccccggggccctgg

SEQ ID NO: 138832 - DNA, 359 bp, Zea mays
  Clone ID: MRT4577_58098C.1
ggcgtgccggcctttgtttcttttctccattctgtttcggtttgtccaaggccgtgacgctgaaggcgaacccgttgctgaagaggtccatgtgctgctgggactttcccttgccgaacacgcccaaaacgtcaccgcccaaagtgtttctctataagtgcagcaacgcgaagctgacggaggcgtaccccgccgtgatggtgcccgagaggctgatgtccactgcactaaggacaccccctggtaaacgaaccacttcctgacaaccaactgtgcggcggcgcccaagaggctgccgcggctaagggccctcccggggagggcggccgccgtcttccaccgtctttgggatggggccc

SEQ ID NO: 138833 - DNA, 594 bp, Zea mays
  unsure (1)..(594): unsure at all n locations
  Clone ID: MRT4577_58099C.1
ctccaccgcggtggcggccgcccttttttttttntttgatgttaatcagcagtgtggatgaacaacattgttcgtgcaggatcttgttccattgtaatatgctaaatagctatccactgcatagttatctttaaaaaaatgggcattacgcctggatagtgaataatttattcaatattcgtcatattctataaatctctgcgctccggccatggccaccgcagccgccattacacccccgccccgcttctcagccttccagttccagaacctgcagcgccaccacggcctccgccaccgcgtgggcgccctgtcctacccccgcccttcgccgccgcaactggacagcagtaccagtcaaaaggaaacatttataataaaaaaatcactctgacatcagcaatcctggacggcagtaccactctcaagctgcgcattagcagacgcgtcaagatcttgaggaaagaagagcctgcatgtgttgtggtacagagttctactcaggccttctatgtcagaaattcctttgcttccagccactaccccaagaacttgcctaactaaacaaggctcattgcgaccttttactgttga

SEQ ID NO: 138834 - DNA, 459 bp, Zea mays
  unsure (1)..(459): unsure at all n locations
  Clone ID: MRT4577_5809C.1
tcctgcccgccaaggcatggcgcgcgaggggaaagaggggcccgcaagaagggcaagaagagcgtggagtacctactagatctacatcttcaacgtgctgaagcaggtgcacccggacatcggcatctgctttaaggccatgtccatcatgaactccttcatcaacgacatcttcgagaagctcggcgccgaggccgccaagctcgtgcggtacaacaagaagcccaccatcacctgccgtgagatccatacctccgtgcgcctcgttctccaaggtgagctcgccaagcacgccctcttccagggcaccaagggccgcaccaagttcacctcgttctaagctgcgtgtgctccgcttggaggcttccctcgtatgntcgcgtgtcttgctgcacttaggtgctgctgtgtgtggtctcctccggtagcgactgttatctgatgggacagtgacaatgc

SEQ ID NO: 138835 - DNA, 244 bp, Zea mays
  Clone ID: MRT4577_580C.1
ggggggggatcccaccccaaatatttttaatttgggggaaaaaccccccctttacaaaaaccattggtttagggggggtttaacgaaaacccgggttttaaaagccgaatcccatccacaaaaaaaagggttttattggccaaaaaattttgccatgggattgcaaaaaaaattctgtacccaacccccttttcaccggggaaaggggaattacccttggacttggtaaaaaaatccccggagg

SEQ ID NO: 138836 - DNA, 787 bp, Zea mays
  unsure (1)..(787): unsure at all n locations
  Clone ID: MRT4577_58100C.1
cggacgcgtgggcaataatcaagagggagaagaaaattttcagtaccatggcgagtggaggttttgtggactggagaggaaacctcgtcaacagacaggtgcatggaggggttaaagcagcatggtttctgcacttcctgacatttgtaacaaacatggtgaatgtcccaattttgctgaatctggtcacctacctccgagggacaatgcatatgggagtgtcggactctgcaactacagtcactaattttgttggtgctacatccggatttactttgataggagctttcctctcggactcttacatcactcgttccagaactatacttctctttggtccattggagtttctggtaatcttttctcatggtttttccaaccaactacagcttacaaagataacttgcatgttttaatgttgttgctaatgtgaacctatcaatagtagtgtttaaatagttttatcaactagagaagtatcctaagactacgctaaagattttttttgatgtaagaactatgctaaaggttgccttcccaatcccgcattacttttatttcagaaattgacatcaagcgcattcatttctatgcccaaatcatcagctaatcctcgcaggcacagaccaccctcagcttttatagaacgccccaattgatatgaatagatttctggatttaggagataccctagcggaggcgtactcgccctccaagatgagattttgacaactatnttttttgggggaatgggtttaatttccttcctggggatacaactgatctg

SEQ ID NO: 138837 - DNA, 580 bp, Zea mays
  Clone ID: MRT4577_58101C.1
ggcagcgagggataattataagaccaaaaacatttcataggcatattggaagttgtacgaaaccaaacgccaaccaaaaggaaacattttttaaaaaaaatactctgacatcagcaatcctggacggcagtaccactctcaagctgcgcattagtagacgcgtcaagatcctgaggaaagaagagcctgcatgtgttgtggtacagagttctactcaggccttctatgtcagaaatttctttgcttcccgccactacctcaagaacttgccgataaacatcttctcaaaagaaagtagcctatcccgatcttctgcggagtcagtgaaggaatgtgtaaccccaccagggaatctgtgcaaattccgtgtcatgatttcacataagtcttcaccaacagcacacatgtgaagaaacatgggcagttttactgcttcagccaactcaaattgtttctcaaagtacttcttttgcatatctgccggacagaactgaagtctgtcataatccaaaccacattcaccaacagcaacgacatgcaaaacttggaattcatgtaagattgctagtgttttttccct

SEQ ID NO: 138838 - DNA, 405 bp, Zea mays
  Clone ID: MRT4577_58102C.1
catgaaacatggcaaaattggcagcgagggaaaattataagaccaaaaatatttcataggcatattggaagttgtacgaaaccaaacgccaaccaaaaggaaacattaaaaaaatcactctgacattagcagtcttggacgacagtaccactctcaagctgcgcattagcagacgcgtcaagatcctacggaaagaagagcctgcatgtgttgtggtacagagttctactcaggccttctatgtcagaaattcctttgcttccagccactacctcaagaacttgcctgactaaacaaggctcattgcgaccttttactgttaaatctggctcatgcttgtctttcttcttggatggccagacagattttacatactggcttccagcatgagtatttatatgtcac

SEQ ID NO: 138839 - DNA, 1967 bp, Zea mays
  Clone ID: MRT4577_58103C.1
ccagtatgtaaaatctgtctggccatccaagaagaaagaaaagtatgagccagattcaacagtaaaaggtcgcaatgaaccttgtttagtcagggatttttgaagcactgactgcattcccctttctcccttcctgctgtgcgaagccgtgccccaaaccctctaccatcttatttcagtccccactctctaccatcctccagggaaaaaacactagcaatcttacatgaattccaagttttgcatcgaggccggccgggccggggctttttttgccactcggattggtccgccctccttgtgctccgccggcaatggcgtccaccgccgtcaagctcatcgacatcgcagtcaacttcacagatggcatgttcaagggcatctaccacggcaagcagtgccacgtcgccgacatcccggccgtactcgcgcgcgcgtgggctgcaggcgtcgaccgcatcattgtcaccggaggctccctgaaagagtccagagaggcattgcagatcgccgagaccgacgggagactgttctgcactgtgggagtgcacccaacgagatgcggggagttcgaggagagtggagaccccgagggtcattttcaggcactgctggctctagcgaaggagggtttagataaaggcaaggtcgttgccgttggtgaatgtggtttggattatgacagacttcagttctgtccggcagatatgcaaaagaagtactttgagaaacaatttgagttggctgaagcagtaaaactgcccatgtttcttcacatgcgtgctgctggtgaagacttctgtgaaatcatgacacggaatttgcacagattccctggtggggttacacattccttcactgactcagcagaagatcgggacatgctactttcttttgagaagatgtttataggtgttaatggttgctctctgaaaactaacgaaaatcttgaggttctacgaggcattcctgtcgagaggttgatgatagaaacagattctccatattgtgacataagaaatactcatgctggaagccagtatgtaaaatctgtctggccatctaagaagaaagaaaagtatgagccagattcaacagtaaaaggtcgcaatgagccttgtttagttaggcaagttcttgaggtagtggctggaagcaaaggaatttctgacatagaaggcctgagtagaactctgtaccacaacacatgcaggctcttctttcctcaagatcttgacgcttctgctaatgcgcagcttgagagtggtactgccgtccaggattgctgatgtcagagtgatttttttattataaatgtttccttttgactggtactgccgtccaggtttcgtacaacttccaatatgcctatgaaatatttttggtcttatatttcccatgtttcatgagcctgatgacatgtcaggcacgttctgactatgtacaaccctactgaggctatgtcctaaaatcatttagggctaatttgataatcatatttttttcaaggatttttcattttttttcaagggaaataaattagttcattttctctttggaaaaaatgggaatcccctgagaaaattaagttgtcaaactagctctaaaactgttctttttactgagtatacacaaaacataggtacaacttgaattgatcacatctttcaaacgtcaattgattcctcggtggctgcagttgcggcggcgaagggcgggggtaggacagggcgcccacgcggtggcggaggccgtggtggcgctgcaggttctggaactggaaggctgagaagcggggcgggggtgtaatggcggctgcggtggccatggccggagcgcagagatttatagaatatgacgaatattgaataaattattcactatccaggcgtaatgcccatttttttaaagataactatgcagtggatagctatttagcatattacaatggaacaagatcctgcacg

SEQ ID NO: 138840 - DNA, 299 bp, Zea mays
  Clone ID: MRT4577_58104C.1
gcagtgttaaatctctcgtctgtccatctggacgttatgtggggaacagtgatttcagtgctatacatggacaagatattccgcgttgcagagacatgagctacgcccagtgataaggtggactattttgttgagcgtgctggagtgtgtttcgtttcacagacagagacattatgctagatcaggagtcgagactcaggtgctgagatgccagctggggctactgcgcggggtttctagacagatcaagatgcttagcttctgcactgttttgtttacctaaacgattatctggaggc

SEQ ID NO: 138841 - DNA, 247 bp, Zea mays
  Clone ID: MRT4577_58105C.1
gttatatcgccgaaggaaaggagacccctagacttgcaaggtgctagggagggcaaagaccacttaccagcgcgcacgcacaatgtcaggtgctcagggcgcgcacccggtcgttcagacgacgcctacgtcgtacgattcgtttggcggtggtgtgatccgtacgcgcaacggacctgtggtcgtggtaggaccaggtctccatccagatcgagaaggttctaggcttggtcgtctatgcttttgg

SEQ ID NO: 138842 - DNA, 564 bp, Zea mays
  Clone ID: MRT4577_58106C.1
aacttatcttctctccctctccctcgcctgcgtgccgttccgcgtctgatcaactcccccgcaccgcaaccctagcagcagatctggcatgcagagctgggtgagctgggaggagacaagcgtcacctccgtcttcttcgcctcagtggagcgctggtcctgaattatcctctccaccgaagacgaccacgacgaccaggaccacgaccagggcaaggaccggcctcttatcctcggcgccgccccacgacacgactccgccgccaaatccgaaccacactccgccggcgaggaccaagacgaccagaaagaagaggaggcggcggtgccgaccgaatgaatccaacccgatgccttgattgtactatatggtagtgatgttatgtcatcaaataaagtggggtgggggagtgcagactacagtactgctctgatgatactatcctaagcctagtatactattatattatacagtccgctctgtgaaatttgaatcgactcgaaaaccacaccccaacgagatgagcttgataagatctgtccacccgaaaaaaaaaaaagagg

SEQ ID NO: 138843 - DNA, 310 bp, Zea mays
  Clone ID: MRT4577_58108C.1
agtcgtctgttatttggagcaaaaaacattagggtccttaggctccttcctggggcgtacgcaggctcaaaccaccactatagggccttaacctcgtgatgaggtctgatagcgctacttcttgttacgtagttctggtccggtgacactgggagccgagacacttgacaatatataatctggaattctgtatactcctgctctacttaggaacacttatatgttggggcacagacacatctttaagacctgctactattatctgcgttgaccgatttgcttggttaccacttatagtcgctagggaaat

SEQ ID NO: 138844 - DNA, 334 bp, Zea mays
  Clone ID: MRT4577_58109C.1
ctaaaaataaaaagcatcttttttgcttggggtttatttttttcctttatctctctacaaatccggacctgctccctttgcctttgttaattgagaagccccaccctttcctcatccaaagttttcttttgaccggccattccttttttttgtttttctttttccctccccaaaatttgacgctcaagctcttttttacggttttaaatgatggacttccttgcaagcagccttttatggttattccccacttttggagcccaactaatgagactttcaccgaggttaaaaggcttttttactgggggacagaaatgaatccctgcttttttta

SEQ ID NO: 138845 - DNA, 792 bp, Zea mays
  unsure (1)..(792): unsure at all n locations
  Clone ID: MRT4577_5810C.1
attccaatttcattacaaggcatttcctccttctagtaccaccgtgtgtgctccaagcctcaagtgctgtgtactagtactactactactacgtgtgtgtgtgtgatacactagtgagtgtgtgagtagtacgtgtgtgtgctcatccaccggtcatctatcagtgtactcgagtgctagcgagtagttctgggctgacaattggcatcagagcctctggttgtggtagccatggccggtggtaaaggagttcagcagcgcaccacctcgggtggttcccaggcgcggccatcacaggacggctcccagtcgccggctccggaggagcggcgagggcgcagccgctccaggcgcggccatcgcggtgaggtcgtggttagggaggtcgtgcgcgagaccgcggtcagtggtagcgtacccatcaccttcccgatgctcacacgctcgaactacagcgagtgggcgttgatcatggagtgcaacctccatgcggcgagcctctgggctcctatggaggacgacctggtctagagaaaggaggacagganaagccgtggcggcgctcatgcgcgccacgccgccggagatgcacggcatgcttcgcggcgaaggcaagcgccaagggaggcgtgggaagccatccgtacccagcgcctcggcagcaaccgcgtgcgcgaggcgaacgcgcagaagctgcgggcggacttcgagaactcnncttcaaagagggcgagctcgtcgacaacttcgccatgcgtatctccagccttgcgtcacagctccgcgcgctcg

SEQ ID NO: 138846 - DNA, 562 bp, Zea mays
  unsure (1)..(562): unsure at all n locations
  Clone ID: MRT4577_58110C.1
naaaaaaaaaaaaaaaaaaaaaaaaaaaaaaaaaaaaaaaggaaaaaaaaaaaaaaaaggaaaaaaaattaaagaaaaaaaaattaaaaaaaaaaaaaagtgcttatttatggaaagttttatttttgatttacttgggtggaggtgaatggaccgtttttttttgggaaaaccgttggggataaccggggggggggggctttggtggaatttaccttttttggcgggttggtgtggtgggctggtttttttttgggggggcctttcccatttgtggtgccgcctgtttgccaaaaggggaccgcgccatgacccctgctgctttaccgggcgttgattctgggggggtgccatgcggttttttccgttcggggtggttagctccttgggggccgggctcgttgcgccttcttcccttggttttctccccttgttggggggggggccccccctttttttggttttttaggtttcctttgggggggggggttttccgggttttggggtttttttttttcgggggggtttttttttggggggctgggtttcggtttggtgggct

SEQ ID NO: 138847 - DNA, 696 bp, Zea mays
  Clone ID: MRT4577_58111C.1
cgggaaaaaaaaaacaaaaaaaaaaaaaaaaaaaaaaaaataaaaaaaaaaaaaaaaaaaaaaaaaaaaaaaaaaaaaaaaaaaaaaacctcacccctttcggtccttagccatcctccgccgcttcggtttttgtttccttaaagccgcgggaagggaagaaccccttgcgggggcccttgaaaaaacggaatcctcctctttggttttttggtcccggttgggtctaagggaatggagaaccggccggggccgccccggggggagggtttcaatggaaatccgttgggaaagaagccaacgggccgtgaacaaatttttaaaaattaaggccccgcccaaggttaattgggccaaactcaaagcgggattttggtttcctgaaatggccagaaaaaaacccgttatttggttgaagttccaagaggccaaaattataaccctggaaatggggaacattcccgggcccattcaaaaggtaaaaaaaaaggccagggaaaaaagagcacatccttggcaaaaaatggagggctactcgggtttgggggctgaccaggggaaaaaaaaactaaaagcagaattggttgaaccctactatggggccctgggtttggaaaattaaaacatattggtttttgagggaccaaaatgggacatatttggttggcaggcccttttgggatcaaaggggaaaat

SEQ ID NO: 138848 - DNA, 187 bp, Zea mays
  Clone ID: MRT4577_58112C.1
tgatgtatgtggccaaccagattatcatatgatacatattcacatcaaaatctggacatgctatctacaagagatgctatcacgacaacaccgcgtcaacgtttaactaactcaatagctgcctttaatgatagataacttacaacggtcatagaatcaaaacctgaaaacgataatgcacatgcac

SEQ ID NO: 138849 - DNA, 530 bp, Zea mays
  Clone ID: MRT4577_58113C.1
aacaaacaaggaaaaaacggggttttttattgggacagccaaatacaagcaataatacaaaggcgacccccaattatttatactcgacaatgctcaaccaagggggaacagggaccccacaaatcctgaatggcgaagggctgtatccccaaacgccgggggcaacaaagctagatgagccaaaattgtcacccggccgaaatgccgtaaacggcaacagtcgcaaatgccaacaccaggctcaccgccccccgggtcaacccggggccggacgtaaggaacggggccgtcggggtccccttcaatccagggccggttcctggggtcaatggtaccccggccgacgggggggccggcgtcgcggcgcccggagcgctgccgccgccaacaaagttgcacttgctcgccgggggggtcttgacgttgcacccctgggggaactggaccgccccccttttgtcaacggggacccccccgagggacgaggagtcgccgttgagcgcggcgcaaaggcactgcgggttggtctg

SEQ ID NO: 138850 - DNA, 1800 bp, Zea mays
  Clone ID: MRT4577_58114C.1
cgattgggtacctcgaggccggccgggattccatagtctcgagacttcctcagcaatcaatcagctttccagcgatcggcagctcctcgatcgtttcgaagctccaatccgcccggccgcctccgcctgttgccactagctaggtgatcgatcgaatggactgcggtggcgcgctgcagctcccgcctgggttccgcttccaccccaccgatgacgagctggtgatgtactatctcctccgcaagtgcggcggcctgccgctcgccgcgccggtcatcgccgaggtggatctctacaagttcgacccatggcagctcccagagaaggcgttcggtggggagaaggagtggtacttcttctcgccgcgcgaccgcaagtacccgaatggctccaggcctaaccgggcggccgggacagggtactggaaggccaccggcgccgacaagccggtagggtcgccgcgccccgtggccatcaagaaggcgctcgtcttctacgccgggaagccgcccaagggcgtcaagaccaactggatcatgcacgagtaccgcctcgcggacgtcgaccgctcggccgccgcacgcaagaagaccaacaacgcgctcaggctggatgactgggtgctgtgccggatctacaacaagaagggtgttatcgagcggtacgacacagtggacgacgacgacggcgacggcgccgtggccgaagacgtcaagccggtgccggcgccggcggcgtcgaagaacccgcgtgccagtgcccgcgtaggggcagcagcggcggcgccgatgaaggtggagctccccgagtacggcggcggctactacgactacgacgacctggagacgccgtcggcggggatgctgtgcttcgaccgcccgtcggccccggcgcccgcggaccgcgactcaaacaactccgtgccgtggacgacgcaccacacgcacacggacaactccagcagcggctccgagcgcgtgctctcgccgtcgccggacctgcccgaccgcgaccacgccgagagccagcccgccgccgccgccgccgccgccgggtggtggcctgtcggaggcgactggggcagcgccgccgaggacgggttcatggtcgacgtcgacgtcgacgacgggagctcgctgttcgggccgctgtccccggggctgttcgcgcgcgtcgacgccgccgcgttcggcttcggcgacatgctcgcgtcgtacctgcacaaaccgttctgatgcaacgcgacgcgacgcgagcgcggccaccccgcgcctgcgtgctcctctaggccactgaccactgacatggacattctggtcgtcgtgtagctcagttcttcattcattcaggtcgacgtgcaactggtaattgtacaagatcttgggcagctgccgtatggagatcgatgagtgccgagttagcatggaggacgactggtggtcatggttggtacagagctagctagccgtccgatcgggtatcggattaatctgattgccagttttgtttttttttggtcgcgtcaagtagctgacatcttaagaatgaagcctactggattcagaggcctgttgatggtaatggtatggtgtatgtatatcgtctagtttagtctagcctagctgtacttagaattggttcaggttggtggcaagcagagcgctgtaatttttgttgagtgtttatgcactataattgcaacgtcatgtattagagtcgctctcagcggtcgctttctcgtgatcgaaaattttgcgatgcaaattatcctaataaagttgttgtaagatgtaattacgt

SEQ ID NO: 138851 - DNA, 279 bp, Zea mays
  Clone ID: MRT4577_58115C.1
atggacaaaaaggccgctacaccatatttgatcaagaagaaaaagaatggaaagatgatagcaatcaaggctaacatgcaagccaacaaaggaaaggggcaaaacacatctgggtgccaaagaaaattatcacagccatggaaagcaccaagaaggtttggatcccaagagggaagtgagaagtccgaaggacttcgagaaatttgtagacttgacaaaattgggatgtatatcatgggatgcatcacattggatcaagcctattgccaaatgagttag

SEQ ID NO: 138852 - DNA, 829 bp, Zea mays
  Clone ID: MRT4577_58116C.1
ccctcgaggtcggccggtattccaaagctctcgagacttcctcagcaatctatcagctttccagcgatcggcaggtcctcgatcgtttcgaagctccaatccgcccggccgcctgttgccactagctaggtgatcgatcgaatggactgcggtggcgcgctgcagctcccgcctgggttccgcttccaccccaccgacgacgagctggtgatgtactacctcctccgcaagtgcggcggcctgccgctcgccgcgccggtcatcgccgaggtggatctctacaagttcgacccatggcagctcccagagaaggcgttcggtggggagaaggagtggtacttcttctcgccgcgcgaccgcaagtacccgaatggctccaggcctaaccgggcggccgggacagggtactggaaggccaccggcgccgacaagccggtagggtcgccgcgccccgtggccatcaagaaggcgctcgtcttctacgccgggaagccgcccaagggcgtcaagaccaactggatcatgcacgagtaccgccctcgcggacgtcgaccgctcggccgccgcacgcaagaagaccaacaacgcgctcaggctggatgactgggtgctgtgccggatctacaataagaagggcgttatcgagcggtacgacacagtgaacgacgacgacggcgacggcgccgtggccgaagacgtcaagccggtgccggcgccggcggcgtcgaagaacccgcgtgccagtgcccgcgtaggggcagcagcggcggcgccgaatgaagtggagctccccgagtacggcggcggctactacgactacgacgacctg

SEQ ID NO: 138853 - DNA, 2366 bp, Zea mays
  Clone ID: MRT4577_58117C.1
gacttcctcagcaatcaatcagctttccagcgatcggcagctcctcgatcgtttcgaagctccaatccgcccggccgcctccgcctgttgccactagctaggtgatcgatcgaatggactgcggtggcgcgctgcagctcccgcctgggttccgcttccaccccaccgatgacgagctggtgatgtactatctcctccgcaagtgcggcggcctgccgctcgccgcgccggtcatcgccgaggtggatctctacaagttcgacccatggcagctcccagagaaggcgttcggtggggagaaggagtggtacttcttctcgccgcgcgaccgcaagtacccgaatggctccaggcctaaccgggcggccgggacagggtactggaaggccaccggcgccgacaagccggtagggtcgccgcgccccgtggccatcaagaaggcgctcgtcttctacgccgggaagccgcccaagggcgtcaagaccaactggatcatgcacgagtaccgcctcgcggacgtcgaccgctcggccgccgcacgcaagaagaccaacaacgcgctcagggtaattcactacaccatgacctttctcaggagaacatatttatctcccccgaaatactgacacttgcagttagagggaaaaaatatagagagaagtaaaaaaaaaaagattgatgtttgattttaccaatgctgcaacaagaaacagtggatcgaatcgaaatgtgttgttaggcttgcaactatatatgcagattcttagttaagaggaattgaaaaaggctctagagacatgtaaagcgcgggcggcgtggcgtcacggctcacgcacgccgcgatagagacaagcgcggcaaccatggtccatggccggcgcagagccgccgcctgatcttatcgcccgcgcacaaattaccacatgcgcggcgcgcaccggatccgacgtcacgtcgacctcatctccaagcctcttccaaacactccaatgcgtactggatgactgggtgctgtgccggatctacaacaagaagggtgttatcgagcggtacgacacagtgaacgacgacgacggcgacggcgccgtggccgaagacgtcaagccggtgccggcgccggcggcgtcgaagaacccgcgtgccagtgcccgcgtaggggcagcagcggcggcgccgatgaaggtggagctccccgagtacggcggcggctactacgactacgacgacctggagacgccgtcggcggggatgctgtgcttcgaccgcccgtcggccccggcgcccgcggaccgcgactcaaacaactccgtgccgtggacgacgcaccacacgcacacggacaactccagcagcggctccgagcgcgtgctctcgccgtcgccggacctgcccgaccgcgaccacgccgagagccagcccgccgccgccgccgccgccgccgggtggtggcctgtcggaggcgactggggcagcgccgccgaggacgggttcatggtcgacgtcgacgtcgacgacgggagctcgctgttcgggccgctgtccccggggctgttcgcgcgcgtcgacgccgccgcgttcggcttcggcgacatgctcgcgtcgtacctgcacaaaccgttctgatgcaacgcgacgcgacgcgacgcgagcgcggccaccccgcgcctgcgtgctcctctaggccactgaccactgacatggacattctggtcgtcgtgtagctcggttcaggacgaatcgagagccggccggtctaggtgtagtgctgcgaaaccaacaccaccgtgcaggcacactctctgcgggcggcaagatcgacggacaatcctgcgcggctgcgcccgtaggtatataccggtcgtcgatcaggtgttcatcagttcttcattcattcaggtcgacgtgcaactggtaattgtacaagatcttgggcagctgccgtatggagatcgatgagtgccgagttagcatggaggacgactggtggtcatggttggtacagagctagctagccgtccgatcgggtatcggattaatctgattgccagttttgtttttttttttggtcgcgtcaagtagctgacatcttaagaatgaagcctactggattcagaggcctgttgatggtaatggtatggtgtatgtatatcgtctagtttagtctagcctagctgtacttagaattggttcaggttggtggcaagcagagcgctgtaatttttgttgagtgtttatgcactataattgcaacgtcatgtattagagtcgctctcagcggtcgctttctcgtgatcgaaaattttgcgatgcaaattatcctaataaagttgttgtaagatgcgaaaaaaaaaaaaaaaaaagcggcc

SEQ ID NO: 138854 - DNA, 405 bp, Zea mays
  Clone ID: MRT4577_58118C.1
tttttggattttttttttttttttgtgtggtcttctaattttaaaaccaaaactttattatggtgcatatattattgggcataccacacatgataatgggtggcgccttactgcgttattacatatatagatcgagagggttggatagaggagattttccaaatatcatgaatcatatcttagggcggaatgggaacggttaccccacacgggttggtgcgggagctgggcaactgggactggcactggtagagtccacccatggccgggatgttctgcgccaacatcatggccatggggatgagacccttggctggcagcaactgttgctgctgctgcattagagctggctcgtacaggatgttgatggcgggagccgcacgctaaagctgcattatcatttgc

SEQ ID NO: 138855 - DNA, 1140 bp, Zea mays
  unsure (1)..(1140): unsure at all n locations
  Clone ID: MRT4577_58119C.1
ggtacgctcattgggtacctcgaggccggccgggctcccagctccgcctccctttcctaccttcttccctccgtctcccagctcgcgcaggcaggcgacacagcgacgctaaaaaccctagagcgaggaggcgtgccaggccagcggtttgcgatgacggcaccggcggacaaggggaagaaggccaagaccgatgccgacggcggcgaggagaacgagcaaatcgacggcgcccttgtcttctccatcgagaagctccaggagattcaggacgagctcgagaaggttaatgaggaagcaagtgacaaggttatggaggtggagcagaaatacagtgagattcgcagacctgtctatctcaagaggggtgacattatcaagaccatcccggacttttggctcacagcgtttttgagccatcctctactaagtgagcttctgactgaagaggatcagaagatattcaagtacttggactccattgatgtcgatgattctgatgttaaggcaggatattccatttaccttaacttctctgagaacccgtactttgaagacacaaagcttacaaagacctattcctttgttgatgatggaacaaccacaataaaagcttctcaaattaagtggaaggatggaatgggacctgcaaatggaaatggtattaacaagaagggaaacaagcggccattagtagtggaaagttttttctcctggtttagtgatacagagctcaagagtcttgctgatggtgtgcaagatgaggtggcggagatcatcaaggaagacttgtggcctaatcctttgaagtacttcaacaatgaggttgaagatgaatttgaaggagatgaagaagatgatgacgacgacgacgacgatgataatttggatggtgatgacaatgacgatgatggggaccaggagaactgagccctcgcgtttaggcggggaattatgtgacccgtttgggggattttttttggttgtttgacttagctggaactcaacttagggaactgtttagtgccttatgaagtcaaccaacttgaaaggagactgctatatcataatctcggtatatctatcaacgcagtttgacctgtgattcaaaaaaaaaaaaaaaaaagcggtcgccttcnn

SEQ ID NO: 138856 - DNA, 418 bp, Zea mays
  Clone ID: MRT4577_5811C.1
gctgctcacaattccagctcaggccaccagcaagcacatcgcaaaggcagcaagtaagcaagcgagtaaccacaccacaactacagggaggaagagcagaacagaggcagagagagagagagccatggcggcggtcgccgtgagcgggaggctgcggacgctggggcgcggcgcgtcgggcgccgtggtgtcgctggcgtgggacgccgcgtcgggggagctggtcgcggtcaagtcggccggcgcgagcggcgcggcggcgctcaggcgggagcacgcggtgctggccgggctgcgctcgccgcatgtcgtgcgctgcttcggcggcggcgaggcggcggcggcggaagaggggtcttcgtaccagctcttcctcgagtacgcccccggcgggtcgctcgccgacgaggtggcccgg

SEQ ID NO: 138857 - DNA, 442 bp, Zea mays
  Clone ID: MRT4577_58120C.1
accccccaataacccatataacaagcaaggggggtgtgccaggcaaaaatacaaaaggttcatgaataccaatcaacacgattagtattttgggggggctgggggaaaccggttcggggggcccccgctgccaaaattggcacctgaactaaaaaccccgttttaaaaaggccgggtggaaacataaaaacttttcaaccttaattcaatgtttgggcttgaaacaacaggcccatttgaaaatgaatcaaagggagacctccaatcctaacctgaacgggttggggttcaagggctctaaacttcagggctggcattaaaataccaggaaacaaaagccctgttgtcatggatactgagttgacaaaaaaattttaacaagaaaaaagaatgtttttggaacttttcccttttgggcttaaaaataaaaaccccttgaaaa

SEQ ID NO: 138858 - DNA, 1071 bp, Zea mays
  Clone ID: MRT4577_58121C.1
cccggccttttgggactggacatgggaccagcttgctgactatgatcttcctgctgtgcttgagttcgtctataacagcacaggaggcatgaaagtccactacgttggtgactccctggggaccttgattattcttgcgcccctctcggagaacagcttaacagacattgtgcgatcagccgcgttgctcggcccaatcgcttatctcgaccgcatggaatcgaggctcatcctgcttgccactcgcatcttcctcgcagaaacgattcacatgctaggttatcacgagttcaaccctgttgggccagtggcaaaggaagtgttgggaaaagtctgcgtcgacccagaggtcgattgctatgatttattttggtctcctgacgggattggaggaccggactgctgcctcaacacctcgaccacatgcatcttcttgcagcacggtccacagtcaagctccatcaagaacatgatccacatgtcgcagcgtaagaatataatccttttatttatttttcttcgttaagaaatcagcgtacacaagaattaatctttatcaggaacgaaggaatctgttccccagttgctcgtgtaaaatacatcgatccatgtgtgtcatcgatcagtggtcaggaaagagacgatcaggaagtacgactacggaagcgagaaggagaacacgaagcgctacaaccagacgcggcccccaacctacaacctctcgtccatcccaagccacgtccccctgttcctcacccacggcggccaggacttcctcggcgacgtcgccgacaccaggcacctcctgcggacgctgctcagccagcacgacagcgacgacatcgaggtgctgtacatgcctgactacgcgcacggcgacttcatcatgggctacaacgccccgcagctcatatacaagcccatggtggagtttttcaagcgccactgagaagtgagaacttgctagtgcctagtaataactagtgcctagtaataagctgctgctgctatatgcagcaacaattgtttcatatagccgatttgattggtgtattattgccgtaagtaagt

SEQ ID NO: 138859 - DNA, 560 bp, Zea mays
  Clone ID: MRT4577_58122C.1
aaaaaaaaaaaaaaaaaaaaaaaaaaaaaaaaattacctgcccgaaacgaacaaataaaaaaggaaaaaattacaaaacactgacaaaccggtgataaaaaaatccaaaacacaaaacaaaggcttccctgcccgggggggcccttttctaaggggcggttttccacccccttggcggtcccttttttggggttcccaccctgggccccacttttggggtattctgggccttgccttttccctggggaaatttgttttcctttccctttcccccccgccttctttccgggaggcttacctggtaagcccggggggcccttgggggggccctccccccctttattggggttggcctctttgcccttttttccgttggaaaccttgtggccccctttgtttttttgattcgccccccccccgggggggggggtttttcttttggggcctttttccctttcctggttcattggctcgctgggctgggaccttcggttcgggggaccggtttcggctccctcacggggggagtttcggttttccccagttttggggtttacccc

SEQ ID NO: 138860 - DNA, 1188 bp, Zea mays
  Clone ID: MRT4577_58123C.1
attgggtacctcgagacgggccggagcttcccagctccgcctccttttcctgccttcctcctcactagtcgctcccccgcggctcgcgcaggcgggcgacacaacgaggctaaatccctatcgcgaggaggcgtgtgaggccagcggctttgcgatgacagcaccagcggacaaggggaagaaggccaagactgatgccgacggcggcgaggagaacgaacagatcgacggcgtcctcgtcctctccatcgagaagctccaggagatacaggacgagctcgagaaggtaaatgaggaagcaagtgacaaggttatggaggtggagcagaaatacagtgagatccgcagacctgtctatctcaagaggggtgacattatcaagaccatcccggacttttggctcacagcgtttatgagccatcctctattaagtgagcttctgactgaagaggaccagaagatattcaagtacttagactccattgatgtggatgattctgatgttaaggcaggatactccattcatcttaacttctctgagaacccgtactttgaggacacaaagcttgcaaagacctatatctttgctgatgatggaacaaccacaataaaagcttccgaaattaagtggaaggaaggaatgggacctgcaaatggaaatggtattaacaagaaggggagtaagcggccattagtagaggaaagtttttttagctggtttggtgatacagagctcaagagtcttgctgatggtgtgcaagatgaggtggcggagatcatcaaggaagatttgtggcctaatcctttgaagtacttcaacaatgaggttgacgatgaatttgaaggagatgaagatgatgatgatttggatggtgatgatgacgatgaaggcgatgatttggagaactgagcccttgcgcttggttcagaatgttgtccgtggatgatgtggctgggcggaactgtgacccttttgggagattttttgttgttgttgtttgacttagctggaactcaacgtagggaactgtttaatgccttatgaagtcaaccaacttgaaaggagactgcttatatcataatctcggtatatctagcaacgcaatttgacctcagtgtcctgtttgtgattcagtttttgcttcggtcggttgcctaaagatgacgtattgccttcagtttgtgctc

SEQ ID NO: 138861 - DNA, 261 bp, Zea mays
  Clone ID: MRT4577_58124C.1
ccgggaaaccggtcggactcacgacgagtcgacgacgcacacaaaaaaaaaacagaggcgaggcgggatttagaagctgcgcagcgcgcatccctcccccaatcccgacctgacccgaccccgtccccgtcgccagatctcgcgccccctccccggggctcgatcggatcagcggcggccggtgatacggggacggggagatctcgccgaggtttgggccgggccgggccgggctggtgggagcaggggagccatggcgtc

SEQ ID NO: 138862 - DNA, 195 bp, Zea mays
  Clone ID: MRT4577_58125C.1
aaaaaataatacaaaacaaacaataaattttaacttttaataaaaaaaaaaaaaaagctaacgcgctcaaatttaaactggtctggggcactcttaaacaaccccattttaccttcactctcctgcaacgttcattctttacctttaccctacctaaatactatacacacccctttatcccacccttttaccctt

SEQ ID NO: 138863 - DNA, 322 bp, Zea mays
  Clone ID: MRT4577_58126C.1
aaaaaaaaaaaaaaaaaaaaaaaaaatataaaaaaaaaaaaaaaaaaaaaaaaaaaaagaaaaaaaaaaaaaaaaaaaaaaaaaaaaaaaaaaaaaaaaaaaaaaaaaaaaaaaaaaaaaaaaataaaaaaaaaataaaaaaaaaaaaaaaaaaataaaaaaaaataaataaaaaaaaaggggggcgggatctttgtagtgatataggttagattctctatgactaggagtattattcttttttgagggcctccctaaatgagatagttggtgatgtgaactatcagtgtgagtttggaaaaccctgggtgtgccccttttt

SEQ ID NO: 138864 - DNA, 261 bp, Zea mays
  Clone ID: MRT4577_58127C.1
cactcctatagggcgattgggttcatcaaggccggccggagtaaccaatcgcacatataatataccgttgcagctgagatgggaacgctcgctaatagcatcatgtctcatgggtgacgtccttttcgcattcttgggcgttgatccatgcggcacctcgaaggagacgttggggaccaacatcaccacctactacaattgtactggtttcaccgccagtggctactggaacggctagtcctaaggggacggggctcctaa

SEQ ID NO: 138865 - DNA, 381 bp, Zea mays
  Clone ID: MRT4577_58128C.1
ctatcttatatttttttttttttttattttctcttgatttttttttttttttattttggaaaccttagggacaacccggaaaagccgaaccgggacactaaggagcaaagacagtacaaaaacgaggtcgaaaaaagagtaggcctaataagggataaagcagaaaccggggaaaaatggtaaaccgataaaaaagtaccaaagcaaaagagccggaagcaaaaagggaaaaacccggagggccaaaggggggggcctacaaacaggtaaaggaaatgggaaaaatgcgcgtttcccagcgggaaaacctgaagggccaaatctccaaatgaaataggcaaagtacggggaaaggaggattgagaaaaagggcccacgggg

SEQ ID NO: 138866 - DNA, 223 bp, Zea mays
  Clone ID: MRT4577_58129C.1
ctggcacaagatggatttggtgaggaggctttgtcttattttgacgagtgagctatcaggagtgttccagccgccgtgatgctagctaattcattggactatctctttgcatgtactactctactattatgagaaatcatcatagtgattgcactaattgatggaaagtcaaaagttttacgatatatattctggggagttcatgatgctacctatatcaaca

SEQ ID NO: 138867 - DNA, 234 bp, Zea mays
  unsure (1)..(234): unsure at all n locations
  Clone ID: MRT4577_5812C.1
cttgacgccatgccgcgtcgtagcttgatctctaacggcgccttttttttttttgggctggatttataatatacaaacagatgaattgacatgtatatacattgatattgaaatttcctgactgcacagaggattaaaggcggaatacatatgctaggaaacagagctgcagttcggatttcatccaaactgacaaacnccaccattcggaagctgattattgcggtgcactct

SEQ ID NO: 138868 - DNA, 820 bp, Zea mays
  Clone ID: MRT4577_58130C.1
ccggccgggaacttccatctcacaacagcatcttctcgcccttcagcaacttgaccaacgcacgagttcttactcaaccgaagcaatcaaccactcaacttttttcaccaactctctcaaatctttcgaaatggctcccaaggctgctgacaagaagcccgcctccaaggctcccgctactgcctccaaggctcctgagaagaaggatgccggcaagaagactgccgcttctggtgacaagaagaagcgctccaagacccgcaaggagacctactctttttacatttacaaggtcctcaagcaggtccaccccgacactggtatctccaaccgtgccatgtccatcctgaactcttttgtcaacgacattttcgagcgcgtcgcttttgaggcttccaagcttgccgcctacaacaagaagtcccccattttttcccgagagatccagacctctgtccgtttcatcctgcccggtgagcttgccaagcaccccgtttttgagggtaccaaggccgtcaccaagtatttttcctcgacgaaataagtgctttgatggcttgatttgttttgggcatttggtttttcacgcgtggcatcagggtgtcatgagtttgaggtttcacggggatccagccctgttttgggggcctcataatgcgttacggatggttttgttttatttcctgggggcaaggttttcacacacgggcaacggggttcgcggttgtacaataaacatcgagaatagggtttcgatcaaatgaattcgtgcccataaaaaaaaaaaaaaaaaaaaaaaaaaaaaaaaaaaaaaaaaaaa

SEQ ID NO: 138869 - DNA, 2848 bp, Zea mays
  Clone ID: MRT4577_58131C.1
aaagcaaagggcgatgggcaggcagacccgcgcggccatcctcctctagaaccttccacggccccacctcctccttcgttcctccgctcaccccaaccctcctcggcgagtcggctcctccctccacgcctctcctcgtcgacgagcggacccggtccacgcccccgacccccacccccgtccccgacccctccccgccccgctccctcccgatcccagatcccgccctccgatccggccgcgaccgtggtgggttcggtctccctctcatcggggcatcagccatggatcagagccggcgggcggtggattcgtactggcgatcgcggatggtggacggtgtcacggccgacgacgacaaggtcgcgcccgtctacaagctcgaggagatctgcgagctcctgcgcgcctccgacgccagcatcgtcaaggaggtcgccgatttcgtcctcaagcgccttgacaacaagagccccctcgtcaagcagaaggctttacggttgatcaaatacgcagttggaaaatctggtactgatttcaagagggagatgcaaaggcactcagcggctatgcgccaactagttcattacaaaggccaccctgaccccttaagaggggatgcccttaataaggctgttcgcgaaactgcgaatgaggctattgctgcaattttctccacagaggaccctaaacctgctgtcgcaaccgaaagtcttggcaagcgcatacaaggctttggaaatactaattacgagccatctagagatgacaagaagtctttccttagtgagcttagcgaagtagtgggtattggaagtgcatccatcaagcagggtttgagcaacttcgctgcagcgcatgcaataatgacaaatgacaacggtagcacatacaggagccctaatctccgtagatctttaaccacggaatctgaaagatatggtcggtatgatccaagtgaaattcaacgtgagagccgagcctcatctgatgcttcaaagaatgcaccttctggtccttggggtccaacttccagttctacaccaactgatgaaactagctcaagtcaaccagggattaagactcgtgaagaaagacttctagagacaattgttactgcaagtggtgtgcgattgcaaccaacgcgagatgctctgcaaatttttttcgcagaagcttccaaattggatgcagttgccttgagccgtgcacttgagggcaaactgaattctccattatggcaggttcgcatgaaggctatttgtgtgttagaagccattgtaaggaaacaggatactgatccttactctatcatcgcttcatatttcactgagaacacagcttctgttgttaaatgctctgagctgccacaggtttctctcagagagaaagcctcaaaggtcttgaatatgctgattggggaacaacctaccggaaccgcagcaacaaaagctgcgatgcccacacctgttcagatgcctgatttgatcgatacaggtgatcaagatgatctggcaacaagttctggacatgcaagcattgaacagaattctgggaacagtgcatatgtttcttcagttgatgatttgcttggtggtgaacctatttctgatacaagtgtcactgctgatagtaatggaagcgacccatttgcagatgtatcattccatgaggcagagactaaggagactaatgatctgttctcagggttgacagtagaagagaaatcatcaactaccatgcatgatagttcttcggacaaaaatgaattaccagatatctttggcagctcccctgattctttcatccagggtagtgttactgaccaaggaactgtcaatgatttgattgctggcttgaaccttaatggaacaggccatgctcagtctgcagttaaagcagaacccaatagcaacagtggttcacagttctttgatacaaaaaatgagtccggccatgtgccaagtgctgcaacattgaatgacattcttggtcaaaactcgctttaccaacagcagcagactccattgcagtacagctttcctcaacatatgatgctcaatcaatcatttcctggacaacaattaaattatggtgccatggggattcttcttgctcagcagcagcagttactgcaaagttttggaaatttcaatgctggacttgggaattcttctttcaattcgatgaacggtgggaatacatctgtgcttccagatattttcaattcaagtaatcaacctcaaaatcatgttgcagtgatgagcagttcgaagaaagatgacaataaagcttttgattttgtttcggatcaccttgcagcagcacgtggttcaagaaagtgaaacaggaagcaatgaacatgtccagatgctggaaagagctcaagtatttgatggacacaatagctgggaattccaaaaactgcatctcgtcacagcctcgcagattggatgcgtgattcacacggctggtttggcattgtttgaacacatgagaaggaagggttgttccatacggttggaagacgagatgttgcgttgtgtactatgtatttagacgaagactgttcttttttacgctgaaaaataaattgcatcttccgtctttctttgtgttgtgctccttttctctatcctttttcttttctagaaaaaaaaagagtgagacactatacgtgtttgttacctgcaggttttatgtttcttttctgtacaagtatatggaggatttttttggtggcaattgtaaagctttggaacgtgaataagagggtgcagtatgatatgtgctgctacatgatcctggcaatgctgcctcgtgatattgctcgtgtatgtttactctt

SEQ ID NO: 138870 - DNA, 2758 bp, Zea mays
  Clone ID: MRT4577_58132C.1
gccattctctagaaccttccacggtccacctccctcgttcctccggcggcacgtgcccgtgccgctcggctcacccgcaaccctccctccacgcctctcctcgtcgacgagcggacccggtccacgcccccacccccttcccatcccaatcccagatcccggccagccctccgattcggccgcgaccgtggtgggttcggtccccctccgatcggggcagcagccatggatcagagccggcgggcggtggagtcgtactggcgctcgcggatggtggacggcgtcacggcggacgacgacaaggtcgcgcccgtctacaagctcgaggagatctgcgagctcctgcgtgcctccgacgccagcatcgtcaaggaggtcgccgacttcgtcctcaagcgcctcgacaacaagagctcccttgttaagcaagaggctttacggttgatcaaatacgcaattggaaaatctggtactgatttcaagagggagatgcaaaggcactcagcggctatacgccaactagttcattacaaaggccaccctgaccccttaagaggggatgcccttaataaggctgttcgggaaactgcgaatgaggctattgctgcaattttctccacagaggaccctaaacctgctgtcgcaaccgaaagtcttggcaagcgcatacaaggctttggaaatactaattacgagccatctagagatgaaaagaagtctttccttagtgaacttagcgaagtagtgggtattggaagtgcatccatcaagcagggtttgagcaacttcgctgcagcgcatgcaataatgataaatgacaacggcagcacatacaagagccctaatctacgtaggtctttaaccacagaatctgaaaaatatggccggtatgatccaagtgaaattcaaagtgagagccgtgcctcatctgatgcttcaaagaacgtagcttctggttcttggggtccgacttccagttctgcaccatccgatgatactagctcaagtcaaccaggggttaaaactcgtgaagaaagacttctggagacaattgttactgcaagtggtgtgcgattgcaaccaacgcgagatgctctgcgggtttttttaacagaagcttccaaattggatgcagttgccttgagccgcgcacttgaaaacaaactgaattccccattatggcaggttcgcatgaaggctatttgtgtgttggaagccattgtaaggaaacaggatactgatccttattctatcattgcttcatatttcattgagaacacagcttctgttgttaaatgctctgagctgccacaggtttctctcagagagaaggcctcaaaggtcttgaatatgctgattggggaagagcctactggaaccacagcaacaaaatctgcaatggccacacctgttcagatgcctgatttgatcgatacaggtgatcaagatggtctggcaacaagttctggacaggaaagcaatggacaaaaaaatactgggaaagcatatgtttcttcagttgatgatttgcttggtggtgaacctattgctgatacaagtgtcactgctgatagcaatggaagcgatccatttgcagatgtatcgttccatgaggtagaggctaaggagactaatgatctcttctcaggattgatagtagaagaaaaatcatcagctaccatgcacggcagttcttcatcaaacaaaaatgaattaccagatatctttggcagcccccctgattctttcatccaaggtagtgttactgaccaaggaactgtcaatgatttgatgtctggtttgaaccttaatggaacaggtcaggctcatcctccagttaaagcagaacccaatagcaccttcagtggttcacagttctttgatacaaacaatgagatcggccatgtggcaagtgctgcagcattgaatggcattgttggtcaaaactcgttttaccaacagcagcagactcccttgcagtacagcttccctcaacatatgatgctcaatcaatcatttcctgggcaacaattaaattatggtgctatggggattcttcttgctcagcagcagcagttactgcaaaattttggaaatttcaatgctgaacttgggaattcttctttcaattcgatgaacagtggaaatgcatcagtgcttccagatattttcaattcaagtaatcaacctcaaaatcatgttgcagcgatgagcagttcgaagaaagatgacactagagcttttgattttgtttcggatcaccttgcagcggcacgtgcttcaagaaagtgaaccaggaagcgatgagcatgtccatatgctggcaagagctcaagtgcttgatggacacaaaagctgggactccaaaagctgcatctcgtcacagcctcgcagattggctgcatgatcacacacggctggtttggcatgggatcgggcgcatgtttgaacagttgagaaagaagggttgttccatacggttgaaagacgggatgttgtgtcgtactatgtacttagacaaagactgtttttttactctgaaaaataaattgcatcttccgactttccttatgttctgcccttttctctcttccttttttttattaaaaaaatgagtcagacaccatatacgtatttattacctcaggttttatttcttttctgtacaagtacatggaggatgtttttttttgcggcgcaatttgtaagctttgggacacgaataagagggtgcaatatgatatgagctgctacatga

SEQ ID NO: 138871 - DNA, 945 bp, Zea mays
  Clone ID: MRT4577_58133C.1
atgacctcccctacgtcactgaccaccccgccggagctctactgccgccggaagctgcgccactatttccaggcacacagggtcgtggtggtgacctccttcccattaagggccatcctccataactctaatgccacaggcaacatcgccaagtgggcagcggagctcgctgagttccaactggacttccagcctcgccacgccatcaagagccaggtcctggctgacttcatcgtggagtggacgcctcccccgagtgctactagggggtccgaatcccaattcgggccccacacccgcggagcccaggggtccggtcttcaccgagccccactggacactcttcttcgacgggtccgcccgtcagcaagttggtggagctggagtggtcctcatcgacccaagtggagatcaagtgagcgcatagtgcggttggccaaatgctacgcggtgatagaagggggtctctaccgccgtggtgccaacggcattctgatgcggtgcattacccaggaggagggccgtgagttgctcacagagatccatggaggagagtgcggaagtcattcatcatcccgcacactggtgtgtaaggccttccgacatggcttttactggccaaccgctctccaggacgtagctgagatggtcaagtcccgcgaggcatgtcaattccacgcaaagcagatacacacactagctcaggctctgcagatgattccgccctcctggccattcgccgtatggggggtggatatcctgggaccatttcccagggccgtcgacggatactggtacctcttcgtcgccatcgacaagttcaccaagtggccagaggccacccctatagtcagcatcacccagggtgccgctgtcgccttcctcaagtccatcgtctgtagatttggggtcccaagttgtatcattacggacaacagaacctag

SEQ ID NO: 138872 - DNA, 382 bp, Zea mays
  unsure (1)..(382): unsure at all n locations
  Clone ID: MRT4577_58134C.1
atcaaatacatctatttctgttcattagaatacaacccacccatcaaagacaagtttncanagtgctttgtaggagaccacctcncatttcaaaatgaaccttgtaaacccacaagagactacatttcatcccactttaaccaatttgccatctattacttttacaaattttatttttcagcctgctgttccaaagtccatccaattgaaactggttccgcctagtgccaccactgttccacctattgaaagtggtccatccccacaaggcctcaacttaaccattacccaccagggccagaacccgtttccattccgattccgattgccttttaaagggaatgccaagaccaatttgaaccaaggccaatccaccattttt

SEQ ID NO: 138873 - DNA, 301 bp, Zea mays
  Clone ID: MRT4577_58135C.1
gatttttccgagagcattcatctcgtctggtgtcttgtatcgttcttcgtgtctctggatttgggaccagaattctaggaatcagtgatttatatatcacgctctacgagcacactgggaatgaatattctgtaatctgaatctttccataaacggtagtctagtaattaagttaaaggactcgagtccggttcgtcagatctcagcatgagaggacatttaggtctcctattgcttctgataattgtcagtgtgacatgctcgtctatagacgtagcgctcccagcgttctacaggatta

SEQ ID NO: 138874 - DNA, 326 bp, Zea mays
  unsure (1)..(326): unsure at all n locations
  Clone ID: MRT4577_58136C.1
acgcgccgccgcctttttacaccacagagggcgggggggggcgggggggaacccaagccgaaggaccaggggcccaccagccgccggagaccaagncgggcgggccggacacgnccccgaacgaccacaccaagcaagccaagacccgacccaaggacaacgccggcgacctcggcgaggcccgcccgccgcgggggggggccgcccnncgccggcccnacccaccggccgcccccaagaaccgagccgccggcgacgcgcccgacggggcccacaccaagcacaacaccgggagagcgccgcccgcgcnggccaaagcaaggaag

SEQ ID NO: 138875 - DNA, 403 bp, Zea mays
  Clone ID: MRT4577_58137C.1
cccacgcgtacgaacaaaatgaatcttgaagaccatttcaatcgtcaatattaaaggatctagcagaacacacttaatgtgctaaatctgtgcgtccggatcatgcccaacatttctttgttgtagaagctctctcgatcgtatggacttaggttatggaactctcgtgtggccatattttctaagccttgcgtttgttaggtttgactcataaagcacccgttcgattagaatgaatgtcttcccaagtcaacttctgtaactctgaccacactcatagaagaatgcaccagcttcaaacatatattcatatcgcatttatttcgtactgtaaattttaatatataatccaagttcctatcaatttgagcatagttcatagctaatgctatcatattgtaca

SEQ ID NO: 138876 - DNA, 354 bp, Zea mays
  Clone ID: MRT4577_58138C.1
ggcggtattaaattagaaaaagaaaccaaatgtacacatgcacgacgtgtggcgacactcacgctatatatacgtgcacgtgctacactgattacatgcagcgcatgaatatctgctgctgttggtggtaaaaatatacaaaaatatagtgctaatggcgtctaagagcatcttcaacaaggtaactcaaaatagtgtcctaaaaattaaaatactacttccaccgttccaaaataaaatatgttttaccttttagttgatacatacaataattaatccatttgaccatggacatacaattcaagagctaaaacgattaatatttttgggactgagggagtacattatctatgc

SEQ ID NO: 138877 - DNA, 739 bp, Zea mays
  Clone ID: MRT4577_58139C.1
aattcggcacgaggcgctagctcacttgatatacatattgcatctatcggcataaaaactgaatttaccatggcccacttgatctcttctgcaatcgcaggcgcgggcaacttggtcgctgatggaatcagtggtgtcactggcgtagcgtcgcaggttgtagaaggtgagtcgtttcgttcctataattaatagccatctctcatcgacgtacgccttcttttgctaatatacaaaacggatcagtaaaataattacacagacgagtatatatggatgcatgacactacatttggataaaataataatgcataaaattgcggttctgaatgtgttcataacatcttaatgctactaaaattaattgcttctttaatttgttggacggatgtggaatgattctagtttttttgatagtgaaagtccagttcctctctaaccactaccttctttacacgctatagtctatcttttctacgttgaaagtacgttgggccatatgtcctctcttgcttccccgctctatctattttgttttatattttagagacatactctccccttcccaaaatgtaattcgttttagactttatatgcattcattaattaactacgaatatagtttgtatgtatgtctagatttattatcattcgttcgaatatggatgaaaaaaagagtcagaaagaactatattttctgacagagcggagtacttatgaaaggcatccacattaaaat

SEQ ID NO: 138878 - DNA, 208 bp, Zea mays
  Clone ID: MRT4577_5813C.1
gacagcaagataaatttaccatttcattttcatgggaaaacaataaggtacatgggggtcattaaggcctaagcccggcaaaggggtttttggacccaaaggacgcccaggatattggttacctaacaatttataaagggtgcgttaatcccaaaggggggccgggggaaaacttggattattaaaaaagaagagaggtatttttttt

SEQ ID NO: 138879 - DNA, 264 bp, Zea mays
  Clone ID: MRT4577_58140C.1
gaggcagtaacatgcaaaagggatgctatgtacaagttgatgatggagaagctccaacattttttctccaatgttgaggtgattgcttttgatactgcatcaaactttctacataaaaggactgaccttctggatgcatctgtttcagatgctgaactattctatggggacagcgacgctgcactaccttgcaatatggctgcagatgaaaaagatgattcttcttcgaattcccaagaatcttcagataaagaggatcccttg

SEQ ID NO: 138880 - DNA, 850 bp, Zea mays
  Clone ID: MRT4577_58141C.1
gggagaaagtattattttcgatggctgcaggaatctaaaaattctctgtaaattcatatacaacacacgcacgcgcgggcgggcgcacacacatttcattacgtacggattcaacatcactggggtttacacatttcatcacataaatattttatcatatacacattcaacatcactcaagtttaccatccaacaacaatacaccattacaatcaatatacaaattttatccattcaacacaacgaagttgttcgtgtatgactctaatttagtgaagtcactttattgacctgtaaagaatgtagtgatcacaaatctaactcattatattctggaaagtggaaactaaacagaaaaccagagagagatgacgatggaccacgaactaaacacgctagtgtgacgccgtttctgttgagataattggattttttgccactcacaatgttgtcttcttgttaattaccactgtatctatgaattgtgggtccagctgggtctataaaatgtgggcctgatggcaattttacgaacatatttcttgctgatggcaaatatcagaatctctcgtttctgttatcctggacgaattagtcacggcatgcttggatgaaaacaatcttgcacacgcagctgcagagaacaaattcgatcccagactctgaaaatcagactcctcctgagcgtgctgtttgggataggcgccgcctcctccacgctagtacgagccaaggagaccgtcggtgaccttacatcccatggtagcgcctgtatggaagattttttcagcttctttattatggtggcgagttccagtcccaccgtgccggccaccgtgagcatcccaat

SEQ ID NO: 138881 - DNA, 278 bp, Zea mays
  Clone ID: MRT4577_58142C.1
attcggctcgagaggcggtagtgacgattattttgatggtgaggaccataaataggccggtgatgacgataaatactatggggatggaaacaaagggcaaaatcagcgaggaggaaaaggaacacgatgataactatgatattccccaaccacctactaagagaaataattgatcgacggctgtctaaaaggttgcttggttgctaacatgcaggaatgctccctgagactgccctgcctaatcaaaatactggttagtttttgaatcaaattaacaa

SEQ ID NO: 138882 - DNA, 399 bp, Zea mays
  Clone ID: MRT4577_58143C.1
gccagagccgtaatttactagggaagaaggacacggagaagggggctaaacggtcgacatgggtcgcacgcaatctgccgtagcggtcgccgtgggggccccggtgctgctgcttgcaacggcgacaactacctcggaggccgccatcatctgttgtccaatgagcttacacactaaaaatcgggcattccaccccctaggtacggggaacaccccctccgcgttctgctgtagcggcgccaggaacctcaagagcgccgccagcaccattctccaacagtgacacatgcctgcactggcatatgaacgctcacaggggcgacagccgccttaacgccggcaacgccggcagcaaaccctacaagtgcggcgtcagaaatcccctacaccaatagaacc

SEQ ID NO: 138883 - DNA, 608 bp, Zea mays
  Clone ID: MRT4577_58144C.1
catctatcatctttatggatgagccaacctcagggcttgatgcccgagcagctgcaattgtgatgcggacggtgaggaacactgtcgatactggtagaactgtggtctgcacgatacatcagcctagcattgacatatttgaagcatttgatgagcttttcctcatgaagcgtggtggagaagagatctatgctggtccacttggacatcattcttcagatctaatcaagtattttgagtcgattcaaggggtcagcaaaattaaagatggctacaatccagcaacatggatgctggaagtgaccacaatttctcaggaacagattctaggtgttgatttcagtgacatatacaagaaatctgaactctaccagaggaacaaggccttgataaaggaattgagccaaccagcaccaggttcaactgacctgcatttctctagcaagtacgcgcagtctttcaatacacaatgcgtggcttgcctgtggaagcagaacctgtcatactggaggaaccctccttataataccgtgaggttctttttcactggcataattgctctcctccttggcaccatcttttgggacctaggcagcaaagtgtataca

SEQ ID NO: 138884 - DNA, 341 bp, Zea mays
  Clone ID: MRT4577_58145C.1
attaccaacaagaacatgcagattacaagggcgttgaaaaacacagaaggggaaggaccaacgccccggggacaacaaacagcccccactaacacacgaagaccccaacaaccgcaaaagggaagagagcagaggaaccgacaaacaaacccgacaccaaaaaaaggaaaaaaaaaatacgcccacaaacatcctgtgaaacccccggccgccacggacccctaccacaaacacgcacaagagacgaaaaaaccccggcaagaagacaaacgaatcgggccgaagccacgaaacggccggcggccggggaacccaaacctacctgaacagaagcacaagga

SEQ ID NO: 138885 - DNA, 128 bp, Zea mays
  Clone ID: MRT4577_58146C.1
accggcccggaaacccggggacacaccacgcgcgataagggcggacccaaccgcaagcacagggggggcccataagaacgagcgggcgagcacaccgcccagcgcacgcaagccgaacgagcagcaag

SEQ ID NO: 138886 - DNA, 315 bp, Zea mays
  Clone ID: MRT4577_58147C.1
aaaaattaggggaaaccaaactcgggatagagaacgtgtgtcctggtgggaaattcagagaaaataaaattaacgtagtgcgactccaccggtcttgacacgaaaactgaagcgacgttggttatttcatactgatggaagactgtccagaaaaatgaacgaagataaatctgtttgcaaagtcccgatcatattgagagagaggaatcctattttggcagggccccttcaaactccaatcgcccccatgccgtgccggggcttgctggttttggggaacctgggctgggcggggggtggggaacacgggcttta

SEQ ID NO: 138887 - DNA, 349 bp, Zea mays
  Clone ID: MRT4577_58148C.1
ccggccggggagccgtgccagaaagcaccctcgtcacctgcattgacaagtatgttggtgggaggtgaaatatcaacctgaggcaactagcatgggtgggtatgggtataccgttcttattgaactgctgttgagtagctgtatgtagataataatatgattttcactccaataaatgcgatttaaggatggcaagccaaaaaaaaaaaaaaaaaagaaaaaaaaaaaaaaaaaaaaaaaaaaaaaaatgaatgtaccagagtttaaaagttgtcttgcaccggacggcttttgctgacctgactgatcttttagcaatgattctttcatattcaggttctatttattt

SEQ ID NO: 138888 - DNA, 160 bp, Zea mays
  Clone ID: MRT4577_58149C.1
gcttaacggcccatctggacacatggcaagaagagataaactagctagctgcctcccaaagatgctactaccttctcttcgacagcttcaacgttcacatgcccctcccttgcatggcgtagtaaactgggttgcttgaaaaaaaaaacattaattcttt

SEQ ID NO: 138889 - DNA, 227 bp, Zea mays
  unsure (1)..(227): unsure at all n locations
  Clone ID: MRT4577_5814C.1
gatagagaccaactatcaacatacaattcactttagagcaccaacaatggcaggcaaagtatcctgcctactgatgtcggtcaancaaacngcaagngnagctaccgcaaccattatcccacaatgctcacaagctccaatagcttccctcattcccccatacctttcaccagctgagacattaatgcgtaaaaacccaaaagctcacccctacagaatccaacaag

SEQ ID NO: 138890 - DNA, 166 bp, Zea mays
  Clone ID: MRT4577_58150C.1
gaaaaatgaggccaacaaaatttaagtttttgcggcaattgggtttaaacagttgtttaaaccaagggttgggttggcccgtccttcaatgtccggacctaaaatttcatgccaagaattaacgacagggttttaacaaaattgttgttttttttttatggggaaa

SEQ ID NO: 138891 - DNA, 2240 bp, Zea mays
  unsure (1)..(2240): unsure at all n locations
  Clone ID: MRT4577_58151C.1
ggcttcgatccgagagcaatccgtcgtccgagttggcatctttggccaaaccagtatcattgcccaatcacggatctctctctctctctctctctctctcttttcccactacctgctcctgcttgttgcttgtgcggtgtgcgctgcgcgaggtgaggagcggagcggagcagggaggtgaaggggatgaaggaggagatgatggtcggcctgtcggcgccggggccggtgggaaggtggggcgccgcgccgccgcaggcgatgctggagaggatgaaggactacggccaggagggcgccttcgcgctctgggacgatctctcgcccgaggaccgggagctcctcgtccgggacatcgagagcctagacctctcaaggatcgatcggatcatccggcgctcccttggatcacaaggcatcccattgcctgctgtcgagcccgtgccggaatctagtgtctccaaggtggaggacaggtctccagaggacaaagaaagatggtggaagaaggggttgaaagccatctcggaggggaagctggccgttgtccttttggccggtggtcagggtactcgactgggaagctcagatcctaagggatgtttcaatatcgggcttccatctggaaagtcacttttccagctccaagccgaaaggattctgtgtgttcaaaagctggctgctcaatctagcgaaagtagcaaaggctcctgatggcaacggtggagtttatgctgcactgaagtccaagaagttgatggaagataagcccgtgctgctccgcaaatacgtagattgggtagtcgctgacggcgcgctgttgacgcactctgtgcccttgtatatgacaggcgtcaaagtttctccgctctcctcctacgccggagagaacctggaagccatctgccgtgggcgaacgttccatgcgccgagcgagatctcgttttaggaggtagacctgttcatgggactggagtagcagttgtgtcatctgtaaaacgagcgtaaaggatgggcaggctgttgtgtactgcgtgttgtagatgtaacatctcggacggacacaaaattcatctcgagttttcttgagaaggacagtgtataccatctagctgagaagaagatcccttccatccatgggttcacgacgggcctgaagcttgaacagtttatattcgacgccttcacatactccccgtccacggcacttttcgaggtcatgcgggaggaggaattcgcgccggtaaagaacgccagcggcgcaacgtatgacacccctgatagcgcgaagctcatgctgctccgcctccacagcagatgggtagtcgctgctggcggcttcttgacgcactctgtgcccttgtatatgacaggcgtcgaagtttctccgctctcctcctacgccggagagaacctggaagccatctgccgtgggcgaacgttccatgcgccgagcgagatctcgttttaggaggtagacctgttcatgggactggagtagcagttgtgtcatctgtaaaacgagcgtaaaggatgggcaggctgttgtgtactgcgtgttgtagatgtaacatctcggacggacacaaaattcatctcgagttttctcttgcatggttctccnaggacaaacaaacagacgaaagtgcataaagctgaagaccctgaccaagtaagtgctgcagacaaaaaaaatggtttgctgtgctaaatgttccaacgcatttgagcaaaatgcacaatgcttcccattcgttagtaagaggtttgtctcccggttaggcttaaacctttttttcttggcaggtgacatttttccaacaaggcacacttccatgcgtttctgccgatggtagatttattatggagacagcatatagggtagcaaaggctcctgatggcaacggtggagtttatgctgcactgaagtccaagaagttgatggaagatatggccgcgcggggtgtgaaatacgtagattgctacggagttgacaacgcgctggttcgagttgcagatcctacgttcttagggtacttcattgacaagggcgcatcttctgccgccaaagtggttaggaaggcttatccgcaagagaatgttggggtgttcgttcaacgaggccgtggtggaccgctctcggtggttgagtacagcgaaatggatgcggctatggctaccgaaatgaatcagtcgacagggcgactccgttactgttggagcaacatctgcctgcacat

SEQ ID NO: 138892 - DNA, 558 bp, Zea mays
  unsure (1)..(558): unsure at all n locations
  Clone ID: MRT4577_58152C.1
attgggtccctcgaggccggccggngacatctagtctgagaagaagatcccttccatccatgggttcacgacgggcctgaagcttgaacagtttatattcgacgccttcacatactccccgtccacggcacttttcgaggtcatgcgggaggaggaattcgcgccggtaaagaacgccagcggcgcaacgtatgacacccctgatagcgcgaagctcatgctgctccgcctccacagcagatgggtagtcgctgctggcggcttcttgacgcactctgtgcccttgtatatgacaggcgtcgaagtttctccgctctcctcctacgccggagagaacctggaagccatctgccgtgggcgaacgttccatgcgccgagcgagatctcgttttaggaggtagacctgttcatgggactggagtagcagttgtgtcatctgtaaaacgagcgtaaaggatgggcaggctgttgtgtactgcgtgttgtagatgtaacatctcggacggacacaaaattcatctcgagttttctctcaaaaaaaaaaaaaaaaaagcggcc

SEQ ID NO: 138893 - DNA, 233 bp, Zea mays
  unsure (1)..(233): unsure at all n locations
  Clone ID: MRT4577_58153C.1
ccacgcgtcggaactccaccctcgcaggcgctgcncaggtaagtcggcggcggcgaggacaacgcgcgtcaagaggaagcgcaggagcgcggcacgtggcgcgcgggcacggccgcatcggcaagcacaggaagcagccgggaggtcgcggtaacgccggtggcatgcgacaccaccgtatcctcttcgacaagtaccaccggggcgacgtccgcaaggttggcatgcgttac

SEQ ID NO: 138894 - DNA, 2202 bp, Zea mays
  Clone ID: MRT4577_58154C.1
aattcggcacgaggccgagaacaaaccgtcgtccgagttggcatctttggccaaacccagtatcattgcccaatcacagatctcctccccccgagaccccccctctctttctaatccctctttcttcccctctctctctctctctctctctctctctctctctctctctctctctctctggctctctaccactgtacccactagccggttgtggtgcttgccgcgccgggcctcatctgcaggtaccgcccacggcccgcgggtccccctcgggccctacctcttccggtgcccaatccacgatggtgcgtgttgcgcctccaaggtgccccggacctggtcccgcacgagggcgctcaatctctctctctctctcccgcatttcccactacctgctcctgcttcttgcctgttcggtgtgcgctgcgcgaggtgaggagcggagcagggaggtgaaggggatgaaggaggagatgatggtcggcctgtcggcgccggagccggtggggaggtggggcgccgcgccgccgcaggcgatgctggagaggatgaaggactacggccaggagggcgccttcgcgctctgggacgatctctcgcccgaggaccaggagctcctcgtccgggacatcgagagcctagacctctcaaggatcgatcggatcatccggcgctcccttggatcacaaggcatcccgttgcctgccgtcgagcccgtgccggaatctagtgtatccaaggtggagggcaggtctgcagaggacaaagaaagatggtggaagaaggggctgaaagccatctcggaggggaagctggccgttgtccttttggccggtggtcagggtactcgtctgggaagctcagatcctaagggatgtttcaatatcggacttccatctggaaagtcacttttccaactccaagctgaaaggatcctgtgcgttcaaaagctggctgctcaatctagcgaaagcccgagtaacactgtgctgatccactggtacataatgacaagcccctttacagatgctgccactggcaaattcttcgaaacccgtagatactttggcctagaccctgaccaagtgacatttttccaacaaggcacacttccatgcgtctctgccgatggtagatttattatggagacaccatatagggtagcgaaggctcctgacggcaacggtggagtttatgctgcgctgaagtccaagaagctgatggaagacatggctgcgcggggagtgaaatacgtagactgctacggagtcgacaacgcgctggttcgagttgcggatcctacgttcttagggtacttcatcgacaagggtgtgtcttctgccgccaaggtggtgaggaaggcttacccgcaagagaatgtcggggtgtttgttcaacgaggccgcggtggacctctctccgtggttgagtacagcgaaatggacgcagctatgactactgagatcaatcagtcgacagggcgactccgttactgctggagcaacatctgcctgcacatgttcactctggacttcttgaaccaagtggcgaacagcctcgagaaggacagtgtataccatctagctgagaagaagatcccttccatccatgggttcacaacgggcctgaagctggaacagtttatattcgacgccttcacttactccccatccacagagcttttcgaggtcatgcgggaggaggaattcgcgccggtaaagaacgccaacggcgcgacatacgacacccccgatagcgcgaagctcatgctgctccgcctccacagcagatgggtggtcgccgccggtggcttcttgacgcactccgtgcccttgtatatgacaggcgtcgaagtttccccgctttcctcctacgccggagagaacctggaagcgatctgccgcgggcgaacgttccatgcacccagcgagatatcgttttaggatatcgttttgtgtaactgtggactgaacggaaagggttgcaagattgtgcatgtttacttcgaggcgtgagatgggtgtcgggttgatgtgtgcttgtatgttctctgagtgttgtgatgtagcatctccaactccaaattcatctcgagttttctcccccatctccttggactactgccatttttaatgacaatgggtcaggttcggatcaaaaaaaaaaaaaaaaaaacggaaaaaaaaaaaaaaactctcgtgc

SEQ ID NO: 138895 - DNA, 702 bp, Zea mays
  Clone ID: MRT4577_58155C.1
gtgcaacccctgccatgcatccgtccttcgcgcatccatgggctggcactgtccggctgtggccatatgaccagtccgggcgcccaccaccgccgccagcgttcaacgcccttccacaatacaacagcttcggcagcacacccagtgcctatggaggcttctacggtgctcctccccctccgtatggcatgccctacgggggagctgcaccccctggtttccaggcgcccgcaccagcataccaagcgacgccctggaaccccactcacggtggtgcatggcatcaggacgcccttgcacactccttcaacactatgacgctcaatccaccgaacgctacttccgagtggtatgccgactccggtgcaggatcacacatgacctcggacgctggatttgcaaaccaggaacgtgatcgccaggtgcaatagctccggtgacctctacccgttccatgcaccctacaccagcacctctgcattactcgctgtacccacctccctgtggcatcgtcgtctcggtcaccttgggcatcaagccttgtccaaactcattacctccagtgtcatttcctgcaataaagatgatgtcaaccacatatgtcatgcgtgccaacttggtcgtcatacacgtttgccgttcaattcatctagctctcgagcttctcacaattttgatttaatacactgtgatttatggacc

SEQ ID NO: 138896 - DNA, 659 bp, Zea mays
  Clone ID: MRT4577_58156C.1
cttcacttctcgttctctttcgccctccctccctccatccaaaaactgtagcagttgcatattatctctctctcttttttgtgtagatctgcctgcacatgttcactctggacttcttgaaccaagtggcaaacagccttgagaaggacagtgtataccatctagctgagaagaagatcccttccatccatgggttcacgacgggcctgaagcttgaacagtttatattcgacgccttcacatactccccgtccacggcacttttcgaggtcatgcgggaggaggaattcgcgccggtaaagaacgccagcggcgcaacgtatgacacccctgatagcgcgaagctcatgctgctccgcctccacagcagatgggtagtcgccgctggcggcttcttgacgcactctgtgcccttgtatatgacaggcgttgaagtttctccgctctcctcctacgccggagagaacctggaagcgatctgccgtgggcgaacgttccatgcgccgagcgagatctcgttttaggaggagcacttgtgtctggagtagcacttgtgtcatctgtaaaacgagtgtaaaggatgggcaggctgttgtgtactgcgtattgtagatgtaacatctcggacggacaccaaattcatctcgagttttctctca

SEQ ID NO: 138897 - DNA, 476 bp, Zea mays
  Clone ID: MRT4577_58157C.1
cacccaccggcctagtagctctcgccatccacatcgcctgtagctgcatgcggtgatcgcggcggcggtgcaggccacagacgtacgcgcgcgggctggctgtcgggcgcgcggatgcgccggccgcggcgggcggtgacagaagagagtgagcacacggccgggcggaacggcaccggcggatggtgccgtcgcggacgcgtgctcactgctctatctgtcatccactctctcccccgctccgctccggtcgctttgccgccgatctgtcgaagcaccgcagctgactagccgccgtgatcaccgcgcgcaccggccggcgccgcgcttctggcactagtagctagctaggtggtgcaccgctccacacgcccatcttcttgttcgcgtcattgtatgccgcggaaccaccgcgcgctaggcgttggtgcccggcggtacgtcgtcgtcccgtctcccgtccgcaggaatttcta

SEQ ID NO: 138898 - DNA, 1407 bp, Zea mays
  Clone ID: MRT4577_58158C.1
gaccggctccctcgaggccggccgggagccgccatctctctctctctctctctcttcatcgccgcagtgcgcgctcctacaacccatcgctcaccaccacctgctcctccagcggcggcgtccagggtgaacccgaatccccaacaccatggcggggggcaagatccagaagaagcgccacggcgcggcgggaggcgcccggctgcagggcggtatcccgttcgagaagtccaaggggcagcacatcctgcggaacccggcgctggtggactccatcgtcgccaaggccggtctcaagcccaccgacaccgtcctggagatcgggccgggcacaggaaacctcaccaagcgcctcctcgaggctggtgtcaaggccgtcgtcgccgtcgagctcgacccgcgcatggtgctcgagctcaaccggcggttccaggggcacccgctctcctcgcgcctcaaggttatccaaggagatgtcctcaaatgtgatctcccatactttgatatttgtgtggcaaacatcccgtaccagatctcatctccccttactttcaagcttctgtcacaccgtccaatctttaggtgtgctgtgattatgtttcaacgtgaatttgccatgagacttgtggcacaaccgggagatagcctctactgtcgtctctccgtgaatgtgcagctcctgtcacgagtgtcgcatctcctgaaggtggggaggaacaactttaggcctccacccaaagttgattcatcagttgtgcgaatagagcccaggaagcccctccctcctgtcagcttcaaggagtgggatgggcttgtgaggatttgtttcaaccggaagaacaagaccctgggctccctctttaaacagaaacgtgttctggaattgctagagaagaactacaagactatgcagtctctccaaactgtgcaagatgcagaaatgggtgaggagaagatgtccgcagacgatgtcgcgttgctggctaatatggttgaagatatgagcatggagactggctatgataaggaagatgatgaaatggaaatggatgatgcagacatggctggagatggtgctgcaagctttaaagaaaagattatgggtatattgcagcagggcgattttgcagaaaagagaggttccaagctgagccaagttgatttcttatacctgctgtccctcttcaacaaagctggtatacatttctcgtgattggtggtccagcttctcttcagtagtagtctgtttctttctgttttatttgtcgtgctgttaatgtacttattagttactgaaaaaacctctaagcttgtgctcgtagaaattttttacaggctccgtcctagtttgagctgcaacgaaagaaaattctacttgttattaaaaaaaaaaaaaaaacctcgtgc

SEQ ID NO: 138899 - DNA, 3594 bp, Zea mays
  Clone ID: MRT4577_58159C.1
atggcggcatcccttgccgagttcggcgatcccatcagcgataggcagatggtgctcacgctccttcgcggcctcggcggcaagttccgtcacatggtgtccatcctcaagatgcaccggccgttccccacgttcgcagaggctctccgggcgcccaccaccgccgccagcgttcaacgcccttccacagtaagcagcttcggtagcacacccagtgcctatggaggcttctacggtgctcctccccctccgtatggcatgccctatgggggagctgcaccccctggtttccaggcgcccgcaccagcataccaagcgatgccctggaaccccactcacggtggtgcatggcatcaggacgcccttgcacactccttcaacactatgacgctcaatccaccgaacgctacttccgagtggtatgccgactccggtgcaggatcacacatgacctcggacactggtaaactctctgctatttcctcgcccacttcattcactcctacatctatcattgtgggaaacggtgccttgcttcctgtcacagccactggatcacacactttttctttcccgcatcgcaatttagttctcaataatgtgctggtgtctcctaacattattaagaatttaatttccattcgtcgcttcaccaccgacaataattgctccattgaatttgatccctttggcctttctgtgaaggatttgcaaaccaggaacgtgatcgccaagtgcaatagctccggtgacctctacccgttccatgcaccctacaccagcacctctgcattactcgttgtacccacctccctgtggcatcgtcgtctcggtcaccttgggcatcaagccttgtccaaactcattacctccagtgtcatttcctgcaataaagatgatgtcaaccacatatgtcatgcataccaacttggtcgtcatacacgtttgccgttcaattcatctagctctcgagcttctcacaattttgatttaatacactgtgatttatggacctccccaattgttagtgtgtcgggctataaatattatttggtcgttgccagcagcaccgtggccaccggtcacacggccgacactcgcccgatctccatcacgcctgtcgccaatgcgcatcccatgcgcactcgtggcaaagccggcattgcacagcccgtggatcgcatcaacctccacgctgtgcctatgtcgccactgcctcgctccgttcgtgctgctttgtcagaccccaattggcgctccgctatgcaagctgaatatgatgctctactcgccaatgacacctggagtttagtagcacggcctcctggagtcaacgtggtaactggcaagtggattttttgccataaattgctcgtcgatgggtctcttgatcgatacaaggctcgctgggtcctccgagggttcacccagcgtcccggtgtggattatgatgagactttcagtccagttgtcaagcctgcgacagttcgagttgttctctctttggctctctctcaggactggcccattcatcagctagatgtgaagaatgcattcttacatggcaccctcacagagctagtatactgcgtacagcccgctggttttatggattcctctcatccggatcttgtctgtcggctcaacaaatctttatacggatttaaacaggctcctcgtgcttggcatcacaggttcgcatcctaccttttttccattggatttgctgaaaccaggtcagataattcactgttcatctatcgccgtgggtccgacactgcctatttgctgctatatgtggatgatattgtcctcactgcctcttctgccaagtttcttcaacacataattggtgctcttcagcgtgagtttgctatgacggacatgggccagcttcaccattttttgggcatttctgtgacacgctccgccaatggcctgtttctctctcaacgacagtacactcaggatattttggagcgcgccgggatgagtgcgtgcaagccgtgcagcacacctgttgatctccactccaaactatctgcagatggacctcccgttgatgacgctactcagtaccgcagcctggcagagccccacctcgcggccctcaagcgcatcttgcgctacctacagggcactctgtcccttggactaactatgcgtcggtcttcccctacggagctcgttgtctacacggatgctgactgggctggttgccccgatactcgacggtccacctttggctacgcagtcttcctcggagacaacctggtgtcgtggtcctccaagcgccaacacacggtttcccggtccagcgctgaggccgaatatcgtgatgtggcaaatggtgttgctgaagctacttggttacgtcagctactcattgaacttcagcaaccgcctccctgtgccaccctagtctactgtgacaacatcagtgttgtatatctctccagcaatccagtgcagcatcagcggacaaaacatgttgagattgatctccattttgttcgagaaaaggtcgccctcggtcacgctcgggttcttcatgttcctacaacatcacacataggttctcttaccaagctaaaagttattctcctttataaaaataatttgtccggggtcatcccatcaagcctaggtaacatcaccaatttatctgtaatcactctttcagaaaatcaactcaatggacccattcccactgagttatggcaaatgccacacatagcatctttgtacctgttttataataatctatccggtgaaatcccacaaactatatctaatttaacttctcttcaagagctatccttggcagccaatatgctgagcaacactttgccatccaacttcggccatgccctccctaatctcaagttcctgtacttggcagccaacttgtttgaaggacaaattccagattctctagacaatgtttcaggtctagtatatttggatatgtcgtctaataagttcactagcaaaattcctagcatatttggaaaactttcagggttgtcttttctaaacctcgagagaaatatgcttgaagcgagtgatagtactggttggcaattctttgctgacctaacaacgtgtagttccctgacattgctttcattagctagcaataatctgcatggagttataccaaattccatcgctaacctgtccaccaacctcacatatctactattgagcgacaaccacctatcaggaatagtccccacaaacattaggaaacttaatggattaattcaactcgcgctcaacaattttactggtacaattgagcattggatcccaaagatgacgagcctacaacgattagacctcaatgacaacaactttgatggtacaatgccaacttccattagtaaccttacacaattgacatttttgaatttatcaaataataaattcattggttcaatacaatctagcttgggaaacattcaagttcttgtcaatttgagcctaagcaacaacaattttagagggagaatacctgtcgagcttggggaccttaaacaattagtctttctcgatgtttcatcaaacaaacttagtggggaaattccataa

SEQ ID NO: 138900 - DNA, 260 bp, Zea mays
  Clone ID: MRT4577_5815C.1
gcacgtaactctaattaacatttcatgatttctgtgtattttattgctgctgaacagtagtttccacattttagtaagcaggtagcaggatacttcgtttatatgatattttctagattaatcttctttgtgttaccaccatatgtatcatatggcaggttgcaaggtcattatggagatattgctatgaatccttctggctcattcttagtagagaagtgcttgactgccagtaactgttctcataaagaggctatagt

SEQ ID NO: 138901 - DNA, 188 bp, Zea mays
  Clone ID: MRT4577_58160C.1
ggaggtgtcttcagttcattctccagtcccgctgctgttttgcctcccactactccatcatgtccttcagtgctgaccagattgccgaattcaaggaggcatttctcctcttcgacagaaccggtgaatgcaagatcaccttaagtcaggtgggcgacgtcctccgggctctgggcaccaatcccaca

SEQ ID NO: 138902 - DNA, 232 bp, Zea mays
  Clone ID: MRT4577_58161C.1
gctttatgctgatgcacattgaaggactccgattggtggtatacgtatgggagcttgttgactgcgaacggaaagtggacacgatcaacttaagaaagcagccacgatgcaagcctatcactactatccttccacggcctgattgacgtcaagacacgtctatgatctcataatatctctcactgattcacaactccctcaacactctaactaccactcgagctaaaccttt

SEQ ID NO: 138903 - DNA, 512 bp, Zea mays
  Clone ID: MRT4577_58162C.1
ccggaagccagccagtgaagttttttcgatcaaggaagctaagtgggtggcaactgttcaaggacttgtgcgccgtggttgacaggctaacaaaatgctccgaggaggaggagaacgaaaacatggtattggatgaggatgcaatcaatggaaccaaagactggatgagcttcgacactgtgctgcatggcatggtttgggagatcgaacgatccatcttcaagggccttatcgacgaggtcgtcagcggtgagaccccagagaaaatgcgatttggacaaaggaagctgcaaaggcagctttctttcggtagcccaaactgaatatgccccgtagtagtagtcatttgggtcaagaagctttccagcaactagtaaatgtgaaacattttctgtttttttccctgaagactaacctgtagaaggagtataaatgcaaaaaaaaaaaaaatgatcctcaacactagtctttctgccagaagaagcaaggaatataaatataatgttcttagt

SEQ ID NO: 138904 - DNA, 151 bp, Zea mays
  Clone ID: MRT4577_58163C.1
aacatagatgctatcactgccacctgaggtgatcacaccacctgcaggcgcagcctttatacattgccaccacctgaagaagattaacaagattatttcgggagacatattttcgagatcaacccatggatcaatgacctttggggaagca

SEQ ID NO: 138905 - DNA, 217 bp, Zea mays
  Clone ID: MRT4577_58164C.1
cagattcaaatccactctctaagaaacatacatctcattctcatcttttccacgattcgtattctatatatacttcagcaccatactccaattaactctcacattatacatacccatactcaaaaactcacatatactaatctattatttattaacaatatataatatccatcatcaaaaaccataactaatctataaacaaattctaaacctatca

SEQ ID NO: 138906 - DNA, 355 bp, Zea mays
  Clone ID: MRT4577_58165C.1
gcgatttgctcaagttatttgtcgtttatgaattacttgctttcctcaacccgggaagggcaatattggactgagtaaaagaatgtggtcaacactgtcatcaatggacactgttatttggtctagcgggccccgtactggctatataatctatatatgcgggggggcccttttaggggtcccttgtttacttccccggcgttggaaggttatattttttctttgtggtccccttattccatttgactggcctaaccttttacaccgtgcgtgcgggaaaaccccgggcttaccccactttattgcctttggagaccttccccttttctggggttggggtttttgccagggggcc

SEQ ID NO: 138907 - DNA, 1267 bp, Zea mays
  Clone ID: MRT4577_58166C.1
cccacgcgtccgcgcgcttttcgtgtcctcagaaactgcgggtttgctgaaattctcctccactttcccaagcaaagaacaaagaaccgcccttgttctctgcgactctgcccggccggtctccgaggcgggcggagggaaccagagagcaaggcgaggagcgcggaagggctgagggaaggggcggcggggcatggctcgccggccggcgtcgtgggagcagggcggcgacgagtacgactatctcttcaaggtcgtgctcatcggcgactctggcgtggggaagtccaacctgctctcccgcttcaccaagaacaccttcgccctcgactccaagtccaccatcggcgttgagttcgccacgcgcacactccaggtggagaacaagattataaaagctcaaatctgggacactgctgggcaggagaggtaccgagcaattacaagtgcttactatcgaggagctgtcggggcgttgctagtctacgatgtcactaaagtaatgacatttgagaatgtgaagaggtggttgaaggagctccgggaccatgctgactcgaacatagtcgtaatgctcattggcaacaagactgaccttaggcacctgcgctctgtcgccgttgaggatgctgcaagctttgcagagagcgaaggtttgttcttcatcgagacctctgcgctcgatgcgacaaacgtcgagaaggccttccacaccgttctagccgagatctaccggataatcagcaagaagcccctgtcttcggaggagtctggtttggggtccggtaacctcagagagggacagtccatccaagtgtcagccacaaattctggcgcccttacgtcgcggtgctgctcttcttagagccacgcccaccagaatcatctgaagaacaacagttcgtcaagaaggtcctctcttccgaagtcgaaatatttactcccctttgtgtgaacaataagcgtagatttaaagaatgtcagactcagacgctgactatatatacttgacctgcatagtcatgttccgtcgagaggtgctgtgggagaaaagttgtattgctctcgagcatagaagaaggctgtgtgtatcagaccccagcaaagctgcttgctattaaccgtggcagggtagtctctgtgattttgcagctataattttgttgggggttagttactatgactgcggagggtgtcgtggcttgtggcaacttgattcccgacgtattatagaatcctctttgctatccgttagccaaaaaacacc

SEQ ID NO: 138908 - DNA, 272 bp, Zea mays
  Clone ID: MRT4577_58167C.1
tctccaccgtcgtccgccgccgccgaaggagcgtttgagaagagggtacgggcgtctccttgcccccatggcccacgagaagaagctgtccaacccgatgcgggagatcaaggtgcagaagctcgtcctcaatatctccgtctgggagagcggctaccgtctcacccgcgcctcaaaggtgctcgagcagctcagcggccatacccccgttttcttcaagtgcgaggtacactgtgcgttttttcggcattcttcgtaactagaatatcgcc

SEQ ID NO: 138909 - DNA, 428 bp, Zea mays
  Clone ID: MRT4577_58168C.1
gacgtacgcgtacgcgcacgaccacgcgtacgaccacgcgttcggtctggaaggccagatatgcggcagaggtgaaggtaatgcctggttcccgagtatcattactacagctctgttgcaagtctggaaggccagatatggcggcacatttaggtagtcagcattgtcgaggaaccctactaatgtctaatacttcctctgttttttatttgtcatgttttagtaaaaaataaattagcgggcgataaatattcgagaacggatgtagtattttttatgtacaggttcggctgcagtttcttgtatcacttttgctgtgttgtgttggacatacggtgttttgcttccaatgaattaggaaaggtgttagaggcttagagccaccgtgttactgattagcgttatgggctgtgtcaggtgcattatgc

SEQ ID NO: 138910 - DNA, 581 bp, Zea mays
  Clone ID: MRT4577_58169C.1
gatccgaacaagggagtgcatcaacccagtaatgaatggatacaatattcagctcgcgtattctatggacatctatggtacccaaaaaaaacatatgctttacaaaaaaaaaacacacacacaaaaccgaccccgacccttatgtaatggaaaactgtacaatggtatgctatgctatgctatgtactgaaatgcgggcaactgatcagctgctcattggtgggaatggagacacgagctgtatttggtgacagtaacaagcccactcaaggtggcctcactctacaaatcgttaccatggtggtgccttcatggtcatactccaaggagcagagattaagtgtttcgttttccactacgaatgctgataatattgccgtccactagggtttgctggagctgatggtggagagagagaagaagatggcggtgcggcgagggcgtaagtgaatcttgacgagctctcaatgagcccagcaactccagcagcagaagattgtgcactggatggaaggaaaaggtcgtgcttctggtctttgtaagcactccatacatcagaggaattcaggacttcacgaact

SEQ ID NO: 138911 - DNA, 223 bp, Zea mays
  Clone ID: MRT4577_5816C.1
caaccctaccttggcacgcatgcgatcttatatatcgtctatataagatacactacactgagtcgactggctacaacgtttacaactgggaaactgctaacaccacccaacttaataacctagtagcacatccccctatccccatttggcctgatagcgaaaaagccaggacggatcgacctttcgaacttttgaacagcctcaaaggctaaagggacactgc

SEQ ID NO: 138912 - DNA, 198 bp, Zea mays
  Clone ID: MRT4577_58170C.1
ttcgatcctagaatggctactccaaagaggggtctgcttaaagtttaggggggcaaccaacatttggtgctcgacatggatgcgctagggcccgaaattgacgtaaaagggattgagatgctcctaaacgacgggcagtatagtgtctaagactttctacacctaacaagggactaataaggtcagcgatagctctaa

SEQ ID NO: 138913 - DNA, 243 bp, Zea mays
  Clone ID: MRT4577_58171C.1
ctgttcctcgccctcggggtcccccgccaccccatggagatgagaacagagagatggatgatccttctgtgggccccaagatcccccaggctttggaaaagattctgcagctgaaggagagccgtcaggaagcgatgaactcccagcaggaggaagaagaaatggagacagacactcgctcatctctgggacagtcagcatcagagactgaggaggacactgtgtctacatccaaaaaagaga

SEQ ID NO: 138914 - DNA, 1024 bp, Zea mays
  unsure (1)..(1024): unsure at all n locations
  Clone ID: MRT4577_58172C.1
atgccggccgggatacccgatttttatatttnntttccatggctgttaaatatgtgaaattgtttcgagatcgataaagatacgtgctatgtaatcctaatgtctaatttatcctaatgtaagtcagcaacgtgccaacacggcccgccggccgctacgatcgatgggagccatgtctcgttctctcgatttttcttgtcacatacatgctcatcgggagttacactggtgtggacggtgcatgttctcgctttctcgtgtcggcgttctctcgatttttcttgtcacgtacgtgctcatcgggggttattacactggtgctgctgtatgtctacagcttgaaggcatattggtgtatacgtagacatcttgagagacatatcaagtagtgtgtacaacttgtcatattcattttatgtatacagtttgaaggtgtataattatttaaactggattgtagcataaactattcatgatgtcaggtcacgatttgctgattagttcgacaatcatctgaatcaaattttaatttagaggtttaggctccaaagtttttgaaaacctcttaaatactacagtatactcaatatcacagtttaaaattattctacaattttagaaacttgaggaccagatctcaatttagataccttaaaacaactacatcattctatatataatattattctattcatactataatggagtatttgaactgtaaaaaaactcactcctaaacacctttttacttttaaaaaatatttaatttattagagaagtattttattcaaaatatttatttgtgcaagtattctagagttgaattgaaagacccgttcctattttcattttcacaatttttatctaaatataggggaaatgaaaaatatttaatttattagagaagtattttattcaaaatatttatttgtgcaaatattctagagttgaattgaaagacccgttcctattttaatttccacattttttatctaaatatagggggaaacggatatagggggaa

SEQ ID NO: 138915 - DNA, 508 bp, Zea mays
  Clone ID: MRT4577_58173C.1
aaaacaagggcggacagcacatatttcgcggcagttaatggcccccccttttttcggctttcaggggtttagatccaaccgggggcgtccgagctcccagccccaaaatcctctggcaaacaggtcgggcggcggaaacaaaacaccggaaattaaacgatccaggacaaaatattacaaatttccccaggcccgggtcatttataaaaaactggccccccccaacaaaaaaaaatgggccccgcctcccgataaatccaggaaaagggccccgaggccaatcggttaaattaattcaaagcggccctggccaaaatatgggaacactgaccaacgaccagggattcagggggaagcatctttgctatagaacgggcccaagggctttgcgggaatacgggggaaaagttcccgggggaaaacccaaaccaatgcccatgcaaaaccgagggactggaaaatgtcccgggggaaaaaggccccttgggacaaaaacttcctttaaaac

SEQ ID NO: 138916 - DNA, 293 bp, Zea mays
  Clone ID: MRT4577_58175C.1
ttgacctattaacaattgtttttacattctgcaatctcattaccaacagggcgcttggggcaatttctaacatctgtaagatgcttgaatgtttgtggttggaatcatgctctttgctaaatgagaaggaactagcgtgaattacaactctttgccgcaacctttagtagatcgacctcactgtctggggaattgatcacgcaccgctctattactttgctacattatatcaactgcgaatattgaaattaggcctatgctcacttatttctgacatacgcattgcatttatc

SEQ ID NO: 138917 - DNA, 332 bp, Zea mays
  Clone ID: MRT4577_58176C.1
tcgtaacctgcaacccttgccgcgacacgacgacgcctttaaacttagggggctggttcaagctataaagctcaagagtcagggcggcatgtccacagaaacagacacctttgccttttaagctgagatcaacccgaaactcttactaatcaacaacaccctttatcgcaacacggttaatttttaaggggaagttatttcccactttttcgatgcgttggacgcaaattagtttttttagcctctcttactagatctagcttatcgggcattcggcgctttttatacacattgtaccaaacaaagttttgaatacactttttattatttac

SEQ ID NO: 138918 - DNA, 415 bp, Zea mays
  Clone ID: MRT4577_58177C.1
actgactcgtgagccgctatctccgtatcctccgtcgcttcgagcatcaatcatctctgcctactgcgcaaagtacactgatgagctcatcctgaatgctgcctacattggcacccctgtcaatggtatccttgctgctgaggagtccactggcaccatgtggcaagcgcctttccagcatcactgtcgataacgttgaggagaaccgccgtgccctccattagctcctagtctgctgccctggtgctctccattacatcagcagtgtgatcctcttcgaggagaccctgtaccagatgacctatgatggcaagccttttgtctatgtcctcaacgatggaagactcctccctggcatcaaggttgacatcggcaccattcaggttgttggcactgataatgagaacactgccca

SEQ ID NO: 138919 - DNA, 544 bp, Zea mays
  unsure (1)..(544): unsure at all n locations
  Clone ID: MRT4577_58178C.1
ctggcccgtcgtccattgacatggcgaggagatcgatgtgggctgcagagaaagattgtgttgtgtgccgctgccctgcctttttcttttctagtgctgcgtgtttcaggacagcagagactgactgctgagtaagctatatgtgtttgtgtgccccggagccgagccggacccctcaacgtagcaggtggaggaagggtgcgccctggcgacggcggaggagatcgccgcggcggtgcgccacgtcctctgcatcatcgacgccgaggcgacgccgcagaggctgctcgctgccggagcaccagggacagggcagccggacgtctagctagtcaggatgattcaggacgaggtcttcccggcgtaacggggcggcatgggctgcgcggggtgtctgcttccgtttcttgtaaagtgcagtggcgtgcgtgcgtggctggccagcacacgagagcctgatggcgtagcgtaggtacagagtatgtaacgggcaataacacgcaggttcgtgtctggacctgtggtctctcgttcgtgccccnnt

SEQ ID NO: 138920 - DNA, 152 bp, Zea mays
  Clone ID: MRT4577_58179C.1
gcgtccacacttccaacccctaacaagtcccaactcaggtttacactcatcattccaaccaaaggtacaggttgttcttttaccctgtggcgtcatcacactttactacacacattgacgtcgaacttatgtacaacattattcgtcctcct

SEQ ID NO: 138921 - DNA, 602 bp, Zea mays
  unsure (1)..(602): unsure at all n locations
  Clone ID: MRT4577_5817C.1
ggccgggnaanaattaaaaaaaaaaaaaaaaaaaaaaaaaaaaaaaaaaaaaaaaaaaaaaaaaaaaaaaaaaaaaaaaaaaaaaaaaaaaaaaaaaaaaaaatttttgggttagcttttgggttcggaagttaaggaccggaagccaaccatttaccagggattcagggggggaaagaagcacacccgcagttagttaggagcagaagaagggggggggggaagggggccccccatgatccccccgccagttcgggggggggcccctaagggcctgccgcccctgggcggccgggcctcctctttcgccgtggtttgctccaaaaaaaaaatcaaaaccgacaacccctacggaatgggggggggcctgaccgtcaacgtcaaccccaagggaaaaaagggaaagggaaagggggggaaccatttcgtcaaaaagaacggggcaaacgtcaacggatacagcccaatctacaacgaggatgatgggtttcccaccggggacgtttacgtgggggaaaccacggggtttctgatcggggccgccaccctcgctgggatcctcggggggggcgccctcctcgtttaaacaccagggccctctc

SEQ ID NO: 138922 - DNA, 781 bp, Zea mays
  unsure (1)..(781): unsure at all n locations
  Clone ID: MRT4577_58180C.1
agaaatgaacggaggcttgcgcttgcctgtatcgcgcgaccggagctgagcagcagcacagagtggagccagctcgcttcgcctcctcggtcgcctccacttctatatcacttccccgtctggccccttccccgtgcgccaccgcgcacaatcacacgcgcgcgcccacacggcacacgtgcggcttcccggattcgcgccgccgcgccagagccagccaggccagcttcggatcgaggaagaggaagaggaggtggcgaaggtgaggagtcaacccagcttccgagccatggacggatcggccgcggagctggaggcggcggagcgggtggtgatgcggtgggactatcctcggcgggcgccggcgcggacgaaccgatgctgttcgacggcggcggggaccgggccgaggcggacaggttcctccgcgccgtcgacgatctgcgtcggctcgcgccgccgtcgcccgcggcagtcggcagcccgcgccgcctctcgtcgtnctcgggggcggcgngcggcgccgtgccggtcgctttggngcggctcgngggcgngttccgccctgtgctgtcgncgctcgccctcgtccttgtgtttcttgttgttcgcttttctntgtttggttttcctnngggggggggggttttttttttggtgttttttgttttttgtttttgttttttnttgttttntnttttttgtttttttttttgggggtgtgggntgttgtttttttttttttttttttntnttttttttttttttttttttttttttt

SEQ ID NO: 138923 - DNA, 208 bp, Zea mays
  Clone ID: MRT4577_58181C.1
cgaacggcaaaccctaaagctgatcagactcgcagatccaacccagatgtgcctcaccgacacgtacaggtcgttgctgccctgatcaaaccagcagaaataatgcaagccgacccggcgccgccagcacaagtagcagatgctgcagaatgaagggggagagcggagaggttcagcgcgtgaatctcggaactcctgagaagaccga

SEQ ID NO: 138924 - DNA, 283 bp, Zea mays
  Clone ID: MRT4577_58182C.1
aaaaaaaaaaaaaaaaaaaaaaaaaaaaattaaaaaaaaaaaaaaacaaaaaaaaaaaaacggaaacttaaacaatatgatcccaacttacaaacacatacatccaacttcaaccctcttctatacctaaacctaaatccaatcaacttccccacttttaccaacatcataactcataaaaccattacctttctcaacttactacttcattccacaacatctccacttatctccacctatattcaatactgacaaacaccctcattccttcacctttcccaac

SEQ ID NO: 138925 - DNA, 326 bp, Zea mays
  Clone ID: MRT4577_58183C.1
aaattttgtcattttgttacacctggttgcactacattctgtttctctgctgtagtgaggtatctagtgtgaacattttattctagatattcctgaaattcgcattttgcagtgctatttctgtgactttgagatgcatctatcactgttattaaggcgtcgcctatgcgtgcaggcggaggtccaacgcctaggcgttcaagcggtggtccaacgccttgtctcgacttaccggtttaaaaaccatggcatctatatacaagtttttcattatcacgcttgattttgccaaatctttagtttctttgtcgtgtccttaaatttat

SEQ ID NO: 138926 - DNA, 592 bp, Zea mays
  unsure (1)..(592): unsure at all n locations
  Clone ID: MRT4577_58184C.1
gatgttcggagatctacatcccaatagcatcgtcatccttgaatggatgagctcctactccccgcgcgcgacgcgccgtcgccggcgcagatccttcaccagcgtgcggttgccgcggccacgtgtgcgtcgcagtggctgcctgtcctcctactcggtgcctcatgaccggctcagctgtggggtacgatattggctgcgcctctacagttagtggaggcggcatcgtactcggctccacctgctatacgcctgacgcctctacccaacgatgaggaggtggagcgggaccagctcgagccggctatgaggagactagagaatacaagagggtatttcaagaatttggagaccctgggtgtctggccccacctgcagcgcacaattgtgtctggtggcagtttgacattctctacagatgtaccgcgacaggtgacagcaccctttagattctatgcgactgctgctggtactgctgatgcttttatctcatccttctggntgtttggttacatcagtctttctggaaggcttataagatcatctgaggtgcctgctaaagctcctccacgcgaccgatgatatatactag

SEQ ID NO: 138927 - DNA, 904 bp, Zea mays
  unsure (1)..(904): unsure at all n locations
  Clone ID: MRT4577_58185C.1
agcattttacctaccagttgtattgtacttccggcctgccatgcttgtaaatttgttttcncccatacaggaagttgagaaagatgtgaaagctcggacaaaaggggaactcggagctgcgaaaacattgtgtactccatttgagcagccagaacttccaganaggtatggctcgatgagggcctgaatgcaagtttatggttttctctttacccttgttataatgttatgattgttgtattactacattttcaaatattgccatgctgacctgtcttgtacaacctaaattcaggtaccctgtgctttgcatctggaaagccagcaaagaagtggtcgttttggggccgcagctactgattgcccttgctgggagcccttttggattcagtagtgaaccatgtaacttcgagattttggatacaaatcggaaaatccatttacattgtttttacatcgacttgcagttctgatgtcatcacagctgaaaaaaaaccattgattacagtggacattacttccgagttttgatgttgcaaggatgagaagacatacattccttttaaaaaaaaaaaaaaaaaaaaaaaaaaaaaaaaaaaaaaaaaaaaaaaaaaaaaaaaaaaaaaaaaaaaaaaaaaaaaaaaaaaaaaaacaaaaaaaaaaaaaaaaaaaaaaaccctaggggggccgagataagaacgtcccatatgtaaatgttccatcttaaaaataaattgggtaaaacttgtggagtgacaagacctttaaaaccttgttttgagcaaaacaatgagggtacgaaaaagaaacctttttccccagggtctcaacccctttagtgaaaagcttatttccaacatcacctagcctctttcattaaaatgggcctcggcgacacattttt

SEQ ID NO: 138928 - DNA, 159 bp, Zea mays
  Clone ID: MRT4577_58186C.1
attttcatggaagatgagatcgcaagtattactagcaattatagcactcttattgatcttctcagctttgaacattattaatgtttatactattgaatgattggcatactgataaaattcgatgttaaacttgaaggtcgatgatgaggtatatgatgc

SEQ ID NO: 138929 - DNA, 540 bp, Zea mays
  Clone ID: MRT4577_58187C.1
gttaattcacatattattcatcattccacaaaattcatacaagcccacaaatagctacagacacatatatagatccatcacatatatagctagacggatccaacaccacaatacatgtccaaaactccatctggtactaatccagttaagttcaaaataaaggacatgacaccttacattatactagtataataatatgtattatacgatactgccgtgccagtgtatactagctagctaggggcacgaggcgatgatgcttgctgctgcggctggcgtcccgtccctcctttcggcggggcctcctccacctgtcgcggcgccgaaccatccaagcgcacgcatggacgccatgcactggcaggtatatctttaatttgtagctagctagttcatcctgacgatgtccatgatgaggttgaggtccaagtgcgggtagtcgccgccgccggcagccttagattcttcctcggaggcgaggcagcagccggtgacaatggcgacgatgtcgatatcctcgtcgtcgcccggcgccgtggc

SEQ ID NO: 138930 - DNA, 721 bp, Zea mays
  Clone ID: MRT4577_58188C.1
cggcgcgtggcaggttgatcggtcacgcatgccatgcagcagggccgcagcgtgcgcgtgcttacgcgcgccgatgccgatgccgcttcgtcgtcgtcgtcgtatttttcctcctcccgtgcccctgctagtaatgctgctgtggccacggcgccgggcgacgacgaggatatcgacatcgtcgccattgtcaccggctgctgcctcgcctccgaggaagaatctaaggctgccggcggcggcgactacccgcacttggacctcaacctcatcatggacatcgtcaggatgaactagctagctacaaattaaagatatacctgccagtgctactgctactatgttacatgtgacggcggcgcagtgcatggcgtccatgcgtgcgcttggatggttcggcgccgcgacaggtggaggaggcgccgccgaaaggagggacgggacgccagccgcagcagcaagcatcatcgcctcgtgcccctagctagctagtatacactggcacggcagtatcgtataatacatattattatactagtataatgtaaggtgtcatgtcctttattttgaacttaactggattagtaccagatggagttttggacatgtattgtggtgttggatccgtctagctatatatgtgatggatctatatatgtgtctgtagctatttgtgggcttgtatgaattttgtggaatgatgaataatatgtgaattaac

SEQ ID NO: 138931 - DNA, 323 bp, Zea mays
  Clone ID: MRT4577_58189C.1
tttatattatgttatttgtggtttttttttgttttttttgttcttcttatacttctatttctttatcttgggccaaaagaaaggggagataaccgcccccatgggggccgaaaaaacaacgacaaggtcactgacggggcacaccctcatcaaccccgtctgtttcctttgaaaaagggcctcccctttcgaagatgtcttaaccaacggtcctttcctgtaaggccttaggctcaccctttagaagccccaaacctaatttgttgacctcaattcaaagaaccaggatgtgaggtgtcagtttatgaactacgggctcgtgc

SEQ ID NO: 138932 - DNA, 343 bp, Zea mays
  Clone ID: MRT4577_5818C.1
aattatttttttttttgttgtttctttttttttggttttttttatattatttttgggtttattccacgatacgcgaagggccacaacacataaacccaagggagcaagtctgggcatacaagggcaaaccgctgcctaacaaaaagatgggaactttgcactgaccactaccttaagcgaaacttacgctgacccgaagcttggggcaaggcactcaccataggccttaaaacctttgttgttcaaacccaaagctatactcggaaaagtttttaaaaagccaaaattgcaaagcgtcaaaaaacacatccctggggcaaaaaacttggcccaaaaatgcttt

SEQ ID NO: 138933 - DNA, 238 bp, Zea mays
  unsure (1)..(238): unsure at all n locations
  Clone ID: MRT4577_58190C.1
gcctaatccaagcccgtgctatctgtttnggaacctgcggcgttngcagcacccgtatcctgggccagggcgtctagttcctgatgcatcattgcaacccgacggcgactccctactgctcgcctcagtgccagtcgttgcggcagcagtgtttccagcatctcatgcatgtggagccgcatcaccggtaccaagcgatcttcggcttggtcctccagtccatcctgcatcagcagcc

SEQ ID NO: 138934 - DNA, 432 bp, Zea mays
  Clone ID: MRT4577_58191C.1
aaaaaacataaaaagggggggcattttcatccaggacccaactttttaataaaaaaaagggggggcccaggaggtcatttagggcacggggtcctataaaggggctggggggggaaccaaattaaccctttggaggagctaatgggggtagttctgggggtaccgggaataaccgccctcaaaaaaggggttccttttttttttaaggcctccaaggggggccttaaattggaagggccacaggaggtggtccccctccttgaagggggggccaacagtaatgatctggggaacaaaaccctaaaggcaaatgatgttgggcttgccaaagccctcctcaaaaactgggtggtgggacaaagggaccctttgttggttaagttttccatagcccctttggaaaataaactcccggacacttttaaagttggg

SEQ ID NO: 138935 - DNA, 829 bp, Zea mays
  unsure (1)..(829): unsure at all n locations
  Clone ID: MRT4577_58192C.1
gccggccctggaaaaaaaaaaaaatggtagcagttcccatgcttttaatggcccagtccttacccaagaggtcaacaataccatgtttacatatagtccaactcaaaaggttttagaacctaatattgtagttggcgcaccatcgtctgctaggttacctgaagctggtagtcagttaaattgtgttgttttaccagcttttgcaggagagttcccatctaaccaccgcaaatccttggctcgtatttctggagcgcgccccaacacactccatgtttctgctgaagtgatccatataggaagtttagctgttccttctggcgcagataagtgggcgctgcaaaaggatcaaggcatggagctgctcttctctgcagattttgaacctgatgcccgtatacattgtggctgcaacaccattaccgcggtgctgcgtggtggcttctgccttttcttcgtttcagcaataatgctcttagtgagctacgaggtgggcatgtgcatctatggcaagtagcaacctggtactggtctaagataaatctcacagcatttaggttaatcctatgttttgaggcagactcaactggggtctggggcctcctgctagcttttaagtgtgccgcattgcatggcatggacctgtggggtgtttagcactagcagtaccattttgcagctcgagagctaatggtgtatgtatgaattcagtgctatttagaaatactatgagaattgcctcattggcgtgtgaaaaaaaaaaaaaaaaaaaaaaaaaaaaaaaaaaaaaaaaaaaaaaaaaaaaaaaaaaaaaaaaaaaaaananggg

SEQ ID NO: 138936 - DNA, 786 bp, Zea mays
  unsure (1)..(786): unsure at all n locations
  Clone ID: MRT4577_58193C.1
ccgggggaaatgtagctcgaggctgactgggatctctctcgggactttccccaatccactccactccaatccccttcccccctctgtcaaccctagccgcgccgccggcagtctgctcgggtggcgcatacatgacccacccttcctcgccgtcgtcctccgcgccgccaccgccgcccgccgcggcggcggcagcggcggcggccgaggccacctccctcgcgccgggtttccgcttccaccccaccgacgaggagctcgtctcgtactacctcaagcgcaaggttctcggccgcccgctcaaggtcgacgccatcgccgaggtcgacctgtacaagctcgagccctgggacctgcccccgcgctcccgcctccgctcccgcgactcccagtggtacttcttcagccgcctcgaccgcaagcacgccaaccgcgcccgcaccaaccgcgccacgtcgggagggtactggaagaccaccggcaaggacagggaggtgcgccatgggcccagggtcgtcgggatgaagaagacgctcgtattccacgccggacgcgcccccaagggcgagcgcaccaactgggtcatgcacgagtaccgcctcgagggcgacgccgccgtggagataccgcaggactcgtttgtggtgtgccggatattccagaaagctggcccaggtcctcagaatggggcacagtatggagcgccgttcgttgaggaggaatggggaggagacgatgcanatgtgggtttgcttccagtggnaggtgatgctgctgtcgaccctg

SEQ ID NO: 138937 - DNA, 671 bp, Zea mays
  Clone ID: MRT4577_58194C.1
attggtacctcgagccggccgggacaccctgtacaggggcgtattctacggcgagtccctctcatgcgagacggtgcggaaggtcgtcttctctgctgtggcgccattcaccttcttcacggccatcctgggcgaggtatactacctcagctactccaaatcccgagaggccgctggtggtgctggctccaggattggcatgggcccttacaactaaaggagcttgatcgaggcacggaggcagcccccgtgttttcaactctgggcgagctcggctggactacaagccgacactgttgcagttgcttggactgctgcggctgcaatccatagagagaacaatactgtagaagtcgcattcgcaacccgattgcagccgcagcaagccgcagcgaacaggctgtctgcttcgcggtgcaggaatgcagcgttcctttttaacattaccttagtagggacggcgtaattggctgatgaatccgcggtcttttttctctctttaggttcttggatgaagttactcggctggggtgtatactggttggattattgggctggattctggacgtgggatacacgtattcatagaatgctatgctgctgatatgtatgtgaaagaaataatagaagcgttgcatcgtctatctatgagaaaatataactaagcggac

SEQ ID NO: 138938 - DNA, 213 bp, Zea mays
  Clone ID: MRT4577_58195C.1
catcagtgctacactcccacagtccccacatacacgcagatatttgaaaatatccaataaaatcaacaacactgcaaatttactagctcaactacaagaggcatggagttattattaaaaactgaagtactcatgatgacttccaaacaaaaaatctgacgctataatcaacatactatcaattgtggtaactcagtcctatagtcatactga

SEQ ID NO: 138939 - DNA, 1172 bp, Zea mays
  Clone ID: MRT4577_58196C.1
attgggtacctcgaggccggccgggatactatgtgtaatatagtccaactcaaaaggttttataacctaattttctagttggtgccccgtcatctgctaggttacctgaagctggtagtcagttaaattgtgttgttttaccaggtaatcttattatgggaaattacaataggttgctatatcttgatctctgatgggaaaaggagcatttttcttacatgttgcactagattcttttatgtgagatgtatttagttaccctcattgagcaagattgaagtattagatgatttgtgttgttgagaatctagctcaatcttgcttacttggggcagggttatatgcagctggcatgcattttcctgttcattagcttacacctgtaaatggacattgttgacaagttttttgtgttgttttaccagatggtcaggctaagagtagtactattggaaagggatttgtaaagattttggactcaatctccgctcccccagcttttgctggagaattcccagctatccaccgcaaatctttggctcatatttctggggggcgccccaacacactccatgtttctgctgaagtgatccgcgtaggaagtttagctgttccttctggcgcagataagtgggcgctgcaaaaggatcaaggcatggagctggtcttttctgcagattttgagcctgatacccgtcttcactgtggctgcaacaccattaccgcggtgctgcgtggtggcttctgccttttctttgtttcggcaataatgctcttagtgagctatgaggtgggcatgtgcatctatggcaagtagcagcctggtattggattaagataaatctcatgacattagattaatccagtgttctgaggcagactcaactggggcctcctgctagcttttaaatgtattgcgttgcatggcgtggacctgtggggtgttcagcactagcagtaccattttgcttgcagctcgagagctaatggtgtatgtatgaattcggtgttatttagtaatagtatgcgaattgcctcattggtgtgtgatgatgccatttgccatggaaatcctgtatatatataattcagatctgccatggaaatcatgatgcttttgcaaaaaaaaagtaaaaaaataaaaaaaaaaaaaaaaaaaaaaaaaaaaaaaa

SEQ ID NO: 138940 - DNA, 1065 bp, Zea mays
  Clone ID: MRT4577_58197C.1
ccggccgggccgggagacccgcgacacgcgaccgcactgcctttaaactacgcactcaagtacctccccggactactagctcacaccagcggtacccagcccacaccggcagatcagctgcgagctagtagacatcgacggatcgaccggaccgatcaacaggagcagcaagccgggctagctcgctcgctcgcaactccgcaatggcgtccatcatcgtgcaagcggtggtgatcctcctggacgtgatcgccttcggcctgggcgtcgccgccgagcagcgccggagccgggccaccgtcaccccggacgccgccaaggagtacgactactgcgtctacgactccgacatcgccacggggtacggcgtcggcgcgctgctcctcctcgccgccgcgcaggtggtgctcatggtcgccagccgctgcttctgctgcggccgcgggctcaagccgggaggctcccgcgcctgcgccctcatcctcttcctcttcacatgggtgaccttcctcatcgcggaggcgtgcctgctggcgggatcagtacgcaacgcgtaccacacccggtacaggggcgtattctacggcgagtccctctcatgcgagacggtgcggaagggcgtcttcgctgctggcgcggcattcaccttcttcacggccatcctgggcgaggtatactacctcagctactccaaatcccgagatgccgctggtggtgctggctccagcattggcatgggcccttacaactaaaggagcttgatcgaggcaggcaggcagcccccgtgttttcaactctgcttcgtggtggaggaatgcagtgttctttttaacattaccttagtagggacggtgtaattggttgttggatccgcggttttttcctctctctttaggttcttgtatgaggttactcggttgggccgtatactgtttggattattgggctggattctggacatggtatacacgtattcgtagtatgctatgctgtttatatgtatgtgaaagaaataatagaagcgttgcatcgtctatccaaaaaaaaaaaaaaaaaaaggcccct

SEQ ID NO: 138941 - DNA, 309 bp, Zea mays
  Clone ID: MRT4577_58198C.1
aaaaaaaaaaaacaaaaaaaaaaaaaataaaaaaaaaaaaaaaaaaaaaaaataaaaaggaagtgaaaaaaaaaaaaaaagtaaaaaaaaaaaaaaaaaaaaaaaaataaaaaaaaaaatccaaaaaaaaaaataaaaaaaaaaaaaaaaaccaaaaattaaaaaaaagggggcgcgttttttagggttccaaggtttaatcccgggggttttcaactttatagcttttttttgggaacccatattccaaataaagggccctattttttaaaccttttcactgggaaaacccttgggtttcccaatttt

SEQ ID NO: 138942 - DNA, 2668 bp, Zea mays
  Clone ID: MRT4577_58199C.1
gggaactggtgttccggaaggacccgggcctttcttatagccccagccactcccttcttcctcctctcacctctctcgaaactttccccaatcccatctcctgcccccctctcccaaccctatccacgccgccgccagccctgctcgggtggtgcgcatacatgaaccatccgtcctcgtcttcgtcctccgcccagccgccgccagccccggcggcggcggccgaggccacctccctcgcgccgggcttccgcttccaccccaccgacgaggagctcgtctcctactacctcaagcgcaaggtcctcggccgcccgctcaaggttgatgccatcgccgatgtggacctttacaagctcgagccctgggacctgcccgcccgctcccgcctccgctcccgcgactcccagtggtacttcttcagccgcctcgaccgcaagcacgccaaccgcgcccgcaccaaccgcgccacgtcgggagggtactggaagaccaccgggaaggacagggaggtgcgccatgggcccaggcttgtcgggatgaagaagacgctcgtattccacgcgggacgcgcccccaagggcgaacgcaccaactgggtcatgcacgaataccgcctcgagggcgacgacgccgcagggataccgcaggactcatttgtggtgtgccggatcttccagaaagctggaccaggtcctcagaatggcgcacagtatggagcgcctttcgttgaggaggaatgggaggaggatgacacagatgatggtttgcttccagtggagggtgttgctgctgctgaccctgaggttccccttgcttctgtggagatccctggtgctttggatagaggctatcttcaaatgagtgatctcattcagggtttggatgatcaaaatggaaatggtacacctagtttgccagtttctgatacttcaaataatagcaaccattctgaagacgtagatggaaattctggggacattttaagtgacccaaaccttggctctaattttcttcagtgtgttgaacctggggagcaaaatagcttaatgcttaatggaactatcatatctaatgcaaatgctggagatttttttgataattccagccacagtgatgggtttctagagctgaaggattttgcagatgctgcaaatctggatttccctttgggcaatggatcatccatctggcctttggatggttgggcatggaaaacacctgactcagcggaatctgtaaatggagctaatgatgagattcctccacttcctgatgaccagactttccagccagatgagctggaacaactgttacagtcaatacaagaagattcccatttaggctcaagtatcattgaccccccgcattcttctatgacaaattcagttctgcctgatgaggattgtttgatgttctatgatgcaccgttcgattccaccatgtgtgatgatgggtttgcacagaatgggatccttggctctgcagcaaccaatctatctggtattggcatggtggacgatggtatgccatactttgatgcaatggatggtaatttatttaatgacattctgggctccatacagcagccagatggtagcagttcccatgcttttaatggcccagtccttacccaagaggtcaacaataccatgtttacatatagtccaactcaaaaggttttagaacctaatattctagttggcgccccgtcgtctgctaggttacctgaagctggtagtcagttaaattgtgttgttttaccagatggtcaggctaagagtagtactattggaaagggatttgtaaggattttggattcaatctccgctcccccagcttttgctggagagttcccagctatccaccgcaaatctttggctcatatttctggggggcgccccaacacactccatgtttctgctgaagtgatccgcgtaggaagtttagctgttccttctggcgcagataagtgggcgctgcaaaaggatcaaggcatggagctggtcttttctgcagattttgagcctgatgcccgtatacattgtggctgcaacaccattaccgcggtgctgcgtggtggcttctgccttttctttgtttcagcaataatgctcttagtgagctacgaggtgggcatgtgcatctatggcaagtagcagcctggtactggtttaagataaatctcacagcatttaggttaatcctatgttttgaggcagactcaactggggggggcctcctgctagcttttaagtgtgccgcattgcatggcatggacctgtggggtgtttagcactagcagtaccattttgcagctcgagagctaatggtgtatgtatgaattcagtgctatttagaaatactatgagaattgcctcattggcgtgtgatgatgccatttgccatgcttgtggtcgcagtggtcaatgttagtgcaaaatattgtatatatatttgagatccaccataggaatcatgatgcttgtgcagtacagttgtgttggtgttttgagtgtttgcaggtttcaaaatgaatgttaatcgtgttgcaagccatggtgatcaagatgcttgcctggaaatcctgttaattcagatttgcaattcttttgcaaaaaaaaaaaaaaaaaaaaaaaaaaaaagaaaaaaaaaaaaaaaaaaatga

SEQ ID NO: 138943 - DNA, 154 bp, Zea mays
  unsure (1)..(154): unsure at all n locations
  Clone ID: MRT4577_5819C.1
cgccgagaccggccggatttccggcgacccagccgcggggacnnccnagacagcaggacaagggnaagnnnnccaagagaacaaaaggggaaagcaaccacactctttattcaagagagtcatgtatttccatggctaagaatacaggcccaca

SEQ ID NO: 138944 - DNA, 319 bp, Zea mays
  Clone ID: MRT4577_581C.1
tgacagattaactgagcagtagatgtggatgaacgtcgatcgccgatggacccagaggaaagtatccgcgcgacatgacagtacgagagaaaatccgcctctaaaaacgttcacggcttgtgtcgctagaatctgcggcgtgagatgcatgcatgtgccacgccacgcctctcaagagtgaagagtacccggccaaagcacgacagctatgccgctcgcttgccctccattattgatgtgagagggcggcatggagctgatgcgcgcgaaagggaatgtttcggcgcgcgatctttcgcgtgctctcgggtcgaaagag

SEQ ID NO: 138945 - DNA, 525 bp, Zea mays
  Clone ID: MRT4577_58200C.1
gaaacaccaacggatatgcggtcacgatttttatagtgacgtggatgctacggctggccaggaagccgcatccgtttaatatgaagaatatacgagattaccagctcgggggggcccccaatgaatctaaaaattttgattggactacagcaccatgtaagacaatcttctatcctgcagtaaatatttacagcctacaggttgtcgttcagccacttcgcagcgccattaacaatggacccagcaaaatctgtaagtttcttcaaccagtcaccctctgcttctttagatttgcttggatcttcttgactagcaccaacttctttcttttgatgtatggcttttggctgggcagcttttggcttagtgtctgttcgtgcaaagcgaccattactcaaagatgcaagttcctcaagtaattctctttcacgcccacttatgcgcttgggtattgcgactttaacagtgaagagatgatcaccacgtatagacggcttattcaatgatggaactccttgcttcgct

SEQ ID NO: 138946 - DNA, 310 bp, Zea mays
  Clone ID: MRT4577_58201C.1
aacccttccattccgttcctgctgtgcgaaaccgagaacccaaaccctaatgtaagctatttgcgttcagatccgatctagtcacaaatgtagacaactagacatgtattatgcctattaacttcgatattttgcacacagaaaaaccggggtttatatgtgtgctcccgtgtcctacatcgcgtccaacgctgctgcttgtgactgacctaattacaagtgtatacatgtattatactgttcctgacagaaataagtctggggaatgtgttcttatgtgatgctgatgcgctaacaccccaaaagtgat

SEQ ID NO: 138947 - DNA, 323 bp, Zea mays
  Clone ID: MRT4577_58202C.1
ttttggtttttttttaaggggaacggccctaactattataaaccaggtgtgtaataaccacatgcttgaggctcttagaatgccaataaccaggtctaaaagaagaaaagcacttgtaaatcagaagaccaccatgggacctcggtggctattctcaagtccaaaggtctttcacctctatgacacactgggggaaatatgtttacatgagaggtcttccgtaatccaagcagtgcccgagtaaatggtctggcattgatgacatggcgctagccatacacagaagtgttctaagacgatatcgtgggcctatgcaacctatt

SEQ ID NO: 138948 - DNA, 462 bp, Zea mays
  Clone ID: MRT4577_58204C.1
acacaaaaacaacacctgctatcttttttgacaccatacaccagaccatgaccacgactaaagaacttataatatgatgaccagagtataacagtctattactaggccagggtagggttaatcactgaacccggacaattggcaaccatacactattctaagtgccagcttgtatttaacgggatgaaaaaagcaccacccataaccaagggcagctgagattaccatggtccatataagatgatgatgatcgcttggttcaagatccaatggtcgtaacctgtttcggttactaactagttaaccgtattgcctaaacacgtggggaactacacaaaacaccaggagaagctcctgtcatggctagtggagcttatcttagaaagaagtaaccgtgcactgttcttgattaaagattgagttagactgagagcttacgcgattctgatgttaactgacacc

SEQ ID NO: 138949 - DNA, 277 bp, Zea mays
  Clone ID: MRT4577_58205C.1
tgttttcaacagcttgcattaaaagagatgttttcagctgcttggtttattttgcatgctgcactgatttggtcagagaaccatcactgagaaatatcgagtagccacactgtacattgtgttctaccgtatgttattcaaactatgagttagaattccctagttctgaaggtttcgtaccacagtagttatggtgctagtttcagtaggctaaaaaaaaggaagactgtcgcagtcttaaaaacttaagatgtcaagtagagaagctttgagtgca

SEQ ID NO: 138950 - DNA, 421 bp, Zea mays
  Clone ID: MRT4577_58206C.1
gccgctgctagcgaacacgcacaggacacgccatctacccgcaggcgcagtagcagacaaccaggagcccggctgcacgctcagtgcgggccatgaacctggatgtcccggctaggcagcagaacaaccaggacgcagaccatagcgacaagacagtggccgaggacgtcctcggcactgaggcgtgtacccaaccgaaactacgtctactcctacgggacaccaacaccgacgacgccctgttgccgtcgctcaacttccccatggtcgacgacggcatgttacgctcgggcctaccggacgccgccaacttgcgcttcctgctctgcctcaacctgagctccatcgtgtaccagagcccggagccttacccggaggagaacgcgcggttcctgctcacgaacgggatccgacttcacca

SEQ ID NO: 138951 - DNA, 1292 bp, Zea mays
  Clone ID: MRT4577_58207C.1
cattgggaccctcgaggccggccgggaaaattatggtaacaccctaatacattccctcgctcgcggccttgtacagcatactgtccttgcggcgctgctggctccgccgggtgttgggtcaacgttctcccgtccccccgagcgcagtctcgcgtggttctcccgtcccccgaggcccgagcgtagtctctctcttttgccgtggttctccagtcctccctcatccgctctctttctttctctcgtggcgagtggtaacgacgtcaggtgctcaggtcttgttcaggcccttcgccggcgacgagcacacagcaaatggatacaggagctcaagctatgttcatcatcagtcttgtgctctggtgtactacaagctttgccttggatgatgctgctgctacaaggattccaattgtgggcacattacctctgtcaatgaaagaaaatccgcaattatgccaactttgtgaggagtttgcatcagaggccctcttctatttaaatgaaaatgagacccagactgaaatcattgatacactacaccaagcttgttcaaagtttggctcttttaagctggagtgcacgaggttggtggattattatgtccctcttttcttcacaaaaattgcttcattaagccctgaagaattttgtgcatcagcaagtttttgtggggaggtaacattcattcgtcttccaagacatgaagatacttgcaccctttgccatgaggttgtcgatgaggttgttactaatcttgaagatccaggcatggagcttaagataattgagatacttctgaaaggatgcaataatgcagaggattatgtacaaaagtgcaagaggttgataatccaaaatgcacctatcataatggagaatattaagaagttcctcgagaagagagatttttgcaattctatccatgtctgtggaagtaaatccgttcgcgctggatcacaagtcctcagaagcctttcttcagcctgaagccctgaacttgcacggattgttatgatcatgcaacagatattagtgtaaaaacaagtccaggcgccgctatgtgagtcccgtgtgacatcgactgtacagatttggctgtgtacatgttaaaggaaaaacacaactgaggcacaaacctcttctgtttacgggtcatgagcagggtgtatatttgaactgtatatcattataccttggattggatgtcatgttgctctatatttatacgtaaccgagttttgtaactttggagaagtaatgtatatgatgccaaagcttgttcttccatg

SEQ ID NO: 138952 - DNA, 580 bp, Zea mays
  Clone ID: MRT4577_58208C.1
cattgggtacctcgaggccggccgggaccttcttcctcttcgtcatcagccgatagtgttatcacctcggtccggatcgctactagccgatggctgctgggccccacctagccgatctggtacctcgatggtgactccagggatgttctacttccgctccatggcgctcccctggccgcctcacgccatcatgacccgggttcgagactgagtatcgatggactccctactccccttcgtggctgttcctaccagatctcgagcttgagtggaataccgtgcgccgcgtgctgcaagtccgagaagacattcacctaccgcgcatagcaccagaataactccaatggtactactacatggtgatctacgccatgacatgatgtacttctaggactctcttgagtatttattcaacgataaaatgatataatacgcctagggcgaaggagcacataacttctggatgggagaggatgccacgatcctcaagtggttacccacatattacactgcgtctcatatagaactacgacgtgcttgtctccaacaacagaagataggatttctttgtgaagataag

SEQ ID NO: 138953 - DNA, 255 bp, Zea mays
  unsure (1)..(255): unsure at all n locations
  Clone ID: MRT4577_58209C.1
gggaccctcgaggccggccggggtcctttcctccgcctccgcctccgcccccgcccccgcccacgcccactcctcgctgccaccactcctgtcacctcttcccgcgccgacgcagccgncatggaccccgtcgccacatgggggntaaccccgttcgcggncgncgacccggagatctacgatctcttggagcgngagaagnggngncagcgtngcgggattgagttcatcgnctccgagaacttcacctccttc

SEQ ID NO: 138954 - DNA, 152 bp, Zea mays
  Clone ID: MRT4577_5820C.1
gcgccttcatgaactcttgggcgctatacacgttcaaggctgagcgcgacatacgtatcaccattgatatcggggggagtaattttgagacgactaagaactactgcactgatattgatacccctggacatcgggagttgattaagaacatg

SEQ ID NO: 138955 - DNA, 248 bp, Zea mays
  unsure (1)..(248): unsure at all n locations
  Clone ID: MRT4577_58210C.1
aggcgtccgcgagttttgccatttgaaaatgatagggataatgatgacctcgtggcttctgaaccgggaggggcgctccttcttatcctgcagttccaccccccaccaaatcacgcatggcatctccgccgccgtcctcacccccatcgtaactggagcgtccatcttcatcagcgcggagacagtgcgaacgctggcgctgcgcggagcccacgtcatcatggccctcangaaccttcccgctgccc

SEQ ID NO: 138956 - DNA, 223 bp, Zea mays
  Clone ID: MRT4577_58211C.1
aggaccggcgcggaatgcccggggtgatcacacacgccgcggtaaaaacccaagcggacaagctccaacagggggactaagggaccaggctcgcgcaccgcccccgagaagccggcccggccgcgcccacacggagaaccgggcaacccggacgccggacacgcccaggacgcgacggagaccccgcacggcgcgccggagggcagaacggcgaccgagaaag

SEQ ID NO: 138957 - DNA, 368 bp, Zea mays
  Clone ID: MRT4577_58212C.1
attttaaccttaaaggagcgacgaaagatcggggggaatagtaccagtgaggaggcccaaccccagaaaataaccatttagaattgcttgaggatgacagggagacagcataatttagtgcttttgatggccatggaggaacagaagctgcccaattctgtgcaaaatatctgtaagggcaagttcacaaaaacgaaaacgattcaactggagacctaggcgctgatgtccatagagcattcttcaaaacggatgaaatgacgcaaggacagagaggttggggagaactataagaacttggagacaaaaataacaagcctaggggtatgatagaaagattgatccgacctaaaaggagcagtgattta

SEQ ID NO: 138958 - DNA, 1360 bp, Zea mays
  Clone ID: MRT4577_58213C.1
tccggccgggatctctaagcaatgttctgcactgtatcatccgtattatatataagtgaataaaaaaactgcagattttattgtggaattccaaaagcagctacagctagcctacatcgccggtctagctcaacaagattggtaccgtatctataagactataagataaattcgcctgatatatctccaagaaaaagcaagcccatcgtcctaccgtattagcaatggaggcagcagcaggagaggggccgacgacgacgatgaagacggtgtgcgtgaccggcgcggggggtttcgtggcctcgtggctcgtcgagcgcctcctcgccggcggacgatacaagatccacggcaccgtccgcgatcccggcgacgccaagaacgcgcacctgctggggctggacggcgccgcggagcggctgcggctgttcaaggccgacctgctcgacttcggcagcctggcggcggccattgcaggctgtgacggcgtcttccacgtggcctgccccgtccccgactataccctcaccgaccccgagaccgagctgctggctcctgccgtgacgggcaccatgaacatcctcagggcgtgctccgacgcccatatcaggagggtcgtcgtggtctcctctctctcggctgtcatgataaaccctgactggggcgagtgcaaggtcatggacgaaggttgctggtctgatgtcgacctctgcagaactactaaggtatatggaggcacgacatgaagagcatctaactacagtaaaacacattttgaggtacatgctactacaatcaaggttgggggtattctatccaaggaacaagaacatgatagaaatgtcgggatgcagtgataaggacctagctggtgatatggacagtaggaagagcacttcaagtaccatattcttcctataaaaaagtactatcaactagcaatcctccaagcaaagtgtggtggctctcttaagttgcgaagctaagtatatagcagctgcaacaactgcctaccaagctatttggctgacagggttgctgtttgaattgaaggatgaaagagcaagtgtgttagtgttgagtgtgtcattgtccaagaatcatgttctcatgattgatccaaacatactgatgtgagatttcatttgattcgggtatatgacaacatgaagagaattgaagtgaagttcatcagaacaaaagagtaattgggggatattctcaccaagcctttttgcaagaataagtttgctgaattttgcaacaagattgctatgtgtatcaaggattatggggagagttgctaaaataaaccttggacacacttgtttcaatcaaaaaaaaaaaaaaaaaagcggcc

SEQ ID NO: 138959 - DNA, 418 bp, Zea mays
  Clone ID: MRT4577_58214C.1
ttcaaacagaaaaaccgctgcaggcccatggggaggggttttattaaaatcctgcatggtttataacagtcacaacatagacattccagcacctaagcactggtcaacacctttacactaacgaaccaccaatcaaggacgaggcattctgataggcaacccacacatgatctctaatgactacacgcataatgaaccttcacattgctaacgcttgtgcgctctaacactacatccaaaggatggagatcataatcgctaccgataggatgtgctgcatgccatggtggaaactgagctatctgatcaccaccctgaaaaagtcctgggatatgctgcccactacaatcaggattagctctcaacatcctcaagagtctgcaataacgaacgcccaaaaagaacaccaccaccaggc

SEQ ID NO: 138960 - DNA, 261 bp, Zea mays
  Clone ID: MRT4577_58215C.1
atgactaatggaaatcacactttctatgtgagcaaactgatacagaggttggctagattaagtaaatatgatacaatgtatcacatgcacagcattacttcttcagcatcatgggagaaaatcttactgtcagggttcagaggatgttgtacgcaacttttaatgaagggctttgctggtgttgcgacaaagatacatgccaagagcagtatggttgcaggtgaagcaggaacacattttctggctctataccatcagtga

SEQ ID NO: 138961 - DNA, 503 bp, Zea mays
  Clone ID: MRT4577_58216C.1
gtggttttttttttttttttttttttttttttttttttctaatttattttttttttttaatggccaccaatttaaggggttatttattctacctaaaacgtgggggcaataaacatttaaattatcaccccaaccataaatacaagatgggggagagaagagatggatctgaaccgagccaagggctggccccctattacttaatacccagaaaacggaggggcaatggtcatcctgtttaactttccacattaaaccactcccaggtaaaaaaatttctggcccaaccaggttaatgcaacaaagccttcacactggggtactctgtttggctcaaccagaataaccagatagccccccacattaacgatcaagattgtggaagccaactttaccagattaataacaaattgaaatctcccactgggaggcccaaactactctgaataactgtttaatgacaaacacaaaccaggcctaacaaatcgttgttggggaggatg

SEQ ID NO: 138962 - DNA, 962 bp, Zea mays
  Clone ID: MRT4577_58217C.1
gaaaatcgtccgagagatgactaggatgaaggatgagaggaataggctgaggatgatcatggcacagtacttggtgtggcttcattcttcatgcaagatctgagcaaccttgagtagcaaatcgaggggaagggtacgagcagcttcggcaagcgccggaacaagacgcacacgctctgcatccgctgaccgctctgcatccgctgcagcagccgtagcttccacctccagaagagcacctgctcctcctgcgattacactgccgcccgcatccgcaagtaaggacaagcctccacgtcgatagaagcaaatcaatccatttcgtttgacaagtagaagattatctgtgttcaaccaaatggacataattagtgctgttttgcaaaagcattctggattttccagtctcaaagcattccaaaaggaagtcttggatgcttggtttgctcatgaggattgtgttctcctagcagccataggatcaggatcacatgaaaattattgaagacgacggtccaggtgcagccttctatgccagtgctaaggccatgactaatggaaatcacactttctatgtgagcaaactgatacagaggttggctagattaagtaaatatgatacaatgtatcacatgcacagggacctctcaagcaacaacctcaatggataaggcatattaaatagtaatgctccttccatttcataatgtcattacttcttcagcatcatgggagaaaatcttactgtcagggttcagaggatgttgtacggaatgaagttggttgatttgacgaagaagaaaacatttttagtcttgtggctgtgcgtctagctgttgatgcagccgatgagaagtcggtatagccgagagaatttcagtcatcctgcagaaatatgtcttcccatatgacttcttttcgtggtggattatcatcgaggggagagtggcaatacttagtct

SEQ ID NO: 138963 - DNA, 256 bp, Zea mays
  unsure (1)..(256): unsure at all n locations
  Clone ID: MRT4577_58218C.1
ggggtttgcgacccatatctactccancaccgggttcgttgacgatcttttaggattcctggcaccactgcctccgactggacagctgcttccccgcagttggcaactgctccacaatctggaccgacaagccccatactctcctaaagggggattggaggtatacgaagcaaacacgggatcctgggatacagatcctgcacttgactagaaaaaaacctccacattcgcccatttaccaagaaagatacatcac

SEQ ID NO: 138964 - DNA, 3215 bp, Zea mays
  Clone ID: MRT4577_58219C.1
gtaacacccctaggtcaatataaggatacataagatctccatttgctctgttatcctaaaagagaatgtacaagagtacaaggtatgctgcatgagaatttgtggaccgaagtatcatagcaaacaatataggtcacaaatgcacatgtcacgcagttgaacaaacactagaatgttaaaaaccgcctcgacagggggacgctcggctggagcgctacccgcccatattcgattcttttccagcatgaaaggcagtattcactcgatattcttttttacgggcgaatgtagcatgtgtatggcgcgtattctaaaattactcaactatcctcacatatgtctaaacgtgtggtcagcgtaggtgttcacagatttcttaaaaatcaacaccactgctcctcgtaaagtcaaaataacactatcccaatttcttgtaatgcatatgtatttttagcctaagaagttactatggttggagtcaagtgatgagaatttggtgccacgaaatttctgtagtctggcggggtaaaatattgtattttaagcaaagacgctccctcagagtaattgtaaatcgctttcctatgagctgaccaagaacaagtccctccttcacgtaactgaaaaggattagttagttgccaaaagtatcaacatttcaagactgctatatcatgattatatgtgcaactggataatactaatcacataccagaaatttccgacggtaatcccaaacagccgcttgtcaagaccaagctaccggcagcgtgctggcttgcagcttgaatacagttaccgactacaaaagccaaaagaatcactatcactgtgtgcaaagtgatatacagaaaggagaaacttcttagacggataaactatcagataggagaaagacggaactgtatcagaatacatatccttgaaaactaattgtgtcatctggaagacatttaagttagtaatattccatgcaatctcttgtccaaaagtgtttcattcccagacttcagtgttataggtcagtgcccgtgcgttgcaacggggccactacattacaaccttcaagtataagggatttgccacttgcaacgagctccaatgtctaggaacaatttagaagaggtaatatgactatgtgacaacgaacattacaacctggaataagtgttgactgctgtttaataagtcagcatagccctttttcattcctgtgatgagtcttgtatcatcttgtattttcaagattatactttaactgcactgatattatagttcgtttcaccgggtaacagaaggacaagcctccacgtcgatagaagcaaatcaatccatttcgtttgacaagtagaagattatctgtgttcaaccaaatggacataattagtgctgttttgcaaaagcattttggattttccagtctcaaagcattccaaaaggaagtcttggatgcttggtttgctcatgaggattgtgttctcctagcagccataggatcaggaggtaccaaaggaaatgagcaaaacatagcatacagtctcagatgctgcaggtgcacatcatgtccatttttttaatcattcaagtaatgccatttgccaattggttctaacttctttcattctgtaactgtttagtttgatgcaaataaattgcaatggtgttcgtcagagccaaacatagcagacaacactgctttagtttgatgcaaataaattgcaatggtgttcgtcatagccaacttccccaaaacaaatgtcacagaaaaatatctatacctagaacaatgatagatgtagtggtgtcactgacttcttcatcccgtgcatgacttagttcaatcatagactgcacattaacacacaaacacaattaattacatggaacttgcaacatgaatcatagacttcatatacgattaggcatatatatgtggggtctcgcaacacaaaaccatccactgtgaaggtatggatatgtggtggtcgactgataatttcataccctttctggataatttcttgtccaatttatgatttaattgaagaaatgctattcatacaggatcacatgaaaattattgaagacgacggtccaggtgcagccttctatgccagtgctaaggccatgactaatggaaatcacactttctatgtgagcaaactgatacagaggttggctagattaagtaaatatgatacaatgtatcacatgcacaggtaatggtgaaatccaaaatctgggagagccgacttctattttctgcatgctggatataccataccttttccacctatatatacttcaaaacttgttttttagtgtttcattttgtttttgtgattccaagggatctgtctcacaacaatctaaatggaccaataccagatttctatgtcaaatgccatcacttacatttctatataagctttcttgttgatcgacctacatactttaatattgctcaaaacccctctttttatgtttacttcctcttattttgtagggacctctcaagcaacaacctcaatggataaggcatattaaatacattacttcttcagcatcatgggagaaaatcttactgtcagggttcagaggatgttgtacggtacatatttaatattttctccattccttaattagtttttgtggtgtcatttgagtatgttgtgaatctctacaatattccttgtggcaatacttaggaatgaagttggttgatttgacgaagaagaaaacatttttagtcttgtggctgtgcgtctagctgttgatgcagctgatgagaagtcggctatagccgagagaatttcagtcatcctgcagaaatatgtcttcccatatgacttctttcgttgttggatttatcatcgagtggagagtggcaatacttagtctggccactacttgtgcttgccaactttgcttagcaacttttaatgaagggctttgttggtgttgcgacaaagatacatgccaagagcagtatggttgcaggtgaagcagtgagtaacatctgcgttatagtggcattcaacgttcaaagcaagaaatgtatttggtttaattattgcaagcagtgatctgaaatatgtaaattatctttatatggtctttgcaagggaacacattttctggctctataccatcagtgattagccctgtacaaattttattgaaagaaaaactaaaggaatgttttttattgctct

SEQ ID NO: 138965 - DNA, 785 bp, Zea mays
  Clone ID: MRT4577_5821C.1
cattgggtacctcgaggccggccggggttgccctcggcgacgcccaccagtgcccagttgcattgattcctccccggtccccacatcctgccgccaatggatgtcgacgggcccgcccccgccgacgcctctgccaggcccgccaccaacggcgaggccccctccggcgtcctccgcagcttcgtcgacggcgtctggtacccggacgagcctctgctccggcggctccgggcggcgtcctgcgacgccgcgccgcgcctgaggggggcgtcccggaactccgcgcgggacctgcttgagtggaccaggcggggcagcggcctccgcgccatcctcgtcatctcggtcgggacaatcacgcttatagcattgactggccttctgaccttcatgttcttcctattggttgccactgctaatgcgatcattgtctcagtcttgatgtcactggccgctgccggaggattcttggctatcttctttgcttgcttggttgcagtgtatattggagcagtatcagttgctatctttgtcatttctgcgactgtcatttcagcagttgttggaattttggttgctaccggttgggttgggttcttctggatgatctggttcaccgcaaggaagagcatggtcctgacgaagcactccttcggcatgacgagctcggcaatccaatcgtattccgcgtcccggcaagtgaagcagaagcctgtcgactgaggctagttggttgcgtcctgtatgaagcggatatatctatctatgtgaatcacggggttgct

SEQ ID NO: 138966 - DNA, 2931 bp, Zea mays
  Clone ID: MRT4577_58220C.1
gttttttttacaataatatatggaacactcacaccttgcaactcatctacacaaggttcattctacatgaacaaggcagcaggctgcctcacaagtcacaacttttagatttctgaatcacagatactactagctgctactaatgcagcaacttgaacgggttacatttccacaacaggtgcgtgcaaggacttattccgaaaaaaaaaatcaaaatatcaatcacggactggcctctgcaagaaaatgatactttgcagggagaaatcttatgtgttccctacaagttcctttgcttgagaagagatcgaccagcaacattgtggttaattgttcaagtgagaaattcctctcgtcaatcttggacaggtaagctccagccctgactatttcatttttctttagtaattcccactcatgtccgctcgcttgcgcaggcatgatattttagccagcattctgcatggatgaaaacatatcttctgcctcttccaccaatccttcttttataagatttgtgatcattatactgtaagtcacaacactaggctccagccgacttctcgagatagaagcaaacagatgcctttggttgcaatcactaatgaggaagaacgttatctatttgttaatgtaaacagctaagggtgtcccttctcaaagacaagatgagcaaactagacatgtagatgaacattaccttgctggtcatgacgaactgggcggctcagccagggcccaaaacaggattcagcatgctacattattctcccagcagttataacgtcattcctcataaatgcaacatcggctgtgtgaacagacataataaaaaatgctacaagagagaataaaaatcagttgtgtacgtagagcacatagctacatcagcaccggaacgaatcttcttcgaaaaacataaaacgctctgcatatattggatcaaaagtaaatgaacatctgcatatcaagcaggtcaaatgagaagaaaatcttccgagaaacatgaacatgaagtaaaccaatggttttagttaagatcatatactagcttaactgtgacaggtgcgtgcaaggactgattccaaaaaaaaaaatcaaaatattcacggactggcctctgcaagaaaatgatactttgcagggagaaatcttatgtgttccctacaagttcctttgcttgagaagagatcgaccagcaacattgtggttaaatgttcaagtgagaaattcctctcgtcaatcttggacaggtaagctccagccctgactatttcatttttctttagtaattccctgactacatgattcagcaatcgagaatcgggctcacagccagcattctgcatggatgaaaacatatcttctgcctcttccaccaatccttcttttataagatttgtgatcattatactgtaagtcacaacacataggcaccagcccacttctcgagatagaagcaaacagatccttagcttcttcaactctcctggtttgaaacattccagctatcatggtattgagagttatgatatcgatctttacattcattgcacgtaattctttgaaaagaaagattgcttcatcaaagcatctatttttaaaaacccggccgtccacgatgttgtatgtacatgtgttcatagcgataccactttctgtcatttcatggaatttcacctttgcaggaactgttctcccggcctcaaataacccatcaattatgatgctgtataaaatagttgaaggctttattcccttttgcagcatttctctgaaaagactcaatccttcatcaatccttccgattttacaataggcattaacaagtgtaccatacactacaacgtttggttcaatgccagctgacaccatagcatcaaatactcttaatgctttctccatccggccaacaagacggtacccatccatcagcatactatacaccacagcagtaggatgcagaccagcatttacagttaagtcaaatatattttgtgcctccattacccttcccagtttgcaaaggttgttaattatcgaactgaagaaaacaatatcaagacgcatgccattattcattatttccaaaatcaattccttggctttcagtaaactaccatgagtacaaaaaccttgaatcaggcaatggcatgcatatttatcaggtgctactccttgatcaatcatctgattaaatttttccatagcatcatccatcttaccgattctgcagagggcagcaatcactgtcgtataggttaccacatcaggtttcactccatggtctctcatttcattgaagatgatcatagccttatctagcattccacaaaatgcatatgcctgatcagcacattaaaagtacaccctacatgaacaaggcagcaggctgcctcacaagtcacaacttttagatttctgaatcacagatactactagctgctactaatgcagcaacttgaacgggttacatttccacaatcctacaaatacaaggatggtgacgaagataagagccaaaaagagcaaccgcacaactgaaccaaccaatacgtgcacaggctctgcttgccttctctttgttctcccttagagatggtggtggtctgaccacaatgctctgcttccatttcgtatcaagcttcctatacaatctcttgtttattccttgttcaatttccctctctgtttttgccttctgttcctaaatagcatatgcttctctgcttatgctgagcggagtgggaaaaaaaacagtttcaaatgttgagcgggagtgggaaaaaaatcggttttgtacgataccttcagctggcgatccacgggaacgacgagctggaaaccctgatcaaggctaccatcgccgccagcggcggcggcgtcatcccccacatccacaggagctcatcgacaaggctgccaaggaat

SEQ ID NO: 138967 - DNA, 386 bp, Zea mays
  Clone ID: MRT4577_58221C.1
ttaacaaaagggtacatgagcgcgccgcttgctatgtcagggcgtatatgtctgggtgactttttactgtacatgatataaatgctctgatttctaatgccagggtgagaatgcctgcaaacattattaatcagtgtctcttctacatgcagcacattgtcacatcgtctgatgccccgcgatgctgactgactgcatctgtgtcatgcgtgtctaagagaccaacgggtcgtgcagccatctggatcgattaaacaaaaaatcatggttggtggagcgggggaagagactggtcacacagaacgggatcctgtgttactggggaccttattatgcgcctttcgatgctacccgtataaagaggaggtgtgggaggaccctggact

SEQ ID NO: 138968 - DNA, 873 bp, Zea mays
  unsure (1)..(873): unsure at all n locations
  Clone ID: MRT4577_58222C.1
gttgttaacttttaacttttaaggcatccagcaagacattagtcgcaagaacaaatgtgtcagtttccaaaagaagctacagacaaatagaatgcaagttggacaaggcatcacgctgtcaataataaattacagtgacacaggactacagatcatactaaaaggaccaccgtcatcacgcattctaaactcttaatagtccccatcctctaattttgatttagcttcagagtcaaatgtcttgcatagaatctcatagcttttttcaagtcctatctgagggtccactcgcgatggcgaggtactagatatcacatatctcaacttggtatagaaagccatcgcttgagtgttagctttctgaactgttagcatcacagctcccatttggttcttgcaagcgatctgttcaatcaactgcatcataaacttccccagccccttaccctgagcagaaggctccatttgtagctcatacacataaagaacaggaagctcctcttccacaacaaatctatagggtacaaaaccaagcaagcagctttcaggacacactgcacacatatgttccacctccgtttccttcatggaactttcagtaataaacccattagaatattgcttcacaaatatatatcggcttctgggaccaccatctcccgacgcttaactttctncttctaaaagccattctggtccataaggttcctccatgttaaccttaagaagattttggatgtacttcctcattggttttctcagttgatgaccccttccagactctaggtacacatttctctgatatttatggaaatcagataattgagctagatggtccttcacagctacagcttttcttataagctcatatgt

SEQ ID NO: 138969 - DNA, 472 bp, Zea mays
  Clone ID: MRT4577_58223C.1
gacctccacactcttgtgtgctgctctccagatctcgccgtcatgctgccggaatgcccccctcctccgtcggcgacagcgcccgcggccgctacctcatgatcggcgtggcccttgccctcgctgacctgctccggatcgcgttcggctacgacacccaccacatctacaaaactgaaaagccaggtaatgtttcgcatgaataaagttgaaccttatcaccatcctcatcaacacttacgactactacagccttccatatttgtcctgcagaatcgtgaaccctacacataaatgcctacgcccatgaagagcgcctgaataccaatgcagtgattgatagccaccacgaaataaagctcctaaaacacgcgcacaacggcttcatttgtacacttgagctagatgctacatacaggtccagcagcttgctgatgacagtgaaagctcatattgagtttgaatttgttat

SEQ ID NO: 138970 - DNA, 149 bp, Zea mays
  Clone ID: MRT4577_58224C.1
ctcatgtgaactatattcgcagcgaaccgagaggaaggaccaggggcagcgtcaacctggggggggtgcgtttaggtttcggcgaagggcgacatggagagcaccctcaaggggatacgctggagcaatgcgccgagcgttttggacct

SEQ ID NO: 138971 - DNA, 823 bp, Zea mays
  Clone ID: MRT4577_58225C.1
cggccgctcgagccggcgggcaggactatccccaccctctctgcacgtgaacgcccctctttctctctcgtcgccgtcacatcctcctctcccctccccccaaaacccctgccgaaaaattccgtagagcgaagaaggcgaccggagagtggcagccagcagcagcggcggcagcagccaggcgaaacagcgcctctcttgtccctttcccccctttttaatctctctctcctccgcccccttcccgcaagaaaagctcggattcctgggcgtttccccccattcccctcctcgatctgagacctttgtcgtccccaaatggccgcctcccgctcccactgaaccccccgccggcacacccttcgcttccccgctccttggcttcgcgctgtcgggggctcctcagtgaccgtgcgccgtagtagtagtagtggccgaatgggtgctgcaaggggaggcgtctcggcgctgctcgtggccgcgctcctgctcggcgccttcgcccctccggcctccgcggcgtcgtaccccgcaaaggtggtcagcggcttcctctccaatgcggcgtcggcggtgctgaagcggctgtggtcgctcaaatcgacggtcaagacagcgagcggggccaagtccatggtcaagtacgagggcggctacaccgtggagacggtcttcgacggcagcaagctggggatcgagccgtacaccgtggaggtcacccagggtggcgagctgctcgtcatggactccatgaacagcaacatctaccggatcgcgctgccgctgtcccgatatagcagaacaaagctttgttgctggttca

SEQ ID NO: 138972 - DNA, 276 bp, Zea mays
  Clone ID: MRT4577_58226C.1
cttttaataaatttttacacaacggacaaccaaagggtggtttttttaaaaaatcgggggacactacccccaatcctgattctactataaagttagcatggacacatggccacccctaaccagtaggacccgggtttacctatgaagaacgaaccggggccttaattcaaaaacaaaagggcctacgcaaagagcaaaacggactcctcgctagccattgcgagaaatatctgagaagctcctcaagacctgatgtggctacaggcgggatttact

SEQ ID NO: 138973 - DNA, 361 bp, Zea mays
  Clone ID: MRT4577_58227C.1
cagggccccggggctcaaggttgcacccacaaactaaacaaatgggttgtgataggtgacagcccaatgccaaaagggaggttgacccttttcatcttaccggctaatggacaatttcaaaagccagcaacttgtaaaatttaaactccaccccaacccaaaaagatggagcccggcccaatacttagttctgaaatatgcgttaattttttggcctcgggatggtacatcctagtccaggaacttgggggcctggtgcccataagcaatactcaccatggaccattcaatcattcgggagttcggtcaatatacaattaagggggatccgggttcatacccaatggggggtgtaaccgtt

SEQ ID NO: 138974 - DNA, 709 bp, Zea mays
  Clone ID: MRT4577_58228C.1
ccgggggccggtgcttcatcgccgatggtgcgcgcaggagcaggtcctgcggcaccgcgccgtgggcgggttcctgacgcacagcggctggaatccacggcggagagcatctgggcgggcgtgccgatggtctgctggcccgggttcgccgaccagtacatcaactgccggtacgcgtgcgaggagtggggcatcgggctgcgcctggacgaggcgctgcgccgggagcaggtcgcggcccacgtcgaggagctgatggccggcggtaccgacagggccagggaaatgcggcgctgcgccgccaagtggaaggccgcggcctggaaggccacggcgcccggtgggtcgtcgtgcgagagcctcgacaggctggtggatgatctgcggctgtgggaggaggacgccgagctcgccaccgccacgccgttgatcaggtgatgccgtgagaccgtagcacgcccacacgcggacttcacgtcggacgtctccttccgtctccatgtcgtcactcgtcaggctacaggagttggagttgctgaataagggttcagtgacctggtttcgtacttgcagtgtctcgctccgaccacgcaaaaatacagtagtaatgtgtaccagtagctgttggttgctttcgcgtcaacgtagacatcgtgaccggacgaactatgccaatttgactgataatacagcgcggtgcagtcgttcc

SEQ ID NO: 138975 - DNA, 593 bp, Zea mays
  Clone ID: MRT4577_58229C.1
gcaagattgtgcgagggctttactggatcagacatcctagaggtgtgcaagcaggcagcattctaccctatcagggagctattggacaatgagagaaacgggaggaaattagataaacctagacctttgagacaatcagacttggagagagccttatcaacatctagaaagtgcaagaaggctgcaagttcaggactgcagtcacccttgtgggttcggccgacagattcagaagacgatcagatcgcgtgaaaattctacagcggagtaaacgcaggcattacgtcgatacccttaggttttcttacgcagcttgcagagaggttcagcgtatatatatatatgcattaattcgttttgcttggcgagggcgcaccgggttttttgaagctaactgcagctgggagtatgccctggtgtttaagtttattattcaagattgatgcccctgtgggctgtaagctcagaactccatagttgtccggcctacaattggccttagtttccttgcattttatcttcagtttaactagtctagggtagcgaattatacattcatataatgcagaaaggggcccttccgtctcgtcatc

SEQ ID NO: 138976 - DNA, 807 bp, Zea mays
  unsure (1)..(807): unsure at all n locations
  Clone ID: MRT4577_5822C.1
ttgggtacctcgaggccggccggggacacctgtcagtgccaagttgcatcgactcctccccggtcctccaccgcccgccgccgatggatgtggatgtggacgaggccaccgccacccctgcctccgcctctgccaagcccgcttccaacggcgaggccccctccggcgcccgcgaggtggatgtcggcgaggagtacacgctcgccggcgttctgcgcagcttcgtcgacggcgtctggtacccggacgagccgctgctccggcggctccgggcggcgtcctgcgaggccgcgccgcggctgaagggggcgtctcggaactcagcgcgggatctgctcgagtggacaaggcagggcagcggcctccgcgccatcctcgtcatctcgctcaaaacttgcatttcaaggtggagactggagagtgcatcttgtaagcggaaacaaaaacatggtggattactttcggtagcaacagagcatggttgattgctttcgcatgcagttttgatcccataaaactcttacatgataccttggtttggtcgggacaatcatgcctatagcattgactggccttttaatcttcatgttctttctgctaattgccactgctaatgcgatcatcgtctcagccctgatgtcactggccgctgctggcggattcttggctatcttctttgcttgcttggttgcagtgtatattggagcagtaggagttgctatctttgccatttctgccattgtcatctcatcagttgttggagttatgattactactgggntgggttgggttcttctggatgatctg

SEQ ID NO: 138977 - DNA, 1520 bp, Zea mays
  Clone ID: MRT4577_58230C.1
gccggccgggtcgggaatcccgcctcgctcggcgctccgccgccacctcgaatccagttcacccacctcctccgtccttattcgtttcttccgccgcaagccagacagagttgactgtcaccgtgttccctcggggtgggcgatggggtcgtcggagccgtcgtcgcgttccgtgcagaacctcgtgctgtacgccgccagcgccgcgctcagctgcctcgtcctcttggccggccttcgccacctcgatcccaaccgcgccgcctctcagaaggcgcagcagcagaagaaggagatcgccaagcgcctcggccggcccctcgtctccaccacgccctatgaggacgtgattgcgtgcgacgtcatcaaccccgacagcatcgacgtcgaattcgattccatcggcggcctcgacaaggtcaagcaagcgctctacgagctcgtcatcctgcccctgcgccgccctgagctcttcgcctccggcaagctcctcagcccccagaagggcgtccttctctatggcccgcccggcacaggaaagaccatgctcgccaaggccattgccagggagtccggtgccgtcttcatcaatgtcaggatctccaatctcatgagcaagtggttcggggacgcgcagaagctcgtgtctgctgtatttagtctcgctcacaagctccagcctgctattatcttcattgacgaggttgatagtttcttggggcagcgacggacaactgatcatgaagccatgactaatatgaagacagagttcatgtccctctgggatggcttcaccactgatcagaatgctcgtgtaatggtcctagctgctacaaacaggccttctgagctagatgagggcatcctaaggcgctttactcagatatttgagattggaattccgtccagagtgaaaggacagatacttcaggttgtgttgaagggagaaatgtcgagcctcatgttgcttacgatcacattgcaagattgtgcgagggctttactggatcagccatcctagaggtgtgcaagcaggcagcattctaccctatcagggattggtttttgcttcttctcttcctactgctgtttcagaaacctagacctttgagacaatcagacttggagagagccttatcaacatctagaaagtgcaagaaggctgcaagttcaggactgcagtcacccttgtgggttcggccgacagattcagaagacgatcaggtacagaacgcgatccttgagatatctaagctgatgtctcgaatagttgagagcagccagtcagaaccccaagagccttcttcaccttaatctaatccttttgctagatcgcgtgaaaattctacagcggagtaaacgcaggcattacgtcgatacccttaggttttcttacgcagcttgcagagaggttcagcgtatatatatatatgcattaattcgttttgcttggcgagggcgcaccgggttttttgaagctaactgcagctgggagtatgccctggtgtttaagtttatta

SEQ ID NO: 138978 - DNA, 1851 bp, Zea mays
  Clone ID: MRT4577_58231C.1
ccgggaaagctgtgtacgcagcagaatccaatccaatccccagcgcgcgccgccccctctaatccctcctccgcaaggcagacagaggccggcgttcactcgggcatccgcgggacggacggggagcaaagcctcagcggcgagtgcgggcgatgaggtcttcggaggcgtcgtcgcggctcgtgcaggagctcgtgctgtacgccgccagcgccgcgctcagctgcctcgtcctcttcgctggcctccgccacctcgaccccaaccgcgccgcttcccagaaggcgcagcagcagaagaaggagatcgccaagcgcctcggccggcccctcgtctccaccacgccctatgaggacgtgattgcgtgcgacgtcatcaaccccgacagcatcgacgtcgaattcgactccatcggcggcctggaccagatcaagcaggcgctctacgagctcgtcatcctgcccctgcgccgccccgagctcttcaccttcggcaagctcctcagcccccagaagggcgtcctcctctatggcccgcccggcacaggcaagaccatgctcgccaaggccatcgccagggagtccggcgccgtcttcatcaatgtcaggatctccaatctcatgagcaagtggttcggggacgcacagaagcttgtggctgctgtctttagtctcgctcacaagctccagcctgctattatcttcattgacgaggtcgacagtttcttggggcagcgacggacaactgaccatgaagccatgactaatatgaagacagagttcatgtccctctgggatggcttcaccaccgaccagaatgctcgtgtaatggtcctggctgctacaaacaggccttctgagctagatgaggccatccttaggcgctttactcagatatttgaaattggaattcctgttgagagtgaaaggagcaagatacttcaggttgtgttgaagggagaaaatgtcgagcataatattgattatgatcacattgcaagtttgtgcgagggctttactggatcagacatcctagaactgtgcaagcaggccgcattctatcctatcagggagctgttggacgatgagaaaaaagggaggaaattagataaacctaggcccttgagacaatcagacttggagagagccttgtcaatgtctagaaagggcaagaaggctgcaagttcagcactgcagtcacctttgtgggtacggccgacaaattcagaagacgatcaggtacagaacgccatctttgagatatctaagctgatgtctcgaatagttcagaacagtgagtcggaaccgcaagagccttcttcaccttaacctaatccttttgctagatctcgtgaaaatctgcagcggagtaaatgcaggcattacgtcgataccgttaggtttccttatgcagtttgcagaggttcaacatatttatatatgtattaattcgttttgcgtttggaacctccaccggtttttttgaagcaaactgcagctggcgaagtggcaagcgtgccctcgtgtttaagttgatcatttcaaaatacgtgccccctgtgggccgtaaaactgagaactctatagttgtctggtcaacagtcggtcttggttgcctctgtattttatcttcggtttgactactctagggtggcgaattacaacatacagtataatgcagaaaggttcccaaacgtgctaaggtttaaagaaaaaaacgagccaggctctctgttctgttggtcgtcattctttgtgttttgatcaggcttgtggttagcgttttccccctagggtgtttttggaataatatattactagatatatccccatctgttaccccggggtctcg

SEQ ID NO: 138979 - DNA, 437 bp, Zea mays
  Clone ID: MRT4577_58232C.1
ccgagagggaaggaaaaggggcttgttaaaggaaaatcacccattaagcaaaaacacatacacagttaaaaaaaaaacaaagggcacacaccttttattaaggcggggggaaagccaaggcacccttttaaaaaaaaaatggttggtttttcgggggggaaaaaaggtaaaggtcaccaaacaaacaaacagaccaaaggggagaaggttcctttcctccttggggccatgaaatgaaacgtaaaaccccatttaagtccgtactataacaaaatataaatcctaaaaaaaactgggtggtagccataatagtgggaggaaaaaaaacttttcaatcgcggaaagggccccaattttttcaagggggtccttgaggggttccttggaaacgccaagggccatgatggcttgtttgcccctgaacgtccgaccagccc

SEQ ID NO: 138980 - DNA, 923 bp, Zea mays
  Clone ID: MRT4577_58233C.1
tttcacacgaggccggccggaggccaaatcaagctcaccatttcccatgcatccaaactaacctccccgcgaccgagcccagtgcctcagcgcacgcaggacatggccggctccggcggcatggagcttccgccgctccgtgacctatcgcgacgggctgcctccttcctgcgcatggcgcggctggcgctcaccggcgccgccactccggcacaactgctcgccggagaggaggtcgtcgtcgacggcggcatcagctgcaacccatactacaagagcatcagcacggaggacgactggggatctgaactctggccggatcaggaggacgaatcggaactgctcgtggacggcgacgaggacgggtcaacgacgagaggtggtggtggtggtgcatctgagagtgtcactctggtcggagccggaggaggcggcgtcggtggcccgctggacaggaaacctcagttgaggcaccagtccgcagcacccggcgcacacgtgacgtcgtcggagccatcatcgtcggagccgttgatgacacgccgccgagccacgaaacgggtgaatgataccgccgtggcggttgaccacccgttcggacgcgatcgtcgaggcggcgagtcgtcgtcgctgttgcttgtttcttcctagtcccatcgatctgacacaagaaaagtaagcaccagatggttgttgcttctcctttctcagagctagctcgcttgatcggagaagcgaaacaataatgcttcctactagcctagtttcttttcgcagaaacccaaaagtgttatgcacgtcaatactgtatcaatttctagccgccacaggaaagtataggatccaattacatgcactgtatctgaatcaatgaagaagtcgcttatctatggatctggctcgcaaaaaaaaacggaaaaatt

SEQ ID NO: 138981 - DNA, 303 bp, Zea mays
  Clone ID: MRT4577_58234C.1
cgccatgacaggctccactgcgctggacatgggcttcttcgaggagcactggctggcgcacaccgtgtggatctccagctagctccacactcagatcgggtgagagccggacatgaagcccaacatctgcacctccactcaagagcgccgggagctgatccgacatgctctgttcgtgctgatcgagtcacaggggcatcgactacaggtcgaccatgttactcgtccggccgctggaggatgtgcacgctctggtgccgcacgtggaggacgccatcgacacggagcgtggatgagctgatc

SEQ ID NO: 138982 - DNA, 405 bp, Zea mays
  Clone ID: MRT4577_58235C.1
ctgcctagcggcgagctacactcgtttccagctggctgcggagagaagcgtgggctgcataactaagtctgcaggcgtgggtggacgtgatccgccagccggagccgtgtctagggacgatgggtgcagcagctcgctgatctacgcgttcgatggcgcgtggcaccgtggtgctagctgagtacaccgaggtcaccggcaagttcaccaccattaccgtccagggcctgcttaagctcaccgactgccacagcgagagcacctacaactgctacggtcacaacgttaacttcctcttgaacggcagattcacgaatcgtgtggcctgtgacgacatcgaggggcgacacaataccctagttgtcctggacagacgtcaggaggacttcaccaaaaaatattgtg

SEQ ID NO: 138983 - DNA, 161 bp, Zea mays
  Clone ID: MRT4577_58236C.1
cggcgctcgagcccgagcgccgccaacggcagtggcttgggttcccttgcggtcaacgggaccggggccttccggaagaatgggcaattgcctcaaaaggagattccttccaacgtaattggggccgaattcaagaacccgcttccagaactctttgggaa

SEQ ID NO: 138984 - DNA, 328 bp, Zea mays
  Clone ID: MRT4577_58237C.1
gcgcgtgaacgtcgacgggcacgacggcatggcggcggcggacccggacaccgaagtgcagggggagttcccacccctcgttcggcagtacaaaagcggccgtgtcgagcgggtcttcaacctggccccgctcccggtcggcaccgacccggccacgggcgtcgtgtccaaggacgtcgtcgtcgacccgggcaccggcctttgggcgcgcctttttctccccgccggcatgcacgggaagaagctccccgtggtcgtctactaccatgggggggcctacgtgatcggctcggcgggcgacccgatgacgcacgggtaccttaacgcg

SEQ ID NO: 138985 - DNA, 461 bp, Zea mays
  unsure (1)..(461): unsure at all n locations
  Clone ID: MRT4577_58238C.1
tggattcttaggactaaaaagggcaaccatctaanggcgataatactcgatgcaaagggtggtgttttttctttttacaaattacatttcatggttgcagattaaggcttcaaaaaacatatgtaaccactatggtgcacaattgcataagaatttgactatcatcagaaggcataatcagagtagcataaaaaagcttaaaggaacagttactttgacaagaacgacgtgtaaaagtcaggacactgcaaaggcgaagaaaaaatagttttaaataaaaatgatatacaaattatcgggttgtttttatgcttctataaaacaaaaacatgtactaccctttgaaaaattcttgactgatactgatagagtctatcattcaagagctgcacctttagatatgctanaattcttaggtccgggctagaaacgcttgggaaatctataataatcatcatacc

SEQ ID NO: 138986 - DNA, 679 bp, Zea mays
  Clone ID: MRT4577_58239C.1
tggagcctatcttaagcaacactcataacacgagctaacagtgcgcatctcaagcaccgctccagctacaggagacactctgatcatgttcggcactactcgcggaacgtgcaccaatgagctcattaacatgggtatctacataggcacacgtggaaagcctattgttggtgctaatgacagcactggcaccattggcaagcgcatttgcagaatcaatgggagcaacagtacagagaccaggcgagccctgcgtgagctcttattctcatgctgtggcagctctccagaacatgagcggtgcgatcctctgttgggagaccatataccacaagaccagagatggaagggctttctgtagaatcctaatggatgcacgtactctgcttgcgatgaaggccgacactgacaaaattgtggctgtagcacagacgatgacaccaccatccatagccatgacaaccattgaaagcgctggaccgagtactactaggcaacgcatcactatgccaagcagcgcgctggtcagcagagacctcctagagcaccatcacagattgacatcgtacctgatcgctcacggtctggctcgctatgccatcatctgccaggagaatggtctggtgccaattgttgagcctgagatccttgttgatggccctcatgacattgatcgctg

SEQ ID NO: 138987 - DNA, 1401 bp, Zea mays
  Clone ID: MRT4577_5823C.1
acgtggtcgcggccgagtacggtatcagggtttttaatactgctcatttagtatcgtaaatattatcggttttttctaaaacttattaaactgagcttagtttgacgacttcggacagctcaaaacttgcatttcaaggtggagactggagagtgcatcttgtaagcggaaacaaaaacatggtggattactttcggtagcaacagagcatggttgattgctttcgcatgcagttttgatcccataaaactcttacatgataccttggtttggtatggcatccattttagcaattattgaaatttctcagtaaataaattttcctcattttacccttttctgatctggcaatcgattggccggccggggttcctgttgccctcggcgacgccacaccagtgcccagttgcattgactcctccccggtccccacatcctgccgccaatggatgtcgacgggcccgcccccgccgacgcctctgccaggcccgccaccaacggcgaggccccctccggcgcccgcgaggtcgacgtcggcgaggaggacacgctcgccggcgtcctccgcagcttcgtcgacggcgtctggtacccggacgagcctctgctccggcggctccgggcggcgtcctgcgacgccgcgccgcgcctgaggggggcgtcccggaactccgcgcgggacctgcttgagtggaccaggcggggcagcggcctccgcgccatcctcgtcatctcggtcgggacaatcacgcttatagcattgactggccttctgaccttcatgttcttcctattggttgccactgctaatgcgatcattgtctcagtcttgatgtcactggccgctgccggaggattcttggctatcttctttgcttgcttggttgcagtgtatattggagcagtatcagttgctatctttgtcatttctgcgactgtcatctcagcagttgttggaattttggttgctaccggttgggttgggttcttctggatgatctggttcaccgcaaggaagagcatggtcctgacgaagcactccttcggcatgacgagctcggcaatccaatcgtattccgcgtcccggcaagtgaagcagaagcctgtcgactgaggctagttggttgcgtcctgtatgaagcggatatatctatctatgtgaatcacggttttgctgtttgtttgtttgtaagagtgtagaagacagcttgcttgttgcggcagctctgtttctctcggtgactaggtgtataatgctagctctgaactttggcagcatgtacgttcggcatggcggtcaatgctgttatttaaaggatagtgagcagatgttaatgtttatagcaaataaaagcatgttaatgtttattaaatttatcttaatgaacttattatttcttt

SEQ ID NO: 138988 - DNA, 431 bp, Zea mays
  Clone ID: MRT4577_58240C.1
cgggcagcttcgagcagcttcccctctctagcctcatgatccaatacacgctgcgccgccgccgactcgaagctctccgcgcagacatggcggaactgactgagaaggatttcctgcaactggccaatcgatttcgtcgcatcacagaaatccgatgaggagaagaggcctggtacggatgctctcgatgtctgtaagactactctgctacttggcttcaagactcgcagctagatgatggtgggcacctacattgacgagaaatgcccattcactggaactgcgatctatcagaggcagaatcattgctaggcacatgtccacagtgctaatgatgaacagaactataattgctcgccgggactacatccactctgcctggagataccagacgtatgagacgaggcactcctacattcctgctcagatct

SEQ ID NO: 138989 - DNA, 459 bp, Zea mays
  Clone ID: MRT4577_58241C.1
ctacccgccatcccgctctaacgggaatctagcgcctacttcgccgccgcgccgcccgccgccgccgccgccaacggctccgctccggcgtccttcggcgtcgcctacccctaccccgcccctcctcaccaccatcacccgccgccgcaccaccactacccgtaccccccacccccgccgacgcaccaccactacgcggaccacccgccgccgacgcccacctgactgcggcgcctcctcgccgccgccgaaggcgacttccttctcctcggcggcgccacctccatagtccggatccgcatgcggccgagcggcggggactaccttctcgcctccctgggcctctcccgcgtcgctcacaccccccccactgctgactccccgccgcgggcgacgctgcccctcatccgccccccccccaacccccacccctcctgccgcctcttctcccccccccca

SEQ ID NO: 138990 - DNA, 399 bp, Zea mays
  Clone ID: MRT4577_58242C.1
gtctcacctcccgctaaggaggaagtgcttgtgcatgtgaatcaccggcggctctacttacgatttataaaaccatctatcctgcactagccctgtaaaaaaaacttgatatttcgatgctgtgctatccaagtttcctggatcaagactgtactgatacatggttcttgtccaagaaccggcattttttatgatagcaatccagtcttctcttattatgcaacaagacaacacatgcggctgtggatttaacaaaaagaactcacagccaccgcctgcttgcaggcgacattgttacttctattgacactggtcagcattaatgtcctcaattagcaaatctatcgagatacaagatctgaccatttactggtttctgcatgatttgcctaccacacc

SEQ ID NO: 138991 - DNA, 681 bp, Zea mays
  Clone ID: MRT4577_58243C.1
cctcgaggccggccgggccgggattttgacgacaccccctccgtcgctgtcactctcaagtacggcaggagggccgacatggagaacatcatgttcgtgcacacgctgtcgaactctagcgagcaggtgtacctgggcgctatgagggcggtggagatcaaccccaggcaccccatcatcaaggagctccgcgaccaggtcgcccagcacaacgagagcgaggagctgaagcagacgaacgaggctgggggaccagacgggccttatggagagagccatcaacctccccgacccccaggagatcacgcccagcatctaccacgtctccgcaccagagcctggacctgagccccgactcggtcgggctacgaggaggacgaggccgaggagcagccggaggcgaaagagaaggagacgtcgcccaacgaggggtcgaatgcgtccttcgacaaggacgagctgtagactgtagtcagcgtgcgatggtctctgtcttcgggatctcttttgaagtctagatgtacctcacgtttagctgagatatcggcgaactccactcactgccatgtgtgtgtctaggaacgggatacgggatcggctttctttttctaggctgcctggcgatggtactttggacaaacttcagttcagtcgactctgtctaattaccgcctccgagta

SEQ ID NO: 138992 - DNA, 604 bp, Zea mays
  Clone ID: MRT4577_58244C.1
cagcgatctgatctttcgccagtcaccggcgccggaggctctgcgcgtctatactcatggttgtcccgcgcgctcccgagcagacacagcaggaccaggatgaggagatgctggttccgcatcaggatgccattgagggtctgcagaaggatgttcttgagggtccgcagccgatggaagaatttgcatctgctgttgagaaccaaattataccagatacctccacatctagatttacatggtatattgaaaatttctccaaacgaaatgttagaaagcactactctgacgattttattgttggggggtacaaatggcgagtgctcgtcttccccagaggaaataacgtggactacctttcaatgtacctggatgttgctgattcgaacttgatgcctcccggttggagtaggaatgcacaattcagccttgctgtggtaaaccaattagacagcaaagcatcgttaagaaaagaagctacgcaccaattcaattcccgagaaagtgattggggttttacatcttttatgcctttgttggatctgtatgattcaagtaaaggatatgttgtgaatgataaatgtatcatagaagctgaggttgc

SEQ ID NO: 138993 - DNA, 1215 bp, Zea mays
  Clone ID: MRT4577_58245C.1
gtctccgggaaatctgacctgcattgcgagctgcggctgtcccccgcgattattccaagctccccgagcccatggccgcaatggcgatggctccagctgccgtgtcgttcctggcgctggcgctgctgatgctcagtgacgcggaggccaagttcctgcccaacaacatcaccgtcgttggctccgtctactgcgacgcctgctccaacaataccttctccaagcacagcttcttcctgaaaggggccagggtgctgatcaagtgcagcttcaaggtgaactcgacgtcgtccgaagagctgtccctggaagcggagcgcaccaccgaccagcacggcgtgtacaagctggacgtgccccccgtggacggcttcgagtgccgcgagggccacgagctccggtcggcgtgccgcgccacgctcgtccggagctcctccgccgcctgcaacgtcccgggcctcggggcctccacgcagcacatcgagctccgctcccgcgccaccagcgcctgcttcctcaacctcaacgcgctcaacttccgccccgccaaacgggacggcgcgctctgccacgcccaagggggcgacgcgttcggctcctcgcttttcttctggcccttcctgccgctcttctggccgccgttcagggtcccgggcggcggcgccggcgggacggtgtcgttcccgtggccgttcccggtgccggcctggctggtgccgttcctgcggccaccgttcttgccattcccgctctacgagccggcgccgtcaccaccgccgccgttctaccgtttcccgcctccccgagaagcggtttctcggccttgaaatcccatgagccaagaagcttgtcaagatacgctattttagcctttcttggcattagattgtgtgttagtgatgagaaactgatcagaggtcgtgtgatatttggcccggccccatgataggttgacctccgtgcgcatgtaaccgatgctagtactgatgctgccatgtagttcattgtgctcgtgaactgatgaacacgtgtggtctgatatttagtagtggcaaactggcaatggttacttgttacatctcctatttgaaggttcagccaagaaagcccatggtgtatatttccgtgcagtaagattaaattcctaatgaatcggtccatcgtatggggtgtttggtttgaagaatcaattcattctagatgaaatggtgcatc

SEQ ID NO: 138994 - DNA, 364 bp, Zea mays
  Clone ID: MRT4577_58246C.1
gtgctgtgtttctttttgaggtacacatggaactgaagaggccaggggtgcatcgtgataaccgcggatggaacaatgacatggttgattgttaacatacttaggaggtaatggtcgccagtaagagtgactacggacaaggcacatgactactacaggtgatgaggaactgtgcaaaactgaatctgcattttgaaacataagtgacagtgcctttttgttggcgtccttggccaagcgattgtggaggatattaaggcacatgcccaggcgcacgctgtctgtaagggactcgggaagaatgggcattacgaagcgcacgacagagtgtgggcagagtggtggacacctaagctcggagaca

SEQ ID NO: 138995 - DNA, 246 bp, Zea mays
  Clone ID: MRT4577_58247C.1
attcaggtcatattctggaccctggcctgcgcctttaccgtgtattaaaaaacataccatcccataccaacaaaaaataaccctccgcgcctgctgacaatccaaaaaaacacacccctatctattttaaacaaagcatccttttattcaacaaacaaccaccctttctattaaataccggccaaagaggcgtctaccacttcctctcccggcgccagcgcataaaattccaccgcggacaccgtc

SEQ ID NO: 138996 - DNA, 355 bp, Zea mays
  unsure (1)..(355): unsure at all n locations
  Clone ID: MRT4577_58248C.1
nccacgcgttcgnccaagagtacgcttttattgggcacggcagtggcacaccttggtcttccttttggtggttgttttactttactctttctgactttcatttaactaattggcatacgatggtgtaccagtaacaagtgatgacgccacaacacactttgtgttcactgagatggatgtacttttcctttacacaaagccatttgtctggaccagttcaacaattcaatttaaccatcgcgttggaacaaatgaacatgatatacgatacttatcgaaatgctatgtggcgaaacgtggaaaatatttaattaagctttgctttggcaacaattattaggttcacctttatttt

SEQ ID NO: 138997 - DNA, 350 bp, Zea mays
  Clone ID: MRT4577_58249C.1
ctccgtgttgcttcccttggcagagaggaagacaaatgcaccatttctgacacctgagaagctgttcaagcacctacattacttccagaacttggccatgcacacctacctgaatgggcccgttgacgtgatcacatatatggccataccgattgcacttgctgacttcagcatattcatgattgggcatggagcttataacatatctcatcgggtagcgaagaaagagtgatcttctcctgcataactattgtttctgtttgccatggaatagataccgcttagactgctaatttctcttctgttgcgaaacaatacggccatataacaattcaactacatattcgcat

SEQ ID NO: 138998 - DNA, 661 bp, Zea mays
  Clone ID: MRT4577_5824C.1
ataccctactcctctgatacttatcactccgccggcaatcgcctcccattctccacctccgatgatttcatatcgtgttccgctacctctgctgagagcataaagtggacgcaggatgttgctgcgcaaatcgccatctatctcttgactgactactcttgcttttcgtgtgcttactcgatacgtgttaagatcatcgccaacgaccagtgaatccgcaccacaccctcgtacgtcgccttcaccgaatccgagcgtctcttttgagatgagcgcattaatcatctagccatgaaccccatcaactcctttttttatgccaagcgactcattgtcaggaggtttatggactcctctgtcgagagtgctatctaatctgtggaccttcgatgtcattcctgacatcctagtaaaatcagtgctaggtgttccgcaccaggacgaggagaaataggatgcactcgagaagatctcctctatggttctcatcaagatgcacgacatcgctgaacctgaccttggcagcacgatcaagaatgctgatgtcacagctcctgcctatatacgcgactcgcagaggccacccacaaaggatgctggtgtgattgctggactcaatgtgctgcgtatccattatgaaccaaccgctgctgctattgcc

SEQ ID NO: 138999 - DNA, 547 bp, Zea mays
  Clone ID: MRT4577_58250C.1
aggcttgtggatctcgtagagtgttttggatgacagagccaaactgtcgaagtgccaaaagcttcctccaagaccttcgatgctggctttaaggatcaagagagcagtagcttttcacaagtattacgaaggcatatatgatagtggaagaaggttgaaaaaaatagtactacctctgttctcgaatatttgtcgctggctagttcattttttgaactaaacggtgacattgtgacaaataaaaaagaacggaggatcaacttccacacttacgaccgtacgttagactctatatttacaagatgtccacagtatgcctcacattctttagtatatattggactttttccatgcttcccgtgctgactgccgataactttcaagagttctcgaaggttactcctctaacgtagacgacgtaccttggggaccttttgtgatatactccaaacgacttggtcttcctctcccaaatgtacgtacgtactttgcttatattgaaggaatgcgtttattccattcgttcaacaaagtcgacatgcatggg

SEQ ID NO: 139000 - DNA, 339 bp, Zea mays
  Clone ID: MRT4577_58251C.1
aaaagcattcattagttgaaagactagaaattgttctgtagtgaatatgcagacacaatacgaccccacacacggaccacttaataggacagtggcggggcagcacaaatgataagcaaggggcagatcaagagaggacaacacgtaagagccagaaaaaagcctcgaagaagggggggagaccagaccaaaagctttttccgaaacagaggaggcaaaaaaagcagaacaccggttgtgggcttgtaggggctcaaccacctactaaggggagtctgtgcaaaacctcccaaagggcccgtaaggacgccggctttgaggaaagggcccggttaaaaa

SEQ ID NO: 139001 - DNA, 1675 bp, Zea mays
  Clone ID: MRT4577_58252C.1
ttgggtacctcgaggcgggccgggatttttttccaacaatcagtcagtcacaagaaaggaacaacatgaaagtgatctccatgttggaaacctaaaaacaagggagagaaaaaaaaaactcgcatcgcgtccttggttcctcgcattagccacccactggattttcttgccaacgagcttcgactacaccaacgccgcttcgtcccagtgcttgctaatcatcggctcctcttaattgcagcaaccaccacgcttcgtgttttcagatcaaagaagtgggggaacaacacagatttggagcggcacgccagcaatacggaccgggggtgacctgaggcgtggagatttttggccgctgcctgcatctccacgtcgcggtcccaatcaagatcattatttctttctccttccttgtccccgcccaaatcgcaaggcttcgttgcgaatcgcccttggcgtggccccaggattcgacgccccagcgccctcgctggaatcgtgggcgctgtggaggaggactcgaggcggccgtcgcgcttgtctcgtctctcatcaatctcactctctctctctggtctctctctctctctctctctctcctctctctctcttttaaccgcggggattcgccctgatttagaggagcgagttgctggtctcggcgccgcctagctcgtcccggaccgacgatttggggcagggcaggtccaaaggcagcagcatcatggaagattgagaaaatttggaggcatctactacagggttttcctgtgtgccctcaagacagggcgctgtgccgtgtgggcctcctcttgggcatccatggggttcctcagccttgtgggcaactcctttgggtgctctgcttccggtgagcgtcttgtctcagctgcccgcgacggcgacctgcaggaggcacgcgcactcctccaatacaaccctcgccttgcccggtactccacgttcggcggccggaactcaccgctgcactatgccgcggcgcaaggccaccatgagattgtctctctgttgcttgaatccggtgttgagatcaaccttaggaattacagggggcagactgctttgatgcaagcatgccaatatggccactgggaggttgttcaaacactgatacttttcaatgcaaatgtgcacaggacagattatctgaacggtggaactgctctccattttgctgcactgcatggtcatgcccgatgcctccgtcttgtgcttgcagattatgttccaagcgtaccgaatttctgcaccctggtgaatcataagtcatctgaagaagattcagctgctgattttgatcatgagtatgcaggatagctagcatgttttctctgtactagtttattttagtgcacaaatcatgtgatagtatgtctttgttaccagtgctttggtcaagatggtgaatcagaaggcggatggaggtttaaccccacttcatatggcagcattaaacgggcatgtagagtgcgtgcaattgttgctggacttaggggcatctgtttctgaggtcactattgaggatggaacaactatagacttaataggtatcacttttgcctttttggtcgcatactcttgttgtaagtgcttaaccttggtgagaactttgtagtaagcaaatcaacaccaacctatatgattctttgtcttg

SEQ ID NO: 139002 - DNA, 133 bp, Zea mays
  Clone ID: MRT4577_58253C.1
aacaaggaccaacaagagccatgggggtgatgcaactagaacaaatcgcaatgcttaactagcaatgatgaataagactatttgtatacatgcatcgatgttatatcgctagaaactcaacaacacatagctt

SEQ ID NO: 139003 - DNA, 218 bp, Zea mays
  Clone ID: MRT4577_58254C.1
ataccttccgacctcccccctttttttttttttataataaatcacccaccaggggaatatttattcattataactccattccattaaattctataataaatactatcccaacttttcccaaaaaacaattaccaatcatacccataatccataaccctttaatacataccaattattactacttaacaccaagtggcccacttttaaaattacacaca

SEQ ID NO: 139004 - DNA, 464 bp, Zea mays
  Clone ID: MRT4577_58255C.1
ggcggccacgcgtccgcctagcggcctcccttttttttttttttttgtatataatgaaaaaaataaattcaaaggtacgttctttattacataaaccattcatacccacattttcacgcagactttcactcagacaattctaaatcctaaactatatactacacttaaacatccctttataagacatcgtctaacccaacaaggacaccaagaacgtacctgttgaaatctttactaaactcgccacaacattcacttaattattcaattgacgaatctgcttaggtaggtcctttttgcgcacacttattgaaacaacgaaaaaaaaaaattactaaaaaaaccacttgcatgacctgtcacaatcccaaagcccgaccaaatgctccaacaactaatcatacaaagatccatctacctcttggcccgacccttggccccgaacttgttcatgttcctcttca

SEQ ID NO: 139005 - DNA, 495 bp, Zea mays
  Clone ID: MRT4577_58256C.1
caatgacatcaccctgctgaagctggccacacctgcccgcttctcccagacagtgtccgccgtgtgcctgcccagcgccgatcacgacttccccgcggggacactgtgtgccaccacaggctggggcaagaccaagtacaacgccaacaagacccctgacaagctgcagcaggcagccctgcccctcctgtccaatgccgaatgcaagaagtcctggggcaggaggatcaccgacgtgatgatctgtgccggggccagtggcgtctcctcctgcatgggtgactctggaggccccctggtctgccagaaggacggagcctggaccctggtgggcattgtgtcctggggcagccgcacctgctctaccaccacgcccgctgtgtacgcccgtgtcgccaagctcataccctgggtgcagaagatcctggccgccaactgcgcccgcagctcctgccacccctgccttaagatttcccattaaatgcatctgtttag

SEQ ID NO: 139006 - DNA, 404 bp, Zea mays
  Clone ID: MRT4577_58257C.1
cgcgcgtgggctcggtgttccgagacggctctcgtcgtgctgccccaactcggcaactccccatcagctcaccccgatctagggtttcggcaccatccgcttacgcgcctccccaccaagcaaagttgagggcccgcggcatctcccttcgggcgccatggcggctacagggcaggagggggatgacgtcgaccactacgaggtactctgcctcccgtcgggggaggaaggcgcggcgctgaccatcgagcatatcgagaaggcctaccgaacgcagtcgcggctgcgccaccccgataagcgccccgacgaccccaacgccaccgccgacttccagctcctctcgagttcctacaaactcctccgcgacgagtcccttcgccgccagttcgacgcgcgcctcc

SEQ ID NO: 139007 - DNA, 339 bp, Zea mays
  unsure (1)..(339): unsure at all n locations
  Clone ID: MRT4577_58258C.1
gagcgagctgtccggccaaaccctcacggccgcctccacagtgccgcgccatctcgcgctgctcctgcccctgctcctgctggcctcgccggcggccacgcgcctggcgtccgccgcctgcgcgtgctataagttcccggcggggcaagcgtacggggggtgggaggacctnccnaagctgggcgcgtcgctgcactgggcgtgcgaggcgtgcaagagctccctgtcggtggtgttagtggcggcgcccgcgggggctgccggttgggtggtgtggggcttgttccttcgggctagggcntgtgcttnnngtaggtgctgggggtnctgcgttcggtc

SEQ ID NO: 139008 - DNA, 278 bp, Zea mays
  Clone ID: MRT4577_58259C.1
ttgggtggtcttcgtgggtgtcttcttgctcacgaaggcgcgggaatctggggactgcatagccgtgtgggctgtgttgtgtctaatgtcagagtgggtgagtgacggagagcgggcgagagctccgtcgttttatagctgctagctagtcacttgtgcaggacttgcgaggaacgactagtgtgtagattaattatggcaagacgatgatgatcggcgcacccacctgaactggggactcgtgcaacgcatcagttaagatccttcagttggttctt

SEQ ID NO: 139009 - DNA, 1504 bp, Zea mays
  Clone ID: MRT4577_5825C.1
ccacgcgtccgaccattcccttctccctttcctcttctccacgcttcgcccctcgccgactattttaaacccacgcttcttttagttctttcttccccgtcggcttccggagtggaaaccattttcctaccacccgcgggagatccacacgcccacgagcagtggagctcggcagcgaggcttcggagttctgccattacaaggggttctattcgagcaattatcttcccatgacaccaaagagtgtgaatgatatccacaaacgaggtggtacagttcttggaacatcacgaggtggccatgataccaaaaagatcgttgacaacattcaagatcgtggagctattcaggtctacactttaggaggtgatggtactcaccagggcgcacatggtgccattaatggagccggggacgtggtctacaagtagctgttgctggtattcccaagactattgataatgatatagcggttatagacaagtcatttggttttgatactgctgtagaagaagcccagcgtgccattaatgcagctcatgtggaagcttcaagtgctgaaaatggaataggtttagtgaagcttatgggtcgctatagtggatttattgccatgtatgctactcttgcaagcagagatgtggactgctgtttgattcctgagtcacccttttatttggaaggggagggtggactatttgagtatatagataggaggttgaaggagaacaatcacatggttattgttgtcgcggagggagcaggacaggatcttattgctcaaagtatacctgctgcagatcagcaagatgcatctggaaataagctgcttcttgatgttggtctctggttgactcacaagattaaggattattgcaagagcaagaagatggagatgactattaaatacatagatccaacttacatgatccgtgctattccaagcaatgcatcagacaatgtctattgcaccctgctcgcacatagtgccattcatggtgcaatggcgggatacagctttacagtcggaatggttaatggcaggcatgcatatataccatttcatagggtaacatctacaaggaacaaggtgaggataactgacaggatgtgggcgaggctgctgtcttcaaccaaccaaccgagtttcctgagccagaaggacatcgacgcggccagagaagccgacaaggcggccaaccgcacgaagagcagagaggatgcgaagaagcaatctacaccagtgttggcaaatggtgagaaatagtgtgcttttgacggttctttgttgtatgcagtagctgctgcaagctggctgagatcagtaggccaaaactgcgaggtcgatgagttttacttccatttgcatccgaacagaattcacgtaataaaagcttcatagtgtgtatttgcgttagtaaacatatactggtgcgctgcaatttgctcgtgttgctaaaaaaaaaaaaaaaaaaaaaaaaaaaaaaaaaaaaaaaaaaaaaaa

SEQ ID NO: 139010 - DNA, 422 bp, Zea mays
  Clone ID: MRT4577_58260C.1
gcgtgcgcacagctgcaaatgatcccttggctcatgacctctctgttgccgattaaaccgtgactagggtgcacagcttcatcgcgactacatgcgtctgattgcacctgtaggtggatcggtgtgcaatggacgctgctgatgtgcttaacaccggtctggtatggaaggtcgtcttgcttggagcagtgatgttgccagcaacaaaaagatatcaggagcaccctttctacctaaccttgaataaaatgtatctacgatcccacatgcaaaaacagttgcaaaaataagtgtggttcttcagcaattactggtgtttgacgcgtatgcactgggtctattccatcttgtctcacaggataatctattttatttagagataaaaatcgcttgcttacaaataaataaagctctttattttt

SEQ ID NO: 139011 - DNA, 248 bp, Zea mays
  Clone ID: MRT4577_58261C.1
attcggctcgagggcaactgctttttcttttaggacctccaaggtagaaacatcctgaagtaactataaggcgctacggtcactcgcatcatggtgtcctgcgattctacatggatcaggactgcctctcgtgtcctacagaatgacaggactgttagatcatcggctcaacatagctgatccatttgcaggtgccgactacgctcacaccacacctaagcagcacttgagtaccaatgagaaaacat

SEQ ID NO: 139012 - DNA, 708 bp, Zea mays
  unsure (1)..(708): unsure at all n locations
  Clone ID: MRT4577_58262C.1
cattgggtacctcgaggccggccggggccgccacctctagagagaactgtagatccctgtcatccaatcacccaccatgcaatacctcaccgatgttgctcgctccaaggacctgctcaaggttgtaggccattcggtgatcaaggcgatgtgcgatggggagttcctcatgtcgaggaaatgggccgtcggtggccacgattgggaggtccacttgcgtcccaaggatcactcggagggccacgagcgcccggtgacgctgaggctcgtcttgatctccgaagcgcgcggcggcgacgtcaaggccaagctcagctgccgcctggttgatccgaccgggaggctgaagccgtcgaaggagaatagcaaatcgcataagttctacaagtccggcgattactccggtgcaatccaggtgacgggaagagaggatctggagaagtctggctacctggtggacgattcctacaccgtggagtgcagcatcacggtgctaaaaaaagcgccggcgcggaatactgcggctgcggctgcggcgacggccatggatcgcgatgctgcgatgctgccgtccctcgaactgcaccggcacttgngcgaacttctgcagaaggggacgggcgcggacgtcacgttccatgtgtccggcgagaagttcgccgcgcacaagggcatcctttgctcgagggtcgccggtgttcatggcgg

SEQ ID NO: 139013 - DNA, 348 bp, Zea mays
  Clone ID: MRT4577_58263C.1
ggcgggcgggaccctcagtgggcaagatcacaagtcgggttgtcatgcgagagcagcgatatcgatgaatttgtgatgacaccgccagcgccgaggagtaacgccaacatccagtcctacatcaacctcgcctttgatgtcgatgacgactcagcctctgtcagcagcaacgacttcattgcagccaacacctccttggaagagtatctgaagggaagatggagccggtcgtcgagctttgactgacggacccatggtagtctcatccaaagaggtgacaaataaagtcgggatcatacgaaactgtggctttctttccatacctaaatcaatcatcttttgttctgc

SEQ ID NO: 139014 - DNA, 2680 bp, Zea mays
  Clone ID: MRT4577_58264C.1
ccggccgggccgggacttttctttcttcttggcatctcagttgcagttcccctctctctcctctgccgtagcgaggcaggcaagccaccaagtccgagcctcggaggcatcgaccaacgccggcggcagcggcgccatgaggctgctcgtccccgacggcgcgcgccgccagcggttgctccagtgcgaggcgcccccgtcgccctcgccgccttccccgtccccgtacccgtcgtcgtccccgtccaggacggtcgtggtggggatcaggcgcgacgccgccagccgcgagctgctcacctgggcgctcgtcaaggtcgccaatgctggggaccgcgtcgtcgcactccacgtcgccaccgcggccgccgccgacggtttgctcgtgagactggatgagcgcagcagggccgcggactcgctcgcctccgtgctcgccgtctacgacggtttctgcaacctcaagcagattaatttggagctcaaggtctgtggagggtcatctatccggaaaactctggttaaagaagcagctgcttgtggcgcagcacatctcatccttggtgtcacgaacaattcccggtccttcggatcctccttgacatcagttgccaagtactgctcaaagagagttccagccagctgctcggttcttgcagtgaacaatggcaaagtcgtttatcataaagatgctggtcacgggttgcaacatgaactgtaccaaagcaataccacgatacctgagacaccaaggaggagctaccggaagctcttgtcgaccatgataggggataaactctgggatgagaatggaaaagacagaaggtgtgtgtctcgtgccgtcaccatgccaatgaggtctcccgcacggccaaaagaattttcactggcattagtcccggtgaagggttgccaacacgaatcgccagcggtagcaactggctggcccctacttaggaagaagttcttgccagaccggaaagcttctgcgcctgacaagtccaagatgtctgtggtgcagtgggcaatgcggctcccaagcaggtattcagcagtatcgccagtccattcagaatacagaaccacaaaaccggactccacgagcgccagccatatcctccgtgaccgtgtgattgttccctcaaggagcaattctggaaagtcttgtgtagtgattgaagaattggagaaggaaactccagaggaactgacgttgctcaaagagaaattctcatccatttattcttcattcagttacagtgaacttgcaaagatcacctctgacttctcaccagagtgtgtagttggacaaggaggcactagtcaagtttacagaggctgtttggcaaatggcaaggagctagcagtgaagatcctgaagtattctgatgaggtactgaaggagtttgtatcagagattgagattgtcagttctctcagccacaagaatgtgatatccctcgttggtttctgcttcaagaatgatgaccttctgttagtgtatgagtatttgcaacgaggcagcctggaagagatactgcatggtaaaaaagaatgcaagagcatatttggttggactgagaggttcagcgtggctatgggagttgctcgtgctctggattatctccatagtgataacaacagtcgtccagtgatccatagggatgtcaagtcatcaaatatcctcatttcaaaatgctttgaaccaaagttatcggactttggtctcgcagtctgggctgctgatgtgacatctcagatgacatgcaatgatgttgcaggaactttcggatacttggctcctgaatacttcatgcatggcaaggtgggcaacaaaatcgatgtgtatgctttcggtgttgtacttctggagctcatctctggcaggaaaccactttgcactggttgtccaaaagggcaggagagcctagtgatgtgggcaaattccatcatacagggaggaaagctcagacaacttgtagatccaaacttgcccactgaaggccatgtcgatgaagttgagaggatgacccttgctgcgtccctctgcatcagacaaacacctcagaaccgtcctgaaattgatgctgttctgaagcttctccacggtgacaatgataccctcaagtgggcaagatcacaagtcgggttgtcatgcgagagcagcgatatcgatgaatttgtgatgacaccgccagcgccgaggagtaacaccaacatccagtcctacatcaacctcgcctttgatgtcgatgacgactcagcctctgtcagcagcaacgacttcattgcagccaacacctccttggaagagtatctgaagggaagatggagccggtcgtcgagctttgactgacggacccatggtcagagttaaccctttattagtgtatagatcgttcttgttcttcttctaatttaagtttcaattttgcgccttggatgagagttggcacctgcaatgccctccaccaggaaatcctttgattatgtcttagttatttttttccttttcttttgggggtccctcttactctctgaagaggcaccctgttgttttactgtctgaagagacttatcatactcaggtagtctcatccaaagaggtgacaaataaagtcgggatcatacgaaactgtggctttctttccatacctaaatcaatcatcttttgttctgc

SEQ ID NO: 139015 - DNA, 177 bp, Zea mays
  unsure (1)..(177): unsure at all n locations
  Clone ID: MRT4577_58265C.1
gcgcttttctgttcccgctgggcagtacgcgntttatctggtggcccggcgggagagcgccagggcgcatgtcattcgcaccagggcccaacctcgcctacaacctgtcgttcggcgtcggcgacgcccggaacggctgccacggctctatgcttgtggaggcgttcgctggcaacg

SEQ ID NO: 139016 - DNA, 607 bp, Zea mays
  Clone ID: MRT4577_58266C.1
actcctatgggcgattgggttcatcgaggccggccggggggtccaacatcaacaacagagaggaagagtagagagccacggcgaagatcgaagccaaacaaagatggcgcggaggaccaccaccaccagagagcccgccgccgccgtcgtcttgatgctactcctggcggcggccacggcggcggcggcggaggaggaagcgttgccgatggaggcgtacttctcggcggcggagctcgcgcgcattgccgggtacggcgaggagccggtgtcgtcggtgtccgtgtccgggcaactcacctgcgagctctgcctccgccccggctcccccctcctcgccttggagatgccaggtgctaaggtagcagtgacctgcgactgcgagagccaccagcatcccagcgacgaaccggacagccacgcgctgctggccgcgacgacggacgagtccggcaacttcaccatcgacctccccccgcggctccacgccacgccggacctggagaaggcctgcgccgtcaaggtgctccggctcccgccgggctcctcctcctgccgcctccgccaccgcgtcgccgacgcctaccgcctcatgctggtgtccgcg

SEQ ID NO: 139017 - DNA, 2270 bp, Zea mays
  unsure (1)..(2270): unsure at all n locations
  Clone ID: MRT4577_58267C.1
ttaacatagtaattaagttgtacatgctctaggaacatgtttggctgagctataggataggttgtgctcggtagatcgtttatatggtcattgcactgtatattactctgtttaaaaaaatgaagtttgaaataggtggtgtggtggtaggtgggataggaagtctgctagagatagcctttatgaaaatgttggtgtgcattatggacttttaaaaattgttttgaagtctaagctatgagagaaagttaaaaatgtgtttaaccggccgggaaaaaaaaccggagaccctgataacttatccccaaattaaccggtagcgtaaagccggtcgatttccggaccccatattttcttctatcttcccagctgccgttgccggcggaagaagccaattgacgtgatccccgccgccaagcccaaccccgccgaccggagctgcatcctctccttctctctcccataccacgacgagacgatcccatcggcgcccgcgcggtcccttcgatccaagcaagcgtagtcccttgttcctagtataacctctaaatgattccatgggaactccaaacgaaatgatggcatactcttccctgtccaaaatggacaccagccagaaccacggagctgctctgtccaatgtagttgctggaaacaactatcctgttcaggattatctttatgagcaagcatccgaaccagacttcccagagtatgattcaagggatgacctgttcgctccaacacgagctagtccaaaagtcaatctaaatactgttctaggtggtctggtttcgattgttacaggtgtaaacaagagtgaggatgatgcatcgcagcatgaaagttttagcacagacatatcattccttagatctgacaagaatggtaatgtcaatgtgcacccttccgtctgtgttccaagtgccccaccactacttgaagcgaatgctttacaatatagtgcatacaaggaggtgttgctagcagatccaccagagtggttgccagatagctctgctaatgtgtgcctacagtgcaacttgcctttcacggctctgactcgtggaaggcaccattgtcggttctgtggaggtatattctgcaaaaactgttccaaaggaagatgtttgatgcccatgaaattcaggatccgtgatcctcagagagtttgtgatgcttgctatgagaggcttgatccacttcagggattattgatcaactacaatagtaactgcatgcagcaagcaaaacacgatgtcatggattggacaagcactagaagctggttgaacatgcctgttggtgtatcaatggagtatgagatatacaaggctacaaacacaatgaagaaatattgtcaggttgctagattaaaccctgagaagtccatcccatcatctattctcaagggggcgaagggacttgcaattctaacagttgccaaggcaggtgcagttcttacatacaaagttggcactggtcttgtggttgctcgcagatctgatggatcatggtctgctccctctgcaattttatctgttggcctgggatggggagtgcagattggaggagaactgacagacttcatcattgtgcttcatgaccgtaaagctgtcaaggctttcagcagtcgcattcatctttcacttggggcaggattgagtgctgcagcaggacccattggcagagcatttgaggcagacgttcgggccagtgaaaagggttctgggatatgctacacttacagctgcaccaaaggtgccttcgttggggtttcactggaagggaatgtggtgacaaccagaatggagaccaatctacgcttctacggtgatgcatacctgacggcaaccgatatcctgtttgggagggtggagcggccccgagctgcccagcccttgtactcagctctagatgatctgttctccaaaatggtttgctagcccatttagattggcgtgatactctgcattggtggcatgcagtcatgtatgtatataaacataaggtagcagcaaaaatcctaaacaggagatatggaagcggaaagaatgtacagcttttgatggatggtttcactactgatagcagtccatacatgtaaatattggcagaagaagatttaagggctgtttggttcgcacactactgatatcagtacgctgcagtgtgccactggtggactcatccatgcaatggaaaattttaatacatttgttaaaaaaaaaaaaaattaaaaaaaaaaaaaaagggagggncgcggtacc

SEQ ID NO: 139018 - DNA, 255 bp, Zea mays
  Clone ID: MRT4577_58268C.1
atttcgggaattcaatagcaactttttattatcaatggagaccaagatatggtcgctccttatgctctttgctctttctacatgtgttgctaacgcgatcaatttccctcaatgcttacatgctcctatagctccccttcatcctccataccttccatcaattatagcctcagtttgtgaaaacccagcatcttaaccatatatgctataacatgcatccgcatcaagcaacatacttttatcgcccttgttgtg

SEQ ID NO: 139019 - DNA, 285 bp, Zea mays
  Clone ID: MRT4577_58269C.1
aacacattcctgggggggggggttaggcgagggggacatgccaacgaaagaggggaaaatatattctaacacataccctttcgtggctagacaaggactcattagaagacactatgctctaggcgcgccgcgagtcacacataccaaacacgtgaggcgaagccccaggctataggccacatcatttactactgataccgccttatttcgagcgattatcggtgctgttaaaccttctttataaacgggaatccggcatcggagtggcgggccctttaagccatg

SEQ ID NO: 139020 - DNA, 1059 bp, Zea mays
  Clone ID: MRT4577_5826C.1
ccgggcccgttcccctcgtcgacacctgcagtgccaagttgcatcgactcctccccggtcctccaccgcccgccgccgatggatgtggatgtggacgaggccaccgccacccctgcctccgcctctgccaagcccgcttccaacggcgaggccccctccggcgcccgcgaggtggatgtcggcgaggagtacacgctcgccggcgttctgcgcagcttcgtcgacggcgtctggtacccggacgagccgctgctccggcggctccgggcggcgtcctgcgaggccgcgccgcggctgaagggggcgtctcggaactcagcgcgggatctgctcgagtggacaaggcagggcagcggcctccgcgccatcctcgtcatctcggtcgggacaatcatgcctatagcattgactggccttttaatcttcatgttctttctgctaattgccactgctaatgcgatcatcgtctcagccctgatgtcactggccgctgctggcggattcttggctatcttctttgcttgcttggttgcagtgtatattggagcagtaggagttgctatctttgccatttctgccattgtcatctcatcagttgttggagttatgattactactggttgggttgggttcttctggatgatctggttcaccgcaaggaagagcatggacctgacgaagcattccatcagcatgacgagctcggcagtccaatcctattccgcgtcccgccaagtgaagcagaagcatgtcgactgaggctagttggttgcgtcttgcgtcctgtatgaagaagccctcgggtcggtatctgggtgaattacggtagacgacatgcttgttttggcagttctgtttttctcggacactggtgcataaatactagctctgaacttcggcagcgtgtacgtttgtcacggcggccaatgctgttctgtatggtatagtgatcagatgattgtacattgtgcaggtatgcagtatgtacatgccgattcatgagttgataataaaactatcactatattttttttccaaaaaaaaaaaaaaaaagcggcc

SEQ ID NO: 139021 - DNA, 335 bp, Zea mays
  Clone ID: MRT4577_58270C.1
agaagaaggaggggattacctaagatgtatttcaccccaaaatacaacagtgtatgccttagacaacgcttcctgccatgggatgcgcattccaagcggaggcagggcatctccccaaagaagaaagaacaacgccacacacgcacacacatatggatcgaccaattccactataagtgaacgacccgtaccccgggggcacaatttggaaaccttcacgtggacaagtcttattttttcatgaattttactccttcttttgtcctcctatacacatccacatgggaatcaatggatggtggggccactattgttttagcttacatagacgggca

SEQ ID NO: 139022 - DNA, 128 bp, Zea mays
  Clone ID: MRT4577_58271C.1
tttttctctttatattctcctcccctattcaaggtttcacaactggtggcgagatctaaatgccttcgcttagacagaccaaacacttttctattcaagtctcatgctacatctcccttgaactcatc

SEQ ID NO: 139023 - DNA, 350 bp, Zea mays
  Clone ID: MRT4577_58272C.1
gagcctactagtcggcggccgcccttgctttctttcggggccagttgacatagatcgtgccgttggcagcaacttatagctgattgaccatacgatcacatggaactatgggagtgcaaacacatgtgtagagcagatctctataggagcacggacaggatctctttcccgagatgtcttactaagcattaggcctgcacacatggcaaaccttgacagtcgatgagccaaacactactgatcaacgcatctgtggaggaggcgtgatccctttccagcttgacgtgcaagctctacttggtgccacggaggtgatatccactgaaatacccatccttcagattgctaac

SEQ ID NO: 139024 - DNA, 752 bp, Zea mays
  unsure (1)..(752): unsure at all n locations
  Clone ID: MRT4577_58273C.1
tttggnaccacaaacaccagcctaccctgtagaatatatgggcactcaaatagtaagggaacaaacgagtggtagcctcactgccattgttgtggacgaaaatctatgccatgccagggctgcaagctgcatgcttgccaacctccagtgtaaagtgattgtgtatgcgagtcctgttgatgcgctcaagtttcttaaggatcaccaaagagatactgattttgcgttagtggaagtcaacatgaaagagatgcatggttttcagttccttgacatgtccaggaagttgcacaaaagccttcaagtgatcatgatgtcagctgatacgacatggcccacgatgaagagaagtgtcgagcttggtgcacgtttcttgattaaaaagcctcttgatgcaaatacgatgaataacctgtggcagcatcttgacctaaaatttcaacggaccgacaagatcaaggccttattcccaggttggagctactgtgacatgttttctttttccttttgaaaaacgatgtggcacttgttgaactccgtagacaacagcaaaaggtgtacatcgacttcagttaccgtttcaatcaaatgtttttttttgtcaaatcaccattagtattgtagtccgaaaaaacgcatattactcgctaccttgcatgtgaatcatataggtattgaagggaaaacggggaatgcatttgaggaagggaccaagcagaggggaactcacttgatgtggactccattcctgc

SEQ ID NO: 139025 - DNA, 134 bp, Zea mays
  Clone ID: MRT4577_58274C.1
cagaaccaaaagtgctttaagtccaatacttaaatttcaaaatctcaaaatttagcattatatcctgctctttctgaaggaaaattcctaacatttacttatggggggcatgaaataaaaaaaggtttttccat

SEQ ID NO: 139026 - DNA, 511 bp, Zea mays
  Clone ID: MRT4577_58275C.1
ctaaactatacctaaaccccaggaatactgtcgatggctactggtgtaccactataggattagaggactgcgggctgctttcttaatgtgcatcaactgtcattgcactgaaagggacatgtgctgaaatatggcttgtatcattaccgaggactttgaggtgctccaagcacactactgcttgcgctcactgtgttacaaaaaccactctagtccaaagtttatccgcttgacacatctgatgatgtcactattctgaacgaacccatcaggatgctcacaagaggctggaactggaagactgattcaggtgaataatgtccctcatataactaatcactcgatattggcgaccaacaatgctaactcacatgttaaccagctcctaggacgttatcacaaaatgtctcccatgtcagaacagatgactgttccaaaagataactctactctacacaatttccatgatcagtaacttacctactaacaactgcttctacgacagctccat

SEQ ID NO: 139027 - DNA, 590 bp, Zea mays
  Clone ID: MRT4577_58276C.1
cgcacagcggcacgcagactcccaattccaaaccctagacgttgacggcgacggcaggtcgacagctccagccaggcagccagccacgagcccacgacgaccgtggaggcctcacctcctcggctcttcatctcacgacggcgcagcctgcaagcgggaggccgctctgatccctcgcgccggacttgacgacgggtgactgcctgactgcatggcatctgcaagtggcagtgggtgcgcaagcactggagcatcccttgttgctgcgaacaccctggctatggctgtgcaagacacaactccagttaatggagttggagaaggagaagatggagaaagaacaactgatattggagtgaaagagtctgatacaaagaaaaggaaaccaaaaagacaaacatctggtgtttgggactactttatcaagtccactgtgacagagaagggagataagggcgagaccgaggaacaaatttgggcaaaatgcaagaagtgcaagttcaaaactcgtggtgaatcatcgaggggcacaactatcttctggaaccatttgaaatcaaggcactacatacatagagggcagcaagaac

SEQ ID NO: 139028 - DNA, 600 bp, Zea mays
  Clone ID: MRT4577_58277C.1
ggccggccggatctcactcccaaaaggagcgtgggcgtacacacatcccgccgctatcagaatcgtgcggctcgagacgatctccgatccgacactcacatatcctccgttccctatgccgattgttgtgaacaccctcatcggcacaaactatcaccatccacgtgccaatttctgaaggcactgacaatggcaaggctaatatccatcacctcgatgacatccctcctgaccaccaacggctaatatacgacggcatttgctcctgacgacggacgcacatgttgcatgactacaacttccatgaacgactcacaacatcgaattgttgctgccccttaaggaatgcatgaaaaactttatctagaccctgactgagaaaacaaacaaccgtgaggaggcacactattacctcactgacccagtatagtgaaagattccatgacgaagagaacgtacctccagaacagcgaacgggtcatctctgacgattattatgtgtaggatgggaggaaccttgttaactacgacatctctaaagaaaaccacattatgttgaagatgctccacaggggcggaaaggagatatgtgcgagaacc

SEQ ID NO: 139029 - DNA, 253 bp, Zea mays
  Clone ID: MRT4577_58278C.1
ctaacactcacgataacaaatattgcctttcactatggaaggcacccatacaaaaggcgggcttcactagaaaggtgcccatcgtaccacatgtcgctgcttctgacatcttctgagagaaagacatgacttatcatctcaattacatggaggacaacagcgagggctcaaacaaaatctacatgctacatcctgaatgacctgtgcacgtccttagtttctcgacaaccctatctagtcgaaacaaaatcca

SEQ ID NO: 139030 - DNA, 540 bp, Zea mays
  Clone ID: MRT4577_58279C.1
gtagggaattacttaggactgaaaaaagaaccggaggcttgaccatctatgccttgctggtgcagtaggatactgacattctttttaaaaaaaacgaggagcgtactgacaatgataccatggactggctctgaagtctgaacacatgcacacacatccagacactattcgggtgggctaacagtcggaaatatcagatcttgctttccccgtcacaagcggggcggagactatgatggccttagtgttggacattcatcgtctagcgacgctgccaaggtgagcacagtggacccgaaccttaagctggtgcctactcttttttcgcacctgcagggtctggacagttcacacctccaattttttaccacccacgccttccgctttttcattggattactgaacttctcaacacttatgacccagaccattactcctgacggggcattcgggctagaactttttggcacacaccagggtatcttatatgaggccgaatacaatgcacttgtcttataaaagtgggtgcggaacttgaag

SEQ ID NO: 139031 - DNA, 1505 bp, Zea mays
  Clone ID: MRT4577_5827C.1
cagtcaaccccataaacatcaccccgaagaagaaatcacgggaagacatcatcagcaacgccggccggcgtcaccgccaccctcccctctcgcggacaccggaaaccatcacatcaaaccggaaaccacccttccctccagaactccagaccattcccttctccctttcctcttctccacgcttcgcccctcgccgactattttaaacccacgcttcttttagttctttcttccccgtcggcttccggagtggaaaccattttcctaccacccgcgggaggcgggagatccacacgcccacgagcagtggagctcggcagcgaggcttcggagttctgccatggcgtcgtcccacatcatcctgcccaaggaggaggaggaggaggcggctgcggcagcggtggcggaggtcgggttgggagcggcggtggaggcggaccacgaccaccggccgtaccaggagcaggggcccgggaaggcggcgctgccgttctcggcaacgtgcgtccggatctcccgcgactcgtacccgaacctccgcgcgctgcggaacgcgtcgaccatgacactccacgatgatgacgccgccttcgtcaagctcgaggagggcgactacggatacgtgctcgacgacgtcccgcacctcaccgactacctcccggacctccccacttttcctaatcctctgcaagatcatcctgcgtattcaactgtcaagcaatattttgtcaatgcagatgatacagtccctgaaaaggtagttgttcagaagaacagtccacgaggagttcacttccgtcgtgctggacctcgtcagagggtgtattttgagtcagaagaagcgaaagcttgcattgtaacctgtggaggcctttgccctgggctcaatactgtcatcagagagttggtttgtggcttgtcccacatgtacaacgttagcaatgtcttcggaatacagaatgggtacaaggggttctattcgagcaattatcttcccatgacaccaaagagtgtgaatgatatccacaaacgaggtggtacagttcttggaacatcacgaggtggccatgataccaaaaaatcgttgacaacattcaagatcgtggaattaatcaggtgttcattataggaggagatggaactcagaagggtgcatatgagatttacaaggaaatccggagacgtggtctacaagtagctgttgctggtattcccaagactattgataatgatatagcggttatagacaagtcatttggttttgatagtgctgtagaagaagcccagcgtgccattaatgcagctcatgtggaagcttcaagtgctgaaaatggaataggtttagtgaagcttatgggtcgctatagtggatttattgccatgtatgctactcttgcaagcagagatgtggactgctgcttgattcctgagtcacccttttatttggaaggggagggtggactatttgagtatatagataggaggttgaaggagaacaatacatg

SEQ ID NO: 139032 - DNA, 684 bp, Zea mays
  Clone ID: MRT4577_58280C.1
ctgcagttttcgggccgacactcccgggtcgacgacgtgctgcgcgcgcgcttcattcgccgacaggctgacggcttcgcgtaccgcgcgctcgccccattcggcattgcgcccacgcaattgcgcgaggccgcggatgtacgcggcggcgtcctgcatcgccttgcggatctcggtcgattgcgtgtcggtcggcagcgcggccggtgtcgcggatgcctccgacgcgcccgacgcgccggccgccggcgctcgcggcgcggcagggttcgcgcccggcggcgtggcgccgccgatgccgagctgcaccggcgacgccgcgccgagattggtgccgggcgccatcgccgcgaagtggctcgcatagacgatgtaggtgcccgcgctcgcggcccgcgcaccgcccggcgcgacgaacgcggcgaccggcacgggcgagccgaggatggccttgatgatctgccgcatcgacgtgtcgaggccgccgggcgtgtcgagctgcaggatcgcgagcggcgcgcgctcgtgtgcggcccgttcgagcgagcgaacaatgaaatcggcgctggccggcccgatcgcaccgttgacggggatcacgatgaccggcggcgcggcggcgggggcagcggcgggcgggggcgcggcgacggccgcgcacacgacgagcagcgccgcgaacag

SEQ ID NO: 139033 - DNA, 2346 bp, Zea mays
  Clone ID: MRT4577_58281C.1
cccccccactataatgggcctgccgagcgcatgggccgcccctgcatgttggctgcacgcctgggccacttcggcctggatggcgcacctgggccgccccggcctagaggctggccgcgtgggccgcctcggcctggtggcgcctgggccgcccccatgggaccaaattggtcctaaaatgacctattttactattttaaattctgaattttaagtataagactatgttttatatatcaattcagttctaacatgtgttagtgtgtctaaattcaatatttagactgcaaattgtactatgtattgtacatacttgtctgattttaaaatgaaaattgcagactcgtttatgaagcggcacccgccaccgatcgagccgctccggcgagcgcagcgcagcccacggcatttgccgatttgtgaaggagcgtgaaaaagcccttcccacgctgggccccgcctccgcgacgcgagcccacacgtccgtttccggtgccttggccagacaggcagcccatgtgctgagctcacatgcctgccgctcccacacctcgccaccctcctgcctcctccgcatccgcgccccctcgcttagcctaaaccgcggggcagctagtctcgccaccgcaggccgcaccggtcatcacaccggagcgcacgcggggagcccccgtagagttccggggcgaccaggccaactaacgccatgaaggaggaaggcggcggcggggacgcggggttcgtgcgggcggaccagatcgacctcaagagcctggacgagcagctggagcgccatctcacccgcgcctggaccatggagaagcgcaaggaggaggcctccgccggcgctggcgccggcgccaggcagcaccagcagtcccggcgcccgcggagggaggactgggagatcgaccccgccaagcttgtcgtcaagggcgtcatcgcccgcggcacctttggcaccgtccaccgcggcatctacgacgctcacgacgtcgcagtgaaactacttgattggggagaggatgggcatagatcagaacaagacattgcagcactaagagcagctttttcacaagaggtctctgtttggcataagcttgaccatccaaatgtaaccaagtttattggagctataatgggtgcaagggatctgaatattcaaacggaaaacggccacattggcatgccaactaatatctgctgtgtcgttgtggagtaccttcctggtggtgcactaaaatcatttctgataaagaacaggagaaagaagctagcttttaaggtcgttgttcaaatcgctcttgacctcgccaggggattaagctatctccattccaagaagattgtgcaccgtgatgtgaagactgaaaatatgcttcttgacaaaacgagaaccgtgaagatcgctgattttggtgttgctcgccttgaagcttcaaatcccagtgacatgacgggcgaaactggaacgcttggttacatggcacctgaggttctcaatggaaatccctacaacaggaaatgcgatgtttacagcttcgggatctgtttgtgggagatatactgctgtgatatgccatatcctgacttgagcttttctgaggtcacgtctgcggttgtccgtcagaacctgaggccggagataccacgctgctgcccgagctctctatcgaacgtgatgaagcgctgctgggacgccaaccccgacaagcgacctgagatggccgaggcggtgtccatgctggaggcgatcgacacgtcgaagggtggaggcatgatccctgtggaccagcggccaggatgccttgcgtgcttccggcagtacagaggtccatgacagataggtggaaacctgttggagctgcggcctctagatctcgtggatgccgatcgatcgcgtgttgttttctggggaagcaaactggttaatggagctagcccgccttaccggctcgtgtaaatcctctgtccatcaattctgtaactctgttttatcgattaatgaaaagaaccgggcttgctcgactgattcctggccaaaaaaaaaaaaaaaaaaaagctaaattcagccgacgccgctctgtccgttctctgcactccgcacgcgctcgtctcgtggcgccgaaatagcctccccggactgccagtgcggcaccgattgggcacgtgtggcggctcgcgtgcgtgcgcgccagacgcgccccctcctttctgatgcctcttttggcaaattgcgggagttgacgggctgctttttttgtgaggtttcccgtgctgcgagcatgcgacgtgccaccccgtgacatcagttggatggatagggtggctttggttcactcgtgt

SEQ ID NO: 139034 - DNA, 1387 bp, Zea mays
  Clone ID: MRT4577_58282C.1
ttcctgtacagtttattggagctataatgggtgcaagggatctgaatattcaaacggaaaacggccacattggcatgccaactaatatctgctgtgtcgttgtggagtaccttcctggtggtgcactaaaatcatttctgataaagaacaggagaaagaagctagcttttaaggtcgttgttcaaatcgctcttgacctcgccagggggttagtattttactggatcatcctcggtctccctaaatctttatcgtaccgtttcttgttggataattattgtctgcattgactcttcaatcttcgttagattaagctatctccattccaagaagattgtgcaccgtgatgtgaagactgaaaatatgcttcttgacaaaacgagaactgtgaagatcgctgattttggtgttgctcgccttgaagcttcaaatcccagtgacatgacgggcgaaactggaacgcttggttacatggcacctgaggtaccttttcctgggcagtgacagacactcaacccctcctccactcctagctgctcttttatctcgtggtgtcatcacttttagctagctctggcacaataatagtaataaaaagacatccttgcatgaagcacttgtattagtctatgttatgtgccttgcaggttctcaatggaaatccctacaacaggaaatgcgatgtttacagcttcgggatctgtttgtgggagatatactgctgtgatatgccatatcctgacttaagcttctctgaggtcacgtctgcggttgtccgtcaggtaaagatctgattttccgccttgcatgcttgccgcttgcaagttgtaactctctagccgctgagttctgagcaagtggatgatactacaatactacctggtttacagaacctgaggccggagataccacgctgctgcccgagctctctatcgaacgtgatgaagcgctgctgggacgccaaccccgacaagcgacctgagatggccgaggcggtgtccatgctggaggcgatcgacacgtcgaagggtggaggcatgatccctgtggaccagcggccaggatgccttgcgtgcttccggcagtacagaggtccatgacagataggtggaaacctgttggagctgcggcctctagatctcgtgggtgccgatcgatcgcgtgttgttttctggggaaacaaactggttaatggagctagcccgccttaccggctcgtgtaaatcctctgtccatcaattctgtaactgtaactctgttttatcgattaatgaaaagaaccgggcttgctcgactgattcctggccgattgtccatcaattctgtaactctgttttatcgattaatgaaaagaaccgggcttgcaagactgactcctggccgatgc

SEQ ID NO: 139035 - DNA, 523 bp, Zea mays
  Clone ID: MRT4577_58283C.1
gccgaacagaaaaaacaggtactttggggggacattggttccggaacccaaacaaaaacgccgttgcaaaaatttaaaagctgcctaccgagggcggggatataagttttttttttaattggggaaaacaaggagttgcacccttggtatgggcgtggtttgtaccatatgtttctggggggagtatatggaaaaggggcctgcgggcaaataaggggatcgggttcggaggcataaaacgggggactgcatccccaggattattctagcaaagcccggcgcggtataaacgaaccggggtttagggcaatttaaccgagggggaatccagggctgaatcagggggggcgaaacccgaccgggatccggggccggggatcggacattcttacccgcgggcgcagcgttggatcctgggccccggaaagggttaggtggaaggcccgcccctaggcagaggggagagcccccaccgctaagaggccgagacaccctgccttggttagagggcccaaacctatgt

SEQ ID NO: 139036 - DNA, 367 bp, Zea mays
  Clone ID: MRT4577_58284C.1
ggcaactgcttttatcgaactgcgagtttcaacattttagtccagcccccgcccctaaaccacaagaccccccggggggaaacaggaatccaaaaggccccccacatctgtccaggcgtgatgatggacctaaaaaaccgcctccaccaacaggatgcttgtagccaccacccagctttcaacttttaccatcgaacgatgcttgacggctcccgtaaacattttcaacactacaaaaaaccattttcagctttcccccttttattccttgtccacaaaagggaaaggccccccccgattattcagtaataaagtaaaccttgccaccaaacacctttgggagcaaaccctacccgtttaacccccc

SEQ ID NO: 139037 - DNA, 386 bp, Zea mays
  Clone ID: MRT4577_58285C.1
ctgactccctcgggacgcgccttctccttgacacatatgatccatacacaatctctctagcgttttttaccaaagcacaatggttttgcgcagactctggtaaattcgccggtcactgaagaatggcagtgctaggtctgggttgtgactcagctgaattgctacggcctgccttgggcgcaagtattcgcctgctgctttgggtgactcaaactgatgtaccagcgctcaccaagtcgctagcacacacggagggacccatctggtagttgcaccggctaatcgtcacctatctggtcgacagacgaatgaatagatgccaggccctgatggtcggctgtgcactacgaccatgacgactgcccgtaaaacgtgctggtcgacga

SEQ ID NO: 139038 - DNA, 444 bp, Zea mays
  Clone ID: MRT4577_58286C.1
ggacaaaaccacgggcggggaccttttaactgggggggttgggattaggattaggattaggattaggaccaaaaaagcctggaggccccccgtcacccattattgccaaatgccaaacccccccccaatttttggccccaaattatgggtttttctttcttcccgctgctggcttggtcttggcccgatgcaaaatgctttaccaggtccagggcttgtttttgttgccctcggggttgggggcccgcggcaacttcaaataaaaaccctaatccaaggccccctggtggtgccttttcccggggttggggctcttgcccgggaaagggggcccaaaccccgttcccccgaggaccggaaacgtgaacccctgcccctgcattctggcggggataaagggcatgccccttgccccccccggggcccccccccggttttacccca

SEQ ID NO: 139039 - DNA, 581 bp, Zea mays
  Clone ID: MRT4577_58287C.1
ccccgccgcggcacttggcgtcgtccgccccgcagctcagctccacacgcccgcccactacctccggcacaagcgatggcgaccatcaccacgcagctccgctcggccctcctctccccggccgcctcctcctcctcctcctccccgcgccgcggcggccggcgcgcgccctcctccgtccgctgcgacgcctctcccccggcggcgtccgcgtcggcctccctcgacccggacttcgacaagaaggccttccgccacaacctcacccgcagcgacaactacaaccgcaagggcttcggccacaagaaggagaccctcgagctcatgagccaggagtacaccagcgatgtgataaagacgctcaaggacaacgggaacgagtacacctgggggccggtgaccgtgaagctggcggaggcctacggcttctgctggggcgtcgagcgcgccgtgcagatcgcctacgaggcgcgcaagcagttccccgaggagcgcatctggatcaccaacgagatcatccacaaccccacggtcaacaagaaattggaggacatgggtgtcaaagatattcctgttaatgc

SEQ ID NO: 139040 - DNA, 448 bp, Zea mays
  unsure (1)..(448): unsure at all n locations
  Clone ID: MRT4577_58288C.1
gannnnnnnnagcaaaaaaaaaaaacaaaagggggaaattttgcgggaaattttcaaaaaatttcttttaaaaaacccccccccaaaatttcccccccctctgggggccggggcaaaaaatgcccccccaaaatacccctcttggggtccccaaaaaggccccccgggctcccccgggggccccttttgggccccctttttaaaaaaaagtgttaaaaaccagttgttgtccccctgccccatttttttgaaccccccggtgaaaaccccggggggtgtgccccatatttggcccccccgtttgggcgccccgatttggcccccctcttggggccccctttggggaaacgggcccccaaaagggccccctgttttccccaagtggcaaaaagggggaccacaaggggggaaacccccccccggggcgcgcccccggggttcccccccc

SEQ ID NO: 139041 - DNA, 180 bp, Zea mays
  Clone ID: MRT4577_58289C.1
ccttttttttatttccttttgggtttggtttttttaaactccccccaggaaaattcacagctggggacgatgcgaacaagtacaccatcattacccccgttcgacttgtacaaaattcggggaaacaaggggcttcctgacaaaggaagagggtaacccggtcccatatttacggggggg

SEQ ID NO: 139042 - DNA, 406 bp, Zea mays
  Clone ID: MRT4577_5828C.1
tcgaagccgccgcctgctcgctcgcctccggtccggcagcgagctctatctcccgcgacgagcagcaactgccaccgcgcaagcagaccggggaataaatattggtattggtagggggatatctataagaaggcaaggtggttaagttcacaactgtagagctccgggccatcattgacaaaaagaacaacatttgtaacatgtctgtcattgctcatgaggtccatggcaagtctacgcttacagatatccttgatgcagatgttgtgattaaagtccatgtagttactataataatttttaatgactcctactatttcaaatatatttattacttatttttttctttattaaattatatttgctttattatctttttatttaaaattcttatatatatatttaa

SEQ ID NO: 139043 - DNA, 327 bp, Zea mays
  Clone ID: MRT4577_58290C.1
gttttgtttttttttttttttttttttttttttttttaaaaaccatcctttttttttgtttaataaaaattccatttttttttattcgttttgacagcagcaggaaaccccacaaggggccccaacgggaaaaaccaaacggggggggggggggggggggttccccaaacccgacccattaacgggacaaattaaagctaaccgaccgaggggaattaattcgcccaacagcaccaaagccccaaattaaaaaaaaaaaccccgggaggggcccggcccaaataaaaccctgtttgcttgctgggccggggttgctccttccggccc

SEQ ID NO: 139044 - DNA, 367 bp, Zea mays
  Clone ID: MRT4577_58291C.1
gtacgcctccaattcgttctgaacaggcatgggttaaatcgagcaagcaatgacacgaggagagggatcatacgaagcatagcgccaacaagaccaccggaagctaggccgcacgcaagcacctgggcacgaaggtggccaggaagtcggcgccgacgaccgcacgcacgaacaagcccgacaagtacaggcacaggaccatggccctgaccgagatcctgaagtacaacaagagctcccagctgatcatccagctgttgatcttgcagcgcctgttccatgagatcgttcacgacatcaatacggatttgcagatgcagatgcacgcccagatggacgtccaagaagccgtcgaggaatacctcga

SEQ ID NO: 139045 - DNA, 417 bp, Zea mays
  Clone ID: MRT4577_58292C.1
gcaccccctctgcgacgggccgtcggaatccatggcggcggtggtgcgcggcggattgaggggcatcagagcataacggactcaccaccttcatccgggacgtcagcgacgagagatacttaaaatgccttctgaacgggaaccttttgcaaacgaaaaacgcaatattggcacaacacttgcaggagttgcacacgtagggaaacaaatctgatgagtaaactacatgacactcaagctggaaggcataggtggatcgaacatgccagaaaggtgaacatgcattccaaggcgctgaaggccggatggctgcaccacattacagaagcacaggggataacctgatgagccaaaaaactgctaggtacctataattagcacacgacacacactatctacggatgagggctgaaggag

SEQ ID NO: 139046 - DNA, 725 bp, Zea mays
  unsure (1)..(725): unsure at all n locations
  Clone ID: MRT4577_58293C.1
cggggatgcagcagcagggcagcaagcatcctctgacctgccaaactgcccccagcagcagcggcggagccttggccatttcctcccttccaagcaccgccaatcttgtccggcctccctccgcgtccgccgcggtgccgaacccaagaaagacacagcacaggtggtggccgtggcacaggagcgggaagctcggggagaggattagactgactgacgcgacaatgggggcttcctcttgttcctccgtgcggctgctgctgccgctgctctgcctgctcggcttctgcttcgcggcgagccaccagaagtcggactcctgcgacggggacctccaggtggcgcgcctcgtccccttcgacaccgacgccttccactgcatcaccctctggaaggacgaggacttcatcctcaggtacaagaacacggggtcgagccagtggagcttcgtgctgtcggcgccggagaagagatcctacgtggcggtcgggttctcgggcaaggggggcatggtcggcagcagcgccatggtcggctggtcgtcgggcggcaagggcgtcgccaagcagtactacctgcagggcaggagcccggaggccgggaccccggacgacggccggctcaccctggtcaggaaccggaccgtcgccgngtccaagtccggccggctctacctggccttcgagctcagcacccgacgcccgcagccgtacctgatctactcc

SEQ ID NO: 139047 - DNA, 221 bp, Zea mays
  Clone ID: MRT4577_58294C.1
cttattttttttttttatacattatttttttggcgtgggttttgatttttgattccattagtaaatagattttataactgaagatttgattggagacttacttggtggattacaagaaggaggacatgccaaacgcagttacataataagatttcccacaaggtgctaccggcataagtagaaggggcagacaaaagggaatccaaaaacggacgcgaggg

SEQ ID NO: 139048 - DNA, 344 bp, Zea mays
  Clone ID: MRT4577_58295C.1
cgcagagaatccccaagcaaacatacagggtctaaggagaggacaggagaggagaggagatgtggggtctttgacaccatggctaccgtgcaaatgttctgggtcgtgatgttataaaacgtgacgaggttcgcaacgacactggtagaggctggctacaactactagatcgtgcccatgaacttcggcaccgacaagcacaacatcaccctgcatctagatctcgacccggatcgtaatgttccagatatgcatgattatgactgggccctttttgaatcactatcaatttgaacggacgctgattgcataaacaagcccaagcttattatggaacgaaacct

SEQ ID NO: 139049 - DNA, 172 bp, Zea mays
  unsure (1)..(172): unsure at all n locations
  Clone ID: MRT4577_58296C.1
aattttgggtngaccacgcgttcggctcgccatcaatgcctccgtccacatctccattgtttcttcttgccccggccgttgggcgcggtgggcacaagccctctttgctcccagttcctcctcctcctcctcctcnccctcttctataacaccctctccgtcgtcgccgggg

SEQ ID NO: 139050 - DNA, 356 bp, Zea mays
  Clone ID: MRT4577_58297C.1
gactcacttaaggccttgactagagggtcgatcgcggaccgctggcggcacggcgcagggacgcgcggctagggcgggttacaacaacggcggacggccctggcagcacaggtttctgctgggtgtcagcggggggaggcaggtccagcgttacaggtgtgtgctggcccagcactccggtagccatgggcgcgatgggacgggtggtgggcaggccttgctttagtgcctcctcgtacgagggaggctcatctatttgcgaattcgtggatccagatatcctgcagagaagcttggcgccagccggcttcaattgcacgggccccactagtgagtcgtattacgtagcttggcgt

SEQ ID NO: 139051 - DNA, 416 bp, Zea mays
  Clone ID: MRT4577_58298C.1
aattgccgggtcgacgttcttctggtcggcggccgtactcagggccggggcctgcatcaccgtcactggtagtcccactagctcctccttgcttaagctaccctagtacgatgccgtgtccgatgacggacgctagctcaagtcgaggaagaggtcctctaacgttccggctaacacgaagagccacaccgctcctactagcagcactcccgggcctaacaacataccgcttgaggaagctgcccaccggatccacctcgtgagatcccaggaccctgccacggaacaacaacgtgtcgaggcttcacccacatgtgaaccgaccaccattcggggtctttgtccggctccaccgatgacagaaggcgaacaccaacgtaaatccaccccaagcatatcctgagaacccccagtga

SEQ ID NO: 139052 - DNA, 2396 bp, Zea mays
  unsure (1)..(2396): unsure at all n locations
  Clone ID: MRT4577_58299C.1
cattggttacctcgaggccggccgggacacacccccattccccacttgcctccgccggcgcatccctaaaccccagtttagggtttctcgcgcggcgctccgctccccgccctcctccgctccgcgcccgatcgcctcttcatctacctcctcaaagcttcgactgttccacacccccacccatatcaacccctttcccctttagctccttcccaccgatacgcccgccgcgtgaagcattcgttagccgagccgccgcaaccatgtcgtcgttctggggtgtggaagtgaagcccgggaagccctacactctcacccatggcgacttcgccggccgcctgcgcctcacccaggcgacgctaggggttgatgtcggcaagggggagaaggctaccggcgtgaagaggtgtgtgctacagtgcagtgccgagaacagagatcccgtttttctttgcgtcctcatgccggagcagtcggagacatgccacctggagctagaatttgaggaggaagtcaccttctcagtgattgggccaaggagcatccacctcgctggatactatatgactgatgcgtgtggggaagataggagtgacggtgattctgggagcgattctcttcaaagttcagatgaggatggtttcttggaggaggacgatgatggtaacatggttatgggatattcagacagtgaagatgatgattcagagtctgatgatgaagagatggcatacaatcagggtaggggcaaaagttcagttgttattgaggaaattgaagaggatgacaaggctgctgttgctgaagtgcagaagggattgaagaagcaaagccgtgaaaatggtgatgagtctcaactccagcttgctgcaagaaatccacctactgaatccttggaaagtgaagatgaagatggttttcctgtatcattttctgaatcaaagaagagttctgagattgtttcaaacaagaatgggggaaaagacaaggagactagcaacaaagacctgaaaagaaaaagtggagccattagcgaccgtggtgattcttcagggggggtaaaagctgagattgatggggcatcaaagaaaaagaaaaagggcaaggacaaaagcactgttatggacacaggaaaagtaaacaacgaagaaaaggaggttaagctacacgattctccagctgatcctgtcagtacaaaacagaagaaaaagaaaaacaagaacaaaagtgcttctgagggtgataccagtgagcaatctgctaagaacaacaatattgataaagacaatgaggaggcaagtgcgcaggaggccaataaaaagaacaagaaaaagaaggcacatgatataagcagaagtgaaagtcaggcaggaactggacttggtgagtcagatagcaaggaaccactccaaacacggacgtttgccaatggtatgatgattcaggagttagagatgggcaaacctgatggtaaaaaggccagccgtgggaagaaggtttctgttagatatattggcaagctaaagaatggcactattttcgactccaacgtcagtggaagaccttttgagtttagactaggtgttgggcaggttatcagtggctgggacgttggcgtcaatggtatgcgggttggggacaaaaggagactcaccattccaccttccatggggtatgggagcaaaagagtggggcagataccacagaactcaactctcatcttcgatgtggagctggtgaacgtaaaatgaagtgagaagatccacgagaaactgcggcagtttcacaaattttgctacgcatcattttccttgggcaatgctgtttcgtaggcataggggcatgttaagtggattcatctctgtcgctatcatactttcgaactgagtttcagaaggaaaaaaactgtggactgttgccatctgggataattcctgggctgcagcattcgccatccttctcccggttccttcagggtcattttgacattcttgtgataccctcagaaccttttgaactgatgaaatggttaaggtggagtacgtgtacgacttcacgccgattggttttttttgtatcgtttgtgatcaagccaatcaaaactgagatcttgtctgtagagatgggcaaacctgatggtaaaaaggccagccgtgggaagaaggtttctgttagatatattggcaagctaaagaatggcactattttcgactccaacgtcagtggaagaccttttngagtttagnnactagggtgttgggcaggttatcagtggctgggacgttggcgtcaatggtatgcgggttggggacaaaaggagactcaccattccaccttccatggggtatgggagcaaaagagtggggcagataccacagaactcaactctcatcttc

SEQ ID NO: 139053 - DNA, 242 bp, Zea mays
  Clone ID: MRT4577_5829C.1
gtagcccgtccctcctgatacctcccaacaaactcatccaatcccaaactgcggggagtttatactgtgtgatacgaagacctgaagtataaattaacttattgcctcaatcatacagagatccattactatacaaacaactgaacataactctcactcactctttattccttcagttgcccttacccaaaatgtctcctattacataatctaaactctttgtacaaggtctccattaatac

SEQ ID NO: 139054 - DNA, 354 bp, Zea mays
  Clone ID: MRT4577_582C.1
attacaagcagggcggtgcaccatattaacaaacaactcgccagtttattcagccttttcttcttcagctccttcttggtcgcggatgttgaagtatttcaattcgtagctattcttttgagaggcaaccacacgcaaccaatttttgagggattgcttcttgaggtacttttttgccaaatacttaaggtatctcttggagaatggggcttgagcggtgacaaaaacctttgtcttatctctgctgatgcgtacgcgatcgacgagaacgccagccttttccgaaaccttgattttatcgtgcaggaattccttgaatgaggcagactccatgacgccattttcaactgggtg

SEQ ID NO: 139055 - DNA, 513 bp, Zea mays
  Clone ID: MRT4577_58300C.1
gccggccgggtcgcgatcataccctctctcttacactccacaggacacaccaggcgtaccgcaccctattggacatggcgacgcccttctgcctcgcctctgcgtgtggcgccacgctgtgccacccgcatgagacgaagagccccacggcgaagaatcgacccccaaaggcgcgacataatgcagcgcatcatagaaggacctcaccggggccgcctcccacgcgcggtgctggcggtgtcagtgaccgcgtcggcaacaactacgacgactgcggctccgcatccacccccgctgctctcgactgacgcacatggatggtgcggacccttctacgacaacacgatcgagcggtgagcccccgtgtaatccgagacgccttgatgtcctgttgctttctcaaacctggatatctggcaaggctagctaactgccgtatgcgtctctctcctctttgatgaatctctcctcggtgccgacactattcacgtggtaatgatcatattttatgtt

SEQ ID NO: 139056 - DNA, 276 bp, Zea mays
  Clone ID: MRT4577_58301C.1
accaaatatgccaagccagtataatatatacaaatgaaggaggactagctctcattatccttactatgctcccccgacccatatatattcgtctatatacaaatctctatctattgcatagttgcaatgtacgttggctgctctgagccaaaccccccaccttgattggatcacatacaacgatgtaatgtacaaaattctcagctgtgaatcgagcgataggctcaagacctctcctggaaggtctttgaccgttagagcttatctggattcccc

SEQ ID NO: 139057 - DNA, 325 bp, Zea mays
  Clone ID: MRT4577_58302C.1
cccactcctaccaccacacattctccagaattgctaacaaatctagacaagacttgctatgcgaacatccaagggacagcaggtcttacaaaacgcacaatcactccatatacatactacccttccaaggctacttgaacgactcaaacctgacaatacacactcatgactatcgacgacaactataaacagactggtacgacaaacttccacatacatccagactacctgatgcacctactcgccatcataatcaatgttcacatgctgaacaccatcatgcccatcctccgacgatctaactctactgacatccttacatgtg

SEQ ID NO: 139058 - DNA, 289 bp, Zea mays
  unsure (1)..(289): unsure at all n locations
  Clone ID: MRT4577_58303C.1
cggcacaccagnagctccagcagtgcagggcgtcgggagggggcgcgcccgaaggcccaccatgatcatccccaagaagaaccgcgatgagatctgcaagtacctcttcaagggagggcgtgctgtgtgccaagaaggactacaacctggctaatctctcacagattgatgtgcccaacttggggtttgtcagggggatncannacttcaantccaaggagtttgtcagaggggccttctcctggcggttctactactggtgcctctcctacgttggcgttgggctcct

SEQ ID NO: 139059 - DNA, 401 bp, Zea mays
  Clone ID: MRT4577_58304C.1
caacggcacgattctcctcctccgtccgcgtagctctcggtttcggcgatgtcggggcgcggcaagggcggcaaggggctgggcaagggcggcgccaagcgccaccgaaggggcttggccacaaccttcaaggcattaacaaacccgccattccttagcttgcccagaaggggcgggttaaaccccttttttggcttattttacaaggagacccgcggcgtgttaaaaattttcttggagaacgtattccgcgacgccgtaacttacaccgagcacgcccgccgaaggaccgtaaccgccatggttgtcgtttacgcgctaaagcgccagggccgaacgctctacggtttcggcggttaggccgcctccctttctgatgctttgatgtgacggccgtggtc

SEQ ID NO: 139060 - DNA, 1468 bp, Zea mays
  Clone ID: MRT4577_58305C.1
cctgccggggaatgactatgtgtgaccagacaaggccacgcaaactagcaaccggtgccacgcaaactgccaactgccatcttcttccccagccgctgtgcccgtccccctgccaccaaggtccaaggtctccggagcgcgacctggctgcaacgcaggcaatggagtcgccgttccgcgcggacctgctgagggggaaggcggcgctggtcacgggcgggggctccggcatcggcttcgagatcgccgcgcagctcgcgcgccacggcgcgcacgtcgcactcatgggccgccgccgcgaggtcctcgacaaggccgtcgccgcgctccggtccgagggcctcagggctgttggttttgacggggatgtccgaaagcaagaggatgctgccagagtgatcgcagcaacggttgagcattttggcaaactggacattcttgtcaatggtgctgccggcaacttccttgcctccccggaggatttgaagcccaagggattccggactgttcttgacattgacactgtgggtacatacacaatgtgttatgaagccctcaagtatctcaaaaagggtggaccagggagaggtccttcctctggtggcctcatcattaacataagcgcaacgctgcaatacactgccgcttggtaccaaattcatgtctctgctgccaaggctggcgttgacggtatcacaagatcattggctctggaatggggaacagattacgacattagagtaaatggaattgcacctggaccaattcaagacactccaggaatgaggaaacttgcacctgaagaaatgggcaataaggggaaacgagaaacgatgccattatttaagcttggggagaaatgggacatagcaatggccgcactctatctagcttctgatgcaggaaaatatgtaaatggggctataattattgttgacggaggtctttggttgagtcgccctcgccatattcccaaggaggaagtgaaggcactctctaaagttgtcgagaagaaggttagggcatctggtgttggggtgccatccagcaaattgtgatggcatctttgactacgtagctcttcgatgtgttctgtacaacatatgtctatattgttgtcccactaatgttgtcagtttggctatgccaccagtccatgcagatgacttgttaagcggctgagcagtccatttggttgaagaaattcaaatatttattactgttgtcgtccaatttgtattagaaatagttgagatcggtatgggatattgggatcccaaccaagaggtgcgtattgccaaatatttacatgctgtctattcaggttgtcgattaaaagggtcatattaaagatttaacagtttgcgtctcatattgccaatgcctttacttatcaaatgaaattcatgctatacatgccgtctcccaaaaaaacaaattttaaaaaaaaaaaaaaaaaaaaaagaaa

SEQ ID NO: 139061 - DNA, 1044 bp, Zea mays
  Clone ID: MRT4577_58306C.1
ggcaaactggacattcttgtcaatggtgctgccggcaacttccttgcctccccggaggatttgaagcccaagggattccggactgttcttgacattgacactgtgggtacatacacaatgtgttatgaagccctcaagtatctcaaaaagggtggaccagggagaggtccttcctctggtggcctcatcattaacataagcgcaacgctgcaatacactgccgcttggtaccaaattcatgtctctgctgccaaggtacttggaccttctctgaaccgctctgcaagagaaaatcgatgaagtgtgtagatttctgctgattgatcggcttctataggctggcgttgacggtatcacaagatcattggctctggaatggggaacagattacgacattagagtaaatggaattgcacctggaccaattcaagacactccaggaatgaggaaacttgcacctgaagaaatgggcaataaggggaaacgagaaacgatgccattatttaagcttggggagaaatgggacatagcaatggccgcactctatctagcttctgatgcaggaaaatatgtaaatggggctataattattgttgacggaggtctttggttgagtcgccctcgccatattcccaaggaggaagtgaaggcactctctaaagttgtcgagaagaaggttagggcatctggtgttggggtgccatccagcaaattgtgatgacatctttgactacgtagctcttcgatgtgttctgtacaacatatgtctatattgttgtcccactaatgttgtcagtttggctatgccaccagtccatgcagatgacttgttagggcttgttcgcttatttttaatccatatggattggaggggattgatatggattgggggagattttcacttactagggattaaaacccccttccctctcaatccatatggattggggtagaaccgaacatggccttaagcggctgagcagtccatttagttgaagaaattcaaatatttattacaaaaaaaaaaaaaaaaaaggggcggcc

SEQ ID NO: 139062 - DNA, 304 bp, Zea mays
  Clone ID: MRT4577_58307C.1
atgggtcgtaatctggaaacagtgtttactggattagctatggcaatgagtacgctcgaaaagaaattcccttgcattcagacctgataggtatcaagcacaagttatcacttactaggcatgctgatgatagcccataatgggttgttcaatgtgggtgtcttaacaacatccggcacaggagtttgatctagagctggttctgatgagcaacttgctgaatttgtacacgagtacttgctaaaaccagagcccgacgagctcatgccgaggctgggtgcactccgtgatggaaggcaggccc

SEQ ID NO: 139063 - DNA, 367 bp, Zea mays
  unsure (1)..(367): unsure at all n locations
  Clone ID: MRT4577_58308C.1
atggacatgctctactccgtgctcaccgacnacgaggggggcgcgctctccgaggccgacgccgccacggccgccgccgcctcctggaagaggatcgccacgtccacccaccggagcgcgaccggggcccacgccaaggacgacgactgcagcagcgatggcgccagggtgtacccgatgctcgggctgctcgagaccgcaagtctcgccgcggataataatagtaaacatgaattacgcgccggccccgcaggcaagtcgagcggcgccgggttcaggcggcatcggtcgtggcagccggtgctggacaccatcgaggaggtccttgacgcgccggttcaccagcgcggcgccgcaggaggggaac

SEQ ID NO: 139064 - DNA, 117 bp, Zea mays
  Clone ID: MRT4577_58309C.1
cggagactgagcgagaagccgggccggggctcctcctttcttcgacgtcaagcttcgccccactccatggattcgatctgggaggcgaggagctgaggccaggacagggggaggtgc

SEQ ID NO: 139065 - DNA, 287 bp, Zea mays
  Clone ID: MRT4577_5830C.1
cgtccgaaaattaacgtcttcttccccgttcttgtcatcatcctatgtccgccagttctccgaaagcggcggctatcggttcgagccagtcctataatccactgcgtcgtagagcggtgtcgtgcgaggagctcgccgccgtcgctacgcaacaggccgcagtgcacatgggcgctggggccttctcgcgcgcgtgctccaacgtctccgtcgtcttccgctggctcggcagcgctttcaagttcgcggagatgggctacttcgctaaggttggtgatttggttgag

SEQ ID NO: 139066 - DNA, 292 bp, Zea mays
  Clone ID: MRT4577_58310C.1
caagatcatatgtcttgttcacctgcgcaagtttgctgagttgactttgcgaagtcctgttctttcttacattaaagtttccagatgctcagtacttcatcgtggtagcataacatcaaatgctcttcagaaattggtgttgcaaaagcaagagagcctatcaagtttgtcattgttatgcaacaacttgatcgatgtcgatcttagtgactgggaattattaacaaatgcagtttgcgacggttttagtgatggaggggggtgcccaattgttagatcattgattcttgac

SEQ ID NO: 139067 - DNA, 858 bp, Zea mays
  Clone ID: MRT4577_58311C.1
cggccgctcgaggcggcaggccgggatacatacccatagtcgtcttcttcttcatccagctgggcgagaggcacgagatccgatccgatccgatccaccccggagccggaaccctagccaggtccaccgctatggcgacgacccgcccgctcctcctctgcgccgccctcctcctcgccgccctctcctgcaccttcgccgccgacgcgcccttcctcgtcgcgcacaagaaggtggccctctcccgccccaagcccggcgtcgagcgcctcgccgtctccctcgacctctacaaccagggatccgcaactgcatatgatgtggccattaatgatgactcgtggccaaaggaagcatttgaacttgtctctggagaggtctcaaagactttggaaaggcttgaacctggtgccactgcttcgcacgcgtttgtattggagagcaaaacacagggcaggttccaagcttcacctgctgttatcaagtaccgtgttgccacaaaggctgcagttcaggaggcctactcaactcccatcctccccctggacattcttgctgaaagacctccagtgaagaagtttgaatgggctaagaaacttgttgcgaagtatggagcactggtgtccgtcgtttccttcgttctggggttcatctacctggtcgcgagcccatcgaaatctgccggctcaaagtctggcaagaagaggcgctgatctatcatccatggttcaccgtttttgtagctggccgtttgcctggagagagactcttgatagcagagatctctgaagttacacaccccatggactgtaatgtaatggagcgactagcagcaaaatgacactataattttggtta

SEQ ID NO: 139068 - DNA, 315 bp, Zea mays
  Clone ID: MRT4577_58312C.1
ctggggttgggtttcttttttttttttttttttactttttctcatattaacaatggtctctttgttcatgatttctccaattgtacgggcacttacttaggagggggagaaaacgctttatttgaactccctgaatcaagccggcgggcgctccttctcaaaaggggacacccaaatgttgggggaacaggcagacgcatttatacctgtggggctattcgaaaaaaggggctgcaaaacacatgaaaggcctcatatctaaaacaaggcccatagctgccccctgggaaaaattccttttcggtgagaaaaact

SEQ ID NO: 139069 - DNA, 602 bp, Zea mays
  Clone ID: MRT4577_58313C.1
caaaaacatgatcagggatcctattttataaaaaatcatctaacgattatagtgttcattattttgggttctaaatatagtatagtaccttactagatgagtgtccgtgcgttgcaacggagacatataatatataagttaccgtgatattatatatcctcgttgcaacgcatgggcactcacctatatgtacataagttattatatggttccgtcgcaacgcacgggcacccagctagtatatagagaagcctcgaataagccagggcgctgccttttacaataacctctgtacagaacgatgtggtgggaaaaaaaaagacacggtggcacaaacgagcggcgacggtggtgcgaaggccatagcacgccttccctggggcacggcgcgagcggcgccggctgcgccaggtacatcgggtaccgctgccccggcatcagcaccgtccggtggcccacacccgcggcgacggtcgtgggaaggccagagcacgccttcccgtcgtcgcgctcgcagcggcgctcgtgcgccaggaacgtcgggtaccgctgccccggcatcagcaccgtcaagtcaccacggcctccacctgcactcgtgc

SEQ ID NO: 139070 - DNA, 494 bp, Zea mays
  Clone ID: MRT4577_58314C.1
gggtggtgtttttttttttttttttttttttttttttttttttttttttttttttttttttttttttttttttttttttttttttttttttttttttttttccaccccgcaaaaagggggcccaaaccccggggggggaaggggcattagggggggggcggttcccatggggaaagaagggcgggttcccttacccaaagcccgggcaaaaaaatccccccccggagggaaaaaattgggcccccccccagggcacaggggggggaacaatcgggagaaaaaaacggggggttcctacccgttccggacaaacaaaattcacaggactggggggccagggcccccctacaaaaagcaccgccccacccctggggcccaaaaattcgggggttggttggccagaccggacccaagccctgcctggaaaccccctgggccccaaaggggatttttccgtccacgggccccgggaatatcccccccaggccccaaaa

SEQ ID NO: 139071 - DNA, 616 bp, Zea mays
  Clone ID: MRT4577_58315C.1
gctggcctcttccagggctgaagctcctttcaccatcataaaaggatctggaaatcttggacaccttccaagtgccagttctttctgtggctggtggctcataacaaatgctagactgctgatcggcttggaaaaaaaggcatgaaccacccgactagatgccccctgtgtgatcaagaacctgaaaacatcaatcatttgttggtttcttgtgtgttttcaagagttttctggtataaccttttaagaaagtttgggctacacagcttatcccctcaacaagctgatgcttctttctttgactggtgggagagagcttcagctcaggtctttggtctggggaagaaaggattggactctctcattaccttaggggcatggatgatctggaagcatagaaacaaggtggtgtttgatgggagggctccttgtctctctttcctcctgcaggctagatatgacaatgggtacccgaaacccgataggtttttactccattagggtacgggtttcggtcaatttttatacccatgggtttattaatgggcataaatctatacccggcgggcggaggcgtgggcgcacccgtgggcgaacgcgtgggggacgcgagaga

SEQ ID NO: 139072 - DNA, 1033 bp, Zea mays
  Clone ID: MRT4577_58316C.1
gctcctctatataatcacctgcaggtggtcttcaaagaaaagaataagaagaaaaacaggcgcaatatagcatcctgcatccaatccacagtagccgcggctactagctagctagtctgctccacgctgcagggcttttagcttaatggccgggctaagcgttctcctggagaaccacagcaagagctacaccgggaaggcggcggcggcgcagatcatcagcaaggccaccctcgtgacgacgacccacggccccaaccaccaccagcagcagcggaagatccctgtctctgcggcggctgcgggctccttcctgcagcgctgctgcctgtgccacaaagagcttgccgagggcatggacatctacatgtacaaaggcgaccgggcgttctgcagcgaggagtgccggtgccggcagatcttcatggacgaggacgccaccaccgtgcgcggcaggcggccagtcaagacaagacaaggatgggaacgtgaatgggagacgtagcttaggtggtgcaccagatgaccagatcttcttcatggaaacatggatggggagacggagacaagacaaggatgaagatgatgaacacagtgtggaagtgtctgccagctcatcccccgtggggtccgtcgcatgcgcagcacactagtagtacgtgcgtggcatcttgctggacccactggataagatggccgcacgacttggagccgctctttgggccccacctcatgaattggatcaggatccgaccgagtaattagcgggccgcatcttcgcttcttttccttttttttgtcacgtcaaatctgttgagaactacgtcaccacggatcaccagatccgctcccttccctcccgtcagcagtagaggcgcaagaagctgtagagtactcgtctcccttcccattagcacgacagaggaaacacaatagacacgatgtagggttgggcctctggcctctttctcttctctgtattatgagggggtgtacaggttccttatatagaggtgtgagacccaccaggggc

SEQ ID NO: 139073 - DNA, 216 bp, Zea mays
  unsure (1)..(216): unsure at all n locations
  Clone ID: MRT4577_58317C.1
gatggctgcggggatgtatttggaacacaatctggacagtattgaaaaccttccctttgaattacagagaaacttccagctcatgagggacctagaccanagaacagaggacctgaaggctgaaattgacaagttggccactgagtatatgagtagtgcccgcagcctagctccgaggaaaaattggcccttctcaaacagacccaggaagcctat

SEQ ID NO: 139074 - DNA, 853 bp, Zea mays
  unsure (1)..(853): unsure at all n locations
  Clone ID: MRT4577_58318C.1
gggtacctggacgccggggcgctcgagccggccgaggaagaagaaaaacaggcgcaatatagcatcctgcatccaatccacagtagccgcggctactagctagctagtctgctccgctctgggcttttagcttaatggccgggctaagcgttctcctggagaaccacagcaagagctacaccgggaaggcggcggcggcgcagatcatcagcaaggccaccctcgtgacgacgacccacggccccaaccaccaccagcagcagcggaagatccctgtctctgcggcggctgcgggctccttcctgcagcgctgctgcctgtgccacaaagagcttgccgagggcatggacatctacatgtacaaaggcgaccgggcgttctgcagcgaggagtgccggtgccggcagatcttcatggacgaggacgccaccaccgtgcgcggcaggcggccagtcaagacaagacaaggatgggaacgtgaatgggagacgtagcttaggtggtgcaccagatgaccagatcttcttcatggaaacatggatggggagacggagacaagacaaggatgaagatgatgaacacagtgtggaagtgtctgccagctcatcccccgtggggtccgtcgcatgcgcagcacactagtagtacgtgcgtggcatcttgctggacccactggataagatggccgcacgacttggagccgctctttgggccccacctcatgaattggatcaggatccgaccgagtaattagcgggccgcatcttcgcttaaaaaaaataacatcacgcacccaaaccttaaccgcattacttcacacggatcacagatccgctcctttccntccgtcaga

SEQ ID NO: 139075 - DNA, 316 bp, Zea mays
  Clone ID: MRT4577_58319C.1
accaagcgtacgctaatatggcgctgctcgtagcctgggtgcgcctgcgccaccgactggggctgcgcacccggtacatgtcgaccacgttgtggagatacgcgtctcctgtcgagacggcgtatgatacggtgatcccagacgtcatcacaggcgagaccatcacggtcacgctctggcacggactagctggacgctgaatcgacgatgcatctgcagccgagcgttaccgggtccgatctcgacggtggtatctgcggctacgaggacctgaacaatgccgctcttgcatattatgatgggcatgcgctaacat

SEQ ID NO: 139076 - DNA, 427 bp, Zea mays
  Clone ID: MRT4577_5831C.1
ttcttgaaccaaatgacttaccaagtatttgaattctgctgttgctggactacctcatgcaaaaggggctagtctaccttgttggggcgggcgcccaccaaaacaaacctttcgtccctattcttgcgacatccaaggtcttatataagattacctacattgaattcactggtcgcgaattgtccatatcctcatccttggaaaacctttgatctacacatcttacaaggcacaaagatcttcccctttaaaacctctgggggaatatcaaaaacttcagctcgcaacttcttttataaaaatagcgaacgcaaaaggggtttatgtactccccccgactgatatcataatacccgacaagtttgcagcttacgctcatagcaacattgtccctggcactgatattacagacgactggatgcgtttt

SEQ ID NO: 139077 - DNA, 725 bp, Zea mays
  Clone ID: MRT4577_58320C.1
aaaagaaaagaaaaacaggcgcaatagagctagttagtctactccacgcttgggcttttagcttcatggccgggctaagcgttctcctggagaaccacagcaagagctacaccgggaaggcggcggcggcgcagatcatcagcaaggccaccctcgtgacgacccacggccccaaccaccaccaccaccagcagcagaaggtccctgtctctgcggcggctgcgggctccttcctgcagcgctgctgcctgtgccacaaagagcttgccgagggcatggacatctacatgtacaagtaggcggctactgcaatccactgacccgtcgtccgcgccgcctcacgcgagcctctctgtctgtgtactcctaatatatatacctgtgccctgactggcggtgtatgtgatctgcatgcatgcagaggcgaccgggcgttctgcagcgaggagtgccggtgccggcagatcttcatggacgaggacgccagcagcagctgctgcggcaacggcaacggcgcgggcgccgccgccaccaccgtgcgcggcaggcggcgagtcaagacaagacaaggatgggaacgtgaatgggagacgtagcttaggtgcaccagatgaccagatctttctatggaaacgtggatgggagaggagacagacaggatgaagagatgagcacagggggaaggtcggcagctatcccccgggggtcggcgccggcgcatgcgc

SEQ ID NO: 139078 - DNA, 797 bp, Zea mays
  unsure (1)..(797): unsure at all n locations
  Clone ID: MRT4577_58321C.1
cattgggtacctcgnagccggccgggcgaactgctctccttctatgcatgctccctcccgccgccgcagccgccattcgcgccacggcgggcttgccgcgggctgtacgccgcgtccacgctcgtctgctgaaggaggggctcgcggaccttccctccgcgccggcgctccttgtgtccgcctacgccaggtcgtgcctcctccccgacgctcgccgcgcgttcgacgatgcgccgcgccgggacctccacctctactcagcgctcctcgccgccgtctcccactcctccgatccagagctcgttctcccgctcctccgccgcatgctctcggacgacgcgcttcgcccagaccacttcgtccttgcctccctcgcgagcgccgctggcaggctgcgcagcctccgccttggcagggagctccacgcccactttgccgcctccccgtacagtgctgacaacgtcgtcaagtcgtcgcttatcgacatgtactgtaagtgtggcgtccctcaggatgcccggaaggtgttcgacagtatcggtgtcaagaacagcgtcgtgtggactgcactgatttctgggtacgcgtccaatggctgcaccggtgaggcgcttgacctcttccagagcatgcctgcacacggcctcttcacgtggactgcgctcatctctgggtttgtcaaggccgcngaactatactggcgccatggggctgtttgttgagatgaggcgggatgatatcaggattcatgacgcgttcgtgctgggcactgtcatcggtggtgctgcagacctggc

SEQ ID NO: 139079 - DNA, 316 bp, Zea mays
  Clone ID: MRT4577_58322C.1
actacgcgtgcgctgcccttatctgtacggtaacatggtcgtgcaagatcgtgtgcacatctgtgctgattgagggcgcccgaggtagagatttccttcgcgagctggtggggtcattcgaaagccggaaagacaatgccgaacatagctacttggtgctattgtacaacatgattcactgggataccagctgttatgggttccattaccagtggtaccttatggagggctatctcatgcatgcatgcgcgtacacaactgctggaggggcgtttgatcctactgaaagggcatttgcttgtccatctggggccta

SEQ ID NO: 139080 - DNA, 1259 bp, Zea mays
  Clone ID: MRT4577_58323C.1
cggacgcgtgggctcctctatataatcacctgcaggtggtcttcaaagaaaagaataagaagaaaaacaggcgcaatatagcatcctgcatccaatccacagtagccgcggctactagctagctagtctgctccacgctgcagggcttttagcttaatggccgggctaagcgttctcctggagaaccacagcaagagctacaccgggaaggcggcggcggcgcagatcatcagcaaggccaccctcgtgacgacgacccacggccccaaccaccagcaccagcagcagcagaaggtccctgtctctgcggcggctgcgggctccttcctgcagcgctgctgcctgtgccacaaagagcttgccgagggcatggacatctacatgtacaaaggcgaccgggcgttctgcagcgaggagtgccggtgccggcagatcttcatggacgaggacgccagcagcagctgctgcggcaacggcaacggcgcgggcgccgccgccgccaccgtgcgcggcaggcggcgagtcaagacaagacaaggatgggaacgtgaatgggagacgtagcttagctggtgcaccagatgaccagatcttcttcatggaaacatggatgggagacggagacaagacaaggatgaagatgatgagcacagtgtggaagtgtctgccagctcatcccccgtggggcccgtcgccgtcgcatgcgcagcacactagtagtacgtgcgtggcatcttgctggacccactggataagatggccgcacgacttggagccgctctttgggccccacctcatgaattggatcaggatctgaccgagtagttagcgggccgcatctttgcttcttttccttttttttgtcacgtcaaatccactccccttgaaatgcagattacctcacgcacgcaaaccttaaccgcattcgtcaacgcaacggtggatcactgagcagtcagcggagttgatcccgtatgggcgcgcggcggtatctgctggaaatgattttgtttttttcttccacttattgtatccggttctgtattatttctatattgtgcgacaatgatacagttgctgtactccagtcctcaaagggcggccgccaccgcggttgagaactaggtcaccacggatcaccagatccgctcccttccctcccgtcagcagtagaggcgcaagaagctgtagagtactcgtctcccttcccattagcacgacagaggaaacacaatagacacgatgtagggttgggcctc

SEQ ID NO: 139081 - DNA, 281 bp, Zea mays
  Clone ID: MRT4577_58324C.1
ttttttttttttttttttttttgtttggttttttatgaaacacggtactccctaactttattgccctaatcaggcttgttctttgggtcaaaaacaacataaagaccacgtctatatcgtttattaacattacacacagggccaacaaacagacaaactaaaacctttttctggcaacatgtgttccacaagaatacctgtcccttcttttgccagttcatgaatagtaatgttacccccattacatccccttttttttcgcaacaaccttgtggccgtcc

SEQ ID NO: 139082 - DNA, 843 bp, Zea mays
  Clone ID: MRT4577_58325C.1
ggccgccggccgggaaccctacacccatgccgccgccgcaccatgggcaccgtaggctgctggactccagttgctgttcacagcatccgcccgccgccgccatttgcagcagcagtgccaacgccgttctctgcagtaactgtgccacggctgctccttgcagcagtgcctccgctcggtctgccgccatgtgctgccatctccacgccctcctccggcaacgatgcaccagcgtccacgggcccgaagccattgggaagtcccggcacatgcccggtgcggatccagccgcggcttggagccgccgtcgcgcccgcggtatcgctcatcggagccctccgtggggaaaccacctcagtggttaccgccgcggcaggaggaggcgtcgtctctggcggtggaatgttccacccgtgcaccgggcaaaaccccggcggaaactcagtgccagcagggtatgccatcggtggtgggatgacctgcagcggcaccggctggagagctggaggaagtccgtcggtacgggtacgaaaaccgtctccgtggccctcggcacgcgcacacgacgatgatgaagccctgcaacgccgctgcggaggaggctgcgccgtatggcggcccggagacgagcgcgagccaggatgccgaagcggttcccacgacggaactcgcgaaccacagccgctgtcaccatggaaaccacaaggttgatgttcggcatctcacctttctggttcttcacgaactcctcttctgcgttggttgcttctcttggttggagcgtcgtgctgataacgtgttgaagtatactcagtggtaacgagattgagagagaaacaaatg

SEQ ID NO: 139083 - DNA, 567 bp, Zea mays
  Clone ID: MRT4577_58326C.1
atggcgaggtcggtgagcatggcgatgtcgtcgtcctccctggccaccggtgacactaccttctgccacacgaaccaccgctcgcacaccacattatcctaccaagcacgcccacacgtcgatgtaccttttgcctaccacagcagcgcgacactccagcaggtactgctacgccaccatgccttaaagcgcctaacaccattacaacccctcggatggggctccattactgtcgcccagcagcgcgtcgatcttcgcctcattagccgtggtgaggtcggctatggccagtctatcatacgtggtaatttgcaatatgcttctctaagtgcactaagaaggcttccacttgatcatggtaatcaaacatttctccaccgagatgtgcaaggtgattccctcacagttgtctccttcacaaaggaaggatgtgaagccacactattatcaggcagcaaaaccagtgacacaactataacaaaggaatcatcgcccattagcacactaaaattggtgcatacagagaacacacctgcagagtgggatcatttgaacatagttcagtag

SEQ ID NO: 139084 - DNA, 150 bp, Zea mays
  unsure (1)..(150): unsure at all n locations
  Clone ID: MRT4577_58327C.1
tcgagcacccagtaccctgcagcagcnagcaccgccgatggcgggcgcctatgtatgatgagtgcatctcctcctagctagctccgcccgacgaggtcagtcagtcataacctccagannttccatttcccaaccctcctgncgtcgtca

SEQ ID NO: 139085 - DNA, 243 bp, Zea mays
  Clone ID: MRT4577_58328C.1
aaacaaagaaaaattggaagcctgaatgaaaaaccggagcccctggggaaaaaaaaacggccgagaggccaaaaatcccccggcgaaaaaaagaaaacccttgctcaacaacaaagtatggccctccgcccccaaaaaaactatgaccccggacggcctttatcctgggccgggcccggggcatgcctgccgtttcagatcagaccaaaccaaaagggggggacaagcccgggggacccgggg

SEQ ID NO: 139086 - DNA, 274 bp, Zea mays
  unsure (1)..(274): unsure at all n locations
  Clone ID: MRT4577_58329C.1
ctgacaccaagaaaaaacactgtattatctgaactatatctcataccacatctacaagagggcaccaccaatgatggattgctgggagaacactgctggatttgtcacagcacgttggtttggtgggagcacttgttccattcgaactagtgagccctggctaagcgcagcctcctgngcgacccgcgccaaaagagctgggggatatggagggacgggctcatgcgcgccatcggcgccctattgctgctactggactccccgctctatgccg

SEQ ID NO: 139087 - DNA, 606 bp, Zea mays
  unsure (1)..(606): unsure at all n locations
  Clone ID: MRT4577_5832C.1
ttttgcgggaatgtcggcacgaggcgcctctgaaagttcggagccgccggcccagtccgttctccctctccgcgctcccagtcccccaaggcgcaatcagtttctctaaggtggcgaactggtcgtgacccangagctanannccaacnnccactagtgcctnnntcataagnggtggtgtttttttttctatgtgtctccaccccgtagacagnccttgcngaantnccantancatncgtnggnagagggggggggtgacggagggcccnncggtanancanctanttggcgcncanattcntgngtgctttgcaatgcatgttagtgngagagagngngagcgaatctctgggcgcccataaccccaanaagggggggaanaacccttaaccaaattggaacgncccagagaggccctccttgnggnaggccccncttancaaatggtcctggtctaggccgggtgaggcantnncanatgngtgcccnccaggtgggaatgngccnaaggaaccccccncgngcatancntgngngagcctnanaantgngcgtncnccntgagcgtgnngaggannanagngngaaggggccannaggnga

SEQ ID NO: 139088 - DNA, 201 bp, Zea mays
  Clone ID: MRT4577_58330C.1
aaacaaaaacaaataacaagaaaaagcaaaaactacaaggcgaaaaactcaggggtaaggggacaaaacaaagcggcgtggctcgcacgcaatctgtcgtagcagtctccgtggtgggcgtagcgctgctgctggcaccggcggcgacaacctcggatgccggcctcacctgaagactctcgagctccggcatatcgccct

SEQ ID NO: 139089 - DNA, 515 bp, Zea mays
  Clone ID: MRT4577_58331C.1
cagagatctggggggggggggggggggggggggggggttcgggctcacctccccacaagtgcgacctaaccaccaatgagaaagggacaccgcacccacagacgacaacagatctacagaacacacctctgcctacatacccatcacctagaggggacgcgagcacttcctaggcgagggtttgactttagctttcgggagtgcgcacaaccagtactatcagtacttgcctcttttaatagaagcgttggtagcgtacagaccccccggcacgtccgactagcacagactgtcttgatcgatctactcggcttcccataggacacaaactacccgttggcactaggggcggcaagtgcaacactgagaattgtctccccacgtcttaatgtgtcgtggctgtcaacaaccatgttatcttacccagttgagcaccggtttgatttagagtaggggttggcatggtgctacgcgtctgggtacttagtaccgggggtcacgtgcggtagtaccaa

SEQ ID NO: 139090 - DNA, 185 bp, Zea mays
  Clone ID: MRT4577_58332C.1
acggctatgagcctgctgcagcgggcttcggtcgccgctctgacagctctgtctggccgccgcgctggcactaggctcggagtcggaagttttctcacacggagctttccgaagactgtcgctcctgtgcggcacagtgtggaccatggcaagagactgtttgtcatcaagccttccttatacta

SEQ ID NO: 139091 - DNA, 312 bp, Zea mays
  Clone ID: MRT4577_58333C.1
caatattgccgggcactcctcgcaaaaggaaagcgaaacgtggattgcaagggtacatgcattaagagaacatgccatattaacacgaacttttagtcttattttaacataaaatgcacagcttggttcacgatgattacaaccagggcctgttggaggggtaaattaagggcactggcactttcttttcacttggcactagaatacaatatttactcgccccacagggaaagacataggcaatgaaaaatgggctaaaaatcaagggcgaaacaccatgtcattacctttgacacaaatgaccttgggaaa

SEQ ID NO: 139092 - DNA, 260 bp, Zea mays
  Clone ID: MRT4577_58334C.1
ttttcttctttttttttttttttttttttttttttttttttgctctggggggcatttcttaaaacaagcgggaccccccatcaaatacatctttgcctcggaagaagagactacccaaacgaatttcacgagagaaaaggggaatggttcaagcataagatggtaacacaatttggcggaaacaagagatccagaactttttgacgaaaagctcttgaaccacaacatcaaaagcagggcggctatgggcaccgccgtcc

SEQ ID NO: 139093 - DNA, 261 bp, Zea mays
  Clone ID: MRT4577_58335C.1
tcgtacgatcattcagaaacatttatatttaagctcactagccacaacctaacgacaagggcttctaagacatcattcctccttgcgctttttggccactatgtgagtgcaacgcttcacgtgcattattagacaatgcttcactcgctccgagtgccattattccacagtttcgtgcttgtgaaaactcaaatgtgcatctatcaccgatctagccgagtttataagctagaatattacgcttgatgacagtgttttata

SEQ ID NO: 139094 - DNA, 379 bp, Zea mays
  Clone ID: MRT4577_58336C.1
cccccccttttttactttagcgctgtcaccccgggcgtttaatcacctcttggggcgagcccattacgataacttgcttcgcaaaattttccatcactaaaaaccaaccgttagccgcgcctcttatacatgacgttgcaaaactaacgcctaaccctcacccaaaattcccgggctgtgcttgcccccaacctgaaccaattttaagtacataccggctagactaaactagaccatatacattccccataccaatgccaacaaccggcctctgaattcacaagaccttattcttaagacgttaggtacttgacgcgacccaaaaaaaacaaaactggcaactggattaatccgataccccatcggacggttagctagc

SEQ ID NO: 139095 - DNA, 362 bp, Zea mays
  Clone ID: MRT4577_58337C.1
ggaagtaaaagagaaagtgtttaggcaggccgagtctaggagacatgttctagaacacactgaataggagtctagttgaggaagatctaagccaggtagtccattcccaaggcatatcggcgtcctgaagagcgaggatccaagtaggggatctcgccaacgccacagactcggttaccgatgcgcttgccaccggtaataccaccatagtcgtaggtagcgctgtggtacacagcgcggttgtcccaaatgacaaggtcatcctgctcccaacgtaccctcacctgcaactgatgattctctgtgatgagtctctgcacaaattccttcaacatacgattctcaacatcccccaagccctc

SEQ ID NO: 139096 - DNA, 2469 bp, Zea mays
  Clone ID: MRT4577_58338C.1
atggactgcaaaaatgttgttgtatttgatgacacaaaccaaatcatatctcatctggtatgccgaggatttgtgaaggattacacagttttgacaaagcatggagagggtagtgcgccttatacgactgaagccgctgaggacaaaagatttcagtttgttcacgggacatacccacctcttccacagagcgaacatgtaatgccaaatgttaatgatcatggttactgtggaggaagtgaacatgatagaactcatgttctgccgaatgttattgatgaggaagatgtagaattgttagaggcaatgttgcgttgtcatacggatccatcgatgttcttcaagaaagacatgcttccaaaggagaacaaagtgcctgctaacatgtactatgcaaagaaactaatctgtccgctcgctttggatgtggagaagatccacacgtgtagaaatcattgtatcctttatcgaggcgatgattataaagacttggagagcttcccaaagtgcaatgcaagtaggtacaagacgaataaagactatcgagaggatgagtgtgttgcatccatttctaagggcaagaagcgaaagaaaggccaaaagaagacttcaaaatccacgagcaaagaaaaagaagtagactattatgcgctcaaaaagattcctgctttggtgatgtggttagagccagctaacaagaagcagaagaaggaagcacagagaagagtgcagcatgttggggtgcaaggacccttcatcagatccaagtggtctcacattccaatcaccttctcccaggaggatcttcagcttaaagactatcctcacaatgatgccatggttatatcttgtgtcatcaagggatttctggtccataatgttctggttgacacaggcagtgcagcagacatcatatttgcaaaggctttcagacagatggatgtcattgagcattcactcaatgtggatccatctttcaggccaagaaagcaaagacttcggaaaatgtctgaggataaagccgaaggtgctcggaacgaagtaaagagacttctcagtgctggtgttatcagagaagtaacatattcagagtggctagccaacaatgttatggtgaagaaggctaatgggaaatggagaatgtgtattgatttcacagatctcaacaaggcatgtccgaaggacgagttccctttaccaagaatagactcccttgtagatgcagcagcttcttcagaactcatgagcttattggactactactcgtgctatcaccaaatttggatgaagaaagaagatgagccaaagacaagcttcataactcccagtggtacttattatttccttcgaatgcccgaggggctcaagaatgctggagcaagtttcagcagaatgacagccaagaatcatattgccgacttccaagagatgtttgccaatttcaggcaagctggtctcaagttaaatccagaaaagtgtgtttttagagtaaagaagggcaagttccttagctgtctggtatcaacaaagggaatcgaagctaacccaagtaagatcgaagctatccttcgaatggagctgccaaactcaaagaagagggctcaacgattggcaggaaggctggcgtcgctgaatagatttatatcaagatcagcagagaggaatatgccattctttgaaatactgaaatcagccgaagtttttcaatggggtctggctcaacagaaggctttcgaagagttaaagcaatacttgatagatttgacaactctaactccacttcatcgggaacttcgttactcctggcttcagaagctaaaagcaatgggaataagaagggtagtcattaaaactgattcccatgttatttctgaccatgtagacaaaagcagcaaagcaagggatccgaagcttgaaaaatatttggatgcagtccgaagattggaggcttctttcgaaggattttctgtaaaaaatattccaagaggggaaaatgagcatgcaaatttgctagccaaatcagcggcacaggggctctctttgccttcagaagtgttctttgagacaataaaagcaccttcagtcgaacttatggagagggcagtgcttgcaatatcacctgtacatagtgaagattggaggactaaaattatatctttcctccaagtaaggcatccagaatcaaatgggttagtagaaagagtaaatggaattataatgacaggaataatgaagttaatcttcaatcaacccagaggaaagtggccagatgagttgattaacgtggtgtggagccacaacacaactgtgtcaaggtcaacaagttttacacctttcaagctcctattcggtgacgaagcaataacacgagaagaagcaaagacaggatcaataagaacaacatctttagcggaggacgaagctgattatcaaacaacgaaagacactataaaggggaccagactttag

SEQ ID NO: 139097 - DNA, 505 bp, Zea mays
  Clone ID: MRT4577_58339C.1
ataataagaagtccgggtttagtatatttttttttttttagtttcaaatcatattattgtgggccaattaatttttggttacagcagacgcaatcgggtcaaccaacatgcatgggggggggggggcatgagcacaaagactggcgcccaacatgcagagagagagatagcaaactgaaaaactctgtttatctttgtctctcacacaccaaacaatacctatgtgtgggagccagctcggcctcgcttattattgttcaaccaccaccacaagctaaatagataataatcatatccatggtcggggatcgatgtgatcagcagttgcaggggtcgcacttgcagctgctaccgcaaaacaaagcgtgggcggccttttcagacttcgccgcggcctcgacgaaatcgggcgcggcctttttctccgggggcacgccttggactacagtggcctgcgcggcggagcttgtctcctccaagtcagggtacttcttgccgcacttgc

SEQ ID NO: 139098 - DNA, 351 bp, Zea mays
  Clone ID: MRT4577_5833C.1
aatttgatgtcttgtggagaaccgagatctatttgaatatttgatcctctgttaatgtttgcttattgcctgatcatcaaattactcatgttttgaaaaaaaaaaaaaaaaaaacagacacacaaacacaagtcgtcgtaggcagcgagcgtctctcctctcccacgcatcgcgccaaggaagagagagagatcgccgctccccttctgggggtggggggtgcgggtgccctccctcctcgagcgagatctgtctggggacagatctatctgacaaaatggtgaagatctgcttaatggttgctggctatgttggtggccgaaccaaggccctacgtgccctcaagcgccc

SEQ ID NO: 139099 - DNA, 663 bp, Zea mays
  Clone ID: MRT4577_58340C.1
atgcccaaggggctcaagaatgttggaggaagcttcaacagaatgacagccaaggttcttcactctcaaataggcaggaatgtgctaacttatgttgatgacatcatagtaaaaagcacgaaacaagaaaatcatattgccgatttgcaagagacgtttgctaatttcaggcaatctggtctcaagttaaatccagaaaagtgtgtttttggagtaaagaagggcaagttccttggctgtctggtatcaacaaagggaattgaagctaacctaagtaagatcgaagctatccttcggatggagcctccaaattcaaagaagggggttcaacgattggcaggaaggctggcgtcacttaatagatttatatcaagatcagcagaaaggaatctgccattctttgaaatactgaggtcagccgaagtttttcaatggggtccggctcagcagaaggctttcgaagaattaaagcaatacctgatagacttgacaactttaactccaccttcatcaggaactctgttgctcctgtatgtggctgcctcccattctgcagtcagtgcaacacttgtacaagagaagcaagatggccaagtaaaaagacaagcaccgatatactttgtctccgaagtacttagtttatcaaagaaaaattactcataa

SEQ ID NO: 139100 - DNA, 436 bp, Zea mays
  Clone ID: MRT4577_58341C.1
ccaaataaagtagcatattcacaagagcgaatctgttaatccattgataaattacttactcaaatcacactctgtaaatgccggggacaaactacctgagcagtagcaacaacaaacaacaattacagcacgcacgaggccagtgggaagggaacaaacatacggcgactgctagccgatgcacgcgcagtcaaaaggcgaaacaccaagcaacacatggggaaagccactgtgacgacgacggagacggtactggcaggggttcttataatcggctaatcaggaccgtgcttgatttgctagtgattaatttaaggctagcaatggcgacgcgaccgaacctgtccatttagcaggtctgtgttgggccaccccactgatggactgagcaggcccgcttggggcaatctattctggaggcagactgaagagtttt

SEQ ID NO: 139101 - DNA, 500 bp, Zea mays
  Clone ID: MRT4577_58343C.1
aggcacggcttgcatttgcaaaactaggtatgggtcacgggctgtcatttattttgacagacctaaccatgacgccgcccatgctgggaaagcccacgctgggtatacccattgtcggatccgaatcctgacttttgtattgtcgtaagccatagcaaagaaccaaaccactacttcggcgagtagcttatttcttcttggagtcagcctcctcagccttggccttggcgcgcttctcccggacaccgacaaggcgggcctcacagcgggcggcacggagggtcttgtaggcgttctcggtggcctcgtagttgccgatggggccctcctcgaactgagcgacgttcttgatgggcagagcagcggcggtggattggacgaggttgtcagcgctcttggcggccttgacgtcctcggcggaggcgtcaccctgcttggtcttgccgttgcggcgggggaagaggatgaggcgcttcctgtactcctggaggcgctcgacg

SEQ ID NO: 139102 - DNA, 370 bp, Zea mays
  Clone ID: MRT4577_58344C.1
gtcgcccacgatggcctacctattctttttgctcttgcccgccctcctactggggcgtctcgacatcggggcgtgcgacgccaacggggacaggaggtggcggtaggagcaggcgcctgaccgggtgccgcgggtgccggcgcaggccttcaacaccagctacaagcagtacgccgggtacctgaccttcagtgagcagcgcggcgctgcgctcttctactggttctttgaggcctagaaggacccgtggtccaagcccatcgtgctatggctcaacaaagggcctggatgctcgatcattgcttttggacttggggaagaagatagaccttttcatgtaaacacaaattggaagggggtccatgtaata

SEQ ID NO: 139103 - DNA, 705 bp, Zea mays
  Clone ID: MRT4577_58345C.1
ggttcagtcagtggaggtggaatagactagactaatcttgtagcggggtctccggccgcctctaccaccgaggcgagcacgcccctgccggcctgctctgtcgtcggtgagcacgcgcagcggcccgaagaggcgcgtactcgcggggcaaagtgcgccagcgacccgaggtgccttggtatagaatgaagtgaagagagcagagtatcttggtcgtactaatcaattcatcatattatgtgcgcaataagattttgctatgctttcaccgtcgatgcccactggttggatcatgcttctgtttatgagctcattgaagtaactctctcgtagctcaaatgggccaatttctcgtttgcgtggcacacaaaaccttcagctatccatctccatatcagttggtctctcttaattttgtaatcttctggaaatatgcttacatgtaataaatgatgcgaaggtagatcatagaaacatgaacacaattcttaatctaaagcaagatggtgtaggctactttttgtgatttaacacaaatagcaggcacacatgcaccaatactaagaaaattagcaaagaaaatgagtaaaagaggcacttgacttgtagattataaaagagtgatgatcaagaagtcaaccctcttttacctgtagttttgatctaccttctcatccataggattagttattatatttaagcatg

SEQ ID NO: 139104 - DNA, 117 bp, Zea mays
  Clone ID: MRT4577_58346C.1
aaaccaaggaggggtgaaaccataatagaatcctgcgcatatacttactaaattacatatagataacggcactttgataaatggttgacgctctctccctgaaaattaaataataca

SEQ ID NO: 139105 - DNA, 729 bp, Zea mays
  unsure (1)..(729): unsure at all n locations
  Clone ID: MRT4577_58347C.1
aattcggcacgaggctgttcccctgcgaggcccgcgtctccccttcgtctcaacacccaccgcctcctcgccggagccagtaagcttccggcgaagaaatccggcgggcacatcacaagggggccgagcagggggacctaggcgagcgccggaatgggggccagcgcccgggggctcgccgtcgtcgtggctctagggttagataggtgtccgtagcttttttcttcgctcgccctcccccacgcggccagggtgtgcagccccggcgtcgcattgggtcccgggacgaccgtaaggccgcgtgatccacccgtgctcgagctcggacagggtcccggttgcgtggcatgggggcatctcttccgcctgctcccgctgcctgcgagtttggcaccgtttttgagctctgaagaggaggaggtggtggcagcaggcaccgatctggatgccatttcaagtcatggatccgaggcaccacctctcccagttcaccaatacaaccgtagctgcgtcctccttctctgaggagcagcttcgccttcccacagagaggctggtgggttnttggaagcaggagtcgttgcatcacattgggagcaagtcagttgcatcttctccaattgaaaagccccaacccattggtacaaaaacaatgggtcggngtagatccacaaaccatacagccgagaggccagaagtctgcatttagcccttgacacanaacttttg

SEQ ID NO: 139106 - DNA, 285 bp, Zea mays
  Clone ID: MRT4577_58348C.1
gccacgcgtccgcggacgctggtgaaggcgcttatcctgacccatagtctagttgggaagacttccttgatgaaccaatatgtgaacaataagttcatcaatcaatacaaggctacgatcggcacggatttacttaccaagggcgtgcagatagcggacaggctattcactttggaaatatgggacactgatggccaggaaagggttcagagtatgggcgttgcattctaccggagaggagattgaagggtgctagtctatgaaacttattgtatgaaacgattt

SEQ ID NO: 139107 - DNA, 699 bp, Zea mays
  Clone ID: MRT4577_58349C.1
tgggaccctcgaggccggccgggggcaaaaatggactgcgtagtgcggacacaacttggctacccaaggcaacgaacccagagagagagcaccaaaccgcaccgaaaagccaagacccccggcccgcgcgccggcgtcctcctatgctcgccgtcgccggcgacgggaagggccgccgacgctcagtcctgccgaaggaacgcccatccggccgtcttatccgcctcctcgccgcgctccgcccctcccgcaccgggcccctccccgtccagaccggcttccccacctccctcgccgacctcgtcgtcaagaaccatggccgcctcaagaagcatccttccccgtccaccaagcgcggcgccgccgcttcgccttcgcctttgccttccccatccacccccacctcgccatcgctgtccccgccggctgagtctccgcctccaccgacggccgccgacgcagtctcaccgtcggatcggcccaggcccgaccatccgccggcccagcccccacgccgcggcaaaggcggcggctttggcccgggcctgggcctgggcttcctcgcggtcagcggcgtggtggcgtccctcgcactcctcgtgatctggagaaagggggttgcgggcgttaccgtggcctccttctcactctacctgctcgagtccgtgaggtcgtcctcgctccccaggcggcggcccg

SEQ ID NO: 139108 - DNA, 148 bp, Zea mays
  Clone ID: MRT4577_5834C.1
aacacttgaacctgccacctcgtttagcgcgcggaggccgtcccgcatccatgtccacccacccactccaatgcggcgcgccgaccaggcaggatccaccctcgctgctcgctgcctcctctcttccacggcgcagcagacccatgac

SEQ ID NO: 139109 - DNA, 1020 bp, Zea mays
  Clone ID: MRT4577_58350C.1
cttattttgcattcttgccaaatttaaaagctgggcaaaagaagaggttggtgggagattcaaaagagcctgatgaccaatcaccacataagtgcatacatgttttgggtccctcgagggttatggaaaactgggtgactgactgagccttactgcttagaacttaaccctgtctcgttgtttgtttaatatttcggctgcttccgaaattgatgaactttactatttcatagtagaaagcatattatgttaaggaaaactgtaataaatcagatctgcatattcatttgttttctaagctttacaccttctatacaaaattatcctattcgaatgagaacaaacaacctggttctttgccgagtagcggttcttgtaaattatcatgttacaggagtatgtgaatcgaagattctatgttgtcaatggctactgtgctagatttataaatggcaactgtgctgagtgaactgagcgcttagttgaattctgctgtttgctgctttgtgtgaatgcctaaaccttcagcccagtatgtggttcttattttgctacagattatataatgcccgggggactgtcttaccctcgcaggtcgagttttttttactacagattatgagtatttgtaatctatgaagcacatcgatctgatgttttggttccaggtactggctttcagggacataaaccctcaagctccaacacacattctcatcatccccaaagtcaaggatggactaactggtctggcaaaggtagagtttactgctcatcagttacactgtacttgtctaaatctgtatcctcataagccaaaacatttcatcttcattttcatctcacttgctcctatacgacggatccatcctgctggacaatcgctcaagcatcgtgttagagatgttcgccacacccaacaacaacttgatgtgcgggtaccccgtagtcgatgccgtcaaggcggtgctggatgaggtttgcttaggcatcgtctcatacgttgacatactggagctg

SEQ ID NO: 139110 - DNA, 642 bp, Zea mays
  Clone ID: MRT4577_58351C.1
gagtgagagcgagacgccagtcgcttctcgcggctgcgccgcgccgccgccctcctcgccggctcgctgcgccgcctccgtctgccgccgcatcgccgacgcctcgaccgaatcatcgggcaccaccgccgttgtaccatctctccgacggtcagccatcctgtttgataaaatgtcggcaccagcatccattccctgtggttccaaaagtgtgcgaggcaacgacaacggtgtcgacaggctcagcagcctgtccgacgatctgctccaccatgtgatgtccttcctgccgacgccggaggtcgtgcgcacaagtcttctgtcaccaaggtggcgcaatctctggagctctgttccatttatccacatcaacaacaaagacttcgtggttaaaaatgatgtgggcactgcttgctttgataaccacaagctggagaactttgtggaccacttgctgctcttgcgtgatggcactgtttccttggatgaggtccgggtcttcatcacgactcgcagtagtaagaagaggtctgtgaggattcgtcatgccatctaacaccaagatcgtctccttactatttctggatttcatcaccaccctgattttggataacacaacaattgtttcttctatgaacctcc

SEQ ID NO: 139111 - DNA, 714 bp, Zea mays
  Clone ID: MRT4577_58352C.1
gtggtgtgttggttgggttttttttttttttttttttttttttaaaaaaaaggcggtttcatttctttattgcgaccttggggtttacaggacaaaaaaaagttttgaaaaattcaaagaagaaatcagaactagtatatgtttactcaactgggggttgttggggcccttgtagttataggcatataccagccagccccacgcgtggctgctccgacgttacatttacatgcaagtgcaattcaactcatctttgcgagcaggagcagagcaggacgctccacgaccaggctgaacgggaaaactgagagattacaattacaacaaagaatacgaatcaaaccaaagaatcctgcactagctcgctcgccgcttttcgctgctcgcggaccctcggcggcgcgtccggcgatgcagtgaagggcagctcgaactcacctacccttagaccctgctgttacatgaacacacacagacacactcacacacatgatcctgggcgtggacatacaaccacgttgtagtattttttttaatgttcatcctgttgctggaaccttgctagttgctagtgatcttcactcgagttcctcgttcatgtcttcttcggggtttacccatccagcgcacatgtggaacgcttggccggtccactggtagccgaagctgttgacctgctggggaacaggaaccacgtcgccgtcgtcgtcgtcg

SEQ ID NO: 139112 - DNA, 274 bp, Zea mays
  Clone ID: MRT4577_58353C.1
ccccgcaatcgcccaaatttttggtttttaaagtccaataagacagcaaggtttccatggggtcacacaacccccacatggcaatgccaacacaccctttaaagcttataacagttttttttacgaatttaccaaacttgggtggcagtccacaggacaaggggttattggggttaaacagcttaagcctgaatcgtttttgcaaggggccacccccccatgttggcatccccaagttgggttccataaataataagtttttcacagcatttaa

SEQ ID NO: 139113 - DNA, 489 bp, Zea mays
  Clone ID: MRT4577_58354C.1
gaaccagttctcaaatgagagcaaggaatctcccaatggctcctagcagatgtcctcctcctctctcacgcgtcgaccgccgcgcatgccgctgccgtagactgggagtgaccgctgatcccgaaggcggttcccgcgtgatgatgacacactgttctggaactgaacgcgagagcctcacttactgaatttctcgacgaggtttggcaagctctaaaaagacgccgacgatcacacgtaccggctgtccgactttcaaggacacacatgactgcgcagcgaccacgacgaccacactgctgcacccatcagcggagcacggcgtcactagaatctccgacctcccgccggtatagtaccgacggacctacctcggcctccgcaagtcccggagcgctctcctcagacaactcggggagtctactgcacgaggcgcccgtgctccccaccgatgatctccccgacgatttccactgtatcgaccacgga

SEQ ID NO: 139114 - DNA, 403 bp, Zea mays
  Clone ID: MRT4577_58355C.1
ccacgcgtccggagagagtctggcacattctatagaagataccacgtagagcgacgggagcatatggccataggcaggggatgacaggattacgcgatgaaattgctggtggaactgctgcccgagatggggttcatgcaagtgtagataacatgtttgtaacagggggggcaggcccagctgtgctcatgatgatgcagttgttgatttgtgctgggagcgatggcattctctgccctattacacagtgcccgctgtgctctgcctcggttggtcttcacgggggttcccttgggccttattttcttatggaacagacttgtgtggggacgtagatgtttgtggcctggtgaagccgctggggggggcttgttctttgggcctgactggcaggttgcttggg

SEQ ID NO: 139115 - DNA, 443 bp, Zea mays
  Clone ID: MRT4577_58356C.1
cgttctatactctataaccgccacccactccagagcgcataataacccgatcgacaccatgggggtgttgctcgatgccctcgctctcctggctctcgctgcgagcgccacctacacacatacaagcggcgggtgaagctgccagccaccgccgacggttcatctaccgccgccggtgcatatgccacctgcggttcacctgccacctccggtgcatctaacatcgtcggtacacctgccgacgccggtacacctgacaccggctgtccatgtgccgccgacggttcatgtgccgacgacaccatgacactaccctactaaaccgccccggcctgagtctcatccacagtcacacccatgcccgtgccaacagccgcatccaagcccgtgccaactgcaggaaacctgcggcgttggcaacaccccgatcctgggccagtgcg

SEQ ID NO: 139116 - DNA, 396 bp, Zea mays
  Clone ID: MRT4577_58357C.1
gatcgattctctttctgctactcaccgctctgggtgaaccttatccgtgtgtcgctctgtgtaaccccacctgtggacgccagaccctccggggagtctcaaagcagagatccagggtatacgctggctttctccatcggctgtggccaccatttcaaataacatacatccgttcgtggccttgcctccttagctgtcagtggatcctgtggatctcctgtggcgcccctagcatgtactctgtaagtgtggatggctgacgcaaggtacgggtgcggaagagagttcgggcacagccaccacttacatactctggctggcagctctaagatccctgcgcttgagctcgtattcccagaccttggctccactggacggtggctactacaacgacta

SEQ ID NO: 139117 - DNA, 502 bp, Zea mays
  Clone ID: MRT4577_58358C.1
ttttttttttttttttttttttttttttttttttttttttttttttttttttttgggggggggggggggggggctccccggcgggccccccgcggtgcccgggtttttttcctgcacgcccgctcttgccgagccccggggcccggggagccctgggttcccgcgggcccccggtccccgttccgcgccccccctttttttgccccccgtccggggggggggggccggccaggattcctttggggcccgtgggccccccccgccccgtttgcgtttttggggggtccgggggccccccgcttgggggcgccccggcgtccagagtggcccccgggcctaccgccccggttctcatagcgccgccgggaaccggaacccttttgggccctggatggacgggttggggctcccggcaccggaaccattggagggggaataaaaggcggacccccagccctaaccaaaggggttgggggtaaaaggcctctaggtttaagggggg

SEQ ID NO: 139118 - DNA, 320 bp, Zea mays
  Clone ID: MRT4577_58359C.1
agtagtttaactgcatggcatggtaaagaaggccaagatggtcatgacatccacagctgatacaaccacacaagccttggtctttgagtttctgcatggctttcaggatgttctccatgaccttggcgagatcaaggaaaatggtggttccgctactagtccacatgttgaatcagctgccgctcaagacatgcctctacttttgctagaagctgaacagaacattgttgatgccgatcaagaagctcagcatcaggaagaggaagagcttcacatggtggatgatgcaacaatgaccctcgagcctatggatgaggagg

SEQ ID NO: 139119 - DNA, 173 bp, Zea mays
  Clone ID: MRT4577_5835C.1
cgccgaccgacgcctctccgacgagcaaatccacccccccacggagcagcagagccggatcccccagatggcgcagatcccgcacccggcgaacacggcggtgacggcggcgcgagcacgaataatggcggtgggcagcgcgcgatggacctctacgagaagctggagaaggt

SEQ ID NO: 139120 - DNA, 276 bp, Zea mays
  Clone ID: MRT4577_58360C.1
aaagtaaataagttggcctcaaaaggagtctcttttgccttctccttttctctcttttctgcagccagggctgcatttggagcagcttgaacagcatcagggagggatgttttcttgttttgtttaattgtggcagcaggcgcagagatcacaacctttttcccacaaatactaggggggagggggggttcactggacgtatcccgggctgccttagtattgctctggtaagtacaagggacatacagatgagtctgtcgatcggacgaatacgaa

SEQ ID NO: 139121 - DNA, 665 bp, Zea mays
  Clone ID: MRT4577_58361C.1
gcggaacagtaacgtgcccatctgcgctatccaagagcgttggatacctggtggatctttccgcctcgggccgccgcgcgatgggcccatccatggcggcaagcgcagcaaggccgtgacatcgtggggtgggggtcgggctcgagaggaggtagggggatcgtgcattcgtgctcgtgcgtggtgcgtcacgctgtgccgtacagtagcaaccaaaccagtgccacgcgcggcgggcccacggacggcaccatgggcagggccgcaggggtgcagtacagctactgtacagcagtactgcactgtgcacacacagccccgccgtcgtgcaggtgaggtcaccccgccctttgtgggacacgtttcgacctccgagcggctttggcaaggggtagaggagagggcccacgcgccgtgccggatggtacgtcggcgacgactgtccttgtcccgcgcttaggttcacgtgtcatttgacgcggtccggtccgcactccgcaggctggccgagccatgccaatgacagtagggaactaggatgtacttagatattacgaatattatctgtatgtatttaaatttgtttttcgaagaggtcgatttgtcgaagtggactgatatttgatacttattcgagtctaaatattcagtatctagtgcataaa

SEQ ID NO: 139122 - DNA, 344 bp, Zea mays
  unsure (1)..(344): unsure at all n locations
  Clone ID: MRT4577_58362C.1
cccgggtcgcccatctccggcagggtaaaacccggtggctgcgagggcagggaataactggcatatagaagacaaaggagagggatgccgatgtccaggttggtgccaacgcataaaggctgtgatgtgctgtgttgatgttttttttagtagctctggaaggatatagaatagagggtgtgggagtaacatgtttttaagtgtgtttgatgcttataattcatgaacgatttttgaagttaggtgtaatgtgattatgttatntgtttgttaaaacgtgttgtggtgttttgattaaaaaaaaaaaaaaaaaataagaataatatttaaaaggtgttttgttt

SEQ ID NO: 139123 - DNA, 447 bp, Zea mays
  unsure (1)..(447): unsure at all n locations
  Clone ID: MRT4577_58363C.1
ggccgggnagcagcattcatcacagttcattctcactaacgaatagttctcttgctcctatcacgagctagctgaggtcgacgatggtggctgtgctgaacagcaggaagacgacgcagatggtgatgaccgttttggtagggatcggcagtgttgtgttcagggtcttcctggagagtgaggatgtcggaggtcgtcgccgtcaacgaccccttcatcagcacggattacatgacctacatggtcaacgagcagaccgtgaacggggaagggaaacacggcgacatcaccctcaaggactccaagactcttctcttgtcctagaaggcgatctccggcattgacatctttgaacccagaccacctcgctgacggttgagtattcatgtggagtatgcgccggagaactgcgttgtggttctggaaggccgacggtcttgtattcgg

SEQ ID NO: 139124 - DNA, 326 bp, Zea mays
  Clone ID: MRT4577_58364C.1
cccacgcgtccgcccacgcgtccgcggtacaaagttagaaatggaaaattttcacgtaagagaaaaaaaaaaaaaaaaaaaaaaaaaaaaaaaaaaaaaaaaaaaaaaaaaaaaaaaaaaaaaaaaaaaaaaaaaaaaaaaaaaaaaaaaaaaaaaaaaaaaaaataaaaaaaaaaaagaaaataaaaaatatgaaatataataattgaaatacatggaaaaactattatgaaaaagctattactatgaaaaacaaagattatgctaaaaaaagcatcatatgtatagcacaaacatttattacactgataataagtatgtaatag

SEQ ID NO: 139125 - DNA, 466 bp, Zea mays
  Clone ID: MRT4577_58365C.1
gtcgccatgcacaatcctcgttgtcgcgcattgagagaggaaagggcaaagtgtcgcaggtcatcctcggtccgccaccatttcaacctcgctgagcactcgaaggacatcacctgggggccgtggaagctggtacccgtggtcgaagccgctctactcacggcgaattgctcgccggagcaacaccagcgccgcaaacccgccatgcaacgtctctcgatctcgccaccgctagatccgaggtaagaagcccctatgtagttcgccatcatcccttcttcatgtagaacactttgggttggcatttggtacacagaatcgctggggcgtggtgcactggcggtgccgccgtttggtgccatcgtggggaggagaaagcgctatggccactggatctcgagtgagcggtctagattaaatagggctgtaccagttcagtggtgggatccgtgccgttgatctaaca

SEQ ID NO: 139126 - DNA, 775 bp, Zea mays
  unsure (1)..(775): unsure at all n locations
  Clone ID: MRT4577_58366C.1
cgggacaacaacacaccacactccaacaaatcaatccactcttctacacaccaatttcaccccctctaccacaaacaatcacaccactacaacttcaaaatggacaaagcaaaggcagccatcaccgagttcatgggcaggtccggccaccacgacaccactgtccacgaggcagttgcccctgctgtacaccacgaggttgtcaagccccatgtacatgaggagatcaacactgccattgacaaggaggtccaccaagatcactaccaccgcactgtccagcccatccacgaccgcgaggtcctcccagagacacacactgccaagctcggagcagtccagcaccgcgagttcgaccaccgtgacactgatgctaccaagaggaccctcatccaagatcaggctcgctttgccgacgagaggcgtattgaggacaccacccacagccagagcgttgctcccaccgttggcggagagcacgtccaccaccacatccatgagaccatccaacccgtagtccagaaggagaccatccaacccagcgttgttcacaccactgttcctatccacgaggtacaccacaacaaggccactcaccatgagactactgctctgcccgccatgaccatggagcaattcaaggccaagggtggatccctgactggtcgtgaggagcgctacgacgangttcgagggtgttcccaagaacattggtggcgtcagcactcttgctggtgctgagggtcttcaccacaagaccactcacgaccactct

SEQ ID NO: 139127 - DNA, 223 bp, Zea mays
  Clone ID: MRT4577_58367C.1
gatgaatcggttatttgtgtaatgcacactagtcttttcagcgggacagtttgcatacggcaacaggtctacagtcatcagatgtacagtcgtcaagccggttgcattcggaacgtcgccatgcctatgcttgttatcccaccaacctacttacacgtatccaccgatcctttaaaaccgctcaatttgtacacgatgtgctggctttcacaagatgcaaagc

SEQ ID NO: 139128 - DNA, 385 bp, Zea mays
  Clone ID: MRT4577_58368C.1
gcgacccgtccgcagcgcccgatcattttaacggaaactgccaaaatctagtgccaggcgattgattgactatggtagtgcaccataccatcaccaggattgcatactcactgtgtgtaccacacactattgcgccattgaagacatttagggacatcgatcgatatatacatgtgatatctggagtgctgcttgcatacttgttgagctttgctcgtgtgatacactgcatcatactcacgataccttggaacagcttgcactgatggatataggtctaggtcctcttccactgtacatgctggaaagagccgaccaacatgcggcgaagtacgtaagaataggaggattgaactggccgccagcaataacaacagtagagagc

SEQ ID NO: 139129 - DNA, 330 bp, Zea mays
  Clone ID: MRT4577_58369C.1
aattactgatgagaaagcaccaaaggaaggagattttgacaacctggtacgtcgaatctctcaagttgatatagaaacagaaattgtgtttaactgccaaatggggagggggcggacaactactggtatggttatagctacattggtttacctaaaccgaattggagcttcaggtgagaacaaaatttactctggttcctgcttctgttatctgtgtgcttctgttatctgtgtagatctgactgaaaaacagtagcatgagtgcatgaacacagacagtcgtgttgggaactgtcatgtggttgtggtcttttagtattacaaactgat

SEQ ID NO: 139130 - DNA, 286 bp, Zea mays
  Clone ID: MRT4577_5836C.1
gcgccaacgtgctaggcctcgtcaaggtcggcctgccccagcacgagcgatgctgcacactgcaggacgggctcgtggaactcgatgtcgcactgtgcctctgcaccgacatcaaggacagcgtcctcggcatcgagctccatatggcacttagcctacatctgatcctcaacgactgcggcaagatttgcgacgatgacttcagctagcccaactaattgagctgaatatgcagatagaaccagcatccgacgtatgtaccccttaatatacgatctcgcgcatc

SEQ ID NO: 139131 - DNA, 285 bp, Zea mays
  Clone ID: MRT4577_58370C.1
cagacgcgtggtcagacgcgtgggctaacttgtcacgagcgcaccgtcgcacgttggggatgtccccaccggcgacgggatcccgaccggagccctaattccaaggggtaaacgatgaggccgtacgcggtggggacgggctgcatgtgcgtgtggaggctgaaagcgggggccgtcgctggtgccgcaagcccggagttgatggtggtgccggcgtctggtccagctcgggtggacgaagccgggaagcacgcagtgatggcgcgtacaaggctttccgggcgc

SEQ ID NO: 139132 - DNA, 1473 bp, Zea mays
  Clone ID: MRT4577_58371C.1
atcgtcaccttcgcggcgctgccaccgagcaccaactccatgtgcaagttccttatggtgccggcgcaccgttatcgtcgaggtacaccaccatgaggggcgagctcagccgcttcgtgctcattatctcgctcttcagaggatggagtagaagacacacacacactgcctgtttatttttgtggacctatagcatattcccgtggtctccccccttttgctttgcttgccggtgcgcccaaggtggaaggaagacggcgaccatggcgaagcagcagaatcctatccccatcccgatgccgctgtcgctgtcgctgcccctcgtcctcgtcgcgctgctcctgccggccgcccgcggcgccgcggagacgccgcagtacacgacggtgcacgcggagtcggacttcgaggtgcggctgtacggcgacaccgtctggatgtccgcccccaccccggacatcccttccttccacgtcgccaccaagctcggcttccacagattgttccagtacctgatgggcgcaaacctcaactcttcgaggatcaggatgaccacccctgtgctcacgagtgtggttccaggtgcagggcctctgcgctcctcggcctactccgtccggctgtacctgccggcgaagttccaggcttcccctccggttcctctcccagagctgaacctgcatccagatcggtggccaggccactgcgtcgcagcgaggagcttctcgggtcgtgcacgggacaagaacgtggtcgaggaagccgagaagctcgccatgagcctgagccggtcaccatgggctaactccacagactactccagcaagagcgcttactcggttgcacagtacagcagtccattccgcatcattggccgtgtcaatgaggtgtggttcgacgtcaactgcagatctacatctactgctgctggtgttgagtcctactgaaaaaaaaacctgccagatgtgatggataataataatttgcatgtaaaacacaagctgtcctgctttattccatctcttactcctagcctacaaattgcctcagaaaaaattgaccgccgtcgtcatcagattggcacgtaatagctggaacaccacggcggcagccagcaaggccaggactgccgcggaaatgtacttccagtttaccatcgtcatggtcgtcggctcaatagatcgcactgtgcattcgtctggaatcaccacctcatcggcttcaacctcctcttttacttgaacgggcctaagtacaccttcgcctgtggtaacattcttgcacagcaatgtgcgctcgctaacattttctttgcacttttgagccaacgccccgttctttttcgccagcgtaacaacctgaacatgaaggcggtctctttccaaggaaagttttgcaaccaagtccatgatagtcttagttttactagcaatgtcttttgcactggacacctttagttggttagcttcatgc

SEQ ID NO: 139133 - DNA, 405 bp, Zea mays
  Clone ID: MRT4577_58372C.1
tggcttcgaacctttgggctgatttatgtgcttggtattcctacttctgctcatattgctcctcttgttattgatgttaagaggaatgttagggatcgttacgcgttgacttctgtttgctccttaactgggcccgttgcgccttctgcttattcggttattactttcactattggtattggtactaattttgtgtggagttccggtgttgttgcgacccataattagtattacgttcgggtcgattatcggactcctcgggctggttttcctactggtgtcgtgtcggtcgttactcattattaggcgactactagggtaactttgcctaagagcaggctccaagggagttgacgtcgtcgtcctgagacgactttggttccaaaggaccggactgcggtcgcc

SEQ ID NO: 139134 - DNA, 833 bp, Zea mays
  Clone ID: MRT4577_58373C.1
cattgggtacctcgaggccggccgggcacagtgattgttagaaacattcctcgtgtctcaagtcattcaacttctgaaacagtggatgagttcttccgaagaaatcacccagaccactatcttggtcatcagcctgtttacaatgcaaatcggtatgctaaacttgtgaagcaaaaggagaggctccaaaactggttggattactacgaactgaagttcgaaaggcatcctgagagaagaccaacaagacggacaggatgccttggtttctgtggcagggaagtggatcaaatagactactaccgggctagaatcagcgagcttgagaggaggatgacatcagaacgacagaaaattctcaatgacccaaaagctgttatgccagtttcttttgtgacatttgactcgagatggggtgcggctgtgtgtgcacagacacaacagtcaaagaacccaacccaatggttgactgattgggctcctgaaccgcgggatgtttattggcaaaatcttgccatcccatttttctctctcagtatccgcaggtttctgatgtctgtcgctgtctttgctctagtgtttttctacatgatccccatcgcgtttgttcaatcgcttgccaatctcgagggtcttgaaaaagttgctccttttctgaagccagtaatagaagcacatgtggtaaaatctttccttcagggatttcttcctggtctggctctgaagatttttctctatattctccctactgtcctgctaatcatgtcaaagggttgagggctatgtctctttatcctcgctggaaaggaggactgcttcgaatattactactt

SEQ ID NO: 139135 - DNA, 355 bp, Zea mays
  Clone ID: MRT4577_58374C.1
gaaccggcaataaactcccccattaatcctggtgggctggggggaaacaatgaaactgggttacaagcaacatgttctttttcaacataccgggaaaggcaattttgaaacccttgccattgggggcctggggccaaattgacaatcaatacaatggtgccaggaaaaaaaaatccccggggggttgactaccccttgggcattttttttaacaaccaagagttgggggccccccgaattattttttggcaaaacaatttaggaaagcgtaatttgggctgggttcggttcccccttttcacggaatttgacattaaaagccatccattggtaaaaacaaacttcatttttttta

SEQ ID NO: 139136 - DNA, 293 bp, Zea mays
  Clone ID: MRT4577_58375C.1
ggttgtggtgttttttttttttttttttttcggaaaaacagggtatggtagttaactttggcatccaggactcccctcctatcctcggggggatgggatttttgggcctgaaaatcccctacaggtttacaggcggaaccactagtacccgggaccgggagagggggtttaaaggggcttccgacgggccaagaaaaagggcccccggccgccccgggtgttaaaaaaaaacccctccacgcgaaaaaaaaaattgggcttcccaggaaagcaaaaaaaacccctggggccca

SEQ ID NO: 139137 - DNA, 338 bp, Zea mays
  Clone ID: MRT4577_58376C.1
tcacttgaacctcttttgtgatatcctagcctcaagtgcacatcaatgcacacacatactgtgtgtaaggagcacaaccgcaagcggtgaaagtagacagaacattatagagacggccatgtgccttgaaccagcaacaggccaacagttaactcaactgcaacattcttcttctttttcctctgcattttcttatataacaaaaaagaaagaatatgaatgggaagatgcatctggagagcagagacaatggcaattcctcttcattggctcctgtaattgaatcagggtactagttcactaagcacctatcaatgtctatcattttaggatctctt

SEQ ID NO: 139138 - DNA, 348 bp, Zea mays
  Clone ID: MRT4577_58377C.1
atcttgagtacgcaagatgcacttaaaggcagcatcattatatgaccttggggtacgctgcccgccaccatggcatgcacgcacgttgcccggaggcagggccgctacacaaaagaagaaagagcaacgccacacacgcacgcacacatacggatcgatcaatacaaccaaaaagcaacaaccaagaacgatcgacggaacgatctggcacatacacgtgtacaggtttgattcaatttgacggattttcttccctggctaggcttctgcttggagcgttgtttacttgacgttgatgggcagcggcttgtcgtcccactccctgaggcactccagcatggggtccac

SEQ ID NO: 139139 - DNA, 321 bp, Zea mays
  unsure (1)..(321): unsure at all n locations
  Clone ID: MRT4577_58378C.1
ccttcttttttttttttttttttccccccccccccccccccacagggcaggcggcacacaaanncacccatagcacaaacccaaaaggacgggataacccnccacccacaaggaaaaaaacaccgctgccaacaaaattcaaagggacaccttccccgcccatttggttttttgacccaacaattcccaacctttaattttccacaacaacaaaaactcatggaattaaccgaatctaaacaaaaagagggccaaaaaaccgctgggaactttcaacctttgtaaacacccccccccccaaacaaaaattcctccttcgga

SEQ ID NO: 139140 - DNA, 373 bp, Zea mays
  Clone ID: MRT4577_58379C.1
cacgactggatgtgcatgacctgctgtctgatatcctgacgcactcaatgctacaaatgcaccatgaaatagtatactagcttgtcctgaaggacatgtgcaaaaaaaacatccgtatggaaacagacgcctaggcggcatggacacgcgttttataagagttgttgtccgcaccgatcagacacgtacatattctgctgttgagatgtcctaatatcgatatcgagactattgtgaatactctgcatagcgctacagaaaatcagcatgcagattgagaacccgttaaccgaatgagatcttgattatgaatgaatgtgctgttctttatgttgcgtttaaaatggagttgtttgaaagtaggtatgcaaga

SEQ ID NO: 139141 - DNA, 223 bp, Zea mays
  Clone ID: MRT4577_5837C.1
gatttttattataatattgctgttgtgaacaccaaggcttttccagaacttcgtgcagcatgctttcataatgaggtgggacactgctgtgcaaaacttgcaaatttgattgccgacaactgatgggatggacttggcagaccactgaggctggaatcgggggccccgttgttgctggtgttggcaaatgcatgggcttgacgtctgattgtgggggtgcttt

SEQ ID NO: 139142 - DNA, 1005 bp, Zea mays
  Clone ID: MRT4577_58380C.1
agggccggccggggactcacaactcaacacaacttcaattcaaagcttcaagctataagcccaacaaagccggccggccagaacgggagtgaatgattgtgtgcgagaggaagccgaaaccctagaccccgcagccaaagatcccaccgctccaccagaggcgatcgaggagaggactcgagacaacccaaccccgccgccgagctacatcgatccatcgatggccccggacacggagaccacgcttgcgatccgcgacgacgaacccgccgccgccgaggtagatcgatcgatggccacggacacggagtcgccgacgccgacgccggtgccgactcttgcgatccgcgacgaggaagaacccgccgccgccgccggagccggagccggagcccaggtcctagaggaaagaagcgtcgccgtcatcctgcaggagctgctccagcccagggaccggcgcgtccaggcttcggccttcttcttcgcctgcggaggctccgtggtgctccacgggaccgtggccaacctcgcggacaacccggagcatgtcctgctcggattcgggctgttcacggtcggcgcggcgctcgccttcctcacgctcagcggctccgaccgcctcgggcgcgctgcggctcgcgtggaggaaaagctcagaggattgttccgctcgcccgctggctagatcctgcagctagctagtagcgaagcgaaccctcgacggtccttctgtttgagtgtgctaatagttctactagtgtgccggcgtgggctgatgctgggctcaccatgtggtttaattttgagaatgtgtgctttgattctgtgtatattacgagataagtgtgatagatgtagtggtaactaaataattaaagttctccttagggtcgattgtaattccaatatcccctttgaatataatgtttccttccaaaaaaaaaaaaaaaaaaaaaaaaaaaaaaggactctgcgttgttaccactgctgtgcgtattatcacaa

SEQ ID NO: 139143 - DNA, 385 bp, Zea mays
  Clone ID: MRT4577_58381C.1
aaaaccaacagcccgaatttgcattaataggtacatacacgactcctcctcctctgctctccaaagttctccatggtacactttcccaagatccgatccatgacggttccgacgcctagtagcagttagaacgaacgaatcactcgagctgcgcgtaccagatcccctggatcttgacatccttgggcgccttggcgccgaggtcggtgtccgacggctgcacgctctcgaagacgccgatgacctcgccggtctccgggttgctcttggtgacgctcaacgtgatgttgcccgtggacgcggcggcgttcttgatgttctccttaaggagctcctcctcgtcgcctctgccttcggcgggggagcgcgacggcgttgtcgtacc

SEQ ID NO: 139144 - DNA, 501 bp, Zea mays
  Clone ID: MRT4577_58382C.1
ccctcgaggccggccgggatcttcctcacctcccgcccacgtctagcaggtgttctcaggaaccaggagtgtagtcgacgaattcctcctcgtgcatcgtcgacgcctctctgaccgagagtgctccacctacttgagcagacgcggcatcatctcctctctgctcaccttatcctctcggtacataacatgcccgatgatgggggatcctacgaatgcaatcacgaaccaaggaaagtacttactactctatgaggcataccttatttgaaatagacaccacatatgggccgatctagtccattggtccaagaccttatggtataatatgatcatccattaatcgagaaacccctgacaaagcaccgatatcgaagatacactacgtctctcgactacctgctgtcgtgatgtcactatcgaccttgcgagaggtgaaactcattcgccatatccgtcatgagaatgccattgctttgaatgatataatgatgactatac

SEQ ID NO: 139145 - DNA, 649 bp, Zea mays
  Clone ID: MRT4577_58383C.1
ttttttttttttttttttttttttttttttttttttttttttttttttttttttttttttttttttttttttttttttttttttttttttttttttttttttttttttggaaaaaacttttaccccccgggtttttaaaaaaaggggggggggggatttttttgaaaaaaaattaaaggggccccccccgacccctaaaaaaaaaaaattccaaaccaaaaaaaaaccccgaaggccagggtccccaattttaaaaaaccaaaccccccggccccccttttggccccaaagtttgcgaaaaggggaaatttaaaaaccgggggaaatcctttgggggaaaaaaaggggggtttaaaaccctttggtttccccaaaattccccccccccaaaaatttttttttttttttggggaaaattttgttggaaaaattgggcccccttttgggggcccccctgatcccttcccccgggggtttttttaccaacctcaccccctggtggggggggccgttcccacggcccttttggattcccccccctgcttccctcttgggccccgggtgaaaggagaccccccccctctttggaaggcctttaaatttgggtgtgtttgtccacaacctcggggagaaatttgaagatatttag

SEQ ID NO: 139146 - DNA, 428 bp, Zea mays
  unsure (1)..(428): unsure at all n locations
  Clone ID: MRT4577_58384C.1
tcaacactaatgtagtcctccttagcatggcgagaccaaatatctcaggttaatgcaacccaanaagtatcaggcaacacagaattgataagcacattacgtcgttcagtgaaaagcttcagaaggtctctagtggtggtctgtctagaaactttggnnaacctaanggttttgagcactggcaatataatcctcccagacttgtgactcaccaatacctaatggaaggtcaagcctagcaatcatactacacaactcatttctagcaaaaatagggggcgatttccaatttgttatagaaccattattatttaaaaagcagtcctatacttttaccctaatcatttttatcaatccattttatctacaagtttttctttatattttaatataatttctcaataccaaattataatattctttctata

SEQ ID NO: 139147 - DNA, 305 bp, Zea mays
  Clone ID: MRT4577_58385C.1
agccccgcaaaaaatactataaatggggggccccccaaaaaaacctttataaattggggaataaggaacaaaagggaaaacacaaattaggtgcccgccgaagccagttattcttggacatttaaacaaacgttttttttacaggtgggaacccatttcaccactggtttgcctagccccaaaacaagggagcataaatttatgacccgtcttttggtggggggccccacaagaacccgaatcccccacaccccccacttttttgggcaaaaaagggggggggcataaaacacaatccctaccct

SEQ ID NO: 139148 - DNA, 222 bp, Zea mays
  Clone ID: MRT4577_58386C.1
tcattcgtcctccatcttcctttaccatccctacactatcgccgagctgcggttacccttataccgaccctacccccctatcacattatatccccaacgtattctacattcaccacatcttccccttccttctttccactaacgtcatcatctaaatccttttatttacccttacctacattatatacctcaactacaaacatcacttatactactaacctt

SEQ ID NO: 139149 - DNA, 550 bp, Zea mays
  Clone ID: MRT4577_58387C.1
cctacctatctgtctggacaaataagaagacgggcagcactaatggcgatagcgtggacgaacgaactgaaaagctgcagcggcgtggaacaacacatactgctggcgcaagcaggccagtacgagcatctgaccccgatctgcgccaacaacaccacctctggcctcgtaaacatctacttgcacaggatgggccgccagaaaaacgctgcccacctcgcacgggtgatgtccccgggacaccggctacaatcccgtccaaaacctgaaataccacctgaccctccgcccgaacatcaacaagaccgacaagatcaagctgacattaatgtccagtatacctcagctgagctgctgggtgaaggtgtctgtgtactactagtccttgcctgtacaacgagcgacgacgcggatttcacggcctgaaattaaaacctgttaatgaaaagcttatgttattaagtaatgcttactctggtcacctagagggtatcaaatataaactacctctctaaaaaaaaaaaaaaaaaaaaaaacggccggcggtcta

SEQ ID NO: 139150 - DNA, 401 bp, Zea mays
  Clone ID: MRT4577_58388C.1
gctatgacacgctgtgccccctgccggaaccggggcataattaatgagcgggtctgcatgttcactatgctgacggccctcaccgttcttaatagcgagggaagacagaaactctttaccaacacacttgacaagctagatggtgacccctacgtcaacatccgtatagccactgattgtattgcgaaagaacatataacgtgatgtatcttaagcacagaaggtgaacatttatgttaaatttgtgaagaagaaacaacaagaaagaatggctgatatagaaaaggttattaaaggacgagaagatagagctattgaaaaggcacaacatgaataggaaatgacattgctagctagagaaagagcacgtgcctagtttcaagactgggagaagaaagagg

SEQ ID NO: 139151 - DNA, 384 bp, Zea mays
  Clone ID: MRT4577_58389C.1
agcaggcacgcctgcaggagccggtcctgaatatatagactggtcgacgagctttcttttcggcggccgccctgacaatgcattgagaggctatggccatcctgggctattgtgctccaagcatccaaacaagggctattaatgggcttgcacaagactacacaggctacgcgcaggttgcatctgcattaccaaccagggtgtcagtatccaacaaccaaacgcatggtctaactacagacatggggcaatggcatgtctagaagcatgcgaccgccttcaggcaacccttggcgctaacgtcaacgttcttgcatacccacatagcctcagaggcggatgcactgtcgacgatgccatccacgtgcatggcgacaccctggc

SEQ ID NO: 139152 - DNA, 927 bp, Zea mays
  Clone ID: MRT4577_5838C.1
atgcaggaggagctaaacaactttaagagaaatgaagtatgtagcttggtgccacgtctgaagcaaaatgttgcgggaaccaagtgggtgtttcacaacaaacaagatgagtacggtgtggtgacaagaaacaaggcgagacttgtggcaaaaggatatacccaattcataggtttggattttgaggagacttttgctcatgtagctaggcttgagtcaattcacatactattagcttatgctgctcaccattattttaagctctatcaaatggacgtgaagagtgctttcctcaatgggccaatcaaggagggggtgtacgtagagcaaccccctagagatttccttatttctaatgcgttcaaggttgagaaagctgatcttactctttttactaatacttgcaatgtgaagcaactcaaggaagggacattcatctctcaaacgaagtgcacacaagatatcctaaagaagtttaggatgaaggacacaaagctcgctaagacgccaatgggaacttacgaacatttggacctcaacacgggaggtaagtctgtagatcaaaaggtatatcggtctatgataggttccttgctttatctttgtgcaagtagaccggatattatgctttgtgttttcatatgtgctagatttcaatccgaccctaatgaatatcactttgtggatgtgaagcgtattcttcgatatttagttcatacgccttatatcgggctcttgtatcctaaggggtctacctctgacttgattggatattcagactccgactatgccagaagcaaggttgataggaatagcacatcagatacttgtcaatttctaggaacgtccctggtgacttggagttcaaagaaacaaacatctgttgccctatccatcgttgaggccgagtatgttgccacaaattag

SEQ ID NO: 139153 - DNA, 656 bp, Zea mays
  Clone ID: MRT4577_58390C.1
ggccgggcaaaaaaaaaacaaaaaaaaaaaaaaaaaaaaggaaaaaaaaaaaaaaaaaaaaaaaaaaaaaaaaaaaaaaaaaaaaaaaaaaaaaaaaaaaaaaaaaaaaaaaaaaaaaaaaaaaggggtctggcccacccgccgccctcctagttcctttattcgccagccgccatgggcaaaattaaaatgggaatcaacggtttggaagggatcggaaggctcggggccagggtccccctccaaagcgaggatgtaaagttggtccccgcaaacaaccctttattaaccagggcctacttgacctacttgttcaagtacaaccccgcccacggcctttggaggcacagcgacttcacactcagggactccaaaaccttttttttgggggacaagccggccaccgtttttggcataagaaaccctggggaaatcccggggggggaggctggccctgattacatcggggagcccaccggggttttcattgacaaggacagggttgctgcacatttaaaggggggggccaaaaaggttgttatttctgccccaagcaaaaacccacccatgtttgttgttggtgtcaatgaggacaagtccacctgggatgttaacattgtttccaatgttagcagacccacaaactgccttgctcc

SEQ ID NO: 139154 - DNA, 373 bp, Zea mays
  Clone ID: MRT4577_58391C.1
gggggacgaacgaaatccattctctttttttatacaacacaccccttaacacaagggtttcctcgaacaatgccgtttggtgcaaaaagaataagctatcgctcaagatcccaacccccacccgggggagacaggggcccaattaacacagcccatgactggtacttttactactaactaaggggaaaacgaacgaacagggcttcgcctgaccccaaaccaacagttggcccccacgtggacgggagggcctactggacgaggccccccgcgacgaggatgaaaaagacggcagatcaagccacgggcaggaccgacgccgggggcccccctggcgcgcccgtgtggggcgccggggcggggcggaccccca

SEQ ID NO: 139155 - DNA, 494 bp, Zea mays
  unsure (1)..(494): unsure at all n locations
  Clone ID: MRT4577_58392C.1
cggacgcgtgggcggacgcgtgggtctggcttcttgggctaccgggttaggcagaacttctgagttttccaatgaatctgttgtatgcgagaagatgtcagaggccaagatccgcgaagagttccctgatgaagctaccaagcacgaagcagacccttaccaccatcggtatccgcgcgcagagtcgtatcacgaccttgccgtacgcatggaacccatcattctagaacttgagcgtgaagagaatgaccttctcatcatcgctcatgagtctgtccttcgtgtactttacaggtacctgatggcatgtaatgcaggccgacatacccaagctcgagtttcctcgcgatgagatcattgagagcataccctcatcctacaacaacgtggcanaacgcatcaagattcctgatttacctgaatcgatggttcccggaagccccgaagatatcaagatccccgttcccccaagtggcgctgtaagtccactatct

SEQ ID NO: 139156 - DNA, 259 bp, Zea mays
  Clone ID: MRT4577_58393C.1
gccagcacgggtgcgggcctgctggggccctcagcctggggcgtgggcatgcgcgcgcccctcatgatggggggtgcagcgcctgcgaggggcatggggaggggctcatcgggcaccgggggggtggaacatcaccaaccgaatggggcccagcggcaccggggttggtgtcctgcgttgagcgggatgccaaagggggcaacaaggaccttgcacctcgcatacagagacgccggttctccgtgataatgtcgcccat

SEQ ID NO: 139157 - DNA, 414 bp, Zea mays
  Clone ID: MRT4577_58394C.1
ggaccggtcaaagcacaaccttagcttgcacaaaaaagctgcaacaccctaactttgttcataggataggaggccttgcatggttccaacatttggggctagttcttaaacttctcggaccgagaaaattaggtttttaacaatacaaaccccttacttttaagggcaaggggtcactattctatgggcaaaaaaccccccatgccttttttttttttttttttcacaaacttattcttgaaaggattggatctattttctatactgggagctgggcagggcgctcaaacttgcagactgtcttcctcccttatttcttgaaaatggacagcctttctccaacgtttaaaaattcaaaccatttgagggggggaaaatcgtcaaaaatgctagcattgttgggtccaaaggacc

SEQ ID NO: 139158 - DNA, 2486 bp, Zea mays
  Clone ID: MRT4577_58395C.1
gccggccggttcgggaatcacgctttgatcgcttcttttttctctccatcatttctccccgtttcgtctcgcttcttttctgtcgcctcccgtttcgtctatctccgcctcgaggccggcctttctgctgcaaggaaaccaatattgtttgctggatctttcaaaaagggaaaccgaattcccgagagcgagcagcagggaatctctgctgaatccgtaggctccgaattggagctggaagtgtagtgatttcctgattggggacataaggcggggtttgtccctactccccagtgagctccacgcggtccctgctcttcttccagtcaaaattctgtacccttcggtgctgggatcaaggaactaggcgtgttgtcttgaactcttgattcctgcttcatggaaattgtatatgtttttctctgaattcaaaatcttccctattctcccaaagctttctgaggaagaaggatattgtccctctccaaaactataaacatgggttggttgagtaaaatatttaaaggtccagtaaatagagtttcaagaggacactacaacgggaactcccatgaaggctattcaactcagcacactaaatcatatggtgtgcatggcaatgaggacgaagacatggatcatgctattgcattatccttatcagaggaagatcaaaggaagggaaaggccattgataccgggcatcatttagatgaagatgaacagattgcacaggctctgcaagaaaatattggtcataacctagctgaagatgaacagcttgcacgggctctgcaagaaagtatgaatgatggacctcctcgtcagcacattccagttgaagatgttaactcagaaagtactccagcaagcatcttgccctcaaatattttcggaccaagtggcttgagggtttgtgctggatgcagaagtccaattggccgcggtcggtttctcagttgtatggactctgtttggcatcccgagtgcttcaggtgttatgcttgtgatagaccaatatcagagtatgagtttgctgttcatgaaaaccatgcctaccacaggccctgctacaaggagcgtttccatcctaaatgtgatgtttgcagtagctttattcccacagataaaaatggcctcattgaataccgggcccatcctttttggatgcagaagtattgtccttcccatgaaaatgatggtacacctaggtgctgcagttgtgaacgaatggagccaaaggacagtcaatacataacattagatgatggccggagactctgcttggagtgtctgcatactgctattatggagaccaatgaatgccagccactgtacattgatattcaagaattttatgagggtatgaacatgaaagtagagcaacaagttcccttgcttttggttgagcgacaagctttaaatgaagccatggaagcagagaaatctgtgcaccaccttcctgaaacaagaggcctctgcctatctgaggagcagattgtcagaactatattgaaaggaccaattggaccaggcaacagaatcatagatatggtcacaggaccatacaaactcattagacggtgtgaagtgactgcaattcttatactgtacgggctgccaaggctgctaactggctcgattctggctcatgagatgatgcatgcttacctccgacttaaaggataccgaaccctgagtccagaggttgaagaaggcatctgtcaggttctagctcatctttggcttgagtcagaaatcacatcaggttctggtagcatgtcaaccacctcagatgcgtcatcgtcatcttcaacatcttcatcatcgaaaaagggcgcaaagacggaatttgaaaaaagacttggggagttcttcaagtaccaaattgaaacagattcttctgtcgcttatggagatgggtttcgagcaggcatgcgagccattgagcggtacggcttgagaagcacccttgatcatatcaagatgacggggtcttttccatgctgaagctggttttttttacctcggtttggatatgggtatacatattttttttggagaacttttggttcaggttatacatacgaaaagccgaacttctgtgtcgagaagaggcataaggatttagctatactgtccattgcaggaaaaaactgtttcccttttcaattataaaatttcacagttcagacatgaaggtatgtggtctttagcttggccaaccttgtggaatgctgtcacagtgtcacttgatgcaaaagaaaattcgaatacatatgctttgctgtgcttgaaaagcaatggttggatgctatgctcttctttattgcgttctctcattatttaacaaactaattacaattgatgcagtttccctttgatgaaggttgattctagtgccaatcctgttgccgcttgtccacggcagtcagggcagagcgataggatttgtttgcaattaacctgatcgtggcctcgtccac

SEQ ID NO: 139159 - DNA, 560 bp, Zea mays
  Clone ID: MRT4577_58396C.1
agggaggtaatgaagataacttcactgactccgtgttctagctgctcgaaactctcaagtatctgacgattccccctccggggattccaaggagagatattccttgccctgagtatccaaggagctgccacatgggatgggtggaaagccaggtggtttggaacaaacacaacgacagcggcggtggtgccgagtgcacgtcactggacggcggggggcataacaacgcgatgcagtttaagacagatgagtacggcgatgttctctgtctcctacagggaaaactactaccagaacagcatcgccgcccaggatttctccgaactagcatacctcaacgacatatggggtctctgcaccgccttgtcggctggagaacacggaatgcggctcagcgcgagcctatatcatgaccttgtccgcactggctgcggatcgatgtgcccggtatggctacactatgctgccgaatacagtgtgtcaatctctgcgcgaagcatcacatctccgaaatatacttgcatgcgcagctcttgcacgatgatgcaattgctttctac

SEQ ID NO: 139160 - DNA, 618 bp, Zea mays
  unsure (1)..(618): unsure at all n locations
  Clone ID: MRT4577_58397C.1
gccgcgcctcgtggtcggtgcggcgtcgcgggccccgccaccagctcctcgatcacagcggcggcgcatcccgcgtccgtgcggcggggcacattgctccccctccgcccgcgctgctccaccggtgcttctaacccggtgctcctcctactcctcttccagggaggggaacggcgattctcatggtaaggcccgccgcgagagctccagtgccgtccggttggacgtcgaagcagatagcgatcaggtaccaagtttggctgacgagcaacgtggtgagggtgatgttacagagctcttcaacctggctcaacggaatatcctgtacattaacaagcagcggcttattgccatggaggagatgaagaaactgcaggatgaaaataatttgcttcttgaggaaatacaaggactagaaacagaaatgcaaggaattcccctagaagcagcacagtggtcaagtttcagtgagttactcctgcggatagatacaatggtcatttctggaatgatcagcatgacggaagcatctgatttaagagagaaacttgtcactaatagaagcataatacanagcaccttttctgatattcatcataagccaaatactgaattgct

SEQ ID NO: 139161 - DNA, 245 bp, Zea mays
  Clone ID: MRT4577_58398C.1
ccccctccaagccggctctgaaatttgaggcccaaagccccgttggcccccatcgccacgccgccggccacgccccagacgtaccccgccgccgtcgtcgtcttccgctcccttcgcgcgcagccctcgttccgccgtccgggtccgagcgcgctcgcttcttcttcccacgtcggacaggttaagtgtggcttcatcgcgtgagtagttgcagttagcgtggcttttcttcgtgcttgctcctg

SEQ ID NO: 139162 - DNA, 631 bp, Zea mays
  unsure (1)..(631): unsure at all n locations
  Clone ID: MRT4577_58399C.1
tcgacccacttttttcgcggncgcgtggngcgcgtcgcgaaccatgcgggacccagcaggtaagcgtatgtcgtcgccggtagggaaaggcgcgtgagcatgtatgtcgtggctggtcgttccgtcgatgaagcaccttatgtgncgagatcgaaggacaacatctcattttcctttcttcatcgtcggtcacgacggcngcgcttgggcgcagtccgagagctttcccttgttaaagcctgaggaggttgctggtttcataaaggactttgatgaacctggttctcttgcaccaactggtcttttcgttggaggtccatagttcatggtgatccaaggtgaacctggngttgtcttccgtggaaagaagggctctgggggcatttctatcatgaaaaccggcttgtccttgattattggtgtctgcgacgagccaatgacttcagggctttgcatcttggtggtggagaggctcggtggtttcctgttcgagcggggcttctaaaagttcgtcatgttctgttttgggtctttgggcacctaagtttgcgcctgctttggttcttttttccgtgtgctcgtgcttgttcttgtcgttttttctgccgttttttttttagcttgtttttgt

SEQ ID NO: 139163 - DNA, 584 bp, Zea mays
  Clone ID: MRT4577_5839C.1
ttttttttttttttttttttttttttcggtcgaatccatatggattgagattaaaaccaacgtgccctaaaacggggttgcccataccttggaatacaatcggattgctcatttgcataacaaaactagctagtatcatcatatagtgaaaaaaaaagtcattttacatcatgtagcactcgaaagaccctccagctcacttctatcccagcaattcaactgcaatgctttggtcttgagttgctcaaaagcagattttaacttttgttttcctacatgtgttacatcaggcacactagaatccagctgatgccttatatattccaggatgcctttaataaccgatttgccaagagaaagattcctatggagtttccggtcattgcataagaaaatgagtatggttgtgacagcacaaactcgacacgacagctctcctgggtagtttaaggtggagacagatgaaagcagatgatcgcctcctgttacaaaagatttgagggactccaatgtgcagcgaagaaccttgtcattcttgtcaaacatgatggtgcatggcttgagaaagtactgaaatagtctcg

SEQ ID NO: 139164 - DNA, 351 bp, Zea mays
  Clone ID: MRT4577_583C.1
cacaccattatctttatgtactccagagcgcacaagaacccgatcgacaccatgagggtgttgctcgttgccctcgctcttctggctctcgctgcgagcgccacctccacacatacaacaagcggttgttgctgtcagccaccgccgccgtctcatataccagccgcggtgcatctaccacctactgctcatctgccacctccgttgcatctaccaccaacggtccacctgctgtcgcctgtataactaccaccgccggtccatgtgccggccccagtacatctgtcgccgtcaccatgcctgtaccctacttaaccgaccgggcctcagcctcatccacagccacaccca

SEQ ID NO: 139165 - DNA, 708 bp, Zea mays
  Clone ID: MRT4577_58400C.1
acacatggctaccagaattaaccctccttgagcttcttgcccttttagagagcggaacgaatgcttgcattattccacagcgctcacttgctcctagtgccattattccgcagctcctcccaccaggtacttcaatggacttcaaacatccaggcgggctagcctataggctactactagcgcttgcggcgagcgcctgtacgacaaccaattgcccaactgcgacaacaattgttgggacagtgtaaccctacaaaccatcgcaagcgcaacaacaacaacattcttctgacatcactgagccacctagcgagcggcgaaccctgtgggctacttgcaacagcagctgattgcatccgacccacttgctctggcgaacgtagctacataccagcctcaacaacagctgcgacagattatgccagcgctcactcaactagccatggtgaaccctggcgtatacctacaactgatttcatctaggccgctcgctgcgagtaatgcacctacggacctacatcaacagttgctgcaagacattgtaccagctctaactcatcagctagatatgtgaaaccctgctacctacttacaacagatgcttccattcaaccaattggttgtgtcgaactcagatgcgcacctacgacagcgactacaattacttaatccattgacagtggctaacccattggacgctaccttcct

SEQ ID NO: 139166 - DNA, 383 bp, Zea mays
  unsure (1)..(383): unsure at all n locations
  Clone ID: MRT4577_58401C.1
gagtcggatggctcgtggctgccctgctcatacgtgcttgccgctcgaccgtatgcgtaacactnccgtcaactgtctcaaggtatggatgtctcattggtcccgacgaatcagctcgggcaccgcttggacgcgtcggacatacaacggactgtagcgcggctgaaccgatgaaccgaccgttcaccgtccaggagctagtccgattcgccgtctatgagcacaacttgaaggccaatgctcttctggggttcgagaagcttgtgaaggctcaagacacaggtgggtgctggcacgatgtactatcttagtttggaagtgaaggatggcgaagctaagaagctctacgaagttaacgtctgggagaagccatgggagaactt

SEQ ID NO: 139167 - DNA, 615 bp, Zea mays
  Clone ID: MRT4577_58402C.1
actctcggccttctttttccttcggatctccactcgggtaggccgacggatcgcgagtcactgggatgtcacgccgtgtgcgtcatgaaccaagggcggccaccattgattaagaagtcacgtcacctcccgtcgggttgctacgaccgggctcctcgtccccttaacctctccctcaagcgtatcaagagagtcacgatgtcctccgcgtggtgcaagacgctaccgaggccgagccttgggagccgagctagtgaagctacgccaccgcctgggccagcttctagattacgtcagggcctgcgatacttcccggatagagcgtctggataatgccccatgccgcatccaggacattgctgacttcgacgttcaccggggagctgcggtggcgctgattatggggcagatatgctccggctatagcctctaggacatcaacaaccctccttcatccctttcgtacaaaggactagaagacatgctagagggttttgacgaggtggctagtcgtgtcgtgcttagcgtgtcggcacatgacatcgtgcgcagcgcgtgctaaccgcgttgtaatgtgctattctcttggagaaataatatggaaatatttgctct

SEQ ID NO: 139168 - DNA, 1928 bp, Zea mays
  Clone ID: MRT4577_58403C.1
cattgggacccctcgagccggccgggccggggctcattcggaggcacgcactcggctaggcgcagaggctttctcctcccccaagccgaaacaccagagggcgagactcgagagagaagagcggcgcggcggaggacagcactggatggagccctcgccggcggcgggagagcttggcgcgatgcttcgtgcggccgctgacttcgcgtcctacccagggttgcatagtgatgatactgtgaggcagttcctggaacgatgtccgctgcctaagctcttaggtgcattgcagagtgaagcagatgtacctgggatggttgaaactgtcacagagtgtctagacaaaatattttcctcaagatatggagcgtcacttctgccaaactacggtgcatttattcaagctggattgctcacagactcgaagcaaatcagaaaattagcctgcaaagctgtactccatcttcttgacaaggctgaagatggtgctgctgctgtggaaacagttgtgcagcataatctgtatcctcttctgatcaaatgtttgattgagggagatgaagaaatttcagcaatcgttttggacactgtaaagcgtttagcccaaattcctaaaggagctgaagtcatattcccaccagatggtcaaggatctgtgcaacttggtaaagtggcggctcagtcatcttcattggcacggattcgtattctatctttgatggccaagatcttcacaaaaaaaagtaaaactgctactgccattcgtgattcaaaccttctgagcatatttgaagaggaaataaaagatagaagagatatgcttaaaaccctcagtgcgctggaggtcctatatgagcttgttgaacaccctcacagcaacattttcctgctgaagaccaacttgcttcaactcataattgatatcatcaatgattcctcagctgattctgttatacgatcaagggcagcatcagttagtgggaggcttctttcttcagctgatgctttcacagcaatagataaatcctgcgttaccaatctgcttgtagccatagacagaattttgaagatggaagaaagcaagaatactgatgaaattgagagtgcattggagaccttgggtctaattggtacaacaagtcaaggagcacatttcttgctgacatcatcaaatgttgccagacatgttgtcgagtcatcctttgaccgtcaaggcaggggtagacagctggctgctttacatgcttttgggaacatctgtggtgttggtagacaagaagatcagatgaaactggatagcgaagccgaggaaaacttgaagcgcttggtctatacgactgcagcaaacagtccaaaattaaccccttcagctcttctactatcagttctgcaacaagacccagacgttaggatagctggctacagagtaataacaggactggtcatccgggaatggtgcttaagggaggtttgcttaaattcagagataatcagatttgttacggatccaacaatggagacaacaaaacttggcatggaaacccggtatggctgctgtgtggcaatcaacaaggccctatcatcatcccatcttctgcatgaagcaagtctttctgaactcgttgggaagttgaatgatgcggtgaaacggggcccttacctttctgataggaagcgtgtggaggcacggccggtggttgatactgcagagaggttttaaggtgccctcgagtattcacccaaagtaaacgatcactctcacagcgtagctaggaggtaactgagcgtgccctgcgtctcatacggttggcttatgggtaacagacatatatatgatgtacctggacgatggggaggacaatgtgtagttgaattcactgagactggcacaatacctaaacttacaaagcaaagatgttgtttcttct

SEQ ID NO: 139169 - DNA, 263 bp, Zea mays
  Clone ID: MRT4577_58404C.1
caaacggagacctgctgccggcataacaacacgacgggagataatccgttcgacaacgcataaaggtgcaactatcgccggctaggggctagaacaggttatgttaccaacacaaggcatttgtagttcagagaaaagtgggaattggacacgtggccatccctagtcaatttttacctcaaaaaaatctaagaggctggtcgggtgcatgaacacattgaccttgcgatccaaggtctcatgcaggaggtgggactatgaac

SEQ ID NO: 139170 - DNA, 1030 bp, Zea mays
  Clone ID: MRT4577_58405C.1
atttgccgatggactcttggtggtgagcagcgagagatagagagggtgaaactacatatgcatatacaaatacatgtagctagcggcgtagtactggatactgtgccatacggagtatagtatagtatatttatactcgctgtattagcagtagaggcggccgtgcagcgatcggtcgacgatggttgttgccgccatgagagacgagggagaggagggacgacgacgggcggtggtggcgatacgggactacgatcccaagacggaccgcgacggcacggaggccgtcgagcgggagtgcgaggtcggcccggccgccgccgccggcgggatgtcgctgcacgccgacctgctcggcgaccccgtcgcgcgcatccgccactcgccgcactacctcatgctggtagctgagacgtccgggccggacggccggatcgtcgccctcgtccggggaaccgtcaagtctgtcgcctccggcaagagccgccctggcgcgcccgccttcgccagagtcggctacattcttggcctccgcgtcgcgccttcccacaggcggatgggcatcgcgcggcagctggtgcatcggctggagcagtggttcgagctgatgggcgccgagtacgcgtacatggccaccgacaggtccaacgaggcgtcgctgcggctcttcaccggccgctgcggctactccaagttccggacgccgtcgctgctggtgcacccggtgcactcgcaccgcctcagggcgccgcgccgcgccacggtggtccgcctcggcgcccgcgacgccgagcggctgtaccgcagccggctcgcgcacgtcgagttcttccccgccgacatcggcgccgtcctgggcaacgcgctctcccgcggcacgttcctggccaccgtgggcggctacgagtggggcggcgtcgaccgcttcctggcgtgcccgccggcgtcgtgggccgtggccagcgcgtgggactgcggcggcgtgttccggctccaggtgcgcggcgcgtcgcgcctgcgccgcgccgcc

SEQ ID NO: 139171 - DNA, 1563 bp, Zea mays
  Clone ID: MRT4577_58406C.1
aattcggcacgagggttttgttgactggaactcccttacagaacaacattggtgaaatgtataacttattgaacttcttacagcctacttcttttccttctctatcatcatttgaggagaagtttaatgaccttacaacagcagaaaaagtagaggagctgaagaaacttgtagctcctcatatgcttcggagattgaaaaaagatgcaatgcaaaatatccccccaaagatagagcgaatggtacctgttgaattgacatcaatccaggctgaatactaccgtgctatgcttacaaagaactatcaagtactgcgcaacattggaaaaggtggtgcacaccagtctttattgaacatagtaatgcagcttcggaaagtctgcaaccatccctatcttattcctggaactgaacctgaatctggttcacctgaatttttgcatgagatgcgcataaaggcctcagcgaagctaactttgttgcactctatgctaaaaatattacacaaggaaggccaccgtgtccttatattctctcagatgacaaaacttcttgacatccttgaagattatctgactttagaatttggccctaaaacatttgaaagagttgatggctcagtatctgtggcagagcgccaggcggcgattgctcgctttaatcaggataagacacgttttgttttcttgctgtctacacgatcatgtggacttggtattaatttggcaactgcagatactgttatcatatatgattcagatttcaacccacatgctgatatacaggcgatgaacagggcacacagaattggacaatcgaatagactcctggtttacaggcttgtggtacgtgctagtgttgaagagcgtatcttgcaattagccaagaagaaactgatgcttgatcaacttttcgttaacaaatcagaatcacagaaagaagtggaagatatcattcgctggggtacagaagaactctttggaagtagtgacagtgtggatggtaaagatagcagtgaagccccaggttctgttgctgatgttgaatttaagcatagaagaaaaaccggtggcctaggtgatgtttatgaggacaaatgtattggtggttctaccaaacttgtttgggatgaaaatgctattttgaagctgcttgatagatcaaaccttccatcatcagtggccgaaagcactgatggggatctggacaatgatatgcttggtactgtgaagtcaatagactggaatgatgagctgaatgaccaccctggtaccaatgaggatattgcacctattgataatgatgggagtgagttggcatctgaatcaaagcaaggtgctactaatcgtttagaagaaaatgaatgggataaacttttacgtgtcagatgggagcaatatcaaatagaggaggaggcatctcttggtcgaggtaaacgtttaaggaaggctgtttcttacagagagacatttgcaacacttcctaatgaagcattaagtgagggctctgatgagggagatgaaccaaagagagaatatacagcagctggactggtcttgaagg

SEQ ID NO: 139172 - DNA, 366 bp, Zea mays
  Clone ID: MRT4577_58407C.1
tcgtgaccactagcacatagaaagatcataagggaccaacaatggcaacacaaataagttcagctgccttatgctccttggcctttgtgcaagtgctgttcccgtaaccattctgccacaatggtcacaagcatctatcgctgccttactacccccatacctctgaccagcggcgtcatgcagtgtgtcaaaacggagatacttcaaccctacaggatccaacaggcaaaggcagcatggttacgtaccttaatcaccctcgttcctccaacatccgccctatctattccaccatcctccttggatgcatatgtcgacacaaaacatgcagacacactacctacaacgacttgtgctacaaaacac

SEQ ID NO: 139173 - DNA, 603 bp, Zea mays
  Clone ID: MRT4577_58408C.1
cctcgaggccggccgggagcagcagatgcaaagccgcaggccgcaactactccgttctgagtatcacagtcacagctaatagctagccagcagcccagcacccagcaactatccgtacgtacgaacgtgcgcttccgatggcggcgacggcatcctctcgcaggccggcaacggcgccggcctcgcgtggttcgcgtacaccgccgccgtcctgtccgccgcgtccctggtgccgctgctccagggggagagcgccgagggcaggagcggccggttcatgaccgccgacgccgagctctggaacggccgcctcgccatgctcggcctcgtcgcgctcgccgtcaccgagtaccttatcggtgcgttccttccccaccccagaatacatacaagccgcaacgtacagctgtgatagactggtagactggtagtacgtttaatttgtaaaaggatagtgtagtatatggtaatacgcgtacgtatacgtatgtatgcatgcgtaattacaatagcttggaaatttactgtcttctataggattccctgaaaaaaaacgtaataataattttttggcacctcaaaaaaaaaaaaaaaaaagcggcc

SEQ ID NO: 139174 - DNA, 963 bp, Zea mays
  unsure (1)..(963): unsure at all n locations
  Clone ID: MRT4577_58409C.1
cattgggtacctcgaggccggccgggagcagcagaagcaaaagccgcaggccgcaactactccgatctgagtatcacagtcacagctaatagctagccagcagcccagcacccagcaactacccgtacgtacgaacgtgcgcttccgatggcgaccacggtgatggcctccgcgaccgcgagctcccccgccttctccgcccccggcgcgcgcgccaggcgcgccgcccggcttccggcggggttccgcggccgtgtcgccgcgccgccgcgccgcctcgcgctgctcgccagggcctcccagcaggccgatgacgctgccgccgacacgagcgcgagcgcggcgccggctgctcggaagctggggctctgggacgcgctggcgttcagcgggcccgcgccggagcggatcaacgggcggctggcgatggtgggcttcgtgtccgcgctcgccgtcgaggccacccgcggcgacggcatcctctcgcaggccggcaacggcgccggcctcgcgtggttcgcgtacaccgccgccgtcctgtccgccgcgtccctggtgccgctgctccagggggagagcgccgagggcaggagcggccggttcatgaccgccgacgccgagctctggaacggccgcctcgccatgctcggcctcgtcgcgctcgccgtcaccgagtaccttaccggcgcgcccttcgtcaacgtgtaaaatacatacaagccgcaacgtacagctgtgatagactggtagtacgtttaatttgtaaaaggatagtgtagtatatggtaattgtaatacgcgtacgtatacgtatgtatgcatgcgtaattacaatagcttggaaatttactgtcttctataggattccctgaaaaaaaaacgtaataataattttttggcacctgaaaataatgtggaatggttctattaataaaaagggaatgaccgctntantaaaanggt

SEQ ID NO: 139175 - DNA, 313 bp, Zea mays
  Clone ID: MRT4577_5840C.1
actgcctggatcagatgcagttacagggggagatgcgagcagcatccgacggcgaccgccatgggcactccgaggggtggcgtctcctgcctgtgccggccctgcaattgcccggcgtgcgggctcccgacctgcctgtggagcatgctcctttctcttcgtgttctcatgagagtcctctccactcatcgtcgagggtatcatcgaagcgaatattcattcggtcaccgtggactcgggctcgggctaccacttcatgcattcagggtcttcgattttctactactatctcaaggtgtccaggactgtgtgt

SEQ ID NO: 139176 - DNA, 976 bp, Zea mays
  Clone ID: MRT4577_58410C.1
ttgggtacctcgagggccggccggtgggtacctcgagaaaaaaaaaaaaaaaaaacaccagcactacagcagcagaagcaaagccgcaggccgcaactactccgatccgcgtgtcacagtcacagctaatagctagccagaagcccagcacttctcttctgcgaacgaagacgaccggaccggacgtacccgtacatacgaacgtgcgctttccgatggcgaccacggtgatggcctccgcgagctccctcgccttctgcgcccccggcgcgcgcgccaggcgcgccgcccagattccggcggggttccgcggcggagtcgccgtgccgccgcgccgcctcgcgccgctgctcgtcagggcctcccagcaggccgatgacgctgccgccgacacgagcgcgagcgcggcgccggcggctgctccgaagaagctggggttctgggacgcgctggcgttcagcgggcccgcgccggagcggatcaacgggcggctggcgatggtgggcttcgtgtccgcgctcgccgtcgaggccacccgcggcgacggcatcctctcgcaggccggcaacggcgccggcctcgcgtggttcgcgtacaccgccgtcgtcctgtccgccgcgtccctggcgcctgtgctccagggggagagcgccgagagcaggagcggcgggttcatgaccgccgacgccgagctctggaacggccgactcgccatgctcgggctcgtcgcgctcgccgtcaccgagtaccttaccggcgcgcccttcgtcaacgtgtagataagccacccgtacagttgtagtcgtagtacgtttgtaaaaggaactagtgtacgcgtatgtatatgtatacaactatatatacatgcatgcaattacagtagcttggaaattactactgtattttgtaggagtctctgaaaagatatattaagagcggatacttgcagacttgagacttgcaacactcgtttgac

SEQ ID NO: 139177 - DNA, 603 bp, Zea mays
  Clone ID: MRT4577_58411C.1
caccaagctgagcgcactaactaccacctaacaacaatcgctgccaacctattaaccctccttgcgctcgctgcccttcctgtgagcgcaccaaacgcgtgcattattccacacagatcacttgctcctagcgccatccttccacagacactcccaccagttacttcaatgggctggcaacacccacctgtgcaagccagcctgcaacacccagcgctcgcggggagcgtgcgacaacaaccaaccgcccaatcgcaacaacaatccttgccacatctaacaatacatgccatcacaacgcaccagccacaacagtccctaccatcaatgacccacctaaccatggtgaaccctgccgtctacttgcaagagcaagtgcttgcatgcaacccacttgctctggcgaacgtacttgcaaaccagccacaaccacagctacaacagtcactgccaacgctcactcaactaaccatggagaaccatgcctgctacgtacaacaacaacaactgatttcatctatcccgctcgctgtgggcaatgcacctacatacctgcatcaacaatcggtgcaacagactgtaccagctctgactcaactagct

SEQ ID NO: 139178 - DNA, 115 bp, Zea mays
  Clone ID: MRT4577_58412C.1
tgttccatgtgccaggcttcgcgagggagcagtggggcatcagcacggaggcgatccggagcgcgttcggcgggtccatgaggagtttcacaggcaggtgaggcaggagtgggcg

SEQ ID NO: 139179 - DNA, 287 bp, Zea mays
  unsure (1)..(287): unsure at all n locations
  Clone ID: MRT4577_58413C.1
ggtggcctggccctgcgtgccgcgtgcgcgctgcagcagtgcggtagcgggcagatggccgactccacggccatgaccgtcgacttcctccgtgcgcggctgctctccgagcggtccgtctcccgcgccgccaaggagcgtgcggacgagctcgccaagagggtcgcggagctggaggagcaggtccgggcggtgacggcgcagaggcggcaggcggagtgggcgaccgccgaggtgctcgcagttctggagtcccagggctttggcgaccatctctcgnngatggg

SEQ ID NO: 139180 - DNA, 312 bp, Zea mays
  unsure (1)..(312): unsure at all n locations
  Clone ID: MRT4577_58414C.1
cgaaanncccgggccggccacacccttccaaacccctcccccaagtcctacaagccctttctcccttttcccaattgcccccctgtgctaagttttattccaaatatgcgctgccactttacaatcaacctaaaccttaaggttctgcttccttatcccataatttgccagaaaaattgtctgttcccaatttttatccttttaatccttttgaatgcccctaattccattatcctttcccctttctctatttataccttcctttttatctttttaaaaattttttcaattatccacctatttatttttctt

SEQ ID NO: 139181 - DNA, 528 bp, Zea mays
  Clone ID: MRT4577_58415C.1
atggttcagatcatcgagcaccgcgacttgtctcccgaggactttctgatggaggaaggggaagcatcttccatgccacgaggctccaaccgccttgcgcctggtgctgctgctatgcacgctgtgcgacagcacacgcccgcgcagacatctaggactttgtcaagggctgctcctggtggggcgttgtctgcggtcagggagttgctgcgtaaccctccaagttccacggcctcgccgggggccatgaggcaatggcgtgaagatgtcgaccgacttctcggcatggcccatcctagctcagctaggtccaagcctcgatcattctggcgtcaacgcaaggcgtcgacatctgtgcgctcaccctcagtgaggggtgcacagactgacgacctgtgggcagaactcaaccacaggcgtgcgggcgaggatgctcgaatctctctggagagggtgcgtgagcgccggcaaaacttcgagggacgcaacctcgaccaagacttcactgcaagggatgcccgaatctag

SEQ ID NO: 139182 - DNA, 512 bp, Zea mays
  Clone ID: MRT4577_58416C.1
ttgatgcgtccgctcccacacacgcagaggcagaaaatctggcccggggcgctgactacatagaaatcccgatgtacgtgatgtcatctatcattatgctcatggcttctatacgaggagaccacatgtgatagaaggactccaggcttcattcatcaatggggtgtagcatgctgtgtccagtcgtctgtgcctgccagaagctcgcttactaggtataacacccggatgtggtgaatctaaagggacgttacagaacagtgggcttctgagatctttaacgtgctactctttttacaatgctgtgtgctacgataggtcccgacccatactgattatgtacgactggtgaaccactaacacttaatccggatccgcaagcgtcccaagaggcgatgaaggctcacgggactagctataaacttactactaattcaccttccatgctcggaataacccagcgaatactggacttaagcgttcacggagattgggctgaactgggccggggg

SEQ ID NO: 139183 - DNA, 1055 bp, Zea mays
  unsure (1)..(1055): unsure at all n locations
  Clone ID: MRT4577_58417C.1
tcatcagcacgtcgtcgatcagcaccagatgctggccttcgacctcaaacggcagcgccgagggctgcacttgcgggtgcaggccattctggctgaagtcgtcgcggtaaaaggacacgtccagggtgcccagcggcaaatcgctgcccagctcttccagtagcgcctgggccacccacacaccaccagtgcggatgccgataaaacgcggctcgctgatggcgcggtgttccaagtgggccttaaggcgaatcgccatctggctgatcagttcggcgggattgggcaggctcatggtggctccttcaaggccttgcgcggcgtgggcgcagcaaggtccggactcaaacgtaaaaagacgcggcaagccgcgtcagtcaggattcaaataaagcggtgttttcatccagccagccctgcagcaacagggcggcggcaatggcgtccacggggttgtcgcggtagctgcctttttgcccgccacggtcgcggcgttcacccttggcttcaaagtggtcaggcgttcatcgtgggtatagaagggcaggttgtagcggccattgaggcggcgggcgaatttttccgcgcgcaggcacatgtcgctgggggtgccgtccatgttcaacggcaggccgaccaccacagcatcgggcttccactctttaatgagggcttcgacctggttccagtccggcacgccgttctgggctttcaaggtacacagctcgcgggcctggccggtaatcacctggccgaccgctacgccgatctgtttggtgccgtagtcaaaaccgaggatcaagcgcaaagccatcaggcgtgccccgcctggctggtcagcaggctgaggttgacccgaagcttggcggcagctgcttccaggcgcagctcactggcggtgttgaacaggatgtcggcgtcaaacgggcaggtcagccaggcattgctggccagttcggcttccagttgcccggcttcccaaccggcatagccgagggtgatcacgctttgctcggggccgacgccgtcggcgatggcaaacaacacgnctggga

SEQ ID NO: 139184 - DNA, 411 bp, Zea mays
  unsure (1)..(411): unsure at all n locations
  Clone ID: MRT4577_58418C.1
acttcaacttgtactatcctcactacccagccgccgacgcgtctaacctcacaccctcttttccccccgcaccaaagaaccacggctgcggcggcagaatacggcggctccgcgggcacaacttacggagatgaatgcccccgagctcgctgttacccgcatccgaattccactctcctccccccccccccccccccccccccccccccctccccccccccccctcttttgctaccttttctctctctagcttgctcccacttctttctctcatttctctcttcacatcccaccccgcccccccccccccccccccccccccccacccccccccccccttttttttttttttcccccccccccccnnncaccactttcatcctccccaccccccccacctatccccccccc

SEQ ID NO: 139185 - DNA, 419 bp, Zea mays
  Clone ID: MRT4577_58419C.1
gagctcactagacggcggccgcccttcttttttttttttttttttttttttttttttattttccttttccttcttcaattttaacctcagttgatgtttaccgtgtgtaaccttttccctcataccggggggaccaaaaaacaaaagggggtggacccccgccctttctctgagacaccagggtacatccccgggtcaaacatttaaaaatgcacccttttttgaaaaaaccggctgctctcgcacaaaaaaaaaaccttccttttgggggcaaaagcactgggcagataaaacgaggaagcaactatccgggacacaactcgtgagcaggttctgtccccccctcccttgaattatatgccctatataagaatacgttactttccgctcacaattgtagcccggcgcgaccgcatatt

SEQ ID NO: 139186 - DNA, 584 bp, Zea mays
  unsure (1)..(584): unsure at all n locations
  Clone ID: MRT4577_5841C.1
cataccccaatttgtccagccttttatgttctaaacggtttctttttttggtatgaacatttgcaaatgcactccaactgcgctcacagcctgaagcagaacaacaaaggctcacaattttctttgctagacattggagctcaaatgtattaccaccatatgatccccaccagttaataggattttttttatctctatctcttattgcaccaggctttgagaaagtatcaccttctgacctctcatagtcatcagcttgtttacttatcttactttgctcatcttcatcaaccaccatcttccataaaacatcattaaacattgacctcaatcttgcagcactcctcctatctttttctctcaaagtaaaaaacttgcttgggttcaagaacaaggctgccccatatatcttttgctccatttgaccatcccatctcttttcatagcaatccaagacctctctaagcaactgtggcttcttactcaaagaattagtgatgctgctctttgctttttccatggctgccataatctcaggcattgctggngtttcatctccatctgctattcttaatgcaataaga

SEQ ID NO: 139187 - DNA, 253 bp, Zea mays
  Clone ID: MRT4577_58420C.1
cccacgcgtccgatcgtcttctcccgcgctagggtttagcatccgtccccaatggcggtccggagccggcggcgccgccggcaccgtcatgctcggcggcaagggctccgccctgtccccgggcggcgtttacgcgttctccctcggactcgccgccccgggcatcgacccttccgcgcacaagtctgtctctacccgcgcgccctggccgaaggagacccccgcgcgggttggcgccgccctcttggcgctg

SEQ ID NO: 139188 - DNA, 117 bp, Zea mays
  Clone ID: MRT4577_58421C.1
cgaagccttctgaattgacagcagctcagcggcaactactgtcccctaatgttctctgtcaggaccagctgccaaagattctacatgccactgatcttgaaagcctcgctcagtgct

SEQ ID NO: 139189 - DNA, 405 bp, Zea mays
  Clone ID: MRT4577_58422C.1
cttcctcccatcccagcaagtgaaaaggaacccaccgggggaacgagtcagccaaagaaaccaatggaggactactactacttgacctcctgggggaccacgggctccgtcgagcccaccggcttcccggcccacacggtgcctcgcaaccatagctcggcgtcgccgaggacccgccgtgcgtcccgcggcgacgctgacgccggagagcggctccaccactactacctcgacgcctgcttccggtgcgggcgacatcttggcgggaacaaggacatctttatgtacaggggcgacaccccgttctgcagcgacgagtgccggcagcagcagattgaggacgacgaggcgagggagaagaagaggtccaggcagcacgctgcgactgcgactgcgactgcgact

SEQ ID NO: 139190 - DNA, 214 bp, Zea mays
  Clone ID: MRT4577_58423C.1
cggacgcgtgggtttgcgtgcacactagtactaacaatgcctaaatgagccctggaatttatgctctaatttttcctggttttctatggagcactgaggtgtttaggtccacctcgtcgtagtattcgtgcgggtcaagctttcttaaatttaatagagagtatattatcaaaaaataaagttataaaataaatgtcattattgcaataaatac

SEQ ID NO: 139191 - DNA, 191 bp, Zea mays
  Clone ID: MRT4577_58424C.1
acgtggttgtgctgctgcttgtcacaaatcagatagcagtagctcgctcacccacctaagctcgccccctagcggaggaggccaggagggagctctataaggcaccaagacagcaggcgtcacattaagagaccacgcgccagcaggaaattctggagaccttatgaggctatcaagggacggcgaagagg

SEQ ID NO: 139192 - DNA, 1373 bp, Zea mays
  Clone ID: MRT4577_58425C.1
gatccatcctatacacaagatttagtccactacaaccaacacaagtgccacaaaagagagagcccggtgtgcaccggactgtccggtgtaacggcacggcaacggctacttcggcgccaacggtcacctgcagcgacattaaatgcgcgccagagcgcgcagaaggcaggcacgagcgggacggcgcaccggacactttacagtacatgtcaggtgcgccaccggacaccccggcgggcccagcagtcagagctccaatggtcagaaccctaacggtcaggtgacgtggctggcgcaccggacatgtccggtgcgcccttcgccagcagacttctccaacggctagtttttggttggtggctataaataccaccccaaccggccacttcaatgtgtgggagcccaagcaacattccaagtcatctagttgacatactcaagccctcccaaccacatatattcattgatccatcctatacacaagatttagaccactacaaccaacacaagtgccacaaaagagagagcaagcaagagagagctactcatttgagtttagcactagtgccttgtgagattcattgagagatagtgtgtgctacatctttgtgttcatttgtgcgtggagttttgactcccattgaacttcctccaaagttttggaggcttgtaaaagctagcaagagacaccaaagagtgtggtggtccttgtggggtcttaagtgatccttgagaagaagaagagctcgccgatccttgtgtgatcggtggagagagggaaagggttgaaaaagacccgtccttagtggactcctcaacggggactaggccttcgagggccgaacctcggtaaaacaaatcacccgtgttcattgtgcttttgcttgtgatttgtttgctttcccttactctaagttctcttgcactattctttactcatatcatttggtgttgcttcaagttaaactctcatttaagtgaagcaacgctccgcaagaaagaacttgtgtttgtgctcttttcatctaagctttcttgctttattatcatagacttattagttgtattgatttatcacttccgcattatttgaaagctatactctttactagcaagaacttagttttctatactccgataattgttcatcttgttctaccacactctgcagcatacttgtcttggagcggggcgttgaagcctttccctctcctttgcttgaggatttgacggaagctcttgatgatgagcgccatctccttgttgtcgagcttggaggcgtcgatgggtgttcgacttggtgtagactccttcttcttttgcttcgtcgccttgaatgccaccggttgtgcctcgggtgtggaggaagcgcc

SEQ ID NO: 139193 - DNA, 176 bp, Zea mays
  Clone ID: MRT4577_58426C.1
acgcggtgaaccgtccgtccgctatgacgctgctgcagcacccgttcgtggcccagccgcagccgcagccgcagcccctggtcgcctcgccgtcatgatggctcgccgtaccctacaaatccacaatgcatgacggatttgattgatttattgattgcttcccgtcctcatacaac

SEQ ID NO: 139194 - DNA, 404 bp, Zea mays
  Clone ID: MRT4577_58427C.1
ggaaaccccgggtcaataattggggcccaccgggctttcccaaggaaccgggggggggcccccaaaaaaaaagagggccaaaaaaacccccccaaaccttcccaaaagggcttaaaaccctaacccaaaatggccccaaaacccccgtttccccaaaaaaagggcaaaaaaaaagcaggggccccccccttaaggcaagttggaagggccccccaaaatcccttttaaccaaagttttggccccccaattaaaaaggaatggccccaccgggggaacccggccttggccccacccccggggtttggctttggaaccggcccggggggcccctcaaaggggcaaatcccaccccccggggggccggaactaggggacccggcccgggacccacactgggggaaaa

SEQ ID NO: 139195 - DNA, 1203 bp, Zea mays
  Clone ID: MRT4577_58428C.1
gctcggccctcggctccttaaggcttcatcttctcaagttccggccgtccatcgccgccgccggcctcggccggctcagttcctgcctgccagccaaaaattccacaccacccacccagagactgaggcgcgcggtggtgaagacgtgatcgaaagtcgaaaccaaaacgatatatagatggggcgcgggcgcggcaaggtggaggtgcgtcgcatcgagaacagcgtgagccggcaggtgaccttctcgaagcggcggcgcgggctggcgaagaaggcgcgggagctggccgtgctctgcgacgccgacgtcgcgctgctcgtcttctccgacaagggcaggctccacgacttcgccgcgcacggcagcatggagcgaatccttggccgatacgagaggtacttgctatgtgaagatagggacgatgtaacccaagactaccctgaagaatcgcaggggaacatgagctatgaccacatcaagttgaggtccaaactcgaagctataaagaagagccaaaggaatctcatgggggagcagctcgagtccctgacgttcagagaggtacagcagcttgagcaccggatagacagcgctctgaggaacgtcagatccaggaaggaccacatcttgctcaactcgatccaggagctccggaacaaggaaacttttctgatggaacaaaatggcattctagagaaggagaaggctgcagtgggggcatcatcatccctgcacaccaccaccagcaccgcagcagcttcttccacggcagcggcggcggcggcccttccaaacctgaacatctgtcccgacgactccgacgagccaggaatggcggcggcggcggggatcaggttgccgtggtggatgctccagccatctgccgtcagccaacggcaggaacagcactgaactgcttgtcttctcagatgatccacgctgcttgttccagctcgattctagtttctattagaactcgattcagctaaggcgggaatttgtgatctttctattgatctgccgttcttattggttgctagatcgattttatccttgtccttcttagtatctgaacctctgctgtgtcgtttgtcgtagttcttggtcgcaaaagctccggtttgcgtctctagtttggtttggttcctgtaaaatctgctgttgtccttcaatgagctgtgcaggccagttagatgatt

SEQ ID NO: 139196 - DNA, 645 bp, Zea mays
  Clone ID: MRT4577_58429C.1
cttccttctttatcccttccccacgccgacgccgccgacgcgcctcctccgctccgctccggtctacatataccagcgccctcgccgtcccccatttccctcctccccaacccgccatttcccctcctccccgagcgtcctgcctctgccgtctccgcggagtgccatcttctccgctccctccgcgcagtccaaccaatctttctgatcggccggtcgaaatgggccacgagggcaccaagtacggcgaggacggccgccccacctgcgactgcctcctcttcgaccttgatgacacgctctacccggtggcctccggcatcggcctggacgtcatgaagaacatccaagaatacatggtcgagaagctcggcatcgacaagagcgtcagccacgagctctgcatcctgctgtacaagcagtacggaaccaccatggccggtctgcgggctgttgggtaccaatttgactatgatgatttccacggctttgttcatggcaggctggcctacgagaagctcaagcctgacccagtactcaggaacatcctcctgagcttaccaatccgcaaactcgtgttcacgaatggtgacaggctgcatgcttcgagggccatgaagaggcttgggatcgaggactgctttg

SEQ ID NO: 139197 - DNA, 399 bp, Zea mays
  Clone ID: MRT4577_5842C.1
attgggtacctcgaggccggccggggtgggcctacaaaactttccttaaatttccacttccgcggatagcgaacgaactctcgatgtgatgcctattcttgcacggccacgtctcgtctcagcgatatcgggcccggatcagctcggcaatagcagtcatctctggactgtagaggagactaatatgatggatcaggagaacaacgagacgtgcctggggaaccactctgatcaagttgcatgtggactaatgatggggacatatagtggctgctcaagtttacgtcctgacaagggccacattgcaagctgctggaggcgagaaaaagctagactatttgacgaagagctggaacatggagatgattttaacagacatagtggttcatgacgattggg

SEQ ID NO: 139198 - DNA, 610 bp, Zea mays
  Clone ID: MRT4577_58430C.1
ccggccgggactgctcgcactcactcacagtcgccgccgctgcccagtgcccactgctcgccgctagaggaatctgagagagagaggggaaagggcgaaggaggcgcaggcaggcatgggctccccttcctccctccccgccgcggcggcgctcgtgctcctggccctgctcgccggagcccagtgccgcgaggcccagttcgacgccgcggacgccggcgcggagaacttcaacaccagctagctagctggtttgcgccctcgggccgctcggtcaccaccacccaccactactaccaccaccacccactagactactgcttctgctaccaaatactacggcggaacggaacggctggttgccgccgccgccgtcgtccttggaaaggttgaggcgtctcttggtcatccgtatcgttaccgttgtcatggtcctttgagtcgttgcaaccctgattgcaagccggcaagggggaaaaaaccaacaaagccgtgtgggaaaatggaggaggcaggcgtacaatgtacgctctcccgcccactgttgctttataatctctatatcatcatcatcttcttcttctccaaaaaaaaaaaaaaaaaagcggcc

SEQ ID NO: 139199 - DNA, 1044 bp, Zea mays
  Clone ID: MRT4577_58431C.1
gcgttcgctagtgggcgcaccaccccgcttgtgcatcccatcccacgtacctgcgtccaactgttgccaccggcgcccggcggtgaccgaccgaccgccagccccattatttcctttcgctttctctagcataccttgccaccaccagctgcccgggtccatgctaaagcagggagggtgccgtgcgagttcccgggcctgaagatcgggttccacgtggaggagtactcgaaccccgtctacttcgcggtgctggtggagtacgaggacggcgacggcgacgtggtgcaggtggacctgatggagtccaagacggcgcgcggcccgccgacggggcggtggacgccgatgcgcgagtcctggggctccgtctggcgcatggacaccaaccaccgcatgcagccgcccttctccatccgcatccgcaacgagtccggcaagacgctcgtcgccaacaacgtcatcccggccaactggcgccccaacaccttctaccgctccttcgtccagtacagctaaccgatcgggatccgtgccctgcccgcaattggagctggctggctggggcgctactcggctcggtcaccatcgtctacagtactatactatgctctactaccactagactgctgctgttactactagctaccaccaagtacggcggaacggaacgtctagtcgtcgtcgtcggcggcggcggccttgggagaggaggtgtctccggtcaccgtgccgttgcagttgtatcgtgatcatggtcctgggagttgttgcatccggggcgcgctttttttaggtcaggcgtcgtgtgcgatgtttgtggggtcaggctggcatgtcatgccgtgcgtgaccctgattgcgagccggcaagcaagaaggaaaaaaaaactaaagccgtgtgggaaaatggaggaggcaggcgtacaagctacgctctcccgcccactgttgcttttataatttattatcatcatcatcatcttcattccgatcggtgattaatcgaaaagtatattgtaatgtataaacgccttttccttt

SEQ ID NO: 139200 - DNA, 389 bp, Zea mays
  Clone ID: MRT4577_58432C.1
gggccaaaagggagcacggctcttgatagcacgtagtgcaattgggctaccgctgctactttgccctaaccactacaacaatgctttataaatatactctcgggtatacaaatcatgcccttaacaaatctgtagcctaccccccaacttctgcagctagcgaggaattattaaaaaaacattccttcatattgactgtgcgctaacaaattcaaaagctacctttcatatacactagcagcatttagaccgattttaggccattcagtgttgaattctttgttccgtgtcatggattggcaactaccttggaccggtctgctgcaccgttccaaggttggacgcggaattctcgatgccgccattggggacctgtgccgggtcggtct

SEQ ID NO: 139201 - DNA, 386 bp, Zea mays
  Clone ID: MRT4577_58433C.1
agcagtggtaacaacgcagagtacgcggggtctccggtcaccgtgccgttgcagttgtatcgtgatcatggtcctgggagttgttgcatccggggcgcgctttttaggtcaggcgtcgtgtgcgatgtttgtggggtcaggctggcatgtcatgccgtgcgtgaccctgattgcgagccggcaagcaagaagacaaaaaaactaaagccgtgtgggaaaatggaggaggcaggcgtacaagctacgctctcccgcccactgttgcttttataatttatcatcatcatcatcttcattccgatcggtgattaatcgaaaagtatattgtaatgcaaaaaaaaaaaaaaaaaaaaaaaaaaaaagtactctgcgttgttaccactgct

SEQ ID NO: 139202 - DNA, 295 bp, Zea mays
  Clone ID: MRT4577_58434C.1
tggattcggccgaggctctctgcttcccctcttgtttctgcgcgccagggcgcatccttggctcagctgccgcgtgggccggcggccagtcggctggcccctctcgcctcccacctgcgccatccctccgtctctcgccctccgatgggggatgttcccctctcgcggggatcccgttgccgggccaaaggtgcggcgccgggcttcctaggtcgcgatcttgggcgcggctggtggcgactgggcacccccttgcgctgttgctgccgatggcccctcttgcttcggggctcca

SEQ ID NO: 139203 - DNA, 1153 bp, Zea mays
  Clone ID: MRT4577_58435C.1
cccacgcgtccgcgctcgtgctcctcctggccctgctcgccggaggccagtgccgagagggccagctcgacgccgcggacgccggcaccggcacggagaactacaccgccagcgacgccgccgtgtactggggcccctggcagagggcccgggccacctggtacggccagcccaacggcgccggccccgacgacaacggtggcgcgtgcggattcaagcacaccaaccagtaccccttcatgtccatgggctcctgcggcaaccagccattgttcaaggacggcaaggggagctgcggctcctgctacaagattcggtgcaggaaggacccgtcctgctccgggcggacggagacggtgatcatcaccgacatgaactactacccggtgtccaagtaccacttcgacctcagcggcactgcgttcggcaggctggccaagcccggcctcaacgacaagctccgccactccggcatcatcgacatcgagttcaccaggtcggtggtgtgcgtgctgttgaatttcgtagcgcggcaagtgaaagtttggtggtagggcggaggcagcagcatcatcatcattagccgctcacgttactcaccgtcgccgcgccggacactgcatgtgcggcaaagtggcgcagcagctgccgaaggccgcttttattgcgctgcggcacagcgcccaccaacatgctcaattttggctactagtgggcgcaccaccccgcttgtgcatcccatcccaacgtacctgcgtccaactgttgccaccggcgcccggcggtgaccgaccgaccgccagccccattatttcctttcgctttctctagcataccttgccaccaccagctgcccgggtccatgctaaagcagggagggagggattccttcacacttgcaaagctctttcttgccttgggttctgttctgctgctactgctagtgctatagtgacaagatggcgccgccgacggatgtgtgtttgcagggtgccgtgcgagttcccgggcctgaagatcgggttccacgtggaggagtactcgaaccccgtctacttcgcggtgctggtggagtacgaggacggcgacggcgacgtggtgcaggtggacctgatggagttcaagatggcgcgcgggccggccaccggggcgg

SEQ ID NO: 139204 - DNA, 1259 bp, Zea mays
  unsure (1)..(1259): unsure at all n locations
  Clone ID: MRT4577_58436C.1
ccggccgggaccagtccaccactgctcgcactcactccaccgccgcccacttcttgtttgtattgtatccaccagaggaagctgagagggccaatgaggcaaggcatgggctccccttccgccaccgccgcggcgctcgtgctcctcctggccctgctcgccggaggccactgccgcgaggcccagctcgacgccgccgccggcacggagaactacaccgccagcgacgccgccgtgtactggggcccctggcagagggcccgggccacctggtacggccagcccaacggcgccggccccgacgacaacggtgagcgccggcattcccgagacctttattaccgctctgcctcctcccttctccctcgaggcccgcctgcctcggtgccttgtgggcggcaatgtggctcacgggacgcgtcgtgtgtgcgctaggtggcgcgtgcgggttcaagcacaccaaccagtaccccttcatgtccatgggctcctgcggcaaccagccattgttcaaggacggcaagggctgcggctcctgctacaagattcggtgcaggaaggacccgtcctgctccgggcggacggagacggtgatcatcaccgacatgaactactacccggtgtccaagtaccacttcgacctcagcggcacggcgttcggtaggctggccaagcccggcctcaacgacaagctccgccactcgggcatcatcgacatcgagttcaccagggtgccgtgcgagttccctggcctcaagatcgggttccacgtggaggagtactcgagccccgtctacttcncggtgctggtggagtacgaggacggcgacggcgacgtggtgcaggtggacctgatggagtccaagacggcgcgcgggccgccgacggggcggtgggcgccgatgcgcgagtcctggggctccatctggcgcatggacaccaaccaccgcatgcagccgcccttctccatccgcatccgcaacgagtccggcaagacgctcgtcgccaggaacgtcatcccggccaactggaggcccaacaccttctaccgctccttcgtccagtacagcaagctagctggtttgcgccctcgggccgctcggtcaccaccacccaccacatactaccaccaccacccactagactactgcttctgctaccaaagtactacggcggaacggaacggctggttgccgccgccgccgtcgtcctggaaaggttaggcgtctcttgtcaaaaaaaaaaaaaaaaaagcggcc

SEQ ID NO: 139205 - DNA, 1552 bp, Zea mays
  Clone ID: MRT4577_58437C.1
aaaaaaaaaaaaaaaaaaaaaactaaaaaaaaaaaaaaaaaaaaaaaaaaaaaaaaaaaaaaaaaaaaaaaaaaaaaaaaaaccggctcgcactcactcacagtcgccgccgctgcccagtgcccactgctcgccgctagaggaatctgagagagagagaggggaaagggcgaaggaggcgcaggcaggcatgggctccccttcctccctccccgccgcggcggcgctcgtgctcctggccctgctcgccggagcccagtgccgcgaggcccagttcgacgccgcggacgccggcgcggagaacttcaacaccagcgaggccgccgtgtactggggcccctggcagaaggcccgggccacctggtacggccagcccaacggcgccggcccggacgacaacggtggtgcgtgcggcttcaagcacaccaaccagtaccccttcatgtccatgggctcctgcggaaaccagccattgttcaaggacggcaagggatgcggctcctgctacaagattcggtgcaggaaggacccgtcctgctccgggcggacggagacggtgatcatcaccgacatgaactactacccggtgtccaagtaccacttcgacctcagcggcacggcgttcggcaggctggccaagtccggcctcaacgacaagctccgccactcgggcatcatcgacatcgagtttcaccagggtgccgtgcgagttccctggcctcaagatcgggttccacgtggaggagtactcgagccccgtctacttcgcggtgctggtggagtacgaggacggcgacggcgacgtggtgcaggtggacctgatggagtccaagacggcgcgcgggccgccgacggggcggtgggcgccgatgcgcgagtcctggggctccatctggcgcatggacaccaaccaccgcatgcagccgcccttctccatccgcatccgcaacgagtccggcaagacgctcgtcgccaggaacgtcatcccggccaactggaggcccaacaccttctaccgctccttcgtccagtacagctagctagctggtctgcgcccctagttctttctactactcggggccgctcggtcaccactactaccaccaccacccactagactactgcttctgctaccaaatactacggcggaacggaacggctggttgccgccgccgccgtcgtccttggaaaggttgaggcgtctcttggtcatccgtatcgttaccgttgtcatggtcctttgagtcgttgcaaccctgattgcaagccggcaaggggggaaaaaacaacaacaaagccgtgtgggaaaatggaggaggcaggcgtacaatgtacgctctcccgcccactgttgctttataatctctatatcatcatcatcttcttcttctccattccgatcggtgattaatcgaaaagtatattgtaatgtataaacaccatttcctgtttcccggagctgagctcccctgttcacacccctgtgcagggttgaggctcctgcatgttaatcgttctttcgtcaaaaaaaaaaaaaaaaaaaaaaaaaaaa

SEQ ID NO: 139206 - DNA, 282 bp, Zea mays
  Clone ID: MRT4577_58438C.1
cacccactggcggccgctcctacaggatcctagctcggtactcagcttggcttaagcttggtcataggtgtgtcctgcgtgatatggatctccgctcacacccacacactacatactagctagaagcataatgtgattagtctgtattgcctaatgagcgctctacactaaccttagttgaccatcgctcactgaccactctccagctgaaaagccctgtatgtccagttgattaatggatcgcgcaactcgcggatacaggcgtttggccgctagagcgct

SEQ ID NO: 139207 - DNA, 1249 bp, Zea mays
  Clone ID: MRT4577_58439C.1
aattcggcacgaggccgccgtgtactggggcccctggcagaaggcccgggccacctggtacggccagcccaacggcgccggcccggacgacaacggtggtgcgtgcggcttcaagcacaccaaccagtaccccttcatgtccatgggctcctgcggaaaccagccattgttcaaggacggcaagggatgcggctcctgctacaagattcggtgcaggaaggacccgtcctgctccgggcggacggagacggtgatcatcaccgacatgaactactacccggtgtccaagtaccacttcgacctcagcggcacggcgttcggcaggctggccaagtccggcctcaacgacaagctccgccactcgggcatcatcgacatcgagttcaccagggtgccgtgcgagttccctggcctcaagatcgggttccacgtggaggagtactcgagccccgtctacttcgcggtgctggtggagtacgaggacggcgacggcgacgtggtgcaggtggacctgatggagtccaagacggcgcgcgggccgccgacggggcgctgggcgccgatgcgcgagtcctggggctccgtctggcgcatggacaccaaccaccgcatgcagccgcccttctccatccgcatccgcaacgagtccggcaagacgctcgtcgccaggaacgtcatcccggccaactggaggcccaacaccttctaccgctccttcgtccagtacagctagctagctagctggtttgcgcccctagttcaccacccaccactactaccaccgccacccactagactactgcttctgctaccaaatactacggcggaacggaacggctggttgccgccgccgccgtcgtccttggaaaggttgaggcgtctcttggtcatccgtatcgttaccgttgtcatggtcctttgagtcgttgcaaccctgattgcaagccggcaagggggaaaaaaccaacaaagccgtgtgggaaaatggaggaggcaggcgtacaatgtacgctctcccgcccactgttgctttataatctctatatcatcatcatcttcttcttctccattccgatcggtgattaatcgaaaagtatattgtaatgtataaacaccatttcctgtttcccggagctgagctaccctgttcacacccctgtgcagggttgaggctccgcatgttaattgttctttcgtcagtaatgttttctgtgacaaaaaaaaaaaaaaaaaaaaaaaaaaactcgag

SEQ ID NO: 139208 - DNA, 282 bp, Zea mays
  Clone ID: MRT4577_5843C.1
agcgcggagaacggctcgaggacggcagacagccccggcctgcacagccacaaaggggggcaggggcctgggggctcaaattaacaaaacagagaccggggacatgacaagggcagagacccggcggaggcgggaggacacgcccaacgaccggccataagaacacggggagcaagccgtcactggaagcggcgcggacgtaacaagcgacgacggggccgacccagccccacggaggaccgaaccagggggagaccacggggacacgggacccgaacaggg

SEQ ID NO: 139209 - DNA, 362 bp, Zea mays
  Clone ID: MRT4577_58440C.1
acttcatccggcgtgtgtaattaatatttgtttgggcaaaacaaccttacttttttatccaaaactacgccccccaaggcaacaacctaaaggcccccactgccaccacaactaaaaagaggagggcaccatccctgcccaaacccccatccaacaacaaaaaacttacacttccaccaccaaccctaccaacactaaaaacccgcgccccgccccagtaacccgcaccggcaaccccaaaaacaaaaaaatgttctccaataaaacctcaccgtacaagccccgatacatctactccatgctaaactccttcaccgaacccctcgaacaacccaacaagaacagcaactccaacatacgtt

SEQ ID NO: 139210 - DNA, 530 bp, Zea mays
  Clone ID: MRT4577_58441C.1
ctttatatcaacacatggcaatcatacggtttcttgtagagcctccaaccattctagactatgtaccctacaatgggtgaggtgcttgattaatacttcttttttgaatacatgcctgatttcctatacaacacacaattgactatgtgtactaaggatagaaattaaactgctacttatggtggatagctccacctaggttagaattatagattgacctccctgcgcaagcattatattattgtcgttttggattggctaactaacaggtgtcgatgattatttgctgtcaaccactgttagttctttttcgctttataatctattcaacgattgctattggccgaagggcactgccaccttcttttgcttttacttgatgcacggccattgatatgtattccatgtttatgattacttaaaacatggatagaatacaatggttcagcctcagcttaatccatgcaaggatggggttggatagtcctcagctgtttattaatcctgtgagcagtgatttactgactatt

SEQ ID NO: 139211 - DNA, 328 bp, Zea mays
  Clone ID: MRT4577_58442C.1
attattttattatggtctttattttgatttttttgattaacgaaccatatagaggggggagacctttataaacacaagatatgtctagccagacgaaccaaaagtagacgtgccgtctggacaagagttaaaaagtgcccatgctctataagacatatgcgccacgtgatggcgtcacgtggcgaactgaactaagtacaaaggtcatgataaaaagaagggcaaaatttatgtctgatcgtggttgctgaggcaaaccccactttgaaatttaggagggtgacaccattatagggctcgttaaacaaaaaaaaaaattgtttggccc

SEQ ID NO: 139212 - DNA, 261 bp, Zea mays
  Clone ID: MRT4577_58443C.1
acccgcccgtccaaccagtccagatagatctttcccccgtcctccctcgccttcgcctcgtcggcatgagatttccagtaccaacgccggtcgacacctaccctccttccctctcgcgctatggcccatactgttgtgctcaaggttggcatgtcctgtgatggctgtgttggagctgtcaaacgggtcctgggcaagattgaaggcgtcgagtcctacgacgtagacatcatggcaaacaatgtcaccgtgcatggcaat

SEQ ID NO: 139213 - DNA, 608 bp, Zea mays
  Clone ID: MRT4577_58444C.1
gattaaaagacccgcgctagggccgcaaaaatttttttttaaaacatgaccccccgcccatgaaattttacctcccaaaaggaaagattttttgttatctttaaaccgaggggtaaggtttaatggggagggaaaaaacgtactgtaaaaccctaaaaaggagtttgccgccccaaaaaaaagtatcccggaaactacacccctagaatttaacacccaatcgcacggggggggtgactgacgcccggataaaaaaacccaaagaggtgttttacttcgaaaaaaaaggacctaagttggacctcccacccaaaaaggaatccggaggcctaaggaacaatcccatcttttaactcctggttgtcgccgcgccccaaaaacccgactatattaacccttcccaataagaccccgatttttacgcgaaaaatttctgtgacgtgttgggaggcgaccttttctttaacctttccccggcaggggaaagcgtgggaaccctcactggataaggaacatacggcctaccctttgcaaaacacagaagaaaataccgcccccgggaaggctcccgtaccgcaaccaatcgtgaaaaccaccacgcccttggg

SEQ ID NO: 139214 - DNA, 705 bp, Zea mays
  Clone ID: MRT4577_58445C.1
actatatctcacctctttccttcccctccctccagatctctccgcacccggcagatccgacaccccggcgcgctgccacgccatgatctcctcgagcaagctgaagtccgtcgacttctacagaaaaattcctagggatttgacggaggcatcactatctggcgctggattatccatatttgcagcactggcaatggtgtttttgtttggaatggagttgagtagttacttagcagtcaataccaccacatctgtaattgttgacaggagttcagatggggagttcttacggatagattttaacttgagctttcctgcgctttcatgtgaatttgcatcagttgatgtcagtgatgtgctgggaacaaacagactaaacataacgaaaactgttcgcaagttttcaattgatcggaatttagtacctactggatctgagttccacgctggacctatacccactgtcaacaaacatggagatgatgttgaagaataccatggtgatggttcagttgccttgtcctctcgcaattttgatagctattctcacctgtaccctgttttggttgtcaacttttatgccccctggtgttattggagcaatcgtctgaaaccttcatgggaaaaggctgcgcaaataataagggagagatatgaccctgaaatggatggcagaattcttcttggcaaagttgactgcactga

SEQ ID NO: 139215 - DNA, 175 bp, Zea mays
  Clone ID: MRT4577_58446C.1
tcgacccacgggggcggaagccccgggctccccctacgccttctcgccggaatccgcccccaagcgtgccccacactctcctccgcagaagaagaagtctccctctgaggaaagagatgacacggagaaacccccacatatgagatatttatagtctaaaacaggagcggggggc

SEQ ID NO: 139216 - DNA, 1545 bp, Zea mays
  Clone ID: MRT4577_58447C.1
ctttgccttcaagtctccaaagccccccaggccccagctcgacgctcgctaccctaccccgcaaccccgagcagagtcccaagcccaagaaaccaacccccgacgcgcgcgagacggcgagagagggagagataggtgtgcggcagtaatatagtgggtttgctctaattcggcacgaggggctaaattcggcacgagggggaaatggagctgctcagtggcgcagtggcgcagcgggagcttggggaagcggaagcttgcgagcagccagagcactagccattacccagcgctaccatacactgacatatctatcgatctgatcgggctgctgctgagtgcagtgtgtgtacaaaaggccctgaaggcggtaagaccgagctgcacctgcactagaggtgaaggggtgtgagggagaagaaaagcgagtagcccgtgagctgctgcggtgcgagggagcccagggtttcgtctcgtctggccctcttctcttggcgcggccatggacgcctacgaggccaccaaggtggtgttctcccggatccaagccctagacccggaccacgccgccaagatcatgggcctcctcctcatccaggaccatggcgagaaggagatgatccgcctcgccttcggccccgagtctctgctccacgctgtcatggccaaggcgcgcaaggacctcggcctgctcctcccggcctcgccgacctccgttgcggccgccggccacgcgccgttcctgcagctcccacgccagaactccgggcgcgcgggcgcgccgtcgccgctctcggtgtcctcgccgtcgtcatggggccacgcgcccgtgttctccaggagcaacagcacgagtaatggtactggcaccgcggaggaggcggcgggggctggggaggagctgcccagtcccgtgaacggcggcgcggcgccgttctttcctcgtcaggccggcgacgcgctcctggacgacttgcagctgcaggagcagctcgcgttcctcaacgagggcggcgggaacccggcccaccagctcctggggttcgacggcggggagtgccggagccccggtcccggtgatgccgatgggatgttcgcgttcggcctcgggtggcacaacgggggcccagcgcaccgtaggagttcgtcagtcaacgagctctgccttggcggcggcggcggcggcggcgatggtttcggttggaagccctgcctctactacgcgcgcgggttctgcaagaacggcggcagctgcaggttcgtccacggcggcctctccgacgacgctgctgcgctcgctggcgccaagatggaggcagccgccgatcagcagcagcagtgccaggacttcctcatccgctccaagggccagcgcctcggccccgccgccttcccctactcccccaccggctccctcccaggctcgccctccgccgctagcaagtgcctcagcttcctgctgcagcaacagcagcagcagcacgacagagccgcggcggccgcgtctctgatgtgggcggcggcgacgaggcgccaagttcatgg

SEQ ID NO: 139217 - DNA, 276 bp, Zea mays
  Clone ID: MRT4577_58448C.1
gcattccccaactaccgccagcctcggaaggaacgttccaaaagcgcaagagtctaagtccgacgccttcccattcttcctcggcgctatggcgacctgatatcacataaacagtggcgaacgctgccgctgtgcttgatagcagcgatggtgtcaagggcaccatctatttcacccaagagggagatggaactaccggtggaacaggaagtagctctgtcctcaagcctggtatgcatgggagccatgtacatgcactcagcgacaccaccgatg

SEQ ID NO: 139218 - DNA, 589 bp, Zea mays
  Clone ID: MRT4577_58449C.1
gccggccgggtcgggagccacaagtaaaatcaaacatgagctagggtttgtgtcacctaccgtcggcgccgtcgccgccactggagttcgagcctgcacacgtgagggcgtcgcgaccggctgtgtgcagcgtgtcggcggtgcctcgcgcggccaaggaggaaccggtgggcatcgcggcctgctcgttcgtgtcgggctgcgcgacctgcgcgtccttcttggtggcctcggcggacgtgagctgctcccggcgcgacctgcgcgtccttcttggcgggcttggtggacacgagctgctcccgcagcttcttgagctcctcctgcaccttccccagcttgccctcccgctccgcaactcgtgctccctgctcccgccagcagcgggctcctagctacccaacggccactgggcggaggaagctagactccggccactgggtgcaagagctgctacggagggaggtgagcgtctgctcctgcgctgagtgctgatggtatatgcagattgaggccctgttcggtttcaccggaatagaccaggatttatttcagcgcaaaaaaaaaaaaaaaaaaggcccctagggcc

SEQ ID NO: 139219 - DNA, 421 bp, Zea mays
  Clone ID: MRT4577_5844C.1
acataactcacatgaaatattcatttcttatatagtttgtcacatttgcttaaaaaaacatacaggacactgccaccccctttttgcaagggatgttttactacacttttggtacaccatcatgcgacaacaacattacatagctcctagactattttataacaaattcagaaaaacacacacacacacacacaagggttttacactattttgaaagtgaaacgcacaacatgacaatacccgaaatggggggctccatatgttttagtctgtatgtctagtctagaacagctaaaataggcagcacgcttttctaacacctcaaaatggtaaaatccacgctcagctcatgtttccgggtacattatgcgacaacaacattacacttttggtaagccataaaaaagcgcacatcataaac

SEQ ID NO: 139220 - DNA, 239 bp, Zea mays
  Clone ID: MRT4577_58450C.1
ttttgtttttttaagggggaagggacggagtattgttattatcctaagtgcaaaacaacaaccacaagcgctcgattgaaatgaccaaactgatctacgaacccgctacacgcactactgtacccataggtaaaaagaaacgcacggagttcgttacttaattatggaccaaacgttccatcattcagttgttgaccttgataaccttactgaaccaacaagctaaattctgggggttc

SEQ ID NO: 139221 - DNA, 292 bp, Zea mays
  Clone ID: MRT4577_58451C.1
ctaagatttagctcgagctatgtcgcataggcttcagcgatgaccttgggtaggccaaggttggagacgaggcagtatcgtgaaatccgctacacgtgcagatgccgacctgcgttaatacccgtaccggcaagactcatgactctggaggcaagcccagttacactcttcgaaaatgggaagtgcgcatgatccaggatatggaaggcataccccccgaccagcagaggctcatctttgcaggcaagcagctggaagacggtcgaactctttctgactacaacatacagag

SEQ ID NO: 139222 - DNA, 371 bp, Zea mays
  Clone ID: MRT4577_58452C.1
agccttccgccaacccttccggccccaagggccaatatttttaagttgccattgccggcccagcttacccaaccggttgtctttaataggttggggggccagttccacctgccctcgatcatttttgaaggtgtccggccccgaaccatatccccatttgtttaatctaatgaaaggggttttgccacagggacctccttgccccaaagccttttggccccttcaatgtttgttagcggtggcataaatgtccaagtgttccggcccccgttttttgctaatgctcctgctaagaagggaggcaggacctccatgatcgatttaatgatggccgtgttttaagcttttttttcaaaaactgttgtttttcc

SEQ ID NO: 139223 - DNA, 212 bp, Zea mays
  Clone ID: MRT4577_58453C.1
ataaccaaaacctctcaccccccaacccattaaagattcgtgtctcttccctttgcttccatctcaaaaagaattatcctgtggcaattcctccctacctttgccggtggtttcataccactttttcacccaggacttattttttcccaacaaatgccttggccttcgcctctgtgaggtccagcacccaccccaccctttttttctttttg

SEQ ID NO: 139224 - DNA, 400 bp, Zea mays
  Clone ID: MRT4577_58454C.1
agaaagcttgcccatgtttgcgcctgagattaactgcgtattatacacaatattcgagtccgactaaacatgcgttacacgaccaacgcagatgtacaacccacactttctctccatgttctggtgctgttagtgaacatttcggaggatgccgtatattaattgacgcgggctcatagtaggcagacaccagccaagacaacagccacattttttttactgcgaaaagagcatatggtgcacaatggcacaaacaaaagggttgggagcagatgagatggatccagtcgataaccaagacccagaccacctgcaagataacattcctgctggacatggaaaaaacctgatcgttgaccctcaggaacatattctttgtgaaactggcattgatgccgat

SEQ ID NO: 139225 - DNA, 298 bp, Zea mays
  Clone ID: MRT4577_58455C.1
ccagtttccagagagccagagagtgagagagagaaagagagtgagagagagagagaaagagagagagagatgctgttgaatcagaaacagatcaacagcccaaagattttcctgtccctggagtgccagcaccaggaagctccagggctgagtggtcaggagccagtttctccagcccctcctccccacaacccctagtggggaggggcagctgtccatttgcacaaagtattaatgcaactgaagctgtgatatttcaaacgactgtaggaggaaaaattaaggggagagaggaaaa

SEQ ID NO: 139226 - DNA, 413 bp, Zea mays
  Clone ID: MRT4577_58456C.1
ctcgccctatatagttagcaccccggcccccaacattgtgcctgatgctgctgacatgtaacccaacgctcccccctacgtttcaccggaggcgcgcgccacgacggtgaaaactacatatgcttgctagctcccacggcggtgcgggccctgtcgtactacagggcacgccgagcagcggtcatgctcgcaagcgcaccgatcggccatgtagggcaactatacatctttggcacgcatccatcatgctccgagggagacaagattggcaatggagtgcgtgcccatgtatgtttttgcccagggcgcgcacgcgcggctctgggcgagtcacaatggagatgcaatatcatgtatacaccatttgtgttacaacacaaacagtgagaaactattagcgcaaacaaaaaata

SEQ ID NO: 139227 - DNA, 581 bp, Zea mays
  unsure (1)..(581): unsure at all n locations
  Clone ID: MRT4577_58457C.1
gtatcccggcaggtaccgttggtacataaggaggccgtngattattcattgagcgagaatggtcatgcaaaatgaggtagaagccgcagtgaagatttccctattggcagctttgggctcgactacaaataaacttgccaaagttaaggaaatcggaggagaaagcaaagtttcttgtcggagagagagatcgtttgcttacagagagagattctgctcttcaagaagctcagatgtggcgctcagagctaggaaaagctagaggaaatgctgcaattctagaagcagctgttgtcagagctgaagagaaagctagggtctaagcagcaaatggtgacatcggcataaaagaagccatgagccgacttgagtctgccatcaaagaaaaggaaaatctcctagcccttgtggatgctctacaatctcaattacaaagacaagagactagcacaatacatgtttgtgaagagagctcggagctctctctactgctccgaagcacatggaagatgacaatgttcataaagcttgcatatacagaccgaatactggttatagagaacgttgttgagttggatgat

SEQ ID NO: 139228 - DNA, 351 bp, Zea mays
  Clone ID: MRT4577_58458C.1
cggacgcgtgggaaaaaaaaaaaaaaataaaaaaaaaaaaaaaaaaaaaaaaaaagagaaaaattaaaaaaaaaaaaaaaaaaaaaaaaacaaaaaaaaaaaaaaaaaaaaaaaaaaaaaaacaaaaaaaaaaaaaaaaaagagggggggccccatcaaaaggaccaaagctaaccgcccggggcagcaaagaaaaaacttttcttaaagggcacccaaaactaaattcacggggcgcagatcaaaaacggtgcaatgggaaaaacccgcggtttcccaacctaaatggaaaagggcaaaagccccgttgcaaaacgtgaataaaaaccaaaaggggcgtaacgattaccc

SEQ ID NO: 139229 - DNA, 489 bp, Zea mays
  Clone ID: MRT4577_58459C.1
ggggccacaaaattgcaatgcatgttaaaaacaaaaatggggataatccgggcaaggaaccattttgcagggtccaaagggggggctaacaatgttttaatcccgaaatttaactgatctgaaaaaaccaaaaaattttgcaacaacaaactaaaaacgttttaaggaaaactttaaaaataagcatgcccggggcaacttgaaaaaaaattgtccaaagaatgccgttaccccattccaatgttttggaaaaaaaaatggatataaaggcactgccactagcttcgggaaggctttaaaagggaggcacaagccttacttccaaaggttgggcagggacattttcttttccgggttttttttaaaaaccttggccactgccattttaaaatcctcctgggaaacgggcacccttttttaaaaaaaagaaaaaattccagcctttttgaaaaaggccttgaactaaatttctgaggccccattattttt

SEQ ID NO: 139230 - DNA, 655 bp, Zea mays
  unsure (1)..(655): unsure at all n locations
  Clone ID: MRT4577_5845C.1
ttttctaggttgtcttttcttttcctttggagggggcctcagtagatatttcagagtgaaaaattccttccatttgtgcctatggtgcttcacaggtcctgtccacctgttgaggactgtggcctctacattccagtttgggccattcagttactactcaatatgatcctgtctgagtgactttgagtttttttattccttttcagttgaattgtgtatgttcaaggtttccatagaaagatttatactgctataggcacatattatcagcagagggatatgaacctgcatctaccgtgacaacttttttcttggatacgcaggaggactgtgcattattacattaaggagagaaaatatttacaagacacaaactcaccgcacattgttcaaggaatacacgtgactgaaactaaaacactaaactggaacaacaatctatcatgacacttgtctaggcagatttgttgtacccataagactagccacagcatcggttttctatcaagctgaaaaaaggagagagcgttcaagtattgagtcatcccattgtgggcatcgatgtttaatcataaaaagcatgagttgagtagttntcttgctttgatgctgagcaaataacaacttttccagccagcgtttgttcctaccacct

SEQ ID NO: 139231 - DNA, 648 bp, Zea mays
  Clone ID: MRT4577_58460C.1
ggccgcttttttttttttttttttgaaattgaaatctagctaaattattggtacaaagcaagaaatcactctatgtacttgtgccaaactaacaaaagaaactaccaatttgaatgaacaaacatcttagaatctgagtgctggacgatccatatttatttgggcttgtcccacgtaagatgtctgttcttggcactataacatgatgatgcgaaaccctccatcacacacacatgattaactcctagcccttttaccttgctccaaactcttaaccctaatgaacgtatgtgtgtctctcgtctgttcagtcttcaccaggctttgactccacttgttttttgagaccctcttttgatgcgctgtgacaccaacagagagtttggtctcctagaaaccaaggttcgcgcgccacgtgtcgcaaagcacgcacggaaggaccgaagggtaacaagtcggcacgccagatctggtcgccttgcaggacgcgaagaccccggcctcggggctcacactttattgtggtggtccgatactttctgcacggggcggatggcaccctgagcgcgctgttcaagggtgcgcaccagcgtcgccacatggacggactgaggctggaggcggccgcgactcagcaggtggtcagcg

SEQ ID NO: 139232 - DNA, 647 bp, Zea mays
  Clone ID: MRT4577_58461C.1
cattgggtacctcgaggccggccgggagtttcttccatacgacgaggaagagactactagaggagcgcaagcgttcccgactcatatggcgcccttccccgccctccactcgtctcaggtgaccgccaacgcgcggacgatctatcgtacgcgtgtccgctgcacgaatctgcggagaccaacaagaagcacgtctcctgcaaggacgtcagcattatggctatggacatcatcatacgtcagaaaactgctaaaaacgcagtcggtcgaggacacatgatctgcggtcacgcgtgacatggtcgtttatcgcctccgcatatcgcacaactagtgagggcacacaggaaggagcttccttcagaactcgtgctgtgagtactccagtcgtcataccgctatgatctgatccatgacgtatatcagcgtatgcctcgcaggcgtctctatgctgtctgatttacgtgcaatgggcactggagtaccctcatcgacgtcgcgcgtggatcgtgaggaccacatgagggtcgcctgccgagtcgagattatctgatgatatcgagaggctggagacactattgccattgaggaatatccaaatcatgacgatgtgaaatacgcgattagctcgcttgatgactcacaga

SEQ ID NO: 139233 - DNA, 250 bp, Zea mays
  Clone ID: MRT4577_58462C.1
cggaataaccggtctgtcgagcccgcttgtaggccgccgcccggcccatgtcgttgggggggagcattgaaacggcagtcggggtcgccaccctctggaccgcggagacgaagaagagccgggagatcgccgggcgcaaacagagccggggggacacgatcaaagccggcggagctagcagagcagctagctgcccctcgcgtgagagcgtcaccgcaccggcagatgcgcgcgcacacaggaccgaaac

SEQ ID NO: 139234 - DNA, 264 bp, Zea mays
  Clone ID: MRT4577_58463C.1
gggatttttaaaaactcaggacatgatatatatatacaatacatatatagcatgttccctaatcgctacaaaatcctaaggcaatttagagaaaaaagtgaccataaaaattatgactaggaaataatggggagatgcataagtcctgatgtttcatcaggataatggctttaatttggatcctgaagtattagtaggctattaataggcaaggatctctttattccttacacacatattaatgtagcatcatactatgaactt

SEQ ID NO: 139235 - DNA, 423 bp, Zea mays
  unsure (1)..(423): unsure at all n locations
  Clone ID: MRT4577_58464C.1
ttaattcggcacgaggcacaaggggggggggatatccctacttcaaaacgcttntctgaacaaaaagaagctgaaacacgctaacagcacaacaaggagcatggggcgcgggcgcggccacctcctgctgccggaagcagccgcctgcctgcgggcacggacagacgctctacctgaggaggggggagcacatttcngtggttttcgcccccccgggctgccgagggacgggctcaggaggcgcggccgaagactccaccaggacgcgcaggaagccaccaaaggcgcgaggcaacacaacggaagcccgatcaggacctccggaagcgacgacgacccatccgtcgactaacgcaacacccagtactaaggggctgatggcatctggacaccgccgcagaactgcaacactatcttcaacac

SEQ ID NO: 139236 - DNA, 2643 bp, Zea mays
  Clone ID: MRT4577_58465C.1
atgtctgaagataagaaagttgttgctgaatcgaagctgagcctttctgaggagatgcatctcggctttcttcaatcaatagcaaagaccaatacagagaagatcactagggagattttggagggtttatctgaagacactggtgacagtgacagttatgatgtggatagtggtggtgaagattccgtagatcgaccttggcgaccaagccatgcagtttttggtaaatcaagtattaaacaaagccatcttgtcaatatgaggggtagatattttcgggacttgtctattgtgagggctgatgaaggagagaaaacttgtccgactcctgaggagaatgaagtcgtgatattccgaagcttcttaaaggctggactgcgatttcccttaagcagttttgttgtggaagtactgaagatatttgaaatctgccttcatcaacttactcccgaagcaatcataaggatgggcatcttcgtctgggccgtgaggagccaaggtttagaaccaaatgcaaaaagtttctgcaacatacatgaactattgtatgagacaaaaccctggggtaaagagcagtatcacaacaattttggctgctacagcttcggcgcccggtctgggtcaagctgtcccatgccaacctttcgaaagaggtggcccgacgactggatgacggaatggttttatgtgaagagtgacttgaaaacacgggaagatattaaagatatcattatgcgccctatctggcaacgcttcggcctccggaggccgaaggtggaaatgaatgaagcagccgaagaatgccaaagagccttcggtgtggtttgctcttttattgggacaagggatttggtccaagaacacattgccttcagaatatggccacttgtagaaaagtgggaaatgccgaaggagacagttagagaaactgatgaaggtggattagttaggctgaaatacacattccaatatggagataaattcgtcgagccagatgatgactggctaaaaaacactgcactatcatcggccttcggaggccgaaagaagaagacactcaaccgagtatttgatgcaattgggtttgtctaccccgattaccgttatccaacgcggggtcaaaaaagaaagaatacatcttctgcaaaggaggttgcttcagccgctcctagcgagccggcgccgaagaggaaaagggaatggccgaagtgccggcgacggaaaaaaatagaagaaccgagggctgaagaaacaaagacatcggaaattctaagtccttcagcaaaaattgaggtgccaatgccaatacaaatgacgaccccaaagagaaaaagaatggttaatgtactggacgtattggagacaataaagtcttcaagcactactccgaagaaatttggcgagacttctgaagtgcaaatcgaagcatttgatgctgaagcttcaaagcatcaatctgagactgaagctgggccttcagagcccaccaaggtgaaatccttggaagccgaagaaacagaaatagcagaagaaatttcggctgaaaaaactggcactgccgcccccgaagcatcttccgaagccttcgattatattttacgtcatgcttcggggaaaaaattgactgaaaaagaaaagcaagaggcccaattttacgcccaaaaactgaaatatccaaagggggcgttgatattcaacgacagtggagaagaagactttttgtattgtctccctgacagcaaggagatttctgtctgtcgggagatgagcaagagcttcggattcccaacactagaaaatgggctctcggtgttatcaaaagacgagctagccgacagcttggcgtacaatagcttaaagggtcttatacttagcaatgccctcagggctcaaaaagatgctgaagacgaagggtgtgttatggccctgagcaaccttcgttccgaagtaattgaactaaggaacgaaggtctcaaaaaagataaaatattatattcattgataaatagaataaaagaagacgaagctacttttaaagctcaagctgaggctcagaagcgtgaaattgaagatcttcgaaaacaactagccagagctaaagaggagcacacacttgaagaaacaaaaaaagaaatcagtgaacaatgggcaaatcatttggagaaaaatgttgaagagcttcgtgcatctaagaaaagatgctatgaaatatctatggaatgtgttaagacaataaaaaccagcttcgctagtgttggcgcattctcaagtgaggagaactttgtaaggggtgaccccgaaggcccaattggatggatcagccacgaagctgaagcctttgaagaaattttaagtagtcgaggagacatatgcgccttttcgggtgtcagggggattgctaccattttggagaggaaaggctgtgaccacgtgaaattcttggcacaatccgaagccgccttatcctccgaagatataaaagacccctcggccgaagcgagcctggtcggtggaaaatttttcaccgacatctgggacaatggtggccgagaaatggcccaagaaattatacgaaaaagcgaaaaaggcattcatgacgctagaaaagtagtagagcccgaagtgcaaataggtattgactag

SEQ ID NO: 139237 - DNA, 1210 bp, Zea mays
  Clone ID: MRT4577_58466C.1
cattgggtacctcgaggccggccgggatagttattcgtgttgccagagagggtcgcgccgaggaaaactcgccaccgcaaaggccgtcgtctgtagcctcgcctcgccgtcgttctatactcccaataaagtcctccgccaggagcacgatgtcgtgggccgacctcccactcgatgtgctcgtggacggggtgatcgcgcggcttcctatccccggcgaccgcgcccgcttggccgccgtgtgccgcgcatggcgcgccgccgcgcgcgaggtggtgagccacatccagctcccgtggatcgtgctcccatacggcaccgtctgcaccgccggccgcggcgcagcctgttcgtccttccggatccccgggttccccgacgaggccacctgcctcggcgccgcccacgacggctggctcgccctggaccgcacggacgacgtggtcgggcgcacgtcctggttccggacgacatggcccgtcgtcgtcggagacacgtggaagcacgtcatgttgggcgagtccgacgtgaaccacaagcacgcctacgcgctgcacaaccccttcagcgacgtcaccgtgccgctcccggagctggacgccgtcatcggccgtgtcgccgagaccttccgggtgcgtaaagtgctgatgcgttcgccggctccagatgacctcgtcgccgtcatgaccaacagctggaactgcaacgtcatcttgtgccgcgccgggaagggtacgttcgtgctaccctactacaggatcgtcgacgtggcgttccttggagaagacacgctgtatggaatcaccaccggcgaagaactccttgccttccacctcggcgaggatgacgacggcagacctaatgttgccaggattgagctggtcatcaaaaacacgttggccaattattattatgatgaatttggatggatgtggccagcagaagtagctagcactagtagcaacaacgacgaggatatggatatggatgacgatgattatatggaggaggatgatccggcagtcgtcgatgatggtgacgacgaccaagctgatagcttcaacggcgatgagatggtctcggacagcgaggtgtttgatgggtacggcgacggcgaggaccttcaagtcaaggacgagttatatctgggtcgatacctggtgcggtcgctgagcggagagctgctgctcgtgaggcaccaatggcaatc

SEQ ID NO: 139238 - DNA, 1026 bp, Zea mays
  Clone ID: MRT4577_58467C.1
atgtctgaagataagaaagctgttgctgaatcgaagctgagcctttctgaggagatgcatctcgggtttcttcaatcaatatcaaagaccaatacagagaagatcactagggagattttggagggtttatctgaagacactggtgacagtgacagctatgatgtagaaagtggagatatcattatgcgccctatctggcaacgcttcggccttcggaggccgaaggtggaaatgaatgaagcagccgaagaatgccagagagccttcggcgtggtttgctcttttattgggacaagggatttggtccaagaacacattgccttcagagtatggccacttgtggaaaagtgggaaatgtcgaaggagaccgttagagaaactgacgaaggtggattagttgggctaaaatacacattccaatatggagataaattcgtcgagccagatgacgactggctaaaaagcattgatgccataagtgatgaattgcttggattatactcgaaggccgaagatactgcattatcagcggccttcggaggccgaaacaaggagatttctgtctgctgggagatgagcaagagcttcggattcccaatactagaaaacgggctctcggtgttatcaaaagacgatctagccgacaacttggcgtacaatagcttaaagggtcttatacttagcaatgccctcagggcccaaaaagatgccgaagacgaagggtgtgttatggccctgagcaaccttcgttccgaagtaattgaactaaggaacgaaggtctcgaaaaatataaaatattgcattcattgataaatagaataaaagaagacgaagctacttttaaagttcaagctgaggctcagaggcgtgaaattgaagatctccgaaaacaactagccagagctaaagaggaacgcacacttgaagaaacaaaacgagaaatcagtgaacaatgggccaaccatttggaaaaagcgttgaagagcttcgtgcatctaagaaaatatgctatgaaaaatctatag

SEQ ID NO: 139239 - DNA, 1701 bp, Zea mays
  Clone ID: MRT4577_58468C.1
atgtctgaagataagaaagttgttgttgaatcgaagctgagcctttctgaggagatgcatctcggctttcttcaatcaatagcaaagaccaatacagagaagatcactagggagattttggagggtttatctgaagacactggtgacagtgacagttatgatgtggatagtggtggtgaagattccgaagatcgaccttggcgaccaagccatgcggtttttggtaaatcaagtattaaacaaagccatcttgtcaatatgaggggtagatattttcgggacttatctattgtgagggctgacgaaggagagaaaacttgtccgactcccgaggagaatgaagtcgtgatattccgaagcttcttaaaggctggactgcggtttcccttgagcagttttgtcatggaagtactgaagatatttgaaatctgccttcatcaacttactcccgaagcaatcataaggatgggcatcttcgtctgggccgtgaggagccaaggtttagaaccaaatgcaaaaagtttctgcaacatacatgagctattgtatgagacaaaaccctgggtgcctgagtttgtcggtgagacctcttcggccaccgaagctaaagaaccaacccccctgccgaatattgaagggctggccgaagtgccggcgacggaaaaaatagaagaaccgagggctgaagaaacaaagacatcagaaattctaagtccttcagcaaaaattgaggtgccaatgccaatgccaatgacaaccccaaagagaaaaagaatggttaatgtactggatgtattggagacaataaagtcttcaagcagtactccgaagaaatttggcgagacttccgaagtgcaaatcgaagcatttgatgtcgaagcttcaaagcatcaatctgagactgaagctggtccttcagagcccaccaagggtcttatacttagcaatgccctcagggctcaaaaagatgctgaagacgaagggtgtgttacggccctgagcaaccttcgttccgaagtaattgaactaaggaacgaaggtcttgaaaaagatgaaatattatattcattgataaatagaataaaagaagacgaagctacttttaaagctcaagctgaggctcagaagcttgaaattgaagatcttcgaaaacaactagccagagctaaagaggagcgcacacttaaagaaacaaaacgagaaatcagtgaacaatgggcaaatcatttggagaaaaatattgaagagcttcgtgtatctaagaaaagatgctatgaaaaatctatggaatgtgttaagacaataaaaaccagcttcgccagcgttggcgcattctcaagtgaggagaacttcgtaaggggtgaccccgaaggcccaattggatggatcagccacgaagctgaagcttttgaagaaattttaagtagtcgaggagacatatgcgccttttcgggtgccagggggattgctaccattttggagaggaaaggctgtgaccacgtgaaattcttggcacaatccaaagccgccttatcctccgaagatataaaagacccctcggccgaagcgagcctggtcggtggaaaatttttcaccgacatctgggacaatggtggccgggaaatggcccaagaaattatacgaaaaagcgaaaaaggcattcatgacgctagaaaagtgcagagcccgaagtgtaaatag

SEQ ID NO: 139240 - DNA, 2706 bp, Zea mays
  Clone ID: MRT4577_58469C.1
atgtctgaagataagaaatctgttgctgaatcgaagctgagcctttctgaggagatgcatctcggctttcttcaatcaatagtaaagacaaatacaaagaagatcactaaggagattttagagggtttgtctgaagacactggtgacagtgacaattatgatgtggatagtggtggtgaagattccaaaaatcgaccttggcgtccaagccatgcagtttttgggaaatcaagtattaagcaaagccatcttgtcaatatgaggggtagatattttcgggacttgtctattgtgagggctaacgaaggagaaaaaacttgtccgactcccgaggagaatgaagtcgtgatattccgaagcctcttaaaggctggactgcggtttcccttgagcagttttgtcgtggaagtactgaagatatttgaaatctgccttcatcaaattactcccgaagcaatcataaggatgggcatcttcgtttgggccatgaagagccaaggtttagaaccaaatgcaaaaagtttctgcaacatacatgagttattgtatgagacaaaaccctggggtaaagagcagtatcacaataattttggctgctacagcttcggtgcccgatctgggtcaagatgtcccgtgccaacctttcgaaagaggtggcccggcgactggatgacggaatggttttatcaacgcttcggcctccggaggccgaaggtggaaatggatgaagcagccgaagaatgccagagagccttcggcgaggtttgctcttttattgggacaagggatttgatccaaggacacattgcctttagagtatggccacttgcagaaaagtgggaaatgccgaaggaaaccgtcagggaacctgacgaaggtggactagttagattaaaatacacattcaaatacggagataagttcgtcgagctagatgatgactggctgaaaagtattgaggccataagtgatgaactgcttggatcatactcgaaggccgaagatactgcactatcagcggctttcggaggccgaaagaagaagagactcaaccgagtatttgatgcaattgggtttgtctaccccgactaccgttatccaacacggggtcagaaaagaaaaaatgctgcttcagcaaaggaagttgcttcagccgttcccatgcctaaatatgccggtgaaacctcttcggccatcgaaaccaaggagccgactcccctaccgaatgttgaagagccaatcataatgccggaaataaagaaaatagaagaaccgaaggctacagaaacaaggacatatgaaattttatgtccttcagcaaaaattgaagcaccaaagagccaaaagggtccagcaatgacccccaaaagaaaaaggatggttaatgtgctggatgttttggagacaataaagtcttcaagcacgtctccgaggaaaattgttgaaacttccgaagtgcatattgaagcctttggtgccgaagcttcaaagcaccaatctaagactgaagctgggtcttcagagcccaccaaggtgaaatccttggaagccgaagaatcagaaatagtagaacaaattttggctgaagaaactagcactgccgcccccaaagcatcttccgaagccttcgattatattttacgacatgcttcggggaaaaagttgactgaaaaagaaaagcaagaggcccagttttacgcccaaaaaccgaaatatccaaagggggcgttgatattccacggcagcggagaagaagacttcttgtgttgtctccctgacagcaaggagatttctgtctgtcgggagatgagcaagagcttcagattcccaacattagaagtcgggctctcgttgttatcaaaagacgagctggccgacagcttggcatacaatagcttaaagggccttatacttagcaacgccctcagggctcaaaaagatgttgaagacgaagggtgtgttatggccctgagcaaccttcgttccgaagtaattgaactaaggaacaaaggtctcgaaaaagataaaatattatattcattgataaatagaataaaagaagacgaagctacttttaaagctcaagctgaggctcagaagcgtgaaattgaagatcttcgaaaacaactagccagagctaaagaggagcacacacttgaagaaacaaagcgagaaatcagtgaacaatgggcaaatcatttgaagaaaaatgttgaagagcttcgtgcatctaagaaaatatgctatgaaaaatctatggaatgtgttaagacaataaaaaccagctttgccagcgttggcgcattctcaagtgaggagaacttcataaggggtgaccccgaaggcccaattggatggatcagccacgaagctgaagcttttgaagaaattttaaatagtcaaggagatatatgcgccttttcgggtgccagggggattgctaccattttggagaggaaaggctgtgaccatgtaaaattcttagcacaatctgaagtcgccttatcctctgaagatataaaagacccttcgggcgaagcgagcttggtcggtggaaaatttttcaccgacatctgggacaatggtggtcgggaaatggcgcaggaaattatacgaaaaagcgagaaaggcattcatgacgctaggaaagtagcagaggccgctgaaaaaagtgcggatcccgaagggcaattaggtattgactag

SEQ ID NO: 139241 - DNA, 259 bp, Zea mays
  Clone ID: MRT4577_5846C.1
gccaaggaccacagcgaacaggaccagaggcttcctcatcatcgtgagcccacagaattcattcctctcgacaaactctctcgaactaggaacattaatctggcgcctaaatgctgcagattgcaataacgactacaacctcaagaaaatgcgggaagccagcggttactcttacatggacatgtatacatgtgtgcccaaaaaccttgtcaattaaaaagcttgcaaaagaaacccctgaagaacacttgcctactga

SEQ ID NO: 139242 - DNA, 544 bp, Zea mays
  Clone ID: MRT4577_58470C.1
gcctttgcattccacgtccaccattcaccgtggggagggggggggagcagacaaaaaacaccggtatctaagcgaactcgccgctctccgatcacagcccgaggcctcctacctagcacggcgtgcagtgtcgcggaacctcctcgctgactacttcctcccacaagcctagtcatacttccttcaacattgggggggggggagagacataaaccaaatgccgcaatgcagctctcgggttgaaggattataccctataacagtagatcgaccactcaaacatactatgaatgatttggaagagtagcttcatacaataactccaggacaacagacaccaatccacaggcattactgagaagaagttttcactgtcctgaaaggcaaggggacactctagatgggatcaagctcactaaagtacccactgcacccacatgaaactgctttctttaaggataccacattgtcaatccctgtgaatgatccacaccaggtttggaattctgacgagcacgaggatatgcaaggtgttatgatcata

SEQ ID NO: 139243 - DNA, 264 bp, Zea mays
  unsure (1)..(264): unsure at all n locations
  Clone ID: MRT4577_58471C.1
aggcctacgaaaagatatcagctttttcgaggcttaatttgaggggggcgctcaataggctcaatgtgcaacaattgccctaacaactacatgcacatttcaaaccaaataaaccctcagttttaagcattaacagcttgtaaggtttacatttnttagaaaatatatagaacttctacctttatgagcgctgcttctaatactcttcacagagcatattgctctgtcacattagctttattaattaccttattcaccaacagc

SEQ ID NO: 139244 - DNA, 2756 bp, Zea mays
  Clone ID: MRT4577_58472C.1
atgtctggagataaaaaagttgttgctgaatcgaagctgagcctttctgaggagatgcatctcggctttcttcaatcaatagcaaagacaaatacagagaagattactagggagattttagagggtttatctgaagatactggtgacagtgacagttatgatgtggatagtggtgtttttgggaaatcaagtattaagcagagccatcttgtcaatatgaggggtagatattttcgggacttgtctattgtgagggctgacgaaggagaaaaaacttgtccgactcccgaggagaatgaagtcgtgatatttcgaagcttcttaaaggctggactgcggtttcccttgagcagttttgtcgtggaagtactgaagatatttgaaatctgccttcatcaaattactcccgaagcaatcataaggatgggcatcttcgtctgggccgtgaggagccaaggtttagaaccaaatgcaaaaagtttctgcaacatacatgagctattgtatgagacaaaaccctggggtaaagagcagtatcacaacaattttggctgctacagcttcggtgcccgatctgggtcaagctgtcccgtgccaacctttcgaaagagatggcccggcgactggatgacggaatggttttatgtgaagaatgatttgaaaacacgggaagatattaaagatatcattatgcgccctatctggcaacgcttcggcctccggaggccgaaggtggaaatggatgaagcagccgaagaatgccagagagccttcggcgcattttgctcttttattgggacaagggatttgatgcaagaacacattgccttcaaagtatggccacttgcagaagagtgggaaatgccgaaggaaatcgtcagggaacctgacgaaggtggactagttaggctaaaatacacattcaaatacagagataagtttgtcgagccagatgatgactggctgaagagtattgaggtcataagtgatgaactgcttggatcatactcaaaggccgaagacactgctctatcagcggccttcggaggccgaaagaagaagagactcaaccgagtatttgatgcaattgggtttgtctaccccgactaccgttatccaacacggggtcaaaaaagaaagaatacatcttccacgaaggaaattgcttcagccgctcctagcgagccggcgccgaagaggaaaaagatgaaggttctcacacaccggccacgctatattgaaccgaccacagtgcctgagtttgtcgaagaaccaagggctgaagaaacaaagtcatcggaaattctaagtccttctgctagaatggaggtgccaatgccaatgccgatgacgacccccaagaggagaagaatggttaacgtactggatgtgttggagacaataaagtcttcaagcacaactccgaagaaaattgttgaaacttccgaagtgcaaatcgaagcctctggtgccgaagcttcaaagcaccaatctgagactaaagctgggccttcagagcccaccaagatgagcaagagcttcggattcccaacattagaagacgggctgtcggtgttatcaaaagatgaactggctgacagcttggcgtacaatagcttaaagggccttatacttagcaacgcccttagggctcaaaaagatgctgaagacgaagggtgtgttatggccctgagcaaccttcgttccgaagtaattgaactaaggaacgaaggtctcgaaaaagataaaatattatattcattgataaatagaataaaagaagacgaagctacttttaaagctcaagctgaggctcagaagcgtgaaattgaagatcttcgaaaacaactagccagagctaaagaggagcgcacacttgaagaaacaaaacgagaaatcagtgaacaatggataaatcatttggagaaaaacgttgaagagcttcgtgcatctaagaaaagatgctatgaaaaatctatggaatgtgttaagacaataaaaaccagcttcgccagcgttggcgcattctcaagtgaggagaacttcataagaggtgaccccgaaggcccaattggatggatcagccatgaagctgaagcttttgaagaaattttaaatagtcgaggagacatatgcgccttttcgggtgccagggggattgctatcattttggagaggaaaggctttgaccatgtgaaattcttagcacaatccgaagccgccttatcctctgaagatataaaagacccttcggctgaagcgagcttggtcggtggaaaaattttcaccgacatctgggacaatggtggtcgagaaatggcccaggaaattatacgaaagagcgagaaaggcattcatgacgctagaaaagtagcagaggccgctgaaaaaagtgtggatcccaaagggcaaataggtattgactagaaggctttttacaaaaaaagctgaaaaaagctggttatgcatacttctttgatgtttgtctgtatgcatggttaataaaagttaaaagcacaaatcgtgcatttaagatgttaaataaaatacggtagctttaaggatcttcagcacttgtgagagtgaaacttcccttatgtcttaagcagagaatagttccagcaacctggaagtagtatgcattggcagttcaagaaaatgataagttttgccatggaaattatgtataaactaagttcaatggctgtaatagcatttgtaatgatagaactgtcagtttgtaaaacacgccccat

SEQ ID NO: 139245 - DNA, 544 bp, Zea mays
  Clone ID: MRT4577_58473C.1
tgaagatttttcgaaatcctgcctcttatctaaattactctccgaagcagtcataaggatgggcatcttcgtctgggccatgaggagccaaggtttagaaccaagtgcaaaaagtttctgcaacatacatgagctattgtatgagacaaaaccctggggtaaagagcagtatcacaacaattttggctgctacaacttcggtgcccggtctggatcaagctgtcccgtgccaacctttcgaaagaggtgccccggcgactggatgacggaatggttttatgtgaagaatgacttgaaaacacgggaagatattaaagatatcattatgcgccctatctggcaacgcttcggcctccggaggccgaaggtggaaatagatgaagcagccgaagaatgcgagagagccttcggcgtgatttgttcttttattgggacgagggatttgatccaagaacacattgccttcagagtatggccacttgcagaaaaatgggaaatgtcgaaggaaaccgtcagggagcctgacgaaggtggtctagttaga

SEQ ID NO: 139246 - DNA, 386 bp, Zea mays
  Clone ID: MRT4577_58474C.1
aattgccgggtcgacgattacactactcggcggccgccctatagttattttctatcatgggagcctgcgatgcacctggataacttgccaggacaaattattatcatccttgacaacctcattggtactcacgtgcgaacgtacaaatcaaagctaataaagcacaatgccgtagtggcccaactaaaacccaggcaaatgcacaccacagaagaggcctaacggctgtcggcagactgactacgagcgttagatgctgctagaatgtacgtaatccctaagctacgcgtgtaccttcagatatacaaagaactagacgaactacgcgaccctataccggaacaacaagtcactgcagatcttgaatctatgcccgtcttaactac

SEQ ID NO: 139247 - DNA, 864 bp, Zea mays
  Clone ID: MRT4577_58475C.1
gagacgaaaccctggggtaaagagcagtatcacaacaattttggctactacagcttcggcgcccgatctgggtcaagctgtcccgtgccaaccttttgaaagaggtggcctggcgactggatgacggaatggttttatgtgaataatgacttgaaaacacgggaagatattaaagatatcattatgcgccctatctggtaacgcttcggcctccagaggccgaaggtggaaatgaatgaagcagccgaagaatgccagagagccttcggcgtggtttgctcttttattaggacaagagatttggtccaagaacacattgccttcagagtatggccacttgtagaaaagtgggaaatgccaaaggagaccattaaagaaactgacgaaggtgggttagttaaactaaaatacacattccaatatagggataaattcgtcaagccagatgacgactggctaaaaagcattgaggccataagtgatgaattgcttggggtatactcaaaggccgaagatactgcattatcagtggccttcggaggccgaaagaaaaagaggctcaaccgagtatttgataccattgggttttgctaccccgactaaccctatccagcgcggggggaaaagagaaagaatacatcttctgcgaaagaaactgcttcagccgctcctagcgagccagcgccgaagaggagaagggtaaaagttctcacacaccggccacgttatattgaaccagccacagtgcctgcatttgtcggtgggattccttcggccagtgaagctaaagagacagctcccctgcccaatgttgaagctctaaccgatgtgccagtgacttgcttattgaaaacttgaggttct

SEQ ID NO: 139248 - DNA, 498 bp, Zea mays
  unsure (1)..(498): unsure at all n locations
  Clone ID: MRT4577_58476C.1
ccgggtacgacccacacgcccgatttttcactagtgcctcttctgaggggaggcaggggccagctacacaaccaccgctgcgacgcctcccaaatcgggccaccaccaaccgatgagtccatcctaggcgcggcgggcgacatctgagatggcgctcttggtcctcatgagaactcagcccactcgactcttccctctctgggggggggcgcgccnccatccccagggtgtggagcggcgccgcgctcccacatcaactgcccctgcctgctgaaagctttacactggccgatgagcatcatgcggaacctctacaaggctcgccagcggtgatcataccagacgtcgtccagaagaagctcggcatggccagtgacgaccttttcgatatcaacgctggcattcgttaggaacctcagcaccgccatcgccaaagccctacccgctgcccttgccaacctggtcatggaccctgagaactcaacatgacacgattgc

SEQ ID NO: 139249 - DNA, 312 bp, Zea mays
  Clone ID: MRT4577_58477C.1
tccctccgccacttctttcatctcctcgctcccagtccccgggcaagctacgaagcatggcgatccgtcaccgttccgcgccccggacgcgaaccttcgcccgtcgactgacatcgaatcaagtcgggggggggcattccttggccactctagacgcctcgaacgcaccgcgccgtccactacgaacaacctcaaggcgtaggacaagggcgagtgcctccccggacttccctccccctcctacctcgacggcagcctgacgggtgacaatggccccaacacgccgaacccggcgaaggaccccgaaaacct

SEQ ID NO: 139250 - DNA, 653 bp, Zea mays
  Clone ID: MRT4577_58478C.1
attcggctcgaggtacggtggttcgccggtgctgggtcgctgtcaaatgcagtcccgtttcgacaacccgtccaggcccgtaagaggtaaacagaatgagtcaaacgggcgcctcccgacgcacgcaacaaaccgaaaccattagcggcagtagcatttgctctcgcaccaaacatccaacgagcacaggcctactactacggccaccctaccgggtcaatggctcagatcggctccgcatagccggcagtgcgtgggtggggccaccgctaaactgttcaaaacgctggcccacgggacaccgtacggacaccacgcacgcgatgacactccgagcccaccgacctcgcgggcccagcgtgcagctggaggggtgcacatactgcgcgtcgcgcaagttacccgctggatggatacttgtataggacgctgtgtgtccggctgcgagagccgtacagggcgcgcggccacccgttgctctgctgggcccggggcccgatgacggggacggtgtggagcccacagtcggggtagggggtgtggtcgggtgagggctctttcgctcatgctagggcggccagtgtccagtgggctgcctcgggcctcacaaccagaattgacacaaccggccgcggccgccgacaagagagctc

SEQ ID NO: 139251 - DNA, 371 bp, Zea mays
  Clone ID: MRT4577_58479C.1
gtactcttttgtaccacagtcgaacaccatggtctctgacaacgcacatgcgctatacacatacatgtgtaggttcatgaaggcctggcatttgtcatgtatattggcagagtcatagaggcatttgacagattgaagcgtcatggtcaagatagtatccagatactggccgtacatgttggccatgacacgtaattgctaaaagtagaaggacggactgagcgaagcacgcgtgctcagtcaggacgcaaaatcggtacatagattatgagctgtggccgaccatatgatgtagaaggaggaggggatgaagatggactcacaaagggcattgcagctggaccactgcacacttgcataactcggaggtt

SEQ ID NO: 139252 - DNA, 163 bp, Zea mays
  Clone ID: MRT4577_5847C.1
aaaaaacatatgggggatcctacaactcaactcccatatgcataattgcaaagattacacgtcctattctacgccaaatgcctcgtgataactaaggcatcaccaaattactgggaaccgaataaagaggatgcgtacaaccagcacacacattaacgaaaga

SEQ ID NO: 139253 - DNA, 403 bp, Zea mays
  Clone ID: MRT4577_58480C.1
gaactgtgtcccgggctcgcacctctacgcaaactctaaattctgctctagcaaaatttcaaataaaatcattacggagaatgggaactttcggggatccaggaatacacccttaacttttacagtgctaactttatagaaaatatatacttcaactgttgatcttcctgcaaaatcagcaaacatctaaaccagtgccatcgaaaaggacaattcatgcattaatcaaaagaaagctgcaggatcaagccttacaaatggcaaatccattctggctaatagatgcccccctgataatgttcctgccaacaatagtttattttagaatgttaagaacacagaggctgttgtcccaccacttgtgcctgtaaaatacatcatcattccaacaccacaaatgaca

SEQ ID NO: 139254 - DNA, 451 bp, Zea mays
  Clone ID: MRT4577_58481C.1
cattgggtacctcgaggccggccggggacgcacgtcacctcgagttctgctcctcctttaccactgatctgcatctgcgtacatgcatctgcactgtctctcgcgactctcgtccacgcgcgcttgcagccccgcaacaagaaaaacgaaaagtatgctttggaatgttacaacatggacttctagcactgcatcatccttgtgtaccagattacggccatcatcgcagccctcttccacatcaacaacatctggaacatcgccgaccggcagcatgaacatcctgaaaggcatcatcagcctctactcgctcttcggatacttcgctggcaagaggacctccgacaggatcgtccacctcttgaccgtaggcttcgccgtcatcgtcttcttcaaggtggccttccctcatgggcttctcaggcaactgcaccatgatcatggagcgctg

SEQ ID NO: 139255 - DNA, 1406 bp, Zea mays
  Clone ID: MRT4577_58482C.1
cttcttgctcttaatgtcctgtaagtcggggacaatttgagtttctgtgatagtagctctaatcctttggtacatttgttgtttaacacccttcctttcgctctcaacaaagggcttatgtcgctcaggtagcatcacaaggaaagcttcttatgtggggagccaaggtttgtgtcttggttgggatttctgtttcagttatgcgatgttgatttcgttaacctctctccgccgccgcttcgccggcctcctccgctcaccggaggtgcgacatcttgatgccttgccgaaaatgggtagcttttggtttcaaggatcaaaatcgcttgcaacattattcatttgtggcgccggacgcgtggggttctctgcaccttatgtttgcagctctgctctgttcagtgggaacgggtcagggggtagatacatcagtaacgggaagctgttgtccagacggcctcgtggaatcgattccaagaagaggctctggactaacgtccttcttgctcttaatgtcctggcttatgtcgctcaggtagcatcacaaggaaagcttcttatgtggggagccaagatcaacagtctgattgatagagggcaattttggcgtttggcaacatcatctctacttcatgcaaatctcacccaccttgcattcaattgtttctctttgaactctattgggcccatggttgaaatgttaagtggtcctagaagatatctagctgttttatttcagttcggcgctggcaggatcactgatgagctaccgttgtagtgcgtcacctgctgttggtgcgtcaggtgccatttttggattggttggagcctatgcagtttatatgtggaggcatagaagattttttgggaattctagagagagtttagaacatattgggcgtgtggttgtcctgaatatgggtatgggcctcctttcaaggggaattgataactggggccatctgggaggcttgcttgggggagttgccatggcatggttcctaggtccggcatggcaatatcagtacgtggcaaaggatggtagagcggttttcaaagacagggctccagtcctccgactgataaaggggtagacctgtgggtattcgtggaaatagcgtggaagaggatgaaaaggggaaagggggtgaagattcagacatgcgccgagcaaagggagtggcgaaaaaacaattaggccctctttggaatgaaagaatttcagagaaatcatacatgaatcagttcatttttcatagaaaaaacacatgaaccttaacatgtaactagttttggtgtcgaaacatttcactgcagagctaattgctgaggaaacacacacgagaatcatattgctttgttcgaatcgtggcaattgttaaatcttcaaagctaaaacgagttgt

SEQ ID NO: 139256 - DNA, 675 bp, Zea mays
  unsure (1)..(675): unsure at all n locations
  Clone ID: MRT4577_58483C.1
accacctcacccatctacgagattacgctgctcgagtcgccatggttgtctcggggggcggcgcggcaagcacattactgagaacacgcctggcgcacccggcgtcacacgaacgagagcatcgggtctagtctcccttctgggttgcgcgaaatgctacatcctgctcctaacaacgtggcatagagacctccacatcctctgatcgcatcgctgtggatccccgcgccctagaagacccaatacctggactgttcgctgagccgagactacggcttcgatccctgcggtttcgataatgcctcgtagcacctgcgatacaagctatactcgctgtgacacaaccggctcaacaatgatgccgcaggcttcatcgatagccgattcaatgccctccgaagtctggcccacctcgaagtagcccgactgcgagatgatcagcctccattgcttctacaagcgcgggctcatccacggccgatggtacatgattcgtcaaccgccttatcctctccagtgagcaggactctgcagaacatctgataccgactccggcactgtgnatgtnggtgcacaaatgcatactcactgttaccaccggtgacgatatacgtctcgtctatcatctcgcatcgacacgtctatggatatgtattcagacacccatggattcta

SEQ ID NO: 139257 - DNA, 592 bp, Zea mays
  Clone ID: MRT4577_58484C.1
attttcccacacgccaactcccttctctctcacacgacagcaggtatagagagcagacgttccatttttgcgctcgcacgacggaaatgtgtagcgagctccctcttcaagcttcagcgtgcgctcccctcctccatcgccgtcatgctcatcgtccctactcctttctccattcagcacagggtgctcgtcgcggcagtcgccatgggagccgagcggagagctctatgccggatgtcactctagtatatcatggctggttgcgtgcatcaggtttccctcctccattgtaggaaacggtgatgcctaagtggggtgaattaggacttctaaaacttctttctaaactaggccacaaataaaatccatagatcaaaacctatgcaaataagtaatctagaatgtgcaagctaagttttgtctaagtgttgctatctctaccgcaaagcctaagtttgaatcctaaataatctaactagaaaggagagattgaatcctaagttattaatgtaaatgcagaaggtaaagagcaagagtagatatgcaaacactcgtgtatgacatcggtatttttaccgaggtatctggaacc

SEQ ID NO: 139258 - DNA, 633 bp, Zea mays
  Clone ID: MRT4577_58485C.1
agccattcccattctctagtctcgccgcgcctccgtcacgataattgtactagatcacggtcccttcctttctcgcacgttaataccagacaggatgaccggaccccgcgcaacgtatgaccgcgtctgccgtctggctccacctctaggactcagggtcacgctccacgcatcagccgtacgccgtgcgcggcatccaggatacttctaacaaatccgtcgatctgtagaacatgcacccatcaaaggaggtgttctatcggctataaatgcgcctcgcgagaaggctgaggtccagcggaggcctcacacaatgactcctgatatttggccccctgaggactcagagcagaccaacgacagcgagatcctcaagttccttggattgcatgtgagaatccgctggcatgacctcgtgtatatgactgccatcatgactattgcactcttcttgcgctgtttggctagccccccgactgatgggactccatctgtatcgtccagttcgtgctcatgaactccaccgtctccttcatggaatacactattcactacaacgccgccgactgcgctcctggctacgcttgctccctttagctcgcttctgagagatgtactatgcgcgctagcaag

SEQ ID NO: 139259 - DNA, 430 bp, Zea mays
  Clone ID: MRT4577_58486C.1
gggcacgtccggtcagcatgcctgatagccgtctcggggagagagtcgttgcgtgtgtcagcgtcaaggacggctggaactgggtggatgcgagagctgatcacgagcaccgatgcggaggcgaggaggtgtctcctaagatcctccatggccactgcatgacgaaagaactgaacaaatttaaggtgccaaggtcttattaccagttgaggcagccattttcggtgaccaccacggggtagatcagaaaggaggagctgaagatggaactcctggcagcaattttactgcccatcaacctgtacttttttaggcgatgatctgttttggaacaaatcttggttaatatgactccgatggaagctttttgatttttttgtgttgaagatgcctttaacctttaacttgatggaagtttagaaaccaaaaa

SEQ ID NO: 139260 - DNA, 974 bp, Zea mays
  Clone ID: MRT4577_58487C.1
cggacgcgtgggttctgatcgagggccgccctttttttttttttttttagtcaaaacgcatcatcacttcattatggaactctgtaccaaccattgtagcaagcaagcaagcaaacaaacacatcgcacaagcacaatacacaagtcgtagtttatgcaacgcaacgcaacgcaacgcagtgtactgacgtccccgtcccgcgcctctgcatccccgctctgcaaaacagacagattcccgcagaacagacagggcaaacggatcggctcagcttctgcgtgccttcactacacaacagctagcttacactctacaggctacagcagcacagctaaaccaagacgatacatagaatacagcaccacatcgtggggagagagagaggatcaggcacacgcacactggctggcacacaccctaggacactggaggttacagatcaacaaacagatgcagtagtgtggtggtggtggtggttacttattattggacttgtaaaaacgcttagcccgggcagtaagtaaaactcttgcgttgcgtcaaaggatgaggatgagggggaatcctcgtggaccggtcaggaggcgagcagccagaagttcttctgccaccgggtgctgacgaggtagccgcccacgcccttgctccgccgccgcaccgccagcgtcaggcactccgcccggtttatgcactcctccaccagctcctcctcctcgctgctgctcctgctccgcaggaagcagcagaaaggcgagggtttgcgttggctgagcaccagcacggacgcctccagcttcaggtcctgctactcaaggctgcaggtgtcgaaaaaggttcaaaagagccacaacggcagaaggtgggaaaggtaacagtggatcaagtgcgtgcaatagctcaagagaagttgccggacttgaactgcaagagcatcgactctgctatgaggatcatcgctggcaccgccgccaac

SEQ ID NO: 139261 - DNA, 606 bp, Zea mays
  Clone ID: MRT4577_58488C.1
gcgccttcggccagggccccggcaatgccaccacgctcgccttccgtctcgtcgtcgaggacgcctacgtcgggcccgacgccgccgccgcgctcaagacgggcgccgtcgacgtccaggtcaggctcatggccgtcgccgtcttcgatagaggggggtggcggacgagccggagggtcatgagggttatgtgcgatggcgtcaaggtcgttttccgcgggaagaattccactgaggcagccttccatgggccgccaagaaggtgtgatgtcttcctgtgaaggagttttgaggaccattataccgggtttgctgacaactctcgatgctgatcggggggagacttttattctataggcacaagaagctaacaggcactgcgggtcgtttgttttgaccgggaatatccagcagtccagctgagtaaccatgctttttacctgactgtaatagagtagtgactagtgagtgcgagaaagtctgaaatggttcatgcttggtggtagattttatatataactatatttatatgtacaactccatgtacatgtatatataatttctagttcacaacaaataatttaaaacaaagcaacattatgaagt

SEQ ID NO: 139262 - DNA, 210 bp, Zea mays
  unsure (1)..(210): unsure at all n locations
  Clone ID: MRT4577_58489C.1
gcgtgcgccactgtccacctgggcggcgatggcgaccgccgcgagggagaggcgcctgccgggggcggtggccctggcgactctgatcggccggaagctccncacggggggctccgagcgcccggccctgcgctactgacacgccggctttgccaagcgtggagaggactactttctcgtcaagcccgactgtcttcgcgttcccgggga

SEQ ID NO: 139263 - DNA, 578 bp, Zea mays
  unsure (1)..(578): unsure at all n locations
  Clone ID: MRT4577_5848C.1
gctgaccctgtggtgggcagtgtcgtccgggcggcgctgcggagacctccgcccaggacggctccccctccccgggcctctcccctcttacccgcgagtcccctcgcctcgtgggcctatcggatctgttatcgcggggtgaggtgagagcaggcccggggagggtagtcacggctgaggagccgcagtcgcggtcaagatgatagaagtactgacaacaactgaatctcagaaactgctacaccagctgaatgccctattggaacaggagtccagatgtcagccaaaggtctgcggcttgagactaattgaatctgcacacgataatggcctcagaatgactgcaagactaagggactttgaagtaaaagatcttcttagtctaactcagttctttggctttgacacggagacattttctctagctgtgaatttactggacagattcctgtccaaaatgaaggtacagcccaagcaccttgngctgtgttgggctgagctgcttctatttggctgttaaatcaatagaagaggaaaggaatgtaccattggcaactgacttgatccgaataagccag

SEQ ID NO: 139264 - DNA, 276 bp, Zea mays
  Clone ID: MRT4577_58490C.1
aaaacgggggaattgcctttgcctaaagtatattaatagataaaaaaccggggtttcacaaacggggccttaagggtaacccgcccacagcaaaaaaaaccacagcccaatttcaggttcaatttagggccttaccctgcctgacccacccattagtgcgggaaaacgggtttttttaacagcaccttggcacctcccagggccaataacagtgcagcacccccttttcacaggggggggggaacctgttttgtttacacctgagctgcctcccgt

SEQ ID NO: 139265 - DNA, 200 bp, Zea mays
  Clone ID: MRT4577_58491C.1
tgaaaaatctgctcaaaacagcccaagaaaagagagatgtctgtgttcatgtcgtgaactcttgggatgaattcacaactgctctgaataacaaaaagttgatcttggctccatggtgtgatgaggaggaatttgagaatggtctcctacctcttgtccttaataggtgtctggatattatcaacctttcaatcacttca

SEQ ID NO: 139266 - DNA, 449 bp, Zea mays
  Clone ID: MRT4577_58492C.1
gacacaattatgagcgtgtttagtttattaggtttcccttctttcgttcgtcacaaaacaaagagaccaagaaaagcgggcacatgaggaaaagcagagaaaaaaaggctgagcggaacaaaaaaacccggcgacaacgctgctacattccaaaaaaacgggaaaagctatgcccgagccggaccctaactcgaacggaaagggcgtgccctgctcaaggaagacaaagagaattgggcaaggaccgggcgcccattccaacaggggccggctggacctcggggccttcccagaacgggggtaccccgtctccaaccagacgccagaagcccggccgcaacgattccgcctgctcccaggggcagttctgcaggaaaggcacaaccctgaagttgaggcccagagaacccaggaactgggaccgggtcattggcccagggaccgagaaa

SEQ ID NO: 139267 - DNA, 734 bp, Zea mays
  Clone ID: MRT4577_58493C.1
cattgggtacctcgaggccggccgggagagtatcctgtgtctgtgcacacttgagatctattcatatgatatagacgctatctattgtataacctcacaattttatccaaaagataactagagagatcattggcatctgtctcctgtctggtcgtgcaccacatcggataagaacacagcacccgcctgcctcgccggcaggaatgaccgccgccgcctccactgccagatgcttcctccgggccatgcgtctcatcggagctacggagtgtgttgtgcacaacagcctcgcgagtgaaaccgtcaaccgggtccgctggagatgcgcaagcacacatgtgccctccgaggagtcctaagatggccattgcaagagagaacttggtgtatagcagtcctagatgcccgtgcgcagcgatgcgcctgcaacactcatgacgactctacatcacctgaccaggtatgctgagaatattgactccgttcaagaagcactgtgattactgtgatgacagccgactaggatgtgaaatagacgggtagtcatgtagacatcactgatatcgtgattaagctctgtatatggagaaagtacagcaatgaagatgtacactaccgtgaccatatatgatagttatgctagagctagtgcccatattaggagagaatctatgctactgatggatgatctgcactatactgaatgtctgaaccgatgagatctttgtctggag

SEQ ID NO: 139268 - DNA, 1089 bp, Zea mays
  Clone ID: MRT4577_58494C.1
tgtttttgtacttcaaagaagctaatgctttttccccttatcatgggtatagggtgatgtggttcatgttcatgtccaccctgtacagcccatgccttcgcacctgtgtcacaaatatgtggccgtcacatttcttctcaaccaatccaatgcatatagaggaaaccctctaatccaatgcatacagaggaaaccctctctgccccagtttttctcttctttcacaaaataagctcgcggcctaccttctttctcctgagaattcatttcgatctctgtctgaatattggtaactatgacaacacaatcaatgtgcagatctgcaccaagaaggaaaggatgcatgttttactatcgttgcttgagagggacgcaccgaagtctgcaatcatatttgttgctgggcagtctgagagatcaaagaaggctggaaatcctccttcaaccatggtggtctctgatttcttgagaaatgaatacaagggaagccttgatgtgatgctgctggaagaagatatgaacttcaatgctcgagctgtctcgttctccgaagtgaagggaagaggattcctgctggtctcaaccgacatagcgagcagagggtttgaccttcctcaaaccagccacgtatacaacctagatcttcctaagacggcgaccgactatctgcaccgtgctggaagaacagggagacaaccattctccaggttggaattggaatgctgcgtgacaacccttataacagaggaagagcacttcgttctacggagatttcagaatgagctcaagttccacacccaagaggaagagctgcccctcatgaattgctttccaggatagagatacttgcttgtttcatcgtctcatcatcctatgaatgaattattccatctctctaggtgggccgtcgacattcccacgtgaatcgcatgcttgtgtcagtgtcacgtcttttctcgtgttgtacagcagccgatgacaaataaatgaaaatgttttgcaactttgcgttgctttgctttgctttgatgtaagtgtgaactgagctgattcctctattttcaggatgtatttaaatctctcctagtt

SEQ ID NO: 139269 - DNA, 1084 bp, Zea mays
  unsure (1)..(1084): unsure at all n locations
  Clone ID: MRT4577_58495C.1
ggggaatcaaaataccaattggatgatgctagtttataaaacacaagacacatacacatacatggtgggtatgtacacgaagagaaagaaggtaacaggcaaatctatgttccatgaacaaacaaatggaaggaaggggaaggaactgctgcaagaaaacaaacgcaaggatcatgccctgcctttggcctggtggaaggcgctggagaagttggggatcctgtccaggtggcggagcgcgcgctccgccgtctgccgcgtgcggacgtcgccgttgcggtaggcctccaccagaacggacgccacggtctggtcggccgccacctccagcgcgatgtcctcgacgcgcaggatgcgcccacggcccacaccgcccgccgctgcagcgcctccgtccggttctccaccagtacctccaccacggggcgcaccttccgcntccccgatcaccagctccccctccgtcgcgttggccacgccgtcccccagcagcgtcgacagcgccgctagcgccgcctccaccacgcggggatccgcatgctctaggcacgccaccagccgctccaccgccttgcacccgccctccgcaaggcagaacgtctcccgcagcgagcagaagccgccgtgcacgcggcacgtccccattgccccggggggcgggggcgaccgtccctgcccgaagcacccgcacacgaggctgctcccacgacgaggcgccggcacgtccgtcaacctcgaggactgcagcgacaggttctccagcgccatggccgagtagagcagcacagcctcctgcccgctgctcatcatctgctgcaggagctccacgaagagcggcgccagccccacctcgcgcgccagctccacgtacatctcctcctgctgcagcagcgccagcgcgcacgtcaccctgtacagcaccttcaccgccccctccgtgaagggcgccacgtgccggttgccacggatcgtgccccgccggagctccaccagcttcgtggccagcgcccggaacgcgcccagctcctgcagctgccgcgtcaggtttccagtcccttggggggagggtcgccagcaaagcgac

SEQ ID NO: 139270 - DNA, 388 bp, Zea mays
  Clone ID: MRT4577_58496C.1
accaaaaaggtttattcagggcacgagctttttggcgtaattcgtacaggaggtgtgtgcgtgccccttcgatagcccagtacgatggccctggccaacccggcaaccacagacatacataagggacccaggcaagcacaaacgggcgtggatgcccgcccccgggcgggttaattagccctggggaggaagctctccctgcgcttggggacctccccggggcaggggttgaagtcctttttgaacctgggctcgcgccccaaaaaaccctggccgccgtggggaccatggggggggtggtggttggccccggcccctgaaaaccggtctaccttcttgaactttttcttgacaaaatgcctgtggacaccccccccgggggggccaa

SEQ ID NO: 139271 - DNA, 105 bp, Zea mays
  Clone ID: MRT4577_58497C.1
gggtacaacgagcgggagactagaacaccgacttctgattatattgcattatatatctaacaccgatcacttttgggaccaggaagatagccctaataccaaatt

SEQ ID NO: 139272 - DNA, 1737 bp, Zea mays
  Clone ID: MRT4577_58498C.1
gttgttttgatgtctaaccatcagtcagaagcagatccagcaattattgccttgcttcttgaaaaaacggaatccttggattagtgaaaacatagtttatgttgctggcgatagggttgttaccgatccgctttgcaagccatttagcatgggaagaaatctcatttgcgtgtactcgaaaaagcatatgaatgatttccctgagctaattgagatgaagaggagatcaaatactcgaagcctcaaggaaatggccttgcttttacggtatcttcccttacaataacattggtggttcacagctaatttggattgcaccgagtggtggtagagatcgcccaaatccttcaacaggagagtggtacccgggcaggcgccttttgattcatccacagtggacaatatgaggaggcttctggagcatgctggtgttcctgggcacatatatccactattattactgtgctacgaggttatgcctccaccacaacaggtcgagaaagagattggtgaacagagggtgatatccttccatggagtaggcttgtcagcaactgaagaaacaaagtatggggatattacttgtcataccaagaatgctgatgagggaagggagctattcacaaatactttgtacaactcagttgttaatcagtacaatgtcctcaaatctgctatctttagagatcgtggagcagctgtatcaaacaatgccatctcactgtcacaaccatggcgatgaatgttagctttcccagtccagattcgatactgaagttaccttttcagaagaacaggtgaactgcaattgtgcaaattttctgggaaaaactcttgaagtttaatctttctgatatcactggactttaccaatcatggtggagcttattactctaatgcagatcctcgttaagatgtctggctggtcaagggtgattcgtgattctgcagatagggatcctcgtaacattgcatgccgtcgtccgcaaattactgctccctcaggttgttcagtaatgtgctggttgggcactgaggaatccatcaggttgcatccttttgtctagacgtcgatttgtgttgttgaagtggtaaacattttcatcctgggctgtatcgtcatcatgtatagataggctcgagtctctctctttttttttggctccacaattttttggagatataaaagcggcaggagttatgacatgcccacagtcggccctccttgtagaaatcctttggatgtaacctgtctctttcttatacatactgaaagtcaaggctttttttatctgatttcgtcgtcatttatatacgtaggcttgagtcattgttggcaccacattttttggagatataaaaacggtaggctggttgagggtgcctgggtcggccctcccttggggaacccctttacattgctcctccgtggttcgtaaatgcacgcaccgaaaggttattcagtaatctcctggttgggccctaaggaatccaaaaggttgcacccttttgtttaaacgtcgatttgtgttgttgaagtggtaaacattttcatcctgggctgtatcgtcatcatgtatagataggctcgagtctctctctttttttttggctccacaattttttggagatataaaagcggcaggagttatgacatgcccacagtcggccctccttgtagaaatcctttggatgtaacctgtctctttcttatatacatactgaaagtcaaggcag

SEQ ID NO: 139273 - DNA, 408 bp, Zea mays
  Clone ID: MRT4577_58499C.1
caaacactcggagcctcaaggaaatggccttgcttttacgctaatttggattgcgccgagtggtggtagagatcgcccaaatccttcaacaggagagtggtacccggcaaatgaaacgagatggtacagacagttgtagaggttgctcacaagaattatcctttttttttttgcctaagacaatgcttgagaagtccgctgcatggtggacaatatgaggaggcttctggagcatgctggtgttcctgggcacatatatccactatcattactgtgctacgaggttatgcctccaccacaacaggtcgagaaagagattggtgaacagagggtgatatccttccatggagtaggcttgtcagcaactgaagaaacaagtatggggatattacttgtcataccaagaat

SEQ ID NO: 139274 - DNA, 579 bp, Zea mays
  unsure (1)..(579): unsure at all n locations
  Clone ID: MRT4577_5849C.1
aattctctcgggtcgagcccacgccgtctcggctcgtccgtgggaacaaaccgtcgagggagaccgcgtctatcttcgtggacacccanntcgttcggtgccaacgcggtccaatctcctcgagggacaccggtntnnatcaggcnnagcagggcgaatggggcggcattctggcagcngtctcgcacaaaacgaccccacataccaccagcttgtatcgctcgctncgggcccggcccggcttggacaacccnntcgcagtgggggcctgctcgnngtttcttcggaggggcttcatctgctncatttatgatnngttttctttcgcccccgttggtattctattanngtttcaccaatatagaagaaaataggtacctgggtgaactttttaaaagggttgaggggttgttcgnntcttccctttttcttaaacctcttaaaaacccgacaatannaagtattgtatggataccaccaccannataatattatagaccangnntaaagtagtatttagttctaaatatataatgtgtaaagttttgggtattagaatatatatcttttccttttata

SEQ ID NO: 139275 - DNA, 328 bp, Zea mays
  unsure (1)..(328): unsure at all n locations
  Clone ID: MRT4577_584C.1
tactcacacacaattttgttttgcttgttattacaagttcagatggtgtacacgactacccaactacaagtggcgttatttgttcaatcaacaggcacaggcaccggcaccctagggattgcgaccagcaacagctcagagcgtgggggcatggtgatcccagccgtctccgtcacgtgcatctactgagcaaccatcccttccggcatctgccagtcgaattggaacagcatagcatagagcgcgagctgcacatgcgctaggcccaaggccgngccagggcacattcttcttgatgactagccacacgtagtgtacgtcggtgagg

SEQ ID NO: 139276 - DNA, 1530 bp, Zea mays
  Clone ID: MRT4577_58500C.1
ttgacttgtaccaaaactggtgcctcatggcacaaatttatcaagtaaaagagtaaagaactcctgttcaaaaaagataatggactattcacttgcacaaaaatctttaaagttttttgtgcaccattactctttgctaagttggttcttgccctcatgaggaaaaacatattctcaatctagatcatcgtgcatgcaattgcctttactgttttgtgcttgatcccacatatcttcttacgacaatacacagtggtggttcacagctaatttggattgcaccgagtggtggtagagatcgcccaaatccttcaacaggagagtggtacccggtatatgctcttgcctgatggtcttattcttccattttgaccgtgctatgcattatagcacatcttctctttcaatgtaactgcgttactaaaaggcaaatgaaacgagatggtacagacagttgtagaggttgctcacaagaattatccttttttttttgcctaagacaatgcttgagaagtccgctgcatgggtaagtatgttcccttatgtttattttatctgctatatgcaaaaacaagggcaggcgcattttgattcatccacagtggacaatatgaggaggcttctggagcatgctggtgttcctgggcacatatatccactatcattactgtgctacgaggttatgcctccaccacaacaggtcgagaaagagattggtgaacagagggtgatatccttccatggagtaggcttgtcagcaactgaagaaacaaagtatggggatattacttgtcataccaagaatgctgatgagggaagggagctattcacaaatactttgtacaactcagttgttaatcagtacaatgtcctcaaatctgctatctttagagatcgtggagcagctgtatcaaacaatgccatctcactgtcacaaccatggcgatgaatgtagctttcccagtccagattcgatactgaagttaccttttcagaagaacaggtgaactgcaattgtgcaatttttctgggaaaaactcttgaagtttaatctttctgatatcactggactttaccaatcatggtggagcttattactctaatgcagatcctcgctaagatgtctggctggtcaagggtgattggtgattctgcagatagggatcctcgtaacattgcatgccgtcgtccgcaaattactgctccctcaggttgttcagtaatgtgctggttgggcactgaggaatccatcaggttgcatccttttgtctagacgtcgatttgtgttgttgaagtggtaaacattttcatcctgggctgtatcgtcatcatgtatagataggctcgagtctctctcttttttttttggctccacaattttttggagatataaaagcggcaggagttatgacatgcccacagtcggccctccttgtagaaatcctttggatgtaacctgtctctttcttatatacatactgaaagtcaaggcagaaaaaaaaaaaaaaaaaaaaaaaactcgagaagggg

SEQ ID NO: 139277 - DNA, 396 bp, Zea mays
  Clone ID: MRT4577_58501C.1
cgcccttattttttctttttttgttcctttttttttttcttttttttttttaaatacggcatctttttctgtatggtaatccctgtacttcctccccacccgacgaaaaatcgcccaataatgggggggaaatatggatggtgcagtgaataaggttcatcactgagtctcttcgcatgtttgactttcccaaacaattctcgaggttcatccagacaaaattcatccgatccatactcaactaaattggacacttgatcaatatgataatcggggacatttgtatttagcccaatttgggccgtatacggaatcagcgcatgtcaccggcttctgcgctccttccaaattatattcagcctcaaatgttgcagtaactggaataaatgcaaatct

SEQ ID NO: 139278 - DNA, 791 bp, Zea mays
  Clone ID: MRT4577_58502C.1
aaaaaaagtagcgtaactttattacatcatacaagtaatagggtcttaaaaaggaacatcgtcaaagtacaacaggattaaacatggacactcttccacaggagggggattgacgcatcgttagacttagtactcgttaacatcatctggaaagtcttcttcatcaccctcttgctcaaaggtgtcctgcgggtcgtcctcgaacgtattcgattcttctaccacgaaatcagcttcttcgggctgaccacgcgtagggggttcggcgagggcagggcagtggggaggatcgtcgggatcatgacgcggtggctcgggtgggttcgacatcgtggtgctcgactccggcgcggcgaacggcagcgcaggaagctccggctttggtcgacgacgaagggcacgatggagctcggtcggtgagccacacagcgagagaggaaggcgtgaggcggattggatcgaggcaaggctccaagggtgcgaccgggttttatagagcgaggggaggagagaaaacaccggggtgggagagctggcggcggcaatcaaaatgccatcaatggctttggccataacgtcgaccattactggcccggacaagagggggagtggggaggagagggagaggagaaggcgtccgtttttgatccgaggaaggggagagggcggtgtggcggcgaacggtccgggctcgtcagctcggcgccgggcgaaagcgagctgcggcggtggcgctctggccgcacggccgtgctgcggggaagagagcccggccgagcccgagggtaccc

SEQ ID NO: 139279 - DNA, 656 bp, Zea mays
  unsure (1)..(656): unsure at all n locations
  Clone ID: MRT4577_58503C.1
cccagcgtccgcccacgcgtccgcgcttggtcttgaaaggtgaaagaatagctgtatatttggatctgactctacaactgttcttgtcatgtccaatcagatgtcttaatctggacagtgggcatacaagatgttgcagaatgccacgtacccaactcattattaatctactttttggacatgcatcttgagagcactatttttgtcctacatgaaatgtgttacacccagctccattcagtccatcattgggctgacagtagtggtttgatcgcacatgttcagttctagagttgtagtcatcttttctagcctttagatgttttgatccagtgaagtcttagataatattccatgttttacaactaacaaatcaatatattttgtcaatgtgtcttgaaagcactagcctttctatcctgtgtagaatattttacacccagctcagtttgcttcattgttaggcttgcagtagtgggttgatcccacatgattagttctagatttatagtcttactagggttccatgtggatcttaggaaaccatcaatagcaactggttcaacctttttaagtgtatctgtttgcacaaatagtgttatattatgcaatagtgaggtcagatactgctcctgacccaggntaatcatatccgt

SEQ ID NO: 139280 - DNA, 289 bp, Zea mays
  Clone ID: MRT4577_58504C.1
tatttactcagaatatcaacgtatcatggctcgacctctggaaggaaagttcggtatcgtgaccggaggatcgcggggtattggcgaacgatagcccggaatctagcaagcaaagggtgctcgctcctcttgaactacacatccgaatcgtcacgaaccagaaccgaagagctagcatcgtctttcacagagtctttcggcattcaatgtaccacggtccgcgccgaccttaacgaccctcaggcagccagcgatgtaattatagacgcctccaagaagcactttggcg

SEQ ID NO: 139281 - DNA, 371 bp, Zea mays
  Clone ID: MRT4577_58505C.1
aaaaacccccccatattatactgggtcaaaaggggagacccttggggtggaaaaagccaggggggggccctgggggataaggccccaaaaacagggcccttaatttttgggccccggaaggggtttaattaaaaatctccccgggggctggggaaaccccaggaatatagccttccccggggccgctgacaaccggggtataaaaaaaccttttcccccaggggccctgggggaggcaaaattgaatcacgttaagaaaacccgacctaacccggcggggggagacagataaaagggcctggcgggcttgtaccttaaaggggggcctgaattttcggggcccccctggttggacccaggttggggggggg

SEQ ID NO: 139282 - DNA, 405 bp, Zea mays
  Clone ID: MRT4577_58506C.1
ggaaagtaacttttttatttttggttggccccattcattatccaaaaaactttatttttgaattacaactaataatcaatctaaaaaaggcccccccaattatttttttttggtaggaggcttcttggtttgtcaaaacaagttggacaaagggcaacaattgttttatttttaaaaaggttgcggggttagccccaaactgcttgtaaaaaggcagcaacttttgctttttcaaaaaggaagcaccacttgctgcagctagctcgctaaatggcagtagtatttgctgctgcaaataagcaacggggttcaatgcggccaattggttaaatggaaaaatttttttttcttaaagttggcagtaactagcttgctaaatggtaatagttgttgctgcaaataaac

SEQ ID NO: 139283 - DNA, 470 bp, Zea mays
  unsure (1)..(470): unsure at all n locations
  Clone ID: MRT4577_58507C.1
atcaggaaagcagagcaaagcaagagggagaagaagagaagaggagaaagaagaaagaaaagcgaaagcaaaggtgaccggcacctggattagtttgtctagctaaccgcggaagaacaaagggtaacatccgattccttccttcccctgatcccctcccctcctcgccgaaagggagggagaaggatggacagctcagggctgcgggctccggcgccgattcacatggccgggggatgctgtgaggactgaggactttggatgggcgttcgtcccgccggccgagcgcccgcgcgagagagaaggggacagagacgagncagaaaggccggccggngaagctccgnccgnganngctctggnccagctgctgctgatctccctcatgaactgagcaatcgacagaagaacacaaagggtcgtttccgctacagagagaacgaataaatcaccgtaaatgtgaaggcgag

SEQ ID NO: 139284 - DNA, 277 bp, Zea mays
  Clone ID: MRT4577_58508C.1
ggcccaaaaccccaaagggcatttttcatgggggggggggggccaaccgggtacccgggccgggacccccctaaggggaaattcgggaaaaatccaacaaacgggggggcggtcgggcctgcttttaaagggcccaatcccccccaaagggagggggataaaaaaacacgggccggggttttacaacgccgggacgggaaaaaccctggggttccccaactaaaacgccggggaggaaatccccctttccccaggggggggaaaaggaaaaaggccc

SEQ ID NO: 139285 - DNA, 379 bp, Zea mays
  Clone ID: MRT4577_58509C.1
ggaggtcaaacatgtcaaccggttcttgcactcatctttgaaaggcggcaatttttccggtgcctttttggtcctgggaaaaatgaactgattccttcgggggacaacatatttttaacagctgcaattatgccaacaaagctattcaggctagtaatgcatacatgccttccaacctagttaactgcccgccttattctcattttttttctctctctctggaatctatctcactggcagggcgtgcaaacttacagaaatggaaaagcaagaatatcccaaagatataatcatcttcgtttcatgcccttggagggctccgcactcaagtcaccccattttacgttgtacttggcagcgagatagtgggccccgacag

SEQ ID NO: 139286 - DNA, 491 bp, Zea mays
  Clone ID: MRT4577_5850C.1
cccacgcgtccgccgttgggtggctgcgctccctgttcctggacctgacactgccgccggaggccaccgatgacgacctgcgcgctgcggtcgccaatggtaggctgctctgcgcgctcctgcggagactcttgcccggcgcgctgttggacgacgcggccacggacaatgtcggcaggttccgcgccgccatccagcggatgggcgtgcccaccttcagcgcctatgacctcgagaggggggagatgtcagctgtcgttacctgcattcttgctctaaaggatcggttctcatcacgcctcggcgaagaccaccgcagctcttccttcctcaccagatgtgaaagcgaaggtggcaggaggaacatggaaggcaagctgcaaagggtactcacaagccccattatgtcagagccatactctccttcctttggaggcgatgcctattctccatcacaggtatttcaacccgaacatggatattctgatcta

SEQ ID NO: 139287 - DNA, 1965 bp, Zea mays
  Clone ID: MRT4577_58510C.1
ccagaacgcaacgcaaacacagagactagagagagagagagagagagagtcccgaagcgagcacaagaggccaccgcacagcggccaggcggcgagcgagacacctccacacgtctctcccccttcccctccccttccgttccctctgtagctgcgcccgaccgaacccccctaccccgtggaatcgtcctccgatgcggcgccgataggggctggcggaggagcggaatggcggggcacggcgagaagcggcgccgtacgggaggggcccacgagaagccggaggaggaggaggaggaccgcatctcggatctcccggacgtcctgcgcctgcacattctgagcctgctgccgctcaaatcggccatccgcaccggcgcgctcttctcgcggtggcgccgcctctgggcgtaccgctggccggagccctcctcggtgaccatccgcctcccgcccggcgcggcggcggcggcggcggcgcgcgccgaggcgctggccgggatcgaccgccgcgggcggcgccgcgtcgacggcttctcgctcgccttccacgggggccagctggcgcacgcggacctcaagcgctgcgtcgactacgcggcggcgtgcgaggccgaggacctgcacctccgcgccgacggcggcgcgggcgccgcccggggctcgcgcggggccacgcgccgcctgggcgtgcagctcccgacaaacaccggtgaagcattctcggagaacttcttgaaggtggaggaggaggacccgccaaaaggtggattagaaaaccttcgcttagccaagctgacaaatttcaaggggcaccgtaatgagatgcagctagtagcatttctgcttagacagtctagtagtctgaagaaactatttctgattgctcccaaggaggatcaccctcaaggactgcgcaaggttcattcagatatgctgcctgattttcttaaaaaagaaatatcgcatctggaaagagcttcagtcgcgccccgcctccggtccttccgcttcagcggcgctttcctctccagcaacattctctccggcgccaaggcttctctcgagcatctctacctctgctccggcgggccagagaccggccttcccgtcaccaacttgccctacgcagttcctcgcctgtcgaacctcactgtcctcaccctctgcagcattgctctccagtatgtttcttctttcacagccaaggatgtaatggagagcaacctgcatggcttgagggagcttcatttgctcatgttcgggatggccaactccaaccttgctgacatctatagcttcctcaagacctgcccgtgtcctcagttggagcgcctctttgtgcagctcccgacaaacaccggtgatgcattcacggagaacttcttgaaggtggaggaggaggacccgccaaaaggtggattagaaaaccttcgcttagccaagctgacaaatttcaaggggcaccgtaatgagatgcagctagtagcatttctgcttagacagtctagtagtctgaagaaactatttctgattgctcccaaggaggatcaccctcaaggactgcgcaaggttcattcagatatgctgcctgattttcttaaaaaagaaatatcgcatctggaaagagcttcagcaaatacccagatatttttcggcgagcctgatgctcagacccacccgttgcattcggaggtctttgtcaggttttagcttgaaatgagcaaaagctgttgtagcccaattcctgctcatatagatttagatttctcgttgttagataacggacatggggaaaaaagtatctgcaaggcatacagagtttgatatatgtttcctcttttgcaattcatattactaaagaagtcctgcatagcagttgaaatgcgagttgttctgatctgccacattttcttatccctctcttctctccctatttgtgtccattgtccaagatctctttgg

SEQ ID NO: 139288 - DNA, 1335 bp, Zea mays
  Clone ID: MRT4577_58511C.1
atgaaaagaaaatcaatgaaggccatggtagaacatatttggaacaatggatttacgctggactatactcggtggatcttccatggtgaagtgcatcgtacgagagaggaggtggtcagacaacgcgtcgaggattatgatgctgatgccggggtagcggatatattgaacgactctcacgaggcacaattcgccgtgatattcaaatgtcattggtttgaccatcaagtgacgagacagacacattctaatcttgggatagtcaaaattcaacaagattccaccttactaggagacgatgtctatattgtggcccaacaggccacacaagtgtattatcttccatatgcgtgcaaaacgaaagaacatcttaagggttggaatgttgtgtataaggtttcaccacacggtaaattacctgttccaaacgatgaagattataacttagatccggacacatatgccggagagttcttccaagaagatgggctagaagggcgatttgagatagacttaattgaagctatcagaatggaagtagatattgaaatggttgttgatgaggaggaggatgaggttgtggagaatgcagggggtcacggtcgcaaccctaatggcatcctcggccttctgtgcagggagcacttccctggattagttgagtacgctggaatgacgggtctagcctacaccttcgaccactacgacgtcacgcctgatgcactagaccgggacgacagggaattcaacaagaaggcagagcgtgtgaagcaagagttgtggatgattccttattggtgcgccgcacattctcagtgctgggagcagatgtcggcgtcacatggtggccagccttgctctatcttctcggcttatgctatggcccacaagggcaaggcgacgtccgacgtcacctacaacccggatgatggacccgaggtgtatagcaaccccgccgtctacagttgcctaagtgagtacactgccatggctcaggaggtccatgcgccagattacgatccgaggatcgaggacatcaacggagatgtagatgtcctcatgaggctagaagaagagaggagggaacgtcaagagatggaggcgaggatgatagcggagcaggaggcccacttggtaggtcagaagtggatggcagagatgttccaatacatccagagccttggcgccgcacatggtttcgctccaccaccttcgttgttcccttcagttgaccctgctcagttccatactcctggacaatctagggcggcatcgaacaaccctcatggatcgcccagcccatcgccgcaccagtccagctgctcacttcgatga

SEQ ID NO: 139289 - DNA, 406 bp, Zea mays
  Clone ID: MRT4577_58512C.1
agttctagctcgcgatctagaactggctcaaaccttttcctaaatgattttggtggttgaattgcccaacacaaataattggactaactagtttgccctagattatatgttctacaggtgccaaaggttcatcttgtcggcgtttcgaccccgggggtccctggaccgacgagtaaattgtcgctgcgtgtcccagcccagatgggtcggcgcgagacggaacacaacgggggaaaacagtaaggggaaaccgcggtgagccccgtgtcgaccgggagtacgacatggtcatcgtcccgtccgacggcggtgggtgcctctccggctctgactcggacgactccgactggtccatcggctggctcgagccacaggcaccggagcttcagacggatggcgaccccga

SEQ ID NO: 139290 - DNA, 623 bp, Zea mays
  unsure (1)..(623): unsure at all n locations
  Clone ID: MRT4577_58513C.1
ttnnggcatgtgatgcccgtcatatccattccattttcaaccaataatacgaatggttcaaaacgacacctacgtttccagcaaaaattgcatatagacacctgatcgaatggctaacctaaatagtaactaaaaagacttaactaacccaccaaaattttcctatacaaaggataaaccatcgctctaccgcgcgaccttattcttcaacctactcgacaaacaagcgtcggccctgtcctgtgctaactgtgtgcacaggggagccggtgcccccctaaaaataaatgtctatctcccgttcggtcatctcgtacacatggtcccgcgcctcagaaagagcgacctgtccgaatttcgtgaagaagttgtttgcgagatttaacgacgtgactgccagatcctcgttagccttgagcgcctgtgccaatgcgaatgctccgtcgtctcgaatctcattgaaacccaggtcaagggacgtcaacgattcgttgattatcttgaaacttcgcgccaagcatatagcaccatcgtttccaagcccgtttgcccgcagatccaatgtcgataacgttgtgttgtacttgagacagtcggcaatacactctgcaccttccatgcct

SEQ ID NO: 139291 - DNA, 155 bp, Zea mays
  Clone ID: MRT4577_58514C.1
ttcacacgtccggagaggggtacacagcacgggtcttttttacttgagaggcggttttatccaatacacaaagcaccatagcaatactacaatgtcaaccagttccacgactacccacggtcataacccacataccggccacaccatgacactcc

SEQ ID NO: 139292 - DNA, 324 bp, Zea mays
  Clone ID: MRT4577_58515C.1
gggggctggccaagaattggcattcacatcaaatactggtacttgacatgtatacacagattcgctcaaagcgacaatgcgtctttttctttatctgatgatcactaattcattcacttggcgtccgatatgcatacttggccacgaactcggcgatgttcctgtccgagctggcgcctttcctgctcgccgccctggccttcgccatacacacgttggcgctcctcctgaactcggcgctcttgtcgccgtccattaccttctggacgcgcatgaccaccttgccccttcgcacgaggccgaagctgttgtcgggcgcgggcg

SEQ ID NO: 139293 - DNA, 779 bp, Zea mays
  Clone ID: MRT4577_58517C.1
cattgggtacctcggggccggcgggggaaataccccggcgtttctctccctccctccctccctctgcacaaacgccacgccgcgagactcccacgcggtccgcccccgcgtcgtctggccctcgcgatggccgccgccgcactacgaccgcgcgcaccgcccctacgcggctcccgccccccccgccggtgagtacgaccgcccctaccgcaacgaggtcgtgccctacggtgaccgccgcatcgacatcatcgtcaagccgcccgcgaggtcgccgccgccggtatccaacaggggcggcgggggaggggtggggtcggcgtggtgcttcagcgatccggagatgaagaggcggcggcgggtggccagctacaaggcttactcggcggagggcaaagtcaaggcatcgttccgcaggggattccgctggatcaaggccaagtgctccgagctcatccatggctgaacccggtacctcggtgaaattctattgtattggcatggtgcaagatgcggctacaaagcgcgagagatggtttgtctgttgttatttcgctaattcgctctcaaaatgtggaagagaatttgttctgagattgtgtagagaactttgttgcccccctggttataggaaaagaactcgatggagatctgctgagattgcttgtcgctacctgccaattgccccctaattctgttcaaaaaaatgtttgaagaagacttgaatcccggagaagaaaaacacgatagtacttttctaataaaaggcccctagggcc

SEQ ID NO: 139294 - DNA, 316 bp, Zea mays
  Clone ID: MRT4577_58518C.1
agcgtacatggaaccagccgtgaacacaggccgttttctggtacaagagcacttaaacactcccgtcgggagaggaccctatcgtgctggagatgagcacattgggcacagagttgatggttgtaattgatcagaggatatggcgttgctgatgctgctagcaatatgtacttgatcggcgctttcagtagttgtagcatattactaggatgattcggggggagatagtaaaacactataagacaaaacttggaaaataacggaaccaatgcaaaaaaaggtgatagaaagagtgcaaatacacactgaaactaaa

SEQ ID NO: 139295 - DNA, 804 bp, Zea mays
  unsure (1)..(804): unsure at all n locations
  Clone ID: MRT4577_58519C.1
ggggaccctccgggctggccgggaactgaagcagtgcgtttgtttattctctctgcatggctgcatgctcctctcccaaacgttcaccttggcacaagagacgatgcataccggatagaaataactcattccttggtcactgtgctcgactactataagatggagattttagaaaggagggagtatgtctatattcaatggataatgaatttagacacatataaaacacatacatcaagtattgtatgaatctattaattttctaaaacgagttttaatttgggactgatggagtacctttttaagtgatgggcccaagatatctaacaaattatgagtcacttgtagtatctgttcctactgcttgatttattgacaggaactcttttgtgtatgttacgtggaaacttgaaagttttactgttgtatgacccatttatcaattgttgtgtgcagattaaacttgtgctaagcacaagtaatgacacaatatttcactccagtatggacatggctttaagtaaaaaagacccaccagatacatctcttgttactgatattgatatcgtaaactacaaagtatttgatatgtgcatgcttaagctgcattacctgaagcttgtttcaaatacaccagcagtcagccagccgtacatgaaattcgtagggtatgtttataactgccttgtcacttgngagcattgcgttaaatatcagtgtttgatgtatctggtgcttctactcttcaaccgtaggcatgccctcacatccatgctgagtactgacattgcctgtatttggtct

SEQ ID NO: 139296 - DNA, 261 bp, Zea mays
  Clone ID: MRT4577_5851C.1
acgcgtcagccaaggctcccttctctgagcagaacacacgatgactccgcggctcgagcagacacacacacgcccagagccagtccatagaagacaaggagcaggacgctccagggtcaactgcaagtcggtgccgcacgagcactcctcggattacgacggctgccgacgccggtacgactactacgacctccgcggcgggcccgcggcatgccggcagctcctagagcttcaaccggcccagccgcccgggacgacccg

SEQ ID NO: 139297 - DNA, 631 bp, Zea mays
  Clone ID: MRT4577_58520C.1
ctacaagcgccggcgcgctcagggactccagacaccataccatggcctcgcctccgtgctgtaggcaagtcgagcaccgttcccctgcagctctttagagttgccgcccatcatgcctggcatggtgaccttacctagctggggcgaccttggacgcccggctaggtgctgcgagctgcctacgccggccacgatacttcccatggtaggagctacgaacggcccatgctgaccttgacactcagcgtgagagaaagccacgccttctactataaaagcggttcaacgtaagacgtaagatcatgtacctcacgttccctacagacaagcaagttcaaccgtgggccaaaccactatgcagtgagcgcatggactagtgcctgctgacgctgggctgtgcagcgtagccgcggagcagaaagcacaggaactccgggctccgccggctggtgggactggaacgcccagtagacagaatgaaccccgatggcttcacgacggtgcgcttcacacccgatttgcacaggcactgcgcgacggaggacacccggtagatggggacgctgggccacgcgcaccaagcgtacggccgaaagcccaagcaacgggcagaacgcggcgctcgaacccg

SEQ ID NO: 139298 - DNA, 494 bp, Zea mays
  Clone ID: MRT4577_58521C.1
gggaacggagcttcctttccaaactaatcgagggctttgtttgcaaaaaaaattgcccgactgacaaacgaggggcaaactttatgaccataaatgttttgggggcccgatgcccccccctagtaggatagtcccaagggttgggaaatttaagtctccacccaaaacaaatggtgggaaaaaccccccctttacaggaattataaattccttcgataggaaggggaaaaacttccccaaatcctgttgggaagggaccgggaacaccccctgcttttgtgcgccataatatttttccattaaaccccccccggacccgtatttttttccaaaaaaaaggatctggagctggtcttagccaaaaagccccccccccccagcattggcccaaaaaatgttacccccaccccccttgaacagggactgggcccctcccttttaaaaaatttgttggaacccctccaaggagcttttgtccttgacaccctccccaa

SEQ ID NO: 139299 - DNA, 348 bp, Zea mays
  Clone ID: MRT4577_58522C.1
aatatggaattcttttatataggatcgaaaaaaatgcgggttacatcccaccaattttggtgggggggggcaatttttgggcataagacaacggaccgaacactggtgccccgtagggacaaacgccgaaacaaaaatcttttcccggggggcggataaaaaacagaactgggttcaatccattgaaaccaggtttttaaaagggacattttttaaatacacccggtgaacggggataatacataagggaaattcgttctttgggcagacaacttatttcaggggcttttgcgctcctttttccagattaaaccacatgcctattgaattgggtcctgaaaaaaaaca

SEQ ID NO: 139300 - DNA, 710 bp, Zea mays
  Clone ID: MRT4577_58523C.1
ccggccgggccgggagtgttgaggcgagtgcaaacttctagttttatttatctaccttttgggttaatgatgaataccgaattctaactgcaggactgaaccaatgtgcaacacagttctgcccatatgagacacctatgatgacccaacaatgagagcttctcaagaaaacagctggcggcttcttcttcacagaaaaataagagaaggtgaatgcttatatttagtacactatctgccatagtaagcaggcacaaatggagtcctaatgttgagcccctcctaaatcacacaaagggagtggttcccctctaacttcaccttcgtggacgccacttcagcgtagcaaattgaaagcgcttgtaatgaaaatgcaaaggtgtaaagacactggtataacttctgccacaatcatccagaaaggatacaggacgtgagtaaataatacattggagagaagtcgaaccatatgtactgaacggacgttagattgctcctggaaatgggcatggacgcatataggttctctatctcttggaccataatactgccgaatggaaccaaagaatgatggattaacccggatggcatcaagtacgagagaaacctcatcaccttgttgctagaaaacggcatagagccatatgtagccattttccactgcgatgtacctctagcactacaatagaagtacggcggcttcctagata

SEQ ID NO: 139301 - DNA, 384 bp, Zea mays
  Clone ID: MRT4577_58524C.1
atgaagcacgcgtacttgtccaagagcaaccttctcacggacgaagtgaatatcgatctcgatgtgtttggtgcggcggtggtgaacgggattggctgccatgtagacagcactcacgttgtcgcagtagacgaccgtcgcagaagtaatcgacacatggagttcctcaagaagctgtcgcagccagcagcactcagcaacagcgtgggccactgcccggtactcagcctccgcgctggaccgggagacggtagtctgtctcttggaggaccaagagatgaggtcttgttgaaggaggaccgtatatctcgcgccttacggtggggattagatcttgggttcatcgactttgggccttggatcttggatcagacggccacctag

SEQ ID NO: 139302 - DNA, 1341 bp, Zea mays
  Clone ID: MRT4577_58525C.1
ccacgcgtccgagaatccaaagcgcaagcggctgcagcctgcaggcagcgccgcgcaggcgtgggagtggccgagtgggagtgggagtgaaaaagaggaaccggccaagagaagcaagcgagaagaaggcagtgctgcggcggcgttccgtaagatggggaagtacatgcgcaagcgcaggggggccgcgggcgagggggtggccgcagtcgaggtctcgcaggtcgtcggcgtccggacgaggtccaggtccgcggcggcgaccggcggcggtgtcgcgaaggtcgctccgccgaggaggaagaaggcgctgctgcccgccgcgaacgagacggcgtcgggggagcctggtgccgtgggcggtggtggtggggacggcggaagctgctgctacatccacctgcggagccgcatgctgttcatggcagcacctcagcagcaaccgtcggcggctccgacgcccgcggaggctgctggtgcggcacagcagggcggggtggtggcgctcgcggctggcctctcgcgttgctccagcacggcgtcgtcggtggacgtcgggggccagcagcccgcgagcgggagccacgcctgccgctccgacgctgcgcctgcggaggttgacggggatcacgtcccggatgtcgtcaccgcgagcaactcggggagcgtcccggaccgcgagaggagagagacgacgccatcgtcgagccgggcgcacggcggcgagctcagcgatctggagtcggatctggtggggcggcagaagactggctgctcgtcgtcgccggcgacaacaacgtcggctgcggagctgatcgtgccgccagcacaggagatccaggaattcttcgcggccgccgaggcggcccatgccaaacgctttgcttccaagtacaacttcgacttcgtccgcggcgtgcccctcgacgccggccggttcgagtggacgccaggggtcagcatctgaagcgagcgtgcggtgcaaggtgaagctactactagctagaaagtgaggagaaaaaaagaaaagatgccgccaaaaaaacataacggaaaggagaaaaggcaaaggagctttataggctagctaagctaaccaccattcaacatctgccttgcttttttctccggagtagacttgtagaatgacagcgtagttatttactgtttatccagaggttatcttgaccccccaacagatcatccgcttaccgtaatttgtctcctgtatcgtagacggaatttaatttactgtacagcacctagctggcttgcaaaccaaaaaaaactgatttttactatccgtcccgagttattaaccaccgcatatttagtttggcc

SEQ ID NO: 139303 - DNA, 366 bp, Zea mays
  Clone ID: MRT4577_58526C.1
gtgttggtgttttttttttttttttttttttttttttttttttttttttttttttgagcaccacactggttctatttaaattttcctaactaaaaagggtcaccgcctgaaacaaaatattaccggttcaccatccacactggataattggtaattttaccctacaacctacaggtttttgtcggacaaatttttttcagggccggggggtaaaccccaggggcaaggggccataatgggggggggacccattttcttgggtgaaaaaaaactggggggacctttcactttttgggggccaaaaaggggcccccttgattcatttttttttaacagttttgggggccctgggttcaagaggttttt

SEQ ID NO: 139304 - DNA, 383 bp, Zea mays
  Clone ID: MRT4577_58527C.1
ataaaagtgcactctcttatttgggggaccccacatacctgatccaaaaaacttcattatggaactataactcataaccaatctaaaaaagggccccaccaatgatgggtggtgggtaaaacactgtggggttggtcaaaccaagttggctgaatggcagcaatggttgcagttgtaaaagggtcccaccgttaggcatagggtgcaggtaaaacggcaacaactgttgttgtgtcaaaaaggcaccagggttcacataaattacctggctaaatggaagaagttgttgctgcgtgcaataagcagaaaattccattgctgccagtgggtgaaatggaaaaaatcgctgggggtagacagcaactacctggctaaatggaaat

SEQ ID NO: 139305 - DNA, 228 bp, Zea mays
  Clone ID: MRT4577_58528C.1
cagccatttcatataggggccgtgccatggcccatgggactggagtgagactctcctaggacaacattcgtttctttaaactcttttgctgttgtgtctggtaggctgaatcgactctttgcccatggaaccctggtaatatctgatgcaaaggaaacatgaggttgacataaacccccctgcagctgcaacctgtatgtcaatgccacgcttggcttcctttgtttt

SEQ ID NO: 139306 - DNA, 327 bp, Zea mays
  Clone ID: MRT4577_58529C.1
cataacacttttttgtttttttaaaagaaggcggtcgccgaaatatattcctgccagattgagggcattagtttcaattaaacaaaggggttcagttatataacgggggcccccataaagttacaagagagaacgaagtgggcaaagcaaaggaacacttgggttgttggtccctccccaccagacgaggtattaccgcacagccaacttagggcccccccttgacgacacgggcccaggtggtgaactcagtagaagatcatggtagcgacagtagcggccacaccagggatgggaggtccgtttccaagggggggagcaccgggg

SEQ ID NO: 139307 - DNA, 659 bp, Zea mays
  Clone ID: MRT4577_5852C.1
ccggccgggagtatagtcgtcctccagcccgaacgatgccatgccaagtcgacggtgcggttcttgtcccctcatccacggagccagccttgctcgcaagtgtgtgctcaaatttctccaacgccggtggaagaaggcccggttcgctggtcacaaaaaaaatgtccgcagcgttggctacctgggattccgtcagcatgcagcttcctcgagcaccttatgcgtcgtagcggttcaacaaaacagtctttgtcgccagcataaggtcgtctcaatgttatgtacgtacgtctctcgatgcgagacacggtgtctttgtcaagataaaaattcatcagaatactcaagtgaatggataaaattctacactttatataaagcaatggtgttgagcacctattgagcggggcgggacggtccggccctgaggccgaaccggtccgcggtccggacagtccgcgcctgtgggccggacggtccgcgcatgcgcagagcagtttagggttccgagttttgtgctatgtttgttggctagatttgcggaattaacccggaatccagtcgtgtaaagggtcaagcccccctcctctatataaagagaggtctacgaccgatttgtaagcatcaatcggaaaaaaaaaaaaaaaaaacccgcggcc

SEQ ID NO: 139308 - DNA, 232 bp, Zea mays
  Clone ID: MRT4577_58530C.1
atcaaataccgcgcttgcaccccgcctacccatcaataatctagccaagacctcgcaaccctgcacccgctacctcgctgagccagcaaagacaacatagcatgaggatccggatgcctaccattctagcgcgacacctgttgcctcgctgatgcacacggagatctgcccttccccataccacgaggagacacgccccctcacgcttagcctaggtcgacagagtactgta

SEQ ID NO: 139309 - DNA, 301 bp, Zea mays
  Clone ID: MRT4577_58531C.1
gccaccaccgctgctggcctgcctccacgactcgccgacagactaggattttatcccctcccatcgtttaggccgcctcctaacggcagtaagctcatgacttctctcttcttaatctcctacaggtaggcagagccacacctactttgaggggaacccgtctacagcgacaaggggtaccataaggcatacggtgacgggggaggtgccgaacatatgcaaactgaccccgcccgtgaactccatgtgcgggctcgcccactagttcgctctggagttattgtactactacatgagcgat

SEQ ID NO: 139310 - DNA, 558 bp, Zea mays
  Clone ID: MRT4577_58532C.1
tgtcagtgtgagcaatgacctgaatgaacaattgaaatgaaaagaaaaaagtattgttccaaaaaaaaaaaaaaaaaaaaaaaaaaaaaaaaaaaaaaaaaaaaaaaaaaaaaaaaaaaaaaaaaaaaaaaaaaaaaaaaaaaaaaattaaaaaaaaaaaaaaaaaaccaaaaaaaaaaaaaaaaaaaaaaaaaaaaaaagttttttccctccccgggcgccccttaaaaagggcaatttttgaaaatttccataaaactgggggccgtttaaaattcctttaaaaggcccaaattccccctatagggagtcgtttaaaaattaattggccgcgttttaaaaacctgggaatggaaaaaaccctgggttaaccaaattaaatccctttaaaaaaaatccccttttccccatttgggttaaaaaaaaaaaggccccccccaatcccctttccaaaaatttgccaaccctaaatggaaaatgacccccccctttaccggcccttaaaccccgggggttgtggggtttcccccaaagggaacccttaaattttcaaggccc

SEQ ID NO: 139311 - DNA, 282 bp, Zea mays
  Clone ID: MRT4577_58533C.1
ccagggagtgggataaataaggaggggggaggttatgttaaatcaaacgaaatgtgcggatcctggtggttatggagcaacaaaaaaaaacaaggtggccttttacaatcaaagtattaaacaaacacgaaaaattgggggttgcatttaccaagtgtaccctactggtgtcatccttgaaccatccaaccacgtcgggcaagaaacagagataacggaaaaacgtcccaacacacattctcaaatggggggaacaaccatatgggttaggtcacccccaac

SEQ ID NO: 139312 - DNA, 771 bp, Zea mays
  Clone ID: MRT4577_58534C.1
ctttggccttattcaattggggaaatgtgcacatgtgtgaagcaaggaagcgcatccctctcgatgaatctgctccaaaggaagtcatggctgctcagctccgcacagcttattattgggtgaaggagaggtatgctcttgcagggcacaaatatgaggaggcccttaaaatcaagccagacttctatgaagggcttcttgctttaggccagcaacacttcgagactgcaaagcttcattggtcatatgcactggcagataaggctgacctatctacctgggattctttggaaacattcaagctttttgatagcgctgagcagaacatgagggctgcaacagagatgtgggagaaggtggaagaacagagaatggcagagttaaaagaaccaggcgcatgtgataaggatggggtactgaggaaaaggcatcacggtgcaggtggtcaaccggagttgacaccagaagaagcagctgagcaggcagcagtaatgaggcaacagattcacctcttctggggtaatatgcttttcgagcgttcccaagtggagtttaagctcagtgttggtgactggaagacaaatcttgatgcatctgttgaaaggtttaagttggctggagcttcagaatcagatattttgacagtgttgaaaaatcacttttttatatgtagcctctgagtgtgaagagaagaaagttatgacttcaggcacagaaatttcccaaacagatgacattgttgaggatcagtgtgtggctgaaacctaactt

SEQ ID NO: 139313 - DNA, 530 bp, Zea mays
  Clone ID: MRT4577_58535C.1
tgtcagtgtgagcaatgacctgaatgaacaattgaaatgaaaagaaaaaagtattgttccaaaaaaaaaaaaaaaaaaaaaaaaaaaaaaaaaaaaaaaaaaaaaaaaaaaaaaaaaaaaaaaaaaaaaaaaaaaaaaaaaaaaaaaataaaaaaaaaaaaaaaaaaccaaaaaaaaaaaaaaaaaaaaaaaaaaaaaaatttttttccctccccgggggccctttaaaaagggcaaattttgaaaatttccataaaattgggggccgttaaactttaatttaaaaggcccaatttccccttatagggaggcgattaaaaattaattggccgggttttaaaaaagcggaaaggggaaaaaccttgggtttcccaaattaaatccctttgaaaaaaatccctttttcccaatttgggtaaaaacaaaaaagcccccccccaatcccctttccaaaaatttgcccaccctaattggaaaaggacccccccctgaaccggccattaaaccgcgggggttggggggtttccccc

SEQ ID NO: 139314 - DNA, 208 bp, Zea mays
  Clone ID: MRT4577_58536C.1
gtaactggtattcctatgtataagaccttgttgtatctgccgcatctgcatctccaatcggggagtctttacacagcggaagggcgccgacaaaatcattctctgatcaagaaccatcttcaaaagaatcaaacgctccgaacagatctttacaaggacgtacgcaacctattgtgacttgttcaccgctaaccacctcaaatgatct

SEQ ID NO: 139315 - DNA, 728 bp, Zea mays
  Clone ID: MRT4577_58537C.1
aattcggcacgaggattctccaattcggcacgagggccgccgccacctacccggctaccccacgtttccagtccccactccctccgccggcgcatcctgcttccagcctccatcggcgcatcctgctcctggcctcccgccaccggcgcatccttgctcccggcctcctgccaccggccgcatccccagggccgcgagatcctgctcccgccaccggccgccgcaacctgccagcgtccagggcactcgcccccaccatccgccgccgccccccaccggcagtcgcaacctgccagcgtccagggctccaggcaagggccgccacgtgaccacgtctcgcaggtcagcaggtcccttgcctccttccatggcgcatgctggtaggagcggaaccggcgctcaagcacaaggtgccccgaggccgagcagtcatcaagttccctcaaagacaagtgctgtggctgcaggaggttcctcaagtgcacctacaccgacgagtgctgctgcaaatgcaatgccatcttcaagtgctcaagctccaccatcagaaggtcctgacacccttgctgacaagaaacgggcagcgggcggtggctctgtgtttaagccaccccctcccatggtagctggtgctgggggttccatcgatgaagatgagaagccaggacctacagagaaatgacgcgacagcctctctacgacaattcgcagtaactcattgcgacgct

SEQ ID NO: 139316 - DNA, 1727 bp, Zea mays
  unsure (1)..(1727): unsure at all n locations
  Clone ID: MRT4577_58538C.1
actaaagggaacaaaagctggagctccaccgcggtgcgccgctctagaactagtggatcccccgggctgcaggaattcggcacgagctcttccctgcagatcgagaggcactgcacaccaccaccaccaccaccaccaccaccacaccatgctcaacatgatgactgatctgagctgcgggccgtcgtccaaggtcaaggagcaggtggcggcggcgccgacgggctccggcgacaggcaggggcaggggagaggcaagatcgagatcaagcgcatcgagaacacgacgagccggcaggtgaccttctgcaagcgccgcaacggcctgctcaagaaggcgtacgagctctcggtgctctgcgacgccgaggtcgcgctcgtcgtcttctccagccgcggccgcctctacgagtacgccaacaacagtgtgaagtccaccattgagaggtacaagaaggccaacagtgactcctccaactctggcacagttgcagaagtcaatgcccagtactaccagcaggagtcctccaagctgcgacagatgatccacagcttgcaaaacgcaaacactaggaacatagtgggagattccatccacaccatgggcctcagggatcttaaacaaatggagggcaagctggagaaagccataatcaagattagagctagaaagaatgagctgctatacgctgaagttgactatatgcaaaaaagggagatggatctgcagactgacaacatgtacctgaggagcaagatcgctgagagtaatgaaacggggcagccggcgatgcacatgacgatgggagcgccgccgacgagcgagtacgaccacatggcccctttcgactcgagaaactttctgcaagtgagcatgcctcagcactactcccatcagctgcaacctacaaccctccagctcggatgatgaaatcagcgctatacctggcggcgcccggcccccaatcgagatagatcacgcatgcagttatatcatgtgccaaatcgagatctcaagtaactctacgtacgtttgcttaattattaataattgtgattagtgcaactgttagggtatatatatttgtgagtgccaccactgtgtgcgtgcatttgtacgtgtgaatttagctgttgcatctactactattgtaccctccggccaggccatatcatcagaaacgcgggtttatttacgcatacttatatatatatataatttgtgtgctttaatagattgaaaatagtatgttggcctctcttctgaaaaaaaaaaaaaaaaaaaaaaaagatgatgaaatcagcgctatacctggcggcgcccggcccccaatcgagatagatcacgcatgcagttatatcatgtgccaaatcgagatctcaagtaactctacgtacgtttgcttaattattaataattgtgattagtgcaactgttagggtatatatatttgtgagtgccaccactgtgtgcgtgcatttgtacgtgtgaatttagctgttgcatctactactattgtaccctccggccaggccatatcatcagaaacgcgggtttatttacgcatacttatatatatatatgatttgtgtgctttatatagattgaaaagagtatgttggcctctcttctgccncaaacccacccaaaaaaaaaaggatgatgaaatcagcgctatacctggcggcgcccggcccccaatcgggatggatcacgcatgccgttt

SEQ ID NO: 139317 - DNA, 260 bp, Zea mays
  Clone ID: MRT4577_58539C.1
tttggggttttttaaggaattttacggcttacaacaatggatgaatacacactatacaagtccacagatccatgttacttcacagagagaccaatacaccaatgcagtgcactaggggacgccggtcacaaaaacgcgggtgaagatcgggtccaacatctgaacaaaacctacttagaacacaggggcccccggcctgtagattgcctaaaacctaatctgcgggggccagagatactggcactagtgaactacaacag

SEQ ID NO: 139318 - DNA, 268 bp, Zea mays
  Clone ID: MRT4577_5853C.1
ggttgcttctgcacagacacagccttcttcatcaagtgtgcctgctccttttggagctacgccttccacacatcataaaatatataatgctggtccttctgtggcatctcttacaaactcatttcagattaatgccagatttgaacagctgcaacctttggcactgcatccatgagcatgcgtcatggattactttatcctgctccctacagtcttcccaccagctttagtggcagctttcagcagcctgcctttccagcccaagcag

SEQ ID NO: 139319 - DNA, 212 bp, Zea mays
  Clone ID: MRT4577_58540C.1
gggccgaaccgcagaggcactgtagctggtgtcgccacacgtaaaacgatcagcgaaagcataaacttctggacgagctgcgacaactgcggggcttgcaacaagaagcagccgcacagaggggccagagcaaagacaagatggtgaacgggcgccatccggagagcatgatctgctcaaaggaccgtgcaggaatacgtcccggcatgggc

SEQ ID NO: 139320 - DNA, 391 bp, Zea mays
  unsure (1)..(391): unsure at all n locations
  Clone ID: MRT4577_58541C.1
cggttggtggcctgttcttttttgtttcgtctgttccgtgcccagttgcctctctttctagcatgcagtgggtgtggggccctgtctgtgttccaaatttttttgcgggggcgggtctgcagatgcctgacctccttccacttgcgtgtncttttttgtgcccgtggtggtgtacgctgccactcttgttcatcctgtgccttcctccctggctgtgttctctcctaaagctttgccggtggcgggcccatctgtttggcctcttcgatgctccgggcggcnggcggtggcgtcaaattctcctgcttgaggggcctccatctgtttggggttcccccttcctgggtaccccttggtcttgccaaaaacgttgctagcaaacagggttgcc

SEQ ID NO: 139321 - DNA, 391 bp, Zea mays
  Clone ID: MRT4577_58542C.1
tgcgttcggactagttctagatcgcgagcggccgactttttttttgttttttttttatacaaaataagcagtttaacatgtacgtttttcaaatacaatgccatactgtccaaaaccaagttgcagaataacaacaacatttatttattttggaaaactacttactgaatgcttagattgtattattaggataaacacacacggctactcttcgctctgcggctatttcgacggctcttacccctcaaccgtccagaagaccatgtcttcattgggtcaagatggtgctgtactgcgactttcatctacctggactgcttcaattactaggacgagcggtcctttctttacacatacttaaagatcttcggcaatgtccagtgattgtgaa

SEQ ID NO: 139322 - DNA, 419 bp, Zea mays
  unsure (1)..(419): unsure at all n locations
  Clone ID: MRT4577_58543C.1
ccaacgccttgcnnggcaccaagcgagagcggcgcgagcaccacaggagagggaccagacagggcagagngaggaggcaaagangcacaaccncgaanngacacacaagngcgcaaagaaaaggcaaagcaaaaaggggaggaagccgacgacngagccgaaannccagnaccagggggcccagacagacacgcagcagnaccgagcaccccnccgccaagcggcagaaccgcaaccacccggnggagcaaaagccaaggnngagncgacaggcangaagaaaccaccagcacaccanccacaccacgnaaggaaccaggagcgagggagggaaggaaggggaancganaggacaagggcgcagannggacacgnanacgaaacgnganaaacaacagaaaaggnaaaaccangagnng

SEQ ID NO: 139323 - DNA, 298 bp, Zea mays
  unsure (1)..(298): unsure at all n locations
  Clone ID: MRT4577_58544C.1
atccggggccgcccaacccttcctcccacccttcctcccaacacccccttttttttttccccccttaaaccttccttaggtgccgtttttatttttcttagccgcgttttcctttaaccccnttcccataatatttttcccctccacctcaatttcctataaaaaacctctccttctccatccctttttccttttcaatcctaattcccctaccatcctccttntttcccatatccatcaccaaaaccttttactttaaccttaacaactttttcaccaccaccttccattttaacct

SEQ ID NO: 139324 - DNA, 388 bp, Zea mays
  Clone ID: MRT4577_58545C.1
gtccgcaaaaacaatgctatcaacaatcaagcattgcaaaaggcaaatactattttataattcgtcgcatcaactcatgctggggttaaatggagaaatatgatgactaacaaaatcagcgcgtgttccctgtccttgctcatcaggttctgatgacgatcacgcctttcatatggaagacattaatgattcccttggagggaggattcttccagctctttgttttggatggagacttttatctgcccacacccgtgactattccactgggtggggtcatccgtccgcaatatctgctattcatctatgatatcttcttctatttacactaaacctctgcgggggggggtgctatttgttaggtctcttatgccatattcctatcttt

SEQ ID NO: 139325 - DNA, 701 bp, Zea mays
  Clone ID: MRT4577_58546C.1
gacctcgagccggccgggaaagttggtgcgtgcacccaagtcaagtcctggtcctctctctctccatcttcttcttcttcttattgtccccctttctccacagcacggcacgcgcacacgctgagtccaggatcatggcggcgggcctcaaggtccccgagatggcgctcaggctctgcgtcgtcccgctctccttggcctccctgtgggagatggccagcaacgcgcaggcagacgacacctacggggaggtcaagttctccgatctctccggattcaggcgtcggcgtacctgctggtgacgtcggcctcggcggcggcggagctgctgcagctggcgcggcacggcgaccggggcgtgtcgtggggcgaggcgtgctcctacttcggccggttctgcgggaaggcacggtgtcgctggcgctgcacgccgccgcgctggcctgcttcgccgcgctctcactcgtctccgccttcagggtgttcagcagcaggtgccacccgccgcctgacgctgacggccagccgcccaagcacgcacgggacgaggagcaacgggtgtagcactactgacggcaaggcgtgtctccattccattgccaaacaaataacatcctgctcccctgtgtattactactgacgtctaccaaggccatcggtgatctttccacaggcccaaaaaaaaaaaaaaaaaagcggcc

SEQ ID NO: 139326 - DNA, 924 bp, Zea mays
  Clone ID: MRT4577_58547C.1
aaaaaaaaaaaaaaaaaaaaaaaaaaaaaaaaaaaaaaaaaaaaaacggcctcgaggccggccgggcccatgcgcattcatcgctttgtacgctagtggtatggagttggtgcgtgcgtgcaccagtcaagccctggtcctctctcggtcgtcgtcgtcttcttcttcttcttattccccttcctccacagcacggcacgcgcacacgctgagtccaggatcatggcggcgggcctcaaggtccccgagatggcgctcaggctctgcgtcgtcccgctctccttggcctccctgtgggagatggccaccaacgcgcaggcagacgacacctacggggaggtcaagttctccgatctctccggattcagctatttggttggcgtcaacgccgtcacagccgcctacgctgtagcctccgtcttggcgtcgtccttcaagcggcccctcgccgcgcgctacgactgggtggttctcgtcatggatcaggcgtcggcatacctgctggtgacgtcggcctcggcggcggcggagctgctgcagctggcgcggcacggcgaccggggcgtgtcgtggggcgaggcgtgctcctacttcggccggttctgcgggaaggccacggtgtcgctggcgctgcacgccgccgcgctggcctgcttcgccgcgctctcgctcgtctccgccttcagggtgttcagcagcaggtgccacccgccgcctgacgctgacggccagccgcccaagcacgcacgggacgaggagcaacgggtgtaccactactgacggcaaggcgtgtctccaccattgccaaacaaataacatcctgctcccctgtgtactactactgccgtctaccaaggccatcggtgatctttccacaggcccaacccacatctataatctattagtcgtcttcaaaccattagt

SEQ ID NO: 139327 - DNA, 615 bp, Zea mays
  Clone ID: MRT4577_58548C.1
tgggtacccggggtcccccctcgagttttttttttttttttttttttttttttttttttttttttgaccatcattcaggaactgttatactacacaataagggatctgaacaagatcttgctgtactaagcgctacaacgacgttatattacattacaacggcccggggctaaattgatgttcctattaattccatcattattgggctctctggccagcttccatggaatccattgcttggctcgggctcctcatttccactgcgtcagggctgtactgaaaggaaccgttctgaaccgagctgcgacggctcatgtacgtgggttgcgcttggctgtcaccctctggctcaagaatgtgtcggaaatatgcgtgcggccacagtcctgaccattcagtaaggcggaactattagcatttaacaatcatttaaatccgttttccaaaccaaaaaaaaacacgtgctctaaagtttctaggctattcttatcagtatttaaaaattaagtaaaccttcaatacaccccgggatacatatcctcaagagtgtatatgtatctgcggagtatctacggggtatccaatactggtatctgcgggatgtgttttcccatg

SEQ ID NO: 139328 - DNA, 324 bp, Zea mays
  unsure (1)..(324): unsure at all n locations
  Clone ID: MRT4577_58549C.1
gggtttctgaggccggtgtgcctggacggtttcgtccatgtcgtgcgcagtgcgcactcgcatcgcatggtattaatagtcattgcaagccaagaggagactagaaaagagaagccgcgctgcgagagaagaggggtgggagcacgtggagccaaaggggcgattctttgcttggccttcatttctcgccccttccgcatctcgagttgtcgtgattaacaagacagcaagacctcggcggcggcaaacagtcgagcacctgcgagcgtctcntgccaccgggactcaagaggcaatgccagcacccagccccaccaattcgtt

SEQ ID NO: 139329 - DNA, 359 bp, Zea mays
  Clone ID: MRT4577_5854C.1
cttggggttgtggtttttttttttttttttttttttttttttttttttttttttttttttttttttttgtttttttaaaaccattagcccccccatttaattttcaaccttgtaaaccaaaagccctttcccagggggggatccccctcgaaattttttgcaaaaagggggatatttccccaaaaattttgggcacccctaaaaatggggggcaaaacagggggcaaaagacccatcctttccttattccctttaaggcagcgcccacggggtgtataaaaaaaaggctttgattattggcaaacctacttccagaagtgactgacttcacccgttccaaaagttccccccgccaaaaa

SEQ ID NO: 139330 - DNA, 287 bp, Zea mays
  Clone ID: MRT4577_58550C.1
ggttcttgtttttttttttgccttttcgttttttattgtattatttttttttttttggggggcgcctgcattttaaccctaacccctgtggccaaaaataaatgttcccggtaccttgcggggggcgcaaaagctttttgggttggttaagggccgccattctttgttttggcctacaagagttgggtgcactcagaaaaatcgggggaataatttgggccggttcctgctggggcaaacggccttggcggaaaagaaaaggctgtccaaaaggggccgaaaagaaa

SEQ ID NO: 139331 - DNA, 2120 bp, Zea mays
  Clone ID: MRT4577_58551C.1
atgtaaccaaacacccctaaactttagtcgctagactaaagaaaccaaacatggccttagtagtactgctgtcagttaagtataagagagcccccggatgtggcatgctatgcacggatcatgcatgaaaataggactgggtgcagtaccatgtgtagccaacaggccatcatgtctcaccacctgcatgggaaaacacatccgcagataccagtattggataccccgtagatactccgcagatacatatacactcttgaggatatgtatcccggggtgtattgaaggtttacttaatttctaaatactgataagaatagcctagaaactttagagcacgtgtttttttttggtttggaaaacggatttaaatgattgttaaatgctaatagttccgccatcccaggtccctgccaactcccaggtcaggtacctccttccccaggcagccgcgtaatccctcgatggggacgacggacgagacggtcatacttcaactgccgcgtccccgaatattggctattttccaaccggcggcgcagccggtgacgcgcaggcgggcgggttcatctgacccttcgtcgactcgtggcagatgtgactttctgaggccggtgtgcctggacggtttcgtccatggcgtgcgcagtgcgcactcgcatcgcatggtattaatagtcattgcaagccaagaggagactagaaaagagaaggtggaagaacagcaggagagtcggaggaagcaagcttgcccatacgctggtacttatgtgctgatactactgcagccgcgctgcgagagaagaggagtgggagcacgtggagccaaaggggcgattctttgcttggccttcatttctcgcctcttccgcatctcgagttgtcgtgattaacaagacagcaagacctcggcggcggcaaacagtcgagcacctgcgagcgtctctgccaccgggactcaagaggcaatgccagcaccagccccaccaattcgtctgggacctccgactccctatatatcctctcatggatccaaagttgcacgcctacacatgtatgactggattgtgctaattcttttagctgtattggatggagttcttaatataatagaacccttccatcgcttcgtcggatcagaaatgatgacagacctcagataccccatgaagggcaatacagtgccattttgggctgtgccgataattggtatcattgggcctatggttatcataacagtgatatactttaagaagagaaatgtatatgatctgcatcatgccatactaggtctcctattttcagtacttattactgctgttttaactgatgcgataaaggatggtgttgggcgaccacgtcctgatttcttctggcgttgcttccctgatggaaaacctgagtataacaactttactacaggcgccatatgccatggccaggcgagtgttattaaagaaggtcataaaagctttccaagtggtcatacttcatggtcttttgctggccttgggttcctttcatggtatttggctggtaaaatcaaagtattcgatcgtagaggacatgttgcaaaagtctgcattgtcctttcccctctgcttcttgcagccttagtggcagtttctcgagttgatgactattggcatcattggcaagacgtatgtactggcggattacttgggttcacggttgcttccatttgctacctgcagtttttttccactaccatctgatgaaaatggactgtggccgcacgcatatttccgacacattcttgagccagagggtgacagccaagcgcaacccacgtacatgagccgtcgcagctcggttcagaacggttcctttcagtacagccctgacgcagtggaaatgaggagcacgagccaagcaatggattccatggaagctggccagagagcccaataatgatggaattaataggaacatcaatttagccacggaccgttgtaatgtaatataacgtcgttgtagcgcttagtacagcaagatcttgttcagatcccttattgtgtagtataacagttcctgaatgatggtcacgtttctgctggtcctccgaagactgaagcgcgactgattaccgcgttggcgtg

SEQ ID NO: 139332 - DNA, 262 bp, Zea mays
  Clone ID: MRT4577_58552C.1
ccactcatccactgcaattatctcacaacatacaacttttctttacctaatcaacaaaacaacctaatgcggggatcaccacacactacccaacctccactcctaacccccttactaccactatctacccatccactccatcacataccaacatctcctacattccaaaatcatactaaaccaccaaacccatatgaaccctgccttctactttcaacactacttcattgaataatccatacttactttcatcaacatcatt

SEQ ID NO: 139333 - DNA, 1627 bp, Zea mays
  unsure (1)..(1627): unsure at all n locations
  Clone ID: MRT4577_58553C.1
acagncatgtacacattttcttcactattatatttgcttctgaggttttcaccatacatagcattagttattacacacgacacgacgcacagtttacaggaaacagggtaaggcaagacaaggaacatctgttagcaccaaggggtagaatagcgttatcagaacatttaaacaagatgtgcatcacaatttatacatatagtagagctcgcactcgaaggatttcgtcttcacatttgtaggataccatcgatctgcttggaaggaaaggaaagagaaacaataacatccatactatatcacaactgtatgtatgtccactaaaacatcgcacagctcatctctagacaaactagtcatccaaaatcacatcaaggcatcacatacacatacacagcaggccaagatctatggcgagtgtcttggttgtcgctaaaatcattactgcgacagaacttaatttctatggcgaagatagaaatgttacacaattatttaaccaagtcacaaattacaaggaagttaattaccatttcaccttcaatcgatggcaacatataagacacaccaaacaaaactatgcacattataggccacttgtggttagagcagattgcaacacatcttctaggtacttctctgcggctgcatactgcctctttttgtcctctatagctagtgcagctaaagctttatctggaggtaaatcctggtagctccttaatgtgtcagctatgggtttagtcttcctctcgagatccttcttatgctcagccatttccatcaacacaccatgattgatctctggtgtataacccactcgattaagcattgccttataatttgagacttggaggatatattgccgttccttggagtccatcataacaagctttgtttgccaatcagtcatttgctccacttgttgcttctccacatcattcttaaatttctccagcatcttcttcagctcagtaagcttgtttatggccttccgtgtgtagtcaagtagtgcccggacgcgttggactccttatgcactttgtccctcttctcctccacctctgctcgcctcagagacaagtctgcacttgccactacaaagctgctcatctcggtgtcacggatggcgaggaggttagcgactgcagcaacggctcgtgccgccgcggctgcaggtggtgggagtgcgtccctcgcgagccccgcccgctcgagagcctcccgcaaccgcgccgcctcggcgcggtactcggccgcctgcgcacgcagccccgcagccgcgattccggcagcgcgggaccgcccctgcgaagcagaggccagcgcgcggaggtaggccaccccgcgcggtgtggggtcgggacccagcgacagctccgccgccgcacctccgccaccgcctcgccctcccacatccgcggcgagggaggccagccacgcatttacctccgcgacggcagcagaggaggaggcggacgagggtgccggggcggtggggtcgaggtgctcggcggcgtgatccattggggcgagtggatggatcagtgggtggccggcgacacggaggagaggaaatcagaggttggtgtttaaatttcgtggcaatttattccccagggaaaat

SEQ ID NO: 139334 - DNA, 204 bp, Zea mays
  Clone ID: MRT4577_58554C.1
aaaaggccacaaattcaatggccacgaggggggggccaaatttttgaagcccggcgaagccggggccatggttgcaaaattctcattacaggggcagctggtgccgaaagcaacaggcccatcgcatatagcaagaacaaaagcccccggggggggagacgggcagatcaacccaatcgaacacaggaatgcacaactttgaca

SEQ ID NO: 139335 - DNA, 340 bp, Zea mays
  Clone ID: MRT4577_58555C.1
aaccaacaaatttctgatacatttatgaagggcaaaagggaaccagtttagcacatagcacaggtggttgttctcggagccgaggagaaggtacacgtaaaattgcaactcaacgccgctcctttagcaatctcaacaaaccagaaagagcagtcagtaatctcgtgatcgagtcaagcagcgccaacgaaagggggccatatccatctgaatcccaacattggaagacccaaattgggcgttaaaaacccatccccaccccacccctaaggaagccgaaattaacagcagccacgagcccacgacttcgttagtattgacgccagatgcccagatgcct

SEQ ID NO: 139336 - DNA, 186 bp, Zea mays
  Clone ID: MRT4577_58556C.1
gttgtcttctcctccccctccggttcggtttcaggttcgtgaggttctcctgggttcaggtccctcggtgagcggatcgagacagccacgcccctatgtttaatacccctgcttcttccgctgtctcccctcttccacggtctaccactccctccacatctccttcattaccttctgtgaggtcct

SEQ ID NO: 139337 - DNA, 422 bp, Zea mays
  Clone ID: MRT4577_58557C.1
gcgcccacgcgtccgcggctggagatgacatttagggcgggctctatgtggttcctaagatggtgtcgcagggggtgcctctggcgaatctccacttacgatccacgagacctggggtggatgagatcccgttaccactgcttgttaagttctcgatgagctgtaggatctttcgagacaacgcgctttaccagacaggactgttccttttccaattggctcaaattgcgttcaacaatcgaaactcagtctccaacggtgccagaatggaacgtgctctcaagttaatttggagtacactcacttgatgtacttcatgcaccaccgataattcccaagtcactcaacagagcctacatgacctttctatgctttcgctctaatgaccactcactttgggttgttttgctgtgaaagaaaca

SEQ ID NO: 139338 - DNA, 2259 bp, Zea mays
  Clone ID: MRT4577_58558C.1
atggctctcatcatcaagagcttccgccaaatcctcaagcaaaggagggggaaggactataaacctcgctccaagagagtgtgctacaaatgtggtaagtccggtcattttattgctaaatgtccaatgtctaatgatagtgacaggggcaacgacaagaaggggaagaagaaggaaaagaagaggtactacaagaagaagggcggcgatacccacatgtgtcgggaatgggactccgacgagagctccaccgactcctccgacgacgaggatgccaccaacatcgccgtcaacaagggactcctcttccccaacgtcggccacaagtgcttcatggcaaaagacggcaaaaagaagaaggtacaatctagagccaccaaatatacaacatctagtgatgaaggtagctctagtgaagatgaagatgatttgcttactctttttgccaaccttaacatgcaacaaaaggaaaaattaaataaattaataggagccattcatgagaaggatgaacttttggatagccaagaggaattccttattaaagaaaataagaagcatgttaaagttgaaaagttaaatgcttgtaatgattcaattgtcagtcttagaaatgagaatgctagtttaattgctaagattgataaattgaatgaatcaatttctagccttagagatgaaaatgctagattaatttctaaggctaaagatttaaatgtttgcaatgattctatttccagtcttagaaatgagaatgctattttacatgctaagattgatgaattaaatgtttgcgaaccctctacatctactgttgatcatgtttccatttgcactagatgtagagatgtcaatgttgatgctataaatgatcaccttgctttaattaaacaacaaaatgatcatatagctcaattaactactaaaattaatgagcatgaaattgaaaatgaaaagtttaaatttgctagaagcatgctctataatgggagatgccctggcatcaagaatgacattggtttccaacagggaagcaatgtcaagcttaatacccctaagaaactgtctaattttgttaagggggagaagagaatgttctcctcctatgagaaaaacgaagatccccaacaagctatcacattcagggatggaaatcaagattctttagattataacttgctttcagtttctcaattatgcaaaatgggttacaactgtctttttagcgatgtaggtgttactgtctttagaaggagtgatgattcaatagcatttaagggagtgttagagggtcaggtatacttagttgattttgatagagctgaacttgacacttgcttaattgctaagactaatatgggttggctctggcatcgccgactagcccatgttgggatgaagaatcttcacaagcttctaaagggagaacacattttgggaataacaaatgttcattttgagaaagacaagttcagcttaaggatcaaaaagataagaagcgataatgggacagagtttaagaattctcaaatagaaggatttcttgaggatgaggggatcaagcatgagttctcttctccctacacacctcaacagaatggtgtagtggagagaaagaatagaactctactagacatggcaaggactatgcttgatgagtacaagacaccggaccggttttgggctgaggcgattaacaccgcctgctactccatcaaccggttatatcttcaccgaatccttaagaagacatcttatgaactcctcaccggtaaaaagtccaatgtttcatattttagagtctttggtagcaaatgttttattcttgttaaaagaggtagaaaatctaaatttactcctaaggctgtagaaggctttttactaggatatgattcaaacacaagggcatatagagtctttaacaagtccactggactagttgaagtttcttgtgacattgtgtttgatgagactaatggctcccaagtggagcaagttgatcttgatgaattatatgatgaagaggctccgtgcgtcgcactaaggaacatgtccattggggatgtgtgtcctaaggaatccgaagagcctccacaagcacaagatcaaccgtcatcttccaatcaagcatctccaccaacccaaaatgaggaacatgctcaaggtgatgaagaagaagatcaagaagatgagccacctcaagaagaggtcaatgatcaagggggagatgaagataatcaagacaaggaagatgattaa

SEQ ID NO: 139339 - DNA, 226 bp, Zea mays
  Clone ID: MRT4577_58559C.1
cggatctcctacacaagtacaacgtgcgctccatccctatccgcatggacgaccaggggcatgtcgtgcgcggcagctacaatggccttgaggggaaggtggtgcaagtgtaccgccgccgctatgtcatccacgtcgagcggatcacccgcgagaaagtgaacggctccaccgtgaacgtgggcattcacccctccaaggtgatcgtcaccaagctgaatctcga

SEQ ID NO: 139340 - DNA, 211 bp, Zea mays
  Clone ID: MRT4577_5855C.1
aagcaagctgaggtagatcctctggttagtgcttgtggaagcattcatgatcgatatgcggatatgtggaaacatctaatggaaaggatggagcaattagcacagattggttctgcaacaggtatatataatacatttgttaggtatttggtctgtgttccacatgattcattgaattttagtcgacaaatatatgatcataatgggccta

SEQ ID NO: 139341 - DNA, 1070 bp, Zea mays
  Clone ID: MRT4577_58560C.1
cactctccagtccgcgcagggtggcggacggcgaggaagggtgcgaggtgcgcgggaagacggcagcccggtcgattcgaggcgcggacaccggcaagtgccactcggcgaggcacgaccgctggcagggctgacgcggaactcggcgacatcatcgacttcgccgagttccgccgccgcgtcagcaagaagtgcacggtcatggactccaaggccttctacgacttcaaccaacgacgcgggaagccaggcgatcccttctacgttctactgtgctgctggctggccgccatcggcgccgggctgctcaaaacggaggagatcttggaaggcgtggcgcgcctccgcatctccaacgacatcgagttcgaggaggagacgttcatcgacatgatgagggcggcaaaggagaaaagggcgaagctgaaggctcctgctccgcagataccgatggagacgcgggcggagaaggccctcgaagccatctacgtgtgctgcttcggtcaggacatggtggaggacgaggacgagaagcttctccgggcgatactgaacgccgtgttcccctccgtcgggcgggccgcggtcgagaggatggtggcgtccatggccaagcaggtggcctccggcgagaggaagcgggacgggaggaccgtgtccaaggaagtgcagcagcggcagctcaaggacctggagtttctgaagcagaacaagctggagtcgtcgtgaagcagcagcggcggcgagcagaaacttggcagcaaatcacgcggcgtggttcgccggcggctgcagccgccttgcttttggttcgttttggaacaacggattcatggtggaattttgtaggattattagaacagaactctatatgaatttgtaaccctttggaagttggaacaaggaagtggccatactgaaatcctacatgccctttttggaaccgtggtatgctgaacaccgggcttcataaaaataagcactccaacattgtaattagatttgtagtattataatcataattcataacctaaaaaaaaaaaaaaaaaaaaaaaaaaactcgagcccgg

SEQ ID NO: 139342 - DNA, 256 bp, Zea mays
  Clone ID: MRT4577_58561C.1
gccggccgggtcgcgtgaagcagcagcggcggcgagcagaaacttggcagcaaatcacgcggcgtggttcgccggcggctgcagcagccttgctttcggttcgttttggaacaacggattcatggtggaattttgtaggattattagaacagaactctatgtgaatttgtaaccctttggaagttggaacaaggaagtggccatactgaaatcctacatgccctttttggaaaaaaaaaaaaaaaaaaggccccta

SEQ ID NO: 139343 - DNA, 741 bp, Zea mays
  unsure (1)..(741): unsure at all n locations
  Clone ID: MRT4577_58562C.1
ccgggaaaaagtcccgtcggaggaagcaggaacgctacccttgttctatcctatccggctatccccattcggccactctccagtccgcgcaagggtgccggacggcgaggaaagggtgcgaggtgcgcgggaagacggcagcccggtcgattcgaggcgcggacaccggcaagtgccactcggcgaggcacgaccgctggcagggctgacgcggtttccacagccgcccgcccgccttcatcagagtccataatccaagctctaaacaggttcgtccatgagcagataaggcgcgcgccacgccgcggccaccacacgtacgtaaggcgccaacccaatctacgggaaagtatgggggcgctaccagtcgcccacagtctcgctctcaccgccgcgttcctcccgtgccgccgccccgcggcccgcggccggtgccggcgccggcggtacagagcggtggtggcgtacatggagccgaaccccaactcgccggcggccatcgcggggcgcctcgtcggcgcccttcccatcgtgggcctcgtggcgcgcatcctcaacgacgagggcggcgtcggcggcgacatcatcgacttcgccgagttccgccgccgcgtcagcaagaagtgcacggtcatggactccaaggccttctacgacttcaaccaacgacgcgggaagccaggcgatcccttctacgttctactgtgctgctggctggccgnncatcgcgccgggctgctc

SEQ ID NO: 139344 - DNA, 368 bp, Zea mays
  Clone ID: MRT4577_58563C.1
gcctgcagggagccgggactgaattatactgtggggtgttgactatcttattagacggcggtcgtccttttttgtttttttttgattcagaggaggaacgaacactaacactgatacagaagccaacggttacaccatactatctataggtgagatcactagcccgtagccaggaaggggctacacatcatacggtgcaatcctcgactccaacgtcataaccgacaccacgacggtgaggcccaccggcgtacgcttccctaccttcgtagtacgagaacatcatgctcgagcctactcgagaacatgaacagcaaggaattacaggggtgacagatcacggcacaataggcgcagtccccgggacc

SEQ ID NO: 139345 - DNA, 212 bp, Zea mays
  unsure (1)..(212): unsure at all n locations
  Clone ID: MRT4577_58564C.1
tggcgttgctgagcccgcgcgtgccgcaatgaccggtnttacaacttcagctgggctnccaaancccnnnnctttggccctgcctcgaggtgccaggcgacggcggcgggcggcgtggccgccgcggggccccctgtgtcggagctggaggccattcagtggggcagcgccaagctgcatggcgctcgcgacgagatggatgatgaggtctt

SEQ ID NO: 139346 - DNA, 137 bp, Zea mays
  Clone ID: MRT4577_58565C.1
ggcgccgaactggagcatgtgccagccgaggtcagccaggagatgcatggtggtgaccctaatgcatatacaggtgaggcaaagcgagcaggaagatgcccgttctgtgtgtgccggaaatgtagattatgcttgca

SEQ ID NO: 139347 - DNA, 638 bp, Zea mays
  Clone ID: MRT4577_58566C.1
tttaggaacttgacaatgtagttaagagctagcaagtagaaacacgagagattttttttgcaagtgacttgatagtccatgccggaaccccgtccgggccgcaattgttgacagtagcgtggacgcatcgtcatcaatcgagcagaggggagggagagagatgaaggagggcacggcgaactgcatcgacatcctcatcgccatcatcctcccgcctctcggcgtcttcctcaagttcggctgcaaggtcgagttctggctctgcctcctgctcaccttcctcgcctatctccccgggatcatctacgcgatctacgttatcaccaaggactagccagatagcgccgtaaaccgggacaaggtgagagagctagctgatcagccagcggaggtaatggagatgaacgtactgctgagatcactttaatttgccctgttgctcaatgtttctggatggagactggatctcagctgtgatgttgctatatactaccgattgatcctgaaatttgtcgcttttcgttcgtgtctgcatagtatgtgatgcatagtctgtaaaatttgtctcagactcttgtgctatagtatgtgatgcatgcatgtgtttgcagaaaaaaaaaaaaaaaaaagcggccgcc

SEQ ID NO: 139348 - DNA, 191 bp, Zea mays
  Clone ID: MRT4577_58567C.1
cagcgaaggcaactcacatgataacttgccatgggtagcctcgccttgctctggctaggatcttctctacttccaaaagccgggcttggtcaccaaaggagtggttatgttaccacacctgcatcgacattgctgaccgaacgcaaaagagactggacacgcctttggggtacagggggtggccaaagcga

SEQ ID NO: 139349 - DNA, 127 bp, Zea mays
  Clone ID: MRT4577_58568C.1
gaggatgctgcaatgatccctgtggagtggctttccagaagatggctagccctcgtttgtacgaacacccgatggttgctgagtgatgattacagcgacaatccacctcattgtacaatataataca

SEQ ID NO: 139350 - DNA, 361 bp, Zea mays
  unsure (1)..(361): unsure at all n locations
  Clone ID: MRT4577_58569C.1
tnataatttttttttttaattatttttattctgttgttttttaaagttttgttggtttttcattccatctactacaaagtttataatcagagcctgagaaatcagcttttaaaaagggaacacaacctccccaatatctggaaaccccggatgtacatggccaaaaggagagagaggcctcacattaaaaaaaaccgcaaatttcccggggccaaaaacccaaattgtctggacaaaagaaaggaactaatttgtataagcaaaaccgcagggctcgccttgaatccgaaaaactgttcaaaaacaaaaggggcgttcaaatactcaccaggtcttgaatccaccactatatcatccccta

SEQ ID NO: 139351 - DNA, 549 bp, Zea mays
  Clone ID: MRT4577_5856C.1
cctgccgggattgtgttgggctgcggaggtgaaaactaaacctatcgaagcagccagataagtgaagacactctggtctctgagatcgtacacatggcggagggggcggcagacgtgacaaggggggggcagtgggcacaaatgggacggcacccggacgggtgagcatacgatacagcgaggtgcagacgaaccgaatagtgtgctcactatgcgctaccctctgccactacattccagcattatagcgggtacccgccccagcagctgagcatgaaggagctccgatagaatacgcgacgatcttccataacatgtgatgacaaccttcggcgacgatggggacgtcctgacgatgcctgatcagactaatccgctcaagaaagacgatgggcattggggtggacaggggctactcggtcactaatgacatctgtggcatttttgacataactacacgagcttgcacatggacatcacttcgatggaactacgggatgcccatgtcctgaaatgagaaggacgtatgtagacataagatcaaatttt

SEQ ID NO: 139352 - DNA, 412 bp, Zea mays
  Clone ID: MRT4577_58570C.1
gccaacttacaaagtcaaaccctatgggatccgaaagactcctaagtattatacaaaaaatactataagtaccctttcgcatgggagaacatctatcgagggtccaatacaagacgatacatatctctcaggtaaggtccaacactctgtgggtaaccaacctagcgcacttgatgaacgcaacggagtattacgctattgagactattggtaacttaaactatggacgctgcaatttatttccctgcctatagagagcaactagttatgacactgggcctgaacttcttcagcttgccttgaccactgtttttggaaggagacaacctattttgacgaaccatccaagggaggggcgtaaaacccttctcttaacgacggacatggaaaagcttttttgctatttgatatc

SEQ ID NO: 139353 - DNA, 406 bp, Zea mays
  Clone ID: MRT4577_58571C.1
ttcggtccggatcctacatcccgatcgctcgcctccagatgtacagcagctcgaatcgtctcatacctcggcgaaaatgagatagatcttgcacatacagggagggcaatgcggtaaccagatcgacgccaacctttgggagggagtgtgtgaacaacactgcctagacactacatgtcagtccactgacagttctgacctttagtgacagcgcgtcaatgaccactacagtgaagcatattgtggacggtttgtgactagatctctactaatggacctaggacctgcgacaatatacagtgctgcgactgaaccctataggcagatctttcgcactaacaacgtctggtataggaaatctcttgctggtaacaactgggacaccggggattatactgagggctct

SEQ ID NO: 139354 - DNA, 102 bp, Zea mays
  Clone ID: MRT4577_58572C.1
cagtaccgtggagccagagtcgcacaaatggctgacctcccttacaccggagattgatgagctcctgtacagctaaaccgagaacacggagcacaagttcgt

SEQ ID NO: 139355 - DNA, 246 bp, Zea mays
  Clone ID: MRT4577_58573C.1
agcctgctgagcaggtactataggcgagttggtacgtattacaaactcccatgcgtctgcctcagtcaagccctctgcgactttagttctccagagcaaccactgatggggagactggcctggtatcactgggtgcagctgcagttcttgtaataaccaagactgttgggttggtgcaaggttgtatgagctgaatgcgtcgagagggttcatcgggatattcgagattggaaagggctatacgag

SEQ ID NO: 139356 - DNA, 334 bp, Zea mays
  Clone ID: MRT4577_58574C.1
tctacaatgactcgttctatagcggccgcagcctcctccggcgtcgtatgtcgtctacccatccctgcattaacactactccgccgccacgccttactacgtgtatcgctaccatatagctcaatgttatattcctgttgttgaaggaatgcctgttaaaatcgctcctcttcgatgttgtggccttggcatgaggtcgtttctgtgaactagtgggtacatctttacaagtactctatggtaaccttgaacgtttgtgcgcagttgtgtgtgagtacctgattaaattgaaacacctctatgtgtatcttgcactaacgctgcctcacttgct

SEQ ID NO: 139357 - DNA, 456 bp, Zea mays
  Clone ID: MRT4577_58575C.1
ttgataattttgaatgtaatatataagctgggtgtaattcaactctttacgaggcatggaactttacgtacattccgttttttagccttcggcgaaaaccttgcctatttttcatgcttcgggaagaatatccaaattccgtaaaaatatacagtttccgaaaaaacattatgctttgtgaacaatggatctccttttcatatcagagtgactaagctgtatttcttgaaaacttattttgtgccttggcacttcttcgaaacaatgtatgaagcttaatattgcaggtcaacattgtctacctttccgaaggtcaacattgcatgggctttttgtgccattgatgcaatatgaggtatgatgcatgtgctatgcacatgatgtgatgatgtaatgacatgcataatgatgtgtgctgccgaagcccacacacattttccagcggagcacacaatc

SEQ ID NO: 139358 - DNA, 194 bp, Zea mays
  Clone ID: MRT4577_58576C.1
ccgaatggataaaaaagggaacctaggactgaataaaccggcgccgcaaccccgccaatccttctggccttgccactggaacaggttgggggaggaaatgccgccggcctgggaaggcaccccatgacgagggggaataagaaataataagaccggggggcaaaccactacaggaaggggggggggccggggaa

SEQ ID NO: 139359 - DNA, 187 bp, Zea mays
  Clone ID: MRT4577_58577C.1
agttgtcgcgatgacggtggagctgtgcagtcttagcggacatcaagttccaccccggagacgggacggcgctacggcaggagcgagacgggacggtttgccagcgttcgtaatacgacatgcgagacggctttcctttccatgagtaatcctcagtagacaagctggactgtccactaccgcagga

SEQ ID NO: 139360 - DNA, 279 bp, Zea mays
  Clone ID: MRT4577_58578C.1
atgcttacgcgtgggcggacccaccaagaacaggggcaaccaaggcgagcccggggcagacaaccgagggaagaagggatctggaggcaaaactgagaagaagacagggcaagcgaaggtggacggcatcaacgacgagcccatgacccccggccagagcaacatggcggacgagaggctcggcgactacctcgtagagcaaggcctgcgaaaggaatcaacaaaccacgctcgcaggcctgaccatggatcgagccaccagcagcaacgacaccaaca

SEQ ID NO: 139361 - DNA, 555 bp, Zea mays
  Clone ID: MRT4577_58579C.1
cggcgagaaccccagcctccggccgtccatggccgacggggtgcgcaccctggagcagagcgcgcagggatccatctcccccgtggggatggcatcggacggtcactggaaggtgtgagtcaccagtggaaagtcgtcgcctccgccgacgcgctcagatctggctccccgagtcgttaacttgcggtcccgatgcgcatgcgtcgcgcacgtggcgcccatccattggttgcgaggagaacaaagcgttgttagtaggcgagcatatcaaaaagaaataggggagaaaagcgtggtgaaaaaacgttgatttccatagctaaattaggggaagacttggggagataaaaaggcagagctaagttgtgtgctgatggggatttccatcatattatgccaaagcggcatctacttgagagagccaaaaaaaagagagagagagagaggatctttgcagcgcccgattccaagattttgttgattcttattagtgggttctttttttttgtaaaaaaaaaaaaaaaaaaaaaaaaaaaagaaaaaaaaaagctcgag

SEQ ID NO: 139362 - DNA, 3008 bp, Zea mays
  Clone ID: MRT4577_5857C.1
atgagagaacccctcctaggctcctactctctccctagtccccgcgacggcacaagcgaccgtccccacgacggtccagactccagagcctgcagaccccgacgccgctcgcgttcgggaccgtaccgccctcccctgccgtatccgctcgcgttcgggaccgtaccgtccacacaccctccctccccgccgcttccgcccggtatcccccactcgcgcggccgtaggacacggccacgtgcgccgcctcaaactgggggctgtggctggggcgggaggagcggcggcgttagggtttccccatggacggtggcgaggatcggacgttcaaggcgaactttaccagcgagggggtgacgatgctgcaggaccgcgtcaaggagaagctcagtgagctcatgggcgactactccgacgacactcttgccgagtatgttgtagtattgctaaggaacgggaggcacaaggatgaggctgcaaaggagctacatgtttttttaggcgatgacaatgatgcatttgtatcctggttgtgggatcatctgtcctcaaatttgcacctttatgttcaacctaaagctgcctcttctaaggatgacactagaagcagtcacaatgctgccagaggattgcctgttcacagtgtgataagcagcacacaagttaatcatgaacctgaagctgaaacccagaagacagtgataactcataaaaaaaaagattggggtcatcgaaaaagagattggggaacaattggtcgaggtcaatcagaaacagttcctcttagaagcgttgtcgacaatgtttctcttgcaaaggaaaaggatcttcatgagtcacatgcagatgaaaaggcttttcataaatcacattctgtaagacgaacccgctctcctgacatgcataaccacagaaagaggagcagagaggcagatgtgcggtctactaagagtgcaacacacccagttaatggtgcaccacgtcggcttcttcagtttgctgttcgtgatgctgtcagaactgtgcccccagttacttctggttcagaatcagcttccaagcgactttgttctgtagtgtctacattggcttcagattccacacttgatattactcatattaggttacagaaaacaaattcagatttgagaataccagttgccacagcagcactaagagctgcagctgaggctgctgaagatgctctcaaggatagcttttgtggaagtgtttttagtagattgggcagaatgcccacaataaattctactgaacaatcacctgatcgtagatcacaagatcttgaaggcaaagaatatgagaatatagataacatacaagctgaaaatcaagttgaattttatggaagaaatcaacatggtggcagtgatgtttacatgcgtgatcggagaacagaggaagccacaggttctctttctaatattgatgagtatggtcacaacagttctgttaggtataatggattgggttctctccgaagtgcattgcctgctagtggaggtaaagagtcattagtactggggtacgtaagaggagcttctgaagtacgaagcggaagattgatagctcaggggccacctgctggttcaggaccaagatcatctgaaaagatcctaaatgtttctggtaacactaagacacagaagcttcgaactcatgtaactagggatgcccttgcatttgaccctcaagtgccaatggagaaggtttctggtgcaaggaagtcgataggtcaggggccacatgctggttcaggaccaagaccatctgaaaggattctaaatgtttctggtaacactaacacacagaagcttccaactcatgtaactagggatgaccttgcatttgaccctcaagtgccaatggagaaggttgctgatgcaaggaaatcacatgtgaagattgcacatgctaacgatatgtccatgacaactgataagtccaaagatttgatacagtcaagttcaatgctggaggcacaaaaggctacatcaggtgctgctggatcaaatactacaggtcaacccgaaggtggctctgattctagaactgtctttgttagcaacgtacattttggtgcaacaaaagatgctctttctcgacacttcaataagtttggagcgatcttgaagacccatattgtgaccgatggtgtcactggtcagtcaactggctcagcgtatattgagttcttgcacaaagaatcagcagagcaggcgttaaccctgaacggggcatcatttatgttacgcattttgaaggtcgttcggaaaaactccactgaagcaacccgatcgcctggcttgcttcgtgtttcgcggggatcaccatttgcttcaaggctcattagaactgcatacccaaggccaacgtttcctggtgcaatccgtggacgactgccactcaggggtgttgcccagagcttacagtggaagcgcagtgccacagattcctcaaatgctgtaaaaccaagtcaggctgcaccttcagctcctgggaatcagttggtcaccccgaccccacgaagcttcacctacacacgcacggagccaaaaccaaatgacggtgcgatggcttgactgctcagctgcagcatgccgcagctcctgatgaatctcgcagaaagagttcgtgatactgttacgtggttcattcagctgcttttggtaaatatttaagtagctgcagatgttagtttgtagcaggctggtttttgtggaccaaaacctttgagcgatattctgtgaggttttctgtgctgtttttcaccgtcagcacatattctgtgctggctggctgttcggagttcgtggatggagagtaaaatatatatataaaaagtggtagtaagggaaaacacggacgcgataaaaacgttgcaacatttgttattatttttcgatggattatttagcctccacagtttccttgtcaaggggggtgatctgtgattctgtgagattgatcataatatccaaactaccgga

SEQ ID NO: 139363 - DNA, 340 bp, Zea mays
  unsure (1)..(340): unsure at all n locations
  Clone ID: MRT4577_58580C.1
tcgaccgacgcgtccaggcaacctggacgcttcgccagtgctttccaagagacgtagactgctacgaccacaggaaggtgtcggtcggacgagatgcggccgaggggaccatgtggtctcctaccaggaaccgcacgacgaaaactaatacggtggacgtcgtattggtcgntcgcaatgcgtcagacgactagactgtcggacctagcaccgtcggcagatctcttcgggaggcccaatacgcgggcggttaagaggtatgccgatgcatgtccaggtaccgaatggtgctcacagatgacaaggacggactcagcggactggctaccttgcatgtaga

SEQ ID NO: 139364 - DNA, 1158 bp, Zea mays
  Clone ID: MRT4577_58581C.1
tggactgatgcgtccctgttttaaagtaaattcaggtggcttatattctggtggtagtgctcagatggttgagaaatcactagacattcatggggatgagatattatatgttggggaccatatttacacagatgtaagccagtcaaaagttcatttacgatggaggacggcattaatctgcagagaactagaagatgagtttaatgcactggtcaaaagccatgatcagaaagaaaagcttgttacacttatacaacaaaaagaaattgtgggggatcttttcaaccagcttcgcctggctctgcagaggcgctctaattcacgtcctgcacagacgcttgctgcaacttgtatggatgaccaggagcttacggagagtatgcaaaagttgctcattgttatgcaaagattagatgaaaagatcgggccaatgctagaagcagatggagaacttttcaataaaagatatgctgatatatacacatcaagggtttcaaattttctgcactatactccattcatgtatttccaatctcaagaacagacacttgcgcatgatgcccattcctattctggaggaaaggacatcaaagttcattgagcatccgttcgtcacaatctggagattaggcaggaaagagggaacgtgatcattgtgattatggctgggatggctagacaacaacaattgtcgttttgaacaaattaattaatacaccttgtaagattgtatttatatataagtaaatctttagctatagcatgctgaatgattgttctgatagtcagtttgtttgtcgtggcctacctagagtttcatattgggaggcacagtacctgttttggtgtacctgctgctatttgcattgtatatgtgaaatgcgaagtgaagtatgacaaggtaacgattaaaaaaaaaaaaaaaaaaaaaaaaaaaaaaaaaaaaaaaaaaaaaaaaaataaaaaaaaaaaaaaaaaaaaaaaaaaaaaaaaaaaataaaaaaaaaaataataaaaaaaaaaaaaaaaagggggggggccttttggatttaaaaccccccccccccgggttcttggagggttctttttgttaatttgggggggtttggtgtcctctttaaaaaaaaaattcccttttgtggggcccggggggaaaaa

SEQ ID NO: 139365 - DNA, 2724 bp, Zea mays
  Clone ID: MRT4577_58582C.1
acgggaccttgtagcgaagcgccgagaaatgatagtctgcatctttgacagaagccatcccggggagtcggagaaaaaaaaaaaaagagataacgcacggccgcccgcagtgcttgaaaccagcccgctcctccattccaacgtctccacccactgctcccaatggcgacgccgttcccgccggaggccgacgagggggaggcgcgggagctcctctacgaggcgtacaacgagctgcacgcgctggcgtccgagctgggcggcgcagcggcggcgccggcggtcgtggtcgtcggccaccagacggacggcaagagcgcgctggtcgaggcgctcatggggttccagttcaaccacgtcggcggtggcaccaagacgcggcgccccgtcgcgctccacctccgcttcaacccgcgctgcgacgagccccagtgccgcctcctctctgcaaccggcgatgccgacgaacatgacgaagccggggttgccgcccgccccatgccgctcgccgacatccaggcatatattgaagctgaaaacttgaggttggagaatgacccatgccagttttcagagaaggaaatcataattaaggtagaatacaagcattcccccaatctcaccattattgacactccaggcctcatccttccagctcctggccgtaaaaacagagttttgcagagccaggcttctgctgttgagagccttgttcgtgctaaaatccagcataaagagaccattatactgtgccttgaagattgtagtgattggagtaatgcaactacacggagagtagtgatgcaggtcgatcctgatcttgcaaggactgttctagtctccacaaaactggacactaaaataccacaatttgcccgtccctctgatgttgaagtgtttcttcacccaccaaattgtgtgctagatgtttccttattgggagattctccctttttcacatcagtaccttctggtagagttggctcttgccatgaagctgtgttcaggtcaaatggagagtttaagaaggccatcttatcaagagagttggaagatattgcatctattgaagacaagttaggaaggtcacttacaaccatggagaaagatagaattggagtgggtaacttaagattatatttggaagagttgctgcagaagaggtacgttaagagtgttccattaatcattccacttcttgagaagcaacatcgaaatacaacaagtaaattgcgtgaaatcagtcatgaactcagtgatctggatgaaaccaaactgaaggagaaagctcagctattccatgacacatttttgaccaagttatctttgctattgaaaggcatggtggtggcacctcctgataaatttggagaaactttagtcaacgagaggattaatggaggaacatttactggaagtgagaatttccagctcccgaacaagatgatgccaaatggtggcatgcgtctttatggtggtgcacaataccatcgggcaatggctgaatttcgtctggtagttggtagtaccaggtgccctccaataactagggatgaaattgttaatgcttgtggtgttgaggatattcatgatggtacaaactactccaggactgcttgtgtaattgccgtggcaaaagcacgtgacacgtttgagccattccttgatcagttgggttttaggcttttgtacatactgaagaggctgatcccaatctctgtttatctgttggagaaagacggtgagcactttaatagccatgaagtgcttataaggcgtgtccaggaagcattcaagaggtttgttgaatccactgagcaatcatgtcgtcaaaggtgtatggaagatttcgagcggccgcccgggcaggtaccactcgttatgtcacttggtcccttcacaacaagaaccgtgctggattgagacatttcctcgattcatttgttgcaccggagcaactatcagtaaatacattgaacgagcggttttctgggttgaatgataacaaacaggataaggcaaagggtgactcgaagtcaaaccattctccagacacaaattcgtccactgctatgccagagacaaggctggttgacctattggatagcacactctggaacagacgcctggttccctcatctgaaaggcttgtttatgcgctggttcaccagatttttcatggaatcaaagagcattttcttgtcaccactgaactgaagttcaattgctttctcctcatgccgattgttgacaaactaccagcacttctaagacaagaccttgagtcagctttcgaagaggaacttgatagcatctttgatgtcactcagctgcgccagtcacttgggcagaagaagcgcgagctggagatcgaactgaagcggatcaagcgcttaaaggaaaagtttggggagataaataagaagctcaattctcttcaggttaggcagtaggccaggctcaaaatttagcagtagcttggtagtctaggactccaggtagagtgtttctatgctgtaataaaataattggtcatctagagtgacttcttgttgtatcctatcagttgtaaatatgaagtcttcctatgtcttaacgtatgttgttgctacacgggttttcggagtcgatattcctcaaaaaaaagcggcacccccccattcactcctgaagtctaaaaaaaaaaaataaataaaataattaataaaataaaaatttttttaa

SEQ ID NO: 139366 - DNA, 2942 bp, Zea mays
  Clone ID: MRT4577_58583C.1
aactttacaaggtagtatgatgctcatatacaagtgttgttttgtcatgccatttcgcatgcttagtatgcataggatattctgtttttaacacagttgtcccatgccatgaattcatgtgaattaatttacttcaaggtgcataggatattcatcatcgcacgaaggcgaagcacattgagattgaaatccacttcatccgtaaaaaggttgctttgtggcaccttcgagtgctacatgtcccttctgcacatcagtccatggacatcatgacttagggactgtctgtacagttgtttagtgactttcagtccagtctatgcgtccagttctctccagatgtgaatgcgggacgggtattagagatatgtatagtctagagatatgtatgtacttgtatttcaaggtgtattttgactatacacatgaaagtcaccctttctataacgagtgtgaggtgttctcttaatcttctacatttatggtgttgtatgatcaattcagcgtaacaaaaccattgtgctgatatgctggcttttcctccaacaaactatcattggtaccctcgaggccggccggggattctactctacccggtcctcgcttccccgttctgtcctcgcggtcgcgcaggcgtaccaaacagctagggccgggggccgcagccgcgcacacagcaagcaatggcggacgccgccgagatggtgcgcttcctctatctccggaccccgccgcggccgttgctcccgcagttcgctgtacatacacagcggccacaaagtctgctcagagtttccccccgcttccgccctcccatccgtcttcggtgccgcgcgctcgacgccagtagaccggttgcggtggagggggagcgggatgaggaggacggtctcgaggacgaggaggagtcctacttctcggtcacctcgtcggggctctcggaggtggactacctaggggaaagcaccaggggggatttgaacgtgaggagggagcgcctcgaggcgcttgggaacagcaagtcaactttgcatggtcctattgaggagatagcttggaaagaagcgggagaagctgaaacattgcttcatgacttgggaattgcagacccgttttcagtaagacactctcctcgtggaattttctgcaccaggacactaaatcttcgatctatcagtgtagttggctacgatatggattatacattaattcattacaatgtgatggcctgggaaggacgtgcatatgactatgggatggacaacctcaagagcatgggttttccagtagatgaccttaaatttgaccctgacctggtcataagaggtcttgttattgataaagagaagggaaacttggttaaagctgatcgatttgggtacattaagagggccatgcatggtacccaaatgctttccactcgtgctgtgagtgaaatatatggaagagaattggtggacctgcggaaagaaattcgatgggagttccttaatacccttttctctgtttcagaagctgtcatgttcatgcagatggttgacaagttagatcagggattggtgccagctgaacttgggccactggattacaaaggactgtacaatgctgtttccaaagcactttttcgagcacatgtagaaggccaacttaagagagaaataatggctgagcctgatcggtttgtagagcctgatccagaacttcctttagctcttcttgatcaaaaagaggctggaaaaaagttgcttctcattactaattcagatttccattatacaaacaaaatgatgaatcatgcattcaatcgctttcttcctaatgatgtgggatggagagatctgtttgaaatggttatagtctctgcaaggaagccagaatttttccagctttcacatccattgtatgaggttgtaacagatgatggactgatgcgtccctgttttaaagtaaattcaggtggcttatattctggtggtagtgctcagatggttgagaaatcactagacattcatggggatgagatattatatgttggggaccatatttacacagatgtaagccagtcaaaagttcatttacgatggaggacggcattaatctgcagagaactagaagatgagtttaatgcactggtcaaaagccatgatcagaaagaaaagcttgttacacttatacaacaaaaagaaattgtgggggatcttttcaaccagcttcgcctggctctgcagaggcgctctaattcacgtcctgcacagacgcttgctgcaacttgtatggatgaccaggagcttacggagagtatgcaaaagttgctcattgttatgcaaagattagatgaaaagatcgggccaatgctagaagcagatggagaacttttcaataaaagatggggttggttgtcacgtgctggcctatgggataagagtcatcttaccaggcaaattgaaaaatatgctgatatatacacatcaagggtttcaaattttctgcactatactccattcatgtatttccaatctcaagaacagacacttgcgcatgatgcccattcctattctggaggaaaggacatcaaagttcattgagcatccgttcgtcacaatctggagattaggcaggaaagagggaacgtgatcattgtgattatggctgggatggctagacaacaacaattgtcgttttgaacaaattaattaatacaccttgtaagattgtatttatatataagtaaatctttagctatagcatgctgaatgattgttctgatagtcagtttgtttgtcgtggcctacctagagtttcatattgggaggcacagtacctgttttggtgtacctgctgctatttgcattgtatatgtgaaatgcgaagtgaagtatgacaaggtaacgataagtgacaaatcacgtcatttgatcctgcgcaaaacgatattaaaaaaa

SEQ ID NO: 139367 - DNA, 3324 bp, Zea mays
  Clone ID: MRT4577_58584C.1
ccctttttcacatcagtaccttctggtagagttggctcttgccatgaagctgtgttcaggtcaaatggagagtttaagaaggtatagctagtaccgactgaattctttagagctttgtgcttcctcctgtgaagtgtcgaattgtacactgcataaacatgcttgcactctagcatcaagcagactcttgaatttttttcttctgttctgtgccaataaagcaaccggccatctgatttcattatgtacttgtcagagcagtttggttaaactcaagagcgaatgtgtaactcagtatgatgtacaatcccttacaaaaatgattacaactaactgaaaacctgcagtttttaagagcttttagggacacaggtttacacattaaagtcacatgccccctcatttcattttgtaaggtttactcacaagtcacaacataagattcaaacttgataatattttattagcacttaatattataatttgtaggttatgccatacaaatatttgagaacacttccatattgtcaaatgaatattcatgaacattacaatgtatgtgtgttaatggtgaaaatgtactatttcttttgttcttgataaaatgatacacaactttactgcatttgagaagaaaaaaaatataatggtcaaaacatgacatttaccatgccttacaaaaataaaaggagggattactttctgtgtttttttaattcatattgatttttaactcaaatataaaaatacatgcttgctttgacttgtgaagcttctcagactccacttcgaggtgccactccaagagtatgtgtggatgtgcctatatttctatttgtttctgtagggtaaagtctactccagggataacctgtgactaacagataggtctgtacttcctgttgaggttaagaatgtaatcgacaacacttctatcatgtctgtgaaatgtttgctgctattggatttacaattcatatttgtaggatcaagtgacatgtaccctgttcatgtatgctgccttttttaacaacactatctacaataaagaatgttgaagatcagctttcatagtaatattttagtgaaaagtttaaaagatattatattgtgaaagtactgtctcataaagaagaaccgacattattgtttccaggggctacattacaattacatcatgttactagtttgcaatttaaccttgttttatgtacataaccacatttgttttataacaatactatgatgaacttccccaaagtttttcataaaaaaaatcaacagagtttgacgactgaaatcataaacacattatattctgaagggatggaataacatcaaaattaaaaaggtgcttttagggaatgctccaactgaactgctttacagaacacaatgcctttgttttagtgcagcttttttgctagcattgctaattagatatccaaatttgggccttttctcttatgtgtgtgtgatgtaagcaggacagtttttcacaaggcctctaatgttttttattgtgtcgtcatgaaggccatcttatcaagagagttggaagatattgcatctattgaagacaagttaggaaggtcacttacaaccatggagaaagatagaattggagtgggtaacttaagattatatttggaagagttgctgcagaagaggtacgttaagagtgttccattaatcattccacttcttgagaagcaacatcgaaatacaacaagtaaattgcgtgaaatcagtcatgaactcaggtgatgttttggacttttagttgattattctgttcaataaagtgggtccttccttgtagtgggttatgtggtgtttctgtagctcaaagctttgatggaaagctgggttacgttcttccccatatctccaactttacaggctcatgataatatatttgttattcaagatgtattatttatgttgtcaccctatatctgaacagtgatctagatgaaaccaaactgaaggagaaagctcagctattccatgacacatttttgaccaagttatctttgctattgaaaggcatggtggtggcacctcctgataaatttggagaaactttagtcaacgagaggattaatggaggaacatttactggaagtgagaatttccagctcccgaacaagatgatgccaaatggtggaatgcgtctttatggtggtgcacaatatcatcgggcaatggctgaatttcgtctggtagttggtagtaccaggtgccctccaataactagggatgaaattgtcaatgcttgtggtgttgaggatattcatgatggtacaaactactccaggactgcttgtgtaattgccgtggcaaaagcacgtgacacgtttgagccatttcttgatcagttgggttttaggcttttgtacatactgaagaggctaatcccaatctctgtttatctgttggagaaagatggtgagcactttagtagccatgaagtgcttataaggcgtgtccaggaagcattcaagaggtttgttgaatccactgagcaatcatgtcgtcaaaggtgtatggaagatttggagagtaccactcgttatgtcacttggtcccttcacaacaagaaccgtgctggattgagacatttcctcgattcatttgttgcaccggagcaactatcagtaaatacattgaacgagcggttttctgggttgaatgataacaaacaggataaggcaaagggtgactcgaagtcaaaccattctccagacacaaattcgtccactgctatgccagagacaaggctggttgacctattggatagcacactctggaacagacgcctggttccctcatctgaaaggcttgtttatgcgctggttcaccagatttttcatggaatcaaagagcattttcttgtcaccactgaactgaagttcaattgctttctcctcatgccgattgttgacaaactaccagcacttctaagacaagaccttgagtcagcttttgaagaggaacttgatagcatctttgatgtcactcaactgcgccagtcacttgggcagaagaagcgcgagctggagatcgaactgaagcgggtcaagcgcttaaaggaaaagtttggggagataaataagaagctcaattctcttcaggttaggcagtaggccaggctcaaaaattagcagtagcttggtaggctaggactccaggtagagtgtttctatgctgtaataaaataattggtcacctagagtgacttcttgttgtatcctatcagttgtaaatatgagtgtcataacgtacgttgttgctacaaacggtaaacagtcggttatcctc

SEQ ID NO: 139368 - DNA, 313 bp, Zea mays
  Clone ID: MRT4577_58585C.1
aaataactggggcgaaggcttttcaaatggtatccctatagggctgattcaaacattatcttgacccggatgcgttcagcaggagacactgctaatcaaactgcgggcacaacaatggcccatggtctcatgtgtttgggccaacaaccacccgcctgagggacatatatcatgttcaactggataatgcgacgtttgatccttatgataacgcttcccgcttttactccaggtcgaacctaaagcctcttatcggttttaaacataacccgactagatgttgggaaaaattggtctggtcacccacatgatt

SEQ ID NO: 139369 - DNA, 291 bp, Zea mays
  Clone ID: MRT4577_58586C.1
tgcatctacccattgatcctctcttcaggcttggatccatccctgcaggctctggacccaggactaagacataaggaagaggctagcttctcatcactcctcagtctcgtctgatggcaggctgcaaggttgctgtgctcgtttcccctagccagcctttgacacagtccttcctcaccgtcactgggccactgtccacactcagaacccttcatgggcacagccacaccaatccatagagcggaacttctggagtccttcagcccttccacgtctttcactcagctagga

SEQ ID NO: 139370 - DNA, 565 bp, Zea mays
  unsure (1)..(565): unsure at all n locations
  Clone ID: MRT4577_58587C.1
ttgggtacctcgaggccggccggngacatccatacatctatattactgncttgattacatactatacaacacatcccatgggcatacaaacacgcgctgaaacgtgatgtgccgccagaacataaacgagccgtcaccctggccatgtgctagcgtggcagcgtcccgcatccttcatgggctctagcctagccttgacagcatacaagcagcaagctacagcagccgaagacgcgatatatgctcccggtcgaccgatgaagtcgggagataacatcgcccaccaccaccattactattatatttgtcattcgcttgggaatcattgacatcggtaaaggttgctcgttttggtcggctagcccgcttggcctgggatttctggttccaccgatcgaccgagaggcatggccattgcctccgcagtcatgtgctaggattgtgtattactacgaacccgctaatgcgtaatccaacggtacctctgtacttatgccgtcgctccatgctttctgccaaagcccaacacgtcgtcagaaaaccacaagtgacgcgaatttttgct

SEQ ID NO: 139371 - DNA, 366 bp, Zea mays
  Clone ID: MRT4577_58588C.1
ctctgacacttctcgttctgctcccgactcccacccaaaaaaaaaaaaaatcttataaggaggtttcaatagcgaaaccatctcaagcccagacacggatgtgcatgaaaaatgagcttcctggcctaatgtggtgacgaacctgttcatatgaaagccggacgtgaggtcactgccggtatccttcggcagagtctaccttgccggacacctcctaccggtgtcccgttttgtggcaccatcctcagaggctgtgactggtccatagctcgccttcagggggccgatgatcctgcttaccgtactatgattcttgtggaccgacccctaaacggtcgggcgcccctcacaaactttttgcaagtc

SEQ ID NO: 139372 - DNA, 309 bp, Zea mays
  Clone ID: MRT4577_58589C.1
ttctgcttgcccgggcggcccccacccgcagggggagtaccttgacgacacatatcgcattcacggctccatatgcggtctggatgaatgccaagaacacccaccacaaccgctgaggctggtcgccgcagtcaagcaagggtccgagcatgcctgagacagccattatgatgagcccgagccctggaacaggcatcaacccgaatatcaaaggcctggaagatagtaaatgaggttgcattagctgacgatcgacatctgtgttcctaacacaatgatagctggccatgcttgtgtgaaggacctctg

SEQ ID NO: 139373 - DNA, 455 bp, Zea mays
  Clone ID: MRT4577_5858C.1
cgtccgctctgtcttttctctctttaccgctgagtattttatcacgtttttagcactgctcgcgagaccggggaagagggtaaaaatcgctcgttgttttggaaatgaccttgtcgttggagaaagatgaacagtggaggtctcgacatcaagaacaacacgaatgtacgatacctatttttttatcgcattcgttaccactgctttatcttcttcgtgtcgtcgacgacacagtgccaccagggccacagggctgcgcgctcacgcgcctgggcctctgcgctcgcgccggccgcgccggccaggctgtggccacgttgccagggccgcatggctgcgcgctcacgcgcctgtgccactgcgctcgcgtcggccgcgcccgcatgccgtcgcaaaacgtcgcttggaggctggtcgcgccctggccgcccacgcgcttcatgaggccgctcgag

SEQ ID NO: 139374 - DNA, 939 bp, Zea mays
  Clone ID: MRT4577_58590C.1
ccaaccggcggcggcggcggccatgcaggggcatggcagtggcctcggccccctagcgagcagccccggtgcggtgcaggctcgcggccctagccgtgcggccatccccggcgagctgcagcctcccccagcgcatgagcacttggccccggcggccctggctgcccggcgcacgcgggtgcgcatctccgggagcacgcgcgggcaggcccccgacggcacggcgcagcgcgggcgcggctccccggccaacacgcgcaggcaggcccctcggcggcgcgggctaagccccccggcggctcgacacgctgtagcgcgagcgcgcgcacgagcgcggtacggcggggtgccctcccggcgcacgagcgcggcccggccccagcgtgggtgagcaggggtgcggctgcctcgaccccggctgtgaataggcgcgcgacggtcgtcggctccgccggctcgggcttgccacccagccacgacggcgtggtcgcgtgaccccggcgcgggcacgtggccccggcggcgcgggctgcacgggcgtggcccccccggtggcttggggttcagcccctgacggcccgacgcgggtgggcacgggtgcagcgaccacggcgagcgtggctccggcgcggccagcagctatgccccgcggcggacgcggccccagccccagcaccggcggcagacgcgattccccacagcgtggcgctgtggccctggacgcgctggctggctgaccccgacgccggtgtgaccccggcggccctggcgcgtgcgggcacgacgagcgttggctccggcccgacggtgcgcatgcttggcgcgcggcccctgcgagcgcaggctcctactcgcgcgggcgggcacacagccccagccccatggcactggcatgggtcccagtgtgtgcgtcgtcggcacggcgactaagcgtgggcg

SEQ ID NO: 139375 - DNA, 636 bp, Zea mays
  unsure (1)..(636): unsure at all n locations
  Clone ID: MRT4577_58591C.1
gccggccgggatgcggaaaggggggaaaaaaaaaaaaaaaattataaaaaaaaaaaaaccantcacaaaaaaaaaccaattaataacctccctccataaaaactaataaaaaaatcccctccccaaaagaaccccttttcccctccccctccgccctcttgaacaattgggacgccgagggtacttctggagggttccacttatccacggcgggggggaaggggggggggatttaatattgtggggggaggagaacccgatcctagggggaaacaccgattaatcaacgaatttcgggagcgtcgccccggggggttggccaagctcccgagttccaccgaaaatttcaccacacatcggcgccaagggcatgtaaaatttccccgccagaaaaaaaaatttcacaaagagtggggggggcaaaaccttcagttacctcaaatcaggatggtttcccggaatggaaatagggagtacatccccaaaggggaagaaatcccaaaaattttcttgtgcagaattaaggaaattttccccaaaatttgtgccggggtaaaaaaagtacttgctgcattgaaaggttaaaaaagggaatttgaacaaagtttaaaaagggaatggcaaaattgtgggaac

SEQ ID NO: 139376 - DNA, 253 bp, Zea mays
  unsure (1)..(253): unsure at all n locations
  Clone ID: MRT4577_58592C.1
aaaatanggnaggaggacngntctattgttctccgttantcttncngttggagnagggttganaagtgtntatntctanntnctntcctgctggaattcggtttttgtgggtgtnggagttggtggcacgcatgtnttttngtattggtttctggaatttgtcctaccaagnancgtggtgcatggatgcttgtgttntctgtttctgganatcggaaccatcttngnggttgnttggtgggtcgtgttgtcc

SEQ ID NO: 139377 - DNA, 311 bp, Zea mays
  unsure (1)..(311): unsure at all n locations
  Clone ID: MRT4577_58593C.1
tttatttttccccaanccccaaattgcttcctgaggggattgttaaaattagctgacggttcccctcaaaatactgacatcgcgtggcgaatgatgaggtaaccgaatcttgagtgccacataaggaatcctattccaccaaacggggagacggcaacccgaaattaggcggatagagggtaaaaacaagcgtgcgcatgggctcaaccggcaagaagtgataggacaactaaacgccatgccaaggacggtgcaagggaacttggaaccctgcggctcggactcgagaccagtgagggccccaagctcac

SEQ ID NO: 139378 - DNA, 251 bp, Zea mays
  unsure (1)..(251): unsure at all n locations
  Clone ID: MRT4577_58594C.1
gggtcggacccacgccgtccgcccacgccgtgcgncggtccatgcgcgtgtatggacaagccagcagaggaaagatgccagtcatggttgcctaccagtcagctgtcctgacattaagaaagaccgagggtggtaagaacgtacccatgaccccggcgtcgtcagggaaagtatatgtgattattacaagggggcttcggcttcggcataaagagtcttctcttatggcaaagacatacaatgtgaagatg

SEQ ID NO: 139379 - DNA, 282 bp, Zea mays
  Clone ID: MRT4577_58595C.1
agatcgagccgtatatatataagacatttgaaagaaataataaatatatacatacacaaaaaatatagtaaagaacgagatatctaggggatgtttttttttaaaaagaatgataattttttaaagaactacaaaaataaattatagataagaaatctttcggagggagagtttatctctatcaacccttttattattagtagcatatagctcgtgctaacgttacacacgctattcggctggctacatgtcgttgtagttgcaggcaccatccgttgtttt

SEQ ID NO: 139380 - DNA, 613 bp, Zea mays
  Clone ID: MRT4577_58596C.1
gataaaatctacagtatctatgacagaaactatcagagttcacgacaactgatggttagctctgactaggttgcattacacgtcgtaaaagagaaggggggaaaaatcttacagcctttgtgatacgtgagcaggtattcctgtgacctgtctgtctgtcttcttaccgcttccttttatccttccgcagccaatttcgctacaaggcaggcagctacagccgtcgtcataccttgggtgccaaaaagcttcggtaataataaaccagtaacacatgcttcagcttcacatccaccaaggaaaatcccgaggaggaagtcagcttgtgccaggactgatcttgtggaatcaccgactgccgcttttcgggggctccccagccatcgaaccgacaacagtttcctgcgccagttctctctagcacgttcccctatgcgtagtacatgtacaagctgtttgcggcagcgcacgcgatggagttctcagttgggtgccacgcaagatggagcagctttgttgagaggtcgcaagagtttccgctggcgtcaacgcttgtgttctctccacctctcctcacagcaccggtcagagtccgtgcaggccttgctggatc

SEQ ID NO: 139381 - DNA, 356 bp, Zea mays
  Clone ID: MRT4577_58597C.1
ctacactcgtccgaccacgcgtacgaaaaaaaaaaaaaaaaaaaaaaaaaaaaaaaaaaaggaagaaaaaaaaaaaaaaaaaaaaaaaaaaaaagaaaagaaaaaaaaaaaaaaaaaaaaagaactagaaagggaataaactaaaaggtagtttctaatggttcaactgagtgacaaactacgtaactacgagccagtgggcacaccaatgttagcgttaatacaagttgaaaggattattgtacaatcaaagcccaaaatctacagcaccgtataagacaaatgcaacagcaagcaagataactaggaacataaggccgaagaggtttgagacaaggcattggtcacggaagaga

SEQ ID NO: 139382 - DNA, 1981 bp, Zea mays
  Clone ID: MRT4577_58598C.1
tttcgggaaaaacaaatcgtacagtactgtgtcccagcagcgcgcgcggggggcgtacgccggcggcgagatcctgcggtggcggggggatggcggcaaggaggcggagcccgtcggagtggtggtgctagcggagtgcagctgctggctgggtgtgtgaggggtttcggctcatttcggcgacaaggacatgaaggcgctgcggcgatccagcacctcgtcctccccgtcgtcctcctcctcgccgacggccgcgtcctccccgccgtcctcatcgtggatccacatccggtcgctcctcgtcgccggcgcgtcctcgtcctcatcctcgtcgtcctccgcgtccgcccacgcgtcggggagcgcgtttttccacgcgtccgtaattccatttcaaataatagcgatggagaaacattcatatcagcagatgatctgcgaataaacctttggaatttagaaattagcaatcagagctttaacattgttgatgtgaaacctgcaaacatggaggatctaactgaggtgatcacttgtgcggagttccatccaactcactgtaatacactagcatatagtagctcaaagggtactattcggcttattgatctgcgacagtcagcactgtgtgacaaccatgctaaactatttgaggagcatgaagcacctggatcaagatccttttttacagagataatagcatcagtttcagatataaaatttgcaagggatggaagacacattcttagtcgtgattatatgacactcaagttgtgggatctaaacatggattcaggcccagttgcaacttttcaggttcatgaatacttacgtcctaagctttgtgatttatacgagaacgattcaatttttgacaaatttgaatgctgtctcagcggcgatggactccatgttgcaactggttcttatagtaatttgtttcgtgtttttggttgttctcctgaaagcgtggaggcatcaacgttggaagccagcagaaatcccatgaggcgacaggttgttgatccagcaaggcctgcacggactctgaccggtgctgtgaggagaggtggagaaaacacaagcgttgacgccagcggaaactcttgcgatctctcaacaaagctgctccatcttgcgtggcacccaactgagaactccatcgcgtgcgctgccgcaaacagcttgtacatgtactacgcataggggaacgtgctagagagaactggcgcaggaaactgttgtcggttcgatggctggggagcccccgaaaagcggcagtcggtggttccacaagatcagtcctggcacaagctgacttcctcctcgggatttccttggtggatgtgaagctgaagcatgtgttgctggtttattaccgaagctgtttggcacccaaaggtatgacgacggctgtagctgcctgccttgtagcgaaattggctgcggacggaagcggtaagaagacagacagacagacagcagcggatgctagtttcaccaaaggtcacaggaatacctgctcacgtatcacaaaggctgtaagattttttttccccttctcttttacgacgtgtaatgcaacctactcagggctaaccaccagttgtcatgtgtactccgatagttttctaccatagattggtactgtagctttatctatgcagctgctgttgtattcattagattgttcggataagtgtaccagtgcacttggttgtgatttgcttgctgtggccgtgatgtggccccgctctctgtaccgttcaaattgaattccgattctatgtgcaaatgataagtgtttcgtagcccagctacggtgcgcgtcatcccccttctcttttacgacgtgtaatgcaacctactcagagctaaccatcagttgtcatgtgtactctgatagttttctaccatagattgctactgtagattttatctatgcagctgctgtgtattcattaaaaaaaaaaaaaaaaaa

SEQ ID NO: 139383 - DNA, 378 bp, Zea mays
  Clone ID: MRT4577_58599C.1
gggacgcgggggccgacccggaaaacccgaaccggaacccggaggcggaccaagtaccccaaaaaggaggcgaaaaaaagctgggggaaaaaaggggcaaaggggaaaccgggggaaaatgggaaaccgcaaaaaattccaaaaaaaaaacaacccggaagcaaaaagggaaaacccaggggggccaaaagaggaagcaaaaaaaaaaaaatggcgtggcgctaacggcccgcttaaaagggggaaaaccggaagggcaaacggcaaaaaaaaatcggcaaacccccggggaaaggcggttggcgaattgggccccaggggggttttccttttaaccagtaaaacgggaaaaaggtaatggcccttaaccgcctggcc

SEQ ID NO: 139384 - DNA, 439 bp, Zea mays
  unsure (1)..(439): unsure at all n locations
  Clone ID: MRT4577_5859C.1
ggacnggggaaaagggcaaaaagccacagctcaaaagttaaaaaaatgggagcctggatttgcatgtttgaatggaagcgtgcacccccaaaagggggattttttggaacccgggaaaccaaccaaccaaccaagtgagtaagcaataacacaatcccacccggccttgggtggggggcgggcaccccactaaaaggccaggtccctttgtacaaaaggactaatgggccctttttcccgctactcatttatgcactggttggcggtctttcagtggaacatgttatggttttttttcttaacatctttaagaccctccttcccacagttgaccaagttgccgttctgcttgccgggtgtctgagagcatatctttggctccttgggaaacctgttttcctggttaaaccccgccccgggtaaaaatagaaaatccttg

SEQ ID NO: 139385 - DNA, 696 bp, Zea mays
  unsure (1)..(696): unsure at all n locations
  Clone ID: MRT4577_585C.1
catgggctcgagacggcancgccagtgnntgatggatatncnntgcagaaattcgcncnnctttcgagacgggccgccnnncgggcaggtacccaagctttttttttttttttttttttttttttttttttttttttttttttttttttttttttttttttttttttttttttttttttttttttttttttttttttttttttttttttttttttttttggggacgggacaaacctcccgggggcaaaaaaaaaaaattggggccccggggcggaaccccccaaggggggaaatccaaaacccggggggggggtaaaaggggaccccggccgggaaccaaagtgggggaaaaaaagggaaaaagggttcccgggggaaaaatgttatccccccaaaattccaaaaaaaaaaaaagccggaaaaaaaaaggggaaaaccgggggggcccaaggggggggccaacccaaaaaaatgggggggggccaacggccccctttcaaaagggaaaaacgggggggccccctgtataaaaaaaacccccaacccccggggaaaggggggttgggaatggggggcctttccccttccccgataaaaaaatcnttgggccngggggtttggggggggggaggggtttaaacccaccaaaaggggggaaaacgggtttccaaaaaatcgggggataacccgggaaaa

SEQ ID NO: 139386 - DNA, 1366 bp, Zea mays
  Clone ID: MRT4577_58600C.1
cggccgggtgtggatttagaaattagcaatcagagctttaacattgttgatgtgaaacctgcaaacatggaggatctaactgaggtgatcacttgtgcggagttccatccaactcactgtaatacactagcatatagtagctcaaagggtactattcggcttattgatctgcgacagtcagcactgtgtgacaaccatgctaaactatttgaggagcatgaagcacctggatcaagatccttttttacagagataatagcatcagtttcagatataaaatttgcaagggatggaagacacattcttagtcgtgattatatgacactcaagttgtgggatctaaacatggattcaggcccagttgcaacttttcaggttcatgaatacttacgtcctaagctttgtgatttatacgagaacgattcaacttttgacaaatttgaatgctgtctcagcggcgatggactccatgttgcaactggttcttatagtaatttgtttcgtgtttttggttgttctcctgaaagcgtggaggcatcaacgttggaagccagcagaaatcccatgaggcgacaggttgttgatccagcaaggcctgcacggactctgaccggtgctgtgaggagaggtggagagaacacaagcgttgacgccagcggaaactcttgcgatctctcaacaaagctgctccatcttgcgtggcacccaactgagaactccatcgcgtgcgctgccgcaaacagcttgtacatgtactacgcataggggaacgtgctagagagaactggtacagtagtgctttttttttgcttgtttgcttgcttgaagtgaaaggcgtggtctttcacacgttcaaggatccaggcgcaggaaactgttgtcggttcgatggctggggagcccccgaaaagcggcagtcggtgattccacaagatcagtcctggcacaagctgacttcctcctcgggattttccttggtggatgtgaagctgaagcatgtgttactggtttattattaccgaagctttttggcacccaaggtatgacgacggctgtagctgcctgccttgtagcgaaattggctgcggaaggataaaaggaagcggtaagaagacagacagacaggtcacaggaatacctgctcacgtatcacaaaggctgtaagatttttccccccttctcttttacgacgtgtaatgcaacctagtcagagctaaccatcagttgtcgtgaactctgatagtttctgtcatagatactgtagattttatctatgcagctgctgttgtattcattagattgttcggataagtgtaccagtgggctgtgatttgctggttgtggccgtgatgtggctacgcggagg

SEQ ID NO: 139387 - DNA, 321 bp, Zea mays
  Clone ID: MRT4577_58601C.1
gttttctatcaacatggacatgaactctgtcactatgtaaattctggacacccatcgagggctcgctgtttactgttaagtgctggatgatcttgagatgtgactcataatgttgtaggcctgcggaaagatagaatcatggaaagagaatgtgcgcatgcatgggagagatcgtgaacagggtcatttatgtgggacgatggaagcgcttggtggttcatttgcacacacacctgacgcgactttttgggagggggagatagactgtgctgaagacatcactgatttcactggagagcgggaggcatggcctgatgatca

SEQ ID NO: 139388 - DNA, 265 bp, Zea mays
  Clone ID: MRT4577_58602C.1
aggagaagctattgtacaaaatgagccatgcactttgattgcctacaacctgtaacctaataccacgctcagctaatctgggtgaggtagcatgtgcccagcgcattagtgaagccgtgaagaatctgttgttgcaggggatcggttcagtcattgacactaaggacatcattggagtctatacgactccattaatggatgactatgcatcaatctgtgacaatcatcacgaaatgcatgtacacgtaaccagatgtcaacgtgg

SEQ ID NO: 139389 - DNA, 550 bp, Zea mays
  unsure (1)..(550): unsure at all n locations
  Clone ID: MRT4577_58603C.1
gtcgtcgcccttctccggtgtggggggggggggggcgggcggtccagtcaggcgnaggggcggtcgtgtccctccccccgctgcccggcngtccagcgccacatgccggcgtgcgcgagggatcagcnnntgcagcgccaccgnagggagggcccagcggctgctttgtgttcgtgccgtncnnaccgtggnagaaagtatgtcgtgagcgggtggagcgggcgctcnnngtgcangncnnggcgccccggccatttcggtcagaatgtgactgtccagcgggcgcgcctcgacgaacccgccggcgaacttcnnttcggcaagaacnngctgctgatgggaacctcgtgcagcgtccggagggtcgaccgcaaagaaccgggtgctggagaaaagccgnncgggtgacccgggcgttcgcgtcaccaaggaacgcgtggcggggagggggccannctacgagggcgggagtgtcaagggtggcgcggcgtcgtgtcgggcccccgtgggccgccggtnngctgctggnagaaaacgagcnnnaccacaa

SEQ ID NO: 139390 - DNA, 855 bp, Zea mays
  Clone ID: MRT4577_58604C.1
caagcatccattggttcttatatggatccagtcaagcaagggtcacagaagtacaccaaaaatgttgcttcaatgttgtgcaaatcacctgaagaagtggtcagtgagagacataattcaaagagttatcaaccttcaatggagcagtgtacacagaaatctaaggaatcaaagcaagtagttgatgaccatgttgcggatttcttgtatgagaatggaattccattgaatgttgttaactcaagaagctgggaaataatgttagagtccataggacaatatggtcctgggtatctgtcaccttcgtaccatcagttgaggaattcattacttgagagggcagtagacaagacaaatgaggtgagaaagaagcatgaggaagcatggaaaaagtatggctgcactctcatgtcagatgcatggactgacacacggccccgtcatttcataaacttttttgtcaagagtccagtgcttgttgaaaatgaagaaaatgaggaagacgttgacatggaagatgaagaagatgatttcaatgaaatgcaggacgacgaagatgacgaagaggatgaggatggtggaggtggagctgcaggggccttccgagtggatgatgctttactttgagcatttactcattccatttcgtttccaggaattcagacaatcatacttgttagtttagttaatttcagtttcagaattcagactccttttttttatcaatgttccatgctgtgtaatgtactatccaagtgttctactgttctggagtggaacagccaagcagcactactgactgtgtggaacttcaaaaaaaaaaaaaaaaagaaaaaaaaaaactcgagagggggg

SEQ ID NO: 139391 - DNA, 504 bp, Zea mays
  unsure (1)..(504): unsure at all n locations
  Clone ID: MRT4577_58605C.1
tcccggccatcttccatagcatcatcacattctggaggrggkggaagaggtacccaatcatttactaaaccggcaccggctctarkcttcctaccaaatttccacargttcttcaatccttttggaacatctttwgcgtggtmgtgraggggatttrcaccaagaaaaaggatctggtgactggcccactttttccggatcccggrtacatcagsatctsgtatttcatccagkygatagagattccattggggtrggcttcccsgtgggggatcaagaaagggggcaccatcttrattatcattcsgtgaaagggacakgtrkwggatacggaractccawgggggtggracatcaccasctgggatttkbggcatttcctbgaaaaasaggtracttankaccaccaattgsawggkgttttstttgraaatcacsatcaccggtttctggccctggggcatctggatttccaaattcatgrctcactcttggggtctcact

SEQ ID NO: 139392 - DNA, 564 bp, Zea mays
  Clone ID: MRT4577_58606C.1
ccccgcgtccgcccagcgtccggccagcgtgcgcttcttgcttcctatattcacaagggaggtcgtcgatcagagggtgtgtgtgtgtgtgtggcagcttggacgacgacaggagagatcgatcgagcattttgcaattaatggcggccatgggcatgaaggagggtgtgctgatgctggctctcgggctcgcgatggccgctacctcgtcggccgtcgtctacaaggtcggcgacgcctccgggtggacgatcctcggcaacgtcaattacaccgactggacttccaagcagaacttccgtgtcggagacaccataggttatcaggactggagccttcttgacggggaactattctcatgcatgtgttctttgtatagtatctttgaaaaaatgatgttattgaataatatgtaacatgtctcttctataaaagagaatctagttagcgactgtatgctatgtagagattgttataaatttatttttgagtctaaaagtatgtactatcaaagaatgtgacacttgatgataaaggctataattgtgtaggcttatttcgctt

SEQ ID NO: 139393 - DNA, 372 bp, Zea mays
  Clone ID: MRT4577_58607C.1
ggtacctcgagccggccgggacccctttcacgagcaactagactcacttatgtgtgctggctcgctcattcttgtccccatggtgctgatcgccgtagatggaatgggcatgcgcaccgtcgccgcggacaacgcttctcacaaccacgtgcgccgtttgctcgtacagctccaccgcctaatacgatgctcgaaaccaccaacaacttacccatggaactgattgaatacgacgtcggagaaatgttgacggccaccagtcactccaggtaatgacgctctactgaggtgagagggtacaagaaaacgaaaaagagtaaaaggattaataattaatatggcaatgtgaggaaataaaattagaataatgaa

SEQ ID NO: 139394 - DNA, 2023 bp, Zea mays
  Clone ID: MRT4577_58608C.1
tgagtagttgccacctaaccgtggcggaggcgcagtgctgttgcgagatgtggctgtgatggagcgagataactaaaagcctccccacataaatgcacgggctaccggacggcaagcaggcggacgcgaacaaacccccttattccatagcgagcgcgagcagcggcgccgggaggactgctgcgatggggggagacgccagcaccatcgaggggggcccgctcccgcatctcggcggccggccggcctcccgcgtgcccgacaccccgctggtgcgcacggcgggggacgccgcgcgcatggtctgggacgagtccaagcgcctctggggcatcgggctgcccatcggcgtgggcatgctgagcatgtacgccatcagctccatcacccagatattcatcggccacctcggcaacctcccgctggccgccgcctccatcggcctctccgtgttcgccaccttcgcgctcggcttcctcctcggcatgggcagcgcgctcgagacgctctgcggccaggccttcggcgccggcgaggtcgccatgctcggcgtctacctgcagcggtcttggatcatcctcgtcgccgcctgcgtcgtcatgacgcccgtcttcgtcttcgccgagtcgctgctcctgctcatcggccaggacgccgacgtcgcgcgggagtccgccaggttcgccacctacatcgtcccctccatctacgccatgggcatcaacttcgccgccagcaagttcctccaggcgcagagcaaggtcaccgtacccgcctggatcggcttcggggcgctcctcgcctgtgccctcctcaactacctgttcgtcagcgtgctcggctggggcctccccggcgccgccgccgcctacgacatcgcgcactggatcatcgcgctcggccaggtcgtctacatcatcggatggtgcaaggacggatggaaaggatggtccgtagccgccttccacgaaatctggccattcgtcaggctctccctcgagtccgccgtcatgctctgcctcgaggtatggtacatgagcctgatcaccgtgctcaccggcgacctggaggacgcccagattgccgtggactcactaggcatatgcatgaacataaacggatgggaggccatgatcttcatcggcctcaatgccgctatcagtgtccgagtctccaacgagcttggctccggccgtccgagggccgcgtggaacgccgtcatggtcgtcgtcggcgaggcgctggtgatcgggattctgtgcatggcactcatcctcatcttcagagacagcttctccatcattttcaccagcgacaccaccctgcagcgagccgtcgccaggatcgccggcctgctcggcctcaccatggtgctcaacagcgtgcagcccgtggtttcaggggtcgcggttgggggcggatggcagggcctcgtcgcctacatcaacctcggctgctactatatcttcggcctgcccctgggctacttgctcggatacaagttcagctttggagttggggggatttggtccggcatgctttgtggtatcacccttcagacgctcatcttgctaggtgtggtttggaggacagattggaaagcagaggccgcacaagcttcaggccgtgtgcaaaagtggggcggcaaaggcaccgatgaagtcaagcctctcctggaatagaattagtgtagtactatcacgcacgaagctcgtttcatttgaataaacaactgggcaatacgccttatccctttcagaagcacagctcatttgctttcccatcgaatctgatagcttccctttcccctcctccgtgtagttaaattgatgtctctgtatgaacactgtttgaggcgactagtatgaaccctgtttgcggcgactagacgtattgaacatactttttttttcttccagttgactcagcatgacttgaacagtctcaaattgtgtgtaaaggatttactcgctagcagttggtgtaatggtggcaggaatgatgttcttcaggatcagatgag

SEQ ID NO: 139395 - DNA, 1711 bp, Zea mays
  Clone ID: MRT4577_58609C.1
ccggccggaaaaaaaaccagccgccactgtttctcgttctcccatcatgcttcttcctcgcagtgccggcgctccatcttccgctcgctcccttgctcgtgctcggcacgcaggcgacggaggctgcgttcgggctcgggctctcagcaaccgcgtcagcggctgcccctcccgcttctcgccagtcgccccgtgccctcgcctccggtcctcagcacaccagccgtgaccctgcgtcataactgcggtacaagggtgaacaaagaacatcgagaggaagacaatatgccgaagaaggggactaaatctaagaaggagaaggtggacgatgtgcccaatgaacaagaaaataagcttccagactacctggagctccagcgcacacgtgtcgtctgcaatgctgatgcccccattcatactcaaggtttccaatactcgggtgcatttgctgctatgggaattgataatagcgtgtcagtggataaattttgcaagaatttcaaaattgaaataaatcgtctcactgaagatgatatggagttcgatatgattggtattgatgcatcaatagccaatgctttccggagaatcctcatttcagaggttccaactatggcaattgagaaagtcttcatggctgacaacaactcagttatagcagacgaggttctttcacatagactaggacttattccacttgatgcagatccaagactctttgaatatatctcagaaaacgatgtcccaaatgaaaggaatactattgtttataaactgcacgtttcttgtccaaagaattctcaacgaattacagtgaaatctagtgaactagagtggttaccagaaggtagccaattaagcatgtcagcccctgcacagtctggagacaaacagaagactttcacttccttcagtcaaagccaaaaggagatcttagaaaagcctcttggtgtgaagtataaagatattactattgccaggcttgggccaggacaggctatcgagctcgaggcacatgctgttaagggaactgggaacgttcacgccaagtggtctccagttgctacagcctggtacagaatgctccctgaggttgttattcttaaagaagttgaaggccctcaggcagaggagctggtgaataagtgccgggttaatgtttttgacatcgaagacctggctaacggtggaaagagggctgttgttgcgaggccaagggcatgcacgctctgcagagaatgtgtgatgggaccaaatgagaaacaagtggagctacggcgtgtcagagaccatttcatattcaccatcgagtccaccggaagcatgcccccggaggtgctgttcacagaagccgtgaagattttggaagagaagtgcgagagggtcatatctgagctctcctgattcctgagaggccggcggcactgtgcagcactggagttagagtaaaccagctcagcctgcagtatctgctgtttttgctggagactagtgtgcgccattaaacattttttttggtggtgttggatatttgggtcagcaaatgtaagctgtttatatatcatgtaacgcagtgtaatgttagattaaactgtggcaggtgatcgaaatggcagctgtatcaaaggtagacgtcggctgttagtccgcaagtgtaacagcccaaaatcataattttgggtttagaaccctccaaataaaaatttccatt

SEQ ID NO: 139396 - DNA, 1386 bp, Zea mays
  unsure (1)..(1386): unsure at all n locations
  Clone ID: MRT4577_5860C.1
aaatgtttctggtaacactaagacacagaagcttcgaactcatgtaactagggatgcccttgcatttgaccctcaagtgccaatggagaaggtttctggtgcaaggaagtcgataggtcaggggccacatgctggttcaggaccaagaccatctgaaaggattctaaatgtttctggtaacactaacacacagaagcttccaactcatgtaactagggatgaccttgcatttgaccctcaagtgccaatggagaaggttgctgatgcaaggaaatcacatgtgaagattgcacatgctaacgatatgtccatgacaactgataagtccaaagatttgatacagtcaagttcaatgctggaggcacaaaaggctacatcaggtgctgctggatcaaatactacaggtcaacccgaaggtggctctgattctagaactgtctttgttagcaacgtaagtgctcctctgcttttctgcttatgaacatatagacttggatttcactagtttttgtttctttttaggtacattttggtgcaacatagttctctctttcgagacacttcaataagtttggagcgatcttgaagacccatattgtgaccgatggtgtcactggtcagtcaactggctcagcgtatattgagttcttgcacaaagaatcagcagagcaggcgttaaccctgaacggggcatcatttatgttacgcattttgaaggtcgttcggaaaaactccactgaagcaacccgatcgcctggcttgcttcgtgtttcgcggggatcaccatttgcttcaaggctcattagaactgcatacccaaggccaacgtttcctggtgcaatccgtggacgactgccactcaggggtgttgcccagagcttacagtggaagcgcagtgccacagattcctcaaatgctgtaaaaccaagtcaggctgcaccttcagctcctgggaatcagttggtcaccccgaccccacgaagcttcacctacacacgcacggagccaaaaccaaatgacggtgcgatggcttgactgctcagctgcagcatgccgcagctcctgatgaatctcgcagaaagagttcgtgatactgttacgtggttcattcagctgcttttggtaaatatttaagtagctgcagatgttagtttgtagcaggctggtttttgtggaccaaaacctttgagcgatattctgtgaggttttctgtgctgtttttcaccgtcagcacatattctgtgctggctggctgttcggagttcgtggatggagagtaaaatatatatataaaaagtggtagtaagggaaaacacggacgcgatanaaacgttgcaacatttgttattatttttcgatggattatttagcctncacagtttcctt

SEQ ID NO: 139397 - DNA, 159 bp, Zea mays
  Clone ID: MRT4577_58610C.1
cctggctacttgggccgcgttagctcgagggccagcggcatcagcgagcgcaggaccgtcaggaagaagatggtgcgcgaggcagacaagcgtcgcgtctgcacctaccgcaccttgtgcacgtaggggcggaacacatacaggtagttcaagatgaac

SEQ ID NO: 139398 - DNA, 299 bp, Zea mays
  Clone ID: MRT4577_58611C.1
ccggccgggaagcagtattcacctccagccataaccagagaggttatatggtccaggaaactagcctgcaggttttcccggcgctccaactatacagatacgtgaggaggattgctcgtgctaatcataccgtccgtaagtcctgggaaggtagaatcacgcgtagtccgcttttctccaatgcagggaggagagtcagcgcgtaccatctgttttgtgaagaattagcacagaaacaagtccataaccttgtcgctgattaaggtcctcaattaccagaatagcacgctaggtaatga

SEQ ID NO: 139399 - DNA, 1505 bp, Zea mays
  Clone ID: MRT4577_58612C.1
caatataattggcaaaagctatttttttacttttttagcgaggacaatgaagataaatgtacaagttccaagcttatatgccatcaatcagttcaactaaaccggtgccatcttgtgaaacaactctatatggtatctgtgttgaagctgttgtgtactatgtacggcaaccgaaacaaatttacatctgtttgtatcctgttaacatgagttaaacatggctaagctaatacctaaatccagtgaatcatataatctgcagggatcaataacatttacacattttttttcagatgattcctctatctgaatcgagcgagaagccgtccaagaagaagctgccagagtcaatctgaaactcactgaacattgccatgacctggatcatcgtaggtctgcgactaggttgatcgtccaagcactggcaagcaatcgccagatactggtacagctccgactcgcaggattttgtgtcggtcaatataggatcaaatatctcgctgcaccggtcctccttaaccatctgctttgcccagtcgatgagattattgtcgccgaattcagtcggattgattggttttttccctgagagaagctccagaagaacaacgccatagctgtagacgtcgcccttagttgtgcaaataaccgactggaagtactcgggagccacataaccaggtgttcctaagagcttgctcacggttagatgtgagtcaacagcattcacgagccgcgccattccgaaatccgatacgtaggcatcgagattatcgtcaagaagcacgttgcttgacttcatgtcccggtgtatgatgtgtgggatgcaactatggtggaggaaggccagtcctcttgccgagccaactgcaatcttcttccttgttgcccaatcaagacccacatcagtcttgtccctttcatggagcaagacatccaggcttccattattcatgtactcgtacacaagcagacgttcgtcgccaactttgcagtagcctagcaacggcacaaggttgcgatgtttgatcttgccaatggtctccatctctgcagtgaactcccggtcgccctggcctgtgaaatgcatcagcttcttgacagccacaacgctgccatccatgagcctagccttgtaaacctcaccgaatcctcctgtgccaacaagagcttccgagctgaagccattggtagcctcatgcaggtgggcatatgttagtttcctcaacggattctcaaatatcgccagattgatgctcagtggctctttggaaccagaaagcttccagcttgtactggtggacgatgcggggctgtcgctatacccagcagtttgaatctcttcagttttgctcccacggggcctcctgagcttgtatgcagtgacaaccaaggtggccaccatgagcacggtgagcgacactgcaaggagcacgaactcttcgagaaacttcctccgcacgttagaggggttttgaggaacacctccagtgctggcattgtgc

SEQ ID NO: 139400 - DNA, 829 bp, Zea mays
  unsure (1)..(829): unsure at all n locations
  Clone ID: MRT4577_58613C.1
ccttccaccctttcccaccctctcacatccacaccagcggaaaatagtagtaatccccgccgcccaacccccaccctccccggcgcgtgcgcttgcgatgcttccgcgccggcgtcggccacgggtggtgcagtgatggtgggcttcttccgcagcggcaaccttgcctcaagggtgttcgaccgccagtttctctctccgcgccccggcgcaaccgttaatactgtcagacaattctatgagaatttggttccaagttacactatatacgacatagattgtccagactattcatttcgcaagttcaccgatgatggcaagtatcttgtggcctttagtcgaaaccaccaagatttgattgtgtaccgtcccatctggttaacgttttcatgccacgaagaatgtgattctcatgatcttccggccaatgcagagagatttgagagtttctttaagcagctctactcaatctcacttgcatccagcaatgagtacatttgtaaggactttttcctttacatggagtgccatcaatatggcttatttgcaacgtcaactgcacaaagtaatgactcaagtgtcactgacggtgcaattcacggggtaccatcaattgagaaaataactttctatcttgtgaggctagaagatggtgcaatactagacgagaaagctttctgcaatgattttatcaatttggctcatagtattggtgcttacttgtatgangatctggtttgcattgtctctctacgatatcaaacaatacatgtcctacaaatccgagattcaggcagnccttgtcgaggtacggagaaattggtgcatt

SEQ ID NO: 139401 - DNA, 463 bp, Zea mays
  Clone ID: MRT4577_58614C.1
ataccagcgtgttatagttcactgtacgtgaccgtgtaaaacccgcccacgcaaccttctacggcgtacgtgacggctccggcaccacggtatggcgcttgcgtttaccacgacacacgcacgcaggggtacagcgtgcaaacgttgggcgtgaacactgtgatgttccttgacttaactgcctgccgatgacgctacgatgtgcagtgcgtggacatccctagccagtgcaattcctacatggcagcactggtggtgacgatgacctacctgtgcccgcccaaggaccagtggtgcaatccatcactcgatcacttcgacctcagcatgtccgcgttcctccagatcgcgcaagagaaggccgatatcgtgctcatctcctaccgcaggatggcgtgcgcaaaacatggcggcatccggtacaccatcagcgagaaccagtacttcaacatggtgactatca

SEQ ID NO: 139402 - DNA, 520 bp, Zea mays
  Clone ID: MRT4577_58615C.1
ccggccgggagccctgtttctagagtaagtctcatcctcactccccccactctcccgcatcttcggagctgcctcatggtgctcagtgacctccatcgagaacctcctccccgcgagctgggggaggagcctccgcctcacatgactaatacgaggagcgcgggtacgactccgaggacaagatctccatctgcgtgtctaataccgacggcgaagaagacgcgacgccttcgtcatgcccgaccttcgcgtggtggaagatatggcgcttcacgaccccgacgtttctcatgtgcatcgcgatcctgaagccgaggaatgtgaagggagagctaccggcggccagccgcaggcgggtaccatttgttgcgcatgctcgtgcggcgaacgatcatgccccgcgctgatgcaaatgatctgcgcacggataggtgtgtacaaggggaaagacctcgccaagatctgccgacaatagcaccgtcgctgagacactcgcgcggtctgggacatgacagagata

SEQ ID NO: 139403 - DNA, 876 bp, Zea mays
  Clone ID: MRT4577_58616C.1
ggtttagcacagaacaacgcaaaagagtaggtggttgcacttgcgtgctcaaacaaaagccttcccaacttccaccaactgcatgcgcagcttgttttcatcagtgaactgatgagtgagtgtgagtcggttggaattgtaaaatcgcgtgcaggctgctccagcttccagaccagtggggggatggagttataaaatcgcttgcgcatcttggaagtaacctgtggtgcatgattgctccacttgttccagcccatgctgcgtggcgccagaactgattgggtttggggccttggggcccaaaaaaaaaaaagattttttttgtttggtttgaaacaaggctgttttcaatctgttctcatcagcgatgtcttgagacgctggactgacagcgccgcgaccgtcctgccgattctcgcggagctcctcaacaacgacatcagggtgtgggtgtacagtggagacaccgatgggagagtgccggtcacttccagcaggtactccgtgaaccagctccagctcccagttgccgcaaaatggagggcatggttcagcagcactcagggcgccggagaggtgggcggctacgtcgtgcagtacaagggcaaggagaagggcagcctcagcctggtcaccgtcagaggagccggccacgaggtgcccagctaccagccaaggcgagcgctcgtgcttgtccagggtttccttgcaggcaaaacgcttcctggctgcaaaacgtgcgagtcggcttagcggttggcagcactacagcaacatgtatctgagagcgagggagagaaagcgaaagggaatcaagccattggaaacacacgcaccttgcggatcatgtaactgcaggtctgcaaaaaaaaaaaa

SEQ ID NO: 139404 - DNA, 968 bp, Zea mays
  unsure (1)..(968): unsure at all n locations
  Clone ID: MRT4577_58617C.1
cggccgggccgggagaactgatgagtgagtgtgagtcggttggaattgtaaaatcgcgtgcaggctgctccagcttccagaccagtggggggatggaattataaaatcacttgcgcatcttggaagtaacctgtggtgcatgattgctccacttgttccggcccatgctgcgtggcgccagaactgattgggtttggggccttggggcccaaaaaaaaagatttttttttgtttggtttgaaacaaggctgtttacaatctgttctcatcagcgatgtcttgagacgctggactgacagcgccgcgaccgtcctgccgattctcgcggagctcctcaagaacgacctcagggtgtgggtgtacaggtacgccataacagcacagcacagtcgtctctattttcagctccactgatgaggcaaattgacaacgtggaagcatgtcgctgtgatgttggcagcggagacaccgacgggagagtgccggtgacttccagcaggtactccgtcaaccagctccagctccccgtggctgcaaaatggagggcatggttcagcagcactcagggcgccggagaggtgggcggctacgtcgtgcagtacaagggcaaggagaagggcagcctcagcctggtcaccgtcagaggagccgggcacgaggtgcccagctaccagccaaggcgagcgctcgtgcttgtccagggtttccttgcaggcaaaacgcttcctgactgcaaaacgtgcgagtcagcttagcggttggcagcactacagcaacatgtatctgagagagagagggagagaaagcgaaagggaatcaagctattagaaacacacgcaccttgcggatcatgtaactgcaggtctgcaaaaaaaagaaaaaaggcaattatacagtcatagtcacaggcagagaaatctgtacacgaaataagtaagtaggttatgaaaaaaaaaaaaaaaanaaaa

SEQ ID NO: 139405 - DNA, 252 bp, Zea mays
  Clone ID: MRT4577_58618C.1
gtccgagaagaagacgacttttggaacatgcttttgatcagctaagtttgcattctgaagaacatctcaaaggaccgattctagtttcatttactaatgagcatcgcgacgaacaggttagaatctgaagcggcggaactttcaaagatttcatggaaaatactactccagcggcttttggtgtgcagtaccgtctcttcaaggcgactgccgattatctttcgtagcccatcaccacggtcaggattggct

SEQ ID NO: 139406 - DNA, 338 bp, Zea mays
  Clone ID: MRT4577_58619C.1
tagaacggtggggagttgacaccataaacgtataggtccacggcttgcgattgaaagttaagtaggtcattcgcgtgtattaacggacctgattaagctaggggggatctccggccaaatagcctggcaacggccccagtgcacgaaatacactaagttattcagggcgctactagggtatctaagatcgcacaataattcccgcgagagaacgccatgggggaaggcaagatggggaacgcaatcctgagccatacaaacctttgcttaccatgggattgaggagcccaacatcccgcttggcttggacattggggcgtcctggccggccactcccc

SEQ ID NO: 139407 - DNA, 877 bp, Zea mays
  Clone ID: MRT4577_5861C.1
gcgttcgagaataagcagtgacaacaataatctagcctgcctgtccttagcgtagccatgccatggccggcgatgcgctcatcgtcatcgtcactagcttcctcctcgcgctgccgtcagcgacggcaataggcaaggtctgtggcaacgccggcaactacacggccaacggcaggtaccggtccaacctcgactccctcgccgcggcactcccagccagcacgtcctcgtcccctcagctcttggccaacaccaccgccggcgaggcccccgacgccgtgtacgcgctcgcgctctgccgcggcgacctgaccggcaacctcaccgggtgcagcgcctgcgtgaacggctcgttgcagtacgcgcggagggcgtgcccctacgccaaggccgccagcgtctacgacgacaactgcctcgtcggctactccagcgccaacatcctcgtcccggcctataacgccacccgggacacgagcacgctcttcgactactggaacagcatgaccatcgccggcaacgccaccctggtggccgcccacgtcgaggacctgctgacgcagactgcccagcaggcggcctccagcccgaggaggttcgtcacggcctacatggacggctccagcaacgccgtcatcccgacgctctactccctggcgcagtgcacgcccgacctgtcagccggcgactgcctggcctgcctccagcggatcctcggcttgctcaacgccacgacgtcggtgagccttggagggcgggtcctcctgctgcggtgcaacttcaggttcgagaataacatgttctttgacggcgcacagatgacgcagattaagccgtcgtccggggcttcggcgccaccaccaccgtttttcgacga

SEQ ID NO: 139408 - DNA, 480 bp, Zea mays
  Clone ID: MRT4577_58621C.1
ggataagctatcgccgttgctgctgccgcgtccacagaatggggggttacgtgaagactcataagacctatgcgtatttcaaacgtttccaagtgaaattcaagagaaggcgggctggcaagacagactacagggccaggataaggctgattaaccaagactccatcaagttcaacactcctgtaatacgacatttgtaagtgcgagtttactaccgaggacatcactgttcagatcatttatgctaccatagcgggtgatatgtctcttgcttgtgcctactcacatgagttgccacgatatggccttgaagctggtctgaccaattatgcagctgcctactgcactggccttctgttggctcgccgagtgctcaagatccgaggtttggatcaggagtacgagggcaatgttgaggccactggtgaggacttctctgttgagccagctgatgagaggaggcctttccgtgctctcttg

SEQ ID NO: 139409 - DNA, 420 bp, Zea mays
  Clone ID: MRT4577_58625C.1
gcacgcatacgcaagctcggaattcggctcgagggcaatccagctaaggatagtctcctttggggcagtgccaggggtagatgctaacccgagacgcgaatgagccccgacgggcctgtctagggcgtgcgacaggatctaggtgccttacacccccgaggcggacgaggcgatcggacctgtcgcacagggccaccgtacgcgcaactatacggcatgaaggcgctggatctcggcgtgctggcgctagtcgcccccgcctgcgtcgtccatcacagctgaggagggaggcggaccgccgctgccttacgccctgggagcacgccctgatgcctgccacgcacgcccgggtgagcaaccggtggaccaccatcgcgcgccatgttaccaggaacaccaacgacgctacatacaaccact

SEQ ID NO: 139410 - DNA, 1342 bp, Zea mays
  Clone ID: MRT4577_58627C.1
cgatgggtacctcgaggccggccgggagactccagtctcctctagccgtctcgcgcgcttcaccttccccaccccgccgccgccatcgcacgcccgcagccgcatccgctatgggtgcgtacaagtacgtctcggagctatggcggaggaagcagtccgatgtgatgcggttcgtgcagcgcgtgcgctgctgggagtacaggcagcagccggccatcgtccgcctcacaaggcccactcgccctgacaaggcgcgccgcctcggctacaaggccaagcagggttatgttgtttaccgtgtccgagttaggcgtggtggcaggaacaggtgctgcgcctaaaggtattgcctatggccagccaaacccccaaggcatcacccacctcccgatccacactgacaagatgtctgaacctgactcgagccctcgtcagccggttgggcatctcgaggccggccgggagcttcagagttcctgactcctcgttcgttctgcgtttcgcgactgagatagccaaccctgcgactgcgtgcgggcgggcgagcgagcaggcagaatggagcgccacgcccagaagcaggcgccgctagtcctcgcgctgtcctgcctcctcctcctcgcccccgccctcgtctccgccgtccccactccaagaagcctgcgcctggggggccagcagcagcacccgccggctctgaagctcacttcttctcagcaggaggcggcgatcgcggcggcgatgaacatgggcaggccgacggcgagggtggccgtggaggtgaacgactaccaaccgtccggccccaacaaccgccacgacccacccaagggcccctgaagagcttgttgaacggcgctcggctggacgtggacgacccaataatgcttctccttcgttgttgtcatctttaccagcagtatatatagagtgctttgctagtgctcttgtattctaccccaccagtagagattaaggatttaaggtagacacaaagttacctagttatatttgtacactggccgataggaacttggaagcacatcggtagtttgtgttgttcttaggttgccgttcgtcagaactgcatgcagatcgatttcatctcctgctgcagctgcaggtgtcgatacagcacctgcagcagatcgagattgttcagcttaattattctgttcctaaaaaaaaaaaaaaaaaagcatagcagatcgatttgcatctcctgcagcaggtgccggtacagtgtaccagcagattgagattgtccagcttgttagttcgaaaaaaaaaaaaaaaatatacttctatatatcatactagtatatccatcagcaaaagcagc

SEQ ID NO: 139411 - DNA, 705 bp, Zea mays
  Clone ID: MRT4577_58628C.1
ggggggtacgcgccccccccgcgagtttttttttccctttttttttttttttttttttttttttttttttttttttttttttttttttttttttaaaaaaaaaaaaactcctttaattggatttttgggccaagaggctggaccggtccgggaaaaccacccccttttcccggggaagcccggggttaaaaaccccccacggcttgttggaaaaaaccttgtttgcaaaacttgcccggcctttttttttatttttaccacgggttggttgtttttttttttttttaaggtttgtttttggaacccagaatgggcttcctcccctttttttaaaaaaggggttaccccccccaaaggggggcttccttcctttggaaaagggccgggttttacccctttttttgggggcttgcccccaaaaaaaaattaaaatctccgggttttttccccactggtcaaccggacttttttttttgtttacttagggccggaaaaacctgaaaaaaaaaaattccggggaaaaaaaaaaggggttttccggcttcgccgggggttttcaagaaccactttccaaaaaaattaggggcccaattttttttggccgggggggggaggccccccagccgtttaaaggcgggccccccaaaatttcccggtggagggggccccctttaatccacctttgtggtttcccggggggggggg

SEQ ID NO: 139412 - DNA, 385 bp, Zea mays
  Clone ID: MRT4577_5862C.1
ggacagcctaacctttttgggttcacaagaggaaaaatttacaaacaggttagccagaatccacatccagttttttttgcccaaaaacgatgttttataaggggtcccaaagggacccaaaaaaagggcccctttttaaaaattttcaagggaagaaagctttttaggggtttaccggttttagggggacaaattttgtttttgggagatttggggggagctgaactccggggtaaaagcccctccctggaaacatacactccgggctggtcccaggtggattgacctcacaatggcgggccttttgggctcccggatcggggggcctactttgccatacttgggtggtcaagtcagaatgataatttgggcttactttacccgg

SEQ ID NO: 139413 - DNA, 1842 bp, Zea mays
  Clone ID: MRT4577_58630C.1
attgggtacctcgaggccggccgggcttccattcacccgcagctcccatcctctcgcccgccaggagaagcagccgccgttgctgctgccgcgtccacagaatggggggtttcgtgaagacccataagaccaatgcgtatttcaaacgtttccaagtgaaattcaagagaaggcgggctggcaagacagactacagggccaggataaggctgattaaccaagacaaaaacaagtacaacacacccaaatacagatttgttgtgcgatttaccaacaaggacatcactgcacaaatcatatctgctagtatagcgggtgatatggttcttgcttctgcctactctcatgagttgccacgatatggtcttgaagttggtctgaccaactatgcagctgcctactgcactggacttctgttggctcgccgtgtgctcaagatccgtggtttggacaaggagtatgagggcaatgttgaggccactggtgaggacttctctgttgagccagctgatgagaggaggcctttccgtgctctcttggatgttggccttatcaggactacaacagggaaccgtgtctttggtgccctcaagggagctttggatgggggcctggatattcctcacagcgagaagaggtttgctggattatctttctcttagactatctgccgctccagcctttcgctagggtttatccaccggcggcgcgcgcgacggcggcaagatggtgcagcgtctgacctaccgcaagcggcacagctatgccacgaagtccaaccagacgcgggtcgtcaagacccctggtggcaagctcgtgtaccagtacaccaagaagagagccagcgggcccaagtgtcccgtgaccgggaagaagatccagggcattccccatctgaggccagctgagtacaaaaggtccaggttgtctaggaaccgcagaactgtgaaccgtccctatggggggggcgggcctctttctcttagactatctgccgctccagcctttcgctagggtttatccaccggcggcgcgcgcgacggcggcaagatggtgcagcgtctgacctaccgcaagcggcacagctatgccacgaagtccaaccagacgcgggtcgtcaagacccctggtggcaagctcgtgtaccagtacaccaagaagagagccagcgggcccaagtgtcccgtgaccgggaagaagatccagggcattccccatctgaggccagctgagtacaaaaggtccaggttgtctaggaaccgcagaactgtgaaccgtccctatgggggagtactatctggaactgcagttagagaaaggatcatccgtgctttcctggttgaagagcagaagattgtcaagaaggtgttgaaattacagaagaccaaagacaagacttcctcaaaaaagtaactctgaaacagaagtgagccactcttctgcagcaagggaagacatttttgtcgacagttattatcaatggcttagtctcttctagctgttctattgttcttgtatcttgagcggacaactggtttctagggcaccttgaaatctgtctacgagatctctaagattatgagatgacatatgaccccctattgcttttgttcactttgctaaaactgaaagtccgagttcacatgagttgggcatcagttggtgtttatttcctgcttgttgggtcttgcgtctgaattgggaatcagtttgtgtttatttcctacttgttgcatttagttcttattccaatttgtctgactgtgaaaataagttgcaatatgtttcatcgtgactagagtcagtgggactccgttgggcatcagttggtgtttaaaataa

SEQ ID NO: 139414 - DNA, 1710 bp, Zea mays
  Clone ID: MRT4577_58632C.1
gtaccctcgagctcgccggaaatcgcgcacgctccccagtccccacactccccatccaatccgcgcacaccaagcccccaatctcggccgccactcgctgactagctgctccggcaacagtcccccccgaggtacgagggtgcgaccgcggcatggacacgctcccagaaggcgtcgtgcagcacatcctctcgcagctcagcaacgcccgcgacgtggccggctgcgccgccgtcgcccgctgctggcgcgactgtgtggccttccttccgtcgctctattttccgcggggcgcctttgaggccttggccggcggaccggcgtcggccgtggccttcgccgacgacgccatcggtcggatggtcgacgccgccgcgcgcctcgaggagctcgtcgtgtactgccccttctccgcgtccctgctcccgcactggctcgcggcgcgggccgccacgctgcgcgtgctcgagctacggatggactccgccgccgctgacaagtcggggcacctgaatctcgattctatcggggtggccgcgggcctcgaggagctcaggctgtgggggctcacgatgacgcgcgcccccgcgtggggccggatggagcggctccgcgtgctggagatcgtcagcgccatcctggtagacgcagcggtcaacgacgtcctcgccgcctgccccaacctcaccgacctctcgctgctcgggtgccagtgcgacggagaggcggtcatctcgctagcctcgctcgagcggtgccggctcgacttcctcggctctggcaactcctccctcaggttcgccgcgccccgcgtcgagtcccttgaggtccagggtttctcatttatctatctgcaaggtggcaaccgtctcaaacatctcacaatctccaagaacactggtagtgtgcatcatgtcgagatggggaagctcccggagctggaccagctctcgctgcgcggcgtccagtggagctggggcgccatcagctcggtgctgcagtgcgctagcgaggtgaagcacctggtgatgaaggtcgaattctccggtgattatgacacgctgcagccgtttccggagatcgacctcgtcgaattcttcaacagccacccgaagctgcgcaagttcgaggtccacggcgccatgttcgcggcgctgagtcaggaaaacagcctgaagaatttggattcaaggttcgtgatacctttcttggagcaggtcgtggtcaccgtgcggtcatctctcaatgctaagcagaagctgaacaccctcaagtccgttgtcaggtacagcgtgaggctaagaaggatgatcattaggatctcgcagatgaagaattgccatgctgctggagatgatttctttgaggagatttgcaagttcacttacatgaacagtgggacagtgtgcatagagtagaggtgttgctgcatttgccattcttgaagtgatttaacactaaatcaaggcagtttttacccatgctgtttgcttaggacagtttactggataattcattgtttgttttgttgttcaccgagcttgaatgtatcctgcacttcaggcttgaaatcgtttggttctatttgtcactagtctaagttttgcgcctgttaactgcactggtaataagtggctttggtttgttgctgttctttgatccaagcaatttttcccatttggtacaatctagtttgatataataagaaat

SEQ ID NO: 139415 - DNA, 419 bp, Zea mays
  Clone ID: MRT4577_58633C.1
aaccgaatcacttcactctctctaatcaaaaagcttttaacctcagccgttaaatctttctccgatcatgccgaccagaaacatcgccattggtggagtccaagaagaggtctatcaccccaacgcacttatggcggcgctcgctgagtttatctcgactttgatcttcgtcttcgccggctcaggctccggaattgctttcaataagatcactgacaatggagcaaccactccttccggcctcgtcgacgctgccttagctcatgccttcggtctctttgtcgctgtctctgtaggcgctaacatttccggtggacacgttaaccctgccgttaccttctgtgtcttactcggtggtaacatcactctcctccgtggtattctctactggattgctcagcttcttggctccgtcgccg

SEQ ID NO: 139416 - DNA, 706 bp, Zea mays
  Clone ID: MRT4577_58634C.1
gccggccgggttgcgaatctctcaagcctatcacactgctccattctctaccgccgccgatcccttcactggctcccgaagcgctgaccgtaaataacagacgcacataaatgtccacggcccggatatcggtatctatctcaactcaacgaactcttgagacaaggggcgtgagtgcgaacgccacaagataattgacagataccaacgcaaccgcaccacggcctcagacgtcgccttcaccgactccaagcgcctcaaccaagatcttcacactaaccaatgactcatgaaacccgcttgcaccggcgttgatgacaaccaacccgacctcagaacgcacactgatgctgctgtgccagtgatataaagctgcgacctcttcaacgactactctgggactgctgacaatactacgattcgtcgtccagtctcatcgtcaactcaattaccgtgcacttgaagacatctccactatggtccatattctaacgcgtgagaatgctgaagcttactctgctagacgatctacaatgctgggaccccacatcctgcctacttcaatgtgtcaaatagcaacgccacaaacgatactagagtgactggtggccccagtgtgttgtctatcatcaaataggcaacagctgcagctatcgcctatgccatgtgaaacaacgccaacaatgttgatgagaacaatgacctc

SEQ ID NO: 139417 - DNA, 495 bp, Zea mays
  Clone ID: MRT4577_58635C.1
gcggggggggggggttttttttttttttttttttttttttttttacctttcctttcttttttttttaaaacctacccccgcggcccttgggaaaggcaaaatccaacccacaggcggttcttttttggggatccccccccccaccccgggggggggggggaaatttcaaacccgtcacctgggccaacaagttatacgcccaaaacatcaaacaaaaaaccagccgggcccaaaaagggaaaaacctggggtgcctaaggaggggcccaacgcccattaatcgggggggaaacccggcccgccttccggttgaaaaaaccggccaccccccgggaaaaaggaattggccaacccgccgggaaaagcggttcgcgtatagggaccctttccgcttgctcgttcactgacccccagcgctctgaccttccgctggggcgggcggtcttttctccacaaaaggcggggataccgctttccacaacaaggggggaaaac

SEQ ID NO: 139418 - DNA, 772 bp, Zea mays
  unsure (1)..(772): unsure at all n locations
  Clone ID: MRT4577_58636C.1
aggccggccggggccataacaatagcatactgcgacagggcagacatacggtggtgtgccagtgatccatcaagaagctaagccatggcggcggcgctgcgggcgctggcggtgctgctgtgggtggcggcggcgtaccctgtggtgttccgggcgcggcccgtgcaggcgctggcggccaactggggcacccgcgcgctgcacccgctgccgggggacatcaccgtacgcctcctgcgggacaacggcttcgacaaggtgaagctgttcgaggcggacccgccggcgctcagggcgctgggtcactcagggatccaggtcatgctgggcctccccaacgagctgctgggctccgtggccgccagcgtgaccgccgccgagcagtgggtgatccagaacgtctccacctacgtctccaagtacggcgtggacatccgctacgtggccgtcggcaacgagccgttcctcaagtcgtacaagggcaagttcgaggccgccacgctgcccgccgtgcagaacgtgcaggccgcgctcgtcaaggcgggcctcgccaggcaggtgcacgtcaccgtcccgctcaacgccgacgtctacgagtccggcgacggccgcccttcctcgggcgacttcaggcccgacatcgncggcctcatggtcagcctcgtccgcttcctcctcgacaacggcggcgtgctcaccatcaacatctacccattcctccccctgtacgccgaccccaacttccccgtcgactacgnctactttccgtccc

SEQ ID NO: 139419 - DNA, 587 bp, Zea mays
  Clone ID: MRT4577_58637C.1
gcgttccgaaaaaaaaaaaaaaaaaaaaaaaaaaaaaaaaaaaaaaaaaaaaaaaaaaaaaaaaaaaaaaaaaaaaaaaaaaaaaaaaaaaaaaaaaaaaaaaaaaaaaaaaaaaaaaaaaaaaaaaaaaaaaaaaaaaaaggggggggcggttttagggtttttatttttacttcccggggcttgcaagtttttgttttttttttggggccccttaatttaatttattgggccgtgtttttaaacggtggggttgggaaaaacctggggtttcccaattttattggctttggagaaaatccctttttgcccggtggggttattgggaaaggggcccgaccggttggcttttccaaaattttgcccaccttgatgggaaatggggcccccccttttgggggccttttaagcggggggggtggggggtttccccccgggtggcccttttcttttgcaaggcctttaggccccttttttttgttttttttccttttttttttggcaattttggcgggttttcccggtaaatttttaattggggggttcctttgggggttctttaataggttttaaggggccttgccccc

SEQ ID NO: 139420 - DNA, 377 bp, Zea mays
  Clone ID: MRT4577_58638C.1
cgatgagatcgaggtctgcagcggcaggtactcggtcgactcgtcaccccgccgcgacgacgtgacccgacgaacggccgttcccctctaccgctacgccaccatgcctgggcagcagagctactactccactgatgatggctactcggacttgagctcttcgcgtgacacggcactggcaagagctgagggacagccggtgggacgggcgcaggcacgggtaggtgagtatgctgatgaagagtacccggtattttcaggcaccttcgaattttctagccaggtgggagggccgaacaatggggggacctcccaggggggggatgggtcagaggacttccatactggtccagcccggagagaatcgaacaatttgg

SEQ ID NO: 139421 - DNA, 598 bp, Zea mays
  Clone ID: MRT4577_58639C.1
attcgacgccatgcgctctctctccgtctcgccgctctctccgcgagctccctatcctacacaactcgtccgggaaaaatgccctccgaggcgtcgacggagccggaggcctagacgatgctccgctccgcccagcgcgcggaattctgccgccccgagaggaaggacaatggtctcttcctcacgaagaatcccatcgacagccgcatgcatcatcttcaccgcgccaagcttcaccccgaggaactcccatgacctccagaagaacctgggcagcttaagcgcgtaggcccgcttgaatcgcgggcttctatgtgaaccctggagcatggctgctctttgtggaccacatccaaagtgttaatgacgtgcaccctaacaccacaacagatcttgcatcttcatcgtcgattgatgccagatctttcatgtggtgtgttcatctatagtgacaacgctactattgctgtgctactgatgcctgtagcctatggtgcataggagcacccgcccttagctgagagactctctccatcatgtacaagactggctactgtttcagctgaacaagtgatatctataccttctgtatcttctg

SEQ ID NO: 139422 - DNA, 283 bp, Zea mays
  Clone ID: MRT4577_5863C.1
aatgattggtactagagcgcgagcggccgcgcttgatttgtctccatacttccccgactgccgacggaactcgtgagaaaagtgccactgagaggtctggatccacaacagggggccaggtacccaagccgaccatgtgtatacgatcggagacgactcaggagcagaccctacatgctgtaaagctatacgaggaggctgcatgtgaaagcatatatgccagctggaagacagcttgcattgcataaaaggggtcgagcctgaagatcattatggccttcag

SEQ ID NO: 139423 - DNA, 635 bp, Zea mays
  Clone ID: MRT4577_58640C.1
gggtaccctccaggctcgccggtggggcccaggatagtcggcgaggtctatgcggcggacgactggggacctggcgcgctaccgtgacataacgagagatgcccctgctctacagcaactggctcatggagcactctaagatggtgcctcccaccgtctacgcttgtacaagcactctgtgtgtctatcgctacagaaccagagggcgacctatatatgaagaagctgcaattgtaacttatatctcagtccctgctgggagattcaaacccaaactcttctagcacactcaaaacctacattactgctgagcagaacaagcgactagtacaaccggaaagcccgctagatcgcgaagcatagctatacagtccactagtgcataaggatgctagtcgagcccgataggggcacagtaagaaagagcgaacacaaacacacaacacttcttgggttaatggatcggcaggcctggaaaaacaatggagaaccacagtgcttgattcgtgctctgcattcgcttgtttggccaaataaagactcttgattgatcatgtaggggagtgatgtaatgtgtcgtaagatgaaacagctctatctgagtcgagcagatcatgccgatccgcggcatctcc

SEQ ID NO: 139424 - DNA, 1822 bp, Zea mays
  Clone ID: MRT4577_58641C.1
aaaccaaactctgtatgatccttgcaagaatgtgaaggagccagaggaggccacaacagtgcaaccaattaacaaaaaccgcaaacgataagtcgagaagcacagactaattaacacaggagagagagagaaagagagagagacgccatagcagaccagtgcacgcacacgcctccgaactccgaagacgctacgagccgtcgctgggaggactcacgctctcctgtcgctcaccgccgccgccgtgctgctggtgctgacgagagccgccttccgctccgttctgctctggcgcagcgtccgagacggcactatgtgctcggtacgcgttcagcgcggcgaggatccccatgtggccctcgccgccgccgccgccgctggcactgccactactgtcgttgccggcgccgcccacgggcacggggccgccgagcccgagctgctgcccaccaccggggaccagcgccatgggcgccgcggggaagttcatgaaatgtagcccactcggcacgccgcggtacacgggtcgccgcgccgccgccgccgccgcttgctggctgcgggaacgtccagatcgactcgttggcgttgctgccgccaccgccagccgctgcggcagcttgagcgttgctgctcgcgctcggcaccatccacacggcgcctggcatttggctctgcgtcgtgtacccggccatctgctgctgctggtggtattgctgctgatgctgctgctgcatttcctgctcccacctccgtttcttcgacaggtcggagccggcggcggcagacgacggcgacggcgacacgtcaagaccgacgctgccggagtggaaactcagcagcagaggagacgacgccgaggacgtagcggacggagggtcctcggcggcggcgccgaacccgagtcccactcccacgacgcgctcccacgggtccccccgcgcgccgccgaagcgtgggccggccgcacggaggtgcgctgggatggagaaggaagagcccgaggagcggagagagatgttgagcgaggtgaagttggccgggatggtgcccgtgcccgtggccgccaccaccgcgggcttcgcctgctgcagcagccactcgatcgtctcgccgtccgtcttgtgccccagctcccttgtcagctggaacacccgagccgcgcaaattgcaggcatccggatgcgcctcccgcgcccgtccaccttcgtgtgcctgtccttggaggatgtgcgcttcggcgccgccaccttcttcatctgcatctctcccgacccattagccccagcacccacagcaaccgctggggacgtagagcagggctgttcctctttcttttccagcagctgcaaagggaagttggggcggcgacctccgccggcatctccggtgacgtccatagccgatcaggccatggtatatataaatacacaagacgatgctttctcttcagggacctggagaaatatcggtactaataatggatttgctgacctacgaagtgttcttgtggggctgctgacctgacttggtgtatgacgttgggcggtggactggaggctcggcagcgccgtcagcggtggcgttagagctagcgagagcgaaagagtgacatcaagcaagcaagggcttgtgcttgtggcgcttggcgttggagtcaattatttcttggagagagaaaaagagtgaaagagagagaaacggggagggaggtttgcctgtggtgatcgacactattttatggagttctggttgggtttgtcgacaggccgagtgcgttgcagctaggacgattgccgggggaaggagaagatcggacgcg

SEQ ID NO: 139425 - DNA, 303 bp, Zea mays
  Clone ID: MRT4577_58642C.1
ggacggtgggctggagtcttggacatatggagtcattgagagccagagacagacaacaacctgtaaactggacccttgcgtgacgcgtgagagggaacagaacccgatgaaagcctgtcctgattctgacggatgtaggtacggtccatttatattttctcctctatattcttttcacctgccacgtaaataatctttctttctctatatctctattctagttctctctgaatcaaaccttatacccatcaccaaaatttaatatcattttgttctcagcatccctaacaaaagcaggcgcac

SEQ ID NO: 139426 - DNA, 313 bp, Zea mays
  Clone ID: MRT4577_58643C.1
aaaacaaggggctttttgaccacaagttgcccacacaggacagccctatgagggcaacatatagatttcaaaaccaggaggaaaacaagggttgaaaacgagacttcgggtacgatcgaaccggctggtagctggaacctattaggggggaccttggggaccctctcccccttggcgacagtgggctttgctaaaaccaccccatggccgagcaccttcaaagacccaaactgccttaaggaaaggggcggagcactggaacccctcaattccgacgcctgggctggggctttgacttagcccccgtgccttg

SEQ ID NO: 139427 - DNA, 219 bp, Zea mays
  Clone ID: MRT4577_58644C.1
ttctgcgtagagggcccagtagtctaaaaaggagggttatgttatctctcggtgcgtgttggggatggacccgctgagcttggtcttcgacacgctgaactgctacaatgtaggcatgtgcagctaggggatctctccggtgaaggtgatgcagttgaggcacagccgttcgctgcggatcatcttgttgaaggcatgcgagatcttgacgatgacttg

SEQ ID NO: 139428 - DNA, 510 bp, Zea mays
  Clone ID: MRT4577_58645C.1
ttttttttttttttttttttttttttttttttttttattaatcaaaaaatgttggtctttattcatacactacccttcgtgggggtgctgcaaggaagcataacagacgcatgaaaaacaaaaaataaaaaagagaggacggacagacagacaaaaaagaatggaaacgaggaaaaaaaaaaagggacggaagggacaagcaaaaacaaccgacaaaaaaaaaaaaagaaatccgggagtacaaaaaacaaaaaaagaacgcacgcgcgccgtagacagacagccaaccaagagcagacaaaaaaaaaaaaaaggaacgatagacagatagggaaggcagagggcctaccaaaaaaaaaaaaatccatgcatgggtcccagccgggggccgaacccaacccccgcccgcgttagtcccctacctaccgcgcccgccgtccctgctccccttccccagccagcctccctctttcagccaccccaaagaaaggccttctagccaaccaactt

SEQ ID NO: 139429 - DNA, 703 bp, Zea mays
  Clone ID: MRT4577_58646C.1
cattggtacctcgagccggccgggatctactcttgatggttatgagcgatttcgtttgttactcgtctcatcggacaggcatttcggtcccaaaaaaagggtcaagctcctatcagtgttcatcatttggaatctttgagaactacaagtttgtagcggctcatttatctcttcaaaatcctaccagcgcgtggtagtaaaagatagatgatactttaggcgatggcctacttatataatacactttgatgtcggctgcggtgtttttttgcgttctccattcacttagattagaatatcttgtcgtggcggacatattgcgtcaatataatattactggtatgtacctgattcacggcatttcttatgcatgtactaacaatgttatttacttttattttagttgcctgtccggatgactcttgctaacgaacaacactatatatctccaccactagcactgatggctacaccgccccggagcatcttaactcgtgagagggcaggggaacatgcagcagcagcataactggtcacggtgcagaacgcctagatccaggcatttcactatacagcagcggagaaggacaacgataaatgacaggtatgcatcttgactacctcgctgaggtcgatggctagctggatctaatgtacgtttgcttgtatcgctactatgactgctgttgatcgaaggagcaag

SEQ ID NO: 139430 - DNA, 9869 bp, Zea mays
  Clone ID: MRT4577_58647C.1
ggccgccccttttttttttttttttttgcaataaagcataaaaccatacatgtcacaatgttaaattattacatcaccatcatcatcatcggagttttgcaaaagtaaccatcattgttcgaagtgcagcggaataaaactaacggtcattaaacagagagatggggaagcctgtcccatcactcctcatgctcctccccggccgaggcagggtcccactcaacagtccaacccggtggcagggtggacggccaagttatcccagcaaccatctcctccagagaaccttccaaagcagtggcaggcaggtcctctggtgcaggctcgggtgctggatctggggctacctcctgagcagctccttgctccggcacgaggatgtactctccgtcagcaagattacagtcgactcctttgggtagaaagtcggggaagcgagagcgtagaaaatcctcggtctcccatgtagcttcttctgctgaatggtgactccactgaaccttgtacattctgaccgaccttgcccgagttgatctttccttttgatctagcaccttgacggggtactcttggtaggataaatctggttctatctcaatgtctggttctgggagtacttcagtgggtagacgaacgcatttccgcagctgagatacatggaacacattatgaactgctgacatgtgaggtggcaattccacttgataggctacggttccacaagcttccttgatcttgtagggtccaatatagcgaggagctaacttgcctttgatcccgaatctctgaacacccttggtgggtgataccttaaggtagacatgatctcccacctcaaactgtagaggcttccgcctcttatcatgatagctcctttgcctggcctgagcagcttctaagttcttggtaataaccctgacctttgcctctgcctcgagtaccaagtctggcccaaaaatttctctttctcctgcttgagaccaattcagtggggtcctacaccttctcccatacaatgcctcaaaaggtgccatcttcaaactggactgatagctgttattgtaagaaaactccaccaaagacagacacttgtcccaatcctttccataatgtagtgcacatgctcgcaacatgtcttccaaaatttgattcaccctttctgtctggccatctgtttgggggtgatatgctgagcttcggatgacatgggtcccaagtgactcttgcaattgctcccaaaatcgtgccacaaatgatgctcccctgtcagatataatggtcttgggaataccatgcaacctcactatttgatcaacataaagttcagcgtacttctctgccctgtgggtggtatgcactggcaagaaatgagcagtcttggtcaacctgtccacgataacccaaatagaatcatggtgcctggaagtattgggtaatcctactatgaagtccatgcaaatatcctcccatttccaagatggtatgggaaggggttgtaaagggcctgctgccttcaagtgactagcctttattctctggcaagtatcacactcggatatgtacttggcaatttcccttttcattctagtccaccaatataaggatctgaggtcatggtacatcttgttgctaccagggtgcatggagaattttgaaaggtgagcttcatctagtattttccttctaagctcagggtccttaggaacaaccaatcgatctccaaaccatagaattcccttgctgtcctgtcggaaacatttgtatttttctgccttctgcttgatcatatccctgataacctgaacacccttatcctcaacctgtgccctgattatctgctcttgcaatgtgggttccactgagatatagcttaggttacccgaagaaacaacttccaagttcagcttgcacaactcatcacacagggtggtcactcccacatccatgctcatacaattacactgggcctttctgctcaaggcatctgccacaacattggccttccttggatggtaatgcacttccaaatcataatccttgatcaactctaaccacctcctttgcctcatgtttagatctgcctgagtgaagatgtatttgagactcttgtgatcagtgtagatgttacagtgagctcccatcaggtagtgtctccatatcttaagagcatgaactacaactgccaattctagatcatgtgtagggtagttctgctcatggggcctgagtgcccgggaagcataagcaatcactctgttctcttgcatcaagacacatcccaaaccagtaccagaagcatcacaataaacttcaaatggcttggtgttgtcaggttgagctagcactggggctgttgtcaaatgctgcctcaaggtatggaaggcatcttcacacttttggctccactcaaatttgactcccttctttaacagttcagtcattggtttggcaatcctggagaaatccggaataaatcgtcgataataccctgccagtcccagaaaactccgaatctgcttcactgtagtcgggggtttccaatccattacctcttgtaccttttcaggatcaactgatatcccatcctgagagattgtgtgacccaagaatttaatctccttcagccaaaactcacacttagacaacttagcataaagatgatgatcgcgcagtcgttgaagcacaacatgcaggtgctcagtatgttcgtcttcattcttggaatagaccagaatatcatcaatgaagacgaccacgaacttatccaattctggcataaacactgagttcatcaggtacatgaaataagccggggcattggtcagcccaaaagacatcaccagaaactcatacagtccatatctggtagagaaagccgtcttgggaatatcgctggcacggatcttgatctgatggtatcccgagcgaaggtctatcttggagaataccttggccccaaccaactgatcaaacagaacatcaatgcggggcagtgggtatttgttcttgatagtcaccgcattgagagggcggtagtcaacacacatcctcaaactctcatcctttttcttcacaaataatgctggacatccccatggtgaagtgcttggacgaataaaccccttatccaacaactcttgcaattgcttcttcaattctgccaattccgcgggaggcatcctatagggtctcttggagataggagcagtcccgggttgcaattcgatggcgaactcaatatctcggtcaggtggcatccctggcaattcgtctgggaaaacatctgggtagtcgcagaccactgggatcttttccaccggggattctatcagaacaaaggcacaagatcgggtacaaccctggttgggtaaatacaacacagtctcgccataagcaggggaatgaatttcaatggctctggctgcaatgtccaatactgcctgatgcctggtcaaccagtcagctcccaaaataatatccacactatccaatcctaagatatgaagggtggttctaatcaccagactaccaaattttataggcacttgcctgttgatttggtaagtggcaactctgcctcctggcgttgaaattgtaatgcccccatcggtatggtgaaagggcaactggcatttggcactaaacttagtactgataaaactatgcgatgcacccgaatcaaataaaataatcgcaggataattcaaaactgtaaagataccggtcatgacgggtgctccctctgggatatcaaccatggtggtgaagtttagtctgccctgcctcacttgcaccttctgtctcttgccttggttctgattgacattctgcccctgcctctgctggttcctggggcaattcttggcataatgcccagtgttgccacaagtgaagcacctgttgtcattggcttggcggtactgctgctgattattcctctgagctggaaactggttgcggttgggtgcctgctgctgctgctgctgaggtcggattacccatcgcccttgctgctgctggggtcccctgccctgggtgtcggatacaatcctgaagcgctgtggctgagctgagggtcctgccacgggggtcttcctcttcttctctgcctgcctagctgtaatgcagtcctcttgggagatagccatgttgaccaactcattgtagctgttggccctgacggtgttgagacgatcccggagcttagtgctgagcccccttctgaatctgtccctcttcttctcatctgtatcagcatgatatcccgcatactggcacaagtcattaaaggcctgggcgtactgcaacactgtcctgttgccctgagtgagtgccaagaactcattgagcttcctgtccatgatcccggctggtatatggtgtcctctaaaagctgccttaaactccctccactccacctctcggtcctctggctgcatagcaagaaagtgatcccaccaagtccttgcaggtccacgaagctgctgggtggcgaacctgactttggtgacctctgagcaaactccatggagcagtggaaatttggattccaccactcgcagccacacatctgcgtcaagtgggtcctccgcccttgtgaacagtggaggctgggtgctgaggaattcctgataggtggccgccgcggggtgacgctggtggtctccaccaccataatgctggggtggtggctgacgttgagccagctgcctcagaatctcattctgctgagccatgagctcctgcagagtgggaggtgggggcggcggtggaacgtgctcgttctggccacgacgctgcctcccggccatctgaaaaatccacatacttattgactcgggggaaggtggtcttcccgagccagcagtgtccacactggaggcaggctcatctcctccctcaatgtcgacgtcctcgttggcctcctggtcctggatctcctggtggtgcatgtccaggtgctcgttagcatcctcaagctcctgctgcacattgtggagctggttttcctgtagatctttttctaccaactctgaggataggtcgaccacgaagtcctctcggctgtcgagggtgagcttagtagtctgagcgaggttagcaagatgtgccatagcatcgctctgcagggcctgtaggcggtacagtgcgctcatgcacatctccaggggatggtagccgcaaaaagtcgtcagagtcttcgtagctaccgcctcggtggtgtcgtccgtcctgaatccaatggcctcagagtcaagggaacgccaactcggctgaagggggtgtgcctccaatgtcagccagactcggcaacgtggcacccgatgatcctcgtacagctgcaccgtgtacaaaggggcatagggtagccggtggagttgagcacctcccacaagatggaagggaaaccctcgtgagaaaggaaatcggaactgaaacgagtgtctcctccactggcgggggtgggtgaagtcatctggtggcaaggtggacggccaagttatcctagcaaccatctcctccagagaaccggggcttgccttccaaagcagtggcaggcaggtcctctggtgcaggctcgggtgctggatctgggctacctcctgagcagctccttgctccggcatgaggatgtactctccgtcagcaagattacagtcgactcctttgggtagaaagtcggggaagcgagagcgtagaaaatcctcagtctcccatgtagcttcttctgctgaatggtgactccactgaaccttatacattctgaccgaccttgcccgagttgatctttccttctgatctaataccttgacgcggtactcttggtaggacaagtctggttctatctcaatgtctggttctggtagcacttcagtgggtaggcgaacgcatttccgcagttgagatacatggaacacattgtgaactgacgacatgtgaggtggtaattccacttgataggctacgggtccacaagcttccttgatctcgtagggtccaatatagcgaggagctaacttgcccttgatcccgaatctctgaacacccttggtgggtgataccttaagatagacgtgatctcccacctcaaactgtagaggcttccgcctcttatcatgatagctcttttgcctggcctgagcagcttccaagttcttggtaataactctgacttttgcctctgcctcgagtaccaagtctggcccaaaaatttccctttctcctgcttgagaccaatttagtggggtcctacaccttctcccatataatgcctcaaaaggtgccatcttcagactggactgatagctattattgtaagaaaactctgccaaagacagacacttgtcccaatccttcccataatgtagtgcgcatgctcgcaacatgtcttccaaaatctgattcaccctttccgtttggccatctgtttgagggtgatatgctgagcttcggatgacatgggtcccaagtgattcttgcaatttctcccaaaagcgtgccacaaacagtgctcctctgtcagatataatggtctttggaataccatgcagtcttactatctgaacacccttatcctcgacctgtgccctgactatctgttcttgcaatgtgggctccaccgagatatagcttaggtcacccgaagaaacaacttccaggttcaatctgcacaactcatcacacatggtggtaacccctacatccatgctcacacaattgcactgggcctttctgctcaaggcatctgccacaacattggccttccctgggtggtaatgcacctccaaatcgtagtccttgatcaattctaaccatctcctttgcctcatgttcaggtctgcctgagtgaagatgtatttgagactcttgtgatcaatgtagatgttacagtgagctcccatcaagtagtgtctccatatctttagagcatgaactacagctgccaattctagatcatgtgtagggtagttctgctcatggggcctgagtgcccaggaagcataagcaatcactctgttctcttgcatcaagacacatcccaaaccagtaccagaagcatcacaataaacttcaaatggcttggtgttgtcaggttgggccagcactggggctgttgtcaaatgctgcctcaaggtatgaaaggcatcttcacacttttggctccactcaaatttgactcccttcttcaacagttcagtcattggcttggcaattctggagaaatccggaataaatcgtcgataataccctgccaatcccagaaaactccgaatctgcttcactgtagtcgggggtttccagtccattacctcttgcaccttctcaggatcaactgatatcccatcctgagaaattgtgtgacccaagaatttaatctccttcagccagaactcacacttagacaacttagcataaagatgatgatcgcgcagtcgttgaagcacaatgtgcaggtgctcagtatgtccgtcctcattcttggaatagaccaaaatatcatcaatgaaaacgaccacgaacttgtccaattctggcataaacactgagttcatcaggtacatgaaataagccggggcattggtcagcccaaaagacatcaccagaaactcatatagtccatatctggtagagaaagctgtcttgggaatatcgctagcgcggatcttgatctgatggtatcctgagcgaaggtctatcctggagaataccttggctccaaccaactgatcaaacagaacatcaatgcggggcagcgggtatttgttctttatagtcactgcattgagagggcggtagttaacacacatcctcaaactctcatcctttttcttcacaaataatgctggacatccccatggtgaagtgcttggacgaataaaccccttgtccaacaactcttgcaattgtttcttcaattccgccaattccgcgggaggcatcctatagggtctcttggagataggagcggtcccgggttgcaattcgatggcgaactcaatatctcggtcaggtggcatccctggcaattcatccgggaaaacatccagatagtcacagaccactgggatcttttccactggggattctaacataacaaaggcacaagaacgggtgcatccttgcaccttctgcctcttgccttggttctgattagcattctgcccctgcctctgctggttcctggggcaattcttggcataatgcccagtgttgccacaagtgaagcacctgttatcatttgcctggcggtactgctgctgctggttattcctctgagctggaaactggttgcggttgggtgcctgctgctgctgaggtcggattacccatcgcccttgctgttgctggggccccctgcccaactcattgtagctgttggccctgacggtgttgagacgatcccggagcttagtgctgagcccccttctgaatctgtccctcttcttctcatctgtatccgcatgatatcccgcgtactggcacaagtcattaaaggcctgggcatactgcaacactgtcctgttgccctgagtgagtgccaataactcattgagcttcctgtccatgatcccggctggtatatggtgccctctaaaagctgccttgaactccctccactccacctctcggtcctctggctgcatagcaagaaaatgatcccaccaagtccttgcaggcccgcgaagctgctgggtggcgaacctgactttggtgacctctgagcaaactccatggagcagtgggaatttggattccaccactcgcagccacacatctgcgtcaagtgggtcctccgcccttgtgaacaatggaggctgggtgctaaggaattcctgataggtggccgccgcggggtgacgttggtggtctccaccaccataatgctgaggtggtggctgacgttgagccagctgcctcaggatctcattctgctgagccatgagctcctgcagagtgggaggtggtggcggcggtggaggaacgcgctcgttctggccacgatgctgcctcccggccatactcgactcgggggaaggtggtcttcccgagccagcagtgtccacactggaggcaggctcatctcctccctcaatgtcgacgtcctcgttggcctcctggtcctggatctcctggtgatgcatgtccaggtgctcgttagcctcagcaagctgctgctgagtgttaatgagctgatcctctaggacctcaatggtgttctccctggtgcctaccagctcctccaactcctgaatatcagtggatagctgctccacctgcaaatccttctccaccatctcttgagataaatcaaccacgagctcctctctgttatccaacgtgatctttgttgcctccagtagtgccatcagatgggacattgcctcaccgcgcatcacctgtagacggtacagagcattcatgcaccgtactgtcaagtgcgcagtctgacctgggtagatagcccagatgtccttggcatgctccacccgatccttccacattgggtcgtcctccttctccgcggggaacaagccaatggggtgggtagccagctccaagggatggaatccgcagaaagtagtcaatccatgcagagcgatcgcctcgatcgtgtcctctgcccggtatccgaaagactcggagtccaaagagcgccatcctggctgcaggggatgaggctccaaagtcatcctcaccctacagcgaggcactcggtgcttctcgaactgctgcaccgcgtactgagggggtgtcgtgtatccagccccctgaagtacctcccacaaaatgcggggaaagccctctcgtgcaagtccgtcagtgtgggtcagtgcatttccgtcatcggaggatccgtgggaagtcat

SEQ ID NO: 139431 - DNA, 314 bp, Zea mays
  unsure (1)..(314): unsure at all n locations
  Clone ID: MRT4577_58648C.1
gaattttgaaaaggtgacggaaatagtgaggagcggagaacaccggaatgatccatcctctcgtgctatccctgccctcccccgctataatatcgcgnctcgtcgccatcgtcaccacaccaccactccctcactgccctctcactcncgatccctgcancactaccgcctcctccgcgtcacgcctctcgtcgcctcttgcggcgaccggcggcggatcgtcgngcgaaggcaaccatngggtcttcaccgtgagaagaagnacaccttcgaggcnaangcggtactcggctcgnagaagtatgtatcacaat

SEQ ID NO: 139432 - DNA, 4335 bp, Zea mays
  Clone ID: MRT4577_58649C.1
atggccgggaggcagcgtcgtggccagaacgagcgcgttcctccaccgccaccaccacctcccactctgcaggagctcatggctcagcagaatgagatcctgaggcagctggctcaacgtcagccaccacctcagcattatggtggtggggaccaccaacgtcaccccgcggcggccacctatcaggaattcctcagcacccagcctccactattcacaagggcggaggacccacttgacgcagatgtatggctgcgagtggtggaatccaaattcccactactccatggagtttgctcagagatcaccaaagtcaggttcgccacccagcagcttcgcggacctgcaaggacttggtgggatcattttcttgctatgcagccagaggaccgagaggtggagtggagagagtttaaggcagcttttagaggacaccatatacctgccgggatcatggaccggaaactcaatgagttcttggcactcactcagggcaacaggacagtgttgcagtatgcccaggcctttaatgacttgtgccagtacgcgggatatcatgcagatacagatgagaagaagagggacagattcagaagggggctcagcactaagctccgggatcgtctcaacaccgtcagggccaacagctacaatgagttggtcaacatggctatctcccaggaggactgcattacagctaggcaggcagagaagaagaggaagacccctgtggcaggaccttcagctcagccacaacgcttcaggattgtgtccgacacccaaggcagggggccccagcagcagcaagggcgatgggtaatccgacctcagcaacagcagcagcaggcacccaaccgcaatcaatttccagcacagcggaataatcagcagcagcagtaccgccaagccaatgacaacaggtgcttcacttgtggcaacactgggcattatgccaagaattgccccaggaaccagcagaggcaggggcagaatgcaaatcagaaccaagggaagaggcagaaggtgcaagtaaggcaaggcaggctgaacttcaccaccatggctgacattccagagggagcacccatcttgactggtatctttacagttttgaattatcctgctattgttctttttgattctggtgcatcacacagttttatcagtaccaaattttgtgccaagtgccaattgccttttcaccacaccaatgggggtattacaatctcaacaccaggaggcagggttgcctcctatcagatctgtaggcacgtaccaattaagctgggtagtctcatattcaaaactaccctaatgataatggggttggatagtgtggatattatattgggagctgactggttgaccaggcaccaagcagttatggatattgcagccagagccattgaggtgcactcaccaacttgcggtgagaccacactgtatttgcgtgaccggggttgtacccgaccttgtgcttttgttatgttagaatccccagtggaaaagatcccagtggtctatgactatccggatgtttttccggatgaattgccaggaatgccacctgaccgagatattgagttcgccatcgaattgcaacccgggactgctcctatctccaagagaccttataggatgcctcccgcggaattggcagaattaaagaaacaattgcaagagttgttggacaaggggtttattcgtccaagcacttcaccatggggatgtccagcattatttgtgaagaaaaaggatgagagtttgaggatgtgtgttgactaccgtcctctcaatgcggtgactattaagaacaaatacccgctgccccgcattgatgttctgtttgatcagttggttggagccaaggtgttctccaagatagaccttcgctcgggataccatcagatcaagatccgtgccagcgacattcccaagacggctttctctaccatatatggactgtatgagtttctggtgatgtcttttgggctgaccaatgccccggcctatttcatgtacctgatgaactcagtgtttatgccagaattggataagttcgtggttgttttcattgatgatatactgagactgcgtgatcatcagttgtatgctaagctgagtaagtgtgagttttggctaaaagagatcaaattcttgggtcacacaatttctcaggatgggatatcagttgatcctgagaaggtacaagaggtaatggattggaaacccccgactacagtgaagcagattcggagttttctgggattggcagggtattaccgacgatttattccggatttctccagaattgccaaaccaatgactgaattgttgaagaagggagtcaaatttgagtggagccaaaagtgtgaaggtgcctttcataccttgaggcagcatttgacaacagccccagtgctagctcaacctgacaacaccaagccatttgaagtctattgtgatgcttctggtactggtttgggatgtgtcttgatgcaagagaacagagtgattgcttatgcttcccgggcactcaggccccatgagcagaactaccctacacatgatctagaattggcagctgtagttcatgctcttaagatatggagacactacttgatgggagctcactgtaacatctacactgatcacaagagtctcaagtacattttcactcaggcagatctgaacatgaggcaaaggagatggttagagttgatcaaggattatgatttagaagtgcattaccacccagggaaggcaaatgttgtggcagatgccttgagcagaaaggcccagtgcaattgtgtgagcatggatgtaggagttaccaccctgtgtgatgagttgtgcaagctgaacctggaagttgtttattcgggtaacctaagctatatctcggtggagcccacattgcaagagctgatagtcagggcacaggttgaggataagggtgttcaggttatcaaggatatgatcaagcaaaaggcagagaaatacaagtgtttccgacaggacaacaagggaattctatggtttggagatcgattggttgttcctaaggaccctgagctcagaaagaagatactggacgaagctcacctttccaaattctccatgcaccctggtagcaacaagatgtaccatgatctcagatctctgtattggtggactagaatgaaaagggaaattgccaagtacatatccgagtgtgatacttgccagaggataaaggctagtcacttgaaggcagcaggccctttgcaaccccttcccataccatcttggaaatgggaggacatttgcatggacttcatagtgggattacccaatacctccaggcaccatgattctatttgggttatcgtggacaggttgaccaagactgctcatttcttgccagtgcacaccacccacaagacagagaagtatgctgaaatttatgttgatcagatagtgagattgcatggtattcccaagaccattatatctgacagaggagcactgtttgtggcacgcttttgggaaaaactgcaagaatcacttggaacccaagtaatccgaagctcagcatatcacccacaaacagatggccagaccgaaagggtgaatcagattttggaagacatgttgcgagcatgtgcactacactacgggaaggattgggacaagtgtctgtctttggcagagttttcatacaataacagctaccagtccagtctgaagatggcaccttttgaggctttgtatgggagaaggtgcaggaccccactaaactggtctcaagcaggagaaagggaaatttttgggccagacttggtactcgaggcagaggcaaaggtcagggttcttaccaagaacttagaagctgctcaggccaggcaaaggagctatcatgataggaggcggaagcctctacagtttgtggtgggagatcatgtctaccttaaggtatcacccaccaagggtgtccagagattcgggatcaagggcaagttagctcctcgctacattggaccctatgagatcaaggcaagttgtgggcccgtggcctatcaagtagaattgccacctcacatgtcagcagttcataatgtgttccatgtgtctcagctgcggaaatgcgttcgtctacccactgaagtactaccggagctagacattgagatagaaccagacttgtcttaccaagagtaccccgtcaaggtattagatcaaaaggaaagatcaactcgggcaaggtcggtcagaatgtacaaggttcagtggagtcaccattcagcagaagaagctacatgggagactgaggattttctgctgatagtcgcctag

SEQ ID NO: 139433 - DNA, 273 bp, Zea mays
  Clone ID: MRT4577_5864C.1
tcgcgatctaaaactaatgggagcgcgtgggcaaacacgataggcgagcgcggtggacggacgagtgaactagttctaatcgcgaacaagcaccctttagtttttattttaaaacgaaagccctctctatgaattagggatgcgagagatgacagacgcatatgcatgggacccgcatgcgaacgtgtgagcagcaatcaggagtgagaagggggacagacacaggagcatcatcggagcgaacgcagagaagaacatcgatcagtaggtggt

SEQ ID NO: 139434 - DNA, 570 bp, Zea mays
  Clone ID: MRT4577_58650C.1
gtaatctgttggtacgacgacttggcggccaccaccagcaagtcaccctcctcctctagctcggatcacggggcaggtgccgcactgctcgaggccttcgtcgtggcggtgtccagtgctggtaggtgggcgctggacacgcatgcgatatgagcaacgaactcttaatgtcttgccaacctttggctgccaatacaaatgacccaactgtcgagccggatgaagcatgctaagacactctgccggtggctgacctcaagtgcctgcacggctacataaactgaacgagggtgggcgtttacgacatatacccaaatcccgccatggagatatcgtgcaagtgggagcatagcactcctcaaactgctacttttgtactagccaaggcaaggcaatcacgaaggatgatataatacatagctgcaagtgtctatgattgcttcttcttctgagtgcaagcgagacacacggcggacaggttttttactctatctcatattgttacctatcctatatatgagagagagcagtcttactaaataaaagagcttactgtgggttaactcatca

SEQ ID NO: 139435 - DNA, 5301 bp, Zea mays
  Clone ID: MRT4577_58651C.1
ttatgcataaaaccggggcttgccttccaaagcagtggcaggcaggtcctctggtgcaggctcgggggctggatctggggctacctcctgagcagctccttgctccggcacgaggatgtactctccgtcagcaagattacagtcgactcctttgggtagaaagtcggggaagcgagagcgtagaaaatcctcagtctcccatgtagcttcttctgctgaatggtgactccactgaaccttatacattctgaccgaccttgcccgagttgatctttccttctgatctaataccttgacggggtactcttggtaggacaagtctggttctatctcaatggctggttctggtagcacttcagtgggtaggcgaacgcatttccgcagttgagatacatggaacacattgtgaactgacgacatgtgaggtggtaattccaattgataggccacgggtccacaacttgccttgatctcatagggtccaatgtagcgaggagctaacttgcccttgatcccgaatctctgaacacccttggtgggtgataccttaagatagacatgatctcccacctcaaattgtaggggcttccgcctcttatcatgatagctcctttgcctggcctgagcagcttccaagtttttggtaataaccctgacttttgcctcagcctcgagtactaaatctggcccaaaaatttccctttctcctgcttgagaccaatttagtggggtcctacaccttctcccatatagggcctcaaaaggtgccatcttcagactggattgataactgttattgtaagaaaactccgccaaagacagacacttatcccaatccttcccataatgtagtgcacatgctcgcaacatgtcttccaaaatctgattcaccctttctgtttggccatctgtttgagggtgatatgctgagcttcggatgacatgggtcccaagtgactcttgcaattgctcccaaaatcgtgccacaaatggtgctcctctgtcagatataatggttttgggaataccatgcaaccttattatctgatcaacataaatttcagcgtacttctctgccctgtgggtggtatgcactggcaagaaatgagcagtcttggtcaacctgtccacaataacccaaatagaatcatggtgcctggaggtattgggtaatcccactatgaagtccatacaaatgtcctcccatttccaagatggtatgggaaggggttgcaaagggcctgctgccttcaagtgactagctttaattctctggcaggtgtcacactcggatatgtacttggcaatttctcttttcattctagtccaccaatatagagatctgagatcatggtacatcttgttgctaccagggtgcatggagaatttagagaggtgagcttcatctagtatcttctttctaagctcagggtcctgaacacccttatccccaacatgtgccctgactatctgttcttgcagtgtgggctccatagagatatagcttaggtcacccgaagaaacaacttccaggttcagcttgcacaactcatcacacagggtggtcactcccacatccatgctcatacaattgcactggacctttctgctcaaggcatctgccacaacattggccttccctgggtggtaatgcacctccaaatcatagtccttgattaactccaaccatctcctttgcctcatgttcagatctgcttgagtgaagatgtatttgagactcttgtgatcagtgtagatgttacagtgagctcccatcaagtagtgtctccatatctttagagcatggactaccgctgccaattctagatcatgtgtagggtagttctgctcatggggcctgagtgcccgggaagcataagcaatcactctattctcttgcatcaagacgcatcccaatccggtaccggaagcgtcacaataaacttcaaatggcttggtgctgtcaggttgggccagcactggggctgttgtcaaatgctgcctcaaggcatgaaaggcatcttcacacttttggctccactcaaatttgactccctttttcaacagtttagtcattggcttggccattctggagaaatccggaataaatcgtcgataataccctgccaatcccaggaaactccgaatctgctttactgtagtcgggggcttccaatccatcacctcctgcaccttctcaggatcaacggatatcccatcctgggaaattgtgtgacccaagaatttaatctccttcagccagaactcacatttagacaacttagcataaagatgatgctcgcgcagtcgctgaagcacaatgtgcaggtgctcagtatgttcgtcctcattcttggaatagaccagaatatcatcaatgaaaacgagcacgaacttgtccaattctggcataaacactgagttcatcaggtacatgaaataagccggggcattggtcagcccaaaagacatcaccagaaactcatacagtccatatctggtagagaaagctgtcttgggaatatcgctagcacggatcttgatctgatggtaccctgagcgaaggtctatcttggagaataccttggctcctaccaactgatcaaacagaacatcaatgcggggcagtgggtatttgttcttaatagttaccgcattgagagggcggtagtcaacacacatcctcaaactctcatcctttttcttcacaaataaggctggacatccccatggtgaagtgcttggacgaataaaccccttgtccaacaattcttgcaattgtttcttcaattccgccaattccgcgggaggcatcctatagggcctcttggagataggagcagtcccgggttgcaattcgatggcgaactcaatatctcggtcaggtggcatccctggcaattcgtctgggaaaacatctgggtagtcgcagaccactgggatcttttccaccggggattctatcataacaaaggcacaagatcgggtacaaccctggtcgggtaaatataaaacagtctcgccataagcaggggaatgaatttcaatggctctggctgcaatgtccaatactgcctgatgcctagtcaaccagtcagttcccaaaataatatccacgctatccaatcctaagatgagaagggtggttctaatcaccagactaccaaattttataggcacttgcctgttgatttgataagtggcaactctgcctccgggtgttgaaattgtaatgcccccatcggtatggtgaaagggcaactggcatttggcactaaacttggcactgataaaactatgtgaagcaccggaatcaaacagaacaatagcgggaaaatttgaaactgtaaagataccagtcatgacgggtgctccctctggaatatcagccatggtggtgaagttcagcctgccttgcctcacttgcaccttctgcctcttgccttggttctgattagcattctgcccctgcctctgctggttcctggggcaattcttggcataatgcccagtgttgccacacgtgaagcatctgttgtcatttgcctggcggtactgctgctgctgttgattgcccctctgagctggaaattgggtgcggttgggtgcctgctgctgctgctgaggtcggatcacccatcgcccttgctgctgctggggtcccctgccctgggtgtcggacacaatcctgaagcgctgtggctgagctgagggtcctgccacaggggtcttcctcttcttctctgcctgcctagcagtaatgcagtcctcttgggagatagccaggttgaccaactcattgtagctgttggccctgacggtgttgagacgatcacggagcttagtgctgagccccctcctgaatctgtctctcttcttctcatctgtatctgcatgatatcccgcatactggcacaagtcattaaaggcctgggcatactgcaacactgtcctgttgccctgagtgagtgccaagaactcattgagcttcctgtccatgatcccggcaggtatatggtgtcctctaaaagctgccttgaactccctccactccacctctcggtcctctggctgcatagcaagaaaatgatcccaccaagtccttgcgggtccgcgaagctgctgggtggcgaacctgactttggtgacctctgagcaagccccatggagtagtgggaatttggattccaccactcgcagccatacatctgcgtcaagtgggtcctccgcccttgtgaacaatggaggctgggtgctgaggaattcctgataggtggccgccgcggggtgacgctgatggtctccaccaccataatgctgaggtggtggctgacgctgagccagctgcctcaggatctcattctgctgagcaatgagctcctgcagagtgggaggtggtggcggcggtggaggaacgcgctcgttctggccacgacgctgcctttcggccatactcgactcaggggaaggtggtcttcccgagccggcagtgtccacactggaggcaggctcatctcctccctcgatgtcgacgtcctcgttggcctcttggtcctggatctcctggtgatgcatgtccaggtgctcgttagcctcaacaagctgccgctgagtgttaatgagctgatcctctaggacctcgatggtgttctccctggtgcccaccagctcctccaattcctgaatatcagtggatagctgctccacctgcaagtccttctccaccatttcttgagataaatcaaccacgagctcctctctgttatccagcgtgatctttgttgcctccagtagtgccatcagatgggacattgcctcaccgcgcatcacctgcagacggtacagagcattcatgcaccgtactgtcaagtgcgcagtctgacctgggtagatggcccagatatccttggcgtgctccacccgatccttccacattgggtcgtcctccttctcagcggggaacaagccaatggggtgggtagccagctccaagggatggaatccgcagaaggtagtcaatccatgcagagcgatcgcctcgatcgtgtcctctgcccggtacccgaaagactcggagtccaaggagcgccatcctggctgcaggggatgaggctccaaggtcatcctcaccctacagcgaggcactcggtgcttctcgaactgctgcaccgcgtactgagggggtgttgcgtacccggccccctgaagtacttcccacaagatgcggggaaagccctctcgtgcaagtctgtcagtgtgggtcagtgcatttccgtcatcggaggatccgtgggaagtcat

SEQ ID NO: 139436 - DNA, 4554 bp, Zea mays
  Clone ID: MRT4577_58652C.1
ttatgcataaaaccggggcttgccttccaaggcagtggcaggcgggtcctctggtgcagactcgggtgctggatctggggctacctcctgagcagctccttgctccggcacgaggatgtactctccgtcagcaagattacagtcgactcctttgggcagaaagtcggggaagcgagagcgtagaaaatcctcagtctcccatgtagcttcttctgctgaatggtgactccactgaaccttgtacattctgaccgaccttgcccgagttgatctctccttttgatctactaccttgacggggtactcttggtaggacaagtctggttctatctcaatgtctggttccggtagcacttcagtgggtagacgaacacatttccgcagctgagatacatggaacacattgtgaactgctgacaggtgaggtggcaattccacttgataggctatgagtccacaagcctccttgatctcgtagggtccaatatagcgaggagctaacttgcccttgatcccgaatctctgaacacccttggtgggtgataccttaagatagacatgatctcccacctcaaactgtagaggcttccacctcttatcatgatagctcctttgtctggcctgggcagcttctaggttcttcttgataattctgacctttgcttctgcttcaagtactaaatcgggcccaaaaatttccctttctcctgcttgagaccaattgagtggggtcctacaccttctcccatataatgcctcaaaaggtgccatcttcaaactggactgatagctgttattgtaagaaaactccgccaaagacagacacttgtcccaatcctttccataatgtagtgcacacgctcgcaacatgtcttccaaaatttgattcaccctttctgtctggccatcagtttgggggtggtatgctgagcttcggatgacatgggtcccaagtgactcttgcaattgctcccaaaatcgtgccacaaatggtgctcctctgtcagatataatggttttgggaataccatgcaaccttactatctgatcaacataaatttcagcgtacttctctgccctgtgggtggtatgcactggcaagaaatgagcagtcttggtcaacctgtccacgataacccaaattgaatcatggtgcctggaggtattgggtaatcccactatgaagtccatacaaatgtcctcccatttccaagatggtatgggaaggggttgtaaatggcctgctgccttcaagtgactagccttaattctctggcaagtgtcacattcggatatgtacttggcaatttcccttttcattctagtccaccaatatagagatctgagatcatggtacatcttgttgctaccagggtgcatggagaattttgaaaggtgagctccatccaatatttgctttctgagctcagggtccttgggaacaaccaatcgatctccaaaccatagaattcccttgctgtcctgtcggaaacacttgtatttttctgtcttttgcttgatcatatctttgataacctgaacacccttatcctcaacctgtgccctgactatctgttcttgcaatgtgggctccaccgagatatagcttaggttacccgaagaaacaacttccaggttcagcttgcacaactcatcacacagggtggtcactcccacatccatgctcatacaattacactgggcctttctgctcaaggcatctgccacaacattggccttaccagggtggtaatgcacctccaaatcatagtccttgattaactccaaccatctcctttgcctcatgttcagatctgcctgagtgaagatgtatttgagactcttgtgatcagtatagatgttacagtgagctcccatcaagtagtgtctccatatcttaagagcatgaactacagctgccaattctagatcatgtgtagggtagttctgctcatggggcctgagtgcccgggaagcataagcaatcactctgctctcttgcatcaagacacatcccaaaccagtaccagaagcatcacaataaacttcaaatggcttggtgttgtcaggttgggccagcactggggctgttgtcaaatgctgcctcaaggtatgaaaagcatcttcacactttcggctccactcaaatttgactcccttctttaacagttcagtcattggcttggcaattctggagaaatccggaataaatcgtcgataataccctgccaatcccagaaaactccgaatctgcttcactgtagtcgggggtttccaatccattacctcttgcaccttctcaggatcaactgatatcccatcctgagaaattgtgtgacccaagaatttgatttccttcagccagaactcacatttagacaacttagcatacaattgatggtcacgcagtctctgaagtacagtatgcaagtgtttggtgtgctcggcttcattcttggaataaaccagaatatcatcaatgaaaacgaccacgaacttgtctaactctggcatgaatactgagttcatcaagtacataaaataagccggggcattggtcagcccaaaagacatcaccagaaactcatacagtccatatctggtagagaaagccgtcttgggaatatcgctagcacggatcttgatctgatggtatcctgagcgaaggtctatcttggagaataccttggctcctaccaactgatcaaacagaacatcaatgcggggcaatgggtatttgttcttaatagttaccgcattgagaggacggtagtcaacacacatcctcaaactctcatcctttttcttcacaaataatgctggacatccccatggtgaagtgcttggacgaataaaccccttgtcgaacaactcttgcaattgcttcttcaattctgccaattccacgggaggcatcctatagggtctcttggagataggagcagtcccgggttgcaactcaattgcgaactcaatgtctcggtcaggtggcatccctggtaattcttccggaaacacatccgggtaggcacagactactgggatctctttcactggggactctaacataacaaaggcacaagatcgggtacaaccctggttgggtaaatacaaaacagtctcgccataagcaggggaatggatttcaatggctctggctgcaatgtccaatactgcctgatgcctggtcaaccagtcagctcccaaaataatatccacgctatccaatcctaagatgagaagggtggttctaatcaccagactaccaaattttataggcacttgcctgttgatttgataagtggcaactctgcctcctggtgttgaaattgtaatgcccccatcggtatggtgaaagggcaactggcatttggcactaaacttggcactgataaaactatgtgaagcaccggaatcaaaaagaacaatagcgggataatttaaaattgtaaagatacaagtcatgacgggtgctccctctggaatatcagccatggtggtgaagttcaacctgccttgcctcacttgcaccctctgcctcttgccttggttctgattagcattctgcccctgcctctgctggttcctggggcaattcttggcataatgcccagtgttgccacaagtgaagcacctgttgtcatttgcctggcggtactgctgctgctggttattcctctgagctggaaactggttgcggttgggtgcctgctgctgctgctgctgaggtcggattacccatcgcccttgctgctgctggggtcccctgccctgggtgtcggacacaatcctgaagcgctgtggctgagctgagggtcctgccacaggggtcttcctcttcttctctgcctgcctagctgtaatgcagtcctcttgggagatagccatgtttaccaactcattgtagctgttggccctgacggtgttgagacgatcccggagcttagtgctgagcccccttccgaatctgtccctcttcttctcatctgtatccgcatgatatcccgcgtactggcacaagtcattaaaggcctgggcatactgcaacactgtcttgttgccctgagtgagtgccaagaactcattgagtttcctgtccatgatcccggcgggtatatggtgtcctctaaaagctgccttgaactccctccactccacctctcggtcctctggctgcatagcaagaaaatgatcccaccaagtccttgcgggtccgcgaagctgctgggtggcgaacctgactttggtgacctctgagcaagccccatggagtagtgggaatttggattccaccactcgcaaccatacatctgcgtcaagtgggtcctctgcccttgtgaacaatggaggctgggtgctgaggaattcctgataggtggccgccgcggggtgacgctggtggtctccaccaccataatgctggggtggtggctgacgttgagccagctgcctcaggatctcattctgctgagccatgagctcctgcagagtgggaggtggtggcggcggtggaggaacgtgctcgttctggccacgacgctgcctcccggccat

SEQ ID NO: 139437 - DNA, 772 bp, Zea mays
  Clone ID: MRT4577_58653C.1
gttcggcgagctcggtgcaggtgcgcgcgggcgcggtagccaacgaccggcgttggcaggagcgagaagccatgttaggctagctgttctctaaatttctccttctgtattatttttgtatttttcgtacggatcgaaaaattaccaaacacgcactataaaaagaaacatccttagaaaaaaacatataatcgtaattagacgtcctcttatctagcatatggccactatctctaaagtttgacatatcccacaaaaatctcttgctggacatcttcctttgtgtaacaatttctagaatctgaactagaatgttcctctaaaaagaacatgcaagattgatggagttggtctaaaagtaaaggccatatcattgcgacaaagctaaatagaccgaaacattgccgtcaccccaccaattaggagtttcccccccccccctatatatcgtacccttgttagcaacccaattcacatttatatgattaacgctgtcgggtctctctatttgaagagcaaagtaatataattctccaaatatttctagcaatataacaatcaaaaagtagacgttgaatagcctcattttgattacagaaattgcatttcatactacctttccaaccgcgtttagctaagttttctttagtgaaagtaacactgtaacacctgaatttggggtataaaatttctttccaaatatctaccacattcagggtgttacctcttggctctctctctagtctctccctttctctttctttttgattag

SEQ ID NO: 139438 - DNA, 261 bp, Zea mays
  unsure (1)..(261): unsure at all n locations
  Clone ID: MRT4577_58654C.1
ccgcatcgcggnaggcaaggcatcgnccgncagccaccgagcggagggggnagcaaaagcttgataaaaaggagaggaggagacgagncgtgccgtccggacccaagcaacttcctcccaccacctccnccctcccangcccgnatcgagatcttagngggacagcgngnggagaggngacgccgangcgggngnnccctgatncctcctcgncgncgcngtcgnncgnccgaccggnggangnggnntngangggntgtt

SEQ ID NO: 139439 - DNA, 1050 bp, Zea mays
  Clone ID: MRT4577_58655C.1
atggccgggaggcagcgtcgtggccagaacgagcgcgttcctccaccgccaccaccacctcctactctgcaggagctcatggctcagcagaatgagatcctgaggcagctggctcaacgtcagccaccacctcagcattatggtggtggggaccaccaacgtcaccccgcggcggccacctatcaggaattcctcagcacccagcctccactgttcacaagggcggaggacccacttgacgcagatgtgtggctgcgagtggtggaatccaaatttccactgctccatggagtttgctcagaggtcaccaaagtcaggttcgccacccagcagcttcgcggacctgcaaggacatggtgggatcattttcttgctatgcagccagaggaccgagaggtggagtggagggagtttaaggcagcttttagaggacaccatatacccgccgggatcatggacaggaaactcaatgagttcttggcactcactcagggcaacaggacagtgttgcagtatgcccaggcctttaatgacttgtgccagtatgcggggtatcatgcagatacagatgagaagaagagggacagattcagaagggggctcagcactaagctccgggatcgtctcaacaccgtcagggccaacaactacaatgagttggtaaacatggctatctcccaagaggactgcattacagctaggcaggcagaaaagaagaggaagacccccgtggcaggaccctcagctcagccacagcgtttcagaattgtgtccgacacccagggcaggggacctcagcagcagcaagggcgatgggtaatccgacctcagcagcagcagcaggcacccaaccgcatccaatttctagctcagaggggcaatcagcagcagcagcagtaccgtcaagccaatgacaacaggtgcttcacttgtggcaacactgggcattatgccaagaattgccccaggaaccagcagaggcaggggcagaatgcaaatcagaaccaaggcaagagacagaaggtgcaattttatcagtaccaaatttag

SEQ ID NO: 139440 - DNA, 5127 bp, Zea mays
  Clone ID: MRT4577_58656C.1
ttatgcataaaaccggggcttgccttccaaagcagtggcaggcaggtcctctggtgcaggcccgggtgctggatctggggctacctccttagcagctccttgctccggcacaaggatgtactctccgtcagcaagattacagtcgactcctttgggcagaaagtcggggaagcgagagcgcagaaaatcctcagtctcccatgtagcttcttctgctgaatggtgactccactgaaccttgtacattctgaccgaccttgcccgagttgatctttccttttgatctaataccttgacggggtactcttggtaagacaagtctggttctatctcaatgtctggctccggtagtacttcagtgggtagacgaacgcatttccgcagctgagacacatggaacacattatgaactgctgacatgtgaggtggcaattctacttgataggccacgggcccacaacttgccttgatctcatagggtccaatgtagcgaggagctaacttgcccttgatcccgaatctctggacacccttggtgggtgataccttaaggtagacatgatctcccaccacaaactgtagaggcttccgcctcctatcatgatagctcctttgcctggcctgagcagcttctaagttcttggtaataaccctgacctttgcctctgcctcgagtaccaagtctggtccaaaaatttccctttctcctgcttgagaccagtttagtggtgtcctgcaccttctcccatacaaagcctcaaaaggtgccatcttcagactggattggtagctgttattgtacgaaaactctgccaaagacagacacttgtcccaatccttcccgtagtgtagtgcacatgctcgcaacatgtcttccaaaatctgattcaccctttcggtctggccatctgtttgtgggtgatatgctgagcttcggattacttgggttccaagtgattcttgcagtttttcccaaaagcgtgccacaaacagtgctcctctgtcagatataatggtcttgggaataccatgcaatctcactatctgatcaacataaatttcagcatacttctctgtcttgtgggtggtgtgcactggcaagaaatgagcagtcttggtcaacctgtccacgataacccaaatagaatcatggtgcctggaggtattgggtaatcccactatgaagtccatgcaaatgtcctcccatttccaagatggtatgggaaggggttgtaaagggcctgctgccttcaagtgactagcctttattctctggcaagtatcacactcggatatgtacttggcaatttctcttttcattctagtccaccaatataaagatctgaggtcatggtacatcttggtgctaccagggtgcatggagaatttggaaaggtgagcttcatctagtatcttctttctgagctcagggtccttaggaacaaccaatcgatctccaaaccatagaattcccttgctgtcctgtcggaaacacttgtatttctctgccttttgcctgatcataaccttgataacctgaacacccttatcctcaacctgtgccataactatcagctcttgcaatgtgggctccaccgagatatagcttaggttacccgaataaacaacttccaggctcagcttgcacaacttatcacacagggtggtaactcctacatccatgctcacacaattgcactgggcctttctgctcaaggcatctgccacaacatttgccttccctgggtggtaatgcacttctaaatcataatccttgatcaactctaaccatctcctttgcctcatgttcagatctgcctgagtgaaaatgtacttgagactcttgtgatcagtgtagatgttacagtgagctcccatcaagtagtgtctccatatcttaagagcatgaactacagctgccaattctagatcatgtgtagggtagttctgctcatggggcctgagtgcccgggaagcataagcaatcactctgttctcttgcatcaagacacatcccaaaccagtaccagaagcatcacaatagacttcaaatggcttggtgttgtcatgttgagctagcactggggctgttgtcaaatgttgcctcaaggtatgaaaggcaccttcacacttttggctccactcaaatttgactcccttcttcaacagttcagtcattggcttggcaattctggagaaatccggaataaatcgtcgataataccctgccaatcccagaaaactccgaatctgcttcactgtagtcgggggtttccaatccatcacttcctgcaccttctcaggatcaactgatatcccatcctgagaaattgtatgacccaagaatttaatctccctcagccagaactcacacttagacaacttagcataaagatgatgatcacgcagtcgctgaagcacaatgtgcaggtgctcagtatgttcgtcctcattcttggaatagaccagaatatcatcaatgaaaacgaccacgaacttgtccaattctggcataaacactgagttcatcaggtacatgaaataagccggggcattggtcagcccaaaagacatcaccagaaactcatatagtccatatctggtagagaaagccgtcttgggaatatcgctggcacggatcttgatctgatggtatcccgagcgaaggtctatcttggagaatactttggctccaaccaactgatcaaacagaacatcaatgcggggcagtgggtatttgttcttgatagtcaccgcattgagagggcggtaatcaacacacatcctcaaactctcgtcctttttcttcacaaatgaagctggacatccccatggtgaagtgcttggacgaataaaccccttgtccaacaattcttgcaattgtttcttcaattctgccaattccgcgggaggcatcctatagggtctcttggagataggagcagtcccgggttgcaattcgattgcgaactcaatgtctcggtcaggtggcatccctggcaattcgtccggaaaaacatccgggtagtcacggaccactgggatcttttccactggggattctatcatgacaaaggcacaagaccgggtacaaccctggtcaggcaaatatagtgtggttccaccacaagttggtgagtgcacctcaatggctctagctgcaatatctatcacagcctgatttctggtcaaccaatcagttcccaatataatatccacactctccaaacccaaaatgagaaggttggttttaattatcagactaccaaactttataggcacattcttgttaatttgataagtggcaaccctgcctcctggggttgaaattgtgatacctccattggtgtggtgaaaaggcaattggcacttggcactaaattttgcgctgataaaactatgcgatgcaccagaatcaaatagaataatagcaggataattcaaaacggtaaagataccagtcatgacgggtgctccctctggaatatcagccatggtggtgaagttcagcctgccctgcctcacttgcaccttctgcctcttgccttggttctgattagcattctgcccctgcctctgctggttcctggggcaattcttggcataatgcccagtgttgccacaagtgaagcatcggttgtcatttgcctggcggtactgctgctgctggttattcctctgagctggaaactggttgcggttgggtgcctgctgctgctgctgaggtcggattacccatcgcccttgctgctgctggggtcccctgccctgggtgtcggacacaattctgaagcgctgtggctgagctgaaggtcctgccacaggggtcttcctcttcttctctgcctgtctagctgtaatacagtcctcttgggagatagccatgttgaccaactcattatagctgttggccctgacggtgttgagacgatcccggagcttagtgctgagccccctcctgaacctatccctcttcttctcatctgtatctgcatggtatccagcatactggcacaagtcattaaaggcctgggcatactgcaacactgtcctgttgccctgagtgagtgccaagaactcattgagtttccggtccatgatcccggcaggtatatggtatcctctaaaagctgccttaaactctctccactccacctctcggtcctctggctgcatagcaagaaaatgatcccaccaagtccttgcaggtccgcgaagctgctgggtggcgaacctgactttggtgatctctgagcaaactccatggagtagtgggaatttggattccaccactcgcagccatacatctgcgtcaagtgggtccttggaggcaggctcatctcctccctcaatgtcgacgtcctcgttggcctcctggtcctggatctcctggtgatgcatgtccaggtgctcgttagcctcagcaagctgctgctgagtgttaatgagctgatcctcgaggacctcgatggtgttctccctggtacctaccagctcttccaactcctgaatatcagtggatagctgctccacctgcaagtccttctccaccatttcctgagataggtcaaccacgagctcctctctgttatccagcgtgatctttgttgcctccagcagtgccatcaggtgggacattgcctcaccgcgcatcacctgcagacggtacagagcattcatgcaccgtactgtcaaatgcgcagtctgacctgggtagatggcccagatatccttggcatgctccacccgatccttccacattgggtcgtcctccttgtcagcggggaacaagccaatggggtgggtagccagctccaagggatggaatccgcagaaggtagtcaatccatgcagagcgatcgcctcgatcgtgtcctctgcccggtatccaaaagactcggagtccaaggaacgccagccgggctgcaggggatgaggctccaaggtcatcctcacccgacagcgaggcactcggtgcttctcgaactgctgcaccgcgtactgagggggtgtcgtgtatccagccccctgaagtacctcccacaaaatgcggggaaagccctctcgtgcaagtccgtcagtgtgggtcagtgcatttccgtcatcggaggatccgtgggaagtcat

SEQ ID NO: 139441 - DNA, 5265 bp, Zea mays
  Clone ID: MRT4577_58657C.1
ttacataccgactcctttgggcagaaagtcggggaagcgagagcgtagaaaatcctcagtctcccatgtagcttcttctgctgaatggtgactccactgaaccttgtacattctgaccgaccttgcccgagttgacctctccttttgatctaataccttcacggggtactcttggtaggacaagtctggttctatctcaatgtctggttccggtagcacttcagtgggtaggcgaacacatttccgcagctgagatacatggaacacattatggactgctgacatgtgaggtggtaattccaattggtaggctacgggtccacagcttgccttgatcttatagggtccaatgtagcaaggggctaacttgcccttgatcccgaatctctggacacccttggtgggtgataccttaagatagacatgatctcccacctcaaaccgtagaggtttccgcctcttatcatgatagctcctttgcctggcctgagcagcttccaagttcttggtaataaccctgacctttgcctctgcctcgagtactaaatccggcccaaaaatttccatttctcctgcttgagaccaatttagtggggtcctacaccttctcccatataatgcctcaaaaggtgccatcttcagactggactgatagctgttattgtaagaaaactctgccaaggaaagacacttgtcccaatcctttccgtagtgtagtgcacatgcccgcaacatatcttccaaaatctggttcaccctttctgtctggccatccgtttgagggtgatatgctgagcttcggattacttgggtcccaagtgattcttgcagtttctcccaaaagcgtgccacgaacagtgctcctctgtcagatataatggtctttggaataccatgcaatcttactatctgatcaacataaatttcagcgtacttctctatcttgtgggtggtgtgcactggcaagaaatgagcggtcttggtcaacctgtccacaataacccaaatagaatcatggtgcctggaggtattgggtaatcccactatgaagtccatacaaatgccctcccatttccaagatggtatgggaaggggttgcaagggacctgctgccttcaagtgactagcctttatcctctggcaagtgtcacactcggatacgtacttggcaatttcccttttcattctagtccaccaatatagagatctgagatcatggtacatcttgttgctgcccgggtgcatagagaatttggaaaggtgagcttcatctagtatctgctttctgagctcagggtccttgggaacaaccaatcgatctccaaaccatagaattcccttgctgtcctgtcggaagcacttgtatttttctgccttttgcttgatcatatctttgataacctgaacacctttatcctcaacctgtgccctgactatctgctcttgcaacgtgggctccaccgagatatagcttaggtcacccgaagaaacaacttccagattcaatctgcacaactcatcacacagggtggtcactcccacatccatgctcatacaattgcactgggcctttctgctcaaggcatctgccacaacattggccttaccagggtggtaatgcacttccaaatcatagtccttgatcaactctaaccatctcctttgcctcatgttcagatctgcctgagtgaagatgtatttgagactcttgtgatcagtatagatgttacagtgagctcccatcaagtagtgtctccatatcttaagagcatgcaccacagccgccaattccagatcatgagtggggtagttctgctcatggggcctgagtgcccgggaagcataagcaatgactctgttttcttgcatcaagacacatcccaatccggtaccagaagcatcacaataaacttcaaatggcttggtgttgtcaggttgggccagcactggggctgttgtcaaatgttgcctcaaggtatgaaaggcatcttcacacttttggccccactcaaatttgactcccttcttcaacagttcagtcattggtttggcaattttggagaaatccagaataaatcgtcgataataccctgctaatcccagaaaactccgaatttgcttcactgtagtcgggggttcccaatccgttacctcttgtaccttctcaggatcaactgatatcccatcctgagaaattgtgtgacccaagaatttaatctccttcagccagaactcacacttactcaacttagcatacaactgatgatcacgcagtctctgaagtacagtatgcaagtgtttggtgtgctcggcttcattcttggaataaaccagaatgtcatcaatgaaaacgaccatgaacttgtctagttctggcatgaatactgaattcatcaagtacataaaataagccggggcattggtcagcccaaaagacatcaccaaaaactcatagagcccatatctggtagagaaagccgtcttgggaatatcgctggcacggatccggatctgatggtatcctgagcgaaggtctatcttggagaataccttggctcctaccaattggtcgaacagaacatcaatgcggggcagcgggtatttgttcttgatagtcaccgcattgagaggacggtagtcaacacacatcctcaaactctcatcctttttcttcacaaatagtgctggacatccccatggtgaagtgcttggacgaataaaccccttgttcaacaactcttgcaattgcttcttcaattctgccaattccgcgggaggcatcctatagggtctcttggagataggagcagtcccgggttgccattcgatggcgaactcaatatctcggtcaggtggcatccctggtaattcatctgggaaaacatctgggtagtcacagaccactgggatcttttccactggggactctaacatcacaaaggcacaagatcgggtacaaccctggttgggtaaatacaaaacagtctcgccataagcaggggaatggatttcaatggctctggctgcaatatccaatactgcctgatgccgggtcaaccagtcagctcccaaaataatatccacgctatccaatcctaagatgagaagggtggtcctaatcacaagactaccaaattttataggcacttgcctgttgatttgataagtggcaactctgcctcctggtgttgaaatggtaatgcccccattggtgtggtgaaaaggcaactggcacttggcactaaatttggcactgataaaactatgcgatgcactagaatcaaaaagaataatggcaggataacttaaaactgtaaagataccagtcatgacgggtgctccctctggaatatcagccatggtggtgaagtttagcctgccctgcctcacttgcaccttctgtctcttgccttgggtctgattgacattctgcccctgcctctgctggttcctggggcaatttttggcataatgcccagtgttgccacatgtgaagcacctgttgtcatttgcctggcggtactgttgctgctgctgattgttcctctgagctggaaattgggtgcggttgggtgcctgctgctgctgcggtcggatcacacatcgcccttgttgctgctggggtcccctgccctgggtgtcggacacaatcctgaagcgctgtggctgagctgagggtcctgccacaggggtcttcctcttcttctctgcctgtctagctgtaatgcagtcctcctgggagatagccatgttgaccaactcattgtaacggttggccctgacggtgttgagacggtcacggagcttagtgctgagccccctcctgaacctatccctcttcttctcatctgtatctgcatgatatcccgcatactggcacaaatcactaaaagcctgggcatactgcaacactgtcctgttgccctgagtgagtgccaaaaactcattgagcttcctgtccatgatcccggctggtatatggtgtcctctaaaagctgccttgaactccctccactccacctctcggtcctctggctgcatagcaagaaaatgatcccaccaagtccttgcaggtccacgaagctgctgggtggcgaacctgactttggtgacctctgagcaagctccatggagcagtgagaatttggattccaccactcgcaaccatacatctgcatcaagtgggtcctccgcccttgtgaacaatggaggctgggtgctaaggaattcctggtatgtagccgccgcggggtgacgctgatggtctccaccaccataatgctgaggtggtggctgacgttgagccagctgcctcaggatctcattctgctgagccatgagctcctgcagagtgggaggtggtggcggcggtggaggaacgcgctcgttctggccacgacgctgcctcccggccatactcgactcgggggaaggtggtcttcctgagccagcagtgtccacactggaggcaggctcatctcctccctcaatgtcgacgtcctcgttggcctcctggtcctggatctcctggtgatgcatgtccaggtgctcgttagcctcagcaagctgctgctgagtgttaatgagctgatcctctagaacctcgatggtgttctccctggtgcctaccagctcctccaactcctgaatatcagtggatagctgctccacctgcaagtccttctccaccatttcttgagacaagtcaaccatgagttcctctctgttgtccaacgtaatctttgttgcctccagcagtgccatcaggtgggacattgcctcaccgcgcatcacctgcagacggtacagggcattcatgcatcgtacagtcaagtgcgcggtctgtcctgggtagatggcccagatatccttggcatgctccacccgatccttccacattgggtcgtcctccctctcagcggggaacaagccaatggggtgggtagccagctccaaaggatggaacccgcagaaggtagtcaatccatgcagagcgattgcctcgatcgtgtcctctgctcggtatccgaaagactcggagtccaaagagcgccatcctggctgcaggggatgaggctccaaggtcatcctcactctacagcgaggcactcggtgcttctcgaactgctgcaccgcgtactgagggggtgtcgtgtatccggccccctgaagtacctcccacaaaatgcggggaaagccctctcgtgcaagtccgtcagtgtgggtcagtgcatttccgtcatcggaggatccgtgggaagtcat

SEQ ID NO: 139442 - DNA, 1894 bp, Zea mays
  Clone ID: MRT4577_58658C.1
ctactggttcctggggcaattcttggcataatgcccagtgttaccacaagtgaagcatctgttgtcatttgcctggcggtactgctgctgctggttattcctctgagctggaaactggttgcggttgggtgcctgctgctgctgcggtggtctgatcacccatctcccttgctgctgctgggggcccctgccctgggtgtcggacacaatcctgaagcgctgtggctgagctgagggtcctgccacaggggtcttcctcttcttctctgcctgcctagctgtaatgcagtcctcttgggagatagccatgttgaccaactcattgtagctattggccctgacggtgttgagacgatctcggagcttagtgctgagcccccttctgaatctgtccctcttcttctcatctgtatctgcatgatatcccgcgtactggcacaagtcattaaaagcctgggcatactgcaacactgtcctgttgccctgagtgagtgccaagaactcatttagcttcctgtccatgatcccggcaggtatatggtgtcctctaaaagctgccttaaactctctccactccacctctcggtcctctggctgcatagcaagaaaatgatcccaccaagtccgtgcaggcccgcgaagctgctgggcggcgaacctgactttggtgacctctgagcaagctctatggagtagtgggaatttggattccaccactcgcaaccacacatctgcgtcaagtgggtcctccgcccttgtgaacaatggaggctgggtgctaaggaattcctgataggtggccgccgcggggtgacgttggtggtctccaccaccataatgctgaggtggtggctgacattgagccagctgcctcaggatctcattctgctgagccatgagctcctgcagagtgggaggtggtggcggcggtggaggaacgcgctcgttctggccacgacgctgcctcccggccatctgaaaaaccacatacttacttaacaccacagttccaaatcctggacacctagtgagcgaacgaagcaacactcgactcgggggaaggtggtcttcccgagccagcagtgtccacactggaggcaggctcatctcctccctcaatgtcgacgtcctcattggcctcctggtcctggatctcctggtgatgcatgcccaggtgctcgttagcctcagcaagctgctgctgagtgttaatgagctgatcctcgagaacctcgatggtgttctccctggtgcctaccagctcctccaactcctgaatatcagtggatagctgctccacctgcaagtccttctccaccatttcctgagataggtcaaccaccagctcctctctgttatccagcgtgatctttgttgcctccagcagtgccatcagatgggacattgcctcaccgcgcatcacctgcagacggtacagagcattcatgcaccgtactgtcaagtgcgcagtctgacctgggtagatggcccagatgtccttggcatgctccacccgatccttccacattgggtcgtcctccttctcagcggggaacaagccaatggggtgggtagccagctccaagggatggaatccgcagaaggtagtcaacccatgcagagcgatcgcctcgatcgtgtcctctgcccggtacccgaaagactcggagtccaaggagcgccagcctggctgcaggggatgaggctccaaagtcatcctcaccctacagcggggcactcggtgcttctcgaactgctgcaccgcgtactgagggggtgtcgtgtatccggccccctgaagtacttcccacaaaatgcggggaaagccctctcgtgcaagtccgtcagtgtgggtcagtgcattttcgtcatcggaggatccatgggaagtcat

SEQ ID NO: 139443 - DNA, 367 bp, Zea mays
  Clone ID: MRT4577_58659C.1
ttgggccgggccggccgggccgcctcacgataagaaccgaccggctcgaccctcatgccaacgatgcgctcctggccttaactgggcgagtatgagcctccgtcgccgtaacttaacaaaaatcttgttgcttaaagcaagcactcgctcgtggaacattagctggggagaacatcttacgattccgaaactattgtgctagccttataggatctgagcaacgcctaatagggacagtagggggcattcatattatcatatacacaggcgaaatccttggtttgattaaatacgaacaaccgcaaaagcattctgccagggatggatcgattaaacaggaactaaagaggacagctcatatacgatc

SEQ ID NO: 139444 - DNA, 272 bp, Zea mays
  Clone ID: MRT4577_5865C.1
ctctcaaccacctgttgggaatgctgctttgagagagttattttagatgtacctagaatgctgcacttgactgagcatatgattattagaatttagaaatactattagctaatgctgcttatctggagagaggtaagtgttagagggttgatgctatcaaaattgtccctctatccccttggtttccttttgttagttatgttcacaaaagagggtggcaagactacttcaaatcctacggtattcaatccccagcttactttcaccactac

SEQ ID NO: 139445 - DNA, 4107 bp, Zea mays
  Clone ID: MRT4577_58660C.1
ttacataccgactcctttgggtagaaaatcggggaagtgagagcgtagaaaatcctcagtctcccatgtagcttcttctactgaatggtgactccactgaaccttatacattctgaccgaccttgcccgagttgatctctccttttgatctaataccttgacggggtactcttgataggataagtctggttctatctcaaggtctggttccggtagcacttcagtgggtaggcgaacacatttccgcagctgagatacatggaacacattgtgaactgctgacatgtgaggtggcaattccaattggtaggccacgggtccacaacttgccttgatctcatagggcccgatgtagcgaggagctaacttgcccttgatcccgaatctctggacacccttggtgggtgataccttaagatagacatgatctcccacctcaaactgtagaggcttccgcctcttatcatgatagctcctttgcctggcctgagcagcttctaagttcttggtaataatcctgacctttgcctctgcctcaagtaccaaatctggcccaaaaatttccctttctcctgcttgagaccaatttagtggggtcctacaccttctcccatataaggcttcaaaaggtgccatcttcagactggactgatagctgttattgtaagaaaactctgccaaagacagacacttgtcccaatccttcccgtagtgtagtgcacatgctcgcaacatgtcttccagaatctgattcaccctttcggtctgaccatctgtttggggatggtatgctgagcttcggattacttgggttccaagtgattcttgcagcttctcccaaaagcgtgctacaaacagtgctcctctgtcagatataatggtccttggaataccatgcagtcgcactatttgatcaacgtaaatttctgcgtacttctccgtcttgtgggtggtgtgcactggcaagaaatgagcggtcttggtcaacctgtccacaataacccaaatagaatcatggtgcctggaggtattgggcaatcctacgatgaaatccatgcaaatgtcctcccatttccaagatggtatgggaaggggttgcaaagggcctgctgccttcaagtgactggccttgatcctttggcaagtgtcacactcggagatgtacttggaaatttccctcttcattctggtccaccaatataaagatctaagatcatggtacatcttgttgctaccagggtgtatggagaatttggaaaggtgagcttcatctaggatcttctttctgagctcagggtccttgggaacaactaatcgatctccaaaccataaaattcccttgctgtcctgacggaagcacttgtacttctctgccttttgcttgatcatttccttaatcatttgaacacccttatcctcaatctgtgccctgactatttgctcttgcaaggtgggttccactgagatgtaacttaattcaccggaaggaataacttccaggtttagcttgcacaactcatcgcacagggtggtaacttttgtatctatgcttatacaattgcactgggcctttctgctcaaggcatctgccacaacattggctttgccaggatggtaatgcacttccaaatcatagtccttgattaactccaaccatctctgttgcctcatgttcagatctgccacagctgccaattccagatcatgtgtagggtagttctgctcatggggtctgagtgctcgtgaagcataagcaatgactctgttctcttgcatcaagacacatcccaatccggtaccagaagcatcacaataaacttcgaatggcttggtgttatccgattgagctagcactggggctgttgtcaaatgctgcctcaatgtatgaaaggcctcttcacacttctggctccaaacatacttaactcctttctttaacagttcagtcattggtttggcaatcctggaaaaatccggaataaatcgtcgataataccctgccaaacccagaaaacttcgaatctgcctcacggtagtcgggggtttccaatccatcacctcctgcaccttctcaggatcaacggatatcccattctgagaaattgtgtgacccaagaattttatctccttcagccagaattcgcacttagacaacttagcatacaactgatggtcacgcagtctctgaagtacagtatgcaaatgtttggtgtgctcggcttcattcttggaataaaccagaatatcatcaatgaaaacgaccacgaacttgtctaactctggcatgaatactgagttcatcaagtacatgaaataagccggggcattggttagcccaaaagacatcaccaaaaactcatacagcccatatctagttgagaaagccgtcttgggaatatcgctggcacggatcttgatttgatggtatcctgagcgaaggtctatcttggagaataccttggctcccaccaactgatcaaacagaacatcaatacggggcagcgggtatttgttcttgatagtcaccgcattgagagggcggtagtcaacacacatcctcaaactctcatcctttttctttacaaataatgctggacatccccatggtgaagtacttgggcgaataaaccccttgtccaataactcttgcagttgcttcttcaattctgccaattccgagggaggcatcctatagggtctcttggagataggagcagtcccaggttgcaactcaattgcgaactcaatgtctcggtcaggtggcatccctggcaactcatctgggaaaacatctgggtagtcacagaccactggaatcttttccactggggactctatcataacgaaagcacaagaacgggtacatccctggtcgggcaaatatagcgtggtctcaccacaagtggaggagtgcacctcaatggccctagctgcaatatcaatcacagcctgatgtttggtcaaccagtcggttcccaatatgatatccacactatccaaacccaaaaagaggaggttggttttaattatcagactaccaaactttataggcacattcttgttgatctgataggtggcaaccctgcctcctggtgttgaaattgtgatacccccattggtttggtgaaagggcaactggcacttggcactaaatttggcactgataaaactatgcgatgcaccagaatcaaaaagaataatagcgggataatttaaaactgtaaagataccagtcatgacgggtgctccctctggaatatcagccatggtggtgaagttcagcctgccttgcctcacttgcaccttctgcctcttcccttggttctgattaacattctgcccctgcctctgctggttccgggggcaattccatcttccttgccgctgctggggtcccctattctgagtgtcagacacaatcctaaagcgctgtggctgagctgagggtcctgccacaggggtcttcctcttcttttctgcctgttgagctgtaatgcagtcctcttgggagatagccatgttgaccaactcattgtagttgttggccctgacggtgttgagacggtcacggagcttagtgctgagccccctcctgaacctgtctctcttcttctcatccgtatctgcgtgatacccagcatactggcacaagtcattaaaggcctgggcatactgcaacactgtcctgctgccctgagtgagtgccaaaaactcattgagctttcggtccataatcccggctggtatgtggtgtcccctgaaagcggccttgaactccctccattccacctctcgatcctctggctgcatggcaagaaaatggtcccaccaagtccttgcgggtccgcaaagctgctgggtggcgaacctgactttagtgacctctgaacaagctccatggagtagcgggaatttggattccaccactcgcaaccatacatctgcatcaagtgggtcctccgcccttgtgaacaatggaggctgagtactgaggaactcctggtaggtggctgccgcagggtgacgctgatggtctccaccaccatagtgctgaggtggtggctgacgctgagctagctgcctcaagatctcattctgctgagccat

SEQ ID NO: 139446 - DNA, 5142 bp, Zea mays
  Clone ID: MRT4577_58661C.1
ttatgcataaaaccggggcttgccttccaaagcagtggcaggcaggtcctctggtgcaggctcgggtgctgggtctggggctacctcctgagcagctccttgctccggcacgaggatgtactctccgtcagcgagattacagtcgactcctttgggcagaaagtcggggaagcgagagcgtagaaattcctccgtctcccatgtagcttcttctgctgaatggtgactccactgaaccttgtacattctgaccgaccttgcccgagttgatctctccttttgatctaataccacgacagggtactcttggtaggacaagtctggttctatctcaatgtctggttccggtagcacttcagtgggtagacgaacgcatttccgcagctgagatacatggaacacattatgaactgctgacatgtgaggtggtaattccaattggtaggctacgggtccacagcttgccttgatcttatagggtccaacgtagcgaggagctaacttgcccttgatcctgaatctctggacacccttggtgggtgataccttaagatagacatgatctcccacctcaaactgtagaggcttcagcctcctatcatgatagctcctttgcctggcctgagcagcttctaagttcttggtaataaccctgacctttgcctctgcctcgagtaccaagtctggcccaaaaatttccctttctcctgcttgagaccaattaagtggggtcctacaccttctcccatataatgcctcaaaaggtgccatcttcaaactggactgatagctgttattgtaagaaaactctgccaaagacagacacttgtcccaatcctttccataatgtagtgcacatgcccgcaacatgtcttccaaaatctgattcacccgttctgtctggccatctgtttgtgggtgatatgctgagcttcggattacttgggtcccaagtgattcttgcagtttctcccaaaagcatgccacaaacagggctcctctgtcagatataatggtctttggaataccatgcaatcttactatctgatcaacataaatttctgcgtacttctctgtcttgtgggtggtgtgcactggcaagaaatgagcggtcttggtcaacctgtccacgatgacccaaatggaatcatggtgcctggaggtattgggcaatcctacaataaaatccatgcaaatgtcctcccatttccaagatggtatgggaaggggttgcaaagggcctgctgccttcaagtgactggccttgattctctggcaggtgtcacactcggagatgtacttggcaatttccctcttcattctggtccaccaatataaagacctgagatcatggtacatcttgttgctaccagggtgcatggagaattttgaaaggtgagcttcatccaatatttgctttctgagctcagggtccttgggaacaaccaatcgatctccaaaccatagaattcccttgctgtcctgtcggaaacacttgtatttttctgccttttgcttgatcatatccttgataacctgaacacccttatcctcaacctgtgccctgatgatctgctcttgcaacgtgggttccaccgagatatagcttaggttacccgaagaaacaacttccaggttcagcttgcacaactcatcacacagggtggtcactcccacatccatgctcatacaattacactgggtctttctgctcaaggcatctgccacaacattggccttaccagggtggtaatgcacctccaaatcatagtccttgattaactccaaccatctcctttgcctcatgttcagatctgcttgagtgaagatgtatttgagactcttgtgatcagtgtagatgttacagtgagctcccatcaagtagtgtctccatatctttagagcatggactaccgctgccaattctagatcatgtgtagggtagttctgctcatggggcctgagtgcccgggaagcataagcaatcactttgttctcttgcatcaagacacatcccaatccggtaccagaagcgtcacaataaacttcaaatggcttggtgttgttaggttgggccagcactggggctgttgtcaaatgctgcctcaaggtatgaaaggcatcttcacacttttggctccactcaaatttgactcccttctttaacagttcagtcattggtttggcaattctggagaaatccggaataaatcgtcgataataccctgccaatcccagaaaactccgaatttgcttcactgtagtcgggggtttccaatccattacctcttgtaccttctcaggatcaactgatatcccattctgagaaattgtgtgtcccaagaatttaatctcctccagccagaactcacacttactcaacttagcatacaactgatgatcacgcagtctctgaagtacagtatgcaagtgtttggtgtgctcggcttcattcttggaataaaccagaatgtcatcaatgaaaacgaccacgaacttgtctagttctggcatgaatactgagttcatcaagtacataaaataagccggggcattggtcagcccaaaagacatcaccagaaactcatacagtccatatctggtagagaaagctgtcttgggaatatcgctggcacggatcttgatctgatgatatcccgagcgaaggtctatcttggagaataccttggctccaaccaattgatcaaacagaacatcaatgcggggcagcgggtacttgttcttaatagtcaccgcattgagagggcggtagtcaacacacatcctcaaactctcatcctttttcttcacaaataaggctggacatccccatggtgaagtgcttggacgaataaaccccttgtccaacaattcttgcaattgtttcttcaattccgctagttccgcgggaggcatcctatagggtctcttggagataggagcagtcccgggttgcaattcgatggcgaactcaatatctcggtcaggtggcatccctggcaattcgtctgggaaaacatctgggtagtcgcagaccactgggatatttttcaccggggattctatcataacaaaggcacaagatcgggtacaaccctggtcgggcaaatataaaacagtctcgccataagcaggggaatgaatttcaatggctctggctgcaatgtccaatactgcctgatgcctggtcaaccagtcagctcccaaaataatatccacgctatccaaccctaagatgagaagggtggttctaatcaccagactaccaaattttataggcacttgcctgttgatttgataagtggcaactctgcctcctggcattgaaattgtaatgcccccatcggtatggtgaaagggcaactggcacttggcactaaacttagcactgataaaactatgcgatgcacccgaatcaaataaaataatcgcaggataattcaaaactgtaaagataccagtcatgacgggtgctccctcaggaatgtcagccatggtggtgaagttcagtctgccttgcctcacttgcaccttctgccttttgccttggttctgattagcattctgtccctgcctctgctggttcctggggcaattcttggcataatacccagtgttgccacaagtgaagcatctgttgtcatttgcctggcggtactgctgctgctggttattcctctgagctggaaactggttgcggttgggtgcctgctgctgctgaggtcggattacccatcgcccttgctgctgctgcggtcccctgccctgggtgtcggacacaatcctgaagtgctgtggctgagctaagggtcctgccacaggggtcttcctcttcttctctgcctgcctagctgtaatgcagtcctcttgggagatagccatgttgaccaactcattgtagctgttggccctgacggtgttgagacgatcacggagcttagtgctaagccccctcctgaatctgtccctcttcttctcatctgtatctgcatgatatcccgcgtactggcacaagtcattaaaggcctgggcatactgcaacactgtcctgttgccctgagtgagtgccaagaactcattgagcttcctgtccatgatcccggttggtatatggtgtcctctaaaagctgccttgaactccctccactccacctctcggtcctctggctgcatagcaagaaaatgatcccaccaagtccttgcgggtccacgaagctgctgggtggcgaacctgactttggtgacctctgagcaagccccatggagtagtgggaatttggattccaccactcgcagccatacatctgcgtcaagtgggtcctccgccctcgtgaacaatggaggctgggtgctaaggaactcctggtatgtagccgccgcggggtgacgctgatggtctccaccaccataatgttgaggtggtggttgacgctgagccagctgcctcaggatctcattctgctgagccatgagctcctgcagagtgggaggtggtggcggcggtggaggaacgtgctcgttctggccacgacgctgcctcccggccatctgcaagtccttctccaccatttcttgagataaatcaaccacgagctcctctctgttatccagcgtgatctttgttgcctccagcagtgccatcagatgggacattgcctcaccgcgcatcacttgcagacggtacagagcattcatgcaccgtactgtcaagtgcgcagtctgacccgggtagatggcccagatatccttggcatgctccacccgatccttccacattgggtcgtcctccctctcagcggggaacaagccaatggggtgggtagccagctccaagggatggaatccgcagaaggtagtcaatccatgcagagcgatcgcctcgatcgtgtcctctgcccggtacccaaaagactcggagtccaaggagcgccatcctggctgcaggggatgaggctccaaggtcatcctcaccttacagcgaggcactcggtgcttctcgaactgctgcaccgcgtactgagggggtgtcgtgtatccggccccctgaagtacttcccacaaaatgcggggaaagccctctcgtgcaagtccgtcagtgtgggtcagtgcatttccgtcatcggaggatccgtgggaagtcat

SEQ ID NO: 139447 - DNA, 499 bp, Zea mays
  unsure (1)..(499): unsure at all n locations
  Clone ID: MRT4577_58662C.1
nncnnnntttttttttttttttttttttttttgtttttttttttttttttttttttaaaaaacaagcccaccatttttttgtaataaccgttaatccccccacaggggaaatcccaaggaaatgaaagttgcggcaacagtcggttttcattgtttcaacatgaagcccttaacaaattcgttcattacaagagttttgggttgttttttacccatatttcaggcggaacatgtttttttgcacaaaaaaggacccaactgccggcaaaaaatggaatgcctgaaaaaacttgagggggggctcctcggggccggggcggatggaaccggaaacaaaaaccaacatgccttcttggggccccaacgggtggcagtcaacggtaacaatttggtgctcccaggcctggaagggaaaaaatcccaccttgccggcaatgggggatgggccctgaaacttctggccctcgaaggtgagcatggaggtcttttgatacagccc

SEQ ID NO: 139448 - DNA, 260 bp, Zea mays
  unsure (1)..(260): unsure at all n locations
  Clone ID: MRT4577_58663C.1
atgccccaaaacagagaccttttccgccgccgtcgcccctggctccagcgccctcgccgtcggtcgcagccaagcccccgcttcgagcttcccgacctccctcgccgacccaacntgggtaagacacgtggnatgggagctgggcgnaagctcnagacccnnaggaggtcncngaggtggcctgacnaggcctacncnaagagccctctggggcacgagcggaancccccctttgnncgttcatcccacgcaaaggggat

SEQ ID NO: 139449 - DNA, 477 bp, Zea mays
  unsure (1)..(477): unsure at all n locations
  Clone ID: MRT4577_58664C.1
cgcccccgcgtccgncagctccccgctcccgcgccacagcttgtgcgcgcgcaatggcactcgtgtccgcctcctcgtcctccaccaccgccgtcgcggcgctccccaggaatgggcagcagcgggcgtcgtcgtcgttgttctcctcctcctacccttcctccttcctcgtcgcggagacgctgttgacccaggccgagggagctcgctatccgctcgcccgctgtcccagctcgactagctggcggcctttcgttactagcacgccttcccgtacagcctgcttactgcgcgcgccctctcgcgcagtcccgatgacgacgctcgtggccttggcgctgcgcccgcctgctcgccttctccttctcccggcaccggccgctgccccccggcccaccgatgctcgccgcggctcacgtncttcatccgcaggtacctccacgaccgccggggctctcgccgccctctctcgggcac

SEQ ID NO: 139450 - DNA, 469 bp, Zea mays
  Clone ID: MRT4577_58665C.1
cgttctcttgtttttttttttgctgttatgcataaggcccttgtgatataaacgttgctctggaacttgtagacctgagcgatgatggcccattcatgctttccctgccccataagaaacgcccaacatagatgcgaactttcctaggtaacaaaatgattctagaaagcacttttgctcctggggcggaacaagacattgttgctcgctatcactagacgctcgtacatctgtcataactctatagccggtgcttgggttatgtgaccgattcaggacgcacctacacgggtgtacgcatacaaactcagtgggctatcatgaccggtctgacctttgtaacgcctatgtatgcgtatattcatgacagtgagcgccggtatatcgtgcatcgaaagggtccactactctgtatatacagtccaatatcaatcgagtgggcatgcatatacaacgtgcagactgtatt

SEQ ID NO: 139451 - DNA, 624 bp, Zea mays
  Clone ID: MRT4577_58666C.1
ccggccgggattaaccgcctctccctcgctcctctcgctcgctcggctcactccctctccaaagcggcagcctcacgcagtcacgcgctccaccacgccacctccctctactcactcatgttgttttccgtccatccgcccaccggttcgtagcccgcgccgcaaaaccctagccccgggaggatcgcggggcgcctccgcggtgccagcgacgtggctcgtttgatccgattgctggtcgagccccgccctcgctgccgcgcttcgctccggctgtgcagcggcgtgagcaccgagcacactcgcgaatggggaactgctagggtgcttggatcaaggatgggagccctcaccctggggcctcaggtgtggcgttcgttggggaagagcgaagacttgttgaaggctgaggctgccagtccttcatcgtcggagtcgaatgaagagcagtctgagtcccattctttgccaagatgagcctcgccttttgccttcctatagattttcttcttcttcttcccatgtctttcttccccctggtcattttcattatcgggacattgagcaataaaatgacatgtattaccgcatttgaagcaaaaaaaaaaaaaaaaacccgcggcc

SEQ ID NO: 139452 - DNA, 224 bp, Zea mays
  unsure (1)..(224): unsure at all n locations
  Clone ID: MRT4577_58667C.1
ccggggacacgctgggattagcggcggctgcagtcgctgtcggcggcggcagcgggggagtgtggtggagggaagaagataagatataaggagagaggttgcgganggagaagagcgcccggaagcgctccgcgatgggccacctccgcgttcgagtcgtccccggaaatggagcggttcctctgcgagcgtctgctgaacaccnaccctccctgggggggggg

SEQ ID NO: 139453 - DNA, 500 bp, Zea mays
  Clone ID: MRT4577_58668C.1
cctcgaggccggccgggccgggggtagacgcgccgaggctgttgaccgtgtcgatgatggtctgcaggcgggcgccggccggccagtggaacatctggcccgagccctggtcgacggacaccttcgattgcggcgtgacctgcgtctggcctttcgagaacggtcccggctggctgaccgccgagctttccgagatcacgaccttgagcgagccgtgggtcacggcggccgatttcacgcgcaggccgtcggaaatcacgacggtgcccgtgcgcgagttgaacacgacgcgcggcacttcctcgccggcttccaccgccatgttttccagcttggcgacgaaggcgacgcgttcggtcggattcgtcggcgccacgacctcgacgctggtgccgtcggcggtggtcgcgacctggccgaagcggcggttgatcgcgttcacgacattggtcgcggtgtcagaaaagtcaaaaaaaaaaaaaaaaaaggcccctagggcc

SEQ ID NO: 139454 - DNA, 522 bp, Zea mays
  Clone ID: MRT4577_58669C.1
cccttttgtactactgacccctgtccttatcgcattagcattgttgctcggcttcaacacgctgtctgctgcttccggtagacagcaaattctttttttggtgcttgctattggtatgaatagtatactgcatataggttgtgggccggtgatccgatattggtggtgttgcagttgtagagtaagtttcttcgtacctgatgtgtgtcgtagctactgaattgaccacttcaatgtatataaaatgatatttatgcacttatatttctctgctcatatttttcatctaaatgaaggacgatacttatatttctctgctcagatttttcatctagatggagcccttttcctgtctcatttgggtaccctcagtagtctaataaactaatattttttaggataataggatgacaatttcttgtataccactgtaatcttgtactatgtccattctgctacactctcctccatacatcttatgcttggcaattggaagcaaccagccaagaaatgaactaccca

SEQ ID NO: 139455 - DNA, 162 bp, Zea mays
  Clone ID: MRT4577_5866C.1
taatgagttaaggggttgcaatatggagtagtagtggaggttattgctattggaatcttataggacaataccatcctagaaatctcgggagatggcgtgaattacatggcaatgaaatgatgggctagtatgtcataagcatgcgtacctgacagaaactgg

SEQ ID NO: 139456 - DNA, 257 bp, Zea mays
  Clone ID: MRT4577_58670C.1
attgcctaagtgtcctgttttatatgtttcttctctacttgattgtgatataggagttcatagacatgaatgcctaggtcctatttaaacttacgttgtgttggttgctcttgtacggtcaatagaagaacaaatgaacgattaaggtgagcgtagtaaatgtgtgtacttgtgatgtcgtggtcatgttgcgtaaataaataaaatgttgtcatctttttaatggtgttaatgttgaacgccgacgacgtgtagat

SEQ ID NO: 139457 - DNA, 553 bp, Zea mays
  Clone ID: MRT4577_58671C.1
aaaatccaaacccttttggggaaaaaaggaaaggggagtttgggaggggcatatgacccacacaatcccctagcattggggacaagaccaacaatttttccgcacatggagatggggcaaaactaattttaaaattcaaacgggaaaggtcataacaaattttgcaacggctccataaacacagaagcctacgggtcctccttaaaagccttttgaaccccctttaaaactaggggcataaaaggctggttgggggaaaaaattcctttggcacaaaaaaaatatttacctttgaaaaaacccaaatggtttcctggggaattttttaccatgcccccagtttttgggaaaaaaattgacccagctgcatgaccccaaactgtttttatgaaactttggggcgggaggcccaaaaaaagggccccatccccccgggctagggcaccatatttgggtgggctatccattcaaacaggaggagctcggacaccaagtttttttgcaagggagctagttaaaccaccctgggagggggaggcttaaaaggattaaa

SEQ ID NO: 139458 - DNA, 697 bp, Zea mays
  unsure (1)..(697): unsure at all n locations
  Clone ID: MRT4577_58672C.1
ggccgcttttttttttttttttccttccaggattaagctaataatagcatccatccatcaagctcccaagagtgtttaatacgattacatcaaagtgttccaaaatgactcaactctacctagcctagtaccctaagggtgcaaaagctaagctagcggcgaggagtccgactgtccaacttctaaacctaccctggacatctagtgagcgaacgaagcaacgctcgactcgggggaaggtggtcttcccgagccagcagtgtctatactggaagcagactcgtctcctccctcgatgtcaacgtcctcgtcagcctccccaccatggatctcttggtgatgcatgtctaggtgctcatttgcttctgccagctgctgctgagtgttgaggagctgatcctctaggacctcaatggtgttctcccgggtgcccactagctcctccaactcatgaatctcaccagacagctgctccacttgcaaatctttctctaccatttcttgagacaagtcgaccacaagcntcctctcggttatccaacatgantcttggtggcctccagcagtgccatcagatgggacatggcctcaccgcgcatcacctgcagacggtacagagcattcatgcaccgtactgtcaagtngcgcagtctatcctgggtagatggcccagatatccttagcatgctccacccta

SEQ ID NO: 139459 - DNA, 5567 bp, Zea mays
  Clone ID: MRT4577_58673C.1
atgcggagttcatcgtcttccggggctgagcccgagtccgagccctggggtcgggcgaagcggagttcgtcgtcttccggggctgagcccgagtccgagccctgggtcgggcaaagcggagttcgtcgtcttccggggctgagcccgagtccgagccctgggtcgggcgaggcggagcttcctatggcgctcgaggacggacttggctgctgtcagccgcactctgccgagtggcgcagcagtcggagcggcgcaggcagcgctgtccttttgtcaggccggtgtttcacttgtggtaacaccggacattatgccaagaattgcccaagaaaccagcagaggcaggggccgaatgccaaccagaaccaaggcaacaggcagaaggtgcaagtgaggcaaggcaggctgaacttcaccaccatggctgatatttcagagggagcacccattatgactggtatcttttcagttttgaattatcctgcaattattctttttgattctggtgcatcacatagttttatcagtgccaaatttagtgccaagtgccaattacctttccatcataccaataggggtattacaatttcaacaccaggaggcagggttgccacctaccaaatcaacaagaatgtgcctataaagtttggtagtttgataatcaaaaccaacctcctcattttgggtttggatagtgtggatatcatattgggaactgactggttaaccaaacatcaggccacgatggatattgcagctagggccattgaggtgcactcaccgacttgtggtgaaaccacattatatttgcctgaccagggttgtacccgttcttgtgccttcgttatgatagggtccccagtggaaaggatcccagtggtctgtgactacccagatgttttttcgaatgaattgccatggatgccacctgaccgagacatcgagttcgcgattgagttgcaacccgggactgctcctatctccaagagaccctataggatgcctcccgcggaattggcagaactgaagaagcaactgcaagagttgttggacaaggggttcattcgcccaagcacttcaccgtggggatgtccggccttatttgtgaagaaaaaggatgagagtttgaggatgtgtgttgactaccgccctctcaatgcggtgaccatcaagaacaaatacccgccgccccgcatcgatgttctgttcgatcagttggtgggagccaaggtattctccaagatagaccttcgctcaggataccatcagatcaagatccgtgccagcgatattcccaagacggctttctctaccagatatggactctatgagtttctggtgatgtcttttgggctgaccaatgccccggcttatttcatgtacttgatgaactcagtatttatgccagaattggacaagttcgtggtcgttttcattgatgatatcctagtctattccaagaatgaagatgaacatactgagcacctgcacatcgtgcttcaacgactgcgcgatcatcatctttatgctaagttgtctaagtgtgagttctggctgacggagattaaattcttgggtcacacaatttctcaggatgggatatcagttgatcctgagaaggtacaagaggtaatggattggaaacccccgactacagtgaggcagattcggagttttctgggattggcagggtattatcgacgatttattccggatttctccagaattgccaagccaatgactgaactgttgaagaagggagtcaaatttgagtggagccaaaagtgtgaagatgccttccataccttgaggcagcatttgacaacagccccagtgctggctcaacctgacaacaccaagccatttgaagtttattgtgatgcttctggtactggtttgggatgtgtcttgatgcaagagaacagagtgattgcttatgcttcccgagcactcaggccccatgagcagaactaccctacacatgatctagaattggcagctgtagttcatgctcttaagatatggagacactacttgatgggagctcactgtaacatctacactgatcacaagagtctcaaatacatcttcactcaggcagatctgaacatgaggcaaaggagatggttagagttgatcaaggactatgatttggaggtgcattaccatccaggcaaggccaatgttgtggcagatgccttgagcagaaaggcccagtgtaattgtatgagcatggatgtgggagtcaccaccctgtgtgatgagttgtgcaagctgaacctggaagttgtttcttcgggtgacctaagctatatctcggtggagcccacattgcaagagcaaatagtcagggcacaggttgaggataagggtgttcaggttatcaaggatatgatcaagcaaaaggcagaaaaatacaaatgtttccgacaggacagcaagggaattctatggtttggagatcgattggttgttcccaaggaccctgagctcagaaagaagatactggatgaagctcacctttcaaaattctccatgcaccctggtagcaacaagatgtatcatgatctcagatctctatattggtggactagaatgaaaagggaaattgccaagtacatatccgaatgtgacacctgccagagaatcaaggccagtcacttgaaggcagcaggccctttgcaaccccttcccataccatcttggaaatgggaggacatttgcatggactttatagtgggattacccaatacctccaggcaccatgattctatttgggttatcgtggacagattgaccaagacggctcatttcttgccagtacacaccacccacaagacggagaagtatgctgaaatttatgttgatcagatagtgaggttgcatggtattcccaagaccattatatcggacagaggagcactgttcgtggcacgcttttgggagaaactgcaagaatcacttgggacccatgtaatccgaagctcagcataccaccctcaaacagatggccagacagaaagggtgaatcagattttggaagacatgttgcgagcatgtgcactacattatggaaaggattgggacaagtgtctgtctttggcagagttttcctacaataacagctaccagtccagtctgaagatggcaccttttgaggcattatatgggagaaggtgtaggaccccactgaattggtctcaagcaggagaaagggaaatttttgggccagacttggtactcgaggcagaggcaaaggtcagggtcattaccaagaacctggaagctgctcaggccaggcaaaggagctatcatgacaagaggcggaagcctctacagtttgaggtgggagatcatgtctatcttaaggtatcacccaccaagggtgtccagagattcgggatcaagggcaagttagctcctcgctacattggaccctacgagatcaaggcaacttgtggacccgtagcctaccaattggaattgccacctcacatgtcagcagttcataatgtgttccatgtatctcagctgcggaaatgcgttcgcctacccactgaagtgctaccggaaccagacattgagatagaaccagacttatcctaccaagagtaccccgtcaaggtattagatcagaaggagagatcaactcgggcaaggtcgatcagaatgtataaggttcagtggagtcaccattcagcagaagaagctacatgggagactgaggattttctacgctctcgcttccccgactttctgcccaaaggagtcggtatgtaacctcgctgacggagagtacatcctcgtgtcggagcaaggagctgctaaggaggtagccccggatccagcacccgagcctgccccagaggatctgcctgccccagctttggaaggcaagccccggttttatgcaaaacttagataacaaggatagtctaagttgtggatttaatttaagaagggcttccttctgaagttgcaaagagaatgacattcgaagagcagttaacaagagaaacttgagtataaagaaagagtagcaccaacacaccttccagcaccctccaagggacgctacctaaatctcgggacgagattcctttaaggggggagggctgtaacaccccaggtgttactcagggtgtccatacaggagtttccccttttacccattatcacatgaagattaaattgggcaaagtgtaccacacttgagattctaggtcctaagcaagagtaatccactttggatgtcatgccctagcttatcatgcacatctaagtggggatctcccaaaaccctagagcaaaacccccataggtaattataaccctaattgaagccatgatcaaaagagcatgtaaacatcaagaccatggcttggacccaatataaaggttgtaatacactcaataacctaccattaatagtaaggaagtacccacaaaaagtttgcagaaaagtcctaaaaagatcaccaaaggttgaaaacaagggagaaatgcagattttgcctaagttaaaaaccaacccttgagcaaagatccctcatgttcaccttgatccccttttcaaaatctgtcgacccaattgacaaaaaggcgccaaactaaccctagaacaccctggaaagagatgacacctaccctagggcgctagacacgacttgacaccccttttgtctcggtttggaccctgctgacacagcaaacttctcccctctctatctctctgtccagaccaaatctcgacttggaacccacaacaaaaaggtaggatttggagcagagaagtgaccgtacacagtgaccttgccgagatatgcacgccatggcgctcaaaccggccgttgaaccttggcagacgcaaccatccacgtgttcgacgcatgctggcacccgggggcgcgctcagtgcacgccggtgcgcgaacccccgcgcgcccgcggccacccgtgaccacgcccgcgccaaggctataaagcccgccccagcgctcggttgcttcccccgttgcctcgtccgtacttcgccggacttgcccgagccagccgttgcctccggcgacctccccgcgacccgccagtgccgcccgaacgccaccgccgtggccaacccctctccagccatcctccgttcgatccaagcccccagaaagtttcctggtgaagccgtgaaccttgctcaagctttacccgggagcccgcgtcaccggagaggccaaatcgcgctcaccggagttaaagaactcgccggcgcacgtggaccgggtaaaccccttcgccattttccgattcctcgcgcgtatggcctctgtgtcatcccgtggagctcctcgtgcccattaattgaactcccccgccgtggtttggccggagcaggcatcgccgtcgacctccgccgcctgcgcacgtggaccgagcagctgctcgcaccatccccgtcgcctgtttcgtttcagactcccccccagtatattccttcccgatcagagaccccccgcacgtaatgtcatttgtattgccgtcatatttgtagctgatatatatagtgtatatttaagatc

SEQ ID NO: 139460 - DNA, 5968 bp, Zea mays
  Clone ID: MRT4577_58674C.1
atgacttcccatggatcctccgatgacgaaaatgcactgacccacactgacggacttgcacgagagggctttccccgcattctgtgggaggtacttcagggggctggatacacgacaccccctcagtacgcggtgcagcagttcgagaagcaccgggtgccccgctgtagggtgaggatgaccttggagcctcatcccctgcagccaggctggcgctccttggactccgagtcttttgggtaccgggcagaggacacgatcgaggcgatcgctctgcatgggttgactaccttctgcggattccatcccttggagctggctacccaccccattggcttgttccccgctgagaaggaggacgacccaatgtggaaggatcgggtggagcacgccaaggacatctgggccatctacccaggacagactgcgcatttgacagtacggtgcatgaatgccctgtaccgtctgcaggtgatgcgcggtgaggcaatgtcccatctgatggcactgctggaggcaacaaagatcacgctggataacagagaggagctcgtggttgacctatcacaagaaatggtggaaaaggacttgcaggtggagcagctatccactgatattcaggagttggaggagctggtaggcaccagggagaacaccatcgaggttctcgaggatcagctcattaacactcagcagcagcttgctgaggctaacgagcacctggacatgcatcaccaagagatccaggaccaggaggccaacgaggacgtcgacattgagggaggagatgagcctgcctccagtgtggacaccgctggctcgggaagaccaccttcccccgagtcaaatggccggaaggcagcttttagaggacaccatataccagccgggatcatgtacaggaagctcaatgagttcttggcactcactcagggcaacaggacagtgttgcagtatgcccaggcctttaatgacttgtgccagtacgcgggatatcatgcagatacagatgagaagaagagggacagattcagaagggggctcagcactaagctccgggatcgtctcaacaccatcagggccaacagctacaatgagttggtcaacatggctatctcccaagaggactgcattacagctaggcaggcagagaagaagaggaagacccctgtggcgggaccctcagctcagccacagcgcttcaggattgtgtccgacacccagggcagggggccccagcagcagcaagggcgatgggtaatccgacctcagcagcagcagcagcagggacccaaccgcacccaatttccagctcaaaggggcaatcaacagcagcagcagtaccgccaagccaatgacaacaggtgcttcacttgtggcaacactgggcattatgccaagaattgccccaggaaccagcagaggcaggggcagaatgtcaatcagaaccaaggcaagagacagaaggtgcaagtgaggcaaggcaggctgaacttcaccaccatggctgatattccagagggagcacccgtcatgactggtatctttacagttttaaattatcccgctattgttctttttaattccggtgcttcacatagttttatcagtgccaagtttagtgccaaatgccagttgccctttcaccataccgatgggggcattacaatttcaacaccaggaggcagagttgccacttatcaaatcaacaggcaagtgcctataaaatttggtagtctggtgattagaaccacccttctcgtcttaggattggatagcgtggatattattttgggagctgactggttgaccaggcatcaggcagtattggacattgcaaccagagccattgaaatccattcccctgcttatggcaagactgttttgtatttacccaaccagggttgtacccgttcttgtgcctttgttatgatagaatccccagtggaaaagatcccagtggtctgtgactatccggatgtttttccggatgaattgccaggaatgccacctgaccgagatattgagttcgccatcgaattgcaacccgggaccgctcctatctccaagagaccctataggatgcctcccgcggaattggcagaattgaagaaacaattgcaagagttgttggacaaggggtttattcgtccaagcacttcaccatggggatgtccagcattatttgtgaagaaaaaggatgagagtttgaggatgtgtgttgactaccgccctctcaatgcggtgaccataaagaacaaatacccgttgcctcgcattgatgttctgtttgatcaattggttggagccaaggtattctccaagatagaccttcgctcaggataccatcagatcaagatccgcgctagcgatattcccaagacggctttctctaccagatatggactgtatgagtttctggtgatgtcttttgggctgaccaatgccccggcttatttcatgtacctgatgaattcagtgtttatgccagaattggataagttcgtggttgtcttcattgatgatattctggtttattccaagaatgaagccgaacacaccaaacacttgcatactgtacttcagagactgcgtgatcatcagttgtatgctaagctgagtaaatgtgagttctggctgaaggagattaaattcttgggtcacacaatttctcaggatgggatatcagttgatcctgagaaggtgcaagaggtaatggaatggaaacccccggctacagtgaagcagattcggagttttctgggattggcagggtattatcgacgatttattccggatttctccagaattgccaagccaatgactgagctgttgaagaagggagtcaaatttgagtggagccaaaagtgtgaagatgccttccataccttgaggcagcatttgacaatagccccagtgctggcccaacctgacaacaccaagccatttgaagtttattgtgatgcttctggtactggtttgggatgtgtcttgatgcaagagagcagagtgattgcttatgcttctcgggcactcaggccccatgagcagaactaccctacacatgatctagaattggcagttgtagttcatgctctgaagatttggagacactacctgatgggagctcactgtaacatctacactagtcacaagagtctcaaatacatcttcactcaggcagatctgaacatgaggcaaaggagatggttagagctgatcaaggactatgatttagaagtgcattaccacccgggtaaggccaatgttgtggcagatgccttgagcagaaaggcccagtgtaattgtatgagcatggatgtgggagtaaccaccctgtgtgatgagttgtgcaaactgaacctggaagttgtttcttcgggtaaactaagctatatctcggtggagcccacattgcaagaacagattgtcagggcacaggttggggataagggtgttcaggttatcaaagatatgatcaagcaaaaggcagaaaaatacaagtgtttccgacaggatagcaagggaattctatggtttggagatcgattggttgttcccaaggaccctgagcttagaaagaagatactagatgaagctcacctttcaaaattctccatgcaccctggtagcaacaagatgtaccatgatctcagatctctatattggtggactagaatgaaaagggaaattgccaagtacatatccgagtgtgatacttgccagaggataaaggctagtcacttgaaggcagcaggccctttgcaaccccttcccataccatcttggaaatgggaggacatttgtatggacttcatagtgggattacccaatacctccaggcaccatgattctatttgggttatcgtggacaggttgaccaagactgctcatttcttgccagtgcataccacccacagggcagagaagtacgctgaaatttatgttgatcagatagtaaggttgcatggtattcccaaaaccattatatcggacagaggagcaccatttgtggcacgattttgggagcaactacaagagtcacttgggacccatgtcatccgaagctcagcataccacccccaaacagatggccagacagaaagggtgaatcaaattttggaagacatgttgcgagcttgtgcactacattatggaaaggattgggacaagtgtctgtctttggcagaattctcttacaataacagctatcagtccagtttgaagatggcaccttttgaggcactatatgggagaaggtgtaggaccccacttaattggtctcaagcaggagaaagggaaatttttgggccagacttggtactcgaggcagaggcaaaggtcagggtgattaccaaaaacttggaagctgctcaggctaggcaaaggagctatcatgataagaggcggaagcctctacagtttgaggtgggagatcatgtctatcttaaggtatcacccaccaagggtgttcagagattcgggatcaagggcaagttagctcctcgctatattgggccctacgagatcaaagaggcttgtggacccgtagcctatcaagtggaattgccacctcacatgtcagcagttcataatgtgttccatgtatctcagctgcggaaatgcgttcgtctacccactgaagaactcccagaaccagaccttgagatagaaccagatttatcctaccaagagtaccccgtcaaggtgctagatcaaaaggaaagatcaactcgggcaaggtcggtcaggatgtataaggttcaatggggtcaccattcagcagaagaagctacatgggagactgaggattttctacgctctcgcttccccgactttctacccaaaggagtcgactgtaaccttgctgacggagagtacgtcctcgtgccggagcaaggagttgctcaggaggtagtcccggatccagcactagagtctgcaccagaggacctgcttgccactgctttggaaggcaagccccgacatatcccctcacgcgacctgagacgtggtctcccattccggttatggtgggtacaagtgcggtcactgcacgacgacagtcggggtcagtggggcattgtacgccaaggcgatgacttcccacggatcctcagaggacggaaatgcactatcccacactgacgggcttgcgcgagagggctttccccgcattttgtgggaggtacttcagggggccggatacacgacaccccctcagtacgcggtgcagcagttcgagaagcaccgagtgccccgctgtagggtgaggatgactttggagcctcatcccctacagccaggctggcgctctttggactccgagtctttcggataccgagcggaggacacgatcgaggcgatcgctctgcatgggttgaccaccttctgcggattccatcctttggagatggctacccaccccattggattgttccccgccgaaagggaggacgacccaatgtggaaggatcgggtggagcatgccaaggatatctgggccatctacccaggacagactgcgcacttgaccgtacagtgcatgaatgctctgtaccgtctgcaagtgatgcgcggtgaggcgatgtcccatctgatggcactactggaggcaacaaagattacgttggacaacagagaggagctcgtggttgatttgtccactgaaatggtggagaaggacttgcaggtggagcagctatccactgatatccaagagttggaggagctagtgggcaccagggagaacaccatagaagttctcgaggatcagctcattaacacccagcaacagcttgccgaggctaatgagcacttggacatgcatcatcaggagatccaggacatggaggccaacgaggacgtcgacatcgagggaggagaggagcctgcctctagtgtggacactgctggctcagggagaccaccttcccctgagtcgagtgttgcctcgttcgctcactag

SEQ ID NO: 139461 - DNA, 338 bp, Zea mays
  unsure (1)..(338): unsure at all n locations
  Clone ID: MRT4577_58675C.1
tgcgctctcttgcaccctttttagtgagcgccaacaaatgcccgttcattaatctccacaatggctcactatgcttcctagttgccattattctcacaagttcctcctctccagttaccttcaatgggncttgcgaacactccatgctgtgcaaagcctacanggctatcaacatagcgcttgcgagcgagccgtcttacaacaactcaatttgcccaattacaacaacaatnccttggcacatctaaccatacaaaccatcgcaacgcaacagcaacaacaatttctaccagcactgagccaactagctgtggtgaaccctgtcgcctacttgcaac

SEQ ID NO: 139462 - DNA, 11253 bp, Zea mays
  Clone ID: MRT4577_58676C.1
atgtggaaggatcgggtggagcatgccaaggatatctgggccatctacccaggacagactgcgcacttgactgtacggtgcatgaatgccctgtaccatctgcaggtgatgcgcggtgaagcaatgtcccatctgatggcgctgctggaggcaacaaagattacgctggataacagagaggagctcgtggttgacttatctcaagaaatggtggagaaggacttgcaggtggagcagctatccactgatattcaggagttggaggagctggtgggcaccagggagaacaccatcgaggttgtagaggatcagctccttaacactcagcagcagcttgctgaggctaacgagcacctggacatgcatcaccaggagatccaggaccaggaggccaacgaggacgtcgacatcgagggaggagatgagcctgcctccaatacagatgagaagaagagagacaggttcaggagggggctcagcactaagctccgtgatcgtctcaacaccgtcagggccaacaactacaatgagttggtcaacatggctatctcccaagaggactgcattacagctaggcaggcagagaagaagaggaagacccctgtggcaggaccctcagctcagccacagcgcttcaggattgtgtccgacacccagggcaggggaccccagcagcagcaagggcgatgggtgatccgacctcaggagcagcagcaggcacccaaccgcacccaatttccagctcagaggagcaatcagcagcagcagcagtaccgccaggcaaatgacaacaggtgcttcacatgtggcaacactgggcattatgccaagaattgccccaggaaccagcagaggcaggggcagaatgtcaatcagaaccaaggcaagagacagaaggtgcaagtgaggcagggcaggctgaacttcaccaccatgactgatattccagagggagcacccgtcatgactggtatctttacagttttgaattatcctgctattattctatttgattctggtgcatcacacagttttatcagtaccaaattttgtgccaagtgccaattgccttttcaccacaccaatgggggtattacaatctcaacaccaggaggcagggttgcctcctatcagatctgtaggcacgtaccaattaagctgggtagtctcatattcaaaactaccctaatgataatggggttggatagtgtggatattatattgggagctgactggttgaccacgcaccaagcagttatggatattgcagccagagccattgaggtgcactcaccaacttgcggtgagaccacactgtatttgcctgaccggggttgtacccgatcttgtgcttttgttatgttagagtccccagtggaaaagatcccagtggtctgtgactatccggatgtttttccggatgaattgccaggaatgccacctgaccgagatattgagttcgccatcgaattgcaacccgggactgctcctatctccaagagaccttataggatgcctcccgcggaattggcagaattaaagaaacaattgcaagagttgttggacaaggggtttattcgtccaagcacttcaccatggggatgtccagcattatttgtgaagaaaaaggatgagagtttgaggatgtgtgttgactaccgtcctctcaatgcggtgactattaagaacaaatacccgctgccccgcattgatgttctgtttgatcagttggttggagccaaggtgttctccaagatagaccttctctcgggataccatcagatcaagatccgtgccagcgacattcccaagacggctttctctaccagatatggactgtatgagtttctggtgatgtcttttgggctgaccaatgccccggcctatttcatgtatctgatgaactcagtgtttatgccagaattggataagttcgtggttgttttcattgatgatatactggtttattccaagaatgaagccgagcacactaaacatttgcatactgtacttcagagactgcgtgatcatcagttgtatgctaagctgagtaagtgtgagttttggctaaaagagatcaaattcttgggtcacacaatttctcaggatgggatatcagttgatcctgagaaggtacaagaggtaatggattggaaacccccgactacagtgaagcagattcggagttttctgggattggcagggtactaccgacgatttattccggatttctccagaattgccaaaccaatgactgaattgttgaagaagggagtcaaatttgagtggagccaaaagtgtgaaggtgcctttcataccttgaggcagcatttgacaacagccccagtgctagctcaacctgacaacaccaagccatttgaagtctattgtgatgcttctggtactggtttgggatgtgtcttgatgcaagagaaccgagtgattgcttatgcttcccgggcactcaagccccatgagcagaactaccctacacatgatctagaattggcagctgtagttcatgctcttaagatatggagacactacttgatgggagctcactgtaacatctacactgatcacaagagtctcaagtacattttcactcaggcagatctgaacatgaggcaaaggagatggttagagttgatcaaggattatgatttagaagtgcattaccacccagggaaggcaaatgttgtggcagatgccttgagcagaaaggcccagtgcaattgtgtgagcatggatgtaggagttaccaccctgtgtgatgagttgtgcaagctgagcctggaagttgtttattcgggtaacctaagctatatctcggtggagcccacattgcaagagctgatagtcatggcacaggttgaggataagggtgttcaggttatcaaggatatgatcaagcaaaaggcagagaaatacaagtgtttccgacaggacaacaagggaattctatggtttggagatcgattggttgttcctaaggaccctgagctcagaaagaagatactggacgaagctcacctttccaaattctccatgcaccctggtagcaacaagatgtaccatgatctcagatctctgtattggtggactagaatgaaaagggaaattgccaagtacatatccgagtgtgatacttgccagaggataaaggctagtcacttgaaggcagcaggccctttgcaaccccttcccataccatcttggaaatgggaggacatttgcatggacttcatagtgggattacccaatacctccaggcaccatgattctatttgggttatcgtggacaggttgaccaagactgctcatttcttgccagtgcacaccacccacaagacagagaagtatgctgaaatttatgttgatcagatagtgagattgcatggtattcccaagaccattatatctgacagaggagcactgtttgtggcacgcttttgggaaaaactgcaagaatcacttggaacccaagtaatccgaagctcagcatatcacccacaaacagatggccagaccgaaagggtgaatcagattttggaagacatgttgcgagcatgtgcactacactacgggaaggattgggacaagtgtctgtctttggcagagttttcgtacaataacagctaccagtccagtctgaagatggcaccttttgaggctttgtatgggagaagggttattaccaagaacttagaagctgctcaggccaggcaaaggagttatcatgataagaggcggaagcccctacaatttgaggtgggagatcatgtctatattaaggtatcacccaccaagggtgtccagagattcgggatcaagggcaagttagctcctcgctacattggaccctatgagatcaaggcaagttgtggacccgtagcctatcaagtggaattgccacctcacatgtcagcagttcacaatgtattccatgtatctcagctacggaaatgtgttcgtctacccactgaagtgctactggacccggacattgagatagaaccagacttgtcctaccaagagtaccccgtcaaggtactagatcagaaggaaagatcaactcgggcaaggacagtcagaatgtacaaggttcagtggagtcaccattccgcagaagaagctacatgggagactgaggattttctacgctctcgcttccccgactttctgcccaaaggagtcgactgtaatcttgctgacggagagtacatcctcgtgccggagcaaggagctgctcaggaggtagccccggacccagcacccgagcctgcaccagaggacctgcctgccactgctttggaaggcaagccccgaaactcagctagtgcttttggcaaccaaaccccacagccaaacagctgcatgtctagaggtagaggagtagactcctcacaccagatgacttcccacggatcctccaatgacggaaatgcactgacccacactgacggacttgcacgagagggctttccccgcattttgtgggaagtacttcagggggctggatacacgacaccccctcagtacgcggtgcagcagttcgagaagcaccgagtgcctcgctgtcgggtgaggatgaccttggagcctcatcccctgcagccaggctggcgctctttggactccgagtccttcggataccgagcggaggacacgatcgaggcgatcgctctgcatggattgactactttctgcggattccatcccttggagctggctacccaccccattggcttgttccccgctgagagggaggacgacccaatgtggaaggatcgggtggagcatgccaaggacatctgggccatctacccaggtcagactgcgcacttgacaatacggtgcatgaatgctctgtaccgtctgcaggtgatgcgcggtgaggcaatgtcccatctgatggcactgttggaggcaacaaagattacattggacaacagagaggaacttgtggttgacttgtcccaagaaatggtggagaaggacttgcaggtggagcagctatccactgatattcaagagttggaggagctggtaggcaccagggagaacaccatcgaggtcctagaggatcagctcattaacactcagcagcagcttgctgaggctaacgagcacctggacatgcatcaccaggagatccaggaccaagaggcaaacgaggacgtcgacattgagggaggagatgagcctgcctccagtgtggacactgctggctcgggaagaccaccttcccccgagtcgagtatggccgggaggcagcgtcgtggccagaacgagcacgttcctccaccgccgccaccacctcccactctgcaggagctcatggctcagcagaatgagatcctgaggcagctggctcaacgtcagccaccacctcagcattatggtggtggagaccaccagcgtcaccccgcggcggctacataccaggaattccttagcacccaacctccattgttcacaagggcggaggacccacttgatgcagatgtgtggctgcgagtggtggaatccaaattcccactactacatggagtttgctcagaggtcaccaaagtcaggttcgccacccagcagcttcgcggacctgcaaggacttggtgggatcattttcttgctatgcagccagaggaccgagaggtggagtggagggagttcaaggcagcttttagagtacaccatataccagccgggatcatggataggaagctcaatgagtttttggcactcactcagggcaacaggacagtgttgcagtatgcccaggcctttaatgacttgtgccagtatgcgggatatcatgcagatacagatgagaagaagagagacagattcagaagggggctcagcactaagctccgggatcgtctcaacaccgtcagggccaacagctacaatgagttggtcaacatggctatctcccaagaggactgtattacagctagacaggcagagaagaagaggaagacccctgtggcaggaccctcagctcagccacagcgcttcaggattgtgtccgacacccagggcaggggaccccagcagcagcaagggcgatgggtgatccgacctcagcagcagcagcagccggcacccaaccgcacccaatttccagctcagaggggcaatcagcagcagcagcagtaccgccaggcaaatgacaacagatgcttcacctgtggcaacacggggcactatgccaagaattgccccaggaatcagcaaaggcaggggcagaatgctaatcagaaccaaggcaagagttttatcagtgcaaaatttagtgccaagtgccaattgccttttcaccacaccaatggaggtatcacaatttcaacaccaggaggcagggttgccacctatcaaatcaacagacacgtgcccataaagtttggtagcttaataattaaaaccaccctcctcattttggggttagatagtgtggatattatattgggaactgactggttaaccaggcatcgagcagttattgatattgcagccagggccattgaggtgcactcaccaacctgtggtgaaactacattatatttgcccgatcagggatgcacccgttcttgtgctttcgttatgatagattccccagtggaaaagatcccagtggtctgtgactacccagatgttttcccagatgaattgccaggaatgccacctgaccgagatattgagttcgccatcgaattgcaacccgggactgctcctatctccaagagaccctataggatgcctcccgcggaattggcagaattgaagaagcaattgcaagaattgctggacaaggggtttattcgtccaagtacttcaccatggggatgtccagctttatttgtgaagaaaaaggacgagagtttgaggatgtgtgttgactaccgtcctcttaatgcggtgactatcaagaacaaatacccgctgccccgtattgatgttctgtttgatcagttggtaggagccaaggtcttctccaagatagaccttcgctcaggttaccatcagatcaagatccatgccagtgatatttccaagacggctttctcaaccagatatgggctgtatgagtttctggtaatgtccttcgggctgaccaatgccccggcttattttatgtacttgatgaactcagtgtttatgccagaattggacaagttcgtggtcgtcttcattgatgatatactggtttattccaagaatgaagccgagcacaccaaacacttgcatactgtacttcagagactgcgtgatcatcagttgtatgctaagctgagtaagtgtgagttctggctgaaggaaatcaaattcttgggtcacacaatttctcaggatgggatatcagttgatcctgagaaggtgcagaaggtgatggattggaaacccccgactacagtgaagcagattcggagttttctgggattggcagggtattatcgacgatttattccggatttctccagaattgccaagccaatgactgaactgttaaagaagggagtcaaatttgagtggagccaaaagtgtgatgatgcctttcataccttgaggcagcatttgacaacagccccagtgctggcccaacctgacaacaccaagccctttgaagtttattgtgatgcttctggtactggtttgggatgtgtcttgatgcaagagaacagagtgattgcttatgcttccagggcactcaggccccatgagcagaactaccctacacatgatctagaattggcagctgtagttcatgctctaaagatatggagacactacttgatgggagctcactgcaacatctacactgatcacaagagtctcaaatacatcttcactcaggcagatctgaacatgaggcaaaggagatggttagaattgatcaaggactacgatttggaggtgcattaccaccctggtaaggccaatgttgtggcagatgccttgagccgaaaggcccagtgcaattgtatgaacatggatgtaggagtgaccaccctgtgtgatgagttgtgcagattgaacctggaagttgtttctgcgggtgacctaagctatatctcggtggagcccacattgcaagaacagatagtcagggcacaggttgaggataagggtgttcaggttatcaaggatatgatcaagcaaaaggcagaaaaatacaagtgtttccgacaggacagcaagggaattctatggtttggagatcgattggttgttcccaaggaccctgagctcagaaagcaaatactggatgaagctcacctttcaaaattctccatgcaccctggtagcaacaagatgtatcatgatctcagatctctatattggtggactagaatgaaaagggaaattgccaagtacatatctgaatgtgacacctgccagagaattaaagccagtcacttgaaggcagcaggccctttgcaaccccttcccataccatcttggaaatgggaggacatttgcatggacttcatagtgggattacccaatacctccagacaccatgattctatttgggttatcatggacaggttgaccaagactgctcatttcttgccagtgcacaccacccacaagacggagaagtacgctgaaatttatgttgatcagatagtaagattgcatggtattccaaagaccattatatctgacagaggagcactgtttgtggcacgcttttgggagaaactgcaagaatcacttgggacccaagtaatccgaagctcagcatatcaccctcaaacggatggccagacagaaagggtgaatcagattttggaagacatgttgcgagcatgtgcactacattatggaaaggattgggacaagtgtctgtccttggcagagttttcttacaataatagctatcagtccagtctgaagatggcaccttttgaggcattatatgggagaaggtgtaggaccccactaaattggtctcaagcgggagaaagggaaatttttgggtcagacttggtactcgaggcagaggcaaaggtcagggttattaccaagaacttggaagctgctcaggccaggcaaaggagctatcatgataagaggcggaagcctctacagtttgaggtgggagatcatgtctatcttaaagtatcccccaccaagggtgtccagagattcgggatcaagggcaagttagctcctcgctacattggaccctatgagattaaggcaagttgtggacccgtagcttaccaattggaattgccaccccgcatgtcaacagttcacaatgtgttccatgtatctcagctgcggaaatgtgttcgtctacccactgaagtgataccggaaccagacattgagatagaaccggacttgtcctaccaagagtaccccgtcaaggtactagatcaaaaagagagatcaactcgggcaaggtcgatcagaatgtataaggttcagtggagtcaccattcagccgaagaagctacatgggagactgaggattttctatgctctcgcttccccgactttctgcccaaaggagtcgactgtaatcttgctgacggagagtacatcctcgtgccggagcaaggagctgctcaggaggtagccccggacccagcacccaagcctgcaccagaggacctgcctgccactgctttggaaggcaagccccgaaactcagctagtgcttttggcaaccaaaccccacagccaaacagctgcatgtctagaggtagaggagtagactcctcacaccggggacgacatgcgaggacacaagctaactcttctacaggtcgcaccacatcgttccactccaagcctgtcgccgtggcaccaccagcagcgacatcgccatctaccagcactccacgtgacaagatcgtagcaaaaagtctagcgccacctccatcaacaaagggttcttctttcgctggacgcaccaaggatattcaatgttatcgctgtaaagggtttggtcacgtaatacgagaccgtcccaacaaacacacactgattatacataacaatggtgagtattcttcagctagtgattccgaagaaaccatatatgctatgcttgccactgacgttgcaggaacccaagaagaacatgtggatgccacggatactaacaagtatgagagtcttgttgtgcaatgcgtactcagcacgcaggttgcacaacccgagcagcaccagcgccacaccttgttccataccaaaggtgttgtgcaagaacgttccattcacatcattattgacggtggcagctgcaacaacttggcaaggatgcaactgatggagaagttgtctctccccacacgtccacacccacacccctaccatattcaatggcttaaccggggcggtaaactcaaggtaacacgctcgatacatgttcatttctctatggggtcctaccatgattatgctgattgcgatgttgttccaatggaagcttgttcacttctgctcggtaggccttggaaatatgatacagatagcttacatcatggtcgcacaaacaattactctttgatgtttaagggtaagaaaataattcttcatccaatgacccctgaacagattgtaaaatctgacatagctagagctaaacaacaataccagcaaccacccataccaaatgaaattaaactgaaagctcctattttgctcgccactaaatctaattttgatgacggctacattcgtgagtctcttagccctatctctattcctattttacttattcccaagaaggatggtacctggcacatgtgcgttgattgtcgagcgattaacaacatcacaattcattatggctatcctatacctcgccttgatgatatgcttgatgagcttagtggtgctgctattttctccaaggattctaccgacggtttatgcgtgatttcagctccatcgccgctttgttgcatgaactcaccaagaagggcatccctttctcctaggtcttttccttacatcattaaacacaagaacacgaaagataacactattgccgatgctttgtcacgtggatacaccatgctatctcagttagattttaaaatttttggcttacaaactgtgaaagaacaatacgccaatgattctgattttaaggacaatttgatgcattgcaaggatggtagaccatggggtaaattccatgaaccgcatggtggcagactaatgggacactttggtgtatacaagacacatgagattttggccgcacacttgttttggccctag

SEQ ID NO: 139463 - DNA, 679 bp, Zea mays
  unsure (1)..(679): unsure at all n locations
  Clone ID: MRT4577_58677C.1
acgcctgcagggtaccggtccggaatnctaccgaaagagcacgcgtccgcccacgcgtccgctctcagagccccagtcgcgcgccccttcttggttcgctcggggcccgcgcaggcccctcgggcggtggcgaggaggcgcccaggcggaggcggcggcgggcggaggagcgcaggagcgggcggccaggccaccgcgcggcggcggagcgggccgcggaccggcgctccttccccaccgcggcccgacgcaccccggccgccgccatgagcggctcctcaggcaccccgtatctgggcagcaagatcagcctcatctccaaggcgcagatccgctacgagggcattctctacaccatcgacaccgacaactccaccgtggcgctcgccaaagtgaggtcctttggcactgaagaccgtcccacagataggcctgcgccccccagagaggagatttatgagtacatcattttccgaggaagtgacatcaaggatatcactgtgggtgaacctccgaaagctcagcacacactcccgcaggatcccgccattggtcaggcttccctgggatctgcctccgcctcgcccttccagccgcacgtgccttacagccctttccgagggatggcgacctacggtccgctggcgagcagctctctggtcagtcagcagcatgccgc

SEQ ID NO: 139464 - DNA, 641 bp, Zea mays
  unsure (1)..(641): unsure at all n locations
  Clone ID: MRT4577_58678C.1
aggctggccgtcgatcttgtttacctcgtcttggaccgtatcgatgagcagaacgatcgtcgaatggcccgtcacttggttggaatgtaccttgaagatacacccgaaaatgctgcgaagaacgaggtcttgccaattgagttcttgaccgcctacatctcttatgcgcgctccaacatccaccccaagatcaccgagcctgcatcgaaagcgcttgtagatgcatacgttgctatgcgtggattgggcgccgatgtccgctcacaggaacgaagaattacagcaaccacacgtcaattggagtcgatgattcgactttcggaagcccatgccaagatgcgtctttctgaggaggtcacagccgatgacgtccacgaagccgtccgcctcatcaagtctgccctcaagcaggcagccactgatgcacgcacgggattgattgatatgtcgctcctcgcagaaggcacctcgactagcgatcgacgcagaaaggaagacctcaagcgtgcagtcttggcttcgctcgatgagcttggttctgccggccagagcgtgcgattgagcgatctgatgaagagcgtccgagagggtgcgagccgacaagtggagnaccaggagtttctagaaggtgttgcgaagcg

SEQ ID NO: 139465 - DNA, 411 bp, Zea mays
  Clone ID: MRT4577_58679C.1
agccaaatgatttatgtaagtctaaggtaaaccgcttacactacaaatgctgaatcttatacattgagctgcggagcttgatcaacctgggaatttgctcaacagaaggtcattcgaaatacctactaatcaggcgaggtagaaagccccccagggcacaactctttcttagagccagagctctattttcatttctgcaaaggccttgaacttataacacaacacaatgttcttacatctgggctttcactcgctgggtgcctacccagtgatggacgcatcttgcttttcaaaagaccatccaaagctcattagcctcccccgataatgaggtgggcatccttcgcttgtaaagcaatacgtcccattacctaccacccagttaacgccgaaggcatgacccactgaccc

SEQ ID NO: 139466 - DNA, 403 bp, Zea mays
  Clone ID: MRT4577_5867C.1
actccttagggcgattgggattcccgaggccggccggggcttctcttcctcccagcaaccgcttctaaacgggcgccggcggttattactacgttccgccaacgtactctagcatacggcgactacgatcatgggctccaccgacgatgatacgctggcctgatgctctcatataatctcaggcgggtcgaggctgtcgcgcttgatgtcctgtccgtgcactcgtagtcgctgccgctgttgtacgtcggaaaacaatgtgtaacgacctgcgatctccgtggcacgaaccataaacatgtttcaagcatagtaggaccttgactggtatcagatgatctgcactcaaccagacatgaaccaactattgaacaactgtgacgactatcaaccctgacgggtg

SEQ ID NO: 139467 - DNA, 261 bp, Zea mays
  Clone ID: MRT4577_58680C.1
ttttttttttttgtctcttttttatttttttgggggttttaggaacagaagagacctgatctcccattgtactggacgcacccacttattcaccaaattacaccaacgccccgggcccaagtaaaaaaaagcgtgcagaaagaagcattttacttagcccatcacccatctcgacagggtaaagattggcgcatgggaaaataggttaccccctcgggtacccaggttctattttggtttatttgactcaactgccggttc

SEQ ID NO: 139468 - DNA, 461 bp, Zea mays
  Clone ID: MRT4577_58681C.1
agaccggacgcaggagtcgacacgcgagggccgagaaattgagcagggcgcgcgcgcccttgacgctgagcgcggcggcgtcgtgcgcgcgcgccgccatctccgggcgcgggaaggtgcccagccagatgcgcgacttcttgcggggctccctgatctccgacacccacttgccccacgcgcgcatgcggacgccgcggtacgccggggcggcggcggcgtgcgggcgcgggcgcttcttgccgctggtggtggacgacgtggaggaggggtcggacgagtaggaggacgtggacgaggtgtcggagctgtgctggctcattgccatatccatacagatacagggttgttagtcgatcgtgtgcgtgtgtgtgtggtcgagcaagagagatcgaggacagaggtggtgcaatgcaatggcgggtagatactagctaggtagctgtcggaacccggccggc

SEQ ID NO: 139469 - DNA, 604 bp, Zea mays
  Clone ID: MRT4577_58682C.1
ggtaccggcccccttttggagttttttttttttctttttttttttttttttttttttttttttttttttttttttttttttttttttttttttttttttttttttcccaaaaaaagggttttttttcgcgccgaaaaaggtattttaaaaaacccccgccgttggaacccagaagagggggggggccccctacctttttggggagggaaaaaccttggggggaacccccaaaaaaaaaaaaaccccaggggttttttttaaagggccccccccaaaaaccccggaaaaagttggggggggcccgaatttttcctcaaaaaatgttttccccccccgggttttccccccggaaaaaaaaagccccctttttttttccccaaaaggaacccccccccccccgtatagggccccacaacgggggttcccccaaattcccccccccccccaaatgggttccccgcctctaccgggggggaaccgcgcggaggggtcccaagggggccacaccacctttagagagatttgggggcaccccccgggggggggcccccccctcaacatatgggcgaaaaccccccgaaattatggaacccccgccgctttt

SEQ ID NO: 139470 - DNA, 1171 bp, Zea mays
  Clone ID: MRT4577_58683C.1
tttgggtaactctcaaattggctattgctgatgacaaaaattgtgaaggtagaataatcataactactcgtaaatgggaacttgccaaagatgctagctgccagcactttttcctgatagctcaaggaaattattctatacaagaatatatggtgataaaaacttcagtcttggagaaatttgaagtgtccaacggtccaaggcgagtgacaggcagggcgactcgggcggccttccatccgccggaccgccgccggcggcttccaacctcgccgtcaccggagtggccgcagatggaagcttggcagcaacttcaagcttgcttgaagggcggatagtggatagccgccaggcgctcaccgccgccggctcccgcctccccgagccgcacgccgccagatcccaccctcaggtgccgcccagcgccggatcccgcttcaccgagctcccggtcgccggatcccatcgtcccgagtaggcgccgccggatcctgccgtcccagagcaggcgctgccggatccgtcttccccgaccagcccgctgcaggctccctcctctgccgaccaggacctcgccagtgtgcttctgggacaggccttcgcctcagagagcatcggagaggtggaggcagcccggatctgctacgtcctgctgccgtcgcgggagatccagcggaggaggcccgggacggccgccgtcgctccgtagctcggtcccgccgccgccgccggggtgctgctgctcccgcggagtccgcgcgtggatctcgtcgccgccgccagggagcctgctgctttcgtggagtccgccagtggatcccgccgccgccaccgccggggagcctgctgtcctcaggagcccgctcggggatcccgtcgctgccgcccgggatcgggatctcgccactgccgccgccgttgggagcctgttgctgttgccgcccgggacgactgcgcaggaaaggttggcttgaccacatcgccgcggcaaccgccggaggtccttcctggcctcaagcccacctttcgagctcgtcggctgctcgttctcgagtgcttgtccttgccctgcttcatgtagggccgctttcttccctagattggctgctgccgtcaatggcggcggccggtcttagcgctagcagaggccccgtctccaacagccgtccgc

SEQ ID NO: 139471 - DNA, 153 bp, Zea mays
  unsure (1)..(153): unsure at all n locations
  Clone ID: MRT4577_58684C.1
ccaaagaaccggccgcccacaagcagaaagacggaacgaggagcaccgacngcccccccccgggcggagaacncncgcgagcaggcaggcacagacaggngaccggcacacgggagaagagaccnngganggaaggcagcggcaaggccacgg

SEQ ID NO: 139472 - DNA, 740 bp, Zea mays
  Clone ID: MRT4577_58685C.1
ccggccggggagcatcctcacctttcacaatcaggccaaccaacatgtcctactttccaggtcaagggtataacggaggcggaggcggcggtaatggctatgggtacggtcctccatctggccctcctcctccccagcaacaatacggtggttactctggggacaactccggatcgcgaagataccctcccccgaattaccctccacctcctcatctcgatgcctacggatttcctctcccgcagggcctgaaccatcacgcccaacacgctcgatcaggacctcctcccccctctgtgccccagcagttcggtcatggagcccccgaaggctatactttccagtactccagatgtactggtcgtcgcaaggcacttctcatcggcatcaactactttaaccaagaaggcgagctgcgaggatgtatcaacgacgtacacaatgtttcggctttcttggtagagcgctatggctacaagagagaggacatgattctgttgaccgatgatcaacaagatccagtcattattcctaccagagagaacatcattcgggctatgggttggcttgtgtcgaacgctcagcccgatgatgctctcttccttcactattccggccacggtggtcaggtcgaggacctagacggcgacgaggatgatggatatgatgaatgcatttaccctgtcgatcactcccaggctggtcccatcattgacgacgagatccatttccgtgtcgtc

SEQ ID NO: 139473 - DNA, 388 bp, Zea mays
  Clone ID: MRT4577_58686C.1
ctggatccttaagcggcgccttttttttttttttttttttttttttttttttttttttgggggggttttttttttttttttttttttaagaaaacccccctttaaaagggtgggggggtttttaataaaaacccttgggttatcaaaccctggacccccccctaatgggttaacaaaaatacttggcccaaaagcccaaaaaacaacgtcccaaccccggaacaaattttgaacccttacttgttttgacaattcccgttgattccaaacaaattttttgggggaaccaaggggggggggtaaaaaatccccttttttttccaaccattttaattttttcccaattggagtccggatgcattttgggcatcccgacccctgggtccac

SEQ ID NO: 139474 - DNA, 299 bp, Zea mays
  unsure (1)..(299): unsure at all n locations
  Clone ID: MRT4577_58687C.1
aaaaaaaaaaanaaaggaaggcggggaaacaaaagctggaaattnggtttgagcgcgatttatcactgnggntggtgccactaccgcaggggtgtaacgtctttgagatggaacnaagggaagngaagatcggcgtgctgacaaaatggacttgaagccaggatagagcccatggccgcccatgggaccttttcgagcaagcatttccatgaatagatagatatacagctcgcagtcttactgtacataatgtcaccaggatgtggtttatatatgacattatttatgctatctgatta

SEQ ID NO: 139475 - DNA, 273 bp, Zea mays
  Clone ID: MRT4577_58688C.1
gacctgttatttgttcatttccattctcaagggctgtaacatgtctgcattagttcttgcccgaaacctgatcaattaaaaaaggatcccggacaccaaaggcccccttgctactgaccgggccacccccccgatctaaaaataaaccccccccgccctccttttaagaaacccccgaaaaaaaattcccccctggtggggaagtttacaactcccccccccccttttttttaacattttccccctctacaaaaagaacctttccttcaaccc

SEQ ID NO: 139476 - DNA, 332 bp, Zea mays
  Clone ID: MRT4577_58689C.1
tttttctttaggggtttatcccaaacttccgtgagggtgattaaattttttcaatccccaccggcgaaaaaacaacaaaattgtttgaatatcctttcccaacccaaatttctaatataaaaaaaaaattgccaaagacgccatttttagcccagggaaccattgacgccttggttcttgaaccgaattggttcttttaatgggcactttggtggccttaccgagggttccggtatccccctcctacaaataatgttggcgcttgtaggtccgcccttccttcggaggcttgacctttggattggccacggggggttagtggcccccttgga

SEQ ID NO: 139477 - DNA, 466 bp, Zea mays
  Clone ID: MRT4577_5868C.1
tgtttggcggaccccacttgtcagccctctccctctcctctaacttccggtccgcgcacctgccatgggcgcgcccacgtccgcgcgaatcccggccaccacccacgcgcccaacccctactcaagccccctctcgttcactctgctattcccccactcgcagacaccctagctcgccttcgctcgtgcgtcgttctttctcagagtctcagaagaccaccgccgctcgccatgcccacgcgcccgttctgtcgtcaccgttggggcttcgccgtgcctttcacctcggtgagttctgccttgatgcccgcaacttgagacgcgcctcgatttactctctccctttctggttccctctgcccatgctcatcgaagcttcccacgcacagccgaagagccaccgtcgtcgacccaagcccttgttgtgtccctgccaccgttcaagggtcccggagtcttctctcga

SEQ ID NO: 139478 - DNA, 284 bp, Zea mays
  Clone ID: MRT4577_58690C.1
ttttgtatgtttgttttgtttttaataccacgaatttaatgagtatcatgagtaatcatttgatcggggtttgataaattatgaccgtggattttattgcatcggatggaatttacggagaaaacccagtaacatggggtaggctggccacgcatagttcttggggccgctactgagggagcgaagatccttgtaacgatttataccggtggccgggaggaagggccaggtacattatctaggaactatgccggggggtgctttgtaatttaacacgctaaata

SEQ ID NO: 139479 - DNA, 261 bp, Zea mays
  Clone ID: MRT4577_58691C.1
gaaaaggaaacctcggaaaaatagcacaaaacaatggtttccaaaaattgtcccgaatcagctcaacattaggatgagaacccaccaaatgatctcgaaagaactgaagttaccagtcaaacacagttgatgttgtgccagggaggtgatgttgtgcagcaggagttccagggagttgatgttgggcacttaaccccaccaaggctattgttaggcgccacagattcagttggtcatgttgggcactttaccccaccaagg

SEQ ID NO: 139480 - DNA, 307 bp, Zea mays
  Clone ID: MRT4577_58692C.1
aaatagatcttatagtccccatggctgttgcatgcatgtaagatgaaaaagtattatagggcttaataaaaaggaagtaactacgattttgagtgtccaaaaaatatacacagatccattcgaaataatgaatcaattgctgatgctagctaaagtaaggccttttggtcaagataagcagcttatgaactggaatcaccatcttattgactgatttgctccccctttattaaaacagccttgctggtattgaatcgctctgcctgcgaatccaatcgctttcgactatcgaatttgctttcagcat

SEQ ID NO: 139481 - DNA, 526 bp, Zea mays
  Clone ID: MRT4577_58693C.1
ccggccgggacgcggctacgcccgcccgccgcgacccgtcgcaaaccccgactccgacggccgcgatccgccgttgcgcctcgccgatcgatccggacaccgccgccgagatcaggtgaatgagctcaagaacggccgccttgccatgttctcaatgctcgaattctatgtgaacggcatcgtgaccgacaagggccgcatcgagaacctcttcgaccacgtcattcgaccgcgtcgcatcaaccgctgggcatacgccacgaagttcaaccacggcaactaactgactgagcaaggacgtacatgtgtactaccatcacatccatccattcggtcgtccgtgccatgagagaacagtgtgggcatctctgtactctacttgtgcagatcgtaggagtggacaactagcacaacgagttgcatgctcatgatcgatgtgagataattcatcaatgaccatggctgtctgctgcaagcggactatgtgaaataatcacggacttcatgcatcgacatgagaggatga

SEQ ID NO: 139482 - DNA, 482 bp, Zea mays
  Clone ID: MRT4577_58694C.1
ctcgttgagagaaggaaaaatatcctaaaaccctagctcccgatctggatggagaaccctcacgtctttttagagatgaccgtctagcggcgccccaggcggtccgtatcgtgatggagctgtacgccaacgaggtgcccaagaccgcggagaacttactggcgctgagaactgtctacaagggcgtgtgcaaatcctgaaagccgctacactacaagggctccaccttccactgagtcatccacgagttcatgtgccatggcggctacttcacccgcggcaacggcaccggcggcgagtccatctacggcgagaagttccgcgacgagaagttcgtgcgcaagcacaccgcccccggtgtgctctacatggtcaacgccgggcccaacaccaacggttcccagttcttcatctgcaccgacacgaccccttgggtcgacagcaagcacgtagtcttctgacaggtcgtcgagggcatggac

SEQ ID NO: 139483 - DNA, 448 bp, Zea mays
  Clone ID: MRT4577_58695C.1
cttggaaccttgggctgatttatgtgcttgtttatgtgcttgcttatgtgcttgcttatgtgcttgtttatgtgcttgtttatgtgcttgtggatgtgctgtggttggttctgttctatatctttgtttgctcttggtgacctacttatttaacaaagcacttaatttcaatgacttggactgttccattttgtgctacttatgtgaaccgacctgaccacttctggaccccttttgcccccccgcgggcccttcactcctcctgactggagcgtcagggcccgggtgtgtctggcgggtggtgcatcttagggctactgccagccggatgggtcagggcgtccctctattggtggaagggaagtgaacttaaatgacggagaagaagaaggcggtgactttgtcggcgcgttatggctatctgtggttggcggcggactctcctcat

SEQ ID NO: 139484 - DNA, 153 bp, Zea mays
  Clone ID: MRT4577_58696C.1
atgcgcgcgccacggaccagcaaccatgtcgtgctcccagctcaccaccgcctggtccaccccagcgacgcctccaccacccgacggcgctcccccccgcgctcgggtctcctggtgcggtgtgatcacggtggccatgatgctggtggccgc

SEQ ID NO: 139485 - DNA, 170 bp, Zea mays
  Clone ID: MRT4577_58697C.1
ggatggttggcatctcctcaaagtctggttcgggttcgggttcgtgacgttctccgtggttaggtatcgagaatcgacatatccatatagcgtcgtcggatgctgagtactgctgcttctgcaccggcctcgactagtccacggacgacgagtgcttcgacaatacctta

SEQ ID NO: 139486 - DNA, 538 bp, Zea mays
  Clone ID: MRT4577_58698C.1
acttaaatatccattatggggccggggtttttttttaaacaccttccctaaaaaaccaaaggtcttaaaaccgaaaaaacaaacacccaaaaaattaaaacacccgcctcaaattttaataaacccatttaaataaaaaaaaatattgaacgcccccatgaaaaccctgtaacagaaaaatttcccaaaaaactcaataaaaaaacccccacaaatatatttgcatttaaacctcctgccaaaaaacctgggcaaataaaaatctcaaaaaccccaacccccactaaaaagggaattaagggggtttgtgttccccctggaactaaaagaacacatatttcttttggcctggcaaaccccccaaaaattattcacgcccccctatttagtgatcccctttttccaagggaaagttaaattaccaaaccttggaaaaatattacggccccaccccaacaaaatcttggacaaataaaatctaactttgaaacccatttcttagcaaacccccctttaaccactcccaaaaatacctcaa

SEQ ID NO: 139487 - DNA, 544 bp, Zea mays
  Clone ID: MRT4577_58699C.1
ggttcccttccctaattatggtttcgtcctttagaattgttataattttttcttgtttaaattttaaatgcccttttttttttttttttttaagcaccttccttttttggtttatttttggattttttaccttttttattttttttttttcttttttttattattttttttttttttttttttttgttttttttacgaatccgtgcgacgcggggctggatctcagtggatcgtggcagcaaggccactctgccccttacaatgccccgtcgcgttttaagtcgtctgcaaaggattcagcacgccgcccgttgggaagggagcttcgaggcgccccgccgcggcgcgtcggccgggcgggctgagccaatggcacgggcccttggggcgcgaacgccttaacgtggtttgggtcgggcggacagcaaaggccccggtggttacgtgggtatttacttaaaggccttagctgtattcatgtcacggaatttggcgctattgctttaaaccaaggctcgttgaaattaggtaaattaactgtgca

SEQ ID NO: 139488 - DNA, 536 bp, Zea mays
  Clone ID: MRT4577_5869C.1
tttaacataaacatattgaaggatacaatacgataatataatacatatggcgcggacgcaggttccacaactgtctctaaagacagtgtacatgcagttacgaaacggtgatcagtacaacattacataactctaacagtctgcagctccatagactatacatgtacggtgcaacaagcagatgatcattgtatacaaaagcgtgttgtaagcgttggtttgttgcgtagttcttaaaaagtctttggcacaagcacatcaagctgcttaggcttaaacatgaagggagcgaagcacgttcatgtcaacaagcatagaaatccagcgtggcctatgcatagcatcgatggcgaacactgatctagtagtaacctcttcctaggcgtggatgtcagttcctttgttatagcgggagtagcacctggaaccacagtgctgctgccaacacaaaaagtcttatcttgcacactggttgcggaactttgtggtgtgagcggggtggaaggcatgaccaagttagaggctttgttaggagt

SEQ ID NO: 139489 - DNA, 380 bp, Zea mays
  Clone ID: MRT4577_586C.1
gaaagggaaagacaaaagaattgccttccaatatattagataaaaggagtaaacactgtacaaaaactggcacaaaaaatgacgtcaacaccaaaaacactagacaagcaacacctatctagcaccactgaataaaatctaaccctctggccaggcccccagacactactagcaggtcagacctctacccacaagatctttcaccatctgcaccacttgttctgtcgttctctgttgacccttgaagattctgttgtttctctccaaccataagctctaccagaaataaaatagaaggccatcgaaactttttcttgaatgcttgttacagagcaacctcagcctgaaccaccattcgctaagagtgagtagtacaagtg

SEQ ID NO: 139490 - DNA, 643 bp, Zea mays
  unsure (1)..(643): unsure at all n locations
  Clone ID: MRT4577_58701C.1
cctccgcctgcccgtaccacaacatgaancanctccacaantcttcccctacccacncnccatcncctttgcacgcaccggctcccaaggccgccaanccggcncnccctgggccncnctcctgaatcggctacntcctccgcnagcancgcctcctcttcntcctgctcggtgcgctcatcgcctccaccttcttcctcctccggccctacctctcnctctccccntcttcccacctccccaacncccgcccnctcttctccttcnccaccctctccnntgttccccccggcttccncccgccncaacncctcttcttcntaacangcncnnctgggttcnntctnanccacctcctctaacgactttctgaaccaagatcacaacgtgatcntgttcctcaacttcttcaccgacataaaagataacctctcccaccacctccctaaccccaacttctacctgctcctccacaatgtantccatccaatcctcctccaggtgaaccggaactaccncctctcctcccccacgtctcctgttcactacaactacaaccccaatcaaaccatcaaaacaaatgtcatgcacaactttnaatattttccatccttaacatacccaattcttacaaaggtttttc

SEQ ID NO: 139491 - DNA, 913 bp, Zea mays
  Clone ID: MRT4577_58702C.1
gagggcaacagccaacagctcattttcaccgttacagatgtcattggtttaccagaagggcatcaccctttttttttagaagagtacatccactgctccacatattcgactttgtaccgaacttacatttgccatgttgtacagtacagatggagcctgccttcacgacaagcggataaaaagtcgatgactctcaccttattagtcattgtttctaaactgaacatacttgcagtgccagttgtttatctcctagtaattgctatatgcaacacagtgcaggggggaagacagctgatgtttgctgctgttactggagtttcagttacaatcctcagcaccgacgtttctttctgcgtagagaagtgagttgaaggtttgcaacatatacacacaacggcatctgaagctgaacctcacgttcttgttgtgccgatctggaaaccgaggacccggagcagctgctgcatggctttcccggcccaagccaagtcgttctcaaatatacttgtcggcctgttcggtagcacatcacctccctgatacaaggtagtgtcgtcgtcgtcatcgtcgtcgatgctgccattaccagcataattggcggcagaaagggtgccgttttcttctccggggacctcttcaagaatcgtcttgtgcccgtccaccaccagctgcggttggcccgttccgtttgctgctaccatttcctgctgcggaggagcatctgcaaccaccgcagccgacctgtcactgtcagctcgagccgaattctgagtgcttctcgggattatctgccggcattgcgtttgcgccatctgttcccgcaagatcctctggaaacatcacatcttccccgatggagagctcttcctcctctgacactttctgtttgttgccgtgatcccagtcttcg

SEQ ID NO: 139492 - DNA, 311 bp, Zea mays
  unsure (1)..(311): unsure at all n locations
  Clone ID: MRT4577_58703C.1
gacgagaanaagggggggacggggaanacactgagtgaccttccaagggagaccanggctgagaggggggggtcttatgcggcgaanccaancaccaganaaatggggttnttntgtgaggttcatgcctaggcggtcctnaggagnacaactgcgtgcgtgttgggaatactgaccctttaattttctatacatactatccataanacaatgtgggggggcccaggggtccaggagggggtatctcgtgaaactcttncgtgcgtgtatctatggggtgagggaatggggagagtgggcttctgggggtg

SEQ ID NO: 139493 - DNA, 1433 bp, Zea mays
  Clone ID: MRT4577_58704C.1
gaccaaccttgatctattacacagcacgagtttttttttttttttttttcggtaaactgtaaaaatgttctcctcaatttgaccagattccttaagattattacaattaccagtttcaatttacgtgacagtattacaattactaccttcatttgcgcgacagcaaatacgagtagaagccattaagtacaaacctagcacaaggagctggcatttgttgtatttagctggcaacctcaactggttcagatcccttgtcaatagaagctttcacggcatccagtaccacctgcgtcttccgggtgatagccggccacttaccctcaggcctgccaccggcgcggacgttctgcacaagccttgtgaattcctggatcatgagtgcctcctgtggcagatcagtagtaacaacatgcttctctggcaatggatcccatccgatggtgggtttgacgaagcttgacttcgaggccacactgaactccgcagagctctcttcgtacggaatgaccaggtcagtgacatggagagtgccgtttgtgccatagacggtcacgtcaaaggcgaggttagcaagaaacgagcagttgaagtttgcagtcttgccatctgcccagtacaaggtcgcaccgcaagcaaggagcacgccagcctggttcttgacaggatgccggtgagcgatcacggtctcaggcagctcatagtcaacagcccacaggattgagcggatgcagtaccatccaacatcaccgaggacacccaaggcgtcaaggtctggctttaccctgatgtcattcttgaggaattcctcggatgcccgaaagctgcacatactgtttatcactctgacgtcgccaaaggcgtccttgtcgctgacgatctcccgcatcttggcggtgcgcgggttgtggatccacatggtggtgtccatgaactggaccccggaggcgtcgcaggcgccgaggatggcgtcgagttcggcagtgcagagcgcggtgggcttctcgaggagcaggtgcttgccacgcgcagcgacggctgtggcccagggcacgtggagactggtggggagcgggaggtacacggcctccacgtccgggtcctctaggagagactcgtaggacccgtggacgcgcgccgcggggaagccgatttcggagatgaagcggcgggccttgtcatcggagcgactgcctacggcggcgatggtggcggcgcccggagggagcatcagcattgcgcgcgagatcttacgcgcgatgtcagcgcatcccaggacgccgaagcgcaccgcgcgcggcggcggcggctgcaccggcgctgcaggggacgacattggcggcggcgtcgttggttggcctcggttccgaccggtgtgtggagcggtcgcgcgcctgcgtcagttatgattgtggtcccggccggcctcgagg

SEQ ID NO: 139494 - DNA, 775 bp, Zea mays
  Clone ID: MRT4577_58705C.1
ctctttcccttcgccaatcgcggcgtcggcggctgcggcggaacctcccggcgatcaccggactcaccccggcaggcaaagcaatgaggaggtacagtccccaataccggagtcccccaaggaggggatatggtggcagaggtagaagtcccccgaggaggggatatggaggacggagggagcagggttcaggaagcctcttggtccgcaacatcccattgagctgcaggccggaggatctgcgggttccttttgaaaggtttggtcctgttcgggatgtgtacctaccaaaggattattacaccagatagagtcttgtcctaatgaagaagttcttctatgaagacaaagatttgatttgagaaaattagtttcgtgaagagaagataaagagagttgtattgggtagtccatgagaagattaagagaagcgaagttcatttcaagtacttttgagacttttcaaacattgaggaacttgaagcgaatgattttacgaagatgctctttatgaggatcaccgtacttagtcattatacaagaaatttgtacaagaaacttggatactagggcctggacatatagctgtgttttgcaacacttgcttcatgtttgatgggaaatgtgtgtaagttgttgactgtgcttcgtcaagaatcatagagggcacactgcatttgaactgtgatggtacatgagaggcacacacactctttatgaatcttcatgctctcctttggctggtatcccattatattttcctttatcctacttt

SEQ ID NO: 139495 - DNA, 154 bp, Zea mays
  Clone ID: MRT4577_58706C.1
acccactcatcctcacaactaaccatttaacaactccggtatatctatatattctccttccttatcctcctgtctctctctacatgtatcactagcaccaacacttttccctaaacgctcacactcttctatatctcccattcttaccctatac

SEQ ID NO: 139496 - DNA, 256 bp, Zea mays
  Clone ID: MRT4577_58707C.1
catcccattaattaactgttccacataatttatccatcccctggataagctgcccacaaaagcaagagcaagcgaggggtctactcaaaacaattgctaagcattggggggtggctaccccgaacgagggaaaggttttgggggaggggggttccccaaaggataaaggaaacggggggtttggggggtgcacacacaatcgtaacttcggggcacgtagggtgcaccaacaagctgccctcgttttcactccggg

SEQ ID NO: 139497 - DNA, 444 bp, Zea mays
  Clone ID: MRT4577_58708C.1
tggatccaacttaatcacggatgcgttagatacaagagcgcbtkaggatcyaacgcattcatgaaggtgaatccatccagcbagcagtbtcagtgaatttaaacatggctggcgactctagccacaaacgtgcagcagcactctacagggtkaacattccyctcgcaagttaycbtggtcacactctgcttgtgctttgccgcctttgcttggcactcacgcccacacgcscccaattcgtcacawacaccagtkgtcacagggtcgcacagggtctcaatttcttgaattgctgaaatcgcagtagaagacaggatcacaagcacgargcaaagagcagcagcgcacacggcctgggtcgcgttgtkcgtctygacgagtgacgacgacatgakgakcacaaatgttcccctyccyytctgtacgcstgttgcstctyccccy

SEQ ID NO: 139498 - DNA, 342 bp, Zea mays
  Clone ID: MRT4577_58709C.1
agctaggatcttcattcattaagcatggaacaatggcgttgaagtcagcggcttcgcttgcccttcgtcttgcttgctttccaaagcgccaaagcatgccgaactgcttccaccgtctttgctttccgatccaagtggtagttccacagctcagggaaaggatccctcctgccgccattgccgtccttcagctccgtcagcgcctttgttactgcagcatagggttcctcaccgagctcctttacttcttggagcttcttgtcaccctcattgagtgcttccgacacttttccatcaacaataataaccttgaaaggatgccattcaggattttcaatgtca

SEQ ID NO: 139499 - DNA, 337 bp, Zea mays
  Clone ID: MRT4577_5870C.1
aaacctgccgggtttatattcattttcccctatcccccatcatctttacacttttctacacatcaccttattttaatacacatactaatacccctcccccttcatcaattcacatataaatggatggtttacaattttttcaaggcacaatcaccaaccttttaacttcctttttacctcacaatactaccaaactttttttctcataattcaacaatttcaagacattcaccaccctacattcactttttaacaaaacacaatacacacgggacgtacacactcactcacaaaccaaaaactttcttaaccacacctcaaaaattctttattctta

SEQ ID NO: 139500 - DNA, 389 bp, Zea mays
  Clone ID: MRT4577_58710C.1
ccggcccggatttccggggtggaccacacccgtccggaacctttggttttgaccactgacggcctttattactggcgatataattttccgggggggccaaaaaaagatttggggactggactggccaccaattaaaagaatttaattttaaaagaaggcccagaaccaatggctgttttaattgttgaacctggaaggggggctgggggggtaatccttcctccaaggacttattttgccagggtccaggcaatcgcaaagaagtttgccatttttttaatagcaaatgaggtgatcactgctttgggaaggctgggaacattttttggaggcgattcctttaccataaagccggatttagtttaactggccaaggttttttcaaactc

SEQ ID NO: 139501 - DNA, 465 bp, Zea mays
  Clone ID: MRT4577_58711C.1
agggggcgcgccaaccatgaaaatgaagacgacctcgtgcatgcatgtagctaagctaggcatggcgtggacgatggatggatggacgagcacaacagcaaagaggcgcttattagctacaactactggccttttttgttgttttctttttgctcctacctatgcatagatagtagtctctactctctactctctacctagcaacaacaacaacctagctgatgcgcgcatgcatgcatgcattggtcgtcgcttactacatgcatggccattcagtgcagtgcgtgtgtgcgatggcggagaaacaacctagctagctagctgctcgatcgatcgatcggccttgtcttggaagaaggcggcagggagggggtccctgtgtaactgctgtggggatccgatatatcgatctgtccttccggccggcaagatcttgtaattagccgctgtggtactagctagcag

SEQ ID NO: 139502 - DNA, 795 bp, Zea mays
  Clone ID: MRT4577_58712C.1
ggccgttcacgtgtcttcaccccgagtgctgtctctctccttcctctctgctacggctgggtgaggcggggggctactgccgccgcctaacgccaggttccgaggccttcgtcggtctatttgccggcgatgaacatccaccagggatggttgcaacaatttgggcatagcgttggtatcagtggttcgaagatggttctccatatgacccacaatgtattcagttttcgatgctttgctgccaatgggcgtggcttcagtgcggattctaccaataagagaaaaattaaaagtaagaagaggcgaaaggatgttgcactggaatcaaggtctgctcttgagaaaaagaaagctgaagagaacaaagattatcaagctattgattatgatgctccaattgagtcagataaaagtactattggctttggtactagggttggaattggtgttgcagttgttatatttggactagtcttcgcttttggggatttcctgccttatggaagtgttagccctagcagagaaagtgcagtagttaaacaaaagctttctcaagaggaagaagaaaaatttaagaatgcactgcaaggctttcaagcaacgctgagtaagtcgcctaatgatcctactgctcttgagggtgcagcagtattcgttgtccgaactaggtgagtatgagaaggcatcaacattccttgagaagctaattaaggtaatccctgataaagcagaagcataccgtttgcttggtgaagtaaagtttgaactcaggattatgaaaggagttcatcatca

SEQ ID NO: 139503 - DNA, 1861 bp, Zea mays
  Clone ID: MRT4577_58713C.1
aaaaagtgtactactggattctcacaccgcagcatccgttcacgtgtcttcaccccgagtgctgtctctctccttcctctctgctacggctgggtgaggcggggggctactgccgccgcctaacgccaggttccgaggccttcgtcggtctatttgccggcgatgaacatccaccagggatggttgcaacaatttgggcatagcgttggtatcagtggttcgaagatggttctccatatgacccacaatgtattcagttttcgatgctttgctgccaatgggcgtggcttcagtgcggattctaccaataagagaaaaattaaaagcaagaagaggcgaaaggatgttgcactggaatcaagtgaggtaatatctggaaatccaaggaacagggaccaatgggtgccagaattaagaactgaaagtgaaaacaaatctggtaaaaaagtcatggataagaaatttttggaaaaagtggaagcggttcgaaggtctgctcttgagaaaaagaaagctgaagagaacaaagattatcaagctattgattatgatgctccaattgagtcagataaaagtactattggctttggtactagggttggaattggtgttgcagttgttatatttggactagtcttcgcttttggggatttcctgccttatggaagtgttagccctagcaaagaaagtgcagtagttaaacaaaagctttctcaagaggaagaagaaaaatttaagaatgcactgcaaggctttcaagcaacgctgagtaagtcgcctaatgatcctactgctcttgagggtgcagcagtatcgttgtccgaactaggtgagtatgagaaggcatcaacattccttgagaagctaattaaggtaatccctgataaagcagaagcataccgtttgcttggtgaagtaaagtttgaactcaaggattatgaagggagttcatcatcatacagaagtgctttatcttcatcagataatattgattttgaagttctccgtggactgacaaattcattacttgctgctaagaagccagatgaggcagttgatataattctgttatgccgtcgaaagttgaatgaaaagagtcaaacaggactagcagatttggaggctacaaatgacaatggtcgccaaaagcctcaagatattgacccgatccaagttgacctgcttttagggaaggcttattccgattggggtcatatcagtgatgctatttctgtctacgataagctaataactgatcatcctgaagacttccgtggttatttagcaaagggaatcatattaaaggaaaatggtaaagcaggtgatgcagaaagaatgtttattcaggcaaaattcttcgccccggaggcagcgaaggcactagttgatcgctatgcgcaaagatagtcgataagagattgaatggtgttgttttaaaccaatgagatcattcggattccagaaaaacgatcaacatgtttggaacgtcttgtatgatagcaacattatgggatctgggacattttgaattgtattgttttagaacaggcctgacgcagtatcgaaaaaagccttcccactgagacaagagattctgggttcgacagtctctgaaaaaatgcagggcaagccctgcccttggttattccttctttctgaaaaaaatgcagggtaagccttgcccttggttattccttctctctgaaaaaatgctgggtaagccttgccctgggttattccttgctcagacctcgctcacgcggaagccgccagcagcccttttattgctttagaacagcagaaatgaaacatgtatgctttgcctgggacaatgctcagttaaacattttgatatacgtgt

SEQ ID NO: 139504 - DNA, 432 bp, Zea mays
  Clone ID: MRT4577_58714C.1
cggacgcgtggggccttcaccgtcaccgaactgaagtgatgtttaagaaaattttagaactgacgaggattgggtgggattggcactgatgttcttgctggtgcacattgtgaaacaatggatgttgttgctggtttggctttaatccataccgacttctaccgcttttacagtgttttcaaacattcagctttaatccgaagcgaacaactcatctgataccacgtcgctggcgaccctcacgacggatgcgcctagccgcgatgacttgatggcgcagaggccgtggctaccctcgcccccgactcatccgtcgtatcattagcgccaggcaggaagcacaagttgaacgccaccacaagcacggtgaggattttggcagcctccaccgtcaccgaactgaagtgatgtttaagaaaattttataactga

SEQ ID NO: 139505 - DNA, 255 bp, Zea mays
  unsure (1)..(255): unsure at all n locations
  Clone ID: MRT4577_58715C.1
tttttttttttttttttnnnnnnnnaaaataaaatattggctctgaaagcaaatgcagagttatattacaaaatatgaaatattcgaacagtcttcagtcatacttcctccgtttcgttttagttggcacaaagcattgcacggggtacacacatgaaatgacaacggttgttcacgattcagacatagcacgcattatgcaggggaggataactttggtgagcgcaccagcacgggcatcagttgtcaccgaac

SEQ ID NO: 139506 - DNA, 214 bp, Zea mays
  Clone ID: MRT4577_58716C.1
ttttaaattttaaaagccccaaaaaaaaattggggtctggaaatagccctaataaatgcatgaaatcccgtacgtttcacttgtgtacacaacatatctttttgcggagattcatttcataacgtttcttagaattaaccattccacaccataacatggaacatttgcgatacttctgctgcaggtatcaaaacgcatcgagatcaactctaaa

SEQ ID NO: 139507 - DNA, 440 bp, Zea mays
  unsure (1)..(440): unsure at all n locations
  Clone ID: MRT4577_58717C.1
acatcccccccggcggcggcgcgggcagccgaacaacgcccgactccaagccacctcggcggacaccctccgcacccgcaagggcatgaccaaccgcctccaggcccgcaagcaagacggccgcgaggngagccaccccgggcgcgccaacgacnccaaggcggacccgaaggagaggcccgccaaggcgaacgaggngaaggacccaaacaccaaccnnggccacaggcaccgcacccacttccgaggaggaaagcccctggcttcggcctcatctacgacaacctcgaggctgccaagaaattcgagccgaaataccggctcaccaggaatggtctcgctactaaggtcagacaagccccgcaagcaaatgaaagagcggagcagcagggcccagaaaatccgcggtgtcaagaagaccaaagccggtgaccccaagc

SEQ ID NO: 139508 - DNA, 524 bp, Zea mays
  Clone ID: MRT4577_58718C.1
cctcgagcggcgggcgggatctatacaatattattcctatcttattatctttcctcctctttctgactcacctctacttcctcctcgacgaaatgacaactattccattagagatgctggacaatgagatgattcctccacactccatattagattgaaccaatgcaatggacatcggtgcgcacgacgtccacttcgctaagaaccgccattttcacaacatcgtcgagtgcccgggccacatgcgccatgacgttgctattgggggaaatcctggctcatgtggtgacgatgcgcatcccgatagggttatcctgattctagaacaccccatccagaacagaatcgtgagctgcttgctacactgcagattactctgaaatcgactgtatctagcatatgaggtaagtgatcctctcccagagaactatccatcatgctcactgttcacacactgacccaagattatatgcgtgaataaatagactgacatcatgctggacatctgtcactgacgctgtatg

SEQ ID NO: 139509 - DNA, 201 bp, Zea mays
  Clone ID: MRT4577_58719C.1
caaactccccgcgggcaggtaccctctcgaacttcccctatttacccactcgttcgttctcacacacccctaacatccaacccggcgttttaaaaacatccctgggtttcatcaaactctactagctgccgactgtttattcctaattcatccagtctcattctctactgcctcaccttccacaaccacatacgcatacac

SEQ ID NO: 139510 - DNA, 176 bp, Zea mays
  Clone ID: MRT4577_5871C.1
attcggcccgagggttcataacccaggttctaaacactatgagcccaaccccgacggggggccttttaaagggcatcggggccaggccccggagcacacagacaaactgcctctcaagcccaactgccgttgctcctgctgcttccgtgcgctccctgaatcccagtctcctcccc

SEQ ID NO: 139511 - DNA, 749 bp, Zea mays
  Clone ID: MRT4577_58720C.1
tgggaccctcgaggccggccgggaaatctaccttttcactcagatcgattcaaaccacatcaacccaaaccctatctcgacggttccacttccaccgccgaccccaaccccatcaatcgtcatccaccgccggcgtgacaaacggcaatcctgccgccacaaccgcgtctgacatagatccactcttccccacaggcccctccttcctccgtccgctggcgcgctactgcttgagcgtggagggtgtgctgcgggttagccttggtcgcttcatcatcttcgtgttgtgtcctatgcccccgcttcatctgtcgtatcccccagcgcagcccctccctctctccagtctcctttctcgcatcggcaatcagcttggcatggccgaattaatggcggtctacccatggcaggtgatggcgggcttcctcaccctctccatgttcgtcatgctcgaaaaaatgatcaagcacgaccacttgtctcccatcaccgagaactgcgaggagttcttgatacaaaagaataccctgaagggcccgagatctccagatggtgacaacatgcttgctcttggaaagtagaggaatgtaaggattgttttcaagactttgtacatgttcatttattttctgggcacgtacttgaaaccacatgtagcctgcatcatttgtgtgtatttaccaacaactaaaatgtaaacacgacattttcatagttgagtacaggaataattatctcttacaagtaac

SEQ ID NO: 139512 - DNA, 525 bp, Zea mays
  unsure (1)..(525): unsure at all n locations
  Clone ID: MRT4577_58721C.1
aacagaatcactgcttagaaacatctgtctaccccacctaggtgtgctaggtagttggcataactggtgtcaagcacttctaaaaacacttataggtaaattacaaaacattccatgggcagaccatcataatacttancaagtctgcatgcattgatgagcactgatttccagtaactgtctggctcacctagcaaggtttagttgtttgattatagcttcatgatccttttggttctgcaaagcagtacatgtaaaaatttgtgctgcagaaatactaaatgtaatccatatataaactcaatatatttcaacagagaaatcaaataatttaggtcaattaaaattctttatatatcctataagaagattcattttgtggcagttattactttaggatctgttcttgtgacttcgttggttggtcatataaatatgtggaatcttaacgtggcaacgatgtctggaaagttcacagacctaacatcgaagacgtaagccttacaacctaacttgttagaagct

SEQ ID NO: 139513 - DNA, 186 bp, Zea mays
  Clone ID: MRT4577_58722C.1
ttggtcattaggtccagcatccatgcttatccttgcctttgtgttggtatttgagcgttcttagccctcgccaggtacagatacaatgtgggcatagttgaatgggtcagaagtttctgcaatttttggacgaccagaggtgtgccgttatgattaactttcaatgggaaaactgatgccacaaca

SEQ ID NO: 139514 - DNA, 292 bp, Zea mays
  Clone ID: MRT4577_58723C.1
ctcgcccccccgtgccctcccccgtcccactgacggtggcccccaccgcccggccccggtcgtcggcgagcgccccttccgcacgctgcaccgctgacctgggcttcctgcccaagagatccgcccgactgcggtcgctaggaagccggagagccgcgcgtgctgggcgccggaatgcaggcgggaggagccagccggcggccccgatctcgctggcggcgcgtatcggccagacaaataatggaagagttacaagattgcaacgcaagaaacctggcttcccttacgagct

SEQ ID NO: 139515 - DNA, 363 bp, Zea mays
  Clone ID: MRT4577_58724C.1
gggagagcctgcctggacacacagtcctaggtgtcgggcccaacactcgctctgatcacggcatccgccatgtaggtagatcttacagggacacagtatgcactcatgcaagcacggcacatgagtggctattaaccaccgctgtcctacatgcgatcgggcgcatcatctcccggggactctgctagggcaatgagcgacaccacgaccacggtcatcgggttgagggcgatcttttattcctggttgttctcagcagcccccacactaatgcgcacagctaccatgacactctaccaaagagccttgtatactataaagagaaattctcagggctgcttgcggacaggctacgcatcatct

SEQ ID NO: 139516 - DNA, 160 bp, Zea mays
  Clone ID: MRT4577_58725C.1
tttcggacgcgtgggaagcggaacagtggaacagggcgtgttgtcgagttggtatgcgtggaagcggaacagtgaaacaggccgtgctcgtctgtgcaccttgtgactgttaattctacacggctatgaataaatgtcacactgctgagtgcagactctg

SEQ ID NO: 139517 - DNA, 410 bp, Zea mays
  Clone ID: MRT4577_58726C.1
aaatcatgctatagaaacacactgtacccaataatcgcgagacccacataaactttggtgtcgggccgatcgagcgatcgctgccgcgtcggatgacagacaccatcagtacccagaaccatgggctgcaacctggctcaatgcgccaacgtctgcgggtggaccgatgtgcccggaaatcctagacctgctgcgtacgcgtacgtatgcttctccgggaggaagccggcggtcggcagcctgcgtgtgcaacggcaggcgagctgctagccgtaactggggccgacgcggactgtgtacgtctgacgggcctgagcgccagcgagcacggcctaactgtgctccggagacatgaagtcgcccggcgtgcctgagaccgttatgacgccgctggacaccgagcatgagtg

SEQ ID NO: 139518 - DNA, 349 bp, Zea mays
  Clone ID: MRT4577_58727C.1
tccaaatggcttcaccgccgcgacaacaatggcagccttgttccaagccgtgttcaccggggggcagccgtccaagatcgggggccggccgccctttgcctcgctgccgtcccgcccgtcgccgcaactcgcctgcagggcgttcggcgtcaacgcctgcgccgccaggatcacgtgctccctgcaggacgtcgccagcaaggtgcgtctacgccgcgaagctcgctcgcttcgcgctcagcacctcggcgcttctagtatcgggcgcgagcgcggagggcacgcccaataggctgacctacgacgagatccagagtaaaacttacattggaggtgaagggcacgggca

SEQ ID NO: 139519 - DNA, 634 bp, Zea mays
  unsure (1)..(634): unsure at all n locations
  Clone ID: MRT4577_58728C.1
aatcacacagaaagaggcctgcctcaatcatcaatcgttcactcactagttcaacgagttgcacgacacgtgagcgccgagatgccccgacaccccgatccccgctgcncggatccttgaattactatcctctggcgcgccccaccacttcccgaccatggtcgctccagcaggtccacgcaaccgtgctgcgcatccgctgccaaaagggcggtcatacagatgacgctcaccggcgagcgtgcacaatgagcaccaacagctgggactacaagatgcagcgctatgtcatcgaaggccgtgccgacatcatctacctcatcaagcgtggccacacgtgcgataaactctacgttgccgcctgcgacatgcgatagcatcgagaacatgcacgacgtcatggtctgccatgaccgcccacacgtgcagctggctgtcctgaagaactgtcacaacagtgccagcccatgccgtccatgtgatccacctccctggtgcatgcactgaatatgctccagatctccttcagcgagtctcgactgctcatccttactgacccaaggactgaccatcagccaatcaatgagactgctctggcgaacatcacgaccattgacttttgtgacactgactc

SEQ ID NO: 139520 - DNA, 442 bp, Zea mays
  unsure (1)..(442): unsure at all n locations
  Clone ID: MRT4577_58729C.1
gtcgtagctcaagcatcagcggcagcgtcttgctgcaggagctctgggcagcgtgggcacgtgtngtacctagctgggtctgctancctaccatggctgatcaccaccgttgcacgacgggaggtggcgggggctactgcgacctccagcgcgttggcgtgttgcacggctaggcgcatcatcagcagaagcatggcgccatgattacagcgctcaatgccgtgactgccgctaccttcggctggtcgatgctggtgctgttccgtcttatcctggcctgcacccttatcgcgctcacggtggccacccccgtgcttgtgatcttcaacccttttcttgtagacttaaaaaaaacaattttgttaaaaagtaatcttggtcccttttatacctgtatttgaatttattttaaacccctttataaattttttttgtttatcac

SEQ ID NO: 139521 - DNA, 1937 bp, Zea mays
  Clone ID: MRT4577_5872C.1
atgggagacgtgttgatcccggagctccaacgtgggaacacttctgtgaccatatgcgctcgcgtttctcatttatgggacttctgtgatcctcaggatgaagcaaagttgctccattgtgatatggtgttgcttgacgaagagggaaacggtatccatgctgcaatattcccaccagtcatacaaaagttcaagcctctgataaaagaaggagtcgtctacaacatcacatacttccgggtcagagcctcgaacaatttgtacaagcctgttttcaatgagaacatgattacctttacaaactggacaaaattggaggaggttgttgagatgccattggaattgtcacttccatctcggccgtggcgccacaccgatccagagggcaacatacaaccagctctaagaggactatttccttgtgcagtgtcagatggactgtgcttgtctggcggctcaccctgtaagtggtacattaatcctgatgttcctgaagcatgtgccctcatggctagtgcgaggaaagcgcatagtcccattaagtggaacgaggttgtatcttcgaatcagcctatgccccatgttcccgaggaacaaaaaatcgcttgtattagagatctgcacccatttgagaataaggatagggaattcttggtgacagtcactataaaaaagattggttataggtggtggtacaatgcatgcaaaaaatgcacccgcacaactgtggctcatggggattcctacaagtgcagtgatcaagtttgcgctaccattggcacgcccaaccaaaggtacaaactacttctcactgcaggggatgagacaggtgacacagacttcatcctctttggtcgaatggcgcaatgcatcatcaagaggccgtgcgatatgctcatagccaacaatccaaccggctttattcctaatccaatcacagatctgctcgagaagacgtatgtatggaatgtcaacgcagtcatggcagaggtaggtactgcaaaggactccatccaagcatcttcatcggggccaaaacagtcacaacctgtgctgttgcaaggcgcacccagtggcgttgaagacactcctgacaaagcctctaacttggtcatgccttccaccccgctcacaccacaaagttccccaaccagtgtgcaagataagacttttggtgttggcagcagcactgcggttccaggtgctactcccgccataacaaaggaactgacatccacgcctaggaagaggacaaggtcttcgccatcaaagacagttacaaagaggttgttcaccgacgtagatggaggatgccgcggatagcgctgctgcccctagccctaccaaagatgcttagtcacagaggggcacaggtctcttgggctcacagttgtagctgttcgctcttttggatgatcgttgtctactgcttttgtatccaagctgctatgtacatatgctttcggaaggatatatgatacacgttcatgtccacacactcgatacaggttggcccagagcagacttaacaaggttactactagatcagtgttcgccatcgatgctatgcataggccacgctggatttctatgcttgttgacatgaacgtgcttcgctcccttcatgtttaagcctaagcagcttgatgtgcttgtgccaaagactttttaagaactacgcaacaaaccaacgcttacaacacgcttttgtatacaatgatcatctgcttgttgcaccgtacatgtatagtctatggagctgcagactgttagagttatgtaatgttgtactgatcaccgtttcgtaactgcatgtacactgtctttagagacagttgtggaacctgcgtccgcgccatatgtattatattatcgtattgtatccttcaatatgtttatgttcctacaatgtccaggtccctgtcatacttggagac

SEQ ID NO: 139522 - DNA, 389 bp, Zea mays
  Clone ID: MRT4577_58730C.1
cattgggtacctcgaggccggccggggctatttgtccccttgggagggcgtgctgccgtcggtcggtgctccagcgactgtccctatcggcggcatggtaagaaccgacagcctctcaaccgtctctattgatttacacccggatttagccctcaataacttgattctcttttctgtgtgaatgaatgtatgaaatggatatcttatatggttggaatcgtgttcttgaggtgaaacgcgtagatccgggccccatgcattgatctattgaaggattcggtccaaaactaacctatgtgcttggacaatgccctttatacactttatctgctcggttatgggggaaacagttaggttctatccctaaaaaaaaaaaaaaaaaagcggcc

SEQ ID NO: 139523 - DNA, 2013 bp, Zea mays
  Clone ID: MRT4577_58731C.1
ggccggccgggagcacaccagcccactcgcgccaccacctcacctcgcctccgcgcgcggtcgatcactccaccaccacacacatcctccgtcttgcacgaccagctgcacggtgtagccatggaccagctccccaagcgcccggccaactacgtgccgctgagccccgtggggttcctggcgcgcgccaatgccgtctacgccgaccgcgcgtccgtcgtctacgggggcgtccgcttcacctggcgccagacgtacgagcgctgccgccgcctcgcgtccgcgctgctgtccctcggcgtccgcaggggggacgtcgtctccgtgctcgcgcccaacgtgccggccatgtacgagatgcacttcgccgtgcccatggccggcgccgtgctcaacgccatcaacacgcgcctcgacgccgccgccgtcgccaccatcctgcgccactccggggccaagctcctcttcgtcgactacgactacgtgcgcctcgccggcgacgcgctccgcctgctcgccgccgccgccggcggcaccgtcccgctcgtcgccgtcgtcgacgacatcgactcgcccacgggggcccggctcggggagctcgagtacgaggccctgctcgcgcacggcgaccccgacgccgacctcccgccgctcgccgacgagtgggacgccgtcacgctcaactacacgtccggcaccacgtccgcgcccaagggcgtcgtctacagccaccgcggggcgtacctgagcaccaccagcctgctgctgcagtggggtgtggccaccgaccccgtctacctctggacgctccccatgttccactgcaacggctggaccttcacctggggcatggcggcgcgcggcggcgtcaacgtctgcatccgcgacgcgcgccgcgccgacatctaccgcgccatcgcgcgccaccgcgtcacccacatgtgctgcgcgcccgtcgtcttcagcatcctcctcgacggcgacggcgacggcgacggcaggcagctcgaggcccccgtccacgtcctcaccggcggcgcgccgccgccggccgcgctgctggagcgcgtcgagcggatcggcttcaaggtcacgcacgcctacggcctcacggaggcgacggggcccgcgctggcgtgcgagtggcgcgaccagtgggaccgcctcccgctcccggagcgcgctcgcctcaaggcgcgacaggggatcagcgtcctgtccctcgccgacgccgacgtcaagaacgtcgacaccatggccagcgtgccgcgcgacggcaagagcctcggcgagatcgtcctccggggcagcagcgtcatgaagggctacctcaacaacccggaggcgaacgacggcgccttcaggggcggctggttcctcaccggcgacgtcggcgtcgtgcacccggacgggtacatcgagatcaaggaccggtccaaggacgtgatcatcagcggcggggagaacatctgcagcaaggaggtggaggaggtgctgttccggcacccggccgtggccgacgcggcggtggtcgcgatgccgcacccgcgctggggcgagacgccgtgcgccttcgtcgtgcccagggacggcaaggcccacgggctcagcgaggacgacgtgctcgcgttctgcgccaggcgcatggcgcgcttcatggtccccaagaaggtggaggtcatcggtgcactgccgaggaacgcgctgggaaaggttgagaaggtcaagctccgggaggcggcacgtaagctggcgccaaccgtgccggcgcagataaagccaaaagggaagacgacgacctcaactgtggtcggcggtggtcgctgcgaggagcagccggtgtcgaggctataggtagcaaaacactacagaccataacttgtgttcaacttcttttatgtgcagtgatattgtaggtacttaattattacgtgcacaatgtaaaatacatgcggtgtcaaaacgtgaaggaaataaatttcttttttgttctggttccaggccaaagctcct

SEQ ID NO: 139524 - DNA, 272 bp, Zea mays
  Clone ID: MRT4577_58732C.1
taggaaaccaaaactgtccgctttaacaggctctgaaatgaaattgggaaaatgatagctgtgtttgggagtaggtggggaatgtcagtatttgtcagtatcactaaaaatgttctgtaatcatgcttgctaacagattgcggtttcatttttgctttcttactggtttattttaagctctaattgaagaattattggagatgctgagttcatatgttgtcgactccttcctgggacagcagtacatgcgccgccataggtccagaggtcgg

SEQ ID NO: 139525 - DNA, 266 bp, Zea mays
  Clone ID: MRT4577_58733C.1
gcgagctcacggccggcggcgtgccttggcgcaagcacaacagcagctccctccgcggggcgccctccctgctcggaagaccaacaccaccatcaacagcagcagcaccgcgccaacgaggcttccctccggtgtgtgagtgcacgcgcgctcgtgatggcagcagccccggcggagtagtcctccacgtaggggtctccggccgtcagcagaccgaggtcgcggttcggcgacacgaccctgacgaaagtcgtcgtgggcgggct

SEQ ID NO: 139526 - DNA, 782 bp, Zea mays
  Clone ID: MRT4577_58734C.1
gaagtggattgaagtgtattttagggattgaaagagaaattagttcatattacacttcaatacaccttataccccctcaatccattctaatccaaggttacccaaacaagccctaaggtttcttcggttcctctgttcacatctaaacttcacctaaaccttgcctgcatcaatgtgtgtctcatcagggactttgctggaaccaacaatcaagtttttttttagcaatatttgggcgcgatccttcaggcttcagctcttcgtttcgcaacctcgacaaagatcactctgccatccaggaacttcccgtgcatcccttccatggcgcccctggcttcctcctccccggtgtaagaaaggaaagcgaaacctctcggtcgcttcgctactctatccatcacgagacaaacttccgtaaggtcaccaaacttctcgaacgcgtcccggaggctccgttcggttgtgcggaacgaaagaccgctgacgtacagcctggtggcggcgccatgggaggtattcggcggcggcaggcaggcggtggcagtggacgcgcgctgctgattgcgaaccccaacggaggaggccgctggaagatgagtgcgcgaggggaaggggcatgccacgatagtgaagcggctgaagccgaagcttgtggaagcagcgacggtgggggcaaagccggcgggagcgctcgccattgtaaagggtggaaactcggaaggataagcctttagagagcactcatcttggggttgggcttactacttatatgctttcagcag

SEQ ID NO: 139527 - DNA, 268 bp, Zea mays
  Clone ID: MRT4577_58735C.1
aattactgggccgacccactcgttcgttcatgcgttcgtgctttttgacggtactgttcatatttttcgacatgggatttcttgtcagttcaaggcagccattttaaatttctaggggcacgagagcatgtgttaccctggatatcaatttcatgctgctttttgtaatagttcatgcttgtgtttggttaataaatatgtatttaataaaaataattggctgtctgtttataggattccagtgtacgatcgcgtgctttcgtttgtt

SEQ ID NO: 139528 - DNA, 717 bp, Zea mays
  Clone ID: MRT4577_58736C.1
tgcatcaatggtgtctcatcagggactttgctggaaccaacaatcatgttttttttagcaatatttgggcgcgatccttcaggcttcagctcttcgtttcgcaacctcgacaaggatcactctgccatccaggaactgcagaagatagaacgtaagctacaagcacagactatctatcacacgagcatccgacgatctggacatctttcaccttcccgtgcatcccttccatggcgcccctggcttcctcctccccggtgtaagaaaggaaagcgaaacctctcggtcgcttcgctactctatccatcacgagacaaactggagtagcaagcacggagcaaattttcaataattctgaatttaaaacacagacattcgctcatctcgggctctgtcaccttccgtaaggtcaccaaacttctcgaacgcgtcccggaggctccgttcggttgtgcggaacgaaagaccgctgacgtacagcctggtggcggcgccatgggaggtattcggcggcggcaggcaggcggtggcagtggacgcgcgctgctgattgcgaaccccaacggaggaggccgctggaagatgagtgcgcgaggggaaggggcatgccacgatagtgaagcggctgaagccgaagcttgtggaagcagcgacggtgggggcaaagccggcgggagcgctcgccatgtaaagggggaactctccggaccggccggc

SEQ ID NO: 139529 - DNA, 475 bp, Zea mays
  Clone ID: MRT4577_58737C.1
cctcgagccggcgggaatcttttcacacacgcgcgatcactgttactttctccctcacgaggccgattgctcttttcggagatacatgcgaatacacctgctccctggtgcggcacgactagcggcataatatgcaccggacagggtaaccgtacgcgtctagcgcgtgcatttggatgcctggcgctcacgataaccccattgagttggatgagaactctgaaccctctggacgaggcccaacaggacgtggactatgtcttcaagaatgcgtgccgcgtatatcgccatcgtgggtcgagaactaaaaccgtcatcaccttgttccgtcctctcatctccgctctcgcatctttggctgcgtccacagatatcagatcgctccaggcacaggagagtattacttctgcacgcgtaacgaaggagatgaactgcgtttctaaccacgcaaagcggcgacgacgtgtgaaagggc

SEQ ID NO: 139530 - DNA, 1510 bp, Zea mays
  Clone ID: MRT4577_58738C.1
cacggccatcgtggcgagggcaaccaagctgagcgctactcgcagtcgcagttgttgcctgcccagcatgcagctctaactcaccccgtgcagcagacgccgagtcgtggcaggtagctaggaaggagggccggagggaagggaagggcaggccatggcgctggaagccgtggtgttcccgaaggagcacctagcgggcactgccaaggcgcgctcggcgtcgtcactggcctgcggcttccgcaccgaggaggtcgaggacaacggcggtgtggttctgcaaggagaggccagcgatgcgcccggtgccggcgcggccaccacgtgggagtactgggacgcggcgctctgcccgtgctccactgcacctgctggtgccgtggaggagtgctgggacgtgcggcaccggctctccgcgtccccaccgccgccggcgccctccgccgccgtcgcagcgccatcgtccgggcacggcaaggcagctgccgcggcgcggcggagacggcggcaacgcccgaaggcggtgaagaacacggaggaggtggagagccagcggcgcaaccacattgccgtggagcgcaaccggcggcggcagatgaacgagtacctctccgtgctccgctccgccttgccgccctcctacccgcagcggggtgaccaggcgtcgatcgtggccggtgccatcaacttcgtcaaggagctggagcacctgctgcagtcgctggaggcgcagaagcggcggcgccaggggtgcaccgagccaccggcgccggcgccgttcgccggcttgttcacgttccctcagtactccaccgccgcgacgggtgtcgtcgctggctctggtgacggtgctggctgcggcgcagcgggggcgcggcgtggcgtggccgacatcgaggtggccgtggcggagagccacgcgagcgtgaaggtggtcacgccgcggcggcccaggcagctgctgaggatggtggtggcgctgcagtgcctcggcctcaccgtgctccacctcaacgtgaccaccaccgccgaccagctggtcttgtactctctcagcctcaagatggaggacgagtgccggctgtcgtcggtcgacgacatcgccgccgcggtgaacgacatactcgccaagatctccgacgagcgcgccagccgtcacctagtagccgcgtagtgtagcggcaactctgttttagcaggtgtcatgtattgttgttgcaacaccaccaattcgatcctagtacatggaaaacgcactggcaagtcgcaattggcgccactgtcacgcggtgctaccacgcgctccatacgtcgtttgcgtgaaattaaacatgtatcggttggaccagctcagtctcttgcagcgctacttttttagtagtagtatataaaaaaaaaaagtgcctcctgggattcagaatcattcacgtcgatctcgcatcggaccagcgctaattattagcgcagatctgtcgagatgcctgcgactgcgtgtgcacacgggtgacct

SEQ ID NO: 139531 - DNA, 503 bp, Zea mays
  unsure (1)..(503): unsure at all n locations
  Clone ID: MRT4577_58739C.1
aaccgggaaccccgggcccaaaaaagcaatttaaagctggggtaaacaaaccgctcaacaggaagctccgggcatgcccaattgggcccccaaaaaaaaggcccttttttctcggcccctgttaataaaaaaagggtttttgccccgccgggtggaaaaagccctcctttttgggtcccccggaaattgaaaaaggggcccaccccgctttaaacccaaaggggagatggggggggcccttttgggcccacccccccgggggggggctcccccccccgcgggggggggggggggggttttttttttctttccccccccccgcacaaattttttcccccccccccaaaaaaaaaaaaaaaacacaaaaggggggtgttttttggtgtgtataaaaaaaaaaaaaaaaagggggggggggggggggggggagaaaccccccccccccccccccgggnggggggtttttttttttttttccccccccccgggggcgcccccccccc

SEQ ID NO: 139532 - DNA, 658 bp, Zea mays
  Clone ID: MRT4577_5873C.1
ccgaattgggtttagatcggagagagacggccatggacgaggaggagcacgaggtgtacggccaggagatccccgtggacggcgacatggaagccgccgacgtcgacatgaccgccgccggagacgacgcagcgaaggagctggacgagatgaagcgaaggctcaaggagatggaggaggaggccgccgccctgcgcgacatgcaggccaaggtcgccaaggagatgcaaggaggagatgccaatgcgtctacagctgaggcaaaggagcaggtggatgctcgctctgtttatgtcggaaatgttgattatgcgtgtacaccagaggaagtgcagcagcatttccaagcttgtggaactgtcaacagagtgacaatcttgaccgacaagtttggacagccaaaaggatttgcttacgtggaatttctagaacaagaagccgttcaggaggctcttaatctgaatgaatctgaattgcatggtcgtcagatcaaggtatcaccaaagaggacaaacgtccctgggatgaagcagcgtcctccacgcggattcaatccctatcatgcctacccttatagatcatacggggcaccgtatttcccactgtacggatatgggagagttcccagattccgccggccgacacgctacaggccata

SEQ ID NO: 139533 - DNA, 573 bp, Zea mays
  Clone ID: MRT4577_58740C.1
gtccgtctccgacatccgcacgcgcatgtcgtctgtcgtaaacgtcgcccgagtcagatgtactcgtcccgggctcgcgcggctcgatggcgtgtccacggcctacgctactctggccgcgcgcgtcccgcccggacgcgcttcacctcctgtcgctgctgccggccgccacgctactctgcaggacccccttctccttgctacaacgagccacaaataacggaggaacctcatgctccttcctaaggaggatcggcttgttacatgtgatctcctatggaacgatgatgtaacaatgcggccgtcccccctcttcatcacacgtcatctgatctatgacccgagcagagcatgttggaacacacctgatgaagaatagtaaagtcgccgcccaagaaaacgcttaggacactgactctgcacgatcgccgaaatccatagatcgacatcaaccactactctgttttggcagctcgatgggcaggatacagctcctcgcgctctagtccgtggagatccacttctcgttgcatctactgatggtcaacggccacatcgtgatacatcaagctg

SEQ ID NO: 139534 - DNA, 224 bp, Zea mays
  Clone ID: MRT4577_58741C.1
atctggatagagctcgtcacgcccatttatctatctgcaggctaaataattggtccaagctagtatatatacgtacgtacggtgatctatatgatgcagtattatatatctgtccatgcatgcaatgcatgttgcagtacatcgcatgtcgttgtcgtggatgagggagtagtccaagatcctgtctctgttataaatatcattattattacaaaagacataat

SEQ ID NO: 139535 - DNA, 466 bp, Zea mays
  unsure (1)..(466): unsure at all n locations
  Clone ID: MRT4577_58742C.1
gtccctcgagtcctgccgggctggctcgcttcgaggaccgcgccccccctcctccccctggtggtggcgctcgcctgtggcctggtggcggtggcggccaccgcccccgcgaaggaggagacgtacgtggcgacttccacccctaggaggccccgaggtcgagcttcatcgatgacgaggtgcacgctgtagccgttgtcgtcgccaaaacatcatcccgacgcggagggcgcaccgccttcctcgctatgcggagcccgcgtcccaatacggagggcatcaccgcctactgccgccaccgccaccgccaccgngcgnnccatanccnccnccncanccacgcngncgccgccacaaaaaaaaaagcgacnggccgggncaganccggncaaagcacacaggccgcgaaggggggcacccangacggccaaancccagncgnngangcacngaaacaggacacgag

SEQ ID NO: 139536 - DNA, 612 bp, Zea mays
  Clone ID: MRT4577_58743C.1
atggagattctagccggaactctcaactgtcagacaggctcaatgcccttcacctaccttggtgttccgcttggtctgtcaaagcctaaaatctgccactttttaccgctcattcataggattgagaagagattgtcatgcacttctgctctcctatcccaggccgataggttagagcttgttaactcggtgttctcagctctcccgacctttctgatgtgcaccctgaaaattccggttgccacggtcaagaagattgattcttatcggaaacattgtctttggagaggaaatgacatcaattcgaagaaacctgctctggctgcttggagcatgattactcagactaaaaaagtgggagcctgggagtgcaaacttactgtcaaagaagctaaccaaaaggaacaccttattgaaatttttcagcttcctctgtcagtgcaggcctatgatcaatttcttgaattagacgaatcttggaggcaaatcacggtgaccaacacaaaggatgcttggaaactcatttggggagatgataatttctctacaaagaagacttatagacacttgatgggtcaggctcaagttcatcagattttcagatcgctttga

SEQ ID NO: 139537 - DNA, 311 bp, Zea mays
  Clone ID: MRT4577_58745C.1
tctccttccctctcccttcttccttctccaacctcccctccccgttctgaattcccatctccttcttgcgtttgcttgtatatatcacacaccaacacccttcagaggctgcgaggtcggaagaaagaggagccacctttgactcctctctctagtggtttttgtggggatttcgggtggtacgagaggattaattagtggatttgtattcttggagaggctgctagttcttggagagtttttccttttcttgtcctgagagagattcatgcccaggagttcaccctgaggagctggtattgttctgtctt

SEQ ID NO: 139538 - DNA, 140 bp, Zea mays
  Clone ID: MRT4577_58746C.1
cgtaacatggccgcggtcattggattccagcggcggtgggcactgcggagtgccagcccggccagcagtaaccgccggagcgcccggtgaggagggaggacaggggctggccgcgtccactctccccttccacacaacat

SEQ ID NO: 139539 - DNA, 628 bp, Zea mays
  Clone ID: MRT4577_58747C.1
taggggccttttttttttttttttttagaagaacaaaatataatacaacgacgaccgatagtcaacgacaccgcatgtattgatacaagatgccatcgagaaaaaaaaactacaacgaattacacagggcaggcggacataccctctattgacgcccttgagcacgatggggaggaccatgaccaacatgatgaccaggatgatgaggatggaaatgccagaccgcttgaggatgatcgttctggcgctgtccagacgccaacatgtcagctgctcgggtcgcgcgaaacaaccaaagaccatgacgcggtcgacgatgccctcgaagcctaccaggtgctccccctgggcggccaccaatacggccatgaaactgaacacctggtgcagatccagcacgatgggctccactcccatcacagtgccgtgccgctgctggatctctcgcaaaacgaccgacatctccacgtgcacttggccctggtccaataaggtaattctgcatgaacacagctccccatcgccggactccgccagatagatgcagaaaagcctcgccagcttgtatccccgtaaccgagaaataacgccacttcaccgtggcccggtactctgacgagactcatga

SEQ ID NO: 139540 - DNA, 248 bp, Zea mays
  Clone ID: MRT4577_58748C.1
cggacgcgtggggtttgatcgaggtaataataaacacttgctacttgccatgttggagtacaatgcatgcttgcaagtttaaactcattatgctatttatgtacattccgtgtgccctttgggcaccgacaccttctctaccaggtaacagcgtgccagtggcgacgccgcagctttcggaccccagtcgctgctactgctaggcgataacgcagctggctttactagactgccgccgcctgccgctg

SEQ ID NO: 139541 - DNA, 215 bp, Zea mays
  Clone ID: MRT4577_58749C.1
cttcaggctcatagaaaggtagactccagttgcggcgatgggcggtatgttcactgtgaggggaacatttcattggtgctgggggaggctttcacgctattcgacactgacggggacggtcgtatcgctcccacagagctgggcgtgctcatgcgcttcctatattggtaactcaacccatgcgcaatttcgggacatcggtgcataagaaaagc

SEQ ID NO: 139542 - DNA, 1648 bp, Zea mays
  Clone ID: MRT4577_5874C.1
cagatctacaacgatggtcagtcctctccacagatcctgatgtttgttggcacacttgtcaagaaatacgcggatggactgtgcttgtctggaggctcaccctttaagtggtacattaatcctgatgttcctgaagcaggtgccctcatggctagtgcgacgccgtcacatagtcccattaagtggaacgaaagtctatcatgctcaatcagcctatgttcaaatgagctcctgacaaaagatgcaaatcgcttatagcagagatgtccgcccatttgagaataaggatagggaattcttggtgacagtcactgtaaaaagattggtgataggtggtggtacaatgcatgcaaaaaatgcacccgcacagctgtggctcatggggattcctacaagtgcagcgatcaagtttgcgctaacattggcacgcctagccagaggtacaaactgcttctcgatgcaggggatgagacgggtgacacagacttcatcctctttggtcggatggcgcaacacatcatcaagaagccgtgcgatatgctcattgccaacaatccgatcggctttattcctgatccaatcacagatctgctcgagaagacgtatctatggaatgtgagtttctctgaccacacaatcaatactggaaatatttgtttccaggtcaacgcagtcgtggcagagataggtactgcaaaggacttcatccaagaatcttcatcaaggccaaaacagtcacaacctgtgttgttgcaagacgcacccagtggcgttgaagacactcctaacaaagcctctaacttggtcatgccttcgaccccgctcacaccacaaagttccgcaaccagtgtgcaagataagactttttgtgttggcagcagcactgtggttccaggtgctactcccgctataacaaaggaactgacatccacgcctaggaagaggacaaggtcttcgccatcaaagccagttacaaagaggttgttcaccgacgtagatggaggaatcactagctccaaggatgccgcggatagcgctgctgcccctagccctaccaaagatgcttagtcacagaggggcacatgtcttttgggctcacagttgcagttgttcgctcttttggatgatcgttgtctactgcttttgtatccaagctgctatgtacatatgctttcggaaggatatatgatacacgttcatgtccacacgctcgatacaggttggcccagagcagacttaacaaggttattactaaatcagtgttcgccatcgatgctatgcataggccacgctggatttctatgcttgttgacgtgaacgtgtttcgctcccttcatgtttaagcctaagcagcttgatgtgcttgtgccaaagactttttaagaactacgcaacaaaccaacgcttacaatacgcttttgtatacaatgatcatctgcttgttgcaccgtacatgtatagtctatggagctgcagactgttagagttatgtaatgttgtactgatcaccgtttcgtaactgcatgtacactgtcttttatagacagttgtggaacctgcgtccgcgccatatgtattatattatcgtattgttccttggggatgtttatgttcccacaatgtccaggtccctgtcatacttggggcc

SEQ ID NO: 139543 - DNA, 1443 bp, Zea mays
  unsure (1)..(1443): unsure at all n locations
  Clone ID: MRT4577_58750C.1
ggtcggccggggtgtgtgagtaggttctacgtacgtgcctatatatgtcttaatgtctatgtggtgggtctgggcgtatccaactccgatgcacatggatggtctcttgttcgcccgaaaaaaaaaaaaaatcacagcaggtgtgttgcgcttcgtcagggcgttcgccctctgcgtggctacggcatgcctcctcctggcggccggcgtgccctcgcctgtggcggcgcaggacccgtcgaagctgagcctgcagtactactccaagacgtgccccaacgtggagcacgtcgtccggacggagatggagtgcgcggtgcgcgccgacacgcgcaacgccgcgctcatgctccgcctccatttccatgactgcttcgtgcagggctgcgacgggtcggtgctgctcgacgacacggcaaccatgatcggagagaagcaggcggagcagaacgtcaactcgctgaaagggttcgatctggttgacaagatcaaggagaagctggaagccgagtgccctggaaccgtctcctgcgcagacctgctggcgattgcagctagggatgcggttgtgctggttggtgggccttactgggatgtcccagtaggaagactggactccaagaaggcgagcctggaccaagcaaacagcgacatccctacggcccagcaaggcctcctcacgctcattgccaagttctgggagaagggccttgatgccactgacatggtggccctcgtcggatcccacacgatcggattcgcccggtgcgagaatttccgggacagaatctacggcgacttcgagatgacgtccaagtacaacccgtcgtccgaggcctacctgagcaagctgaaggaggtgtgcccgcgggacggcggcgacgacaacatcagcgccatggacagccacacctccgacgtgttcgacaacgcctacttcgagaccctcatcaagggcgagggcctgctcaactccgaccaggcgatgtggtccagcatcgcgggctactccacctccgacacagtcaacaagtactgggccgaccccgaggccttcttcaagcagttctccgactccatggtgaagatgggcaacatcaccaaccctgccggcggcgaggtcaggaagacctgcagatttgtcaacacataggacatgataatatatataggatgctcgagactgcaggagaaactcggtggttgtgattgtactttacgcctgcaccttcttttgatggcttggaaaataaaaaacccctttgctgagactattgtattatacatatgtagcatattaaaaaaagggagcccggcgacctccatctccatggccgagtgcgaggagctggtggagagcggcggcgccgaggaggacatgccccgcgtcgtggccgccctcgccggcatcctggagcgcgcgncgaaccgcaacgacgcggc

SEQ ID NO: 139544 - DNA, 168 bp, Zea mays
  Clone ID: MRT4577_58751C.1
cccacgcgtccgtggattttttggtggacgcatgcgtccaggaatgatgagggagcggaaggggctcctgagcttatacaacggaaatcacatggcattttccggagaggtggtcctgtacgacacaatgggatttttgaggggtcgaatagtggacatcatcagcaa

SEQ ID NO: 139545 - DNA, 532 bp, Zea mays
  Clone ID: MRT4577_58752C.1
ggggggtgtttttttttttttttttttttttttttttttttttttttttttttttttttttttttttttttttttttttttttttttttttttggaaacccccgggttcctttaggcaggacaaacccggagtttacaaacccccagggggggggaggggggggcccgacttaagtttaaaaaagcttaaaacccctatgggtttggcaaaacttcagtttaaaaaacggggattttagctggctggccaaaccccattctggataaaaaaccggagtattggggaataccggagttttctttcaaaacgggaaaaaaactttgttcccaaaccccccctaagttcccgggggcgatctgcccccccgggggggccctaaaatttatattataatttatacccggggggatggccggggggctgccttgaggcccaaaacacatgggattctcagggggggagggggaccaacagccggcggggttaaggaaccttgggcccctaaagcaatccccaaaacgggtttatggc

SEQ ID NO: 139546 - DNA, 1541 bp, Zea mays
  Clone ID: MRT4577_58753C.1
gtgtgtgagtaggttctacgtacgtgcctatatatgtcttaatgtctatgtggtgggtctgggcgtatccaactccgatgcacatggatggtctcttgttcgcccgaaaaaaaaaaaaactcgaggccggccggggcaacagagacatcgatcagctagctagctgctgccaagagctagccaggggacagagcagcagcttgaagttggtcaccaatgctaaggatgggccgcgccagcgccacagcaggtgtgttgcgcttcgtcagggcgttcgccctctgcgtggctacggcatgcctcctcctggcggccggcatgccctcgcctgtggcggcgcaggacccgtcgaagctgagcctgcagtactactccaagacgtgccccaacgtggagcacgtcgtccggacggagatggagtgcgcggtgcgcgccgacacgcgcaacgccgcgctcatgctccgcctccatttccatgactgcttcgtgcagggctgcgacgggtcggtgctgctcgacgacacggcaaccatgatcggagagaagcaggcggagcagaacgtcaactcgctgaaagggttcgatctggttgacaagatcaaggagaagctggaagccgagtgccctggaaccgtctcctgcgcagacctgctggcgattgcagctagggatgcggttgtgctggttggtgggccttactgggatgtcccagtaggaagactggactccaagaaggcgagcctggacctagcaaacagcgacatccctacggcccagcaaggcctcctcacgctcattgccaagttctgggagaagggccttgatgccactgacatggtggccctcgtcggatcccacacgatcggattcgctaggtgcgagaatttccgggacagaatctacggcgacttcgagatgacgtccaagtacaacccgtcgtccgaggcctacctgagcaagctgaaggaggtgtgcccgcgggacggcggcgacgacaacatcagcgccatggacagccacacctccgacgtgttcgacaacgcctacttcgagaccctcatcaagggcgagggcctgctcaactccgaccaggcgatgtggtccagcatcgcgggctactccacctccgacacagtcaacaagtactgggccgaccccgaggccttcttcaagcagttctccgactccatggtgaagatgggcaacatcaccaaccctgccggcggcgaggtcaggaagacctgcagatttgtcaacacataggatatgataatatatataggatgctcgagactgcaggagaaactcggtggttgtgattgtactttacgcctgcaccttctttcgatggcttgtttagggtggcttggaaaataaaaaacccctttgctgagactattgtattatacatatgtagcatattatatgttcttgtcactgttaaccatatatatggttggctatgtgaagatacatacacatctttgtctgaagaattctacgggtgatttggctgagatttaaaaaaaaaaaaaaaaaaa

SEQ ID NO: 139547 - DNA, 265 bp, Zea mays
  unsure (1)..(265): unsure at all n locations
  Clone ID: MRT4577_58754C.1
agggaaacacgggtcaaaattagtaagacttcagatgcttattttcctgcattactaaacgtaatatggggggtgttggatcatttcctcccttnaaaccaacacaccaatnaccnaaattntacaacaactttaaaacacaaccnacacattaccaaaattatancttcatttanctaaccacataaactnncttnnnttaacaacattttaaaatcccctnnctaataaaaaaaaaaanncnnnttaactcccaatttttttt

SEQ ID NO: 139548 - DNA, 511 bp, Zea mays
  Clone ID: MRT4577_58755C.1
ccgccgtccagttcgacggcttcgacctcgaccccgcggccttcttcagcaacggggccaactccgacctcatgagctccgccttcctcaagggcatggaggaggccaacaagttcctgccctcagaggacaagctcgtcatcgacctcgatccgccagacgaccccaagcggtttgtcctccccacccgcgccgcagaaaacctcgcgcccggattcaacgccgccgccgccaccaccgcccctgccgccgtggctatggcggtgaaggaggaggaggtgatcctcgctgcgcctgatgccgcgcttggcagcggcggcgtcgtcctgggccgcggtcggaggaaccgcttggacgatgacgaggaggacctggagctgcagcgccggagcagcaagcagagcgcgctgcagggggacggcgacgagcgggacgtttcgagaagtacatcatgacctgccccgagacgtgcacggagcagatgcagcagtgcggatcgcctgcagaggag

SEQ ID NO: 139549 - DNA, 276 bp, Zea mays
  Clone ID: MRT4577_58756C.1
gtgttgcccctgcttttttggtttgcctttttttttggggggggggtgtcttttttttttatgtgggcccctccttcttttgtgtgggggggtgaactctttttgttttgttcacttttctttgttgtgttgcaatctttttttccgcttttaaatacctttctgggcggtcggtcttgtggggcatttcccgccactgggcgctccctttggggggtcccctcccgctcccatgttttgcgttctcgtggtctttcctgttccctgtgtggcttt

SEQ ID NO: 139550 - DNA, 499 bp, Zea mays
  unsure (1)..(499): unsure at all n locations
  Clone ID: MRT4577_58757C.1
gntnnnnnnnnnttttnnntttttttttttttttttttttttttttttttttttttacaggaatcgggagttactttacatgaaaaagcaaagcgggggccacctcaacattttggatttacatgaaaaagcaaaccgggcccaataaacctctcccaaatgtttttataaaagcaccccaggccccccaaacgtgacccctttaaaaaatccttttaataaaacaccatttttgttcaccggacagggccccccttaccggtaagcccaaaccaaaaaaatgacaagcctgtacaacaccagaggttaagcagtttacccagttcctacaaaacgtcccccggactgttggggctcactcacccaaaccttttattatcgggccgcccttggcccatccatttttggggggggggggggatgccccctcccaaacaaatgaaatgctaatagggccccctgtcatcgccatcaaagtttaggccctgcatgcccctaa

SEQ ID NO: 139551 - DNA, 313 bp, Zea mays
  Clone ID: MRT4577_58758C.1
aaccaagctaccatggatcaaacacacacagatacagagaagtagtgaagagtggccgtcgtcatggatgtgtgctttcaccatcgtcagggtcagggagactcgccctatcccggcggatgtttccgtggcgtcgttgggcggatagggccacctgctccgactgaattgctcaccggagtatcaaacccgccgcagatcgacctgcgcgcgtggactacgtcatctgtgcctataccgtcgatgcgaggtgacgatgaacttggagttccaacctttgggtcaacatctgaactacaaggttttttaaagt

SEQ ID NO: 139552 - DNA, 301 bp, Zea mays
  unsure (1)..(301): unsure at all n locations
  Clone ID: MRT4577_58759C.1
cggacgcgtgggcggacgcgtgggattttgcagctaaattgacaaaatcacctactgttttagccttttagatatgtttatatagttgtgtagcactattctacatcntcccttatacctaactgtacatacatatcagcagtttccaaaataagaaaccacatgttgatttgctggtgttgcagtatttttttgcaataagaaatggaatgcaaagtctggctcttgttacatctgaatcagtaagaatggtgtggctgttataagaaattatgtgtaaagtttggcttcgattacatgt

SEQ ID NO: 139553 - DNA, 183 bp, Zea mays
  Clone ID: MRT4577_5875C.1
ggcgagttcgcgggcaactactgctgtgataccactgtgctatctgcgtacccggagactttcgccaagaaacgggagctggagatcatccagtcccgctgggccatgatgtacgcgttgagctgcgtgttgccggagctgctcacacgcaacggcgtcaaattctggctaggcatgtggttc

SEQ ID NO: 139554 - DNA, 295 bp, Zea mays
  unsure (1)..(295): unsure at all n locations
  Clone ID: MRT4577_58760C.1
cccatcgaggggccataagcacatcgacggggctctcatcnaaccntttncntcattntccccattctcctctaaagataaacaaatggggataaattcctcccataatttaaagagaaactcaaacttcagtgaatagggtttacggtgatggaccaccttggtgctcacgtccaccccctacaccccccgcacggctccaatctatccacacgtcggctctatatgcacacacctattaaagaattttccctgcgggttcagacattccaacctacattaaatcattgcatta

SEQ ID NO: 139555 - DNA, 191 bp, Zea mays
  Clone ID: MRT4577_58761C.1
aaaaaaaaaaaaaaaaaaaaaaaaaaaaaaaaaaaaaacactaactttccatctcggaaggagcaacatcataggggaaggaatagcgtcacactaaattcaatgtacctgtccgtaccttatataactgtcgagactgttaaatcccttaccttacttaatttaatgccatgcaaccctctccccttttt

SEQ ID NO: 139556 - DNA, 520 bp, Zea mays
  Clone ID: MRT4577_58762C.1
gtcacctacaagcccaacgtttaatacaacacggtgtgtagtacaaataatgccaggcatgctacacctacagtgttcctggggaaaaaactttcaaccctggaatctaccaatttaaatactggaatctaataccagaaaaaaactacacatacacaccatcttccgggaaaaataaaatgccacgtccaaacacttataaaacattaatggactagactccttttttttaaaaccacctatccagatccattaaatatgcattgcacttggcgagagcctccatagtttcaaacaaaatagaaccatctccttattagcagttttgactgcacacttcaccccaggaacaccaaccacggatttaacctgtatatggaacggaattccaagtggcatcttcacggcggagatactgaacatccatatccgcatttttccgtttgactataaagaacacattataagctgtaaagggctcaacagtatcatctatgctgtataatgacagatcccaaaa

SEQ ID NO: 139557 - DNA, 422 bp, Zea mays
  Clone ID: MRT4577_58763C.1
aaaaagaccaagcccatttttctggggcaaggggggggggcccccagggggggtcatttcaaggggagagggggcaaggcaagggccgcttttccaagaaagcctagcggggcccccgaattttcccctactcttaggaacaaaccagccccttttgggggggtcataagcaaggggggaaccgctgccattgggggaatcccacgggggcccctttttaatcaggccccgcagcctttgggccccagggccaggctcgaaaacagagtcttcccccctagacaggggggggtcagctcctccttaagagcccccggcacaccatgctccaggggggaaccagccccccggggggggcaagagcccgggggctattttggccaggaccctggcggccttgggaaacctacccccaaatgggg

SEQ ID NO: 139558 - DNA, 573 bp, Zea mays
  Clone ID: MRT4577_58764C.1
ccggccggggcctttgtattcgtcttgctccagccgccgtcggatcggatccgatccaaagcaagcagcagcagccggctcctcctccgcctcccgcagcagccacaccccgtccgtcaccagaggaggaggaggaggatgtcgggatcgaaggtgtacacccttgaggaggtggccaagcacaacaccaaggacgactgctggctcgtcatcggcggcaaggtgtacaatgtgaccaagtttctggaggaccaccctggaggtgagattgatgcggccacgatacccagtaaggtgaagtacacgccccccaagcagccgcactacaaccaggataagaccccggagttcgtcatcaagatcctccagtttttggaccccctggcaatcctgggcctggctgttgctgtaagtgatctacaccaagttggaatctgcctagtcatctgaaccaagttagcgagggttgcatcttgtaccagagtcgcatgtcagaaacttgagtctttgctgtcatacggttatatttatatgagacttctatcgttaaaaaagaaaaaaaaaaaagcggcc

SEQ ID NO: 139559 - DNA, 239 bp, Zea mays
  Clone ID: MRT4577_58765C.1
ccaccctcgaaacgaggggcgccatgtagaagcagggaccctccgtatcccccgcactggagcaggccacggaggacccaatcctcggagtgaccgtagcatacaacaaggaacccagccctgtgaaggacaacctcggtgtcggagccataccggaccgaagaagggaaagcccaactgcctgaatgcggaaaagcgcgccaagcaaatgacgatcaataaattagtcacgtgactag

SEQ ID NO: 139560 - DNA, 2203 bp, Zea mays
  Clone ID: MRT4577_58766C.1
ggtaccctcgggtccggccggggtattcgtcttgctccagccgccgtcggatcggatccgatccaaagcaagcagcagcagccggctccgcctcccgcagcagccacaccccgtccgtcaccagaggaagaggaagaggaggatgtcggggtcgaaggtgtacacccttgaggaggtggccaagcacaacaccaaggatgactgctggctcgtcatcggcggcaaggttacttctcccccctttctatctgtacagtatctctctctggcttttgggaattcagaaggatccctccctccccttgccttcctggtcctggggtgggaaccgtcgatcttccccttcatcggatgtatcattaagatccgttttcgttagctgcctggaatcgagctctgtcacctgcaacgttgaaacgaaacgattcattcccttgggatccgggaactctgcctgtcctttttggattccgattccgattccggttcagccctatccttaatccctagttaggagtaacaacaaatcatggaagcgataggatagcttctactgtacctacctaacctagtactggtgttcataacccacccccctggttgctagtgccaaaaaaaacatcgatcttcctagtggagaattcgatttcatctcaccgccctgtttcattccggttcagctgcttctgccgcctctagtctggacgactcattttcctgcgacatctagttagaccacgatgagtaaatcaaacacgaaacgcaacgataacactcctgtgctgtgcgtgcacaagaccatcactgacacctgaagaccatccatcgtacctggtgtggtatgttgttgggggcaaccatgatttctcttcaccattttgcttgcttattataggttattatctacttctcagatggttcagcctcactctcttctttagaacatctccgcactctctcaggatctccaagaaccatccttagaatgttgattcacaaatgatctcaaacatatcgggcctttactgaccatatgcttgctgacctattattactttctcctgggtacctccgtccattgtccatatttgtctgtacatgctgatttaggtggtggttttttttggtgacctctctcactctctttgagcctgacccactccttaaagattgtcatgtagccctataataatatctggtgcctcgcttccggaaatcatatcattgtggtacaactggaatgctcttgttgccgtctttttttgtttcgtctgggatccacaatctaggtggagtgtaatactcaagatccctgttttgtgaatactggcaaaacaaaaaatatatataccctgtctagatgcgggatgccactaatttaccaaaaaaaaactggtggtgattggatgtgatgaacagaaaagctgtgctagtcattctctaattcagctgaatggcagtggcaccatgatgtttctgcagtagcaaagcttcatttgatgaaaaaaaataaggaaacccttttctgtttgtgtttaggtgtacaatgtgaccaagtttctggaggaccaccctggaggtgatgatgtcctgctgtcttccactgccaaggatgctaccgatgatttcgaagatgtggggcacagcaccaccgcccgtgcaatgatggacgagtacctcgtcggtgagattgatgcggccacgatacccagtaaggtgaagtacacgccccccaagcagccgcactacaaccaggataagaccccggagttcgtcatcaagatcctccagtttttggtccccctggcaatactgggcctggctgttgctgtaaggatctacaccaagtcggaatctgcctagtcatctgaaccaagttagcgagggttgcatcttgtaccagagtcgcatgtcagaaacttgagtctttgctgtcatacggttatatttatatgagacttctatcggtaaaatgaaatggatgtcagaaacttcattgttgttcgctgtggttttgttctgttgtccccttttctaaccgggatatgtttgggaaatatactttctggaagtgccctcattagtttaacaaaactacaaaagggtgttcactataaagtttgcatgcgttcagaactttatattactcaaaaaaaaaaaaaaaaaaaaaaaaaaaaaaaactcgagggaaggccgcggtacc

SEQ ID NO: 139561 - DNA, 532 bp, Zea mays
  Clone ID: MRT4577_58767C.1
ggccctaggggccttttttttttttttttttactttttttttttttttttttttttttttttttttttttttcttttttttttttttatggaagacgggaaccccctcactttattcaatgcaggaataacaacgccgcacggaaatgaggacgccggaaaaaccccccgcgggaaaaaaaagaagactccaaaaccccccccgccgcaaaaaaacaaaaaaatttgcggccaaaaccacaggccccccatttttagggcggcgcccaaataaacaggcccccgattttcaaggcggggaaaaaaccgccaccactgggcggactcccccatgaaaaacgggccgacaacgtggcagacgccgtaaagaacgccggaaagatattggggggcgccgagcaaacaaaggcagaacggcagggaaaaccggaaaaacactcaaagatgtgctgccaagaccaatgaaacctccctagcacctttgagccccaggatatagactccccaagagtagccatggggggcgggatcca

SEQ ID NO: 139562 - DNA, 728 bp, Zea mays
  Clone ID: MRT4577_58768C.1
ggattcggcacgagcttccctagagcatgttcgtgttgaaataatttgtttcgatgccagccataacatggtgaaaaacgcagaagctgcagttcgcaaagctatatctggcacaagtatcccaaatctggaaatacgaagacttcaggaaaatagtatgatacaggacgaagcggacctctgtgatgcagtacaagagcagaataatcagaagcaccagaaaatgaagagttctatggagtcccaggatgggtacctcacttctttaccgaaccaggaaagtgcagatgttgttggctccgataatattgtggaagttcataataaagtgatagagttaccactagtgaatgaaatgaactcgcagacgattaagagggatcaatactataatttcagtgaagatgaggacttaatgttggtttctagctaccttaatgtaagcaaagattctattactggaagggataaaaaagaaggcacattttgggaaagagtatggaaatactataacaagaataggacattcgagtctgatcatagttggttgtcattgaaacatcgctggcttgcaattcagaaggaagtgaatatctttcaaggttactatgatgccatagaaaggaaaaatcacagtggccagacaagtgatgacaagcatgctgaagcagaagtagaattccgagaaaaacaagggaaggctttttctgtattccatgtgtggatga

SEQ ID NO: 139563 - DNA, 481 bp, Zea mays
  Clone ID: MRT4577_58769C.1
ggtgtgagcctttttctcctttttttttttttttttttttttatggcttacaaattggcccttatattttttcccatccttattgcccccccacaaaagcccaaaaccttcccaggggggaaacccaacccacagtaaaatacaaaatttttctttggggggggggaccaattttacacctaaaacctggcccaagccccccttgcacctggtggaactgaaaagtgaacccgggtaattccttatggaggcgtatggttcccgaaagcccaaataaatcccaaaaaaatagacttgccgaccccccccagctaaaaagaacaaaacctttcaaggcgaacaaaccctggatcggggaagcaaaaatattggggggacccaccctaccacaaaaccccccctgaaagcctaaaccgagcctgaacgcaaaaaacagggcccccttgacgtagagggtgcccaccaggctgaccacgaaaaa

SEQ ID NO: 139564 - DNA, 299 bp, Zea mays
  Clone ID: MRT4577_5876C.1
gcgtatgtttacccagcttgacgaggtagccacacgtctacagtcggcatgttccatggcgctacatcgacccgcgcccatgtagctacacctgcatgccctcctacaagcggctattagcaacagggatgccacgcttacaccaactggaatggctcctgctcttccaccaccgcttactacgcggtaggttcagtcaaggaaacgaagacaatcgctgatgaatgacatgacaacaactggtgatgccaacgactcgaaacccgctcaatggccctgttttgtagcgactgactaca

SEQ ID NO: 139565 - DNA, 409 bp, Zea mays
  Clone ID: MRT4577_58770C.1
ggggcaacggttcgctgcaaattaaacaaacaaacgggtgcgggcgggccttcatgccaaattaaatgtaatgcggggggggcctgggcctatgcctgggaaagaccctgctggtggctgcaaccggcgacccgacgaaaaccacgaccaccagggcccccatgtcacctgggtcggatggcccagtgttgtgtacccaaccacaaacaggacaccttcttccaacccaccccttaaaatttaatagtagtagggcgtaaataccacccatgcccgggtaccggcataaacattcaaaaaatcccctggagccctgcgagctcctgtgccaacaccttcctgaactccggcatgggtttgggctccaacgacagggcgagcgccacggggcccttctttccgggggcct

SEQ ID NO: 139566 - DNA, 410 bp, Zea mays
  unsure (1)..(410): unsure at all n locations
  Clone ID: MRT4577_58771C.1
ccgtccgagtaataaccctagnccgcnncgccaccgaagcggcgcgtcccagtgtaagcaggatgcgtcgcntngcccgccgctcgcccattgaagccgccaatctctccgctgtcaccgagggctcccgctcggaaaggtgctncgcaagggcgcccactttacgntngccccgttctctccgtcccgcccgcgggttctcaaatgtcnncgcggnnngctgtnncgacggagccctccgcncacaatgtacccaacgtgcgcctcnncatcccgatcccgcaaaggacccgacgaggtgcantgttcgtgcgccgggcacctacaaggggccgtgagtgtgaagggtggtgccagtgtgtaccgccgcccgctggtgtcatccacggtccaagcggatcactccgcga

SEQ ID NO: 139567 - DNA, 358 bp, Zea mays
  unsure (1)..(358): unsure at all n locations
  Clone ID: MRT4577_58772C.1
ggggaanaaacaggacacaatcaacaaccccgccaagcataaaatatttcagaaagaccacacaccgaagagaggggggttaatctaaaagacagaggaaacccacccccaaaagataaataaatatataggagacaactagaaccagcaaaaaaccaaacagataccaccgcaacaataaaccacaatcaaatagccaaacaaatccaattaaaaaaaaacatggacgaaacaggaacaaacaacacaatggaaaccaacaactaaaaactaccgaaagcccttaaacaaaaagataacgcaaccgaaacagcaaaggcaaacaaactgaaatatgttaataaacaaaacctaaaac

SEQ ID NO: 139568 - DNA, 323 bp, Zea mays
  Clone ID: MRT4577_58773C.1
tacacttccaagatcgctagcatttgacaagtcctgggaaaaacgtacatagaacagaaagaaacctccgtgctttttccaatttacgcttgcactcctgagaaacccacactgcacagagtgtaaaatggtaccttgcagcccaaaccaaagaagcccactctctctctcttgttttccatgtgcgccggacaaaatagaacacgaagcctacttattaaaccccaaaagcgtgactttacgctttgtaccccaagaaaaagcttgacctttattcgatacgcaacgccaaccttgagcatatgggctttgggaatggccac

SEQ ID NO: 139569 - DNA, 609 bp, Zea mays
  Clone ID: MRT4577_58774C.1
attccatattcgcagcgtgctcgcatagactcctctccctgcgcactgcatggctcgtctcgcggcgacggcgacggtcaatactggggagccggagctgccgccctactcagcaggggcacaactattgttgggccacttggccggggacgcgcgccaccggttactccggatcgcggaacgcatggcaacgcatatcgagctcagcacaatgcggtgccgtacaacttgactagcaaggcatgctcaatatctatggttgcacggaccgcgaccagactgcactgctgcatcgcgcttctctgcatggtgcaagctcggttctcgtccgaataggctcagagaggaccgcggtagctctatggtggcggaaccatgcagagcggaggcgacatgaggactgagcacaatagggaggatacaattaacgctgctgctgctgccatcgtcaccgcgtcgagacgcacacagcctgcagctgaacagggaaggaaatgggctgaccgcttgagcgaggacttctgctctggatgacacgagactgggcggtgcatgctagtgaaccatgccagacttgtaccagaacctgcaccttagaggacagatgcg

SEQ ID NO: 139570 - DNA, 447 bp, Zea mays
  Clone ID: MRT4577_58775C.1
agataaaagaaccgcaaaatttctatccttttttttttattttattatttatcttggtggttaacacgaatgatgaggtacggattttctcattcggttatcatattctctatcgagccgtgaatttgattatcaaaagacaaattcaactccactattggttttacgtgaaacaatacctatagtagctcccactataggagaaggggcaagacgtcataaacaaggacccacgcgcgagagttccgaccagacctaggatctataaaaggaagacccttgcttggggtgtctaaaagattcattcctttagcgtgcgccttgcttatggcttatattttaccctgctagggaggagacccaccccctcctatcctttgggccataaaaaaaaaatacccgcccacccccctaaccttggttggtgtaacaaaaaaagaggaccgc

SEQ ID NO: 139571 - DNA, 354 bp, Zea mays
  Clone ID: MRT4577_58776C.1
gccgttgcaccggtaccaggcgacatacggtgtggtcctgcagtccttcctgcagcagcagccgaagggcgagctcgcggctctgatggcggcccaggtagcacaacatctgacggctatgtgcggtctgcatctagcaaaaccagccccctgctttaacaacgcatgttggcggtggtgactactagtgaaaaaactttctgctgtaataatagtatagaggcgccggctaataaccacaaagggtagtagactaattaaacggcgatgaggaaaatcgtgttacccctcatcaccatgggtggctgtgcgagcactcccctgaaccacctcttgatgggggagggatttttt

SEQ ID NO: 139572 - DNA, 600 bp, Zea mays
  Clone ID: MRT4577_58777C.1
aaaactatcacaatagacgaatacctgtctcggtacgctcgtccactgcggctccacgctctctcgattcatatcgaacatcgccatggcgcacaatccccgccgtctgctcgaaagagagacacgtggacggtgacagcaagtactccccactctagcagctatgcgacaatgtgcccgaccgtcatcgtcgattccatcactgctcctctggcgatacctcccgtcctcaggtccccgtctacaagaaagatgctaaatgttttcaaccagaatgattctcaacgccccgacacatcatatgatctcccgatcgattgtgccttttacctacctcaggccatataatgtgcagaattctctgcgctcatactatacgcagacctctagctccatgaagatctgcctagagaactgaaatggatacatggaatttgtgcacaggctccacacgatgatgaccgatcagtccactactcagcgacatgactgcatctgggaggggacatttcgatgcatgcctactctttgctgctatagttccataaatagctcaactaggaacgatgatacctcactactcatattgtacggtgacac

SEQ ID NO: 139573 - DNA, 152 bp, Zea mays
  Clone ID: MRT4577_58778C.1
cgggtggttaagcgcgataatggcggacttgtggacagactatgctgacttctgctctaagatctacggcgatcgcgtagagcactagtatacattcaatgagccaacgatagtatcgctactttgctatgacacagggtcacatcctcctc

SEQ ID NO: 139574 - DNA, 732 bp, Zea mays
  Clone ID: MRT4577_58779C.1
actcgtgggccgatacaagcctctatcccacgcgtccgcccacgcgtccgcgccggcgtgctgcggctggccatgggcgccgtgcgcaccaaggccgccgaggccaaggccgcggcgggcgcgctcgccaacgacccccggacgcagccgctggcgcgcggcccgctgcacgactgcgtcgagtcgttcgacgacatcgcctacagcctcgaccaggccgccaagtccctcgccgccggcgaccgcgacaccaccggcaccatgctcgacaccgtgcgcaccgacgtggacacctgcgaccagggcttcgaggagcgcgaggagctcacgccggtcatggccaagcacgacgccgagctcgccaagctctccagcaactgcctcgccatcgccaccgccgccggcttgcgctagatcgcctgtgcatgtgctagctcctaggcaacaacaacaataatatatataccgccaccttataattaactctccacgcatcagagaagcttcacacatgcaccaaacttgtgcatccatggatatccaagaagaagatgtagttagtgcaagcgttccggttatttcgttttccttttactcctcttcattccttctaccttcaccaagaactgattgttgactgacagcaccaaaaaaagttaatgtaaattttatttaaatccgataattataatcctaaacttgaccaaaaaaaaaaaaaaaaaatttgcggcc

SEQ ID NO: 139575 - DNA, 337 bp, Zea mays
  Clone ID: MRT4577_5877C.1
ctttggctggagtcgggcatgcgattatcaattacaatgaaaagccgggacactggtcgtaaacccacaagcccgagagtagacaaggcgcggctgcacgaatcgaaacagtcttggggggcacgcgctcgttgctagggagggtaatagcgaaaaggtgaaaaaccatggagctcactaacaggtgggcagagagacagccaaaaagaatgactgctgtggcaccgcaataagtgcccatggtgcggtgagttcttacaaggacgagggcggcatattgaagggctctagcggtcatgcaccagattactgaactggttctcttgagccacaaacg

SEQ ID NO: 139576 - DNA, 327 bp, Zea mays
  Clone ID: MRT4577_58780C.1
acatcaaggtgccaatttaataattttttttgaagaaaaggggaatattaacacgggtgcctatttacacgttacagacagccaattccaacagtgcagtccagtttccgattcgtgccacactgagcaactaggtttcttagactccgagaggggaaaaaaggaacgcccaaagttattggacagccctctgacgctgttgctgacacatacacactgtacacacgctttttggcttcaggatttgtggtcatcattgctgagagagcttccttggcttaacatctacagacgcacgagtgcggtattcttggaactggtttttat

SEQ ID NO: 139577 - DNA, 828 bp, Zea mays
  Clone ID: MRT4577_58781C.1
catgatgccattgggctgtgaatacagagcaaggggaggggggtctgctttcctctaatctgagaggactatcagtgaccccgtcaagtggaggcaagagtaggaagctttgattaacaaatactaggtgtatgttcagagagagggacagcaacaacagcaaccaaaaaaaaaagagagagagacagagacaagtctaggttgttttagctctaggccctaagtatatgatgatagcagtcgtataaataacagtgttttagtaagtatctcctgccgggtatgaagactcaagaacaaaggtcagatctcgcgtatgctcgtttgtagcagtgtggatctgatacaggtaattgaaacctttagatggtggtagggctagtagtgagcagtagacgacaactagtcctggcagccagttgtagtgaggtgacatggctgcatacagacatccaaccaaaggaaacagagggtgtggaaagaaggggagagtggacaaaagccagaccggacagacatggctggcgctgctgctgcataggcacaggcacaggcacagggaaaggtgatgagacgagaggggtggggtggtactctgctgggaccggcgcactcacgggtgcggagaatcagcttcgcctcacgagcgatgcagcagctgagacacagacacagacacctctcgtctgcgtactgtttcgcccatgctcttgtcttgtacgcatgcagcagcgctccttgtccttgctccggcgatgtatccaccttctgctcttcttttcaactaggagtttagcggacaaagaaatgaaaaagtaattagcagtc

SEQ ID NO: 139578 - DNA, 254 bp, Zea mays
  Clone ID: MRT4577_58782C.1
agctaattgcaattggtggtgactattgggtatgctggaccaaaatgccttgtgggggaagtgaagagcagcataatggttgtccttctatcggctgaggtaatatatatgctactatggcgatgctatgaatgcacgtgttggatgcttgaaacctaaatgataaatgcgagatgtaataagcctatcgtgctgtagctattcagaggggtgccagtgctgccaattgatctagaactacaagggtataaagg

SEQ ID NO: 139579 - DNA, 306 bp, Zea mays
  Clone ID: MRT4577_58783C.1
acaaaccgaggtttttaaattttgatgataaaaaaaagccctgagttttttgcgtggggaaagggtttttactttgcaaaaaaaagttttttataccccacctacggatttttttattgggccgggcccaaattaaaacaatgtaagggtattacattaaaaaatttttttgaccccaaattgggcccaggaaaaaagaaattttaatgtttttgggcctggtttggaattgaattcctgggggtttacaacctaaaacggggctttgggctaaaaaataaaaaactgtttgaggttttggcccaa

SEQ ID NO: 139580 - DNA, 416 bp, Zea mays
  Clone ID: MRT4577_58784C.1
aaggacccaaaaaaaaagggggccgaaccaagtttaaatggcccccaaaaaaaatttctgaaaaaaattttcaaggtaaacagggcctggaacaaacaaacattttaaataaaaatttaggggggaaaaaggcttgcttccttaaaaacactaaaaatttctttttgggggccccccggggctccaaaaaaaaaaagtggggaaaacattatttaaaatttaaatccttaacccaagggaaagggaacctaaaccctaaaccccgtcttaaatggtaaagagggggatttccttttccccaaaaagggggacctaaatgggcacactccccttttgggatggccaaaaattaaacccgccccttgggttgggcccgtgcccaaaccttgaaaaatctcccccccgccgccggggtc

SEQ ID NO: 139581 - DNA, 242 bp, Zea mays
  Clone ID: MRT4577_58785C.1
agatcaaatacatagcttacgtgggagatgaggtcctctacaggagcggactatttcacagatgaacagtggaccattatggacgtgactatgacatggatacagacactatgtcttattggtaagccggctccataaatggggctgactgattgatggggaaatcacgcaccggatcgtggaagggtaccaagttttcctatgaagagtcagatgagagattggcttagtgctgggcatac

SEQ ID NO: 139582 - DNA, 440 bp, Zea mays
  Clone ID: MRT4577_58786C.1
tatttcggcacgaggctctctctctctctctctctctctctctctctctctctctctctctctctctctctctctatctctccctccgccggtcacactctgtccttcacattcatgcatgtttacttgctggttactgcttatgcgagtatgtatacacacacacatatacagtagggggagagagtatatatatatatatatgtatatatatatatatatatatgtctatatatctaactatataaaaatctgtgtctatgtatgtttgtgtctgtgtgtgtgttggtgtgtgtaaacgaagggaacctttagatgggacggtgtacaagagaaggtgtaaaaaaatgagaatgagggtgaccgaaatgaaaagatataaagacggagaggggaaacccgagtagtaaacatctagacaagagaaaatgacagacttt

SEQ ID NO: 139583 - DNA, 475 bp, Zea mays
  Clone ID: MRT4577_58787C.1
ggccaacaagctggagccggacgcaaggcgcagctggcccgcgcgctggggctgcagccccgccaggtggccatctggttccagaaccgccgcgcccggtggaagaccaagcagctggagaaggactacgacgcgctgcgccgccagctggacgccgcccgcgccgagaacgacgccctcctctcccacaacaagaagctccagacagagatcatggcgctcaagggaggcggaggagggaggcaggaggcggcgtcggagctcatcaacctcaacgtcaaggagacggaggcgtcctgcagcaaccgcagcagcgacgagaacagctccgagatcaacctcgacatctccaggccgcctcgggccgccgacgagagccccgccgccatggacagctaccgcggcatcccgttctacgcctgcgcccgcgccgacgacgtcgaccagctccagctcctgcacagcgggggccacc

SEQ ID NO: 139584 - DNA, 639 bp, Zea mays
  Clone ID: MRT4577_58788C.1
ggcgattgggttcctcgaggccggccgggaagctgccagtgtcgatccacacatatcgtttggtcctcctctggcgccaagagatttgctgccggtccaacctcggcgactatcggagagggagcagagtgcatggcgaagtcgtgcggggtgcaacgtccggtgccgctgttacctgtggccgtggtaccgctgtcatctgttgcttccgaaaagccggtgccttctgtgggcctcgacaacctggctgtcgctgctgcaagcccagtcgttgccgcgcgctctgctccaggctgggacaccatcgctgcgctagataaagcttggagacgaagagagccaccgtgtggctgctaaggcgaggtcgaagccactatccagtatcgagtgcgaggttacgagtcatctgaagatcatcctggtacctagaatctcaagtcccaggtcaagatcaggtaccacaggatgaggcgcgtggaggatgctgtgacgagttcgtgagaggtctaggtcgtcgtctcccagtcaactttgggttgctggaccgttgtctccttataatgtaattatttatttattttgtatagaactcctattatatagtaaagttgtggcgaaaaaaaaaaaaaaaaagcggcc

SEQ ID NO: 139585 - DNA, 523 bp, Zea mays
  unsure (1)..(523): unsure at all n locations
  Clone ID: MRT4577_58789C.1
gctagttgctacgccaggacaattatttacaatacaaaatatgatttatacaacacaagactctaatgagaggttttccagcaccatttacaagaagcccaaaacattgccctcgctggacagaaagtgaggagcctctgacagtaaatttctctgcatttccatcttttggagggtaaactttcttaatgttgtcaattatgaccgaataactagaatctggtggttgcaacttgcaagaatccctctccctccctccttatgaaaagaaaagagggggcactacatcttaacaaacaggtaacacaacagattcggtgaaaagaaattcatgcaggacagcaggagtaatttcgaacaatacaatgagtaactaaatttagtttaaataaataatctcacactagtgtgtgtctgctggggaagggggccaaaatgttaaatcgatcaaagtaagcataacatgaaaatgcgtatgntatgtgtcgaggattactggagggattaaaagaaccattggagc

SEQ ID NO: 139586 - DNA, 1598 bp, Zea mays
  Clone ID: MRT4577_5878C.1
ttgattagaagaactttgattccatttatgatgatgtttattgatgatggttataattatgatctctggtatctccctgttgggggtcttcttcttcgccgaaggtcctcaaggcgaaaacaccttcggcaagataatataaaagcatatgcgacatgatgatacagatgaaagccgatgctatggctaaagaagcttcggcctagtattatgacgaagccgaaggtcgtcaccgactcaaggggaaagactatttagtccttgattattcatattatgattgtaagtatagtcagggacatgaatgtaattgtgttcgggctgcgtcccgtgcctataaatagatgaatagtacccacgtactgttcacgctggattctaatctctctctcgtgtcatctttgcattcacaccttctggcgaaccaaaggtattattgtattatgaatattattaatgttgattcttctctatggatataaatataaattaactgcgaagacataatcattatctatggtatttaatgttctttcgcattcctatttatatttatgattatatgctgaaatgatgaaggtatgtccttcatgaccttcgtctgaagatcattgcatccgaaaggaaataatgcttcggaggacaaaggtctttaactattaacaattgtgttgccttgttcttgatttatagaatttgagaagaagtgaccaacattggtgcccacctccggtgaactcacttccacaactgtgacgatggctctacaaagcaaccaaccttcggctatgaggctagtgctcccaatcacaggcagttcaacttctgaaccagctataaagaggtagaagaaagaagcacagagaagggtacaacatgttggagtgcaagggcccttcatcaggtcaaagtggtctcatattccaatcaccttctctcaggaagaccttcagcttaaggatcatcctcacaacgatgcaatggtcatatcttgtgttatcaagggatttctggtccacaatgtcctggtagacacaggcagtgcagcagatatcatctttgcaaaagctttcacacaaatacaagagccagatgacaagatacatgatgcaacacaccctctatatggcttcggagggagacaaatagtggaacttggcaagataaaaatgccagtcacctttggctacattcacaacacaaggacagagcaagtagtctttgatatttatccatacaatgcaatcattggtcgagggacgctcaatgccttcgaagctatcctccacctagcatacctttgcatgaagataccatcgaaacaagggcccattgctgtgcatgggagtcaagaagctgctaggagagccgaaggaagttggacggattcgaaggctattcataacatagatgaaaccggagcttatcagcagtataagcataaaagagaaaaagctactttggcagatcagccaaagcctatgcttttgtgtgaagatatagtagagcaaaaagtgctgctggggtctcagttatctgatgagcaagaaaagattttgttaaggttcttatttaacaacaaatatgtttttgcttag

SEQ ID NO: 139587 - DNA, 166 bp, Zea mays
  Clone ID: MRT4577_58790C.1
tcgcgatctataaccaaagatgtccgaggagaacaggccctctacccacgctactactgaaacaggagctggagaatatcagacgggcagagaactgcaacgaccgttctcagtataaagtagcactggagcgaagcctcctatggatgcttgaggcatccaagaa

SEQ ID NO: 139588 - DNA, 199 bp, Zea mays
  Clone ID: MRT4577_58791C.1
tccttcctaaagtttgggaggggggggggctagatcctgaccttcctttttatcttggaagtatactgctctgaagagaagatgggtcaagacgacacaagaagcacctgtcccagccttcaatactactattctcggggtattatataccatttctttccaattaagggggggggggggaaaggcttttttttttttt

SEQ ID NO: 139589 - DNA, 480 bp, Zea mays
  unsure (1)..(480): unsure at all n locations
  Clone ID: MRT4577_58792C.1
aatgcaggagagaaacgttgatttaactcggttgctcccatacattgttattaaataagtttaaatgctttatatcttataggacaacaggtttcgggatctgggataaccaactctcacaactggggatgcaaagcacaagcacactctgcccattggctgtcattagacataaacaccacttgcaacgaagcgcgaacagtgaccccaagccccaggaaacaaaagcaacacctgctggtgcgatctccttttacaggctcatgctcccccgggctgaagtttcttcataaaagaaaaaggaggcggggaacatgagggctacggttaccattaccactgccagctttggttaccactccactctgaccggtgtaagaaattgccttcttcgacattctccctagatctgctgccattgatatnagagcaccgctcaacctggctggttttccccttgtctacgccgcgcagaacaaa

SEQ ID NO: 139590 - DNA, 182 bp, Zea mays
  Clone ID: MRT4577_58793C.1
gcgctgtgactacctattgacttgtcgccggtcgtactgctgtatatcccagagcgcccgcggccctcactttctttctctcggccggtccttcaaggagccccctcgtcttgttgcctccgtcgctcttgctctggacgaacgctctaggatattgcgtttgtggttgctctagtggatgc

SEQ ID NO: 139591 - DNA, 138 bp, Zea mays
  Clone ID: MRT4577_58794C.1
cacacatcgtagacaacgcaattagctaggaatagcatccatggagtcaggtgcagctgcttcctcggacctcttgcacctcgacgcggacatggaggccacaagtgcgaggtctgacacattcaccatcaccaacaa

SEQ ID NO: 139592 - DNA, 234 bp, Zea mays
  Clone ID: MRT4577_58795C.1
gaattaactctccattcttcgagggcgcaatgaaattaggggggacatgtgaataccacaataccagcagttagggcgcgcatactgcctgtgcttattttctggttccagacagatccgcccataacatcacatcacggcgcaggcatggacattgtcatactggaagacggccagcgcgtagtagtcgaggacatgcctgaaggcgtggcatgggtaggatccgatcgtggg

SEQ ID NO: 139593 - DNA, 185 bp, Zea mays
  Clone ID: MRT4577_58796C.1
ctcagacacggggcgggacttttgggactgcttgcaggcaggcacgcaccagctacacgcggcacccgtcgactcgtagcggacacccacccaaattatacagatctgtacgccgggggaggtgcatcgtcgtacggcttaatcggggcaacgcggcctcagtgaggccagccagcgcatgagca

SEQ ID NO: 139594 - DNA, 376 bp, Zea mays
  Clone ID: MRT4577_58797C.1
aacgagatcaagggctaacacctctccggcgcggacaacgacggccacgagggtgacgcatgtgcgcaaagaacgggtttccccgagttcaagagtgaggagatggcgaacatcatgaacgacttcgacgacccacaggacctcgcaccaacaggcctgttcctcgggctgacgaagtacatggtcatccaaggagaacctggtgctgtcatccatggcaacaagggatcaggaggcatcaccgtgaacaatataggtcatgcactcgtggttggcatcgacgatcagccgatgacgcctgcgcaatgcaacatggtgcttgcaacgctaggcgactatgtgcttgaacaaggcatgtgactactacgtagcagct

SEQ ID NO: 139595 - DNA, 434 bp, Zea mays
  unsure (1)..(434): unsure at all n locations
  Clone ID: MRT4577_58798C.1
ctcggccgggctggtttaangctcggaatcaactacaccaagcccatcagcgttcccggaagcgaacttgcctctgtcgaccgaagtgttgccatgcttagcaacaccactgccatcgccgaggcctggtctcgtcttgacccaagtttgatctcatgtactcgaagcgtgctttcgttcactggtacgttggtgaaggtatggaggaaggagagttctccgaggcccgtgaggatctggctgcattggagaaggactacgaagaggttgccaacgactctctcgatgatgagggtgttgaggagggcgagtactaaattttgtcaaatatgcatgtggagtgatggagtggagagattactaagtgttaagtgctggggtgagcaaaagactcctggatgctgcagcagaaaaaaaaaaaaaaaaaagcggcc

SEQ ID NO: 139596 - DNA, 148 bp, Zea mays
  Clone ID: MRT4577_58799C.1
cggctcgagcctgcagcaagatggatgtgggcagcaaagaggtcctgatggagagcccgacggttctggagatgagcattggggcgccggaagcccagcaacgcctggccctgagtgagcacctggttaccactgccaccgtctccat

SEQ ID NO: 139597 - DNA, 570 bp, Zea mays
  unsure (1)..(570): unsure at all n locations
  Clone ID: MRT4577_5879C.1
gagacgctggcaatggcggacgtcgactgggcgcggtacgacgaccgcgccttccacgacgacgaccaggacacgccgccggagcacctgcgcgccttcgaggccttcgttgagacggtggtgccgctggacatggtgctggcgttcgggcgcgagcagagcacgagggcccggcgcccaggccacggccgggaggacgacgtcaaggagaagctcaagctctgggccaaagccgtggccgccaaggcgagacgacaatacatcaccaaacaggacaacgacgaccagaatgcctgaatgcacagtgtctgctagggcatatatgcttgttttaaaacaagcattctaagcattttctaactgttttgatcaaatccagctctttgttttttactagatagatcgatggcagtctctcggtccttccagcagctaaccggatctttaatgtattttcaagtttgctcgtagatctcttgcttaattagggttaatttccatctaaagagaggcatattggttgtaattttattataataataatatcagtttacggcnnnnnanannnna

SEQ ID NO: 139598 - DNA, 328 bp, Zea mays
  unsure (1)..(328): unsure at all n locations
  Clone ID: MRT4577_587C.1
gacaacgaggccancnangacancngccgccgcncccnngacacggggcgcccagcnacggcaaccncaacaggcnngncncccaggncancncaacccagacgggcccccngaggggcgagggcgcncngaacggngangggaacgagnnccagaccaaccnggngcccnacccgaggagccacgncangcnngcgncccacgcnccagncagggcngcggagaaggccnaccacgagcagcnggccgnggccgaaagcaccaacagcgccgncgagccanccgccangacggccaagngcgacccccgccanggcaagnacanggc

SEQ ID NO: 139599 - DNA, 848 bp, Zea mays
  Clone ID: MRT4577_58800C.1
caaaaattatgccatttctgcttagccaaatcacccaacaaacagttgcggccctaataaggataaatctctaagatcttttccaaaacccctaagccagctcccaaacatattagaaacactagaaggcttaaaaatgccaaaaactaagcgaatttaactccaaaccatgcgagcaaaacgacagttaaagaacaacctaattgtttctgacacctgacaaaagcaacatgttcaagctcaccgccaccaaggagaaacgctagctgcttttcctcgagaagtacgaagaagccaagatgtggtgggtttgcttgacgaatctgacattctgactgaagtttggacatagcattggggtgggtgcctgactgcctggtcagggttcgcaccgagatccttggacggaagaactgaggcgatttcgacacaatcttcttgggctcaaacaggtgaacggagaattcaggtcccacttcatccgacgatcacgcatccactccatttgccactgacctctctgttactgcgtccaggggtaagatcttgagagagcaacgcaagaacagagctcactagtagctgtatagcaatcttcgttttcttgttaaaaagggagaaaaacaagagagcacagcagatatttttgtattccattcctgaacctggtctcactttccattccattccattccattggatgccaaaccaaatcacaacccgtggttgaaaccaggacaagctcgcaagaatttggcatcagcagtccctagtagccgtttggaccttccgtagtctgaaaccaccaaagtttggccacggaatctgtcaaaatccccacgcgtccg

SEQ ID NO: 139600 - DNA, 2157 bp, Zea mays
  Clone ID: MRT4577_58801C.1
acctcgagccgggcggtgaaaagaagcgggccgcgaggggaggaggaacaaaacgactggctgtccgaacggggacgtctggttcctctcattccccttccacctcgctctctctctctcctcccactgctcgccctctctctcttacgcgcgcgtgacaacctccctccctccactgcgcgcggcgcgggagcagcagcggcagcacccaccgactgatcgccggtgggcggggcgggggcgatctgatgcgggcgcggcggtgatggcagcgccatccggcggtgggggcggcggtgcgggggagggctcctcctcggccgccgcagctgcgacgatcggggtccacggggtggaccaagttgcagaggcgatgtggcagatgaatttggaagaagccatggaactggggccatacccagagcgtgttggtgagccagactgtagctattacatgaggactggcatgtgcaggtttgggatgacctgtaaatttaatcacccagcagaccgaaagctggctgttgctgctgcaagaatgaagggagaatatcctcaaagaattgggcagcctgaatgtcaatactatctgaagactggcacgtgcaagtttggagcaacttgcaagtttcatcatccccgagaaaaggctgcaatggcaactcgagttcagttgaatgaactgggctacccactccgcccgaatgaaaaagagtgtgcttattatttaagaacagggcagtgcaagtttggaagcacatgtaagtttcaccattcacaaccatccaccatgatggttgctgtacgtggctctgtttattcacctggacagtctgcaacttctcctggccagcatgcttaccaaggggctgtaacaagctggcccttgtcgagatctgcttctttcattgcaagtccaaggtggccaggtcattcaagttatgcacaagtgattgttcctcccgggcttgttcaggtcccagggtggagtccttatactgcgcaaattggttcttcatcctcggaggaccaacaacggacacctggagctgctcaatactatactggctcacgccaaagtggtactagtataggcgatcaaggaatgttttcatcctaccaagcaggttctgttcctgttggactttatgcagtacagagggagaatttatttccagagagacctgaccaacctgaatgtcagttctatatgaagaccggagactgtaagtttggtgctgtatgcaagttccatcatcccagggagcgaataattcctactcccaattgtgcactgagtccattaggcctacctttgcgcccgggagagccaatatgcagtttctacaatcgctacggcatgtgcaagttcggtccaaattgcaaattcgatcacccaatgggaaatgccatgtacggccaggctccatcgccagctagcgaggccccagctcctcggcgcatgctggcacatgtaccgccgtcgcacccagaagcatcgcctgatggtggttccggaaggtctaggaggattgcccactctgattcccagcaaataccctctggtgaaaggagcgctgagagagaggcgtcctaggccatcctcggtgtcttcgttccccattcttgactggagtaaccatctgcaaccaacaacattcgaggatccgaagctgtacaggtcttttgccccacctctgagctttacataccggagcttgcttcaacgtgtattgcattcaggcaggaaaaagttcttgcctgttcgggatgctcatttgctcccccactgaaacgggaacaaacctaccttatttaaaacatatgtatggatggaacctactcacctctggacattcaaacccattcgagtcatgtgcactggtcccggtgctgtagttatagagctgtctttgcatggacaaagctgttgcgaaactgactggggatgcgcaagcataacctcttttgttaattattgtctcgttttttttctcggcatttatctctttttcataagggcagccccgcactctgaaagtgtgcgttttgaagattgggaaaataataggttgccatcgtatgctctgtattacccaccatgctttaaatatttgagagtcgtttttaccgaaaaaaaaaaaaaaaaaagcggcc

SEQ ID NO: 139601 - DNA, 1523 bp, Zea mays
  Clone ID: MRT4577_58802C.1
caatactatctgaagactggcacatgcaagtttggagcaacttgcaagtttcatcatccccgagaaaaggctgcaatggcaactcgagttcagctgaatgaactgggctacccactccgcctgaatgaaaaggaatgtgcttattatttaagaacagggcagtgcaagtttggaagcacatgtaagtttcaccatccacaaccatccactatgatggttgccgtacgtggctctgtttattcacctggacagtctgcaacttctcctggccatcatgcttaccagggggctgtaacaagctggcccttgtcgagatctgcttctttcattgcaagtccaaggtggccaggtcattcaagttatgcacaagttattgttcctcctgggcttgttcaggtcccagggtggagtccttatgctgcgcagattggttcttcatcctcggatgaccaacaacggacacctggagctgcccaatactatactggctcacgccagagtggaacacctggcataggcgatcgaggaatgttttcatcctaccaagcaggttctgttcccgttggactttatgcagtacagacggagaatgtatttccagagagacctgaccaacctgaatgtcagttctatatgaagaccggagactgtaagtttggttctgtatgcaagttccatcatcccagggagcgaataattcctactcccaattgtgcactaagtccattaggcctacctttgcgcccgggagaaccaatatgcagtttctataatcgctatggcatgtgcaagtttggtccaaattgcaaatttcatcatccgatgggaaaccctatgtatggccatgcttcatcaccgacaagtgaggcccaaacatctcggcgtatgctggcacatgtaccatcgcatccagaagtatcacctgacagtggctcgggaaggtctaggaggattgttcattcagattcccagcaaataccctctgttgaaaggatcaccgagagagaggcgtcctaagccatcctcggtgtcttcgttcatgctgcctcccctcccctcccctcccattcttgacgagtaattaaatgcaacaacatctgagaatccgaagctgtacaggtcttttgcctcatctttgagctttacataccggagcttgcttcaacatgtattgcatccaggcatgaaaaagttcttgccggttcgggatgctcatttgcccccataaaaacgggaacaaacctaccttatttaaacatatgtatgaaactcactcacctctggacattcaaacccattcgagtaatggtcccggtgttgtagtttatagagctgtgtttcagtggacaaacctttgcgaaactgactggggatgcgcaagcatagcctcctttattaattattatctcgtttttttcctagcatctctcttttcataagggcaacccaaagtgttggaataatagattgccaccataatgctctgtattacccaccatatttaaacctggttacttgtgagt

SEQ ID NO: 139602 - DNA, 531 bp, Zea mays
  Clone ID: MRT4577_58803C.1
gttggcgcaatgggagcgcggtgaaaagaagcgggccgcgaggtgaggaggaacaaaacgactggctgtccgaacggggacgcctggttcctctcattccccttccacctctctctttctttccactactcgccctctctctcttgcgcgcgcgtgacaacatccctccacgggcgcgcggcgcgggagcacccaccgacttatcgccggtggggcggggcgggggcgatctgatgccggcgcggcggtgatggcagcgccgtccggcggtgggggcggcggtgcgggggagggctcctcctcggccgccgcagctatgacgatcggggcccacggggtggaccaagtcacagaagcgatgtggcagatgaatttaggagatgccatggaactggggccatacccagagcgtgttggtgatccagactgtagctattacatgaggactggcatgtgcaggtttgggatgacctgtaaatttattcaaccagcagacagaaaagcgtttggtggtggtagcagaatgaatgg

SEQ ID NO: 139603 - DNA, 348 bp, Zea mays
  unsure (1)..(348): unsure at all n locations
  Clone ID: MRT4577_58804C.1
aaananaanaaaaaaagggggggtttttttaaacaaaaattttttgggggcccgcaaccaccaaagcccccaaaacaactttttccgggtggcttatccaaccaaacgggggggatcccagcccccaaattttgggccccccaacctttgaaccgccaaatacctttggggccccaaaggcttgcctttttagtccccaaaagccccccccttggttcccacccccacctttttgcgttttttggccccccaaaaaaaggagccggggcctccaccggggctcttggtttttttgggccccgggccagccttttctccctctaggaaaattccctctacggggtggcc

SEQ ID NO: 139604 - DNA, 496 bp, Zea mays
  Clone ID: MRT4577_58805C.1
ctccccacttcctctcgtcgccgtcctctgccgtacgcaacggcacgctgcctagcggctaaaggggccggaagcgagggggcaggccaccggggccggccaagagcaagacgggtaaagagacgaaccctttgtgccagagaaggccgaaccggttctgcgtctggggagcgttgccttccaagaaggacctgcaccgatgtctcacgtggcccacggtcgtgcgcatccagcgccagtgtgggatgctaaagcagcgcctcatggtgcctacggcgctcaaccagttcacctgcaccctatgcaagaacctggctaccaacctgttgaagatgcttcttaagtaccggcccgtagacaccgttgacaagaaggagaggcttgtgaagagggcccaggctgagaatgatggaaaaactgccggatccaagaaacccattgctgtgaagtatggccttaaccatgtgacttaacctattgagcagaacatggctca

SEQ ID NO: 139605 - DNA, 273 bp, Zea mays
  Clone ID: MRT4577_58806C.1
aatgggaagggaccagttttataaatgcgggttccttaataatgggaaaaataacactacagatcgaaaacccttatgggttaggaccatcatatattcgtttgcataaaacaaggaaagcgggcgaccttggaaaatttgttaaaaaaacggggtcataaaagttcaaagcttggttataattactggtaacgggcagccgggaacctcttttggaaaggcgttgcctttatgataaaaacatgcttgggcgcgccctcgaacggaaagacc

SEQ ID NO: 139606 - DNA, 243 bp, Zea mays
  Clone ID: MRT4577_58807C.1
cccacgcgtccggcccaagctcccatcagccaaggactggtgtagtggtggggagtgtggacaattgtgtgtaagtgtaactgtgtctgactctatatgatgttggcatgtgcatgttgctatccaccgatcttgatggcttacttagacttgagaatacttttaggttgcaatttcaaactgcactattattctgtaaactgtgagttaagtattacatgtactgttaaactcaataaataa

SEQ ID NO: 139607 - DNA, 316 bp, Zea mays
  Clone ID: MRT4577_58808C.1
cggcgttctccggcgagtgttgttacctgaaggtgaccatgttcgcaggcgccatgatgatatacacagtgaagctgagaggagctgagccgacagaagccatgatgggctccgaacaatgggaagatgatggcgaggaaccagatggggacgacgacagtgagcctgtctgctgcaccactagcaaggcttcggtggctgatgatggaccaaagcttttgccacacgaattggtgcggggtgcaggcgaaggcgaaggtgatgaaatagtggatgagcatgagcactacgggggggtacaggaagggcagacgtg

SEQ ID NO: 139608 - DNA, 196 bp, Zea mays
  Clone ID: MRT4577_58809C.1
acatttcttttttttcttccaagaaacacacacacggggaagttttaagcatgctatgccgtcttctaacgccggagggggggaaataacaaccatccgcttgggacccgcacccatagggaactacggcaacaaaaaggaccaagggcttcaagacagatatatgacgcacgaacacaagaaaacacacggacaa

SEQ ID NO: 139609 - DNA, 400 bp, Zea mays
  Clone ID: MRT4577_5880C.1
tcgaaaggctgttgcgctatcagagcatcaagcttcacatctttctaatgcaacagatctgttggcatttatactgtcctagtctaagctaagccccagtttgcctaatccctcacgtattgatgtttggtcacctgagttattgcccctgcgaccattcaatgttgccccttagatgatggtcctggttaggtgtttgtagcatgctctttctttcaccagtttctcaactctttgtatgaaccaaactgtgcattaagtgttctctacttttactattatttctgtaatctggctaaaaggccattatactggcgccctttcctttacactggacttatctggaacgagaagagcacgtttacgtctacctgcttttttaggctattccatgtgaact

SEQ ID NO: 139610 - DNA, 417 bp, Zea mays
  Clone ID: MRT4577_58810C.1
tcaggagtgaacaagcaattcaagatcttacttaactgtagttcaccattaagggatccattgccagactcagtgtgtggatcttcgaaagcggacctcgaacgtaacatagacttcatatattgcgtgaattcattatccatcttctttctataattgggatctttgtttgatgtcaaccctgtgattgctctctgcagaggcttacgattcgctggatccaaatggcaatatcactataaaatgggatatcatgcagtggactcctgatggatatgtcgtaagtagaattgcccactctaacagctgtatctctttcatcttcagcttggtaggccctggtttattctattaaatagcccattttcacctgtacaatataagttaatgtaacatggtcaatggctgatttggaaa

SEQ ID NO: 139611 - DNA, 381 bp, Zea mays
  Clone ID: MRT4577_58811C.1
cggacgacctccagcctcctcggcggcgcaggcggcgaccagccggggatggggatggtcggcgccggcggggtgctgccctcgcagtcgtcgcccttctcgtcccttgtctcgccgcgcacgcagtatggtggcggcagtgggaacggcttgctggccggcgcgtccagtgtcgcgtccatgctcagcaggcagcactcgtatgggaatggggggactggggcaatgccgggcagcggcgccggtctccccatcggtgggctgcagcacagaggcggccttgatggtgttggtgatttggttggcactggagggcccgattccatggtgttctcctcctacttctccgcccctggtagtttcgtcaatcagcttggtgcc

SEQ ID NO: 139612 - DNA, 375 bp, Zea mays
  Clone ID: MRT4577_58812C.1
ctgttttgttcgactacaaagcctgtggtcatcctcacggggattcgtggggcgcgcacctacctaccaacaatcgattaaccgttctccatggctgtgctcctcctgacggacatcctgcttggctcatctttttcgcgtgcctcccaaaggctggccttgctcgccatctcacaactactgctttctcgaccgccaccctgtgcgaggccatctgcttgctcgggaccagcgacgtccttgtcgatgcacgcccagtagtgtctgacgacatctcgtggctccaggaggaagacgagctagcgcttgggaccaacccttgtgtcaaggagagatgaccggcgtttacattccgtgagctcatcccttcttttt

SEQ ID NO: 139613 - DNA, 268 bp, Zea mays
  Clone ID: MRT4577_58813C.1
cctttgggctgctttatgtgcttggagaagtgcaatataatgtagtgagtcgcacggtccaatttctatggttgctcgtagaacggggtgttactctgtgtcgtcttcgatttcgtcatcgtcggttctgatggtggttatgtgttcggtgcttgttgatcgtgtgggtgacaagcctttggtggggtgcgtgcatgtgctgcgtgaggattcgttgaatcgggtgtgcgctatcggtgcatgattgctaaatcttcgctgggtcctg

SEQ ID NO: 139614 - DNA, 842 bp, Zea mays
  unsure (1)..(842): unsure at all n locations
  Clone ID: MRT4577_58814C.1
ttgggtacctcgaggccggccggcaccgcctccgccctccgttagatcgtccaaggtttcctcagcctccggctccctcctttcttcgcgatcctagggtggtctgttccacgatggacctgcgatacagccacgcgtggccgcgcatcaatgcatgggatctcgtcgtcaaggtcaaatatggtgacactttgaagcgtttcaatgtttctgtgaaaggttcacacttagagcatgatctgcctgcccttcgcttgaagatttcaattgcctttaagttcaattctgacactgagtacattctcacctatactgatgatgatggagatgatgtcatgccggatgatgataatgagctacgtgatgctgctgttaatcagaaattaaaccctcttaggattattgttcaattgaagggcggcaatgttgagacagctcggacagaacagcacaccacaaatttgaagtctcctaggtcaacatccctcgaagatgaactagctcaggtgaaatcagctattgatgaagctttacagtttgtaccagagcaaattcctgctgtcttagcaaaactatctcacgacttgcactctagagctgcgttatctgcaccaacattggctgaattgctttatcgtattgttgaactggtagtacgaagcagcaacattcaaccttctggtggctctggagttggttcacaaaaattggaaattcaaaggctaagcttgaaactacacctatgtcagtttcagcatcaaattccccagacatgcaaaatcccgagacaccctgaaatgggtcttaagagtgtgctatttggaanatcccgctgctaaaaa

SEQ ID NO: 139615 - DNA, 467 bp, Zea mays
  unsure (1)..(467): unsure at all n locations
  Clone ID: MRT4577_58815C.1
gagcaacagcggtcttccggtcgctgggagcatgagcgtcgagcgccaactccactccaggccgccgtgtttggctcgacgatgggatgtccacctgctgccacaaggaacgtcgaaggcccttggaggcaccacgacgcaaacccagcacgggagggaggtttcgggtatcctcatacccataacttcctcccgaccaatggtatggctcctggatcgaacccattccttcagcaattccacatatggtgcatgatgcttttggaagtcatccacattctcaattcgaccgacctctgggtaacatacctaaggttccatttccggngttcgatggggaaaatcctaaactatggcagacacgatgtcaagattatttcaccatgtattctgttgacactagtgtgtggattaggattgctcgcatgcattttacggngtctgcagcacgatggctccaatcggta

SEQ ID NO: 139616 - DNA, 504 bp, Zea mays
  Clone ID: MRT4577_58816C.1
atttcctcacgaccgacggcgactgcgatcttaccatccatccacactgagctgctcaaatcctcattcccatcggtgcagacggccgggaggaggatggccatgccggatacgctccccctgaacgtccgggaggagacgccggccaccgccgctaaggcggcgaccggccccacgtagcgaagcatcatacaacaaggacgggctcatggacctcccccaggacatccaggacccttgggagttcctcagtggggaatgcaagaactaccccacgaacaggatgctcaggtcctgtgatgctacagacggcgacgccgctgaccatgtgcggcaaacagactaagaagagcgccacaacggcatgaggattcagagccgcgatcagagtgctccacctacagacgggatctgactgtcgcatacatggagccaactgcccagaatgaggtcatggacatgcaagaatgtaaagttcaagggataatctctggagccacctgc

SEQ ID NO: 139617 - DNA, 735 bp, Zea mays
  Clone ID: MRT4577_58817C.1
accatccgcatagtcccaagttaccaaatcctcctgcgaggccccagcaccgaatgccccagcacaacaaggcggcatcgtttgagaggaagcggctagaggacctgctgccgggctagaagacggaagtggcgggacgccccgggacgtcgggcggcctggcgctgcgggcgggccagttcgtcttcgccgccgcgtccatctgcgccatggcctccgcgcccgggttcaccaactacacagccttctggtaacagcaattctttcgtttgctgctgcatgctcagctgcaggcgtagttgtgcttttcgaaagggatgcgtacttgtgcagaagggatcctcaactcccttgtggaaggttcgaggttgctgctgcatttgcatttctttgctggacgtttagtgctgcatccgctctggtaatgtcttggctgcttgcctccttgtgaatagtgatcttgtgtaaggtgtctgtaatgctctctttgtatatctcgagcatgctctctcattgtacacatgctcattttgtgtgtgagcaaaccacacgctagaaatggtacggtgtgttttggttcgatgtataagaagagatggaagggggcagccacaattttaacagtgtttggatgagagagtcaagtgatggcgaggggcggagattggagccggcgtgatccaaaaaaaaaataagaagatggtgtcactcccgtctcatcctactttgatatca

SEQ ID NO: 139618 - DNA, 2003 bp, Zea mays
  Clone ID: MRT4577_58818C.1
attggcatcgcgagcctcccggatccccacctccgaaagcacaacccccacgacgcaggagcgctggctccgggcgttcgggtactcggagacggcgttgggagaggagaaccgcaccgcggcgcagacatgggcgagttctgcccctccccgcagggggactccgcgctggcggcgccgcccttgacgctctcctccccgtccccagcaacggcggttaggccgagctacgggagctgcgaccgccgctacgtgaagctggtcttcgacaacctccacgggagcatctccgtagacccgttggccctgcagtttgttgataccgaggagtttcagaggttgcgggacttgaaacaacttggtcttacatatctcgtctatcctggagcggttcacacacgcttcgaacactcattaggtgtatattcgttggctggaaaggctataaataatcttaagacatatcagggagaagaacttggaattgatcatgttgacatgcagactgtaaagcttgcaggtctcttgcatgatatcggacatggacccttcagtcatttgtttgagcatgagtttcttcctcgagttgatcctggctcatcctggtctcatgaagatatgtcagtgctccttttggacagtattgttgacaaacatgcaatagatattgaaaatggttatctcaaaatggtcaaggagatgataactgccagcgctaagcctaccagcacagaaagtgcaaacgagaagcattttctttatgacattgttgctaatggtcgtaatggtatagatgttgacaagtttgactacgttggccgtgactgcagagcatgtggtcttggctgtaatttccagtattggaggttgttggaaggcatgcgagtgatgggtgatgaaatttgctaccctgccaaagactacttgagcatccataaattgttttcaacacgtgctgatctgcaccgcacagtctacacccatgcgaaagtaaaggctgctgagctcatgcttgtcgatgcactcattgaggctaatgactacttggggatatcattgcatgcacacgacccagaagaattttggaagttggatgacacaatcatcaaaaccattgagactgctcccaacaatgaactgaaaaaagcaaaagaaatcattcaacgtattcgccgaagagaactttacaagttttgcaaccagtattctgttccaaaggacaaactggagcatttcaaaaatattactgcacaggacatagtttgttcgcagaaatcttctgaggtgctgctgaaggaagaggatgttgcagtaagcaatgttaagatagatcttactcgtggaaaagataacccccttgaaagcatcaagttctttaaggattttgggtgcgacgagaagttccccatcacagatgatagggttagccacttgctacctgcatacaacgaggatagaattgtgagggtctatgccaagaagcctgagttggttgatgtggtgtcagaagcctttgagaatctccagatgagaatgtatggtgagaaaactcaagtgcatgagacgcccaagagaaagaggattagatccaactaggcagttggattttgtctaatcgcactttagataacatacaaatacaacacaggaaaatagcttcacaaacaagaagctatatagataacaggtttcagatggtagtctgaactggtaaggtgtaggtattttgtgtacaggagaaaatacaaacaacattgcatgaagtctaaaaactcacgttgacgtacgagatgctgcatgtgcgtagattggatagctagtcaaatactttatgatgtggatggattttaattactttatgatgtgtctggatttgtaagtacttgtcattttaatcttaatttatatggatctaagagaattaagtgggtttaaatccctattaagtcaaaaaaaaaaaaaaaaaaaaaaaaaaaaaagttctctgcgttgttaccactgct

SEQ ID NO: 139619 - DNA, 980 bp, Zea mays
  Clone ID: MRT4577_58819C.1
gtgctgctgctctaaagaagggaggagaggaagtagcgacaaattattatattttaaggctgttgaactcatgctcgtggatgcccttgttgaggctaatgattacttggggatatcattgcatgcacatgatccagaagaattttggaagttggatgacacaatcattaaaacaattgagactgctcctaacaatgaactgaagaaagcaaaagaaatcattcaacgtattcgccgaagagaactctacaagttttgcaaccagtattctgttccaaaggacaagctggagcatttcaaaaatattactgcacaggacatagtttgttcacagaaatcttctgaggtgctgctgaaggaagaggatgttgcagtatgcaatgttaagatagatcttactcgtggaaaatataaccccctcgaaagcatcaagttctttatggattttggttgcaatgagaagttcccgatcatagatgatagagtcagccacttgctacctgcgtacaatgaggatagaattgtgagggtctatgccaagaaccctgagttggttgatgtggtgtcagaagcctttgagaatctccaaatgagaatgtatggtgagaagactcaagtgcacgagacgcccaagaaaaagaagattaggtccaactagccggttgtatgttgtcaaatcagtctttaaatagcaatacaaatatacaattacgtcacatgaaaatagcttgacaaacaagaagctctatagataaagcatcccagaataaacaggttttagatggtagtctccactggtaaggtatagatatttagtgtacatctgaagtacaaacaacactgcatgaagtataaaaactcacgttgacgtacgtggtgcgatgttgcatgtgcgtagattggatagtttgccaaatacattttttatggcgaggctggacttttaaacacttaatacgcatgtatcgcctttttaagcc

SEQ ID NO: 139620 - DNA, 394 bp, Zea mays
  Clone ID: MRT4577_5881C.1
ccggccgggagtctccttccccagatccaaatcacgcagaagctgtcgtccctgcacatggcggttctcgactgtgatccatttccgagcttcgaggaatcgacagtcaagcttcagtgaccaagagactgaactctccgagttctacgaggctgaagatcctgagcatctgtttggtgaaggcaagtgtcctctgacctattatgtcacatttactgtataattcatcaacccacataccatgatcaacctaaggattgactagcttttgttgtccatgtccttgtttacctatttgggttggattattattgtgtagctttatgctattgctcaactttaatcaatgaacatgatgagaattaccaaaaaaaaaaaaaaaaaatttgcggcc

SEQ ID NO: 139621 - DNA, 609 bp, Zea mays
  Clone ID: MRT4577_58820C.1
gctcatcactcatcacacggaatatacccacaaccacacttcacagtatgaaccgagtatgtgcggaaacatatggaaagatccagatcattggcgacctgccgggcaggcagcaacgaatgcgcacctcaagggcaacctggtgcttatgcgcaagaccgtgctgagtttcgaacgtcaccagcatacccagctacctaatggacgggctcggagagttcctctgacgcgggggcacctgccaactcgtcagctccaccgataggagaccccaacaacggcataccgaggaaggtgggccaggaggcgagcctggagcattggctgcctgcacccgctcgccgttgatgggcaatgaggaccagctacgcctcaccttccactgtgaggtggagaaccacggcttctccggtcgccatcatcgtgtaataacaaccacgccttcgagaggttcctgaagaccatcaccatagacgacgttcccggacacgggcccatcgagtaggttgacaactaatgggtgtaccagctagacaagtaccgctacaaccgcgtcttgttgtgcaacgacacgtacctacgaagacagatgccggcgacgctgaagcc

SEQ ID NO: 139622 - DNA, 218 bp, Zea mays
  Clone ID: MRT4577_58821C.1
ccctcaactacagggaaatcagttatgtttgcgtcgccggctaagccagccggcgggggtatgacatttttgtcggaggtggtcacgctgagcgttatggaagccaagaaggtgattttggcggacaagccgaacgcctacatcgtggtgctgtccaccaccacgcaggcggtgacctttcgactttgggttcgaccgtgtacgtgtcttcgttctgg

SEQ ID NO: 139623 - DNA, 220 bp, Zea mays
  Clone ID: MRT4577_58822C.1
ggcttattcttcctctccggttagtgttcggcttcgtgaggttctgcgacgttctctgtggtgggtgatcggatcgagatggcatgcctcataatgttgagtcccccttcttcatatgcggcctcgcctgctccactgacgaccacttcactcacaacgccttaagaacctactaggaggtcctcgagtccaagatcatactttatcgggagacacacag

SEQ ID NO: 139624 - DNA, 275 bp, Zea mays
  Clone ID: MRT4577_58823C.1
taccagccttgtctcgggctccgcattcgcctgtaagccttggttaccattcctcacccacagcagagcctgcatatgcttgaagtctctggcgggtgtcctgcatgtactgctagtgctggacgtacgcggctgacgtaatgaagagtgctgtctactgggcgaccactgcgaagcgtatgcgggcggctgataagacaactgggaccattggcaagagcctttccagcatcaatgtggacaacgtggaggagaaccggcgggctctacgtgag

SEQ ID NO: 139625 - DNA, 389 bp, Zea mays
  Clone ID: MRT4577_58824C.1
cctccctttctctcgctgcgcttctgctgtggcggaaaaggcgatggcgctcaatgagccactgcccccctctcggggttgaccagagctagacgggcgccttgggcaagcgtgggggcgaccgtgggggtggtgattatgggcaactcctgccgcggctgccatacgcccccatgcggggcactggaccctttccggccgcgctgttggtgttgcggtcgggaacgcgctcccttcccgccccagaggatccgccgttgctgtgcggggtcccaccggcgggacgagtcttgctgctgcttgccggagggatcttgcggaccgggccttccatgtcagcgacgtggctgctggcctggcggtgattgctggcgtggacgccgaggagg

SEQ ID NO: 139626 - DNA, 320 bp, Zea mays
  unsure (1)..(320): unsure at all n locations
  Clone ID: MRT4577_58825C.1
gcgctgngccaggcccgnggacctgcgccacctngnggagaacatcaaggcgtnggngaagaacaccgngacccaggtggccaagaaggggctgnccatgaacccctngggcgagctcttcagcgcccggttnagcgggaaggggctggtcggngccctngaccgngggggcgngttcccgtccgcgggggacgcgggcagggggaggctgccgntggtgccggaagtggggggcctctctgggggggccncgctggggggggggggcctccttttcgggggccggnnnntttggggggggtcccccgggnggggggggg

SEQ ID NO: 139627 - DNA, 244 bp, Zea mays
  Clone ID: MRT4577_58826C.1
ttctggacataaattctttatttcaattattctttggtgcaatcatcttctgacatctttcactttattgatttgcagaactttgtatttcttcttttaaatattttcacacggtttggaattgaggttgggatgtcaaaacaattgcctgccccaacaattacaaaggatcatcctgtgagcgtcatttataaaatccttggtgctaattcttgcaacatcctcttggagctattccccatca

SEQ ID NO: 139628 - DNA, 407 bp, Zea mays
  Clone ID: MRT4577_58827C.1
ttccctctgtacgcactcgtcctgtgtccccccgtcttatctcttcgtcttcgttcccgcagcctcctcccaaaccctatcgtagctttcctcctccgtgggcgactaccactactcgtccaagctgaagtactactacccctctcctccgcctcggctcacggtgttctcttctggcccgccttctgcctctccgtccgctgtcttttcatttatttttttttattcttcttcttttattttatttttattttattatttttatttttttttcataattattttattttttattttttatttttatcttattttattatatttatctttatttgtttcctttttatatttttattttttcttatccctctatatattatatttttttttatattttatttttttta

SEQ ID NO: 139629 - DNA, 250 bp, Zea mays
  Clone ID: MRT4577_58828C.1
aacaaacataacaaaaataataaaatttaaatattcaaacaaaataaaaaaaatcaaggggcggatataatgacacacttagttatgcttatataaatacacctaccctatctatcttcacatctgacattattttacatgccccatatgttacattagattgtcacttaaaagcctttagacatcctactcaatcaatataaattcacgccattagctattcaaccaaacacctagatcaatttcatta

SEQ ID NO: 139630 - DNA, 259 bp, Zea mays
  Clone ID: MRT4577_58829C.1
cagatctgcctctaccattcaaaactcggaaatgggcgcacggggtagacctatgccttgtgggtggcctacttcattatacttaaaaaaaatatataataatctgggatttcttgcccacactctactctaacgcattaaacagaaatgggagaagaaatcatctatttaacgaatagcataagaatcattgggttctttgtccactcctttctgaaagagtctaatgagaaagcttgtgactcttaaacccattggt

SEQ ID NO: 139631 - DNA, 347 bp, Zea mays
  unsure (1)..(347): unsure at all n locations
  Clone ID: MRT4577_5882C.1
cccacgcgtccgcccacgcgttcgcccacgcgttcgcccacgcgtccgcccacgcgtccgcggccggccctttttttttttttttttttttattntttttttttttttttttttttccaaattctttattttccaacaaaattctaaaaattttattattttaacgcttattcatttggcctattaaagattaattaaaggtttgacggaacattttggttttttgagaaatggaaagttcccggttttctttttgcccggggggggtttcaaccaaaggccgacggtgaaattgaatagtatttttagcccggcccattcgttttttaatggcccttttatttatt

SEQ ID NO: 139632 - DNA, 755 bp, Zea mays
  Clone ID: MRT4577_58830C.1
ctgtgcggcgctcgaggcggccgcaaacagatacacgttccgagcttccgactctccacgactccaccaccaacaacccgcgcatctagcgcactccgaccatcgctcatgcctaggagcggcgactgactctactatacacaacgaggggacctgctgagaccatgcgaccgacgctgattactgtgtcggcaactgcggacacccgcctctctagtatgaatacagcatcctcacgcgcgatcactccaagatcagcgagctgtctgacaaacgcgaaatcgcatcttctggcttacaaggtgatattataggctctgcacaagaacctacctggcacagaattgcttggtaccaacaccacaataatataaggatgagctgccccgccatgcaacatatcctctccaataccctgtactacatacgattcttcccatattacgccttcaatgggctcggcgggattgacagacacaggaaaggatgctccgtcacctatgatgcatcattgctatatgagagaagcgactacagcgctcagttaacggtcatctactttgatcatgccagtcctgaacaatcaactaaaatcaccaagtgctctattactccctgacagggatgctgtcacgccattgtcggactacgaggacatctatctacgtaaggacgtggtcgcatctgcaactgagagacacatctacactgtgagactacatcgaaattgcagtcattaacaaggacgtgactat

SEQ ID NO: 139633 - DNA, 132 bp, Zea mays
  Clone ID: MRT4577_58831C.1
ccctaacatcacggactatgctacggaatgactttggcagcttctagtcggcaagctgccaaagccatgcctaacatcacggactatgctacggaatggctttggcagcttgtcgaggatgaagctttgagg

SEQ ID NO: 139634 - DNA, 221 bp, Zea mays
  Clone ID: MRT4577_58832C.1
gacggcagaacaagggtggactgcattggttagaaggcattacggttacgcattttttctcacataatattaaccaaaaagggtcagccaaccgcacgggcgcacccaacatgcctaaaatggaaaaaatatattgtaccgagcacgattaaacgtggaaaaagaagacaagtccaccttattaccctaaatggagctacacatcttaagaactgctcaaa

SEQ ID NO: 139635 - DNA, 436 bp, Zea mays
  Clone ID: MRT4577_58833C.1
aaaaaaaaaaaccttttcccaaaaaaaaaatcccttccaattaaaaggggtaatggggggaatggcaaaaacggccacccaggggggggggggaaactcggttactaatggccgttaaaggggggaactagctttagccctaagggggggtgggaaggggccccattaaattattaccacaggaaatagttccctaaaaagaaaaaacccccggaagttgttttaaaggggaagggacctggttgttgaaattgaaaaccgaaaattgccggaaggtggtggcctaccggggccgcaataagggccggaagctccccctggggttgttgttgaagaaaggactgcaaaaccacaccgtatgtcccctggaaccggggaagggggtccacctgcctaattggggggaaaaattgttgctgaaacccctggaattggg

SEQ ID NO: 139636 - DNA, 356 bp, Zea mays
  Clone ID: MRT4577_58834C.1
aattcggcacgaggcacccacaactgctccaccccaccctagccgtgcgatgctcacaccgcagcgacgagacgcgagcgtcccaccaccacaccgtgagctgccctgccctgcccgcgcccgttaccttccatcatgccctccactcactccttacttcttcggccaaccgaggagcgagcgcgcgatcccgagcgcctccttgacatatactcgtaacctcaccatcacaggtgcgctcactacacccgtggatgcagcgaccgatgcaccctgcctgagccaagccttcgcatcacgacattgacacgacgacgccatcaactatgtacatgttcacccaatccaccgatgct

SEQ ID NO: 139637 - DNA, 797 bp, Zea mays
  unsure (1)..(797): unsure at all n locations
  Clone ID: MRT4577_58835C.1
atcccagcgcgatttgatttgcaccaaccaaactaacgagtactctacacaaaaaagcataagaatcccacagccctctttcccatttcggagaaggaaccaaaaccatccatcaaaggccgcggagatgacaccccaaccccacgccgtgtgcctgccgtacccggcgcaggggcacatcgcccccatgctcagcgtcgccaggctgctccacgcccgcggcttccacgtcaccttcgtcaactccgagtacaaccacgcccgcctcgtccggacgcggggcaccgctgccatggccggcggcgcgggcttccgcttcgccaccatcccggacggcatgcaggggccgtctgatggtgtcgacgacgacgtcacgcaagacatcccgtcgctctgcaagtccaccacggagacctgcctcgggcccttccgccgcctcctcgccgagctcaacgcggcgggggaccgccctcccgtcacctgcgtcgtctccgacctcatcatgggtttctccatggacgcggccaaggagctaggcctcccctacgtccagctctggaccgccagcgccgtcagctacctcgggtaccgacactaccgcctcctcatcgaccgcggcatcgccccattgaaacatataaaacagttgacggacggatacctcgacatgccggtggaggacgtcccggngctgaggagcatgaggctcagggacttcccgactttcatacgcagcatggaccccggatgagttcatggtggngtacgccatcaaggagacggagcgcgcggccggc

SEQ ID NO: 139638 - DNA, 600 bp, Zea mays
  unsure (1)..(600): unsure at all n locations
  Clone ID: MRT4577_58836C.1
tatgtggatgatattgtgctgacagcatcttcaacctctctgctccagtgggtgattacagctctacagcaagcattctctatgacagatctcggccctttacaccattttctaggtctcacggtgactcgccagcccaatggatttcccacgcgtccgcccacgcgtccgcttgaagttcttgaacgtgcaggtatgacagactgtaagccatgttctactcctgtcgacatgaatggcaagctttctggtactgaggggccaccagttgatgatccgactcactatcgaggtcttgctggcgcactgcaatatatcactttcactcggcctgacatttcctatgctgttcagcaagtttgtctacacatgcatgatcctcgggaaccacattatacgttgatcaaacgtattcttcgctatctgcatgggacattggatcatggcttacatcttcgccccacagatgtttctgctttggttgcctactctgatgctgattgngccggttgtcctgacacccgtcgttcgacctctgggtatgctgtttttcttggtgataacctcatctcttggtcatccaagcatcaacctactatt

SEQ ID NO: 139639 - DNA, 190 bp, Zea mays
  Clone ID: MRT4577_58837C.1
gggacctgcaaaacttggccatgccacaatattattggttattattcaaaatccaaatggtcccccgaccggttttcacgcttcttcaagggggcaagggaacattcccaagaacaacttggggtttgcttttcaatttacaatacaaatgagagagcacaggtggccaggacattacttaagttcgttg

SEQ ID NO: 139640 - DNA, 923 bp, Zea mays
  Clone ID: MRT4577_58838C.1
ggggaagaattaaccgacaggtaaattgcagtaaaatatgtcatgtctataaatagtacatgtcaggggtatttataggggcaccttttagcacttctgtaaagtcctaactaccctgtactataaagttacaatcgtttgcccattcaagggcaatttggtttgtttccatctttatcaatgcttgaattcttgtcggtgaccagtcttcacaggcacgtcttcacctctggcaaagactctttcgtggctttgcttaattgtaggaagatatcgcctttcttaggaagcttcatatctcctaatgcttcatacaaagtcttcgtaggtgagacttcatgtggtttgaggcttcatattgtgtcttcattgatgaagcttttgggcatagaataaaggtgatgtaacaactttgaccttcgtatgatctatgtgcttgcctgagttaagtggtttatcttttgctttattatcacctttgttgcttaactcgaagcaaagttggtccttgaaaggtgaaagcaaatttaaaacaaagaaagactattcattagcttcaaaatatgggggtgtttacctatggtgaaaccccaacgtgttggacatggttttttattacttatcttatatcatgttaaatttgctcatttataatctttcatttcaaattccaacaaatgagctaaaacatgtacttccgagttcatactgtgatactggtatgaaatcaacatatccatgtccacatgtggttcttgaaagattactcaattattttggcagtacatgaagtgccaacagggccccatatggaatcagtgaaattgaaatgcatagatgcttcaaaaagaaaagtagaaagaaatgtatagtgctacgcttgagcaatggaccatgttgaggtttgcaagctgtgttccaaa

SEQ ID NO: 139641 - DNA, 438 bp, Zea mays
  unsure (1)..(438): unsure at all n locations
  Clone ID: MRT4577_58839C.1
ggcctggacctttgggctgatttatgtgcttgacgtatgcttagacgcgactatacccaatacatctacagacctacanaggagaaaatagataccccacaagacggagtaggcgcctaagagttcatcgtggctaaaggggaggttcatatatttgatgcccaaccttacgacaataaaccacgggagagtaaggtctatagagaaagtggagctcgcggccgagaagacggaagaaccgggacctaaattaaatcacgcgatataggaacgttctactacaacgcatgtctaccgcgaccgcgcactacaggtttggtatgcgcccgacgagtccgcgattctgtagaataaagcgtattcactcctgccgaatctgacgtcggaagttcatcgtacgaatcgtccgtatatagaagtagactggtcgtcggacat

SEQ ID NO: 139642 - DNA, 638 bp, Zea mays
  Clone ID: MRT4577_5883C.1
gtatagcctacccgcacggtcgtacggcagttcgtcaccgtggagacgtatgcgccacaagcccactgcccacagggccactgctgcagtgctgccgtctcgcctcatggctcaagctgcaggctgacgacgccaacgccgcccctcccggacttggcccaagtcgtcacctcctcgcccctcgcccacggctgcggacacattgtcgccggcttgccaacacgcccgtgtagatcggccgccgcatcgcgccacgccgccgtttcgatcccccgccagggcagcaggcaggcaggtgccctgctcttccagcgcccaggcagaatcacttgcatttttatcttttctcattcaagatctgatcttgcgtttctttagtgactttactatgccacctgttgacggcctcaagcgtaatgttggctaaccactgaatgcttctgtttcctacagaaatccctgtcctagaaattcatttcgtacgaacaaaataactgaaacggaaagaagtggtaacttaggatccgtttttcataatatatctatgcttaataaaatcggtccaatttacctcccccaggtcagggagccatgtgtcagatatgatacattgaggattactgtctcatcacagttat

SEQ ID NO: 139643 - DNA, 454 bp, Zea mays
  unsure (1)..(454): unsure at all n locations
  Clone ID: MRT4577_58841C.1
gggacgttcagcatccctacgcgctgacgaccatagtccttctcaaggacgactaccctaggggaggccctcatcggagcatcagaaaggagaacgagttgtttgcgaacggtgacctgactctcagaataagtgcaactgaaatgggaaggactagcgccatgtactcccaagaccgcaggctctcacctccaccacctatttatccctatgtgccacgtgagacgggattcttgacaggcggatctgccatgaaggccagtgatggttatggtgctggaactggaagcgcccagcggctgcntgatgatgacgattttattgtccacatgaatgccccacacattgagaggagtngagatnttggtaggcnttattctggcngttgggactttgttgttgtgaacggtggggctgctgnncggtctgcttctgctgctgttctgccttctgg

SEQ ID NO: 139644 - DNA, 303 bp, Zea mays
  Clone ID: MRT4577_58842C.1
actgaacaaggctcggtgcggcttggcctttgccagctcctgcaccgacccgtgcgggtactttatttgggacggggtgcaccttaccgatgcggtctaccgttccattgccgacggctggctcaagggcccttactgtagacctcccattacagcactgatcgtgctagttgggtcgtgggactgaatagctaattaagcttgctttatattattcatgattggcatcttatatctttgtttggttacggctaattgccatgtgcttcattcttgcgttctagtaggttcatcattgatggg

SEQ ID NO: 139645 - DNA, 323 bp, Zea mays
  Clone ID: MRT4577_58843C.1
cctacccctttttctcttttttttcaccaccccaaccaaaagggggtttggggggattttttttatactgggttcccaaagcccaaactaaaaccaaaaggaaaaccctttgggccctcaccaggcgaagcattcaaccctaaagaaaacatcctgggctataaaaaaggtccaaaaatgaggaatttaacaaaaaacccctaacaagggggaaaaacggccaccgaccgggaaaaaaccccgccgcctctaaataccctttaaaatacaaacccctggagaaaaacaaaaaagagggaacgccccaaaacttgggacccccc

SEQ ID NO: 139646 - DNA, 312 bp, Zea mays
  Clone ID: MRT4577_58844C.1
gtggtgcaagttctgaaataaaagaatctgtttagtttcaaaaaaaaaaaaaaaaaaaaaagaaagatataaaaaaaaaaaaaaacaaaacaaaacaaaaaaaaaaaaaaaaaaaaaaaaaaaaaaaaaaaaaaaaaaaaaaaaaaaaaggccccccttttaaaaaaaccaaacttacctacccctacattcaaacttaaaaccttttaaaaagtgcacccaaaatcaaatcaactgcccttcttttaaaaacctcctaactggaaaaacctctccttacccaaactaaatccctttaaataaaatcccctt

SEQ ID NO: 139647 - DNA, 1576 bp, Zea mays
  Clone ID: MRT4577_58845C.1
agcccggccgggagagcgattcgagctggtcgaatccggcagccgagcgagatggagagctacctcaaggagaacttcgggggcgtgcaggccaagcactcgtcggacgaggcgctgagacgatggcgcaaggtcgtcggcctcgtcaagaaccccaagcgccgcttccgcttcacggccaacctcgacaagcgcaacgaggccaccgccatgaagcgaaataaccatgagaagctacgtgttgccgtgcttgtttcaaaggctgcacttcagttcattcacagcgttgctccgtcgagtgagtacaaggtccctgccgatgtcaaggcggctggtttcggcatctgcgctgaagagctgagctcgattgtcgaggggcatgatgtgaagaagctgaaatctcatggtggcgtgcagggcctcgcgtccaagctatccacttcggagtctgacggcctcaccacgtccgcggacaagctagcgacccggcgggatgtttttggcgtcaacaagtttgcggaggcggagtcccgtggcttcttggtcttcgtctgggaggcgttgcaggacatgacactcatgatccttgccgcgtgcgcgttcttctcgctcatcgtcggtatcgccacggagggatggcccaagggcgcacacgacggcctcggcattgtggccagcatcctgctggtcgtgttcgtcacggcgtcaagcgactaccgccaatccctgcagttcaaggaccttgacagggagaagaagaagatcacggttcaggtcacccggagcggctacaggcagaagctctcaatatatgaacttctcgtcggcgacatcgttcacctctccattggtgatcaggtgccggctgacgggctgttcatgtcaggcttctcgcttctgatcaacgagtcgagcttgaccggagagagtgagccagttgccgtcaacgttgagtacccattccttttgtcagggacgaaggtgcaggacggttcctgcaaaatgctcgtcacgacagtcggcatgaggactcagtgggggaagctgatggccactctcagcgaaggtggtgatgacgagacaccattgcaggtcaagctgaatggtgtggccaccatcatcggtaagataggacttatctttgcagtggtcacattcgcagtgctcacccaaagcctgttccggcgcaagatcattgatggtacgtacttgagctggactggagatgacgcattggagctgcttgagttcttcgccattgctgtcaccatcgtcgttgtggcagtacctgaagggctaccgctggccgtgacactgagccttgcatttgcaatgaagaagatgatgaacgacaaggcactcgtccggcaccttgcagcctgcgagaccatggtctcagcgacctccatttgcagtgacaagacaggcactctcacaacgaaccacatgaccgttgtcaaagcctgcatctgtggtaagatcaaagaattggatggtgtttcggatatcaagaacctgttcttttgactcccagactctgtcatggcgattctttccagttcatattcaacaacac

SEQ ID NO: 139648 - DNA, 694 bp, Zea mays
  Clone ID: MRT4577_58846C.1
ccggccggggcggacttcttttcgtctctgagattttgagtttcgttctgacgccgtcccctgaaacctgtgctctgggtaggatggaagagagctgcaaaggaacgcgatagggggcgaagagatggatgcacattccgcaaggaagaaactaggattgctggcactgcttctcctggcggcggccgtacgcccggcctcaccgcttcctgtggaagatagccctgctcaacagtggtgacttagacacaggcaccaaacggaggtgttgaagaagctgcttcagatgctgacggagcatcgtcaatcccaggatagaatatcgacgcgaccgctggaactcagtttcagcacgccatacacacaagtggcatgtactcactgatagctctcagggggactcgatgcaacaaggctagggaatgatcgctacatcttgcacaggtggcgcacgctcataacgaatcggagcatgctaacacattccgtgctgcccggacatgtgcacaactgacaggcactgaatagatccctgactatgatggcgcgtctcacaacagcatgacttgcagactctgtacaacatataacgctgggatgcaaacacgttggcttttcatgcgacggaacaacaggcacaacttcaattcatgaaccctgccatgaaggatgatccaacttgtggtcctatcct

SEQ ID NO: 139649 - DNA, 526 bp, Zea mays
  Clone ID: MRT4577_58847C.1
gccgtcgcggactgcttcgtctgggcggagctgccagatgcagaggtggagcaactcgtcgccaccgccgcagatgccagcagcagcggccatggccacctacgtcgtctcccgcgcattgcaggagtggtagctgtagctggtgccacgaccaccattgagcagggcagctacttgcctatgcattcaggcgtccacgaaaagaagaaaaatccacgcccgttcgatcacggtgacgacgggatagaaaatgcgggatcccaccgcgcttgtaacatgaacagaccaataacaatgaaacgaatttcgtttaaaaaaaaaaaaaaaaaaaaaaaaaaaaaaaaaaaaaaaaaaaaaaaaaaaaaaaaaaaaaaaaaaaaaaaaaaaaaaaaaaaaaaaaaaaaaaaaaaaaaaaaaaaaaaaaaaaaaaaaaaaaaggggggggccgttcgggtattttaaaaccccaccgttgccccccaccgtttcccccccaccctttcgggggccccttggggtttccccc

SEQ ID NO: 139650 - DNA, 779 bp, Zea mays
  unsure (1)..(779): unsure at all n locations
  Clone ID: MRT4577_58848C.1
tagggttttagcggcgacggttccacttgacatgaacgcgagcgaccttcgcaccggccacctccacccatgctattgagccccactcttcgacccaaaccaccacactgcccagattcagatccacccagcgcagcgccgttgtgactactggatctcaccgtggttctcaccaccgtcagcaagcccacctccgagctctcctactagcggaaggtgcttcgcaccactgagcaagttgggtagtgctcgttggcctcaccgccgacgaatgtgtcctatcgcgcttcctctacaacgagtgcatcaaccactcctttgtctatgaggcaccgctccccgtctccatgtttgcgcttaggctcattgataaggcgcaggtccgtacctctccatgcgcttcctagactccccctcccttctgtgatcccgatctcttctcttacgagcccgaggcagaccgatagagtaagcattagaatttcaatggtttgaatcgttgtacgagttgagatctgtgcttcagtgaggttattgtttctccaatctgcgatccgtttcagttaacacaatagccagatctgaggctattgttgtacgagatggcatggggcaatgagcaattgttgtacgagtcgagatctgaggcttgcactcagcactcttaacacaatagccaatacatttgtgcaaatcatgtttaaaaaaaaaaacttaaaaaaaaatgaaaaaaaaaaaaaaaaatcatacctactanaaaaaaaaaaaaaaggccccta

SEQ ID NO: 139651 - DNA, 1024 bp, Zea mays
  unsure (1)..(1024): unsure at all n locations
  Clone ID: MRT4577_58849C.1
cggttcccggtgatcccgtccagccgtttttcgcatccacgtgggccagccggccaggcgaccgccgccgccctactcctggtcccagctctgctgcacccttcgccggcgacgagcgtccaccgcggcaggtacacccacccccctcacttttgcccctccaaccaaaagcgccggcatctcaaaccggacggcgctctcttctctatcctctgtgtcccctccaccaaaaccgacgacgacgtcgctctcctccaccggtgctcggcgctctccctccaccagcggcggtccaccgacgctcggcgagctccaccggcgggcgctggtcagatccgctcggcagtcatccacctggcacatcgggtagctcgcgcctccgttggcagtcccaccgccgcccggccctcccccagcgcccccggtgatccggaccgcacccgcttgctcggcctaacgaccggctcttgccccgccgcagccgaagctcccagcgtcctcctgcaggccgagctgaaggttcagcgcgccggtggagttcgacgacgaaactccgtcacgtcatacctctccgcctcccgtctccaatcggggctcccagcgtctcggagaagaggagcagcacggcacggcggctgtggcgaggaaggctcctgtcccatcccaacccagttaccagccgcccaaggaggaggagatccaatcggcgtgcgggcgtccgcggtccatccatcgatccaattccaatctgcagcgaggaggtcggcttcctttctcctccggcgagctccacgagggcgccgacgaggggatggatgcgcagcctaactggagaggtggaccggcggcgactaggatatcgtacaagaacgccaccatcgtcatgtgcgcctttaacctcttcgttgcggncctcctcctccacaactactactcgtcctggacgcgtatcgccggaggcaacaagctcgattctgctcagcttcggtatatatgggaaatctgaggagctgcgtcgggctat

SEQ ID NO: 139652 - DNA, 172 bp, Zea mays
  Clone ID: MRT4577_5884C.1
cccggtttgaccaccgaacgctggaggctaacacatcaaaacgttcagaatacgagccggatcacaaactcgatctaggcaggaaaacccgagcgtaccgtgggccggccacagaggctgaaacggaggccgacgcacgcaaagacgaaatgctcctgcttgtacaggccct

SEQ ID NO: 139653 - DNA, 1363 bp, Zea mays
  unsure (1)..(1363): unsure at all n locations
  Clone ID: MRT4577_58850C.1
ggctctggtccgaaagggcgtgggttcatcccacagctgtcaccaaccggtcgccacctaaacctaggcgcgccactctccctggcagccgccgtttgttgtcgcgagcgcgttcctgccccgccacagccgaagctcccagcgtcctcctgcaggccgagctgaaggttcagcgcgccggtggagttcgacgacgaaactccgtcacgtcatacctctccgcctcccgtcttccagacgtctccaatcagggctcccagcgtctcggagaagaggagcagcacggcacggcggctgtggcgaggaaggctcctgtcccatcccaacccagttagcagccgcccaaggaggaggagattcaatcggcgtgcgggcgtccgcggtccatccatcgatccaattccaatctgcagggaaaggaatattgtagaacacgttaacaaaattgctccaaggttccaggagggaatcaaggccttctcaggcagcccaattgttggggagatacgcggtctgggactgatacttggaactgaatttgtcgacaacaaatctccaaatgatccatttgccggtgaatcccgttcatcgtttttttgatcacgtgggccagccggccaggcgaccgccgccgccctactcctggtcccagctctgctgcacccttcgccggcgacgagcgtccaccgcggcagccgaagctcccagcgtcctcctgcaggccgagctgaaggctcagcgcgccggtggagttcgacgacgaaactccgtcacgtcatacctctccgcctcccgtctccaatcggggctcccagcgtctcggagaagaggagcagcacggcacggcggctgtggcgaggaaggctcctgtcccatcccaacccagttaccagccgcccaaggaggaggagatccaatcggcgtgcgggcgtccgcggtccatccatcgatccaattccaatctgcagctcagcttcggtatatatgggaatctgaggagctgcgtcgtgctatggagcctgtggatttgattagaagagtatgtttccgtgcactttgtgaaggaaattgagcaagaagcttatggtgagcatggcatggcgacagatgaagatcctaagcagactgccgctgttgatttatcaaaacggcttaaggatttgagggcagggaatgatggcagtagccaaaaagctctcgaagaatggcgtaaacggaagatggagcgtgcaaggcagcgagccatcgaaaagaatgggacttctagtgtgaaaactannatgaggtgaggagtgtaatgcagcacaagggattttgttttcatgtgtctcggagctgctccatgatgcattcaagtcaatcc

SEQ ID NO: 139654 - DNA, 599 bp, Zea mays
  Clone ID: MRT4577_58851C.1
ccctagtctgggggctgcgtatgaggagaattggtcgggcagttctacctgtggcggcagcggccgtgcacggggtcctggcgtgctgttcaggcctctgacgcggcgagcgggccggggcgacagagtgcaaggacctgacaatgagcggcctccccctctgatccaactgcacgacctgtgcaagtcacttgtaggacctattatctgaggggggacttgccgtaaatgatgatcccaggattcacatcattctataagcaaactaacattttcttacgcaaatattgaggcatgcatgagtgaaactggtttgtcatccagaatatgcacggctttctatcgagcaagataaacactacttctccatatgtggaaacccgttattcctatgggtcgccaccataactgataatgctagacacacaggggtgagacagcatagtagaccatcaacggattgcataaactggagagcgagcagcacacttctgcgagtttctcaacgataaagtgcaaccagtgaaatcagacagctgagttctcgcaataagtgtctgactattgccagtttgacgttccactagaacctacataac

SEQ ID NO: 139655 - DNA, 729 bp, Zea mays
  Clone ID: MRT4577_58852C.1
aaaaaaacccggttccgggtccagaagcaagccattttatgaatacctaactttctgggggcaacaacccatacatgggacgggggtaaaaaaacactcccacaaagacccttcacacaaataaacaaactgcaaggctgcaacacttgcccttaagttttcagtggtcaaaggcttcaacagacagcagcagcagcagtgaagggggggacagatcacgaagaggaaaggtcaccatacccctttaaataaagcacccttttgcgggttattttactcgcggattccgatctcgagggctcttgttgggggaagcgggcttggaattcggaattccgttcccccgcaccgaaccttaagaacttggattaggcggccaagcatacacggaatgaaaattcggatttgacgcaatttttggattaggcagccagacgcacaacagacgctgagacgcattaaaaatgctttgaatttgacgcggttcaaatgctcgacagcgacggccacactgcgccacggtgtggcagtgcgacgcgtgatgggagtggaatacagcgagatcgcaaactaaccacttgaacgttgcgggcctagtcccaaaacagacggaaccaaccgaatcctaacagacgagtaaaacaccaaacggaagcaatcacaacacgggatagatagacctcggccgcgaccgctgcgcaggcatcgggctgaaatcgcgcaagcgag

SEQ ID NO: 139656 - DNA, 2406 bp, Zea mays
  Clone ID: MRT4577_58853C.1
cattgggaccctcgaggccggccgggatcctctatcctctgtctctccaccggtgcttggcgctctccctccacgagcggcggtccaccgacgctcggcgagctccaccggcgggcgctggtcagatccgctcggcagtcatccacctggcacatcgggtagctcacgcctccgttggcagtcccaccgccgcccggccctcccccagcgccccccggtgatccggaccgcacccgcttgctcggcctaacgaccggctcctgccccgccgcagccgaagctcccagcgtcctcctgcaggccgagctgaaggttcagcgcgccggtggagttcgacgacgaaactccgtcacgtcatacctctccgcctcccgtcttccagacgtctccaatcggggctcccagcgtctcggagaagaggagcagcacggcacggcggctgtggcgaggaaggctcctgtcccatcccaacccagttagcagccgcccaaggaggaggagatccaatcggcgtgcgggcgtccgcggtccatccatcgatccaattccaatctgcaggttatactcaaactgcacacagtagcatccttctggtacagtaacaaaggatttggaacccagccctctgttctccaccaccgcttcgaagatgccgcaggtaatggtggtggcacggaacttcatggatatggtggctgctcttcctgcgggcaagcttgatatgctctatgactcagcctttatctgtgaggcagtactcaggtcacttcccccactggcaaagaagtatgcactgcagatgttgtatgtgctggcaccagtgaccgctgcagcaatggaagagtgggtgcttgatgaatatgctgccaagcataaggttgccattgataagcttctacagctcagggtctttgttgaagtgcgcgacagacgacgggacgtgagctacaagatgaatcagaagttccagggaaacatgcagaagtatttggttgatggtgggagtttaccaagggaacctttaccattaagtgtcactggtcgattgcccacaccagcagatctggaagcctatgctcttgatcaatgggagtgcttcttgttgcaattgatcaattcatctcaagtcgaaaaagggtcaagttttagctcctccatgatgaagacgtttcagcgtggtcttctgagttcaagggatggtgaagcttcaaagttgactgaaaatggcttccaatttcttctgatggaaacaaatgcacaactttggtacataatgagagaatacatttcatctgctgaggaacgtggagtggaccctacggagctgatatcatttctcttggaacttagctttcataaattgggagcggcttatagcttgaacactctgactgatgtccagaggattgccatcagggatcttgcagaattaggactagtcaaacagcagcagggtcgaaaggatagctggttcattcctacccaattggctactaatctttcagcaagcttgtcagattcgtcatctaacaaagagggatttgtggttgtggagacaaactttcgaatgtatgcatactctacttccaagttgcactgtgaaattctacgcctttttgcaagggtggagtatcaacttccaaacctcatcgtaggagctgttacaaaagaaagtatctatggtgcttttgaaaatgggataactgctgagcagataatttcatttcttaggcaaaatgctcaccctcgtgttgctgacaagatacccgctgtcccggagaatgtcacagatcagattaggttgtgggaaactgacctcaacagggttgatatgattccatcgcatttgtacgaagattttcctagcaaggaatggtttgaacaatgctgtgattatgcaagggataatgggtacttgctctgggaggaccccaagagaatgagactaattgtacgaggggagttccaccctgaaatgagggagttccttcgcaggcaaagatgaggaacgaccttgtacttgacggaccatgctatgcttctttgtagtgcatagaaacactgtatcgggtaatagttctcctttaaagatcaggaaagggtctagaaaagggctcagtttttgaattattttggtgacctgtgagctgtggaagcatatgaataatgtggtgttcaatggagcaaggcccaacatccttgatctgctcctaaatgttactagtgactgtaccctatgctggtgtatggctggtggccaggtcctgttggaactcttaggtagatagtgtttggttttggagtatggtgggatggagttgttatgctcttaatttgttgttatttggattgattctatatagaacggagtgattctaaaaatgaaaaaaactcaaatgatgaatc

SEQ ID NO: 139657 - DNA, 668 bp, Zea mays
  Clone ID: MRT4577_58854C.1
ccggccggctcgactccggccgggaatcacaatcacaatgtctggtctctttgctcgtcaagcttgggctactgcctccaaggtccgatctactgctctgcgagcaccaaaggttgcgtttacctgcagagtcaacaacattgctccccgacgatcattttcagtttccatgaaccttctggctagaaaatacactgagagccacgaatggattgacgtagccgccgatggcaagacctgcacaattggcatttcaaactacgccgctgaagctctcggcgacgtagtctacgtggaactccccgcagtaggcgaagagacagcccagggcgagtcctttggcagcgtcgagtccgtcaagtcagcctctgacatcaactcgcccgtttctggttccgtcgtcgaggtcaacgaccccatcgtcgagacacctgctgatctcggcaaggaccctgagaagagtggctggttgatcaaggttgaggctgaggatgtttctgctttggatgcactgatggatgaggctgcttatgccgagcacatcaagggggagcactaagcgaagaggcagtggtttaattaatgtttgtgatttaaaaagcaagatatcaagacactttccaacaagcaaaaaaaaaaaaaaaaaacccgcggccaaacccgcggcc

SEQ ID NO: 139658 - DNA, 2362 bp, Zea mays
  Clone ID: MRT4577_58855C.1
cgcggccgccttttgttgcggccggggccctcctaactaacgcgccgcgattccaaccccgacggcgctctcttctctatcctctgtcccctccaccaaaaccgacggcgacgtcgctctcctccaccggtgcttggagctctccctccaccagcggcggtccacggacgctcggcgagctccaccggcgggcgctggtcagatccgcttggcagtcatccacctggcacatcgggtagctcacgcctccgttggcagtcccaccgccgcctggccctcccccagtgcccccggtgatccggaccgcacccgcttgctcggcctaacgaccggctcctgccccgccgcagccgaagctcccagcgtcctcctgcaggccgagctgaaggttcagcgcgccggtggagttcgacgacgaaactccgtcacgtcatacctctccgcctcccgtcttccagacgtctccaatcggggctcccagcgtctcggagaagaggagcagcacggcacggcggctgtggcgaggaaggctcctgtcccatcccaacccagttagcagccgcccaaaggaggaggagatcctaatcggcgtgcgggcgtccgcggtccatccatcgatccaattccaatctgcagacgaagggatcaaggatcagcgaccagagaaaggctgcgtctgctgatgctactacgatcgctgatgctatgaaccaaaggaccggggttgatccttgatcaggctattggtagccagtgctgccggtggctcgttggagctgaagaacctttggcagcatggcagagatcctcacacaggggtgtccttgcggttgttccggcagtgattggttgctgagaagctctgcagccgataaaggttgcaactggtgttggagggtccctacgcggaggaatgaaagtattagatgcactctctgaacgggttagatttgtaaagcagcgtggcagcgcttcagatctaccggatcgggccgcacatccctttttcggacttcggggtcgaaggccagcggaagctgacacagtcgtcgattttagttgttggagctggaggtttgggctctcccctggcattgcatctagcagcttgtggtgttggttgcttgggcattgtggatggtgatgatgttgaattgaataatcttcatcgacagataattcataaagaagcatatgttggacaatctaaagtgaagtcagcagctgatgcttgccgtgagattaattcctctatcaaggtagtagagaatcaccatactctgaagccatgcaatgctttggagattgcacggaaatatgatatagttgttgatgcaactgacaacctgcctactaggtatatgatcagcgatttcgctgttttactgaacacgccttttgtatctggtgcggcattagctttccaaagcccatcgacggagcagtatcaaaagaaagtatctagggagcttttgcaatttggaaatccgctgagcagataattctcatttagaagcccagacagtggtgctcgtggggttgttcaggtacccattggctgcttacaagctctagaggagataagggtttcaactggtgttggttaaacttcgtggaaagatctccagattgcacccattgtggcgaaaactccgttttcacagagagaagactttcagaagtttgactatgagagcttcacacagtcaccaatgtctgataaggcagcagcaagcgtgaacgtactcccagagagcgcgcgtatcacttgcagagagtacaagaaactggccgacgatggtgaacctcatctactgctggacgtacgacctgcgcatcacttccagatagcttcgatctctccgtcccacaacatcccgctctccatgctggaagagaagctgcccgcgctcgaagcctcgctgaaggaagcaggggaggggtcagccttggttgtcctgtgtaggagaggcaatgactctcagagagccgtccagcttctccgcgagaagggattcgccaacgcgaaggatatcatcggtgggctgcaggcgtggggacaagacgtcgatcctgatttccctgtgtactagcgagatggaaatggatgcactaccttgtaacagtttggatgccgctagaacgagaactctgatactatgatttgagtactaattttgccataccgtgtacttgcaaaaacaaatatacaactggtatggacacggtattgtgatgaataatgccatggacaaaataaaatttgagtgatatttttttgcaggtttaaatatttagcaaaaaaaaaaaaaaagcggcctttgtaatgattgttaaaacgttgacacagggtgagttcccc

SEQ ID NO: 139659 - DNA, 2877 bp, Zea mays
  Clone ID: MRT4577_58856C.1
actcctaagggcgattgggatcctcgaggccggccggggctctcttctctatcctctgtgtcccctccaccaaaaccgacgacgacgtcgctctcctccaccggtgctcggcgctctccctccaccagcggtggtccacagacgctcggcgagctccaccggcgggcgctggcggctggtcagatccgctcggcagtcatccatctggcacatcgggtagctcgcgcctccgttggcagtcccaccgccgcccggccctcccccagcgcccccggtgatccggaccgcacccgcttactcggcctaacgaccggctcctgccccgacgcagccgaagctcccagcgtcctcctgcaggccgagctgaaggttcagcgcgccggtggagttagacgacgaaactccgtcacgtcatacctctccgcctcccgtcttccagacgtctctaatcggggtcccagcgtctcggagaagaggagcagcacggcacggcagctgtggcgaggaaggctcctgtcccatcccaacccagttagcagccgcccaagggaggaggagatccaatcggcgtgcgggcgtccgcggtccatccatcgaccggctaacaatctgcaggcaactcggcacgagggtcggccgcaccagcaggcagcatcccgccgccgccgttccccagcaggcagcagcaggtcgccgccgttccccagcaggcagcaacaggttgccagctcgcccccgcgttttgcttccggtcagctgatgtcgcatgcttttcggcagcgctagtcctcgacggacggcgaccagcatcagccgccgccccagtcgaccaacatccacggcggcacgagcccacgaccagcagatcaacgcggtggcagatcaacgagcccacgaccagtcagaaaatttttacagcagcatatccagcggatacccgatacccgacgggtacccggtgggcacgggttatactcaaactgcacacagtaaattttgctaggagtacactgggtcaaaatctggttgtctctagagcgagcgacaccaatctttggtgttggccctttcgtcagtgagtagcatccttctggtacagtaacaaaggatttggaacccagccctctgttctccaccaccgcttcgaagatgccgcaggtaatggtggtggcacggaacttcatggatatggtggctgctcttcctgcgggcaagcttgatatgctctatgactcagcctttatctgtgaggcagtactcaggtcacttcccccactggcaaagaagtatgcactgcagatgttgtatgtgctggcaccagtgaccgctgcagcaatggaagagtgggtgcttgatgaatatgctgccaagcataaggttgccattgataagcttctacagctcagggtctttgttgaagtgcgcgacagacgacgggacgtgagctacaagatgaatcagaagttccagggaaacatgcagaagtatttggttgatggtggaagtttaccaagggaacctttaccattaagtgtcactggtcgattgcccacaccagcagatctggaagcctatgctcttgatcaatgggagtgcttcttgttgcaattgatcaattcatctcaagtcgaaaaagggtcaagttttagctcctccatgatgaagacgtttcagcgtggtcttctgagttcaagggatggtgaagcttcaaagttgactgaaaatggcttccaatttcttctgatggaaacaaatgcacaactttggtacataatgagagaatacatttcatctgctgaggaacgtggagtggaccctacggagctgatatcatttctcttggaacttagctttcataaattgggagcggcttatagcgtgaacactctgactgatgtccagaggattgccatcagggatcttgcagaattaggactagtcaaacagcagcagggtcgaaaggatagctggttcattcctacccaattggctactaatctctcagcaagcttgtcagattcgtcatctaacaaagagggatttgtggttgtggagacaaactttcgaatgtatgcatactctacttccaagttgcactgtgaaattctacgcctttttgcaagggtggagtatcaacttccaaacctcatcgtaggagctgttacaaaagaaagtatctatggtgcttttgaaaatggaataactgctgagcagataatttcatttcttaggcaaaatgctcaccctcgtgttgctgacaagatacccgctgtcccggagaatgtcacagatcagattaggttgtgggaaactgacctcaacagggttgagatgattccatcgcatttgtacgaagattttcctagcaaggaatggtttgaacaatgctgtgattatgcaagggataatgggtacttgctgtgggaggaccccaagagaatgagactaattgtacgaggggagttccaccctgaaatgagggagttccttcgcaggcaaagatgaggaacgaccttgtacttgacggaccatgctatgcttctttgtagtgcatagaaacactgtatcgggtaatagttctcctttaaatatcaggaaagggtctagaaaagggctcagtttttgaattattttggtgacctgtgagctgtgaaagcatatgaataatgtggtgttcaatggagcaaggcccaacatccgtgatctgcttctaaatgttactagtgactgtaccctgtgctggtgtatggctggtggccaggtcctgttggaactcttaggtaggtagtgtttggttttggagtatgatgggatggagttgttatgctcttaatttgttgttatttggactgattctatataggacagagtgattct

SEQ ID NO: 139660 - DNA, 563 bp, Zea mays
  Clone ID: MRT4577_58857C.1
tcgcgggtgctgggctaccttgggacggctctacgcaaccacggctcccaggagcgggcctccatctgccaccgggacccaaaaatcaataacctctgctacacgccccccaaggcacaacatggctggcagtacctggcgtcatcctcagactaggacatcaacgcggggcaccgagacaaaactgaccaggggaataggaccccaatgctcatccaataccgtcttaaacggaccctgaccacacatatggtggtgaccttcaatcccccctggatcgaccagtgcgagacgaaaggatatattccagactacttagcaccatcagagagcaagcgcttctgcgaaacttacgatgaggatcatgccaaccaaaagcttgggctggagaacattttccctgactccaagatcaccgacaatgccaatgggcatgccagctggcagcccatcgagaccacaagcaagcccggaataaaggtgggcgtctccctcaaagaggtatacaggctggagcttggggttgatccccgggctgatgatgacggtgatgaatgagcccg

SEQ ID NO: 139661 - DNA, 271 bp, Zea mays
  unsure (1)..(271): unsure at all n locations
  Clone ID: MRT4577_58858C.1
tggggcgcgcgctgccgacgcccggcgacgagcaccccaaaatctaccgcatgaagctctgggccaccaacgaagtccgcgccaagagcaagtttttgtacttcctnacgaacttgatatagggtggaggggggaaccntcatgtnctggccatcaacgagatcttngagcgtaacccggcgacgatcaagaactatggaatctggctgtgctaccagagcaaaaccggctaccnaaacatggacaaggagtacctggacacaaccctaaa

SEQ ID NO: 139662 - DNA, 363 bp, Zea mays
  unsure (1)..(363): unsure at all n locations
  Clone ID: MRT4577_58859C.1
aaaaaagagccgacgaactttattattaaccaagaataacattcatggcaacaatattcaggggggggctcctctttcaaccctacaaaggagcaggggggggagccccatcccctaccctgggactggcaaaaacaaagcgaagggagaaacacattggacggggcagcacaacaatttactacgagacacaatctgggcagggtcatatggagatgccggggggaatgcccatgggaggaagcccctcgnccttttcgccgggaacgtccgacgnggggggggacaacaacatgtacgggatttccacagggcccttccgggttttnaaggccggactgggnttcattggcttggtccgat

SEQ ID NO: 139663 - DNA, 517 bp, Zea mays
  unsure (1)..(517): unsure at all n locations
  Clone ID: MRT4577_5885C.1
gtatccccacgtaactatagggcctttgataaggcgtntgttctatggtgcagaatagtactatggagcctatatagctattacttctggcgaaaatattacggactgcgtatctggcgccaggtgcggagatcaggacggatgtgtgactgagcaatatcgcattgttgagtgacctccactctggacgggacgaggaccaactgtacgtgccattccactatgatggttggtaagccatttgagatcctgcataagagctatggaagcacgctctgttggatttgaacctacgacattggatttgggagacccgggttctaccaacctgaactaagagcgctttcgagacacatgaataaaagagattcgttctgtattcctaacgtgtctcacgtccgtatagaatccacaaattcaagttcatacccactttaatcgatctccccactactgcccataacgagaggagacttaatagggtcggatgacaggatttgaacctgtgacattttgt

SEQ ID NO: 139664 - DNA, 414 bp, Zea mays
  unsure (1)..(414): unsure at all n locations
  Clone ID: MRT4577_58860C.1
accggcaccagnccaccagcgcccgccgggggccaccgagcggccccaaccaaccacaccgcagcgcagcaagggcgggcaacggcgccancgnggggagcgacccgcngaacnggggcgcggcggcggcggagccggccgggagccaccnggacgaggngaagcgcaggggggggggggcccggcagcccgnggncaagaacgagggccccaccccccgcgncggccaggnggccgccgccgcccccgccaaggacgcgcccggcgncgccggcgagcccgacgaggaggcccgnccncgcgccaaggccagcagcgagcggacccgcgacggcaccgcccacggcggcgacaccaacggccggaccaccggcgacggcggcaccaccccaccgccgaaccaaggcccgggcc

SEQ ID NO: 139665 - DNA, 554 bp, Zea mays
  Clone ID: MRT4577_58861C.1
gttagatcaactgagttgttgatgcttgcttagggaaccaccctgtacaagatggaataaaaacacgaaggcaattttgtctttcgactgtaaaaaaaaaaaaaaaaaaaaaaaaaaaaaaaaaaaaaaaaaaaaaaaaaaaaaaaaaaaaaaaaaaaaaaaaaaaaaaaaaaaaaaaaaaaaaaaaaaaaaaaaaaagggactaaagtaataaaaaaatcaaagcttatttacaacataaatgaaaagaaaaaaaaaattcatataaaaaaaacaaaaaaaaaaaccaggggatcaaacctttcaaaagcgtgaaaaattagaaaaacaggacagtaaccaaacgtaattcccaacagagcaaaaccccatttggcaaatgggaaaaaaacctaaaaaggaccgaccaaataaacattccaaaaaggttacaaacataaagggcgaaagacacgccaccgcaatagggacataaaccttagggggcttgcttatttttcccacacgaaacgttaaatttccaagaccagaaaataaacacttttttcccttta

SEQ ID NO: 139666 - DNA, 306 bp, Zea mays
  Clone ID: MRT4577_58862C.1
catcctttggagggaatcgggcgaacccggtcctgggcttggaaaagctgggaggcggcgtccctggcccgcgctgacctcttactcgcgcctgttgctgcaggaagcgtcccgtcgccgtcgggctcagtgccaggagccggcgctcctttcagaccgctgtttaacgactttggaccgccttccatgggctacgtgcaggcgatgaagccacccggcgcccagggctcccagagcaccgacacggacctgctgtcagtcatagacgagatgggcaaagagatccggcctacctatgctggcagc

SEQ ID NO: 139667 - DNA, 737 bp, Zea mays
  Clone ID: MRT4577_58863C.1
ggttcccggccgggataccacaccatgtgatgcgaggagcctcttctgcctctcatccccctacttccaagatgcaatcatgctgccccagactcctcgggccctcggtcaccatgattgcctcaccgcctctcaggagtcgcctccacctacttccaagaggaagaggccggagaagctatagtccatgaggaaattaagcggaggggcggcggccggtgaacgaggggccggaggaggaggagagagaaggggaggtggcagaaaaagctagagagagagagagagagagagagagagacagagatgcatggtgcatggcatgatgatggcgtggttgatctattcgatccagtacttctgtgatcattcgagtcaagaagccatcatcagatcggtgcagttctccctcctccttccagctcctcttcagcttctttgtaacactgcgcccgccatggctttggggaatcaagcgtcttggtccgaaatccttctttcctagctaggaactacgtacttgtacgtgcaagagtatgtatgttatccctgcatgttcttattctgtctctatatatggtttatgcagacagagcaagattcgttcgtcttgattgatttgtttccatcactctttgattcagagtttgattcatgtaatattttgttagttatgtggatttcttctttgagctttttctatagctgaggaacctcgttcagagatcagtttgacg

SEQ ID NO: 139668 - DNA, 372 bp, Zea mays
  Clone ID: MRT4577_58864C.1
tcctctagagtggccgccctgtggtttttttttttggaattttttttttttttttttttttttttttttttttttttttcttaaaataaccacagcttaaacttcagagagaacattcccacaaacccccaatattacatttgggcgggggaggtggcctttgttctctttttggggggggggccctgagccggatttgaacctttgggccctcccaaactcttggggaagctgaacaaaatggttccttccgggctcaggctcggctttggaaatctcaatggttttgaagcatgttcttgaaccaatggggcgacccctttggggggggtttgagcggtgtgaagtccaccttaaaaatgtccgaatttg

SEQ ID NO: 139669 - DNA, 452 bp, Zea mays
  Clone ID: MRT4577_58865C.1
aaaacaccaacaggaaaaatgaggaaaaaaaaaggggaaaaaaaaaacaaaaaaagcacaaaatggccaaaaaaaacaaaaaagggcggaaaaaaaaaaaaaaaacagggcccaaaaaagaaaaaaaagggccgggccccaaggcaagtgaacaagccttccggcgagcccgggggccttggggtgggcaagctgaactcttcacactcccgcctgaattaagaaaaagggctgggggttaagaaacaggactttttcccaaagcccaaaacccatcaccaaaatgggttggtgatcggcaaacttataaaattgtaggaaaacctatagaaccggacgcgggggtcgacccccgaaccccggaacggaacccggaaaccaacaaccttaccctaaagggaaccaaatttggctatagggaaaggatttaaaaattgggttaatgatggaaa

SEQ ID NO: 139670 - DNA, 614 bp, Zea mays
  Clone ID: MRT4577_58866C.1
aattcggcacgagggaccctgtaagcctgctgctgctactgctatctagtacctgcccacctgcgcttgcatctgttgctaccctgctgctggcctgcgaatccacctgcatttgcctagaggctcatcagccgcgtgtactcctgctctgagagaggattcacgaaatgctcgtagttgcattcgacgcctgaaacttctaggagggcatgagttcttgccacgctcctactaacctcgctgatgcggtgatgccctcgaggacgtatatacattgaggctatcaatgtcatcttatcgcttaatgcaacatcatggctgaatctgagtcacaagagttctggatctggtctgaaggacacatccaggaccagcctactgctttgaccttacctcgtcaacatgaataactttgcttatactgctctcagatcagaaatcaacgctaacttcaaatattactctatcgaaatgtgtacgtccgacttttattatccttttgcttcaaaccggctctccgacggcagctgagaacacaaaaccaatctcacgaaccgccctatgctagacgatggtcgacagtatatctctgaacgacttgccaactacttgct

SEQ ID NO: 139671 - DNA, 222 bp, Zea mays
  Clone ID: MRT4577_58867C.1
gccgtgagacaggtctgcacgtccgaggcctccaccgatgcgctggccgacaactccgtcagcaagcacaggcagctggagtcggaatgctatctgcaactaattgacagcgcgtgtagtgcgctgctccccgggccggaaccttgcatgatcggaagcttgccatccgggcacacagcccagaccaacggcatccaggaagacgttacatagagctcggta

SEQ ID NO: 139672 - DNA, 278 bp, Zea mays
  Clone ID: MRT4577_58868C.1
cccacgcgtacgaccaggcggccgtagcacggacagtaacgagcaaactcaagatccccgagagggacgcgacgatggtgcgggtggagaaccccctgccggcggtgctgagtcatctgctggacgtgcgcgattttttttgcggaacggtcgacgacaaagcgagttggaggcgccacgcgcacctaagtccgcgacgcgcgcgccatggcaggccactgggggctgaacttaaggacgctcgcagcagcgtacgcgttaagtagtggacattgccg

SEQ ID NO: 139673 - DNA, 398 bp, Zea mays
  Clone ID: MRT4577_58869C.1
aaaaaaaaaaaacccccggcccggcccaaaaaaaaaaaaataaaattttttccaaaaggcagttcccggcgggataggggaggcaaacccccaacccaaccgggtttttcccatattaaaaaataaaaaggggggggggggagggaaaaaaaaaaaaaaaaaaacccctttttaccgtttgggggcctttgggggggggaaatgaccccaaaaaacggggggcccttaaaaggggaatggccccacccccggttcataagggcccccaaaaagggaggacccttttgggggatccccggcctcaccccgaggggtggaattccaacggccttttgccccggaaagaaggcggagaagcccccccctcgggggattattccccaaaaccccattcggga

SEQ ID NO: 139674 - DNA, 2412 bp, Zea mays
  Clone ID: MRT4577_5886C.1
atcagaaagaaatgtaccgggaggatgcccggtagtgctgaataatcatgtcctagagtacatgaaccgagaaagaatacacacattcctccatcagaaactcacaattactaaacattcctccagtgggtcctggggacgctatcatattccccacctcctctggtaaccttgcaaggtgtcccggttcgcacagaaaagattcctagctctaagatcaccaaaccaaaggaacatgccaagtccaagacgcagattattttcactgtgatgccctctatacaaaaggatttccagctgataaagtgccaactggtatattcctggaccggcgggaaagcagatatcagcagatagcagctcagcatgtgacgctgacgctgatggaacataagcacaagagctgctggagaaccatctttcaggtaaaccatcaaggaaggttggcagatctgggctaggcaaggcctcttgcaatgaacttacgtccatgaacagatcaggagtccccgactgagtgtcaaatggaaggtcaaatggatttaatggcatctgctcagtagagggtcctcccagagatggctctgaggaagcagcaatcaatgtattaggtgtcaattcacccatcaatactttgtgggaatcatcgtcataagattcctttaaaactatagagcacacaaatggattgctggttgatagagaaatgcttgctgtattgctgtggtcatcaattcgtggctgagcacaaacgatcccattagcatcatcaaatgaatgccaaagctgagagctattttcgttcattgttcctttaggctcttgcaatctagaagtcattaatgatagatctcccttgacagtgtactgggtactaccactggaggcatcgaaaatactccaaggctcagaactgcatgtatcaagagatgtagcagtagactgattatgattggtaaccgaagcatcatccttagagctccggaaccatgttagctcatcatttgattcagatgaaaacaaatcatgattaagagcttgtttatcgatgcttgtagcagaaacataagaaagcccagtgagtgcaggctgcttttgttctggaggtgtatcaaatgtggcccacccagcattgtccattgaatgagctgttggtatcaccttatcagcagatggagtttcagtaagcgtatttgaaaatagatctacagattgatctatggtagtgacatggtgttcctgagaagctttggaatcaaagctagcttgatttggagcactaatagcatcagaaaaggctatgaaacttggagcagcggaatttgaggatttttcagttcggtgaacattatcattctcaaaaatcaaatcagataagtttgatttgcctgatttaagagagatagaatctaggtctcctgccgatacagctctctgtgaactagtgagtccacaagaactatgtacatttgattgatcttgtaccacaggggggctgaaacatccactatcaggaaaattaggtgattgtggtgcagttctaactgtgtcactaatgctggaccctgagcagttagaagtcctcgatacagaattctcaccagtaaatccatcccgagacattctctgatgcaagctatgtgaactgtaacaaaatccagaaatcttcccctgatgccccttatctgaaccaggcttcctacttagaaatgcagatcgcttgccattgcgcccctcttcatactgataatcataaggtgggctctgtgaaaatgaatggtaggaatttggccttctatgctcttcttcatgggccttttggttctgtttgtctcttggaggcctttcagaaaatctaccgccagcataccttcgctccacatagacagcttttatgaagtccctaagactgccggagttgctgctatcaggtagcctcattttctgggtatcgaaatccttcaggaatgattccttggcacgctggttcccacccttctggagagcctcgacctcttgcgtgctgaacgttgacatggagacggatttcacacggtgcgtgaactctcggctacaagtgcatcgatcagtgcgtgtgaggaactgaggataatagtacatcaaggctgtttgaataaacgcgcattgcaaatcacattcccatcccaacagacgtgatagaataacaacagagaatgctgataacaacactggtgtacggaatccggtagtaggcgcgggaaagggcaaggcggcactcactggatgccgctgcaggagacgcagatgaaggtccagaagctggtgcacacgtactgcggcccctggatcagagtcacagacgcacaagcacagaggccgggaagtgagcaaacactgagcggcgacgaagccgcgcgccgcgggccacat

SEQ ID NO: 139675 - DNA, 347 bp, Zea mays
  Clone ID: MRT4577_58870C.1
tattaacaaggggcttttgggattttttttttttttttgcattgggaaaaaccaaaaaaagccttaatgtggcgcagtggtttcaaccccggtaacaaaaatgtgcacaagagtcggggcccctaaccgtctctactccaaaagtgaaaaatgaaaaccgagccaaagaacgtgcaacagctgtttcttgaagagctcatgccacaacaaacggttcatgcggagaactgccgacaagaatattctcacgcgaaccctgattaaattcactgggccccccctgactctataagacgaggcggacacagattactacctccttggcaatggccaggtggtacacctca

SEQ ID NO: 139676 - DNA, 498 bp, Zea mays
  Clone ID: MRT4577_58871C.1
cagaattgcaataattgacaagaatgctcgtattggagaaaatgttaagataatcaatgtcgacaatatccaagaagcttcaagggagactgatggatacttcatcaaaagtggcattgtcactgtgatcaaggacgccttaatccctagcggaacagtcatataaaggcaaccaatcaccactgtacataaggttgggccttgcagcatatggtgatctgatctccagtgcacatcaagcaatcaacttttaacgctgtggtttattccatgctgccagttcaccaagctctgcatcaacttgcaaggatatcataaaaaaaataaaaaataaaaacaggtgccacttaaaggcaccattttactgttactagtatgagcaaccgctctagagcttagaggtgttgtaagtccgaaaaccgtgtctgaaatgtgggtattttgatgtgtataatctttgtccttttgcatgatcagatctaaatatcctgtgtttat

SEQ ID NO: 139677 - DNA, 359 bp, Zea mays
  Clone ID: MRT4577_58872C.1
ggggcttaatggaagggtccggggggtgctcaacagtttatcaccaacccacatagcggagggtctaatttacacgtcccggagctcatggacaccaaaaaattctttaacgggctcattccttactgagaaaatagaaccaaaagcgcttaagtttgaaaaaaaaacttcgccgaattatccggatggttttggtttgctgaattccaccaacatttgatggggctgaatccccttagttgttagcagggactgaaaaacacaccgggacagctttacatgcagggaaaatgctgattcccagaccagtcggggccaaatgattttcctcagagcccttattgccatggtaactggtt

SEQ ID NO: 139678 - DNA, 658 bp, Zea mays
  Clone ID: MRT4577_58873C.1
gcacgagggatggctgaccttgaagccctgaaactgtacatcaactactattcggccatcctgactacgccgctcccccagcattatgatcctgacctccttgcccagtacttcgcctcacgtccgcatatccttgcctctcgcgtcattcagatactcttcacatttctctcagctgtggtgaagatgcggatttcaaaaagagctcagttaaccacagatgctacctatagtagtggtaacagcggcaacgggtttgatgatactcaatatatggtcggccaacttctcaaggagacatttcttacccttgggcctacttttgttaaagttggacaatcactttctacaagacctgatatcataggttcagagatttgtgaggcccttgctgagttgcatgaaagagttcctattttcccaagagaggatgcaatgaagatcattgagggagaatttgggtgccctgtgtcgcatatgttcagttatgtttcagatgagcctgtagcagctgcttcctttggacaggtctaccaggggcgcacagttgatggtgctcttgttgcaataaaggttcagcagccagaccttctaccttctgtactgagagacatctatattctacgccttgggcttgctttcatacggaagatagcca

SEQ ID NO: 139679 - DNA, 189 bp, Zea mays
  Clone ID: MRT4577_58874C.1
tacgacggccgcccgggcaggtacttgttcaacttatccctttcaacttggctaccgtgaggcggaccttggaaacttttgaatagcaggggaattcgtcttcctccaaacgtcgagccgtgggctttgaaaccaaaaccttacccacaatgtgaagttaacatgttagtaacagaaccctttttaaat

SEQ ID NO: 139680 - DNA, 1118 bp, Zea mays
  Clone ID: MRT4577_58875C.1
cggacgcgtgggcggacgcgtgggcggacgcgtgggcggacgcgtgggctgacgcatgttctccacgcgtccgcgccacccaacccgccgagtccccaagcaagttgagcatccatccatccatggcgggaggcaagtccaccggcaatgccgcgcgcagcaggaagcgcgtcgaggcaaccgtcctcaagcgctccagggacgggagcgccttcaccagatgcgaggcctgcaacaaggatgtccccgtcgtcctcatcgacatgcacagctgcagcctcgacgagaagatcaggatgacgctcgaggcgcaggtcgtcgagaagaccgtcgaggtcgccagtgcggaccgcaagaagtcctccgccaagggaggtggtaacaaggacgccaagcgcaagcgctcgcccaccgccttcttcctcttcatggacgacttcaggaaggagttcaaggccacccatcctgacaacaagagtgtcgccaccgttgcaaaggaaggaggggagaggtggaagtccatgacagacgaggagaagaagccttacattgaaaaggccgcggagctcaaggctgaggccgagaatggcgagggcagtggtgagaacaatgttgccactaagaaagccaagacagatgaccaggaggtggatcagccagcaaagaagctcagaaagtgcaaggctcttcacgaggacgaggatgacgatggtgaccaggaagacgaggatgagaagaacgagttggatgacgacatgtagatggcagaggccactctcccatctctgtaaatggatggcagatgtgagcgtcttgttagaaatgtcacttgtttcaagctagagggaagagggagagtagtcagtagtgaatatcccccgttatcgttgctacatgaatgaactattctatgatgcagttctgtctgctttcatctccatccaacacatgtactcaatgcctttttcttttctggattttctatattacatccattgctcctgaaggttggttcatgtttggaagaataaaaggacaaaggaggcgttagatcagtagcaccgttgcctagttacattagcatcagcatcaaccaaacagtacaatagctgcaaaaa

SEQ ID NO: 139681 - DNA, 282 bp, Zea mays
  Clone ID: MRT4577_58876C.1
gagcttattagtcggcggccgcaccggtcgattaggtggatcccgactatgggtacggcggctttcatggccgctacggtgagagagaggagccaggcactgtctgacggaggagaatccagccatccggactatcgaggagctgcattgcatgacagcgttgatcctcttaaattgataaaaggcctgaacaccaacccgagcagagaacgctaggctcaattcttgtaactcggggtcatccagatagtttccggctttgctggactggaatacatgcat

SEQ ID NO: 139682 - DNA, 1478 bp, Zea mays
  Clone ID: MRT4577_58877C.1
agctaattcaacaactggcggtgttcaaaggatattcagctgcattctgtgctctaaagcttgctggaaagaagttcccatcctcaacaagtttacacatccagcttctaggaatgcagattctacatgagcgcgcacttcatcgagggcatctaaaagtcgcgcaacaaatctgtgatgagtttggggtgttatcatctgctgtttctggagtagacattgagctaaagacagaatttagtgtacggcgtgctcgcactctccttgccgcaaaacagtttagccaggccgcagctgtggccaattctcttttctctacgtgctacaagtacaacatgcaggttgagaatgcaagtgttcttttattacttgctgaaatacataaaaaatcggacaatgcggtccttgggcttccttatgcgttggccagccaatcattctgcaaatcattcaacttggatctgcttgaagcctcagctacacttactctcgctgagttgtggctggatcttggatcaagccatgcaaagaaggcactgagtcttgtctaccagagccttcccatgattcttggtcatggtgggcttgagctgcgtgctcgagctcacgttgttttagcaaagtgccatttatccgatctgaaattctcagttctcgaagatcctgaagctgttttggatcctctgaaccaagccactgaagacctgcaagcattggagtaccacgagatggcagcagaggcgtactatctgaaggcaatggcatacaaccatctcggcaagcttgatgagagggaggaagccgcggctcgtttcaaggatcacgtcactgcccttgagaccccgcataacgaagaggactcgcttaagtactgagacccaagaccatttgttattggcaagcatgccccactgccagagactaaagagggcgtggtggccttctggacccgcatggtggcactggcaggctacaatgctacactgaggcgaatggcgtttgctgccatgcggaggcactgccactgactgtgggcggaccggcggacggcggtgaccgaaggagacgggcagccggtgaggtcaatgtgctagttgggtcagcgtggtatggtctcatccatggaccatggtgttcattagagcgagacgaagacatcagattgagacttgatgttcttactctgttcttatcgacttctctgctctgttactggggagttccgaattgctaactcagacagacagtgctgacaatgtgtttgtgtttgaatgtaaacagaacaagaacagaaaaatagaagattgatctgttttttccaaaaaaaaaaaaaaaaaaactcaaagcttattaaaaggaatataagctgaataagctactgaaggttgaatgggataacctgtctgtaaatgcccccatatgctctgggcctaagtcacgctacattaaatcatttgaagattacctgggcatgtttg

SEQ ID NO: 139683 - DNA, 183 bp, Zea mays
  Clone ID: MRT4577_58878C.1
cgtgcactgccctccgagtccgacgagttgtttggaggcaggcgtggggtcggtcacctgaccaaatcagccgggcggggggtttctctgtggcgcaaggctctccactcaccagtgcaagagaaaagtggtgtaagctgtacatagcttttgagtatttataaccagagagaattttaaggg

SEQ ID NO: 139684 - DNA, 465 bp, Zea mays
  Clone ID: MRT4577_58879C.1
ccggccgggatcacgccagagacctcgggtgagagagagattgaggcattgccggtgcctttcggctgccttgccggtcaggctaaattgggagggctgagtgcttcaccgacatacaccgcgtgtttgcgtgacctttcggggtggggaatggcgggactcgtcgggaattcgtcaccgaacttggggacgccacagcagagccacctgtaccgtgggcaggatatgtgggcgtactatatccaggtcaagaacaggtaccgcaggatgaggcgcatggaggatgctgtgctgtgttcgtgagaggtctaggccgtcgtctcctagtcaactttgggttgctggaccgttgtctccttataatgtaattatttatttattttgtatagaactcatattatatagtaaagttgtgacattcgatcctgtgccatgattcaaaaaaaaaaaaaaaaatttgcggcc

SEQ ID NO: 139685 - DNA, 363 bp, Zea mays
  Clone ID: MRT4577_5887C.1
actcccgtcctctccaaatcccccaaccaccagcctcctcctcctcctcctcctcccagatccgcctccccgccccgcccccagatcccccacgcaggcgagcgaacgcgcgcgcgcgcaggcccagatccgcccgccgccccgccggagcagccatccatggcgaaggaggccggcggcgagggggccatgtcggagccggtgctgcgcaaggagctcgtctcctactgctacgtcgcggagtggatcttcctctccttcaccgtcatcgtctacaacaagtacatcctcgaccccaagatgtacaactgccccttccccatctcgctcaccatggtgcacatggccttctgctcctccctc

SEQ ID NO: 139686 - DNA, 1381 bp, Zea mays
  Clone ID: MRT4577_58880C.1
aaagaaatcgattttatgcatttaaggagttaggtcattgcaacagaggtgagtaattttgtatattttgaacccaattcaattacatgtcctccaatccaatgtcgaggctaaaaggtcccttattgctgtggaggaacatgtcatttccttattcgaatcccagggacatccttgagccccatcttcagagcggtcttccggtatatcgctggaggcttctccaggccaatcgaggcaccaaatcgatttgctaggtcaacaaccattcttttatctctacctatgtcagcgatggagttgtagtaacccagccacgcatggtatgctgcttctttgatgctcatgtcaaccatctctattgaatcgtcaaccttttgcttcatctcctggtcaacgtctggtgctggatacttgtcaatcgggagatcgcctatctcgtccaagaagtattgttcccatggcgcaagcaaaagaattcccttgccagatttaccttcccttgcagtccttccaagccgatggatgtaatgctctctatcgggaggaacaccaacctgaatcacaagggtgacatctggatagttcaccccacgagtagaaacatctgacgttacgagaactatgcggttagagccccggaactcttcagatatgcgagttctatagagctgaggtttcctcgagtgaatttccctgacatttaacttcaaatctcgaagcatgatatacataaactcagtcaccatggctgtcgtgcagaaaacaataaccttgtaatcaacttcacgatcaatatgctctcgaagcaggtgatgaaccgtatgaaaatgcagctcatgtggcaccacaagacatgactgctgaaccttagttggggtttcaacagctccaaggcccactgtgtcaacaaaaacgtgatccctctttaatactagctgtgaaactcttcgaacctcttttggaatagtagctgagaagagcaatgtttgtctttgacgtggcaaggtatcgacaatcttttctatgtctttacggaaacccagatctagcaaatgatcagcttcatccaacacaagcaatttcaatctcatcaaacgaacagagaatgatgatttgttttcaatgtgatccagcagtctaccaggtgttgcaactaaaatctggcatggatcagattctaatcgtctctgatcaagcttgaatctagtgccaccaataagagattgaacaccaattccttcatggtactttaacaagacatttgcttcagctgtaagctgaatagcaagctctcttgtagggcataggacaagagcaaatatggagatactcgctgatttgtattgctcttcatagcattcaagactgattcacccgg

SEQ ID NO: 139687 - DNA, 135 bp, Zea mays
  Clone ID: MRT4577_58881C.1
atgtcgcacatcgggaaggggatggtgaccggcggcaacgggaagggggcatcgagacggactagctcgggcgacaacaaaaagaatgggaccaaacggatagatgctgggtgtggcatgagcgagcgcggctag

SEQ ID NO: 139688 - DNA, 282 bp, Zea mays
  Clone ID: MRT4577_58882C.1
gaaaggcgttaggactggtggtgattagtaccctactaagactgttagataacattgacgcaatcaaagaatcattcgttagataatataggactcaagaagatggtgctgacatctccaaacaagcctcgaggttcccttcctcactaataacaaaaaatgcaggggtgaatggggactttgtcattaaaaaagggctactgtatgatagatgccaattatggctacaatgctgccaagaactggtatgacgacttcatggccgctgttatactggacgca

SEQ ID NO: 139689 - DNA, 342 bp, Zea mays
  Clone ID: MRT4577_58883C.1
ttttctagacaacgtctttgctaccctgattgtctagcaccctccgatcctgctggccactcacgtggtgaagatgatcctgaagatctacgacgtcatctcaccgtctgaggactgatgaagcctgaaggaaggaggaataaagcacaggaacaggcgactatgctgcatgagaggttagcatacagcattgctgatgtgatgattgatattactccttgatcaggcgggctccttgcatcttatgagctgcctaccaccttttttgtgagagggattgattgtattgcacgatattgcatcgaggagtacggatgcacgtggtgtcttaattatttataa

SEQ ID NO: 139690 - DNA, 497 bp, Zea mays
  Clone ID: MRT4577_58884C.1
aattcggcacgaggcttctgcctgccacggcagccggctcctgtccccttgcaggcagcagttgcagacgacactacctcctatccagcttagggcccacctcccctgaaaaccctaaacgcgctcacgaccactatatggcatgtgctaccgagaacggcacgatggccggacgacaccaacttgcaccgcttcttccgcagcatcgacggcatcggggcgggacgccgcgggggctcctctgacgccctgagcacaggcgtagggacccacaccgaagagcagagcacctccgccttatgcgaggggaggcggaacaggttgacgataatgagcggagggacaacaatgttattgaacataaaggtgacaagctgagcgtagacttgcccagcggtgtggacgggatgacagagaacgcttgactctcacgggaagaggaaaagaatgaaccttagtgcgcacagaagctggactaccttggatatctttatggt

SEQ ID NO: 139691 - DNA, 868 bp, Zea mays
  Clone ID: MRT4577_58885C.1
atcaaacccatctccttccttgtgtcgtataaaaagcccgggctctctggtgatcgatcgattgatcgcgacgcacggacaaggagagggatcgccagctccgcccgtttccgtggacgcagcaaggaagcgcggatggacggatcggtctcagtacctccgctcccgctgcgcgatgcgtccgtcgcctaattgccgcccgtccacagcaaacggagcagacgtgccggtgccggtgccgccggtgcggcccgcccggcatataacaaccaccttctcagtcgctagctccagcctactcagtactcaccaccgttgctttcttcgtcgtccagcgaggctccagcctacacacgccgctcttcgcgctcgcgctcctcggcctgctgcgctgcgccgccgtctcgtgctcggcggcggcggcggcgacgacgctgctgcaccgcgagagctacgcgggcaagtcggagttcaggacggtgaaccggaagccgctgggctcctgcgtcgacccgagcccctacctggccatcgatgtcggcgccgcaggcccgatccccgacgaggcgttcctccaggtcaccgtctccggcgtgcaaaggcccgacccctccgactgggtcgccatgatcacgccttccaactccatcgttgctgggtgtcctctcagtgaagtgaactacgtggagaccggcgacctggcgaatctcccgctcctctgccactatcctgtcaaggcccaatacctgacaagcgaccccggatacctgggctgcaagaacgccgggtgcgggaagcgcgacgcgtccggcgcatgcacggcccggacctgcgccgccacgctcacctttcacgtcgtcactttcgc

SEQ ID NO: 139692 - DNA, 355 bp, Zea mays
  Clone ID: MRT4577_58886C.1
tttatacttacacccttcgcccttttttattttttttttttctttcacacttaatttaacggtttatgttcttttaaaccaactttcaactcttcaccatttacaaatgaaacaccgtacacattttacccttcattaaaacctcaaaaaactttcgctgaaaccgaactttatttattaacacttttggaacatttacttacaccctccaaattaacaagacctatcaactcttcactttattatgacctgttgaactttttacaaccacttcccctcccctttgttgtttaccatcctttcaattcttaatcaaaactctaaaccataaaccgcaaaactacaatttctaaat

SEQ ID NO: 139693 - DNA, 418 bp, Zea mays
  Clone ID: MRT4577_58887C.1
ctttcttccttctcactccatccccgtcgggtctctcccagtcgctttgcgtcgtcatggcgccgatcgagtgcactatgcacgtcggcgccgtgaaagtcggcgtgggcgcctccgtggccgccgacgaagacgacgctcgccaagcgcgggttgacgaccacttgggtttcgaggtgcctgccgtacgtgcaggacgacggcaggcgtatcactcaccggcacacactcccgtgcacgctaaatgcagtagccggtgccatctcggggctctgggtgttcgcgcagggagaggcgaccaccgcggcggcatcatcttcttctcatagtttggttgcaaggccatagcttttgccctctgcttttttagtgtggttgtctattatctgggatgcagtaagatttgataagaaagggg

SEQ ID NO: 139694 - DNA, 593 bp, Zea mays
  Clone ID: MRT4577_58888C.1
acgggtggtgtaacaatatggtggattgcccaccgaaaacccatgtgtatgcaatctctgggaaacacaagcttttatctttaaatctaacaggcaagtactcaaatacccttttttacaatatcccgcacccctgtactgagagtccccactcctgattaacccccccccgtcagcttgaggtgtggaactccccgttactccaacaaggagatatttttcctgtaaacgctctgtgggctctctaggaacacgactccctcaaaacccttgtacagcttttcggggactcaaccaccgggggacccgggaaccccttccatgaaagcgtaacaggagtgccggagggggccttacccacgggcgccataaaccacctccggggactttaaaacaaagatgcactttcacccaatggggtccccttgcagggaaagaggctcctactctggaaccccggcttgcccaatggtgccacctcgggtttcataaaccccacttgacttattgtccccccgcctgttttataccacgtgggtaagcccattcccacgctcttgaccgatatcattgagctcccccaaaagggatgc

SEQ ID NO: 139695 - DNA, 420 bp, Zea mays
  unsure (1)..(420): unsure at all n locations
  Clone ID: MRT4577_58889C.1
caggcgatggatgagggcttcactcacagagaggttggatgatggccgactaatcccgtggacttcttaaagctgatgtgngaaaatctggatgactgcacttgtgtccctggagagaggaatcttgatgagactaatctgacgatgagctattatgaacggatcctgaatgatataacacctgggttctggggccggagcatggaaatcatataccagactagcgcatgtgctgcaatgctgactgatgtcacatattggggcctccttgtgccatttttctaccgtgacaaggatgggttacctgtgatcactgatggcgcgcgctccttaaatgctggacctgtacttatagacacacttttgagcaacatgccctttctctgtgaccgaatggatctctttgccttctggagctgc

SEQ ID NO: 139696 - DNA, 346 bp, Zea mays
  Clone ID: MRT4577_5888C.1
gtacaacagggtggattttttacatatatttcccattgggccccaggttcaagtcatcggtgccacataattcaatcaccagaacgatttcctaggaacaagagacgaggcctatctatctatctaagtctcactcaatacacaagctaacccactgctgacggaaggttatgcatgggcgaccattgctccgaacgaaagatgaccaagtaaacaggggttagcaaaggtcctgcttacacaactgaagtgacaactgacaacaacccaaggggtactggatgcgcataacccgggccaacataagttgaagagatgacaatcaggcaggaaattgacctgggat

SEQ ID NO: 139697 - DNA, 633 bp, Zea mays
  Clone ID: MRT4577_58890C.1
gatcccaatttcgctacccatttagaacaacctctcctgtctcatacgccttcgaggggattagcggcgaggagaggacaaacagctgcccgcgcaaagaaagccctgaagactctgccacacttgtagaaatagctgacgaatgatcccgactgcggccgatctagacatcaggggccttccgcatgtccacaggaccttcgtccccggacctttcaagcaacctcatcaacagcgcatccatcaagacgagctactgattccagtcacgatgatgagactgtgttcgactgtatgagtgccgaatatgaatgtctttgtatagattgaaaagaactggatgatgtcatgtacacccagaaccttgtcacatataacgcctgagaggtgatcgatcttcaaagtctgtgcacacctatcccagagatatttattcttgtgagctgcagacaccaccaatgtggctgtacggaaactgttgatgtgctgttggtcagatggaacgcaagtatcactatgagatgctaggaacgcaacttgaacgtatctcactctgacctattgtgacagatcgtggttatgtgaatcccttctctatggagacgctcggtgatgctgtatcttctataccag

SEQ ID NO: 139698 - DNA, 556 bp, Zea mays
  Clone ID: MRT4577_58891C.1
gaacagcttcagtagcctacagtacgactggaagtggtttcagtagagtgaacaggagcctgccagagagcttgcacctgatatttatactcgttgggtccatcactgacaacataaacgttacatccctcagaagcggcgggttcttatgttacagcaaaaaggaaacattagcaatgttacgacaagtgtctgtatggctgtgttcctttgtaatccgcaaataggaggaccgtacccaacccattgggggctgggggcaagtgtcggcggattccaaactgggggaagatcagagcgtctttcccctgtttttttttcgggttggatgacgatgatttctctcttgcagtctgtgtaccatggctcaccgtactcttgtgtaccttttgatggccaagaatctcactgtagctgtgctatactatgtataagctgttatttactagtggaaagcatcaggaaaagtttctgaatcttggatgacgacccatctgtgtaactgtttttttttccttttcttttctgatgaatgttcactagtattaattaatat

SEQ ID NO: 139699 - DNA, 348 bp, Zea mays
  Clone ID: MRT4577_58892C.1
ccaatgcaacgagtgttgtgttcattattgttcaagtcgatcttgaaggtagcaaaaaaaaaatcaggcactgcaattcatatacatgaaagaaaaaaaagtactactgccgtatgaaaatgttcgcatctcctccaaggaatgtacccttatcgatctaatacgtaatccatgcatacatgaactaatcacaatcacaatcacaacaaaaccataagactagactagaggcaacggcactgcttctcttctgcgcccctaccttatcgacccagttgcccgtgctgctgctgcgtccgcagctgctcgtggaaccacatgatgaactcgccggcgcgcctgtccacc

SEQ ID NO: 139700 - DNA, 738 bp, Zea mays
  Clone ID: MRT4577_58893C.1
ccggccgggatcgctgcaccgtaccttctcttactagtcttctctactatcttctccatggcaattcattagggcgggatcaacgacaggtaggtcgccggaaggcgagctagctcgtcgtcatcatggacggcggcagcagctggttgccattcctaggccgtggaattggcgacggcgtatcggggtaagaactcttgccacaagcagccaatccactacgctagtagtacgtataatagggtaatgaccgtcaggcgacatgaactatgaccacttgagtctccagttactagtctagtttcagttatatattctgcttcagcagcaggagcagtggctcggaggtgcagcggaaggaggacgacgacctgccgatcagctcgcaagtggaggaggagctccgacaggcaatgatcatgcacgcacgcacgcttgtaatctgcaattgttttacttttttcgtactagctacatgaaacaagcacctatctttctcggtgggggcgcagttctacttgctgatgggcatggagagaactggacacccagcagagcgagagacgacgacggcgttgcccccttcatcggaatcatccatgttccgctccttccctggaagcccggccgacgaggcctcgtcgctcaggccacggagcagcaacaacaatagtaccacggcgaactcctaccaccaccacccggcagaagtctcctcccagtcccatctgaccgagc

SEQ ID NO: 139701 - DNA, 270 bp, Zea mays
  Clone ID: MRT4577_58894C.1
gtctcacctcccgctaaggaagaagtgcttgtgcatgtgattgaatggcggctctagttacgacttagaaaaccgtagatcctgcactacccctgtagaaaaaacttgatatttcatgcatagctatctaactgtgctgaatcaggattgaaccgaaattcggttcatatccaagatcccgcattttttatgattgcaatgcacttttttcatattattctttgaatcatcagatgatggtttggtattaaagaaatgaaatcaagacca

SEQ ID NO: 139702 - DNA, 197 bp, Zea mays
  unsure (1)..(197): unsure at all n locations
  Clone ID: MRT4577_58895C.1
atattgaactgggtgtactgattgccatggatggcgttcctaaagaggaggaggcgatgcatatatgtttgggtgtgtaaanaacaactgacccaggtaatatggtggtggcagaaacggtggccatggatgcattttggtgcacgccaccactttcaacaacacggagcatggcatgcactgttgcgcagggagat

SEQ ID NO: 139703 - DNA, 311 bp, Zea mays
  Clone ID: MRT4577_58896C.1
cttgtaatatacatggtaccagcgcattaaccagtttggccgcctccgccgccgttcggaatagaggttgatgtgggaaaggatatgcacgcgctgctactgctatactgagactgtgagcccctcgacgctagcctgccagatggcggaaagtacttcttgcacgagcaaatttctgggcctcatatcatccagaatgactgtgacagaaccgctcatgctcatactgacgactttgatgctcctggtgcatctgttactggcgatgtacctgtgggacctggagcttacctttgatgtcggtgcgaata

SEQ ID NO: 139704 - DNA, 1115 bp, Zea mays
  Clone ID: MRT4577_58897C.1
gggtacctcgaggccggccgggccgggatctcaacgtctggtccaccagctcgtcactcgctccgatctcctcccacacctctccacctccgacgacgaccaccaccatggcggccgcttccctcgcgcgcctctcccgccgcgccaccacttccacctccgtggcggcgcccgccttccggcgcctcctctccgccacctccaccgcccccgccgcggcatccgccccgccgccgccccccagcgcggccgccgccgcggccgtgggcgcggatcgagtgcggtgggactaccggggccagcggcagctcgtccctctgggacagtggatgcccaaggtggccgttgacgcgtacgttgctcccgaggccgtgctcgccggccaggtcaccgtgcacgacggcgcctccgtctggagcggcgccgtcctgcggggggacctcaacaagatcgcgctcggcttctgcgccaacgtccaggagcgatgcgtcctccatgccgcatgggcgacgcccacagggcttccagctgagacccttgtggaccggtacgtgacagtgggtgcctactgcctgctgcgctcttgcaccatcgagcccgagtgcatcattggccagcactctatcctcatggaaggttcgctggttgagaccaactcaatcctggaggctggctctgtattgcccccaggaaggcgaattccgactggtgaactctgggctggaagcccggctaggtttgttcggaagctgaccaacgaggagatcatggacattccaaagcttgcaactgccatcaacgatctgatgcaaagccatttctcggagttcctgccttactctaacgcttatttggaggtagagaagttgaagaagtcgttctcgatccccctgtaagagcatgttgccccgctcgtccagttgaatgaatgaggaaataaaggttccccaatgctagatgttttgtattgaatcgaacttctacttctgttacgtctttttggggggttctttgttgttttgagcatggggacacgtgcaggaatcatgtcttgatatctttttacgcaacccaattctgtgttgattaaaaaaaaaaaaaaaaaatttgcggcc

SEQ ID NO: 139705 - DNA, 555 bp, Zea mays
  Clone ID: MRT4577_58898C.1
tggcggcaaccagaagcggcgccccgcccccgcagtgtgcctccctgacgacgccatgtccgcgtgcccgtgcacgcccggtgccagggacggggaggggaaggaggaggccgcggcggccttgcacgggctgcagctggaggcttaccggtcgacgatgcgagcgctgtacgcgtcggggccgctgacgtgggcgcaggaggcgctgctgacgaacctgcgcctgtcactcaacatctccaacgaggagcatctgctccagctcaagcgcctactgtcctcctgatcggccatccttctggccggccgagcgccgtcctgttccggcgagcctcttcctttttactgttcttgttatacatggtttattacattgtctagttcaggtagaaagaatcctatgtttattaccagtgtcgagacatggatgcatacacaaagacgcttgcatctttttgatgccttgggtatcctggataaatctcttgcttgtaaatgcaaacatatttacaagtttttctttgaggggccgtatttccaagttttttccccccc

SEQ ID NO: 139706 - DNA, 629 bp, Zea mays
  Clone ID: MRT4577_58899C.1
cacgcctgcgtgaaccgggctgctaatacacggtcgacctacgctttcgtcactaacaaataaaagcgcactttgttctcaacaggggaaggctcaaaaattatacactacatatgcttcttgaactatatcgtaatagcagatacaaagaagataccaccacaggtcgtgacaggctgctaaatgttgcttggtttgccaaaacctgtcaccaacaaggtattaattgtgggaaaacccaaatgttgaaccctacaggatccaacaggtaatagaacgtggactactacctttatgaccctaggtactacaacattacatccagccttattacatgaatgacctttggtgcattgattggcacaaaacatcaaggcacaacatctacaacaacttgagctaacaaaccttgctggctactctcaacaacagcagctgattgcattcaaccaactaggtgcattgaactctgattcttatttgctacaacaacaactaccattaaaccagctatctgctggctacccccagcgattgcttgcatacaaccaactgacagcattgaactctgctgcttattcacagcagcacaactactaccattcaaacagctatctggagtgagccct

SEQ ID NO: 139707 - DNA, 693 bp, Zea mays
  Clone ID: MRT4577_5889C.1
ccccgcgtccggtgtatctagaatattcttttgatgatctcccgggttgggaagagagtttgcttctgcacttccaggtggtaaagttcttgacgggaatgccaactcatggagatgaagtgcatcttgtgcaagcatttcaaatgttgaaccctcaactctactaggagtaccttcaaaacacttactgaccacttctgaagcaagaccaagggcctcaaatatctgggcacctttgtacgacgccagggtggatatccccatctttgcaagaaccttcattattccattgttagaagcatagaaatacttgtcaataagttcctttggatacagctgtccgtcgtcttgaagaggtattttctcatcaatctgtaaccgccatatggcttcaatagccaaataagggcatatagcatctgcaccaaatccaagaaggctacagaaatggtgcacttcacgaggttcagctgaatcaacaagcaaccctatgcgtgtcctctcatttttcaagacaagatgctgatggacagctccaactgccaatagagaactgacagctacacgatctggagagaaacctgtatgaaaaaatagttcatacctgacattttaaacctccaaatgctagagagtatatgacaagtaattttacagaaaaaaaaaaaaaaaaaaaaaaaaaaaaaaaaaaaa

SEQ ID NO: 139708 - DNA, 553 bp, Zea mays
  Clone ID: MRT4577_588C.1
gagcatttctctagaggtgggttggattctcctccctctccggcttgggttcgggttcgtgaggttctccgcggctcggcttcgtgggtgagcggatctacatggcgccgtcgtatggtgagtaccgctgctttgtctgaggtctcggctggggcacgggcgaccatctccctcctactacgccttcagcacctacgccgagggcctcgagtccgagatgatcctcgatcgggagacgcataggtgccgcgggttcctcttcctcgccttgtgccagttggaggcgcatgtgctacgccttcgtgggcatgtccggcagggtcgctggacggccgcctcatctccgtcttcgtggcccaggaccgcggcggcggtgtgcgcgactttggcggctgtgactgcgcagtgcgagcatccgctcgctaatgcgctcgctggtgctctagatctacatccgagatggccttgacaaggagctactcttccgcgcccattgaaaccgcccgagtagtaccccgtgtcggccaatggaacatgcgctggatcgacggcc

SEQ ID NO: 139709 - DNA, 1353 bp, Zea mays
  Clone ID: MRT4577_58900C.1
ctcctagctaataaacaaactcacggggacgccggacgcggaagccgcctccgtctcctagtcctaacccaccaccaacgcaataatctacagcagcggaggaaagcactacagctcttggtcgagcagtcacaaatcatccaaattaagctaacaacgaacgacaactccacgcagagcaacaatggcgccgccgatgaaggtgtacgggtgggccgtgtcgccgtggatggcgcgcgcgctggtgtgtctggaggaggccggcgccgactacgagatcgtccccatgagcaggtgtggcggcgaccaccgccggccggagcacctcgccaaaaacccgttcggtgaaatcccagttttagaggacggtgatctcacgctctaccaatcacgcgccatcgcacggtacgtcctccgcaagctcaagccagagctcctccgcggaaggcgacctcgaggggtcggcgatggtggacgcgtggatggaggtgggaagcccacccacatggagccggccctgtggcccatcatccgccacagcatccatcggccagtacgtcggaccgcgaccgcgaccaccagaggccgtcattcaacgagaacctcgaccaggctgaggaaggtgctgccgcgcgtacgagcgcgaggctgtccgtctgcaagtacctggctcggggacgacatcagcgccgccgacctctgccacttcggcttcatgcgctacttcatggccacggagtaccccggcttggtggacgcgtacccgcatcgacaaggcctggtgggacgcgctgctggcgaggccctcggtgcacgaaggtcatggcaggcatgccgccggattttgggtacgccagcgggaacataccataggctaaaagcggtgggcgtccgtcattctgcagatctgaggtctctgaacctcagcgtttccgataaacatgcatcctttatctactgtttaaaaaaacaaacctggtcggtgcataggtattttggttctcttaaatgattcatttatcgcgttttgaatacttttagtccctaaaaccaaacgagatagagactaaattttagtttagagcatctccaatagttatgtaaatttagcactctaaattacagatttaaaaagttactaaatcactttaaaaagtagcggccaaactttagtttactatctaaactttagtcactagatatataaactatatatgtgtactatatataccgaaaaattattatacttatactaggcgacagcaacgcttaggccatcagagcattcaccgatgcaattgctgctggaatctcctcacgttgaggaatccctgcacatgcaaatgacatttt

SEQ ID NO: 139710 - DNA, 288 bp, Zea mays
  Clone ID: MRT4577_58901C.1
agctcggaattcggctcgagccacattccccaccatatcatctcccccaccgcccacaccaacacagggggggttttataaaaccttacgttttttacacccccaacccacacaagcaatacatgcaacgcacgagaaacctgaccatcataccaccccatcacaagcaacggaccgacaccgacaaacaacaacaccaggtcggatctcccaagcagacagacctaaacaacagcaaacaaacgaacccacggctctagaacctgcaccccctggacagccaaccta

SEQ ID NO: 139711 - DNA, 172 bp, Zea mays
  unsure (1)..(172): unsure at all n locations
  Clone ID: MRT4577_58902C.1
ttcttgcagaccggccgggctaagccagagtttacccccgaacctaaaataaaaccaaagccaaaacctgaaccaaaatcagagcctattccacagcataaacctgtagncatagtcagagtctaatcccataccgaatccatagtctttgttatagcctctccctttacca

SEQ ID NO: 139712 - DNA, 264 bp, Zea mays
  Clone ID: MRT4577_58903C.1
ccggagccgaacaacgcccgcacccaccgcacactagacgccgccgcccgaaaagtaatggggaacaatcaacaggtcgtcacaacagaggttgtgagaacaagacgccaaggtgcgcacgcaaaacaaaggagtacacaaaaacatgcagagaaaaaaatatcaccaaacacatccttaagacaacccacaccctgacatgcaaaccacagaaagaggcgcagagaggcagaagcgcaatctaccaagacgtcatccccaccc

SEQ ID NO: 139713 - DNA, 938 bp, Zea mays
  Clone ID: MRT4577_58904C.1
ctcctagtcctaacccaccaccaacgcaataatctacagcagcggaggaaagcactacagctcttggtcgagcagtagcaacaatggcgccgccgatgaaggtgtacgggtgggccgtgtcgccgtggatggcgcgcgcgctggtgtgtctggaggaggccggcgccgactacgagatcgtccccatgagcaggtgtggcggcgaccaccgccggccggagcacctcgccaaaaacaatcacgcgccatcgcacggtacgtcctccgcaagctcaagccagagctcctccgcgaaggcgacctcgaggggtcggcgatggtggacgcgtggatggaggtggaagcccaccacatggagccggccctgtggcccatcatccgccacagcatcatcggccagtacgtcggccgcgaccgcgaccaccaggccgtcatcgacgagaacctcgacaggctgaggaaggtgctgccggcgtacgaggcgaggctgtccgtctgcaagtacctggccggggacgtaatcagcgccgccgacctctgccacttcggcttcatgcgctacttcatggccacggagtacgccggcttggtgcacgcgtacccgcacgtcaaggcctggtgggacgccctgctggcgaggccctcggtgcagaaggtcatggcaggcatgccgccggattttgggtacgccagcgggaacataccataggctagagaggtgggcgtccgtcattcgcagatctgaggtctctgaacctcaacgtttccgataaacatgcatgctttatgtactgtttaaaaaacaaacttgattggtgcaggggtattttggttctcttacgattcatttatcatgttttgaatacttttagtctataaaaccaaataaaatatagactaaactttagtttacgaaaaaaaaaaaaaaaaaagcggcc

SEQ ID NO: 139714 - DNA, 780 bp, Zea mays
  Clone ID: MRT4577_58905C.1
ggggggtgggttttttctttggaggaaagcactacagctcttggtcgagcagtgtataaatattaacaatcactcatgctcaccgtgtgcacgccacaaatcatccaaattaatctaacaacgaacgacaactccacgcagagcaacaatggcgccgccgatgaaggtgtacgggtgggccgtgtcgccgtggatggcgcgcgcgctggtgtgtctggaggaggccggcgccgactacgagatcgtccccatgagcaggtgtggcggcgaccaccgccggccggagcacctcgccaaaaacgtacgtggctagctctctccgccgtcgcatcgtcgaccgacatggatgatggatccgacccttaactttgagtttccagcagcaactttaatttgcccagttaactgttcgctaacgttagtttagcgagcaagataataagtaatagctcttcgatgttctgcgctgcagccgttcggtgaaatcccagttttagaggacggtgatatcacgctctacccactatactcaatatactaatcacgcgccatcgcacggtacgtcctccgcaagctcaagccagagctcctccgcgaaggcgacctcgaggggtcggcgatggtggacgcgtggatggaggtggaagcccaccacatggagccggccctgtggcccatcatccgccacagcatcatcggccagtacgtcggccgcgagcgcgaccaccatgccgtcatcgacgagaacctcgacaggctgaggaaagtgctgccagcgta

SEQ ID NO: 139715 - DNA, 1281 bp, Zea mays
  Clone ID: MRT4577_58906C.1
caaataatctacaactaacgacactccagcagagcacatggcgccgccgatggaagtgtacgggtgggccgtgtcgccgtggatggcgcgcgcgctggtgtgtctggtaggaggccggcgccgactacgagatcgtccccatgagcaggtgtggcagcaaccaccgccggccggagcacctcgccaaaaacctacgtggatagctctctccgtcgttgtatcgtccaccgacatggatgatggatccgacccttaactttgagtttacatcagcaactttaatttgcccagttaactgttcactaacgttagtttagcgagcaagataataagtaatagcttttcgatgttctgcgctgcagcctttcgttgaaatcccagttttagaggacggtgatatcacgctctaccgtaagctatctatctactctatcagtctatctatactgttgttaatctgtagcatacaattgccaactaacaactcgagcggtttaatttctctaacgctcctgattccagaatcacgcgccatcgcacggtacgtcctccgcaagctcaagccagagctcctccgcgaaggcgacctcgaggggtcggcgatggtggacgcgtggatggaggtggaagcccaccacatggagccggccctgtggcccatcatccgccacagcatcatcggccagtacgtcggccgcgagcgcgaccaccaggccgtcatcgacgagaacctcgacaggctgaggaaggtgctgccagcgtacgaggcgaggctgtccgtctgcaagtacctggctcggggacgacatcagcgccgccgacctctgccacttcggcttcatgcgctacttcatggccacggagtacgccggcttggtggacgcgtacccgcacgtcaaggcctggtgggacgcgctgctggcgaggccctcggtgcagaaggtcatggcaggcatgccgccggattttgggtacgccagcgggaacataccataggctctagagcggtgggcgtccgtcattctgcagatctgaggtctctgaacctcagcgtttccgataaacatgcatcctttatctactgtttaaaaaaacaaacctggtcggtgcataggtattttggttctcttacgattcaaaaaaaaaaaaaaaaaaaaaaaaaaaaaaaaaaaaaaaaaaaaaaaaccacataaaacccaaaaaagccggccctcaggccccaggttttgctcccttaaataaagattggggccccgaatgcccaatttttgtcccttttag

SEQ ID NO: 139716 - DNA, 401 bp, Zea mays
  Clone ID: MRT4577_58907C.1
cccaacatcacaacccaatcttctagctctctcatcccaactcactctcatggaacgttctcctattctagctatctacctatcaaagcatcaattctcgcaacaaacccaccaccctaccacaactcttctttccaaacgccatagacaacctaacctacaatcccaaccctaacccaccctacaaaaatcctctttaactcatcctatcctactacactactcaacaactcaccccactagacaacagcacccaaatgtatcttatcttagtaactcatccgcttacgaagctattctaccatccacaattcaatcaatagcataccatcaaaatcatctcatggctaaactaacttagaccaaaaactccatacacatcgaatcaactcttctcctcg

SEQ ID NO: 139717 - DNA, 368 bp, Zea mays
  Clone ID: MRT4577_58908C.1
cccccgggggttttttttttttttacgtttttttgggcagcacagaggacttgtcttacacaacattatatggtgccttacaatggatggaataagtccgacaactgaactgaaaagacattattaagactatgacggggtgaataacagatagtgctatatgtcctacgagtagcacagtgctactttatctattacaaccaccatgcctggtagtagtagatcaaagatcactatggtctctgcgatgttcagtgatagaggtgggggacaccagcttggctgaggggggcctggacctaaccatggaaggcgacacctgggaagacatgacatttacaatgagtgcggcggcccaagacaataaa

SEQ ID NO: 139718 - DNA, 347 bp, Zea mays
  Clone ID: MRT4577_58909C.1
gggtgggggggccgcccaaacagttttttccccagttaaaaaaggggttcaaatgggggggggaaaaaaataacccggtttaccaaatttttctggaaaaaactgttcccgaacccttaaaaaaaagccttgttgttccccaaaactggtgacaaagcccagttccttagttcttggtgggggcaagaatttccaattgggaccccaacttttcctggggtgccttttgggccttgacacccagtttggccaattgttttttttttttgggggaaacctggggctttttcttccttttttcccaaaaggccccggggggtggaggggtgttccccccccccttttta

SEQ ID NO: 139719 - DNA, 292 bp, Zea mays
  unsure (1)..(292): unsure at all n locations
  Clone ID: MRT4577_5890C.1
cccggtcgcccatgcgttctgtgcttgtgtatcaagccagcaggggagcaactgggacaactggcctganaccggtgtgaagtgtgttgagattcaccaccaggcgcttcacgaggctcttcctggtgacaatgttggcttcaacgtgaagaacgcagctgtcaaggatcttaagcgtgggttcagaggccgccaactccaaagatgaccctgccaaggaggctgccagcttcacctcccatgttatcatcattaaccaccctgggcagattggcatcggctttgccccaat

SEQ ID NO: 139720 - DNA, 280 bp, Zea mays
  Clone ID: MRT4577_58910C.1
gggcacgcacgcacgctccgatcctgtatagccggctcgacccactcgttcggtcggattttatggtcttgaagaccattgcccacccaaacccatgaatgcaccacccatgttaatgaccatctattgccactctgcatttgctgatgcgctgctcttcattctggcaggtgtgatgccgaacaaatcccagtgctgatcgcccaggggccgctaactagtgtgcactaacccagacacccggctgtgcacgtggataacgaaagcgacatgcctgtct

SEQ ID NO: 139721 - DNA, 274 bp, Zea mays
  unsure (1)..(274): unsure at all n locations
  Clone ID: MRT4577_58911C.1
ntttattttttttcttttttttttttaacgatcggggggtattttggttgaaaaaggggagtggtatacacaccgaggaggagagaactttggaaccccaactgacaaaatacctacacagtcggggagacgtacaagcagggggccggacaactccttcccttaatgattgcccttccacacacaaaagttccgaccagaaaaccctatcgccaagttcagggtaaaaatgcattaggggggccaaacagaccatgtaacactttcgaggggc

SEQ ID NO: 139722 - DNA, 108 bp, Zea mays
  Clone ID: MRT4577_58912C.1
cttaccgcaaacacaagtacacacagtcttcattaatagatagtaagaacaaaacaaatacacctgcctcctactgattaagcaagctaacttgtagaaacttctagt

SEQ ID NO: 139723 - DNA, 379 bp, Zea mays
  Clone ID: MRT4577_58913C.1
gctaaaccaaaaaccaatagcatgggctctaaagtccttaaatatattacaagatccaagccaagacacataatgtgctcctacctcagatgtaagagattactatgctgatggcccacaacttttttaaaccttgaacccacggcatatagcttctgccaccagccttatacaaatttgttccattggagcccacatctggctcgttgtacgatgtgcggtacttcaataccctcggctaagttcatgatcttctcacgggcatgtttgagcccaatcaagaggaccgtgttccttctaatgggcacacggagagcaatctgctcaaatgtaagggacttccaactaccattcataatcctgagccttgtcggttcaa

SEQ ID NO: 139724 - DNA, 1421 bp, Zea mays
  Clone ID: MRT4577_58914C.1
accggtcacgcccttcccgggctgcgtctgtagtcttctttctcgcgtcggcagtcagcttggcagggccgaaccaatggcggtcgacccgcggcaggtggtggcgggcttcctcaccctctccatgttcgtcatgctcggcaacatgatcaagcacgaccacttctctcccgtcaccgaggagctgggcttcgaggcaacaggtgtggtgtgggacacaaggaagcttgacaacgatgctgaaatgagcagcgtcgatacggctggagtggaggacctgatggacgctgtcgaggaagttaaaccttgctggaccaaaccaagtccaaaaaatcagccgtctaatgggtttgttacattctccttgactatgggccctgagtatcacatctctcagatcacagatgctgtggttattgcaaggggtctaggtgcaacacttgtgctcccagacatcagaggaaatgaattaggaaataagcgaaaattccaagacatttacaatgtggataagttcgtgaggagcctggatggtgttgtcgaagtaatagaggatatacctgatgaagtgagtgctaagaagccagcagtcatcagagtaccgaaccgtgtgactgaaagcttcatcacaggcaccatccagcccatcttccaaaaaaacaagcttcaagaattaagcaagaagtcagatgggaaggtcttggcgatcgatttgcggaccgacttgctggaaaagaagagttgcaagacaacccgcggcgctcgaagaaaaggctgttatagccctgatgaggtcctggctttcctgaggagtgttggcttctctgctaacacaaccatctacttgacagagacgtcgtggtacaaaggcctggatgttctgaaggaagaattcccaaacacttggtataagggtgacattatgccagccgagaacaaagctgaattcctgaaatccagcaatgcagacctagcaagggctctggaccttgagatctgttcgcagagcgacgtgttcgtccctgccgtcgctggcctgttctacgggcatgtcacgggtaagaggatcgcgtccggacgcacccagatcgttgtgccttcccagtccagcacctcgacacatgcgtcagacttcatctccacctacatctccaacaagaaccaccttgcctacgcgtgctactgctaagcatccttttgtacggccgttaataagatcagctgaagggaaagtgctctgggtgcatatacaagtacctctcgtggacatgaatgatgttgtacactagctaatgttttgttatgaggaatattagcatacgactgtgtgttggttacttgtttggatattaaactctggaacagcagcaaggagcataaaaaaaaaaaaaaaaacgaaaaaaaaaaaaaaaaaagcggcc

SEQ ID NO: 139725 - DNA, 1802 bp, Zea mays
  Clone ID: MRT4577_58915C.1
ctcgaggccggccgggccgggcattgggtacctcgaggccggccggggccccccgcgtgcggagcgtgcttgcctcgcactgtcacagtcgtgcactccctgtccccgtggactgtggagagttcctgtcggtggtcgccccgcttcatctgtctcatcttccccagcgcagcccctccccccctgtagcctgtatccgccccccacactctgcgtctgcagtcttctttctcgcgtcggcagtcagcttggcagggccgaaccaatggcggtcgacccgcggcaggtggtggcgggcttcctcaccctctccatgttcgtcatgctcggcaacatgatcaagcacgaccacttctctcccgtcaccgaggagctgggcttggaggcaacaggtgtggtgtcgaacacaaggaagcttgacaacaatgctgaaatgagcagcgtcgatacggctggagtggaggacctgatggacgctgtcgaggaagttaaaccttgctggaccaaaccaagtccaaaaaatcagccgtctaatggttttgttacattctccttgactatgggccctgagtatcacatctctcagatcacagatgctgtggttattgcaaggtatctaggtgcaacacttgtactcccagacatcagaggaaatgaattaggaaataagcgaaaattccaagacatgtacaatgtggataagttcgtgaggagcctggatggtgttgtcgaagtaatagaggatatacctgatgaagtgagtgctaagaagccagcagtcatcagagtaccgaaccgtgtgactgaaagcttcatcacaggcaccatccagcccatcttccaaaaaaacaagtacttaagactagcggtcattttctcttccgtaagtttaaggccaaaggagacgaacaacaaggacatggacacaactgcttgccttgcgatgttcggtggcctcgagctgaagcacgaatattctgaggtggccagaaaaatgctggataggcttcaagaattaagcaagaagtcagatgggaaggtcttggcgatcgatttgcggaccgacttgctggaacagaagagttgcaagacaacccgcggcgctcgaagaaaaggctgctatagccctgatgaggtcctggctttcctgaggagtgttggcttctctgctaacacaaccatctacttgacagagacttcgtggcacaaaggcctggatgttctgaaggaagaattcccaaacacttggtataagggtgacattatgccagccgagaacaaagctgaattcctgaaatccagcaatgcagacctagcaagggctctggaccttgagatctgttcgcagagcgacgtgttcgtccctgccgtcgctggcctgttctacgggcatgtcacgggtaagaggatcgcgtccggacgcacccagatccttgtgccttcccagtccagcacctcgacacatgcttcagacttcatctccacctacatctccaacaagaaccaccttgcctacgcgtgctactgctaagcatccttttgtacggccgttaataagatcagctgaagggaaagtgctctgggtgcatatacaagtacctctcgtggacatgaatgatgttgtacactagctaatgttttgttatgaggaatattagcatacgactgtgtgttggttacttgtttggatattaaactctgaaacagcagcaaggagcatatactgcacgttcctgttggcgcgcaccaaaaaaaaaaaaaaaaaaaaaaaaaaaagccctcgagggagggccgcgggtacc

SEQ ID NO: 139726 - DNA, 1242 bp, Zea mays
  Clone ID: MRT4577_58916C.1
acaaaacggcactcgagcacattaattccctgagtggcttcgacaaagtagcctaccagtgtcgtcccagccgccgtcccgtccgccgtcaaacgtcatccgaatccgcgccgcgaccagcgaagaaggtaggaagcatccggaacggagacgcgcctcctgcctcgctttcctcccatggcgccgcccctcgccgccgtctcatcgtcgtcgcccctattctctccttcatcgtcccgccccatccgccgctgccacgcacctcctccttctatctccttccagacgcggggacgctcgcccacggcggcggcggcagctgagtcctctgtcagtacgcttctcgaggtgcgcggactcaccgcatccgtgaaggagactgggcagcagatcctcgccggcgtcgacctcaccatccgcgagggcgaggttctcgtaggccatcctcattatgaggtaactggtggtaccattctcttcaagggtgaggacctggttgacatggggccagaggacagatctctagcaggccttttcatgagtttccaagcacctattgagattcctggagtcagcaattttgattttctgctcatggctgtgaatgctcgcagagaaaggagtggtctaccagcattggggccccttgagttttactcagttgtatcgcccaaagttgatgccttgaagatggacccaaagttccttgatcgcaatgtgaatgaaggttttagcggtggtgaaaggaagcgtaatgagatattgcagctttcagtcattggagcagatttagcccttcttgacgagatagattcagggttagatgttgatgcacttgaagatgttgctaatgcagtgaatgggctgttgacaccccaaaactctgttctgatgattacgcattaccaacgtcttttggatctcattaagcccagctacgttcccatcatggaaaatggcaagataatcaagacgggtgacagttctatcgccacacaaattaatgaaggcggcttcaaatctatcgcccttgtatagcgtcaaagcagtaggttgtgttttgttccctgcaccttcccctttttcttctgttggaatattcttggttttctgactgaaattgaactatgcacttacatggtggcaataccaatgacgcctcttaataacagaaatacaatgattaaaagatgtatgtttaggttgatgtgtgaagaagtaaatgaggtttttgaggcctgt

SEQ ID NO: 139727 - DNA, 2158 bp, Zea mays
  Clone ID: MRT4577_58917C.1
gccggcctgggcccggtaaaaaaagaagcagaagtactcaatcccgagactaacgccgagccgtgttgcggtctgcggagcgtgcttgccacactcacagtcgctcactccctgtgcagctgtgctcctgtcggttgtcgccccgcttcatctgtcgtctcctccagtgcagtccctcccccccctgtctccgccccaactctctccagtctcctcgcgtcggcagtcggcctggcagggctgaatcaatggcggtcgacccgcggcaggtcgtggcgggcttcctcaccctctccatgttcgtcatgctgggcaacatgatcaagcacgaccacttctctcccgtcaccgaggagctgggcttggaggcaacaggtgcggtgtcgaacacaatgaagcttgataacaatgctgaaatgaacagtgtcgatatggctggagtggaggacctgatggacactatcgaggaagttaaaccttgctggaccaaaccaagtccaaaaaatcagccgtctaatggttttgttacattctccttgactatgggccctgagtatcacatctcacagatcacagatgctgtggttattgcaaggtatctaggtgcaacacttgtactcccagacatcagaggaaatgaattaggaaataagcgaaaattccaagacatgtacaatgtggataagttcgtgaggagcctggatggtgttgtcgaagtaatagaggatatacctgatgaagtgagtgctaagaagccagcagtcatcagagtaccgaaccgtgtgactgaaagcttcatcacaggcaccatccagcccatctttcaaaaaaacaagtacttaagactagcggtcattttctcttccgtaagtttaaggccaaaggagacgaacaacaaggacatggacgcaactgcttgccttgcgatgttcggtggcctcgagctgaagcacgaatattctgaagtcgccagaaaaatgctggataggcttcaagaattaagcaagaaatcagatgggaaggtcttggcaatcgatttgcggaccgacttgctggaaaagaagagttgcaagacaaccagtggcgctcgaagaaaaggctgctataaccctgatgaggtcctggctttcctgaggagtgttggcttctctgctaatactaccatctacttgacagagacatggtggcacaaaggcctgaatgatctgaaggaggaatttccaaatacttataccaaggatgacattatgccagctgagaacaaaggtgaattcctgaaatccagcaatgcagacctagcaagcgctttggaccttgagatctgctcgcagagtgacgtgttcatccctgctgtcgctggcctgttctacgggcatgtcacaggtaagaggattgcatctggtcgtacccagatcattgtgccttctcagtccagcacctcgactcatgcttcagatttcacctccacctacatctccaacaagaaccacctagcctacacatgctactgttagcatgcttttgtactgccattaataagatcagctgaagggagccgcagggtagtgctctgggtgcatatacaagtacctctcgttagtcgttaacatgctgttgtacactggttgatgttatgttatgaggaataaatattagcatatgttgtgtgttgtttacttgtttggatattaaactttggaacaacagcaaggagcataatgactgcttgtatgctgtaaaatgaacccgaggttaggcgtgtgaaaagagtttgcttcatgtaccttgattcatcaccttctgtctgctcaccaattgatgtagtaattgctccggaagtctccatggaagcaatgtatagatgtgcgtgagatttgttaatctgctgtgtggacgccgaattgtgactcaagggcattgtaatttggagccaattgcgactcaagtcgtttggcagagcttagtgaatctactgttaaactgtccacaagtacctgtggtggacatggatgatgttgtgcgctagctaatgttttgttatgaggaatatgagcaagcgagtgtgtgttggttacttgtttggatattaaactctggaacagcagcaaggagcataaaaaaaaagcaccccacgaaaaaaaaaaaaaaaaaagcggcc

SEQ ID NO: 139728 - DNA, 1507 bp, Zea mays
  Clone ID: MRT4577_58918C.1
cctcgaggccggccgagattggctacctcgaggccggccggggcgtcccgtccgccgtcaaacgtcatccgaatccgcgccgcgaccagcgaagaaggtaggaagcatccggaacggagacgcgcctcctgcctcgccttcctcccatggcgccgcccctcgccgccgtctcatcgtcgtcgcccctattctctccttcatcatcccgccccatccgccgctgccatgcacctcctccttctatctccttcggccgctcgcccacggcggcggcggcggcagcggcagcggcagctgaatcctctgtcagcactcttctcgaggtgcgcggactcaccgcatccgtgaaggagactgggcagcagatcctcgccggcgtcgacctcaccatccgcgagggcgagattcatgcgattatgggaaagaacggctctggcaagagcaccctcacaaaagttctcgtaggccatcctcattatgaggtaactggtggtaccattctcttcaagggtgaggacctggttgacatggagccagaggacagatctctagcaggccttttcatgagtttccaagcacctattgagattcctggagtcagcaattttgattttctgctcatggctgtgaatgctcgcagagaaaggagtggtctaccagcattggggccccttgagttttactcagttgtatcgcccaaagttgatgccttgaagatggacccaaagttccttgatcgcaatgtgaatgaaggttttagcggtggtgaaaggaagcgtaatgagatattgcagctttcagtcattggagcagatttagcccttcttgacgagatagattcagggttagatgttgatgcacttgaagatgttgctaatgcagtgaatgggctgttgacaccccaaaactctgttctgatgattacacattaccaacgtcttttggatctcattaagcccagttacgttcacatcatggaaaatggcaagataatcaagacgggtgacagttctattgccacacaaattaatgaaggcggcttcaaatctatcgcccttgtatagcgtgaaagcagcaggtcaaataacagaaatggctcgctgggcttgttcaccagccactaagcctacttgccaggacagaatgcctactgcttggggtttgcactgttgcctactgcattcagaggtgtaccacatacgaatttagtaaaaaaaaatgagttagtgctctgttcgactaggcatgttgtcttgcctcgtcgagggtggggagctggatacaccacctcctctatgtaagaatgtttggatgaaggtattgatacatgtagtcatacatagggatagcatgccgtgcgtgcatacaaggtccaaattttgtatgtttgaattatgacttattctcccaggcttctggctatcaaggctggtgctgcgtgcaacttttgtaacatttttagcacttcaccgatgttcagacctataaagcaattcagttgttctct

SEQ ID NO: 139729 - DNA, 467 bp, Zea mays
  Clone ID: MRT4577_58919C.1
gcacgaggcgtcgggtaaccagggccgtcaggctcagtccgctgcagcgcagcgccgaggatcggtgaggtaatttctcgtgaacgcattccgctatatattgactgctcgcccattcgagcagatggggggttttttttttttatttagctcgacacagtgaagaactgggggatgcacattgggcttgcttgtgttccgtctctctcaaacatcctgttggtgtgctgtgaaggtctgaaggtcacataatccacttggctatatgccggggtgggtaatgtgagtcgggcttgataaatgcaggcttgttaacttgttttgcaacaagaatgggggcaaaagtagaacgggaaagttatatgcctggatattatgcgacgggggatctcaatatggaaccaaatggtagatggtctccatactatgaggagatgacatcaaatgatcagttatgcaatggcttc

SEQ ID NO: 139730 - DNA, 1720 bp, Zea mays
  Clone ID: MRT4577_5891C.1
cgtcgagacctcgcgcaggcaggtcctatccctctggcctcgtctcgtcttctcttctcgcgaatggcggcgctgtgcgatctccgtcgctgccccctccgccagtgatttctgggacgcgcgacgaacacgagttggaaggaggtggtcgtgctttgggcggcgaaggacctgggcgctagcagcctcagaccctgacagatcacaacctgacagatcacagataatgggttcttgggaggagaatgttaggcaatttttgttggaggaggaggaagatgatgatgaactattctttgttattctccctgctataatcccatacctctcggaagagaaaagacccatccacacatcctccctcaccggtgctaaaaaggttaaagaaattcttgaagggcatgagagctggtgcaaatctgagtttagaatggaaaaggaaatattcaaagccacgtcaaattttcttagaagggagaatttactacgtgacacacgaggagttagtgttgagaagcaacttgggatgttcatgtatatgatctcccacaacgccagtaaccaaatgctacaaaaggcttttcaacacagtggagagactatccatcgaaaaatatctgaagtttttgagatagttcccatactaactcaacgatttgtgaagcttcctagctcagttcaaactcatgctaggattgcaacagattctaggttcatgcccttttttcagaattgccttggtgccattgacggcacacatgtatccatcactatcgcagaagatagggcccctccatatagaaatagaaaaggaactctttcacacaatgttatggtagtctgcgactttgatctcaattttacatttgtctcgtgtggatgggaagggtcggcatcagacgcaggggtgcttcgatctgctattagcaaaagatttagtgtgccagaaggaaagttttatcttgtagatggtgggtatgcaaatacaccatcatacattgcaccatacagaggtgttcgataccatctcagtcaatttaggaggagtcgttcatcacaaagtggttatgcaaactacaaagagttattcaatcatcgccatgcaattctccgcaaccatatagagagggccattggtgttcttaagaaaaggttcccaattctaaaagtagacacattccatcccatagaaaatcaaatcaagatcgcagctgcagccattacatttcacaacataattagagggcaaaatggtgatgaaggatggctggacaaccaactagattatatatctccaagccattacattggtgttacttggtacttgcagagtgctgagtggaagcaacatatgaagctgacacggaaaaggaaaatggatgatctccttggttatgtttccctgtcttgtgcatgctgcatttcctgctaccgtgaagaccggggtccaggagagtaggagactgaaagcactgtcgagaagactgaaattatcacattgacatgaagaccaaagccatctcttacctacttatctttgtagcttacgtttctattttattctgtcatgaaaactaaagtcttatgtatggtcattatgtactattttggttctgaaaatatttgtttatgttatgaaaactattggttgaaagaatggtgattacggttttggcttgataaattaagtcaaatattaaaaaaaatgacttactgaaaa

SEQ ID NO: 139731 - DNA, 1525 bp, Zea mays
  Clone ID: MRT4577_58920C.1
gacaaaatagaacgattggctacctcgaggccggccgggaccagtgtcgtcccagccgccgtcccgtccgccgtcaaacgtcatccgaatccgcgccgcgaccagcgaagaaggtaggaagcatccggaacggagacgcgcctcctgcctcgccttcctcccatggcgccgcccctcgccgccgtctcatcgtcgtcgcccctattctctccttcatcgtcccgccccatccgccgctgccacgcacctcctccttctatctccttccagacgcggggacgctcgcccacggcggcggcggcagctgagtcttctgtcagcacgcttctcgaggtgcgcggactcaccgcatccgtgaaggagactgggcagcagatcctcgccggcgtcgacctcaccatccgcgagggcgagattcatgcgattatggggaagaacggctccggcaagagcaccctcacaaaagttctcgttggccatcctcattatgaggtaactggtggtaccattctcttcaagggtgaggacctggttgacatggagccagaggacagatctctagcaggccttttcatgagtttccaagcacctattgagattcctggagtcagcaatttcgattttctgctcatggctgtgaatgctcgcagagaaaggagtggtctaccagcattggggccccttgagttttactcagttgtatcgcccaaagttgatgccttgaagatggacccaaagttccttgatcgcaatgtgaatgaaggttttagcggtggtgaaaggaagcgtaatgagatattgcagctttcagtcattggagcagatttagcccttcttgacgagatagattcagggttagatgttgatgcacttgaataatgttgctaatgccgtgaatgtgttgctaatgcagtgaatgtcgctgttgacacttcaaaactctgtacttatgattactcttttccaacgcatttaggatctcatcatggaaaatggcaagataatcaagacgggtgacagttctatcgccacacaaattaatgaaggcggcttcaaatctatcgcccttgtatagcgtgaaagcagtcaaataacagaaatggctcgctgggcttgttcaccagccactaagcctacttgccaggacagaatgcctactgcttggggtttgcactgttgcctactgcattcaggggtgtaccacatacgaatttagtaaaaaaaaaatgagttagtgctctgttcgactaggcatgttgtcttgcctcgtctgggtggggagctggatacaccacctcctctatgtaagaatgtttggatgaagatatttatacatgtagtcatacatagggatagcatgtcgtgcgtgcatacaatacatagggtttgtatgtttgaattatgacttattctcccaggcttctggctatcaaggctggtgctgcgtgcaacttttgtaacatttttagcacttcaccgatgttcagacctataaagcaattcagttgttctctaccggggttca

SEQ ID NO: 139732 - DNA, 357 bp, Zea mays
  Clone ID: MRT4577_58921C.1
cccacgcgtccgatatcttcaatgcaaaacctgtgtcgaacagttatgtagtcttggctggattaatcaaagggacaccgtaatttcttggagccaaaaaaaaaaaaaaaaaaaaaaaaaaaaaaaaaaaaaaaaaaaaaaaaaaaaaaaaaaaaaaaaaaaaaaaaataaaaaaaaaaaaaaaaaaaaaaaaaaaaaaaaaaaaaaaaaaaaaaaaaaaaaaaaaaaaaaaaaaaaagggtggccctttaaaaaagttcaaaattaacaaaccttaaattcaaagaaaaaagttttttaaaatggaaccaaaattaaaataaatggacctcatttaaaaaacttataaattggaaa

SEQ ID NO: 139733 - DNA, 1329 bp, Zea mays
  unsure (1)..(1329): unsure at all n locations
  Clone ID: MRT4577_58922C.1
cccacgcgtccgatttcatcgccgtatcatttgtcaagtctggtgggctaacgcatggtttgaagagttacattgctgcgaggagccgtggaagtgatataggggtcattgcaaagattgagagcatcgatgctttgaagaacctggaggagattatccgtgcatcagatggagtaatggtagccagaggggacttgggggcacaaatccccctggaacaggtcccttccatacagcaaagaatagttagaatgtgcagacagctcaacaagccagtcattgttgcttctcagcttctggaatcaatgatcgagtatcctacacctactagggctgaggttgctgatgtttctgaggcagtccgccagcgtgcagatgctctcatgctttctggtgagtcggccatggggaggtacccagagaaggctctcagcgtccttaggagtgttagcctgaggatcgaaaggtggtggagagaggagaagcgccaagaggcactggagcttcaaggtgtctcgtcttccttttctgataagatatcagaggaaatatgcaattcagcagctaaaatggccaacaacttaggagtcgacgccgttttcgtttacacgaaggatggctacatgggctccctgctctcacgatgccgccccgactgcccgatcttcgccttcacgtcttcgacgtccgtcaggagacggctgaacctccagtggggcctcatcccgttccggctgagcgagtccgacgacatggagagcaacctcaaccgcaccttctccctgctgaaggccaggggcatggtgcagtctggagacctggtgatcgcgctctccgacatgctgcagtccatccaagtggtgaatgtgccctaggaatacgatccccatgtccagctggttccttgacctggaatgtagcatacaattaggaggggcttctttttttgtttgtttgtttgtcatttgagtgtatcccagttcgtagcatgtttctgcctcatgttgaggctctctggatgtcgatattgatttgcgtcagtgtggtttaggttcggactcgaatgctcgatttgaaaattcgaacagaactcggtttgcatcagtgtcatgattagctcaaaccattgttctgtactatatcagaacgtgttactacttatcttagtgtcattcctcagtttcacttggttttttttaaaatgctcgatttgaacattcgatcagagcacggtctgcatcagtgtcaataattagctccatccgtttgttgtgtcctgnaaaaaataacnntttgttttaaggacgccaaactctaaaggatccaacc

SEQ ID NO: 139734 - DNA, 339 bp, Zea mays
  Clone ID: MRT4577_58923C.1
aaatataccaccccgaaagcggacccgggggtcgtccctggaaattcgaaccggcacccgcagaggaagcaccttttcctcaaatgagggcaaaaaaagaaacggggcaaaaaatagggaatgggggaacccgggagaaaatgataggccataacactttcacaaaacattcccatgcagaaccctaaagtggaaaaaactggggcgcctaaagaggggagccactcacattaactggggtgggcacaaaagccggtttgcctcccacaaaaccattttgacgcctggataaaagaaattgacaaacccccgggaaaaagggggtatataatggcagcc

SEQ ID NO: 139735 - DNA, 346 bp, Zea mays
  Clone ID: MRT4577_58924C.1
cttccgaagacatcactctcgatgatcaaagctatgacacaaaccacaacgcgaaagccaagagtgacgacaaggtaggtatcctgtcacaccatcaaagtttcatcttcagcacaaagcaactctattactgacagacaccacccgatactaaccgcatacggaatatattcctcctccgtttctatctcttccacgtgggaagcacatctcattgaagactcctactgatacaaccattattatacaagtccagaactcggtatccagtgataacgggaaagccaacattccggaccttagaacaatttgcaccagatcagcaacagctgattattgctgggaa

SEQ ID NO: 139736 - DNA, 318 bp, Zea mays
  Clone ID: MRT4577_58925C.1
cggagcgctggcgtgacgcgtgggccgcccgtcgctcgcacgcgccgaccgccgccgccaggtgccacggagtcgtggacagtctgcttcggcgaggagcacccgccgagccatatctctgcaatgggtgactacgcgatccagatgagcgccaggctcattgaccagcttgctcgtgaggacgaggaggtgagacggaaagccgagaagcgcaagcctaagaagaagcgcaccgtgcagccgcatgaagagcccctggaattcccgagaggaccaaagacgacagaccttgctagtgctcgctggtggcctctgcag

SEQ ID NO: 139737 - DNA, 368 bp, Zea mays
  Clone ID: MRT4577_58926C.1
ggatctggaacctagggtttggtttggtggttttggtcctccgcaaaaatcccgaaaaccagggttaggggaggcaagacccggaagcggggaaggaccaaggttgccaacaccaggcccaagttcgttttaaaggaaaacggccaggattccccccaggtaacccggttgttcggaaccggccggggcagggccatttgcgtcaatggacccccccgcttttgccatatccggggtaagatgcacaaaagggtttggatcggggttgggaacattgtcctcgtgggcctccgggattaccaggacaacagggccgacgttatcctaaagtccatgaacgacgaggcccccttgttaaaggcctacgg

SEQ ID NO: 139738 - DNA, 744 bp, Zea mays
  Clone ID: MRT4577_58927C.1
ctaggggccgcttttttttttttttttttgcatttcaatatttttttcttcttcaatattttcctgacacactaactatgtgatgaacagatacagaatcaactcccggggttctcggcgaaggattcgactgtcaatgagcagtctccagcagcactgccatcctaccatccactggctaggactatcatccttggcttcagcaagggtggagtggtggtgaaccagctcgtgacggaactttctcgctggggggcatcaggatcaacgacccccggcggcggccgacgttccacgaccagcagcagcaggtccacgtccaccaccccatccgacccagagccaccttctcctggctcctactcggagcagcgacgacctgctgtcgagtatctccgagctccactacgtggacgccggcctcaaccgcgccggatcgtacgtggccgaccgcgcggtgatcgggaggatacgcgagcacgtcgtgcggcgcgccggtgacaagacccgcctccgcttcgccctccatggtaccccgaggcagtggtgtgatccgagccgcccgtggatccgggaggagaaggacgccatggtccaggtacttgcggacgaggctcgcaggagcgaggggaggcttgtgctgtctgagaagctgtatttcgagggcagacctcgcagcctgctcatgcattttgaggtcttggaagcgatggatatataatgtaatgtaagctctgatcgagg

SEQ ID NO: 139739 - DNA, 466 bp, Zea mays
  unsure (1)..(466): unsure at all n locations
  Clone ID: MRT4577_58928C.1
ggttagtggacaatccaaggttgactccaaaggcccttcaacagaggataaaagatgagttcaagcaccaagaatggttttccctgatcttggcctcacacctccagttacaaagaagagaaagagctcatccactacatcaatggctgccaagaagaagaagagctcagccatgtctgttagatctggacaaggctccaaccagccagaccctatgcctttgtctatcatgatgccatcaatggaggttgcagacaaggaagagaatcaagaaacaaaaaaagaggtggcaggacatgggaagaaaaataagagagagccagaagtcatcggatctcctgcaatgggaactagaagcaaagccagttgcagtggcagtcctgccatgggaactagaagcaaaagaaagctcaatgtctaattggaactaagtagtcttttgtactatnttttgggtctacttgac

SEQ ID NO: 139740 - DNA, 1263 bp, Zea mays
  Clone ID: MRT4577_58929C.1
ggtcgcctgcagtaccggtcggaatccgggtcgaacaagcgtccgctctccctccaggcctctccactcccggcaacctcgccgccggggccatggaccggtggaccggcgtcgtctacgtcccactctccagaggcggacccctcttccgcgtcgctgcctcgctcctcctctcgccagccaaaacgctcgccactcgcctacggagcctgaactattccgatggaagcaggttccacgagtcaacgcgatccttttcacgggcgaccgcgtccgcggcacgggcgatccggtgatcgagcggctctctgacgccgcccacctggctggggtcctcgccgggaagctccctggggaggccaacgcgtgggtggtcgacgccgcgcgctttgctgggccgtttgcggtgtaccgagagctcgttccgaccgtcgacgccgctggagaccccaaggggtatgaccccactggcttccccgccgccgccggtgttgccaacatccttgcacgcagcattggtgagatacagaatcaagtcccggggttgtcggcgaaggattcggctggcaaccagcaccctccatcctaccatccaccggctaggactatcatccttggcttcagcaagggtggagtggtggtgaaccagctcgtgacggaactttctcggtggggggcatcaggatcaacgaaccaggcggcggcggccgacgttccacgaccagcagcagcaggtccaggtccaccaccccatccgacccagaacgaccttcttctcctgggggctcctactcggagcagcgacgacctgctgtcaagtatctccgagctccactacgtggacgccggcctcaaccgcgccggagcgtacgtggccgaccgcgcggtgatcgggaggatacgcgagcacgtcgtacgcgccggcgacaagagcctccgcttcgccctccacggtaccccgaggcagtggtgtgatccgagccgcccgtggatccgggaggagaaggacgcgatggtccgaaacctgagatgcgcaagtaagctgagcgaggggaggcttgtgctgtctgagaagctgtatttcgagggcagacctcgcagcctgctcatgcattttgaggtcttggaagcgatggatatataatgtaatgtaagctgatactcgataggtctgataagcgatggatatataaattgttgtcccctgcttaacaaaaaagaaaaaaaaaacaacaaaaaaataaaaaaaaaaaaaacaaataa

SEQ ID NO: 139741 - DNA, 215 bp, Zea mays
  Clone ID: MRT4577_5892C.1
cccacacatccaaatatatatcatattaacatgctggacaattgtataccatactttcatggaagccatggtaatggagttagtgacattctcacctccatacaccacccacataatagcacgtaccatccttttaatatcccacaccttacccaaaacgtcaacactaccatcaccacatataatacaattcaaacacatttacaacttaacaa

SEQ ID NO: 139742 - DNA, 322 bp, Zea mays
  unsure (1)..(322): unsure at all n locations
  Clone ID: MRT4577_58930C.1
tttttgccgttttttttacaanccctttttttttttttttttttttaaaaaaaaccttccttcggtaaaatcaaatgggaaacccaggggtgggccccctggttggtgttaagctaattggaaagggcggaaaaaaaaaccttggcgttaaaccccaattcattttaaacccgttggtttccccccctaagggggtcaaaagaaaaacactttttttaaggttaaattggtttccctggccatttaaggggcaaaaaaaatacttggggtttttggaaaaacgggggatttttttttcccccggggggggaccccctttttt

SEQ ID NO: 139743 - DNA, 183 bp, Zea mays
  Clone ID: MRT4577_58931C.1
tagttctgcagttaacaatcgctcctcagatatcaacaaaaagattcgcacagcacttgggaaaggtaagaaaattgtttttcttaccagagttgatccttttccagtagctttactggctgttctttttggcgttaagagtgaaattctgagttctaacgccactaaccctatgctgacgcg

SEQ ID NO: 139744 - DNA, 661 bp, Zea mays
  Clone ID: MRT4577_58932C.1
tttttttttttttttttgacccatcaggaaaatatcatctcaaattatcatcagagcacggtgtcgaggtcaatcggggaaccaagcaaagctatggacactgatatcgagttacccctccctggaaatataataaggatggacttgccaagctacatctacatgctaccaattcccacaggttcagtcggttttttcccaacaatcattcatgaaaatacacggttttcctatgtaccttcatcccattgattaaggcatgcgtgtattttaagaagtctaaccttttaaatctttgactaacaattatagagtggaaacatagtctggtgatacattaataaatcaatttccacgcttcatcctatcaatttgagataaacttatatctagattttagaaagtggtggaatgtcaaaattccaagctaaatagcctactctattaagtagatcctaattcctccaaaataaaggaatccaaacggcccctaaagagagtccgaacttaggtggtctagacattcgtttatacactgccattttctgcctaacaataaccgttagtttctctccaaggaaatccgtcgaacatgaaacaagcatggcggtgcagcctcgcacagggcatggcacagccgtcaacagcattcgcagtgcac

SEQ ID NO: 139745 - DNA, 379 bp, Zea mays
  Clone ID: MRT4577_58933C.1
gaagcacttgaacacacacatgtgtcctcgtctgccacctagtggggtaatcatttcaaatcctgtgctcggctgaattgacatacgcacccttctatacctcccaaatgattattccttgcgaaccaccaaactagccctgggagcaggatgcctaggcactgcacattgaagggaaccacggagggggaagtggactaacgtgtccacagatgccaatttgaacatgacgttctgcaggatgcctccacggactgagctctcctgctcaacctgagagactagggcacagatgcatgtgaaagatttactcatggagcattggaacaaccacatgctggccggtgcggatctatctgaagatggtgtggaatataat

SEQ ID NO: 139746 - DNA, 307 bp, Zea mays
  Clone ID: MRT4577_58934C.1
gcggaattcggctcgaggcgcctctcaaacgtctgggttctgcttttgactgtgaaccacaacactacgggggcggggctgatttttacggcggtggggtctatacctaagccggccctcattcacctgtttaacaccatgaacaggccttacaacatgaaactacatgtccgcaacaggttcataaagcacaactgccaagagctcactccctgaggggctgaactcccttaagggttttgtagcctataacaaacctttagtcaacatcacccgagagactcttgagcacaccaacaccctcaag

SEQ ID NO: 139747 - DNA, 271 bp, Zea mays
  Clone ID: MRT4577_58935C.1
gttcctacatttgttcttttttttttttgtatttaacagtttaggcaggtgaaacaaaacacctggaatttaacgacacatcggttacttttacaactttccccgggacctagtttttttttaatttcttgcccttcccaaccaaaaaaatttggcccgtcctcccagatactgcatgaaaagggccccggggccaatctgtgtaaatttttcaaagccgcgctttccaaaaaattgggacactggtcaacgaataggggttggtggggaa

SEQ ID NO: 139748 - DNA, 281 bp, Zea mays
  Clone ID: MRT4577_58936C.1
gaggagaaaaaaaaaaaagttctttccttcataagggtttttaaaaccagaaaaacaggtttaaacaaggggccggaatcccccctacccttaaaaattatgttggccaaaataaaattaggttggttaaacccaaacgtggggaatgcctttccaaccgtaaattggtcttaaacaacgggcttgaggaaaagctttccaagaacacccttttaaaaatttttatggttacccaggaatttttggttgccacccttagggaaaattgtcccccccctttt

SEQ ID NO: 139749 - DNA, 823 bp, Zea mays
  unsure (1)..(823): unsure at all n locations
  Clone ID: MRT4577_58937C.1
ccggccgggaccacaccatcgtcctctcctttgccagcgccgccgaacccgccccagccttctcccatcctcgaagcacggaaggctcccagaaggagctctcacctcgcagccatctctggcacgtccgtccttcttctccctcggtccctccccttctccacagctatcggattggcgttggagtggagatcgacccgggctcggaattcccttcgttgttaattttctaggaagattggggtttcagctcaaactcccatgctcgacgctgaggacgaccctggcgggagatgacgaggatcttcgtgcagcgcgggaccgccggctcctcgtccagctccggccgctcggacacgcagccagtgcagccggcagcagctgcccgggaggaggagttgccgctgcaacctcaaccacagctgccggagctattggccatagatgatacaactgataatttaaatgagggcagcgagaatatcagcaataagcctttgaggacggatgacaccatttcagagagctcaagctccgcagaggagagggctgccagggagaagcctcttaaggatgactctaatgtaatcaaccccactttcttagtagaggaacctgtagggatccagatccctgatcagattgagcatgaaaattctgtgctgtcagtcactggttcatcacagatggcaggtgcagcatcgcacccaccaccaccgncagctccacctccaaaaccattgttggggaataatggcttgcggagaatggggccctggaagttcgaatagtgtgcggattggatcttcagaaggccagtagc

SEQ ID NO: 139750 - DNA, 2463 bp, Zea mays
  Clone ID: MRT4577_58938C.1
cttaaatgcggacccgggcgacctcgggcacacccaccatcgtcctctcctttgccagcgccgccgaacccgccaccagccttctcccatcctcgaagcacggaaggctcccagaaggagctctcacctcgcagccatctctggcacgtccgtccttcttctccctcggtccctccccttctccacagctatcggattggcgttggagtggagatcgacccgggctcggaattcccttcgttggtaaggaaccctaatttggtcagatgggatttccaacttcgacaaagcccgcgaggtcgatcgatctcagttgacgcgagggattggaaaactaagttgcgggtgtagttaattttctaggaagattggggtttcagctcaaactcccatgctcgacgctgaggacgaccctggcgggagatgacgaggatcttcgtgcagcgcgggaccgccggctcctcgtccagctccggccgctcgggcacgcagccagtgcagccggcagcagctgcccgggaggaggagttgccgctgcaacctcaaccacagctgccggagctattggccatagatgatacaactgataatttaaatgagggcagcgagaatatcagcaataagcctttgaggacggatgacaccatttcagagagctcaagctccgcagaggagagggctgccagggagaagcctcttaaggatgactctaatgtaatcaaccccactttcttagtagaggaacctgtagggatccagatccctgatcagattgagcatgaaaattctgtgctgtcagtcactggttcatcacagatggcaggtgcagcatcgcacccaccaccaccgccagctccacctccaaaaccattgttggggaataatggcttgcggagaatggggcctggaagttcgaatagtgtgcggattggatcttcaagaaggccagtagcttggccactagtggcagcccggacatctgcttcaggttctcggccttcttcacctaggtcacttgttgatggggaaggttacaacagtgctgatgaacagggcccctgttatgccttgagttatgatgattcggaaagggagcgtatgtttgaccatgacctaaggcgagtgaaagggttggaaatcagaaagatggccgaagatgggaactgtctattcagagctgttgctgatcaagtttatggagacgcagaagcttatgacatggctaggcagatgtgtgttgattatatggaaagggaacgggatcatttctctcagttcataactgaaattgaaagttttacattatactgtaagaggaaaaggagagataaggtttatggcaacaatgttgagatccaggcatttgcagagatgtacaatcgtcccattcacatatattcctacagtacagagcccattaatatttttcaaggaagctataacacagacgttcctccaattagattaagttaccatcatggtaatcattacaattcagtggttgatccccgacggcagacagttggggcaggacttggatttagctcccttagagggacaaataatgttgacagggaccaggtgaaggctgcaataaaagctcagcaagaccagcaaattgagaatgcacttttagcagaagggcgattctactctgatctggagttaacagagagggaaatagaacggatggtgatggagtcctctcgttcagaatatctcgccaaggagaaaaagcttaacattcgggagtcatcgacatcaagggcagagccatcttcatccgccgcaattagtggttcctcccgttcagttgctggagctgatagaggcaaagaggactactttgtgcttccagatactgcactgactcgcagcatgcagttgctcctcgcaatgggcttcagctacatccaggtcatggaggcctacagcatattcggcgaggacgtggactcgatggtctgctacctgttggagacaggaggcaccggagcctcagcgggcggtagcaatcgccggaaaggaaaggctgctgagtgatctgcacaccttcattgctgtggatgtaatcgttgatcgaaatcgttgggcatgaggaagcataccagataatgacagccttgtgagttgatatgtcgatatacctgctaccttttgggtgatgaataaatggtactcacacttgagacttaaaaaaaaaaaaaaaaatgggcacaactcataccagataatgacagccttatgagttgagatgtcgatatacctgctaccttatgggtgatgaataaatggaactcacaactcttctcgatgccttctggtgatcaagttaaataattaatgatagttggtggttgggattctgggaaaatttgtgggtcaccctggtgctcattgtgatttttgtgggaaccgcgaagctcgtggtgtggtgtatgtggagtgtgaacattatctata

SEQ ID NO: 139751 - DNA, 482 bp, Zea mays
  Clone ID: MRT4577_58939C.1
aatgagcagaaaaacgcacgagagccgccacaggaacactgaaggaaaaacagcacggagacccgacaccggctggccagcccagcatggagcaacggaaagccagcaacgaagcaccggaggactcgaggaagaatagcctagaaggaccgggccgaataccgagagatggatccaacagaacacaggccccagaagacgacaaggggggcaacacagagccaaacggacaaaaccgagggcgaaaacacaagcggacactgggccaaggagaggcagaaagcagcgagcaaaccaaagacaaacccgcgcaagttacaacgaaaaccgaggcaaaaaaaaatgccggaaaagccacataaaatgaaagcgcggagacaaaaaagagcaacgaaagcacaagcgggaaacgagggccggcaaaaaaaacccgggccggacaaggcccaccgcaaaacaacaaaagaaaggcggcctaaaca

SEQ ID NO: 139752 - DNA, 652 bp, Zea mays
  Clone ID: MRT4577_5893C.1
cccagcgtccgcccagcgtccgcccagcgtccgcccacgcgtccgcccacgcgtccgctagttctagatcgcgagcgatctagaactagtctatccctctggcctcgtctcgtcttctcttctcgcgaatggcggcgctgtgcgatctccgtcgctgccccctccgccagtgatttctgggacgcgcgacgaacacgagttggaaggaggtggtcgtgctttgggcggcgaaggacctgggcgctagcagcctcagaccctgacagatcacaacctgacagatcacagagtgctgagtggaagcaacatatgaagctgacacggaaaaggaaaatggatgatctccttggttatgtttccctgtcttgtgcatgctgcatttcctgctaccgtgaagaccggggtccaggagagtaggagactgaaagcactgtcgagaagactgaaattatcacattgacatgaagaccaaagccatctcttacctacttatctttgtagcttacgtttctattttattctgtcatgaaaactaaagtcttatgtatggtcattatgtactattttggttctgaaaatatttgtttatgttatgaaaactattggttgaaagaatggtgattacggttttggcttgaaggttcagaagtga

SEQ ID NO: 139753 - DNA, 464 bp, Zea mays
  Clone ID: MRT4577_58940C.1
cccacgcgtccggtgatatcaggagaaacaactgttcactgtcaacaatgcttcacaataagatgctggcaaggacgaacagattcaaaccaattatttagcgaacagagttcaatcattttttttgaccatccagtcttttggttcacaaaaggtttctctgggagcaaaccatcgatgttactttttccagcgtgcatatgtatttatgctgggtaactcaaaacagtatctggcctttgcgtaccagattaggttttgttcggttattcctatcttcatgtggattgtatgagattggaaggaattatgagagatgttgacttgtttaggatttaaatcatccaataatccacataattcaagtttcgttggtgttaaaaaaaaaaaaaaaaaaaaaaaaaaaaaaaaaaaaaaaaaaaaaaaaaaaaaaaaaaaaaaaaaaaaaaaaaaagggggcggcc

SEQ ID NO: 139754 - DNA, 1425 bp, Zea mays
  Clone ID: MRT4577_58941C.1
gacccccgaggctggccggagtaaaagtgtagttacctttgcagcttctgttgaagcctgcattggtgcaaagcaggaaagcataaaacttgccaattccccaatgcatgacaccaagagtgcatattcatcctcgtgtccaacagggcgcatctcattcaagttgtatgattggaatcctgcagaattgcctcgacgactacgacaccagatcttcgaatggttgggtagcatgcctgttgaattggagggctacattcgtccgggttgtactattttaacagttgtgttctgaactagagaggatacatgatgctctttgtggttcttacagtgaaaataatgtacttggtgagttactcagtgcttcttctgatcctcatgagcaccggaaactttgtagttctgtgatgtctggattcctgatcgacattggatggcttatcagaaagcctactcctgacgaatttaaaagtgtgctgagttcaacaaatatacagagatggatatgcatgttgaagtttttgatacagaatgatttcatcaatgttctggagataatcgtgaagtcaatggacagcatcatgggttcagaggttctttcaaacttggaaagggggaggttggaagatcatgtaacagcatttcttggatatgtaagccatgctcggaatattgctgatcgtagagctaaccatgacgagaaaacacagattgaaacaagaggcattattgttacttctccaaatcagccaaacttaggcgcctcagtgccatttgctagtgaaaacactgactttggaggggataacaaattgaactcaactgatgaggaagaaattatgccacttgtgactagagatgtctcacaccggcactgctgccagcctgatacgactgttaggtggcttaagccctcactgattgttacttatcctggtggtgccacgagaatgcgacttgttacgactgtggcggttgcggctgttttgtgtttcacagcttgtcttgttcttttccatccgcatggggtaggggtgcttgcagctccagtgaagaggtacttgtcgagtgactccgcatcgtagttgatgttatagatcagatattctattttgccgtgccgctctgctctgtctgtatcatttgcgctttgttaaggcatagcttgtgtatctgatttttttgtaagggaaccaacacgcaggtgcttttcatctgtgcaaaactggcatcttttgtttttttcagactgtaagtataggcgccggaagctctgacctgctaatgtttgggcatgtaaacttctaatgtagtgcatcagttaatggaaaatagctgcattgctgcaaaaaaaaaaaaaaaaaagaactgttggcatacaatacaattgtgctgtttctcgctgctgcgggttttactggc

SEQ ID NO: 139755 - DNA, 642 bp, Zea mays
  unsure (1)..(642): unsure at all n locations
  Clone ID: MRT4577_58942C.1
tccgcgcatccgcatgcgcatccgacacgctcccagctctagcagtcccggctttccctgctcgcctcgcagccgccgccgccgccagccatgggtcgcaccaaggacgagctcctcgcgcgcctcgaggagcttaagatcgatttcaagcgctacgaccacccggttgtgctgacggtcgaggagcaggccaaacatgtgggaaatttcggaggcgcgttgactaagaatctacttctgaaggacaagaagcaccggttgtatatcgtttctgcacttgctgacaccaaagttgacatgaaaattctgtcccagcgtcttggtttgggaaaaggtggcgtgcggatggctcctgaggagaatttgtgtcaagtgcttcaggtaccgttaggatgtgttactccgtttgcgctattcaatgagtccgcgagtgccgtctcattattactggaccaagggttcaagtctaaacagagctgctacttccatccactgacaaatgatgtgactattgccctcagttcaagcaacctggacaagtttctcctctccattgggaagcaaccagtttatgtagacttggaggnctcaccagtggtaggtaaagataatccccctgatctagcagatcttgtgccttct

SEQ ID NO: 139756 - DNA, 530 bp, Zea mays
  Clone ID: MRT4577_58943C.1
acccgtaaccgccgtcgcctctccactttcgtctctctcactcactctccccctccgccgccggcgcagcgtcctccccgcgactccgatggccagcaagtgggtcaggcccgaggtgtacccgctgttcgcggcgacgggcgtcgccatcggcatctgcgccttcagcctcctccgcaacatcaccggcaacccagaagtcagggtcaacaagatggggagggcagcgggagtgcttgagaaccatgaggagggcaggcgctacgccgagcacggtctcagagcctatgtgcaggacaagacccccgagatcatgccaggaatcaacaagttcttcaccagcccgaaatgaagcactttagtctctctgtggctcgctattagcaactgttgtagtcaagtgcaaacctatttcaagcattcagtagtgttgtcgcgtccataattcagaggatatcataaagtacctcttattgaaagaaccatgtgatgtttgatggcttgctatatatgtgatggttgatggcttt

SEQ ID NO: 139757 - DNA, 318 bp, Zea mays
  Clone ID: MRT4577_58944C.1
ggggggggtttttttttttttgggtttttttaaaacaaaatggccttttttttcccacaaagaaaaccagggcggggtacataatcacacaggggcaggacgttcatatactcataccatctcggggccaaaaaccggaccctgctttagagcacctttattttattttgtatgaaaacaaaaaagaaggggaaggaaaacccaatctccggacacaatacccttggatatccaaacaagccggaggggaaatgaatgtcatcccagtccaatgtgttaattgttggcctcgggggtggcgacaaggaaagccgcacc

SEQ ID NO: 139758 - DNA, 1427 bp, Zea mays
  Clone ID: MRT4577_58946C.1
catcttcttcttccccgcgctgcctgctgcctgctcgagcttggagatggcgttggtgcggcgatgcctctgtggatccgaggaagactgcagagcgcttttgggcatggaaaatctccggctgttctcctacagagagatcagagcaggcacaaacaacttcgatcagagtaacaagcttggacgaggtggttttggaactgtctacaagggagttctaagagacggcactgaatttgccgcgaaggttctgtcctcggaatccgagcaggggatcaaggagttcctagctgagatcgagagcatatcccaggtgaagcacgcgaacctcgtcaggcttctgggctgctgcgtacagaggaaaaaaaggatactggtgtacgagtaccttgcgaacaacagcctcgatcatgcgctcaaaggagcagcagcagatctaccctggagcacgaggtcgggcatctgcttgggcaccgccaaggggctgagctacctgcacgaggagcacgagccgaacatcgtgcacagggacatcaaagccagcaatgttcttctcgaccgagactacctgccaaagatcggagatttcgggctcgcgaagctgttcccggacaacatcacccacatcagcaccgcagtggtcggaacgagtggatacttggcgcctgaatacttcgtgcatgggcagctgaccaagaaagccgacgtctacagcttcggggtgcttgtcctggagatcgtcagcgggaggagggtctcgcaaacgatccagtcggacatgttcccggtgcgagaggcatggatgatgtaccagcaaggcaggctgctagagatcgtggacgcgagcatggggagctacccggagaaggaggtgctccggtacatcaaggtggggctggcctgcacgcaggccacgcccagcagccgccccacgatgcgccaggtgcttgccttgctgtcggaacggagatgctcccgccgagtttcgccgagcaccgcggccaccacacggcccctgccctggggggtttgcccgccggtccgctaatccatgcgtcgccgagggcgaggtggccggcggcggcgccgtcagcagcaacgtcgccgaagcaggtcctgagcctgaacgcgcaaccggcaatccggcatgtaactgaaactgatatagtcacgtgtgaggcggcgttcgttctgtcacgtaatcacttgcgttagaatttgattttctagtcttgttcgtgctcgcagtttggaccgggaaaaaagggtaggaggggctaggcaggtccataaacgagcatattgtttttaatctcaatccatatgagttagagaggattgagaatctgttcattttaatctcaattcatgtggattgaaagaaattgagtagatttaaatctctaacaactcaaattttttttctg

SEQ ID NO: 139759 - DNA, 489 bp, Zea mays
  unsure (1)..(489): unsure at all n locations
  Clone ID: MRT4577_58947C.1
ccactttttcttncccccgtttttaaccatataaggagaccnncaaagcncaggacacacacggacagggggacaaaaagggccaaaacgctcacccacgcacacagcgggggacaaataacagaaaacccccatcacagaagcaccggcagcaaaaactaaagagatgacgaaaaggcggcacgacaaccaacagaggaccgggaagagcctagtcgagcaccgggagagaggcgccggtggcggcgccaccagccgcggaggcagcgacgccgacggcagaaaacaggccctaaacccagacggcggcgcggccccgggccaagcgggccaggaacgccaagcggacccggtcgagcagcagccgagggacgaccaccagggaggggaggacgcccacgaccacggtggagccgaacacccgcgcgcgggtgacccgcacaagcgtggaagacccagcggcggcggcagaccagcaccacacccccc

SEQ ID NO: 139760 - DNA, 628 bp, Zea mays
  Clone ID: MRT4577_58948C.1
atacttcctcatctgcaagtcactaggatctgttggcatagctatgtattattcaaggaccaccatttcctaaatggtgttttcaatagctatgtattatttagttttgatcatgactacattgataatatagctagctagaataatgtgagtaagtgttgtgtcaccttgaaccatattagtataggtttgtgatgcttttttgcattttcaccttttcagttctatgaacacaatgataataagatgagctacccagcaatggctcaacttctgtcaaatatactctactacaagagaaattgattgggataacatctctactactatgaagaatctaaggggtaggatgtctcccctggttcaattgaaagtagatgagaagagtaaggaacacaaaaaatacctaaggaggatgttgtatacctaaaagttggattgcaacttgagtatgataggggaactacgatggggaacagttggagtaatgatgctggtactaaaattttttctatgcctgatgatgagtacatatcagaagatacaattggtggttatgataagctaaatcctgtaaatccaaacttctatttaacatgactctctttatttccactttacatgaaaa

SEQ ID NO: 139761 - DNA, 698 bp, Zea mays
  Clone ID: MRT4577_58949C.1
attctccaccagagagatcgagctcaagccctcgacctctcctcaaacacgagtcgtctatatcaatcacctgtatcgccgattcgtgcacgtggaagcgataagacacgtgatggagaggaccaaggaggagttgctgcgaatgcacaaccacctcctggacatttccgtgggcttcgacgaatccttcgtgatcgacgatgacgttagactgaagaatgctatactcgatgacgacaacgcttgcgtatgcatgacccttcgcctaatccgagccgagactgagatactgccgagaggagccacccgcaattctacgacgcatgcgcgaggtctgcgtcacgctcatgttgagagaagtcacagtgacaagcattgggaggggcagatgagtcgaccaaacgcacaacaaacgtcaagctggacgaggtactgatcatgactacgaggatcgagactgcctcgtactggcacatgtgatgcatgtggagcttggcgccgcaaagtgagttgagtgcatacctgctatcggtgacaggccacacgtccggggaatcaccgagagcatacaactggacactaactgaacgggcacgatacgtctagatggctggatttttccttacagtgtgcgctgagtctgatccagctagtcgctgagcatgctgcagcatgtaacaaggagtgccctgatgaac

SEQ ID NO: 139762 - DNA, 402 bp, Zea mays
  unsure (1)..(402): unsure at all n locations
  Clone ID: MRT4577_5894C.1
aaggacactcaattcttaattatgtttgatctgcacttacaaaagctattaatacaaggctgatttacacttacaaccatcaggtaaacatgccaagtaaccaaataaaatttgagcatgtcttctcaacttattgagttgctagcagtaaggataatggcaagatcaccaggagtatttagaactaaacttacaacatctgcaaaggtcccataagaaagcatgaaacttcttggcaaaatagtccaacaaactcaatgaaacttgtccatacagttttgaactttcagtgcatctgtaaatatatgttaactttgagaggtagtcatcttcctgaagtccctcngcgtcggctccctgtcgttgttgtgtcggctgggttgctccccnnggtggcttggt

SEQ ID NO: 139763 - DNA, 314 bp, Zea mays
  Clone ID: MRT4577_58950C.1
gccacgcatgctgggcaccagactgtacggtggtgcaccgtacagcgtacgatggtgcacgggacagtgatctgagcgccagggcgtcttgtgccaagaggccgctctcgggactgtctactgcgacttcgggtaaaattcaccggactgtccggagtgcaccggactgtccggtgagccaactgtctgtcaggccaactgacggacgggtgatctgcgcgcgacacgtggccatgccaacggtcagagggaagcaccggactgttcagtgtgcaccggactggccggtgcgccagatctgcaacggtcgggaa

SEQ ID NO: 139764 - DNA, 371 bp, Zea mays
  Clone ID: MRT4577_58951C.1
aaaaagatgtgaacatatttttatctgcccttcctagccgggggaatgacaatttcagtccccaatgatatagttagcattaacattcttcgtatgttactgctaacaacaacgaaatgcagctgccgttcgacgtgggtgtcagtgatctagatcgaaggaaaacaacgaagcattgatttgccaaattactgggggggaatggattactgatgttgctaacttttaatcccctggtcccaaacaagccctaagtgctggcagctaccccattgggaggttgtgaccgggctttctggcattaagtggcatttgggccctgggtgaaaacaagtcctttaacattttgtccaaagaattctttgcttacg

SEQ ID NO: 139765 - DNA, 466 bp, Zea mays
  Clone ID: MRT4577_58952C.1
ttttgggattgcaacgagatgtggttttttttttgtgggggacgcaaacaccaccaacctcgttatttatttttttttgacaaagacgggccctaatatttttttaaaaaaaaggctgaccaaccaaatgtggtattcgggggaaccgacaataactttaggaactttctaaaacttgggggtcggtaaagattagagggacggcttttttttcccctccaaaaacgaaattcgaaaaaaatgtcctgggggggggctgaggctaaacacttaccccaggggacaatcttcccgcgttgggtgttgcccttcaaccacttcaaaaacacgatgttggtgccaatccgcacaccgccggggacctttgctcctgggaagggggtaaaaatacggaaaaatttgttgaccatgcgaacccctctgaagccggggcctacataacattttttcgtacacacaaaccact

SEQ ID NO: 139766 - DNA, 669 bp, Zea mays
  unsure (1)..(669): unsure at all n locations
  Clone ID: MRT4577_58953C.1
ggtaccggcgccctctcctcgagtttttttttttttttttttttttttttttttttttttttttttttttttttttttttttttttccaacacattttggggggttttttttttttttttgccctaaaggacttgggaaaattaacaggaggcccgggggttttaatcgccataaatttaacccgttgaaaaaaaaggatacaagggccatttccgaaacagttaatgcttttacggagaatccttttaaaaccccgggggaaggggaaccccctaaaaacaaacattgggccaacccatgtttttttttgatctcaaaaccaaactttttatttgacacaaaaattttttcccacatgggtaaacctgtaaacaaaaagccttgtccccaaaccagggggccccagaaaacaacccggttaaaggaactttactaaactttttccataaaaaacatatggggggaaggaaaaatttgaaaaaagagatttttttttttttggccatccccagttagaggggatactggggcctttgaaaccccctaaaaggaggggtttttttgggaacaaaagcccttctcattctcgaaaggttcaaaaaattccatcactatggggncctgcccaaggacatccaaagggggcttggtcgcctgttccccatcca

SEQ ID NO: 139767 - DNA, 255 bp, Zea mays
  unsure (1)..(255): unsure at all n locations
  Clone ID: MRT4577_58954C.1
gagagcgtggcggtgaggcggcgacgacggggagggaggaggaggcnctntcnnangcctcntcnatcttcncnncttcttcctacatctcctccatcnncnataactcctcntcccacaaccanttcacccactttataactacattctataatccaactcacaattcctcancattatnccctcctccattccttcaacnatcccctccccatcaacatanaacctttcatctctaacctcaccnatccccac

SEQ ID NO: 139768 - DNA, 558 bp, Zea mays
  Clone ID: MRT4577_58955C.1
tctatcaaggagtattggtttcccgaagcttgagaccgacataagccgctaccgacgacggcatcttgtcggtagcttattctattctaatttcaaggtaaaaacttttcttcgactttttattgttttgaacaacgaaggtgttttctaacgaaggttgcttgtgcacagagtatgctgttgagtaaagctttgagaatgcaacaagatcttgaagataaaaaacatgaagttataattgagggtttagaaagcaaattaaaagatcaagcagctgcccctgaaaagaaggatttcgagcttcaaacaacagaaggtttattggcagaagctaaagctaaaattgcaaagttaaatacagagcttctctcaaagtcagaaagcttcgaacaggaaaagtagaagttaaatgccaaatttaagactgaggtcgaaaaaagttcgaatctgcaaaaatcattgacagagcttcagaacaaatgtctggagttgagtagccgatgtgtgcaacggctgaagcagatcttcaattcagttggagccagttgtgaaaaattt

SEQ ID NO: 139769 - DNA, 352 bp, Zea mays
  Clone ID: MRT4577_58956C.1
ccccggacaaaaaccagcgggttttatcaaacgggagcccagttaaaagttaaccatccgatcaaattttgtagggaacaaaggaaccccctttttttttctaaacagttttgggtttaaaccccatgtaaatgctttagggggatttgggctgcccgtttaattggctgcagttgcagcttatatttaaacctggcaagccaccaggcttggcctgtgttaacaccgtttttttttagaggatgggtttttaaaaaaatgcgatgtttaataggaaaatttttagtattttttaactgcgctggcaacccttaggttttcattgggatcaacggtttttccagaaattggt

SEQ ID NO: 139770 - DNA, 159 bp, Zea mays
  Clone ID: MRT4577_58957C.1
cagacaaaatagcctggtggttaatcgaaatttttccaattgcggggctccccccctcgtgatacacccttcgggttacaacttaaccatttcaggtacaaaaaagaccccggagtctccctccctggggggcattgcttttatttaaatatgaaatgc

SEQ ID NO: 139771 - DNA, 106 bp, Zea mays
  Clone ID: MRT4577_58958C.1
tcttttctattgatcggactcactccaccggtgcccagttcttgtatgaatgggagggcggacttcacaggaagcctagagggccaataaggcaaggcatgagctt

SEQ ID NO: 139772 - DNA, 277 bp, Zea mays
  Clone ID: MRT4577_58959C.1
cgcgaggagcgctaggacgacgacgtgagttccatggtcacgatctccagcaacagcgggcagaaccagcaacgatgggtgatgagggctgcagtgagaggaggaagagagagggaggtaggttagccggtgatgagggttgcagtgagaggacctcgtgccgaatttttctgcttcaccatttgacatcatcggccgtccagcagacttagtggtcccaacaattaaaacttgatcatttccttttttgcaatttgcatgcattttcgctgttttc

SEQ ID NO: 139773 - DNA, 603 bp, Zea mays
  Clone ID: MRT4577_5895C.1
gagagtcgcccgagcacaccgccgcctcctcttgtttgagcacgtcgtcacctcctcttgcttggagtcgctcgagcacgccgcctcctcttgcctaaagtccctcgagcacgccgacgcctcatctcgcctgaacacgccgacgcctcatcagattcttatctagacatagctgatgtctgcgtccaactactggacgtgcaagacgaaaagctcttcctgatcaaccacgaaaagatggatgcatataacaacctgatatcaaagaaacaagttccatgaccgatgacgaaaagactaaactcattattagcatgaagtgtttgaggaagatgttttcccctaaagttatataatttgaccggggtccaggagagtaggagactgaaagcactgtcgagaagactgaaattatcacattgacatgaagaccaaagccatctcttacctacttatctttgtagcttacgtttctattttatcctgtcatcaaaactaaagtcttatgtatggtcattatagtactattttggttctgaaaatatttgtttatgttatgaaaactattggtggaaaaaaaaaaaaaaaaaggcccctagggcc

SEQ ID NO: 139774 - DNA, 313 bp, Zea mays
  Clone ID: MRT4577_58960C.1
gatcatgtcaaggcttgcctcgagaacggcctgctcacggtcaccgtgcccaaggcggaggacaagaagccctgagtgaacgctattgagatatctggttgagcatgcaatccaatatggacgtggaaggaaggtggactgcttgcggtccgtggctagtgctgtcttgcgtgaagtttactgtgtcttctacgatatataacgtacttccgtttgtttcgcttcgtatgtacaatcttccggttatatgaataataacatataaaatcgggttctcacggtcaaaccgttcagccaacaggcctgaaccctt

SEQ ID NO: 139775 - DNA, 277 bp, Zea mays
  Clone ID: MRT4577_58961C.1
aatgattacgcgggcctgcgacaccaacgagggggatgtgcgaggagaaacccgcacactcaccacacggcgggaaacaggccaaagccagctcaaatgacccatgcggaagaacggcacctactggaatagggaaagctatcaggcaggaaccagaaacgaggtagcggcccacacaaagccaatgcgatacttggcagagcgagggggagagtccatgccaccctggaacctgccccagcacagaaaggagagacccccgagggaagggagaacc

SEQ ID NO: 139776 - DNA, 405 bp, Zea mays
  Clone ID: MRT4577_58962C.1
tatagaagagctatgacgtcgcatgcacgcgtacgtaagctcggaattcggctcgagctcggcgggattctctaaagaaaatagaaatctggaaattgcctcctgtgctgttagtacacctgaaacgattctcctatgacggcaggtggaagcagaaactgcaaacgtccgtggatttcccattagaaaatcttgacctgtcacagtatgttattggcccaaaaagcagtttgaagaaatataacttgttttctgtttcaaaccactacggcgggctcgatggaggccactacacggcctattgtaaaaacgcggcgaggcagcgctggtttaagtttgatgaccacgaggtttcggacatctccgtgtcttctgtgaggtcgtcagcagcttatatcctgtttt

SEQ ID NO: 139777 - DNA, 907 bp, Zea mays
  Clone ID: MRT4577_58963C.1
cgacgccctcctcgcgacgctcgacgttgccaactcgacctccacacctttcgcccatgggttcatctccactacttctacatgctctggcttgattccacatgtgtccgcgtgcccagatctggcatcgcggtgcccgtgcgttgcctcgcggtgcccatccatctacaccgacaaggggcagaagcgtgcccgagctttggcggcggggtccctactctccttcatcagtcgtgcacctcggtcttggctagatgcatgtgtagttgcactgccatccatggcatggcttggccctcgatccctcgaggacgacacggtggaggcgacgagccgcaggcaggtgatctaaactccagtggtgcctaggcttggagcctagatccgccgctgatacaggtatatgatcaaaggttgacctgacagaggataaggagattaatgtggaattcctatactcagccaagtggaaggaatgaaggattaaggggactgatcagatagcagctacctaaaagttccctatgtttctccttgtcttttccagttgctcggctccgtctttggtaacggttgaacacgaattagagaacagaccagagaacctttgaaacttcttgcagtcatgtttgtctgtttcttggtaccaggagcaggtgttttgtgtcaaaacccaaaaggttgaacacgaattagagaacagaccagagaacctttgaaacttcttgcagtcgtgtttgtctgtttcttggcgccaggagcaggtgttttgtgtcaaaacccaaaaggtgtcttctttgcttgcggatctgcatgccctgcctttcatgtcgattgatttcgtagaattcatggatgctagataatttgggacccgcgttttttaaaagccgggtttaccttctcc

SEQ ID NO: 139778 - DNA, 596 bp, Zea mays
  Clone ID: MRT4577_58964C.1
aattcggcacgaggcttgattccttgtgttactaatgattatttctagactgctaatactttctccttactggtaagattgctaaagagaacaggtttgggcgaagcctctttgagagattaagtggacttgatttcccaaagcacatgctaaatattcaatatagaatgcacctttggatcagcaagtttccaaatcaaaaattttatgaaggaaaaattatagatggtctgaacgttaaggactataacaatatttatctcgatgtgcatatatatggtccttattcattcatccatgttgaagatggtttcgaagaaaacaataaacagggcttaaaaatattgttgaagctgctgtggtagccaatattgttggcagacttgcggaagcatgcgccgagcagaagaagaaaaccaacgttggtataatatctccatatgcagcccaagtaatttctttgcaagaaagagttcagatttataagaagcatgactttctttctattgaagtatgcactgttgattcatgtcaaagtgctgagaaagacattaatccttttcacagttagacaaaataatggtgggaatataggc

SEQ ID NO: 139779 - DNA, 288 bp, Zea mays
  Clone ID: MRT4577_58965C.1
ctagatctacatcacaagctttctttctttttaacaatttaaactcagacggggggtatattcttgaagtgattagaccgactgaatgctgccaagttatattaaaaagcgcaaggttaggcatccacttgcaagttacaacagcccttatattattacacaagtatgggaataaaaattacaacaattgacactcttctaacgaacaaaaccaaatcttacatattcagcatgagcagcagcttcatgcagtttctatcttgagtctattacccaaaacattaagca

SEQ ID NO: 139780 - DNA, 373 bp, Zea mays
  Clone ID: MRT4577_58966C.1
gaacacagtgtttcgtcaatgttttcgggacgcgccaatgttatgtgcttgagttttaaaggagtcacttgacaaccagtgttcatttcttttcagctttaatagtaaataactgatcattaggtgcaattttctattcaagcaaccatgttacatgatcagttggtatttatggcacatcaattttgttagttgcgatgctagcattctgaactgtgtcatcatgggttgcttttagaactattatacatagataataattgatttggagaacacttcaattcctgtaacaaacacgcaagttacgctagcatgtcatgtcatgtgcttattaattcaaaaacaatacttgcgtgcatgcacaatagatctg

SEQ ID NO: 139781 - DNA, 332 bp, Zea mays
  unsure (1)..(332): unsure at all n locations
  Clone ID: MRT4577_58967C.1
cctgcccngtgttgcngggctgctccnntggcctccttgtccgcctctctgccccgtcggtcctgcgggccccntccctgggctggcgggggngcggngtccccggccggnttgtggtctccgtgtccnccccccgntgaggcctcgtctccctctgtcggcggtcccctcggtttcgcgtctccgcggcgtcggcggngacggtcgcgccggtgctggtcntcgtgntgctgctgctggcgctggcggcggncgtggggctgncggcggcggccgtgttctcggtcctcggcgccgcctcgctggnctcggtggggttcgtcgtgtcgctg

SEQ ID NO: 139782 - DNA, 476 bp, Zea mays
  Clone ID: MRT4577_58968C.1
cacttgctctccatccagcggctagttatggccgggcatccttcttgtagctggtcatattgtcgatcggaggcgggagaactgcacttgcgcccctgttccaccacaagagggcgcggtgcagctcgccgccggggggtacggtgagcctcgctctactcactgtaggcgcatcgactgtcgttaggtggagaaccacggtactaataactagtcccttcattacaagcaggaggagaaggagcacatgcacttgcgtgacctgggtacaggtcggttccatcatgtaccggggaccttaggactagtacgaacatgcacgacccttaataaagaccctgagcacccgccccgtcacacgatcaaggacgatgattccggggaaccaggtcgtgagattcactagctgccattttcatactcaccatcatatgaacatggaccacaaagactacgaagacgccgtgggcgaaaac

SEQ ID NO: 139783 - DNA, 476 bp, Zea mays
  Clone ID: MRT4577_58969C.1
ttcgtcgacggcggcggccgtcggttgctttgtcgtgctcagcgcgaggtctcgccggggctcgcgctcggtggtgcgatgtgtcgccacgacgggtggtgagctctttctgtcgagcgtgtaccttcagcagtcagcactatctcaaactaagtgaatcggagtcaccatgccaaacctgtgcggttcaccgcaaaagacctcctcctcctcatcctaaattcgccaagcaatgtgcgatgccggcttcgccaactgtgattccttatgccgccgaatcccatcacctcgaaatcctccgtagtagtctttgcggtgacctcttttgttggtaagaaatgttaaattgttagttttgttccagcggacctttctttagcgtgagcattcaaatcaaggtaactttttttttcctatcaattcggttggtaatgggtttgttcgctgcatgacatcctgtcaatccgattcatgca

SEQ ID NO: 139784 - DNA, 848 bp, Zea mays
  Clone ID: MRT4577_5896C.1
accctcgaggctgccgggacccaccccacggcccgcccacctcctctccacctcctcgtcctcgatccccaagcagtcaggcacgagcttccctcccctcctcccgttgggtaggctggcgagccgccggccgccgtcccttcttccctggatttgattggtgctctgggccgcagccgcgagcaccaatcaaatccagggaggaagggagcaccgccatcgccatgggagggcgccgctggctgtcgtgacctcaccttgccgctgcagctctgtaagtaggtacctagtattccagaggtgatttctcttcattgacagagagcaaatctggttcgtgatccctagtaccagagagggacacggttttcctatcgatgtgttagagtcaagtactcaagcttttgtggttccaatggagtctaagcgtgtgagtgatcaggatgctttgatcgacctggagagtggcaatggcactacagtaagcaactacaccaatggtggggatgctagtttcacagtggggcaagcaagaacagcgcctaatggtgcgtggaatggttgtgtgtgtgccaacgggtgtccgagggacgacaggaatcagcacatggattgctcccctcctgcttcggatgctgttgctagaagtggagatgacaggaagtctgagggggaggagaagcttatggacagctcaggaggggagaagacgaagaagaagcggtccaagaagccacctgcttcggatgctgttgctagaagtggagatgacaggaagtctgagggggaggagaagcttaggacagctcaggaggggagaagacgaagaagaagcggtccaagaaaaa

SEQ ID NO: 139785 - DNA, 695 bp, Zea mays
  Clone ID: MRT4577_58970C.1
cggccgggatgacttctgcacggttctgcctctcctccgcagtcctccccaatcacgcagatcccgtccctgcgccgtggagccgcccctccctaccgcgacagacgccgcacgacccctcgactcagcgccccacgctctgcgccccctctcccctcggcatgagacaccgcccctctcgccatgcgcccccgtgcccgacggcatatgaaattagcgaggggcgtacaggtcgctctcgtctgctcggggctgggttcgctgccgtgccaccgggcgagccatcgaggtacccaatttctgccatggcgatctgcccgaaccaatggtcgattctccatctgaccatcctcgataagcctcctgccccacaaccgccctccaaagcggcgcgcgcgccaccgccatctccacccacgccacgcccaccttgctgctgcagctgccccgtaccgctaccgcacgctcaatctgaccctccccacggggcaggatggacaaagggaattcggtggtggccgagctagcggcgttgtttagcgatgtccttgtcacgccgtgctagccgttagagccccaagccaagagcttcctaccgtcgccctcctccctgccgcctgttcgcttatgttgggtaactgggtaagctgagtgtgtattggctatggatgtttgaagttttcgcgatttatttc

SEQ ID NO: 139786 - DNA, 754 bp, Zea mays
  Clone ID: MRT4577_58971C.1
ggtccggaattcccgggtcgacccacgcgtccgcgcccggttcgttgagggggccctcagtgtgcggcgaggaaggagcggagcgagacgctgcgccggaggtctttccatagacaacagaagcaaggctcctataatcaaaagtgcctctttgctgagtcattgggaaaaacttgtctgatccaatctgctagacttggaaaaggggagtgacgaatccagcatcatactgtggagtggccaagatctaccagtgtgggggcatcagactttgaccttacgttggaagatctcagaggatgcaccatgatgaaacggcatagacctgtcagcagcagtgagagttcagatgagtgtccttccacttcctttacttctagctcaatgtataggaagaagtcaaaaaatcctaaggaacagaagaagtctgctgaggtattccgaaaggacctcatcagtgccatgaaaattcctgactctcaccatgttaatcctgacagctattacctctttactgacacatggaaagaagaatgggaaaaaggagtccaagtaccagccaatccagactctgttccaacgccgtctctcaggattatatctgaaaaagtaaaggagatgctttttgtccggccccggaaatatatccgttgctccagcccagagtctgcagaacctggctatatcaataccctggagcaagcagcatctacatgccgctatgacctagatgacatggatatcttttggcttc

SEQ ID NO: 139787 - DNA, 460 bp, Zea mays
  Clone ID: MRT4577_58972C.1
gtatacataatcaacaatggaaatatgaaaacttatcacatgtaacatggaagtctaacgaaagtgccaaggagcctggccggatatcaagcacgccgggcgacacggatggatcgttaacctttcgtaaaacactggccaatcgcttcaaaaacaaaaacaagatgtgctccaaagtaaagaagaccgaaagcaatgcacctaaccactgaagtgcagatacaagccacctgcacgcggaacagccaattgcggactaatgcaagggacacaaacaatcactaaacgatgaagcaagcacaaaacttcaagaagtgatgcaccaactggaattggcaacaagctattcaaaagacggcaaacgccaaccaaaagtataccaccaagccaacgccgatagcaatacaaaacacttgctttctcttcgattgctacagaaagtttaacgtccgcagcagcg

SEQ ID NO: 139788 - DNA, 488 bp, Zea mays
  Clone ID: MRT4577_58973C.1
gtgggacgagaagaaagaagcgagctggaaggggaggatggacgactggaagtccaagcagggcatcctcggtggcggcggcggcggcgacccctaagacatggacgccgacgtgccgttgaacgacgaggcgaggcagccgctgtcgcggaaggtgtcgatcgcgtcgagcaaggtgaacccgtacctggaccgtctcaccctcaggtacgagagggaaggggagccgtcgctgctgtcggcggtggacctgttcgtcagcacggtggacccgctcaaggagccgccgctggtcaccgtcaacaccgtgctttccatcctcgccgtggactaccccgtggacaaggtctgctgctacgtctccgacgacggcgcgtcgatgctcacgttcgaggcgctgtcggagacggccgaattcgcgcggaagtgggtgccgatcttgaagaaggtctgcatcgagccccgcgccccggagttctacttctcgc

SEQ ID NO: 139789 - DNA, 2830 bp, Zea mays
  Clone ID: MRT4577_58974C.1
cgagctctcgtcttccctgcacaagcgcatccatccctaccctgtgtctgagccagggagcgccaagtgggacgagaagaaagagtgagctggaaggagaggatggacgactggaagtccaagcagggcatcctcggcggcggcggcggcggcgaccccgaagacatggacgccgacgtgccgctgaacgacgaggcgaggcagccgctgtcgcgcaaggtgtcgatcgcgtcgagcaaggtgaacccgtaccggatggtcatcgtggtgcgtctcgtcgtcctcgccttcttcctccgctaccgcatcctgcaccctgtcccggacgccatcgggctgtggctcgtctccatcatctgcgagatctggttcgccgtgtcctggatcctggaccagttccccaagtggttccccatcgaccgcgagacgtacctggaccgcctcaccctcaggtacgagagggaaggggagccgtcgctgctgtcggcggtggacctgttcgtcagcacggtggacccgctcaaggagccgccgctggtcaccgccaacaccgtgctctccatcctcgccgtggactaccccgtggacaaggtctcctgctacgtctccgacgacggcgcgtcgatgctcacgttcgaggcgctgtcggagacggccgagttcgcgcggaagtgggtgccgttctgcaagaagttctgcatcgagccccgcgccccggagttctacttctcgctcaaggtcgattacctcaaggacaaggtgcagcccaccttcgtgcaggagcgccgcgccatgaagagagagtacgaggagttcaaggtccgcatcaacgcgctggtggccaaggccatgaaggtgccggcagaggggtggatcatgaaggacggcacgccgtggcccgggaacaacacccgcgaccaccctggcatgatccaggtgttcctgggccacagcggcggccacgacaccgagggcaacgagctgccccgcctcgtgtacgtctcccgtgagaagcgcccgggcttccagcaccacaagaaggccggcgccatgaacgctctgatccgcgtctccgccgtgctgaccaacgcgcccttcatgctcaacttggactgtgatcactacatcaacaacagcaaggccatccgggaggccatgtgcttcctcatggaccctcaggtcggccggaaggtctgctacgtgcagttccctcagaggttcgacggcatcgacgtgcacgaccgatacgcgaacaggaacaccgtcttcttcgacatcaacatgaaggggctggacggcatccagggcccggtctacgtcgggacagggtgcgtgttccggcgccaggcgctctacggctacaaccctcccaagggccccaagaggccaaagatggtgacctgcgactgctgcccgtgcttcggccgcaagaagcggaaggacgccaaggatgggctgccggagggcaccgcggatatcggagtggacagcgacaaggagatgctcatgtcccagatgaacttcgagaagcggttcgggcagtccgcggcgttcgtcacgtccacgctcatggaggaaggcggcgtccctccgtcgtcgagcccagctgcgctcctcaaggaggccatccacgtcatcagctgcggctacgaggacaagaccgactggggcctggagctggggtggatctacgggtccatcacggaggacatcctgacggggttcaagatgcactgccgcgggtggcgctcggtgtactgcatgccgaagcgggcggcgttcaaggggtcggcgccgatcaacctgtccgaccgtctcaaccaggtgctccggtgggcgctggggtccgtcgagatcttcttcagccggcacagccccctgctgtacggctacaagaacggcaacctcaagtggctggagcgcttcgcctacatcaacaccaccatctaccccttcacctcgctcccgctgctcgcctactgtaccctgccagccgtctgcctcctcaccggcaagttcatcatgccgtcgatcagcacgttcgccagcctcttcttcatcgcgctcttcatgtccatcttcgcgacgggcatcctggagatgcggtggagcggggtgagcatcgaggagtggtggaggaacgagcagttctgggtcatcggcggcgtgtccgcgcatctcttcgccgtcgtgcagggcctgctcaaggtcctggccgggatcgacaccaacttcaccgtcacatccaaggccaccggcgacgaggacgacgagttcgccgagctctacgcgttcaagtggaccacgctcctcatcccgcccaccacgctgctcatcatcaacatcatcggcgtcgtggccggcatctccgacgccatcaacaacgggtaccagtcgtggggcccgctcttcggcaagctcttcttcgccttctgggtcatcgtccacctctacccgttcctcaaggggctcatggggcgccagaaccggacgcccaccattgtcgtcatctggtccgtgctgctggcctccatcttctccctgctctgggtcaggatcgaccccttcatcgtcaggaccaaggggcccgacgtcaggcagtgtggcatcaactgctgagctgtctatcacggttcaaaaaagttctagagcttgtgcatagggagaaacaacagtttagaaattttgtattgtcatgttttggagctcatacgctacgttttgtgtaatgttcttggacccagaattgtcggccggacgaggaattgaacaaaggacaaggtttgaatcaatgttaaatagcaaatgatatttcgtgtaaatttggtcc

SEQ ID NO: 139790 - DNA, 473 bp, Zea mays
  Clone ID: MRT4577_58975C.1
gccctgcaacgaaagcggcagtcgagttgacatatggaccttttatcgacatcatactgaaggatctgtgattgtcgggcggcggggggggtactaccgggaactgcgttaggatcacaccatcgttgtgatggactaacgaggggggcatcttcttgattgtggagagggctatttacctcctgtatgttggaggcaagccggtttaatattatgtgcaaacgctggaacaatgctatggtatactgggagattagtaatattattgattaatgagacatctgctctttggattttaatttaaaacgattctatttaatacggtgggcttggattgctaatcctacatgataaatgactggattctgtcgttgtgtgctaatctgaccacatcgtagaattatgagtgttgataacttttacattcatgcaatgtgcctcttgtgactctaatgtagcttgaatagatacct

SEQ ID NO: 139791 - DNA, 260 bp, Zea mays
  Clone ID: MRT4577_58976C.1
caggggaaaatggtaaaaaattgtgggccccccccttggttaaacagaccaattttttaagggtttgggcccccaaaatatttaaagggattttttcccccaaaaaacggggtattccctctctattgggagaaaaactcccctaaaacacatatagtgggaacccccccctttttctttctaccccggggtccaaaaaaccccccgcccaggagggtctactccccctttaaaaaaacacccccgatcctttctggggg

SEQ ID NO: 139792 - DNA, 198 bp, Zea mays
  Clone ID: MRT4577_58977C.1
atggctgctagaatctccgccttccttaagaatgcctgggcaaaggagccggtgctggtggtgtccttcactgtctggggcctcgctataattatgcccatgattagcccctacacccagtatgctagcatgatcatcaaggcgacaccctacaactacccagtgcctgtgagagataatgggaacatgcctgatgtg

SEQ ID NO: 139793 - DNA, 194 bp, Zea mays
  Clone ID: MRT4577_58978C.1
catgcgctcagtctctatatatgggtgaggtcatcacatgtacattatcactttccatatggcctgcgaggctgcgactagctagcaccatgcataccatagaaacattactagatgtggatcgccattgctttgtttggcttctcttctgcgtacgtacgtactcgaccactgcacagccagtcactgtgtgc

SEQ ID NO: 139794 - DNA, 841 bp, Zea mays
  Clone ID: MRT4577_58979C.1
cccacgcgtccgcagaatagtaggagttggatgcgcatgcacttcacgacaaatgagtggcaaacaaatttcaaaaagttcatacaaactacatttggtggcactactagaggagaaactgcaccatgtccatgttcaagatgtcgatgcatgtcctacaaaacacaatctcaggttcagagtcacttggttattagagggtttgatgagagcttcatcgaagaaggaaaccaagcaaacgattcagatgagggcaatgctgcaacagttgtcaatgatgatgaaacaggtgacagtggttctgtgaccgaactagtttcaacgctaatcagtggtgctatacatgaagacatcataggaaatattaatgaagagccaaatgcaaaagcaaaggcattctttaatctattaacagaggcaaagaaggaattgtatccaggttgcaaggaggtcactaaggtatcttttatagtaaggctctttcagattaaatgcatgtttggtcttagtaaaagtgcattagcggttgtacttcagttgttccggcttgttctcccagaaggccactgtgttacggacacattggatacatcttgttgccacgagtcacttgtgtggcaccagtgttttgttgccatgaagcatcttgtggtaacaaagccatttgcaacagattcaaacgtggcattaacacttattaccatgaaatatgttgtggcaatatagtttttggcaactattataaatgttgcaatataacttatttgcaacataatagtccattgtaacaacaaacagttacaacacttgaacacgttgcaaaggatatagtaattgcaac

SEQ ID NO: 139795 - DNA, 613 bp, Zea mays
  Clone ID: MRT4577_5897C.1
accgccgcctcctcctctcgcctgagcacgtcgtcacctcctcttgcttggagtcgctcgagcacgccgcctcctcctcttgcctaaagtccctcgagcatgccgacgcctcatctcgcctgaacacgccgacgcctcatcagctcttgcaacatccaactctaaactgggaggcacacaatccactcatcaacctcagtaggagcaccacgaagtggtacaggtggagtagttcaacctcagcaagagctagctgcaggtgttggtgttcctactctcatcgacacagaccggggtccaggagagtaggagactgaaagcactgtcgagaagactgaaattatcacattgacatgaagaccaaagccatctcttacctacttatctttgtagcttatgtttctattttatccagtcatcaaaactaaagtcttatgtatggtcattatagtactattttggttctgaaaatatttgtttatgttatgaaaactattggtggaaagaatggtgatcacggttttggcttgaaggttcagaagtgaatttggctaccaattcgggacagatggtaattggttacctgctgtccgtatgctagctatttgaactt

SEQ ID NO: 139796 - DNA, 188 bp, Zea mays
  Clone ID: MRT4577_58980C.1
gtgcatgggagaggaaaaaaaaaatctaggcctagcatccacagcggtaggattcgggggttccaattgcagcggcaagccagacagcggcggacggtgaagtgggtcaacgacaccaagggcttccggttcatcttccccgaggacggcacacgaacatctcttcgtgcaccaatcgacgatcaagt

SEQ ID NO: 139797 - DNA, 184 bp, Zea mays
  Clone ID: MRT4577_58981C.1
cggctgaccacataccggaccaacctgtgcggcgccatcgttgtgattctggcctactaatgatgatgagacatcgggaaatgttcgctatgcatcacactctatctatatcctgaccaatgcagcgatacgacacacattatcatgagtggggatgaccaactatagaagcctggctataata

SEQ ID NO: 139798 - DNA, 331 bp, Zea mays
  Clone ID: MRT4577_58982C.1
atttatttaatttttttttttttttttttttattatattggggtggttttttttttattctaaaatccctttatataaacacacctaaattcacattattcaggacatctctttatccaaaaaaaaacatttttaatatttaaaaaaaaattttatccacacacacttattcaagtcctatatttatctttttccaaaaactcctatgtccgaccaacacattttctacttccattcaaatattcttatacccaaatcaaacccttcccttcactcatttaactaatacaatttttaaaaacatatttaacacatacccctacataacaat

SEQ ID NO: 139799 - DNA, 1041 bp, Zea mays
  Clone ID: MRT4577_58983C.1
gccacttccatagtcccttcctttgagctttgcaaatacagtagcgtattacaagatctgaatcgctgcaagcgtgcaaaataatgaatccatctttctatgcatttaaaatctaaaccatttgaaacattacgaacgcatgaccagaaaatgaatatcaatcagcaattcgtacagctttgacatgctatcattggtagcaagaacaattgccagtgaagttaaaccctagtaacagaaatgctaacccctgaaggtacatatataagtagtagcttgttttcccatggaacaccaggttgtatgatgcacagaggaagagaaacaccgaaaatccaatctcggggagattgactctgtctctcagccttttccgggttttctgaagcaaaggaacttcagtgtcctcgagatcattccccaccttctttgtcacaatccactggttgaatccttctagctccagcagtccagtcatcgcagccctcatccgatgcaatgtcatcacactctcaaacaaaatccaaaatggcagtatgtgtagattttttggatgtcttatagctgtgaccacggtaagcaccatgggaatataggcaacaccccacactggtaggtaaagctccgggattgtgactgagatggggatgatgacattgtagagaatacaggcagccgtcggcgctacaactctcctcacaaagaagaagctatagagcatatagaacttcttgacgagtgatatatccttggcaaacaaaacatcctttgccatcttacggaataagtttgcaccaccactagaccaccggaattgctgccgacagtaggccttgtaagtggacggcagttcactcttgaccctaacgtctccaacatatacaaatttccagccctttagggttgctcgaaccgccaagtccatgtcttcaactgtagttcggtccttccaacctcctgcatctcttatggctcctgtacgccacactccagcagttccgttgaaactgaagaaggcaaaggtcgctgcggacgcgtggg

SEQ ID NO: 139800 - DNA, 320 bp, Zea mays
  Clone ID: MRT4577_58984C.1
ccgggctcgaccacgcgtccactcagaattgtgggtctccggcgatggcggctcttgctccatccaagattctgggcaccaagctcaacttcgccggctcctcccgctacgccagcgcagcgcccaccgcgggggctcagaagatcgtcgccctcctcagcaagaagcctgcccagaagcgcaagccctctgcggtgtcgtcctcgtctccggacagcagcgacgagctcgccaagtggtacggtcctgacaggaggatctacctgccggatgggctcctggaccgcgcggaggtaccggagtgcctcaccggacaggtc

SEQ ID NO: 139801 - DNA, 379 bp, Zea mays
  Clone ID: MRT4577_58985C.1
caacaagcaacatagaaagttgtatttagtagcaacactagagcaacaggggggagcaagatatagtgcgtccttatgctccttgctctttctgcatgtgttgctaacgcgacaattttccctcagtgctcacaagctcctatagctgtccttctttccccataccctacatcaatgatagcttcagtatgtgaaaacccaggtcttctaccctataggctgcaaaaagcaatcgcagcaagcaacatacatgttatcacccttgtttcaacaatcgtcagccctatctctggggcagtcatgcgcacaaaccatgatgccacagctgctgcagtaactcgtgctacctgtgatcaatcaaatagctcttgcaaacctt

SEQ ID NO: 139802 - DNA, 419 bp, Zea mays
  Clone ID: MRT4577_58986C.1
cccacgcgtccgcttatctgcagctagtaaggttatttagatcgtccctcaatatagagtcgcatagttatgtaacatggatctcatttgcagattctcagaaaagcacttgcttctaccagaaggccaacatgatcactcaaaatttactttgcaatgagccactcatcgactagcaggtctttgtgaatactaactataattttcacatatacttatgctttatttatcagatactttaaatttgtacattgcttacccagaatgaataaatacatcccccatatattcactgtttctaaaaaaaattttccttaattccaatgcttaaacattattataaatttcttaatttcctttttaacatacacaattaatgttccttttctttacactcatttttcatttttgtttattta

SEQ ID NO: 139803 - DNA, 203 bp, Zea mays
  Clone ID: MRT4577_58987C.1
cggtagcaggtagcgccagcctgcctaccatacccagcacattcatgtggatggcgaccaccggcggcggcaaggcggcactggtgcttggggcggcttcagcttttgctgtgcctgctcggccatggagctgcgcagcggtcacaacgccatctggagatttcgcgaatgcctctccgaaaccggtcacctctgcgtggggg

SEQ ID NO: 139804 - DNA, 198 bp, Zea mays
  Clone ID: MRT4577_58988C.1
aagggcaagagcacaatagcttatagcattcttatggatcgacatgcaccgaaatgtgtgtggtgatcagtacactctcttggttagccgcttcaagttcatagcgtaatgccatattataagacctggtcggcacacttgtatataaaagctattgaacgtctacataaaaaaaataaactttacattaataatggc

SEQ ID NO: 139805 - DNA, 294 bp, Zea mays
  Clone ID: MRT4577_58989C.1
actgttattatcaacagttggaggtactacaaagaattggaggagaggcctgaacaaggttttcttacaaaaagaagaggcgaagaggagacccgccagatttccttacccccaaaacattactacgagctaggggagcagaaaaaaaaaaaaaaagcccactcctagctacggggggccccttgaggggcactgatgaacaacccatttaaacagaacttttttcaaaaaaagctaaaaaaaccccctcggctgcgccctcttcctccagcctcaaaagggctcccctcagcc

SEQ ID NO: 139806 - DNA, 1054 bp, Zea mays
  unsure (1)..(1054): unsure at all n locations
  Clone ID: MRT4577_5898C.1
cccagcgtccgccccgcgtccgcccacgcgtccgtcgtctcgtcttctcttctcgcgaatggcggcgctgtgcgatctccgtcgctgccccctccgccagtgatttctgggacgcgcgacgaacacgagttggaaggaggtggtcgtgctttgggcggcgaaggacctgggcgctagcagcctcagaccctgacagatcacaacctgacagatcacagttgcagttggagtgacgggcgctaccaaaagcgatcacaggcgctaccaaaagcgacgggcggccgacggcggcattgcagttggagcgagcgagcgcggtgcctttcggagggcactgtttacagataatgggttcttgggaggagaatgttaggcaatttttgttggaggaggaggaagatgatgatgaactattctttgttattctccctgctataatcccatacctctcggaagagaaaagacccatccacacatcctccctcaccggtgctaaaaaggttaaagaaattcttgaagggcatgagagctggtgcaaatctgaggttagaatggaaaaggaaatattcaaagccacgtcaaattttcttagaagggagaatttactacgtgacacacgaggagttagtgttgagaagcaacttgggatgttcatgtatatgatctcccacaacgccagtnaccaaatgctacaaaaggcttttcaacacagtggagagactatccatcgaaaaatatctgaagtttttgagatagttcccatactaactcaacgatttgtgaagcttcctagctcagttcaaactcatgctaggattgcaacagattctaggttcatgcccttttttcaagtgagctacaactgcaaacacacaattatcctatgctaattgccacatgtcctcaacatattttcaatatttgtcctttaatgcagaattgccttggtgccattggcggcacacatgtattcatcactatcgcagaagatagggcccctccaaatagaaatagaaaagganctctttcacacaatgttatggtaggctgcgac

SEQ ID NO: 139807 - DNA, 412 bp, Zea mays
  Clone ID: MRT4577_58990C.1
tttggggcggccgcgctggcttgattttttaacacatatttttctgcgtcaagaaaccttgaaatatggagaatcataaaaaacaagccaccaacaaaaattgtttgcgttcgaccgcaaaacaaatataaccggtacctctagggaaacctaagccttctgttacaggagggttggaggactcccaacactgctttattggggaggaggggtgggctccaagctcaccggagtgtctactctaacaatgactgaacatacatggatctcacagtcctcaatggaaaagatccaccattttatgctcctccctgaagaaactattaaacatcacttggaggaccccaatcctgatcaagcccaaaaacagcctcattggaaaggaaggtttttatgggggtaggcaacattc

SEQ ID NO: 139808 - DNA, 767 bp, Zea mays
  unsure (1)..(767): unsure at all n locations
  Clone ID: MRT4577_58991C.1
cctagcctccggatccatccatccgcccctcgctgccgctgcgtctcgtctccaccaccccacttgcccccggactcaggaggatcgtcggagatgtcggacaccgatgagcaccacttcgagtccaaggccgactccggcgcctccaagacctacccgcagcaggccggcgccatccgcaagggtggacacatcgtcatcaaggcccgtccctgcaaggttgttgaggtctccacctccaagactgggaagcatggtcacgcaaagtgtcactttgttgccattgacatctttaatggaaagaagcttgaggatatcgttccttcatcccacaactgtgacgtcccccatgttgaccgccaagattatcagctgattgacataactgatgatggatatgtcagccttctaactgagagtggcaacactaaggatgacctgaagcttcccactgatgatgttctgcttggccagatcaagactggatttgctgatggcaaggacctgatcctgtctgtgatgtccgccatgggtgaagaacagatctgcgctgtgaaggaaatcggtggtggcaagtaagcagctgtgcgtggttgcctacctgcgatacttggtatctagtgcttctgggtgtttgagatacacatacataggcatcaagatatctgttgggtgaaacaagtttgatccagatttgtgtgttttttacaccgaatgctcgaggtgctgctagnaccttggtatctatctatctatctctattatag

SEQ ID NO: 139809 - DNA, 370 bp, Zea mays
  Clone ID: MRT4577_58992C.1
ccccttcccgccccccccccccccccccccccccccccccccccggacctggggttgtctctcccccaggggagtttaggagtgagccccgccaccagcacatggccaaacgccaaaaacgaccccaagaacacacccccaaccagcgcccacgccccacggccccccccaacccccggggggccccccggacaagaaaaaaaaaaaaaacagagggacccccccgccggcgggggacgggagcacgccagggaacggaggcccgcacagggcgccggggcgggggcggtagaaagagccccaaccgaagccggcggggcgaaccccacgggggaaaaccaaccggcggtgggggggcccccgcgggggg

SEQ ID NO: 139810 - DNA, 2408 bp, Zea mays
  Clone ID: MRT4577_58993C.1
gaaaatcgttcgagagatgactaggatgaaggatgagaggaataggctgaggatgatcatggcacagtacttggtgtggcttcattcttcatgcaagatctgagcaaccttgagtagcaaatcgaggggaagggtacgagcagcttcggcaagcgccggaacaagacgcacacgctctgctcgcgctgggccgggttttcaggaaacggcacggaacagggatcttggaggtgcatctagccgcaggtcacggtcaattcacttgacaagctcactttccaccaaatctctcagcctcaggtctggaagtctaaagaacctcagctatcagtacagtactggagcagatggtcgcattgagatgatttctaatgctgataatgaccgcaaatacccagcgccacgtggctacttcttcaagcttctgaaactgaacgcacctgaatggccatatgcagtgttgggggccattggttctgtcctctccggatttattggcccaacttttgccattgttatgggtgaaatgcttgatgtgttctactacagggaccccaatgaaattgagaagaaaaccaagctatatgtgttcatttatattggcacaggcatatacgccgtcgttgcttatcttgtgcagcattacttcttcagcatcatgggagagaatcttacaaccagggtcaggcggatgatgttgtctgcaatacttaggaatgaagttggttggtttgacgaagaagaaaacaattcaagtcttgtggctgcgcatctagctgttgatgcagctgatgtgaagtcggccatagctgagagaatatcggtcatcctgcagaacatgacttccctcatgacttctttcgtggttggatttatcattgaatggagagtggcaatacttattctggccactttccctctgcttgtgcttgccaactttgctcagcaactttcaatgaagggcttcgctggtgacactgcaaaggcacatgccaagagcagtatggttgctggtgaaggggtgagcaatatccgcaccgtggcggccttcaacgctcaaagcaagatcttgtcactcttcagccacgaactgcgtgtcccagagcagcaaatcctccgccgcagccagacatcaggtcttctgtttggcctgtcacagctctgcttatactcctcggaagcgctcattctctggtatggttctcatcttgtgcggtcacatgggtccaccttctccaaggtcatcaaggtttttgttgtccttgtggtgaccgccaactccgtagccgagacggtaagcctggccccggagatcatccgtggaggtgaatccatccgatccatctttggcatcctcaacagagcaacaagaatcgagcctgacgatccagagtcagagagggtcaccaccatccgaggtgacattgagttgcggcatgtcgacttttcgtatccagcacgcccggacatccaaatcttcaaggacttcaacctgaaaatccaagctgggcgcagccaggcgctagtcggagccagcggctcagggaagagcaccatcattgctctcatcgagcggttctacgacccgtgcggagggaaagtggccatcgatggcaaggacatccggacgctgaacttgaagtccctgcggcgcaagatcggcctggtgcagcaggagccagtcctcttcgcgtcgagcatcctggaaaacatcgcgtacggcaaggaaggcgcgagcgaggaggaggtggtcgaggcggcgaagacggcgaacgtgcacggcttcgtgagccagctgcccgacgggtacaggaccgcggtcggcgagcggggcatgcagctgtcgggcgggcagaagcagcggatcgccatcgccagggcggtgctcaaggacccggccatcctgctgctggacgaggcgacgagcgcgctggacgcggagtcggagtgcgtgctgcaggaggcgctggagcggctgatgaaggggcggaccaccgtcctggtggcgcaccggctgtcgacgatccgaggggtggaccgcatcgcggtcgtgcaggacgggcgggtcgtggagcacggcagccactccgacctcctggcccggccggagggcgcgtactcgcggctgctgcagttgcagcaccaccgtgtgtgacgacgacgagcctctcctccctctgatgataaaaatcttcggtttggaggcctgggcgaggtggcgggttcttcttcggtttcttgggttggttgggcggtggtcctgtcgtgcggatgtagatactaggccaaaccgtgctgtgttcttatgcataaacttggaacatgtgtgatctgtatcttctccctgggatgggatgtactaccatgaaatgcaactcttttggtccaaaaccctcccccccacccac

SEQ ID NO: 139811 - DNA, 469 bp, Zea mays
  Clone ID: MRT4577_58994C.1
accccctgcgtttttttttatttggcacgggttatttaaaaaatgaaccggggggcaaaaaattttcgaaaacggggggggttttttataacctccaaataggggggttttcaattttcggcctcgggccatttttcccctttttttttcctgctcccccctttttttttcctaaataaaggaaaggggtttttaatcctcctgcctaaaaatcctcgccctcctttttttttccatttttatagaaaaaaaatcggtttccatggcactgacattttaatttttgccgggatttttactaggaccatccccaaacttttttttgatcattggtaagggggcttaataattttaattttaaaaaaattttttttttgccacttgctttttttttgcaggaccatcacaaattccattgaaaaaaactggccgtgatggcatggacttggaaggaggcccaatctgcctt

SEQ ID NO: 139812 - DNA, 258 bp, Zea mays
  Clone ID: MRT4577_58995C.1
gacctctgggagtcatgtccgcaagcaagaggtgctgttgaggggcgaggatgcaccatgaaagcaagtattccaaggtatcatgagaagcgtgcttctgtaccagtaacaaggactgaccaatgtcccaaggcatgcaattctaacggcgactgcattgatggaacctgtcactgatgatactggattcaatggccacgactgtagtagaggatcttgaccaaacaaatgctcctgccgtagtacatgcatatctaa

SEQ ID NO: 139813 - DNA, 836 bp, Zea mays
  Clone ID: MRT4577_58996C.1
aggcccagcagcaggagctcccccgtctccgtcctcctccgcctctgtcagggtcccggtcggacttccaccactgccctgtaccctccgcaccgctgcaaaaccatttacctggtcaggcatgcccagggcattcacaacgtcgcaggcgagaaggacttcggcgcctacatgtcacatgaactgttcgatgctcagctcacccctttgggttggaaccaagtcgatggtctgcgggagcatgtgaagaaaagtgggcttgcagagaagattgaattggttattacttcccctttactgaggactatgcaaactgcagttggggtctttggtggtgaaaagtatgctgatggtgtaaatgcacctccactaatggttgaaaatgctggacacagtggacgtccagcagtttcaagtttgaaccgccccccatttatcgcagttgaaacctgcagagagcacttgggtgtccatccatgtgacaagaggaggagcataacagaataccggcctctcttccctgccattgatttttcattgatagagattgatggagatgttctttgggaaccagatgtgagagaaacaaatgaggctgtcgcattgagggggtatgaagtttatgggactggttgtggacaagagaagagaaagagatagctattgtcagtcacagtggttttcttgtttcacaccttaagcatgtacagcaaggagtgccatccaaccataagagacgaagttagcaagcactttgcaactgcgagctaccggccgattggtgttggttgacagaagcatgcttggggtcacattcgtcaagattcaactatgct

SEQ ID NO: 139814 - DNA, 222 bp, Zea mays
  Clone ID: MRT4577_58997C.1
ggttagtgtcattgtttaaagttttattttaatttgaaaaacaagacgggaactgacatagtgagcagggtcgaggcacatgtgagcaaagattacaaggtcaacacagcaaaggggagaaacggagccgctccatgggggggggggggttatacaaagcaaaccagggtgaggcgtatgcacagatcttgaaacaacaacatagaaagagctaagaacgtg

SEQ ID NO: 139815 - DNA, 228 bp, Zea mays
  Clone ID: MRT4577_58998C.1
atttttgggggggcataaacaagtcaccgttgttttgtcattgaatacatgtaatgttggaactatttgtacacgttcactggatcaatatagcttcagaccatggcgctaaccttcccccgcaaacaccatgtccgctggcgaagcttttgcccccgcccgctccaccgtgaaccaagtggaaggggcgaagcctaaaaggtgggcaacctctggagctaccgcaca

SEQ ID NO: 139816 - DNA, 1826 bp, Zea mays
  Clone ID: MRT4577_58999C.1
tcgtccacgcgtcagcccacgcgtcctcggacgcgtgggcaaactcgaggccggccggggtctccctccaccctcctctgtcagggtcctccgattcggacttcctcacggccgccgcgcgaaatcccgtctcgttgctccggtccgctgcgcatcctcaggaatggaacttggcgccaccactgccctctaccctctgcaccgctgcaaaaccatttacctggtcaggcatgcccagggcattcacaatgtcgcgggggagaaggacttcggcgcgtacatgtcacatgaactgttcgatgctcagctcactcctttgggttggaaccaagtaagattttgctctttcttttttttcccacaacttaaccagccctcacgcactggaatagtaactgctcatagggtgttagtttctaccgacaacacaagttccaaggatggagctgtgcttctactaacaaattttactttggcctaagctagcaaggtcgatggtctgcgtgagcatgtgaagaaaagtgggcttgcagaaaagattgaattagttatttcttcccctttactgaggactatgcaaactgcagttagtgtctttggtggtgaaaagtatactgatggtgtaaatgcacctccactaatggtcgaaaatgccagacacagtggccgtccggcagtttcaagtttgaactgccccccatttattgcagtcgaaacctgcagagagcacttgtttcatgtttggtttggttgctgttaaatcagggtgtccatccctgtgacaagaggaggagcataacagaataccggcctctctttcctgcgattgatttttcattgatagagaatgatgaagatgttctttgggaaccagatgtgagagaaccaaatgaggctgtcgcattgagggggtatgaagttcatggactggttgtggacaagagaagagaaagagatagctattgtcaggtcacagtgggtttcttgtttcacaccttaagcatgtacagcaaggagtgccatccacccataagagacgaagttagcaagcactttgcaaactgcgagctacggtcgatggtgttggttgacagaagcatgcttgggtcatattcctcaagattcaactatgctggcaagaatccaaccggactagatgtgcctagtgatattgcagataagaagcaggttgacgaagctcagaagaactgaggcaaccttgaaagcataccatatatgacttggattatcaaaaagccactctgacctttgcgaagcttgcttgcttgctttgaagaggacaagctaagagggcatctacagatagagtttacgcataccattttgttagtcaagttgaactacgcagcaatgtattagcatgtctgctcttttgtctcagcctacatttgagattcagggcattggactaagatcgcctatttatgataataataataataataaccggatcaccccacattcaccaggtgatgcacgtcaaaattctcttggtttccgagctgttctagtctaggggtggctgtacaacgtccacggctccacgcaattccgtctcatggatggtgataaaaccaatcgatgtatggttttggtttgtgcagattacatatgatggttgggttcgctgtattatggcttgcttatttttattatttttggttcagagataatggaggccggcgctgctgcatatgcatccaaactgtttacattgtgtaaaaaccatatatgttttgtttacaacgtggaaggcgagacggatcacaacgtgcaatgcaggctgaccgcctgcgagagcatgt

SEQ ID NO: 139817 - DNA, 361 bp, Zea mays
  Clone ID: MRT4577_5899C.1
cctcgaattcggctcgagggcggtattcacacctaagaaagtctgctttttgagggcggcctttcacaacgggaaagtgtcattgagagctaaacactcccactgaaaccacacggtatgtgaaagatccaagcaagaagataaaaaataagttaacgaaaactgataaggaacaacaggtgctgcgatcagctgtagggtattgcaccgttcatgttcacctaaaacacgctttaacatctaaaggcataacctggtgaccagcgcactgatagcagggcctaagattagcattactcttaccctatttatcctctttttttttcctcgtcttaccctttagattcactcatgggatatc

SEQ ID NO: 139818 - DNA, 489 bp, Zea mays
  Clone ID: MRT4577_589C.1
tcgagcggccgcccgggcaggtacaagcttttttttttttttttttttttttttttctttttttttttttaaactttttttttcccaatatatcatttcccctccatttcaagggttcacacaggaaagggcccacactgccacccatgaaaatgggagacacggggggggaccacacccgggaccaccccaagggcgacccccagaagagggacggcccccacaaggggggccgagccaggggccaaccagggcggaaccaaggggagagggggaaccggcgaaaaattgtccgccgccaacaattccacacaaaacactaccccaaagcataaagggcaaagcctggggggcctaaggagggagctaacaaacagtaagcgaactgcgctcactggccgggaaccaatggggaaacctgccgtcccaaaaccattaaggaaagggccaaaacgcaaagagaggcggcccgcgaaaagggcgctcttc

SEQ ID NO: 139819 - DNA, 306 bp, Zea mays
  Clone ID: MRT4577_58C.1
ggctggtgtccacgtcggcaactcgtgcttcgagctgtatagcctcaagcatcgcattcaagctgatagctagatgctcggtgacaagaacattcggggaggtcatgatgctttcggcggcttctacagtgatcctgtcgctgagcagcacgtcccccgtgctgtgtttcaggaccttgagcccaatgtcatcggtgacgtgaggacttgcacctgattgcagctcttccatcctcagcagctcatcagtggcgatgaggatgcagccaactacttcggtcgaggtcactacagcactggcaagga

SEQ ID NO: 139820 - DNA, 622 bp, Zea mays
  unsure (1)..(622): unsure at all n locations
  Clone ID: MRT4577_59000C.1
tcccccttccccggctccgcccagggcgtgggcgcggacttcccagccggcaacctcctcctcccagccgcctcctcctagctgcccccatccggcgcggcacagatccgcgccatcctttcctcccggggcggctcctctccagtcgccgtccctggccggcatgcccactggacgtcacgccgccgtgagctgcctcccgctcggcatctactggtcgcaccttcgtgccccagcgccagtgcacgtgctcccccaggtcgccttccaccgccggccacctcctggcggcgccagccatggcgacgcacgcggcgggccccattgtcgcaggcgcggcctcgctgctccccttccctgatgtccggcgcccgctggcccttcctcctcgtgcgagggccccttcggccagcgtcgctgccgtggatcctccttccctccaacctccgcactggcgcgggcccctccatccatgccctgcgcgctgctgccgtcggcgagcacgtgcttgcgcggcgcctcctctcgcgggcgtccttggctctngnggggcggcggntgngncgncgcnncgncttgcnggcnggccgccgctacttcgcgggcccgcgggccgncgcga

SEQ ID NO: 139821 - DNA, 534 bp, Zea mays
  Clone ID: MRT4577_59001C.1
ctacaccgatttcacacacataataccaggctccttgaaatgaggataatatagtactgaacattaggcaaaagaaataccacacctaagaggaaaggcaaacatgtcttatcatgccccaccaacgctacttgggggtataacccatttgtgccatcagtcagtcgcactcaagacaaacggagcaacctacagtgaagtaaatccaacaaagcagggttccacactaaaaatgaccggggataggtgcatttgtatcctatatcaccttgaattcactcatgaccatctcatgctgactcctccagtatctttacttgcatagccagggactcctgccttttggacacgacaacgaaaatcctgtggtactgatcttttgcttcctggtactgaaccatggacttgactcttgcaagagctttatagaaccgttcttcagtctgttttcagacttcttgcataaaatcgaaaacatctacagaagacttatttgaggatcgacttgatacttggtacgacattactggtgtc

SEQ ID NO: 139822 - DNA, 632 bp, Zea mays
  Clone ID: MRT4577_59002C.1
ggaacctcgttgcttctatgctcacctcccttccctcttctggcgaccgcctggcgccgtcgatgaccgacccataccacccttcgaactcacattcgcggcgcgcgccgggatggcaacggcgactacggaggagatggcgctcacgtgcgggagctcttcactacggtcttggcgaagaaggatacgccgatgctcaccgtggcgctcgataccgccactccgaccaccaccgtctacactgtccggcgcggcccgatcggcaccaccatccccgccatctaccgtgaatgtttaccccagtccagaacgataatcttcgctccactggcggttgtggctgcccatctgagaatatgatagctcgtctgctctgagtacttccataacgcccagtgcctcatcttttccgggagacccatggatcgaccaccgatgttagctgcaagatcagatgatgagctgcctaccccacgcctgagactatagtatcgtaactacaaagccgatgggctgcttggttgcgtcttggtgctgatcttcccaatgccatggctgccgccgagatcactgactagctcgcattacactccctgaaccggccactctgcgacatccagagcacatgtgcc

SEQ ID NO: 139823 - DNA, 398 bp, Zea mays
  Clone ID: MRT4577_59003C.1
ctttgcaagatgggggagatcaacacagccatatcacttgttaaagattgtcttggaaatatagaaaatgggccagctgaatttaaatacaccttgactattctggaagcttgcagatcaaaaagcccagagaaagtcatcaatgtggtgtatgagatgattgaagtaggttgttcaatggaagaaattgtctattctgctatcatatatggcttctgcaagtatgcaagttcaactgaggcgagacaagtattcactatcatgagagatcaaaatatcttatcagaagccaattttattgtttacgaggacatgctgaacgagcacttaaaagaggccactgcagacttggtgatatctggatggaaattttttgaccttgaatcaaacttgaaatg

SEQ ID NO: 139824 - DNA, 230 bp, Zea mays
  Clone ID: MRT4577_59004C.1
tgattttttttttatataccgcacgatatagagtgcaggaaaaagattatttgtggaccttaataagccaatgaagaggatgaaagataatgctgttcaaaattgagcaagaataatattgatccatctcaatgccgaggagactggatactaatcttggatgtgctactgaaggatgagactttgagccaaaggcaacaagttgcaccatggagagcttgaattgaatt

SEQ ID NO: 139825 - DNA, 819 bp, Zea mays
  Clone ID: MRT4577_59005C.1
cggacgcgtgggtgctcccaacacgccagtgtgctatccagtatgctaggtttgcatataatcctgtcgtgtcccttggatggttatatccccccagcttagtttcagaactacagcatactccgttcaggttttgctgacctgttcccacacaatgtgctgtacagttggtggggctatgttgtgattactactccgaatggtgttttggatcatgaggaagcaatcaggcagaacgtgggtgggcaggtccttggttatttccattgactgacaagtaacgtcgctcttagtcctgaatgaggcaacgggttgtgcccatttggtattactgtactgttgttattaccgaacccattctgtttgcatcttgggagctgttttgttgtcgttcatggccatgcaagaaatgaaataacatgccaaatgtacggctgagggctgacaacactaggaatattgttaaacaggaacactgagtttcttgtgaggatgtcatgatagcttttctgagacctttccctacagggagggttgagcacacattggtattttggtcagtgtctgaggctctgagatgtgtttcggatcttgtttgcagcactgcttgtaggactcctttgtttaggacaataatgttgatgggtctgtttgatgaatgacagatgtctgagcgaaaccaatgtcgctggttttgtagagtgttcaatttattggctgggaatgccatgtgaatgtgttgtctggatatgaacctgtcattctttgttatgctgtgcactgcgtgctggagatgtttgctcctgggaatatgccccc

SEQ ID NO: 139826 - DNA, 1187 bp, Zea mays
  unsure (1)..(1187): unsure at all n locations
  Clone ID: MRT4577_59006C.1
ccagacaacacattcacatggcattcccagccaataaattgaacactctacaaaaccagcgacattttttttttttttttttggtttcgctcagacatctgtcattcatcaaacagacccatcaacattattgtcctaaacaaaggagtcctacaagcagtgctgcaaacaagatccgaaacacatctcagagcctcagacactgaccaaaataccaatgtgtgctcaaccctccctgcagggaaaggtctcagaaaagctatcatgacatcctcacaagaaactcagtgttcctgtttaacaatattcctagtgttgtcaaccctcagccgtaaatttggcatgttatttcatttcttgcatggccatgaacgacaacaaaacagctcccaagatgcaaacagaatgggttcggtaataacaacagtacagtaataccaaatgggcataacccgttgcctcattcaggactaggagagcgacgctacttgtcagtcaatggaaataaccaaggacctgaccacccacgttctgcctgattgcttcctcatgatccaaaacaccattcggagtagtaatcacaacatagccccactggcgtgttgggagcatcctaactctgtatcgttctatctccttagctttgaggtcttgcctgtaggtgagagctttgcaatctttaagacgtccatcaagctccactctaattttcccaactctattctcatcaatgacctcaaagtttttgatataccctcggtacttcatgatgttgaggaaggagaccatgacgccggagatgggtcggagaagcgccgacgcgttcccccgccggtctgcgttgaccatcgtgcgcagagcatcgttgaggatccgccgccccatcgcgagtccggaggttggatctttgactgaccacgagcgccgccgccgccctttccgcttcctctcctctagcagtagcgctacccgccggcggcgctctgcgaaggattatgcccggccggcctcgagtcccaactgtacagcacattgtgtgggaacaggtcagcataacctgtacggagtatgctgtagttctgaaactaagctggggggatataaccatcccagggacacgacaggattatatcccgncctagcatnctggatagcncgctggcgtgttgggagcncccncgcgtccg

SEQ ID NO: 139827 - DNA, 522 bp, Zea mays
  Clone ID: MRT4577_59007C.1
ccggccgggtacttgtcgaagacatccaattgcctgggatatctgtcacgtcgacgtactcctatccaggtatagcgtccatgcgtcataaaaatcctcaagaatcatgctaaaaaccacttgagataagccatgccagcagaacttatgctacgacgcgcaagatctccaagggccgtcctctgtcttaataaccgtgtgcttcctcagatgatggaggacactgaaaaggaattctaagcttcacaatgagatatcaacacagcacgacatgggcaagatgtatgtctcatatatggacagcgaatggaaaggctgaggcaccggcatggagtccgatgctgctgccagctgcacgaatatcacatggtgtatcgaggtagcctgcgaacaatgtacacgcataacacacggtgtgtgatgatagacccgagcaagatttggggtgctctctacaaaaaatggagagtagggccgaaatatcgcagctgctgaagattgaagagaaggctctcgggattc

SEQ ID NO: 139828 - DNA, 745 bp, Zea mays
  Clone ID: MRT4577_59008C.1
ttttttttttttttttttttttctcatccaaaactgaatattttattccaaatcatagatccacatttcagtcagtgctatggtcgagttggtagcaaatcttcaatataacaataactaaacgcaaaagatcaactattataaaactgggaacacagcctttgcagtcataatcaaccagctaataagatgcctactacccaactgaatgctaataagcatcatccatgctaaaagagatgccttattgtgcccaggtgctacttcgcctcgctcactagtgactggggtgaccccagtcccaaccgccatctgaaactgtcatgcatacaagttccctaaaaaatacctggattgtagaaggccacgcagggaaagacggcggcgccttccttatcttcatctaccaccctccgttggagagacttgaggtcttgctgctgctgctgggattccgacatggcgaggaaatttttgtgcgtctgtcagatgcaggggcttgcttgctacttagagacgacggcttcgctgatgtcttgatggcgctccaacggcaacctgctgttgatgcatggtcgtgctgaaacctgaagccgatctggaattatggatgctgcccgcggtggtggtggacggctggacgccaggaggatgcagggcgacgcgtgaggtgtgaagcaaggggctgggcgaagcaacaacggcgactagctactcacaacggtggtggcgtgtggaaaggctc

SEQ ID NO: 139829 - DNA, 640 bp, Zea mays
  Clone ID: MRT4577_59009C.1
accaccgtcatccagctttgaaaaaacagcagctaggcaggcagctaagaagctaagctaagtgctcagtgaaaatggtgtccgtcagcttcaagatccatggagccgttgccgctctcctcctcggctccctcattctctgttccggtgcgtccatggaccagccggctgcttacaagcacgtcgctccagctccgacgccggcgccggcgccgatccagccggtgatcatcgtccagggtctcatctactgcaagtcctgcaacctccgcggctacaacgccggcatggacgcctcgcctctcgccaacgcgacggcgaagctggtgtgctacgggagcaagggcgggtaccgggtgctgaacatgacgagcacggcgacggacgagagcggctacttcctggtgatggtgtacgacctggccatgttcagccggcgcagctgccgggtgtacctccgcacctcgcccacgccgctctgcgacgcgcccttcctcccggccgacgcctcgctggggatcgtcctcaagagggaggaggtgaggccgtcgttgccggtgggcgtgcgcggcgtctacagcgccaggaccgcgctcatgtacgccgccgcgcaagggtgccaagtgcccggactatacta

SEQ ID NO: 139830 - DNA, 1008 bp, Zea mays
  Clone ID: MRT4577_5900C.1
gccggccgggcctcgatttccaacacgccaccgcctctcacgactcgcttgagcacgccgccgcttcgtctcacctagagtcgcccgagcacaccgccgcctcctcctctcgcctgagcacgtcgtcacctcctcttgcttggagtcgctcgagcacgccgcctcctcctcttgcctaaagtccctcgagcatgccgacgcctcatctcgcctgaacacgccgacgcctcatcaggtgagggctcttgcaacatccaactctaaactgggaggcacacaatccactcatcaacctcagtaggagcaccacgaagtggtacaggtggagtagttcaacctcagcaagagctagctgcaggtgttggtgttcctactctcatcgacacagacatagctgatgtctgcgtccaactactggacgtgcaagacgaaaagctcttcctgatcaaccacgaaaagatggatgcatataacaacctgatatcaaagaaacaagttccatgaccgatgacgaaaagaccgcactcattattagcatgaagtagatgaggacctgacagtcccctgttggagtgacgggcgctaccaaaagcgatcacaggcgctaccaaaagcgacgggcggccgacggcggcattgcagttggagcgagcgagcgcggtgcctttcggacgacactgagcacagagtgctgagtggaagcaacatatgaagctgacacggaaaaggaaaatggatgatctccttggttatgtttccctgtcttgtgcatgctgcatttcctgctaccgtgaagaccggggtccaggagagtaggagactgaaagcactgtcgagaagactgaaattatcacattgacatgaagaccccagccatctcttacctacttatctttgtagcttacgtttctattttattctgtcatgaaaactaaagtcttatgtatggtcattatgtactattttggttctgaaaatatttgtttatgttatgaaaactattggttg

SEQ ID NO: 139831 - DNA, 687 bp, Zea mays
  Clone ID: MRT4577_59010C.1
ggtaccgcggcctctcctcgagtttttttttttttttttttttttttttttttttttttttttttttttttttttttttttttttttttttttttttttttttttggaacaaaaaaaaaaaaattggttgggggaaaacccccgggcaatttattggggaaaaaggggccccctaaacccttccaattaaaatattggttttccacttaacaacctttttttttgtttgggcccccggaaaaccttttaatgggccctttccttttttttccaaacaatttccaaatggcctttccgggggattttttttttaagggggggcattggccccccccccccttattccccattgggctccccgggaaaataagggggacccctccctttggaaaaactttttttctttttttccggaaaaatcccccggccaaaaatttcgggttgccccccaaaggggttgccccccccaaattttgggattgcccgggacctttgtacccattaatccccaaagttttaggggacccttccgggggggcaaacaagggggcttttttgttccccaaaattggttttggaaatttccccggcccccacctttttaaaaataaccccgggattgtggttttcccaaaaaaaggtaccgggggcaaggcccttttgggagatccctttggtggaaaaccc

SEQ ID NO: 139832 - DNA, 347 bp, Zea mays
  Clone ID: MRT4577_59011C.1
caccgggcggggatcaaagggtgagggcagtccgcttgaccatagggggccgacagcctgccacccgcggatcaagacgctggaaacctcgagctgcataaagtccggttcgggcgtaccaaccacgttcggcggcagtgaccgcggtgtccagcgagaccaacagggtgaacgccgacacaagccgccgctcgtgcgcggaccgcagctctgccgcggtgtgacacggaaacggcgcccgccccccggagccaaaacacgggcggctgaaggctcaaggcatcatgatacaccccggccgagcgatgcgggcagaaccacatgatacacgctggcggccgctgcac

SEQ ID NO: 139833 - DNA, 266 bp, Zea mays
  Clone ID: MRT4577_59012C.1
gcgctcccctttgctcgccgacgccgggagtcctccaccgctacgggcccagcgctggaggactccagcccccgcattgtcgaaggcaaggccgtggtccgccgccgcgcccgttaatctccccaggggctcgtcctccaccagctcgacatgtgctgccgcaacgccgacctgaccagctcgctcctcctctactacgactccctctccccgtacaatcccatcccgctctcggtgcagcactacaactggctgctctagctctg

SEQ ID NO: 139834 - DNA, 394 bp, Zea mays
  Clone ID: MRT4577_59013C.1
aaatattatcaccagccataggaaaatccgggcttgccgggtcgagccttcgttattttccctacactttttttttattttgggaagttcctttcgtggggggaacaacaacatacacgtttgttcaaaaggttttttttttttttgcgggggtttagttatgcggagcaaactgcaaagtccgggaaccggttaagttttcccaaaaccaggttttaaacgtcctccaaggacgtggaagccctaatttccttccaaaggttaaatatagctccaaagacgtggccctggggtaatatacagaaccacatcgggcgataggatgccctgctgaacttggagtttcgaactgatctgtaaacatggggggttgtttcccccctcacaaggggaa

SEQ ID NO: 139835 - DNA, 335 bp, Zea mays
  Clone ID: MRT4577_59014C.1
atatataaatatatattagatatataatacacatatatatacgagaggggcctataaaatagttttcgctcatggcctctaaaatgctaggaccgaccctgagtgcgtgccaaaaccaacaaaatactagcatgtggtgtggatgttggttagctaggacttgtcgggtagggttgtgtacttgtgtgcaacgtattctgtgtgattggttaccgtagaagtcgagtcaggtacgtatgagtctagccagtattagtagaaccaagataagtttgtgcaaacacttttgtttggttgtctgtataaactcctgcaaattaaacatagatttagtt

SEQ ID NO: 139836 - DNA, 326 bp, Zea mays
  unsure (1)..(326): unsure at all n locations
  Clone ID: MRT4577_59015C.1
ggaaatcgcgcgtctcctcctccgcgcttaatccagataaaggaaaaacgcgaagcagagctccctccctcctctctcttcttcttcgtcgtggtgtggggcatctcgcaccccacccatccctgtcctcccgctcgccggtgcgcgcgcttttctagggtttccgctgccccagccgccaaccccgctcacctctcgtcagcggcgatggggtttggtgggtgtcttttttttttttaggggcaggggccgggggcgggaaggacgaggagcncgccgancnggngcggcgccccanggacgcccncgcgcgccacgcngaccgc

SEQ ID NO: 139837 - DNA, 210 bp, Zea mays
  Clone ID: MRT4577_59016C.1
agcagtggtaacaacgcagagtacgcgggctgaactgatacagctgtgctgtctgatctgactgcgataataaaacctgtacttataaaagatgtgtctactgcctgttggtcagtgcttatgcgagttttgatgccacatgatatgaaatattctacatcaattaaaaatatactcgctatcagtatgggctagtttcatctaagtaaa

SEQ ID NO: 139838 - DNA, 250 bp, Zea mays
  Clone ID: MRT4577_59017C.1
atctccagtgaaagtctctaggccaaaaaaatacagtttacatgttaatgttcctaggtggaaacccgtcaaaactgacatttcactcttaaaacatgacatacagctcattgcctcagggcacaagcgggtctatatacatatgagagcttacacaacaatgttgtacatacgcacatatatcgaggtgtactatcctaacccactcgtccgcccacgcatatctccacgcatgcgtggactcgcgtgc

SEQ ID NO: 139839 - DNA, 254 bp, Zea mays
  Clone ID: MRT4577_59018C.1
gtctcaccccccgcatcacaggaagtgcttgtaaatatgaatcaacggaggctctacctaccttttagaataccaaacatcttccactacccccgtaaaaaaaacttggcacttcctgcatgatctaaccaacttacctttatcaagaccggactgatacacgtttcttagccaataaccgggattttttgtgatagcaatccagtcttcacgtattatgcaataagacaacacttgctgctgtgttcttaaca

SEQ ID NO: 139840 - DNA, 515 bp, Zea mays
  Clone ID: MRT4577_59019C.1
ggaaagaaaccaagttcctgatgtttagccttaaaccacaaaatgccgcactataacacaatattgctgcgaccgtcagacttgtacaaacaacttctgctcatcactagaaaaaaattggacttgtctacacagcaatcccgggaagcggccatgaagccaatcggctcaatccatttaacacttgtcactctatcgggacactgatcaacggtcagtggttcaacggcaggcctatgtgatatacctctgattctaggtcttcgcccttatacgggacacaagatcgggagggaagattccttgccttgcccatgcaggatctattgactggaccatgccactcgtgaagaatgctcctggcgggaaaaactaccttttaaacttgtgactgaacgctaagtgcctcagaccctttgacgaaagtgggttgtctacaacgactggcttgatggcctgaacatcctttccacttgcgtaggggcttaaagctgatcagacaccttcgacaggtc

SEQ ID NO: 139841 - DNA, 435 bp, Zea mays
  Clone ID: MRT4577_5901C.1
acgcgagagttgttatgaccggcacagcacaaacgcgtggggggggattttaaaaggactgatgcgctccataacgcgacccggggaagagcgcacagagcgatgatgggatgaagcacagggggggaaatgcggaagcaaaagggggcagaggctcatgcccgggccaaggctaccgaagggaacaaggacgacagtgtacaatggcaggcaacgcgaggcataaacggaacaggagcgcatagcccagggggacgaacgacaaggcccacaagggagaagccccgacgagaggaggggaccaccgaagaagaacggatgtggctgaaacaatggatgcagaccggaagaaggttaaccctaaaagcaggggcatcgtacacagcagaataaaaacccgggcaggtgggacgcaggggggaccccactagaaac

SEQ ID NO: 139842 - DNA, 327 bp, Zea mays
  Clone ID: MRT4577_59020C.1
ataaatctggtctatataatatgcgtcgtcacttccattggaaggatgcgaatggcaaaatgctaaaaggaggcgactatttcacctattcatttgaaaatggcgtgcatctgcttgaatcaggacaaagtctactgtccgtttatgcttggtcattaggagtacgtgaagtgattgcaaatcaattgcgcaatccaaaactatggttttcactgaagaacgcatatgacgccactcgtcgattggagtacagtcgagatggaccatgtgccgaaattttgtttgttcctacagaaagaggtgctttcgatcgatatacagcgtgca

SEQ ID NO: 139843 - DNA, 362 bp, Zea mays
  Clone ID: MRT4577_59021C.1
atcagttcgtccttgcaaaacaaagaatataaaaaaaaacaaaaaaacaaaggcaaacgtacaaaaatgagaaatataatataaaaaaaaactaaattaaattcaactaaccatcattttacaactaaaataactaaaaaaaaccataacattaacccaacttggtcccctttcataacatcccaactttctccacctgtcattataacttaatatcttttttctgttcccccttaacaacatttccgcagcctgattttcaaatggtactctcaaaaaacccctgcattcaccactttaattgttgtggaaacacaccccttttccgccacttttttcaataccataaggccccccccttt

SEQ ID NO: 139844 - DNA, 399 bp, Zea mays
  Clone ID: MRT4577_59022C.1
attagtgaaccgggtgcatcattcccaggggcgagactaaccaaacacaagaacccaaagagaactgcgaccccagagggcaactagcaaacagttaaacaccagcgttgaaaacaaggcactccccatgtgttgaaaatgccagcggaatctgtatattgaaaccgcataaactttctgaacttaaatcatcaaagacagcaataatagagaaaaactgctgctttcagcaatggtcattatgggccgcggaagcatgctgccaaccggctggaacaaccctaggaggtacagcttcggaaatgaccgggggaggataccgaacattatcccccacatcacgggttggaaccacacctcggggaccaccccaaacaggaaccgtaggatcaacagggg

SEQ ID NO: 139845 - DNA, 181 bp, Zea mays
  Clone ID: MRT4577_59023C.1
gacctcaatgcgacctcattcttcgccgtctctgtgtatcgtttttcccccgagatgcgcgaaggagatagagacagagaagcaatgacgacagcggggaaggtgatcaagtgcagagccgccgtggcgcgggaggccggcaaaccgctgtccatcgaggaggtggagaaacatccgctgc

SEQ ID NO: 139846 - DNA, 307 bp, Zea mays
  Clone ID: MRT4577_59024C.1
tcgcgcacgcgtccgctaatgccttggcggcgtctaatgctctacattccacagacgcgcacgagatcgtccgcaactcgtacctggctacacatactatgtcgagctcacggcactactctcctatagcgcggcgctggacacgctgacattaaatggcagccagaggcaaacatctgtggctgactgctggcggccagagtgtgacgtcgcgacgctgaagacacctgtgcacatagttaaggcagcgtaggagtcaccgcaggctaagagcgtcgtagcatctaattcagttgatacgaacaac

SEQ ID NO: 139847 - DNA, 378 bp, Zea mays
  Clone ID: MRT4577_59025C.1
tactgcttgcgtacatcatggagaacggaattgccgatgttactaccatagagacacctgttcccatggatgatgccttaaaggactacaaaaggctagatcacatccatcgccacatggattctattaacgaatcaatagacgtgcgatgatatgtgcatggctacttcgcttgcaatttgctatacaacttcgaatggaccgaccgttataccgtacgttatggcattggctacattgaccgcaacaattacaggacgcactacatgaaggagtctgaccagtggatcaaacagatcaacgccagcaagaagaccatcacgaaaattcttacaccagcttacaaatcatgggcctgatgatgatagtacactccat

SEQ ID NO: 139848 - DNA, 305 bp, Zea mays
  Clone ID: MRT4577_59026C.1
cggacgcgtgggcgctgtcgtttttgctcgcggttcccaggccttcagtgcccgtcaccgttgtttatagtaacagatattgattcttgacaaaggaattgtaggatattgagatagatgatagtatatatgtgaaaggttctatgtaaccattatatattaatattttgtatgtagtggcaacacatcacgactctttgacgatgattaatgtgaactacttcaaggaattgatgcgtacgagtctgttgttgcattcattgctggacttacggcacccaccgtccgtttgatgggtcaatgct

SEQ ID NO: 139849 - DNA, 502 bp, Zea mays
  unsure (1)..(502): unsure at all n locations
  Clone ID: MRT4577_59027C.1
tccggccaatgaacgcgcggctgactggatcaggtgcatgtccccgagtagtcagcgcccctactttcccgcgccaaaggagcatgctcacagtgacacgccacgtgcggagcccataccgctcatggtgcagcacaatctgtcagctcacgcaagacgacattcatcaagctggtatgcttaacatctaatggtactacctaaattatttcgagctgcatgatcattaggtctaacacgtgcaagacacatttgacattgttacttcgcaaaactacactggaaggaagtgcccagntagatctaagatttctaggagctcggatacgaaatcggccacaaggcaacttgacgacttcttaacaacgctccacaagaggttgctagataagaagaagcgcgttactcatgaagacttacaagcgtaatggccgcatgagatattgcagcctaagggtactcggtcccttgctcgatcccaggcaacacatggtacactcgc

SEQ ID NO: 139850 - DNA, 1502 bp, Zea mays
  Clone ID: MRT4577_59028C.1
ccgggaaaaaaccagcgtctccaaatctcacgctctctcctcctccccatctccaatctcgcactctcctctcccaaaaaacctcatcttccccgctcgtctgcattctcggccatcggcggcgctccagagttccaggccaggagaagctagagttacaaatcgtagtccgtgagaaccagttgaatttcatcaatcttatcaggtcatctcaagttcagtgactctcaaccagcctacaacgacggaaaggaagttggcaccttcaagggtcctcaaatattgctgcaccggacgttgtgtcgtgtatcattgagaccttccttcctgatataggaaggcagggttcatgagcggcggcacgcctgcagcaagcagtagcctgcgggcagcactctcatactgcgtgaggcaagtccgcgcctatgactaccaccactacctctgccttctccacctggccccggccgtgcgcaaggccgcgttcaccttccgcgccttcaacatccagacagcaagggccatggatgtggtgtccgacccccggaccggcctcatgcgcctcctctggtggaaggaggcggtcgacaaggtctttggcaacaagctggtcgagcacctagttgcccacgcgctctcttcggtcatcgcagaccataaggttagcaagcactggctgaagcggtccgtggaggcgaggatcaacgacaccaaccgtgaggaaggcaccattcctgggacgagcgcggagttggagaggtatgcagaggacacccagtccaccatcctttacatgaccctgcaggctggcggaatacagtctaccgtggctgaccacgccgcctctcacatcggcaaggccagcgggcttctgttactgctcaaggcgctgccgcaccatgtaaataagcaagggacggtacattatatcccagctagtgtggccgaggaatgcggcctgctcatcacacgggagggtggcaggtcggaggtcagggcgggcgtgaggctgccagacgtagttttcaaggtcacatctgttgcagaggctcacctgcacaaggcgcgggagttggcatcgtccgtgcccaaagaggcgatccctgtgctcctcccagccttgccggcctaggtcctcctagataccctgcgaaggtgtgagttcaacgtgtttgatcctcggctgtcgaggggagtccacgaggtctctcctctgtggtaacagctgaagcttaactggaacgcgtggcgaagcaggtactaatgaggaggaggaactttttgccctcaaccatgggagctgctgttgttccttgtagcaaaaagctttttattggggggtttttgacatagcagagattgaataagatgagtagggtctgctacttgcagcagatttgaagctgttgaatatgtgtcgtgctttctgttgtgtttgtgggttgggctcatttacattgcacaattgcaacactgacaatgcctattttatttttgtttag

SEQ ID NO: 139851 - DNA, 741 bp, Zea mays
  Clone ID: MRT4577_59029C.1
atctttccgcttggggcaatgacgcagctagtgaggtataccgaggcgcgtcaattgctggttgaaaactatttccaaatcccctctttggccctcatgggccactgagaatttctggaagggctccctctcttcggagaggggaaagccctacaatccgatccgacccaacgcggctccagtgccgccgccgtgccctaacctctcctccgcggctcccaacccgtcgccgcccggacccctccgcctttcacgcgagtcgccgccaccgccgttcccgttcaaccccaccgcgtcgccctgccgtcccaaccccgtccggcgatttcggtcatcgtttctgaggtttgtgcattccaagccagccctaggacacctcttgtgacagtatgcctaagataaagacaagccgtgtggaataccccgaaggatgggtgcttatcgagcccacaatccgtgagctggatgccaaaatgagagaagctgaaaacgatacacatgacgggaagaggaagtgtgaagcactttggccaattttccgcatttctcatcaaagaagccgttacatatatgatcttttctataaaaggaaggaaatatcaaaggagctgtatgagttctgcctgtaccaggggttatgcagaccgtaatctgattgcaaagtggaaaaagccgggttacgagcgcctctgctgcctccgctgcatccagacccgagaccacaactttgcgactacatgc

SEQ ID NO: 139852 - DNA, 270 bp, Zea mays
  Clone ID: MRT4577_5902C.1
tcttatcgcgtggggtcgcgcgcgcccctcgaaaagccacaccccgtcgtctgacctcgtggtgaccggtcccgcaggcggcgacaggagatggacggggagcaggcggcgcggtgggcggcggcgcaggatggggttcccgccggggcggaccttgtcggggcggggctgcgtcagatgagctttctctggttggggtaccgtgacagttgggtcttctacgagggcacgatgacatattgagatttaagcatttactatgcaccccaa

SEQ ID NO: 139853 - DNA, 280 bp, Zea mays
  Clone ID: MRT4577_59030C.1
cgggcagtgaggaggaggatatggatgcacttttgaacaacagcctgcccccaccccacccagaaaatgaagaggacccagaagaggatttgtcagaaacagagactccaaagctcaagaagaagaaaaagcctaagaaacctcgggaccctaaaatacctaagagcaagcgccaaaaaaaggagcgtatgctcttatgccggcagctgggggacagctctggggaggggccagagtttgtggaggaggaggaagaggtggctctgcgctcagacagtga

SEQ ID NO: 139854 - DNA, 893 bp, Zea mays
  unsure (1)..(893): unsure at all n locations
  Clone ID: MRT4577_59031C.1
ggcgagcggacccaccccgcccaactgtcgttatccggattcaggtccctcccaagtcccaactgttcacctcccgccgccccctcgcgccgtcaaggcctccggaaccggtcgcaagcggcgtaggacccccgccgctacagagccctcgtccgtcgcacttcgccgccgcgtcggagtcatccagctcgtcgacgcctggcggggagatccccagtgcgaggggaacctccacgacgggaccttccttcctgatacaggaaggcagggttcatgagcggcggcacgcctgcagcaagcagtagcctgcgggcagcactctcatactgtgtgaggcaagtccgtgcctatgactaccaccactacctctgccttctccacctggccccggccatgcgcaaggccgcgttcaccttccgcgccttcaacatcgagacagcaagggccatggatgtggtgtccgacccccggacatgcctcatgcgcctcctctggtggaaggaggcggtcgacaaggtctttggcaacaagctggtcgagcacccagttgcccaggcgctctcttcggtcatcgcagaccacaaggttagcaagcactggctgaagcggtccgtggaggcaaggatcaacgacgccaaccgtgaggaaggcaccattcctgggacgagcgcggagttggagaggtatgcggaggacacccagtccaccatcctttacatgaccctgcaggctggcggaatacagtccaccgtggctgaccacgccgcctctcacatcggcaaggccagcgggcttctgttactgctcaaggcgctgccgcaccatgtaaataagcaagggacggtacattatatccccagctagtgtggccgaggaatgcngnctgctcatca

SEQ ID NO: 139855 - DNA, 1899 bp, Zea mays
  Clone ID: MRT4577_59032C.1
cattgggtacctcgaggccggccggggttcacctcccgccggcccctcgcgccgtcaaggcctccggaaccggtcgcgagcggcgtacgacccccgccgctacagagacctcgtccgtcgcacttcgccgccgcgtcggagtcatccagctcgtcgacgcctgtgggggagatccccagtgcgaggggaacctccacgatggttctaggtctctcccccttcccgcgcctccaaagctcccgctctctcttcctccccatctccactcgcgcactctcccatcccaaaaaacctcatcttccccgctcgtctgcattctcgcccatcggcggcgctccagagttccaggccaggagaagctagagttacaaatcgtagtccgtgagaaccagttgaatttcatcaatcttatcaggtcatctcaagttcagtgactctaaaccagcctacaacgacggaaaggaagttggcaccttcaagggtcctcaaacattgctgcaccggacgttgtgtcgtgtatcattgaatgaagcacacctaggttagcaaaggcatgccagattctacatgttccaagaatgacaacatttagtccatcctgaaatacatcaagagaccttccttcctgatataggaaggcagggttcatgagcggcggcacgcctgcagcaagcagtagcctgcgggcagcactctcatactgcgtgaggcaagtccgcgcctatgactaccaccactacctctgccttctccacctggccccggccgtgcgcaaggccgcgttcaccttccgcgccttcaacatccagacagcaagggccatggatgtggtgtccgacccccggaccggcctcatgcgcctcctctggtggaaggaggcggtcgacaaggtctttggcaacaagctggtcgagcacctagttgcccacgcgctctcttcggtcatcgcagaccataaggttagcaagcactggctgaagcggtccgtggaggcgaggatcaacgacaccaaccgtgaggaaggcaccattcctgggacgagcgcggagttggagaggtatgcgagaggacacccagtccaccatcctttacatgaccctgcaggctggcggaatacagtctaccgtggctgaccacgccgcctctcacatcggcaaggccagcgggcttctgttactgctcaaggcgctgccgcaccatgtaaataagcaagggacggtacattatatcccagctagtgtggccgaggaatgcggcctgctcatcacacgggagggtggcaggtcggaggtcagggcgggcgtgaggctgccagacgtagttttcaaggtcacatctgttgcagaggctcacctgcacaaggcgcgggagttggcatcgtccgtgcccaaagaggcgatccctgtgctcctcccagccttgccggcctaggtcctcctagataccctgcgaaggtgtgagttcaacgtgtttgatcctcggctgtcgaggggagtccacgaggtctctcctctgtggtaacagctgaagcttaactggaacgcgtggcgaagcaggtactaatgaggaggaggaactttttgccctcaaccatgggagctgctgttgttccttgtagcaaaaagctttttattggggggtttttgacatagcagagattgaataagatgagtagggtctgctacttgcagcagatttgaagctgttgaatatgtgtcgtgctttctgttgtgtttgtgggttgggctcatttacattgcacaattgcaacactgacaatgcctattttatttttgttttggaacatacaatgcctgtttgtattcatacagcagaaagcagacactatttttttgataaactcaattagttcctctatagtttataaaaaaaaaaaaa

SEQ ID NO: 139856 - DNA, 239 bp, Zea mays
  Clone ID: MRT4577_59033C.1
gacgcttcaaaagacatgcattatactttgttttgcaatccaacggttgttatttcaacatcacattaaatgccaaattatttgggtggggccaacaactaatctgtactactgagtaacaaatcacccaagtggaatggaaaggctcattactaaattgccaaagaaacagatgcatctgttcccagtgagacttttttttacaccttttgcagatccaacattttaacagcttacta

SEQ ID NO: 139857 - DNA, 1506 bp, Zea mays
  Clone ID: MRT4577_59034C.1
cattgggaacctcgaggccggccgcctgacgactcgcggtcaccgcctgcgggccaccgtccgcccccagctcgctcacgatattgtacgttcgtggcgcggagcaccgtggtgttggcctagtacgtcgatttcacggtgacttcactaccattgccgcccagtggctgcagaagctccccgccagcaacaagttcacctacaactgcgacggccacaccttcagttacctcatagagaaaggatttaggaccttccttcctgatacaggaaggcagaattcatgagcggcggcacgcctgcagcaagcagtagcctgcggacagcactctcatactgcgtgaggcaagtccgcgcctatgactaccaccactacctctgccttctccacctggccccggccgtgcgcaaggcagcgttcaccttccgcgccttcaacatcgagacagcaagggccatggatgtggtgtccgacccccggaccggcctcatgcgcctcctctggtggaaggaggcggtcgacaaggtctttggcaacaagctggtcgagcacccagttgcccaggcgctctcttcggtcatcgcagaccacaaggttagcaagcactggctgaagcggtccgtggaggcgaggatcaacgacgccaaccgtgaggaaggcaccattcctgggacgagcgcggagttggagaggtatgcggaggacacccagtccaccatcctttacatgaccttgcaggctggcggaatacagtccaccgtggctgaccacgccgcctctcacatcggcaaggccagcgggcttctgttactgctcaaggcgctgccgcaccatgtaaataagcaagggacggtacattatatcccagctagtgtggccgaggaatgcggcctgctcatcacacgggagggcggcaggtcggaggtcagggcaggcgagaggctgccagacgcagttttcaaggttgcatctgttgcggaggctcacttgcacaaggcgcgggagttggcaccgtccgtgcccaaagaggcgatccctgtgctcctcccagccttgccggcccaggtcctcctggataccctgcgaaggtgtgagttcaacgtgtttgatcctcggctgtcgaggggagtccacggggtctctcctctgtggtaccagctgaagcttaactggaacgcgtggcgaagcaggtactaatgaggaggaggaaccttttgccctcagccatgggagctgttgctgttccttgtagcaaaaagctttttattgggggtttttgacatagcagagattgaataactgcttgcggcagatttgaagctgttgaatatgtgtcgtgcttttcgttgtgtttgtgggctgggctcatttacattgcacaattgcgacactgacagtgcctgttttatttttcttttggaacatacaatgcctgtttgtattaatacagcagaaagcagacaatattttttgataaacgtaaaaaaaaaaaaaaaaaagcggcc

SEQ ID NO: 139858 - DNA, 1387 bp, Zea mays
  unsure (1)..(1387): unsure at all n locations
  Clone ID: MRT4577_59035C.1
gctcatttatatacctttgatcatatctctttctttgctatgactaatgtggctttcaagtgtatttcaagctcagtcatagattgaaaggggaaatggagtcttcggcgaagacaaggcttccactccactccatcgaattattcatccttcgccgtcgctccgcaccgctctccaactttgagaccttccttcctgatataggaaggcagggttcatgagcggcggcacgcctgcagcaagcagtagcctgcgggcagcactctcatactgcgtgaggcaagtccgcgcctatgactaccaccactacctctgccttctccacctggccccggccgtgcgcaaggccgcgttcaccttccgcgccttcaacatccagacagcaagggccatggatgtggtgtccgacccccggaccggcctcatgcgcctcctctggtggaaggaggcggtcgacaaggtctttggcaacaagctggtcgagcacctagttgcccacgcgctctcttcggtcatcgcagaccataaggttagcaagcactggctgaagcggtccgtggaggcgaggatcaacgacaccaaccgtgaggaaggcaccattcctgngacgagcgcggagttggaaaggtatgcagaggacacccagtccaccatcctttacatgaccctgcaggctggcggaatacagtctaccgtggntgaccacgccgnctctcacatcggcaaggccagcgggcttctgttactgctcaaggcgctgccgcaccatgtaaataatcaagggacggtacattatatcccagctagtgtggccgaggaatgcggcctgctcatcacacgggagggcggcaggtcggaggtcagggcaggcgagaggctgctagacgtagttttcaaggtcgcatctgttgcggaggctcacctgcataaggcgcgagagttggccccgtccgtgcccaaagaggcgatccctatgctcctcccagccttgccggcccaggtcctcctggataccctgcgaaggtgagttcaacgtgtttgatccttggctgtcgaggggagtccacggggtctctcctctgtggtaccagctgaagcttaactggaacgcgcggcgaagcaggtactaatgaggaggaggaaccttttgccctcagccatgggagctgttgctgttccttgtagcaaaaagctttttattgggggtttttgacatagcagagattgaataactacttgcggcagatttgaagctgttagggtttagggttattcaattgtgccatgggagctgttgctgttccttgtagcaaaaagctttttattggtgttttttgacatagcagagattgaataactacttgcggcagatttgaagctgttgaac

SEQ ID NO: 139859 - DNA, 1641 bp, Zea mays
  Clone ID: MRT4577_59036C.1
ttgggaccctcgaggccggccggggataaagaggagatccatatatcatgtgccaaacagggccttagtctattctcgcgacggccggtacctccccggcaccccgcccgtcctcccgacggccgacgcctcccgaccatcctcccaaggactagcgtcaggcaccccagcctcgggcgccacgaagctattagccccgtggacgcgacggcggcggctccggctgccacaccaacacagacaggcaagggctagtcaaggcgcaagaagaggaggggaagtcgaaaataatttagcagcggaagcggaagcagcagcacgaggtgggtggggcagcggcagcgggggaccttccttcctgatacaggaaggcagggttcatgagtggcggcacgcctgcagcaagcagtagcctgcggacatcactctcatactacgtgaggcaagtccgcgcctatgactaccacccgggccgccgggcgtcacggcctcgcgcggctcccgctcccgcgaggccgcggctcccgctcccgcgatgaggaggaacacaaccgtcgcttctgcgtgaacgacgcggctcccgccgggtccgcgagctcgtgttcggacctgaccagtggcggcttcttccccgagggcgcgaacggcgggacgcgctccgccgcttttcccccatccgcttgccaacgcgactcaccgactcctccacgccgcgtcgagatcgctcaggccttcgcttctagcaactccaccactcagcccacccgccggagcaatggggagcacggggcgcaagccggaggttaccgcgccgacttccccgacggcttcgtcttcggcgtcgccacctccgcgtaccaggccaggagaagctggaattccaaatcgtagtccgtgtgaaccggttgaatttcatcaatcctattcggctcgagcgcgctctctcactcatcccccagagatccaccttcccctgctcgcctccgctcacctgcgtgctccggcaacagccgctttcggacttcggtttccctccaccggcgctccaaagaacgttgacgaatatacagatcagctgaccaagaatgaattatcatcaccaccaaaaaagatgaagcacacccaggttagcaaaagcatgccagattctacatattcaaagaatgacaacatttagtccatcatgaaatatatcaaggtatcatgctccatcacttttggtcctgagacttttatgtacatattaaccttatgtttagaccttcctaaaacggtgtctatgcaagaaaagctaggtcacttttgatcagtaaactgttatttgcaccttgcacacatagaaaaggctccatcacttttggtcacaagacttttatgtacatattaacctgatgttgaagcctttctagaactatgtgtgtatgcaagaaaaactatgtcacttctggtcagtagacttttatgtatatatgactccaccgttggagcctttttacaactatgtttgcatatgtaaactctgcatatacactattactggacactcaattatgctagtttaatgtaacttgccacttattgtaatctaaaaaaaaaaaaaaaaaaaaaaaaaaaaaaggataaaaaaaactcgaggggggg

SEQ ID NO: 139860 - DNA, 677 bp, Zea mays
  Clone ID: MRT4577_59037C.1
tgggtacctcgaggccggccggggtccgcatatctgcaacgttgcctcgtcacctctatcctccggtctctcaccgcctaacacggcggcagaggcggcggcgtggtggaggccgtgccagagaggttcgacgacttcgatgttgtgttcgtgtgctacttccctggaatgggagtctccgcgggggcgctcctcaaatcgctggccaagaggtgctcaaaaggtgcaagagttgtcatgttcttagatcaaggcagacagaattttgagcaacaacggagagagcatcctgatgttgtaacttcggatttgcccagtatagccttcctggagaaggctgcatctgggaacaagtatgaaataacagagttcgttgacgagcctagcttttaccttgctgttttgcagtttcaaggatgatttgttccttttttgcaatatttgtgaagcaaattgtgactgtctgtaaatttgcaatatttgtgaagcaaattgtgactgtctgtaaattctgatggacgtagtttgtgggtggcttatgtcgtactagcctgtttggtttgctgtctaatttatcacactttaactaattttttgtgtctaaggttagttcttctatctgaacgactaaccttaatgattaagtgtggagcaaaaaaaaaaaaaaagaagcgggc

SEQ ID NO: 139861 - DNA, 377 bp, Zea mays
  unsure (1)..(377): unsure at all n locations
  Clone ID: MRT4577_59038C.1
gggggccatttttttccttaggatttaacttanaataaancctgacgggggtaacagcacccatcgatccccantccatgctggttgatgcttttttttttttganccnnatatggggggtcgcggggggctnacacananccaccttcantcaaaaacacaaatgggcaacaacaaacactagacgaacgaagataaacactctggacttgggttaacaacacggtcgcgaacaggataacttgggcgggcgggccccaccgctcagttcctccatttcccgtctgagttgccgtagcctccgtctcggttgccacctctctatccgccttccccaccactctatccgccggcgtccccaccgtagcccccgccac

SEQ ID NO: 139862 - DNA, 1107 bp, Zea mays
  unsure (1)..(1107): unsure at all n locations
  Clone ID: MRT4577_59039C.1
gggtacctcgaggccggccggggggtgacagactgacaggtccgtccgcaaatctgcaacgttgcctcgtcacctctatcctccggtctctcaccgcctaacacggccgccatggccgccgcctccacctcccttccccttggcttctcctctcaccaccgcccaactcccagaatccggccgcagccccagtcccagtcgcaaccactgaaggcaaaaccccttaacccccttcgcttcagcctagccctcaccccggcgaccgcgaagccccgcctcgctgcgatgcccgacgatgtcgccgtcgccaacttcgtggagaaggactggtcgttcctcgagtccgcgggcgcaaacctccagcgcgctctcgcgtcgggggcgctctcgccggcgtcgcgggtgttggcattgacgcccacggcgtccttcgtgaggtcgctcctcgcgtcctcgccctgcgagctactggtggccgcgcatgagtcgatgtacgtgctggcaggggtcaaggaggcgcacgacgaggtgaggtgcttccacctcgagggtgggggcggcggcagaggcggcggcgtggtggaggccgtgccagagaggttcgacgacttcgatgttgtgttcgtgtgctacttccctggaatgggagtctccgcgggggcgctcctcaaatcgctggccaagaggtgctcaaaaggtgcaagagttgtcatgttcttagatcaaggcagacagaattttgagcaacaacggagagagcatcctgatgttgtaacttcggatttgcccagtatagccttcctggagaaggctgcatctgggaacaagtatgaaataacagagttcgttgacgagcctagcttttaccttgctgttttgcagtttcaaggatgatttgttccttttttgcaatatttgtgaagcaaattgtgactgtctgtaaatttgcaatatttgtgaagcaaattgtgactgtctgtaaattctgatggacgtagtttgtgggtggcttatgtcgaaaaaaaaaaaaaaaaaatttgcggccggtgncatgttcttagatcaaggcagacagaattttgagcaacaacggagagagcatcctga

SEQ ID NO: 139863 - DNA, 744 bp, Zea mays
  unsure (1)..(744): unsure at all n locations
  Clone ID: MRT4577_5903C.1
ttagccgccgccccctgctctatctcccagccgccgccgccaggggagggatttcctccctgtcctgccgagcgggccccaccagcggccgtcccctggccttcttcctctgcatgtcacccgcgccctcctctcgattctctctcccctcccctgcttcttccatgcgcgtccgacgtcaccgagccgctggacgccaggcgcccctgcagccgacgcgcccagctgctcgcccaggagcccgcgcgccaggcctcgccactcggacccgccctgcagccgcgcgccagcgaccgtgcgacgtccagcgccgggaccgtgcaccgcgcgcccagccgctcgccgaaccggctgctcagcgccctgccctgcggtcgagcagccgagctcgacccgccgagcgactagcgcccaaggccacccgcgccctgcatccacgacgcgaagccgccgaccgagcccctgcaccacacagcgagcgcccaacccgaccgcgcgacgaccgcgagcacagcagaagccgagcagccccgaccgtttcctctgcgttcaagacacttcaatggagtcgttactcctctcccattaatcctttcgttgatgaatgtcattaatggtgcttgataatgttggctgtttcttccctctccctggntctctctctccctcccctttctctataattggaagctgagccttctccctctccctgcccgatctccctctctcactccctcctcaccg

SEQ ID NO: 139864 - DNA, 315 bp, Zea mays
  Clone ID: MRT4577_59040C.1
actgactcgtgtacggatttgtgtgcagatagagaatgatcgacatgggcttgggtaaccagatatgggagaggcgaaatgatgctgtctcattgaggggtatgaagtttatggactgtttgtagtcaagattgcatatagtgattcacctagttcattacagctgatgcatgtataacaccttaagcatgtactgctaggatttccatccaaccatattagactaatttagcattcacttatgtaaactgctagctactgtcaatggtgttgtttgacttatacatgctttggttatatttgtcaatatataac

SEQ ID NO: 139865 - DNA, 278 bp, Zea mays
  unsure (1)..(278): unsure at all n locations
  Clone ID: MRT4577_59041C.1
tnataattttttatgggaatgctttttcttttaccgagaggatgggtacgttccagcgagaaacgcccacacacgaacccgggcgacatgggccccgagggtgggcccgcctgccatacaaaggtggaacaaacacaaaagggcactactgactaaaccaggtgctggggcccttggggccccaaggcttgtcccaataacaataatcccgacagatggtcgtcgcctgcaactattcatggagcgtgacccatgccattagaagccgggggctgata

SEQ ID NO: 139866 - DNA, 118 bp, Zea mays
  Clone ID: MRT4577_59042C.1
ctcttctatgtggcatttctgttgctttttatatatttggtaggagcacttgctcgtccatctgagctcgccccctagcgaggcatgccatgatggcgatctatattccgccgctaca

SEQ ID NO: 139867 - DNA, 846 bp, Zea mays
  Clone ID: MRT4577_59043C.1
tacactcctatgggcaattgggttcctcgaggccggccggataaggggctgccggcattcttgtcctgtgacctccttgcctccttgccactcccggactccctccttctccatgtctgtcctacccattttatagaaggccctccagtgaagaccatatcagctattaggggtttgcacggtatgctgggtttacctgatcacattcttgtagcggcggcaagcgattctattgagagtctgccatcatgtgaagccaccaacaaatttggtgcctcctttgaaactccttcgggtcgtagactggtaaaaccatcagactatatggagttgatttcctgtatgaagcctaatatatgggccagtttggcggatgaggtaccagcttgggtgactgagaaacgaaacaaagtctctgttgacaggacattgcggtggcttgatgcatgtattgctttggatgtggcttctgggactaatagttttggtgtaattgtgggaggatctagcttagaacagcgaaagctatgtgccactgaagtgtcgaagcggaatgtttcaggcttttggattgcgggatttggctttggagagagtattgaagaacgttgcactttgctcaatgccacaacagattgcttgccacgggaaaaacctcggctcgtatctaggcttggtcttccagaggaggtcttggagggtgtggctgctggtatcgacctttttgactcccatacatttaccaacttactatgggtggtttcgcactgatcttccctggtgacatggttgaaagagaaatgcaaaagggtgtactcaacactactgatggcgattcaacaaaga

SEQ ID NO: 139868 - DNA, 406 bp, Zea mays
  Clone ID: MRT4577_59044C.1
aggcgctatgctaatgaccgttacgaaaactaccagggaacgctccaaaaggttgcagagaagactcccatgaaaattaccaaaaaaagcttggtggggagccaaaaaaactaaaggggcctgaacagctgggttgctaagagaaaatttcggccctgccctggggaaaaaatatgggggcgcttcggtgccacttaatggcatagccaaaagccccctaatggggccactaattaccgatacaatcgacaactaccgggggaacagactaccttttttatttattccccccgcaccgataacatagtttgcccctaactaaataaatctggctccgccaggttaacgaaccatgcacggaaggagggccccatggatgaaggaaagggccccaacctgcgtggcc

SEQ ID NO: 139869 - DNA, 773 bp, Zea mays
  unsure (1)..(773): unsure at all n locations
  Clone ID: MRT4577_59045C.1
ttgggtacctcgaggccggcctcactcgtgtcctcgtttactgtgcccctcgtctccgccgtcctcggtgccgccatcgccctcgtcttcctcgccggctacctccgccgcaagcgcgccgccatcgcccacatccctcccaccgaaaccgccgccgccccggaccagcctaagcatgtccgcccctccaaccaggcccagtacaagaagggccatctccgcccgcatcaccacgcggccgacaaggacgcggccaagaagcaccaccatcttgatgtcaacaccttgagggggcatactgactccgtcactgcacttgccttctccaatgacgcctgcaacctagttaccgtatgtgctgatggagccatcagggtattcaggatcgatgatacctctagcaagagcttcaagattcttaggataaacttgccagctggagcgcaccctacggctgttactttctcagaggggtcatcatctgttgttgtggcggcgcaggcgcttctgggatcataaagtttggcatgggaagagtgggaaggagtttggtacagttgacaccaatcagttaaaaaataatatggctgacatatccccaaatggtcgcttcatagctgctgcggcttttactgctgatgtcaaggtgtgggagatagtttactcgaaggatggntcagtgaagggagttaatannagtatgcaactcaagggtcataagagtgctgttacttgcttgtgctttgctcccattctgagcaaattatactgca

SEQ ID NO: 139870 - DNA, 837 bp, Zea mays
  unsure (1)..(837): unsure at all n locations
  Clone ID: MRT4577_59046C.1
cggggaaacgtgccggttgaaaaaaaaggaaatacttggggaaaagccctccccttctcttctctcgccttcaccacgcgccgcccgatccgccaccgcccgccgcagccagcaagccaaggccagatggcggcctcactcgtgtcctcgtttactgtgcccctcgtctccgccgtcctcggtgccgccatcgccctcgccttcctcgccggctacctccgccgcaagcgcgccgccatcgcccacatccctcccaccgcgaccgccgccgccccggaccagcctaagcatgtccgcccctccaaccaggcccagtacaagaagggccatctccgcccgcatcaccacgcggccgacaaggcgcttctgggatcatctctttatatgtatgcggatgttagcgctcctccaaccgcggaaaacaaactgcagggaaagctttctccacctgaaatcaagtggagtcaccccaagatacatggcaaggagtctgtgctcaaccttgcagcggcccgtgcaactcatgggtctggtgatgggagcactattatcatttcatgctcagaagcaactgatatcaaagtttggcatgggaagagtgggaaggagtttggtacagttgacaccaatcagttaaaaaataatatggctgacatatccccaaatggtcgcttcatagctgctgcggcttttactgctgatgtcaaggtgtgggagatagtttactcgaaggatggttcagtgaaggaggttaataaagttatgcaactncagggtcataagagtgctgttacttgcttgtgctttgctnccaattctgagcaaattattactgca

SEQ ID NO: 139871 - DNA, 375 bp, Zea mays
  unsure (1)..(375): unsure at all n locations
  Clone ID: MRT4577_59047C.1
taatantttttttttttttaggcaattagactcgttactttttaaggagttttcggtttttcactgtttcgccccaaacaaacctttcactagggcctataccggggcaagggaagcatttttacagcaccccgcacagaaataatagggcccctcgtcctaaccaaaccagatctttccaaacactgggatccatgataggaactggcattaggtaaaagggtgcccattaagtaaaaaagttttaggccccaaaacaggggtattgggaactttttaaaaaagaaaaaacccaaaaaagtcaacgttccaaaagctttctaaaatttagataaaacactttgcaatttattgttaaacccccccaaggcttct

SEQ ID NO: 139872 - DNA, 554 bp, Zea mays
  Clone ID: MRT4577_59048C.1
ccatcaccagacccatgagttgcacgggccgctgcaaggttgagcacagactccttgccatgtatcttggggtgactccacttgatttcaggtggagaaagctttccctgcagtttgttttccgcggttggaggagcgctaacatccgcatacatataaagagatgatcccagaagcgcctgcgccgccgcaacaacagatgatgacccctctgagaaagtaacagccgtagggtgcgctccagctggcaagtttatcctaagaatcttgaagctcttgctagaggtatcatcgatcctgaataccctgatggctccatcagcacatacttgtcggccgcgtggtgatgcgggcggagatggcccttcttgtactgggcctggttggaggggcggacatgcttaggctggtccggggcggcggcggtttcggtgggagggatgtgggcgatggcggcgcgcttgcggcggaggtagccggcgaggaagacgagggcgatggcggcaccgaggacggcggagacgaggggcacagtaaacgaggatcacgagtga

SEQ ID NO: 139873 - DNA, 253 bp, Zea mays
  Clone ID: MRT4577_59049C.1
cctagatgagctagaagacgaggccaaagctgcccgagcccgagctctggcaagggcgtcagggtcctaatctggatgggtattgatcatgtccaacctgctggagccccttcacatggtggatgatgccccatgaccctgtagaaattgaatcctgctcacaacattgttggccttcttactaaccttggaccgtgattgagcccaagaaaccagggacttacgcatttggccaatgtcaaaagaacagaac

SEQ ID NO: 139874 - DNA, 585 bp, Zea mays
  Clone ID: MRT4577_5904C.1
cttgtaaaactcaatttccatatataaacataatcacagggatgaaatctatattccaatttccaatcaaattggattatgtacactttaaatacataagaattcaaaccttatagcttaaaggcttatttgaggcattaactgtgatttcaagtttaactcgaaccttagctggtttatacagcaggaagaggaactaagcaagttgaggacttgttcttctctctcttgatctgtgcttctagattggctattctttgtaatgatgcttgttcgatgcatgcacgccgcttgcattcttcctccaataaacatgtcatttcatatcttaattcagccatttcttgtgttaagtcctctgcttcttccttggcctttagtttctcttctttcaactcatccttgagctgctttacaagatctttgtattgaagtatctgtcttgccatatcttccattttgtctctcagtttcccatcctggaaaacctctaatttcttgatgatgtcatggaaacaatctggatttacaggcgcttcactttcactttccaaccttcctctaaagctttgacgtaagtctttg

SEQ ID NO: 139875 - DNA, 407 bp, Zea mays
  Clone ID: MRT4577_59050C.1
ccgggtcagtactcaatctgtctcactgtccattggcgtggcgggcggccccggggttcgcggcccactgtgactctggcttcactcttgcgctgcccgccgccgcgcgcaactgcgctgccagccaaacttgctgacatgttgctctgcggcacggggggagactgggcgacgggtgccagcggccctgccgtcgggcggggcggcagcagggcggcgggggcgaacgtggctagcgtctaccggctcctttcaacgctcaaagccagccggacggtgcgaggcaagactctacacccgacgcgttcctagcgcctcaagcgtacccagctccccatggcgggtccagtgcagcaaggcgagatcgcgcttcttgcccacccagcacgagaccgggcatttctgct

SEQ ID NO: 139876 - DNA, 303 bp, Zea mays
  Clone ID: MRT4577_59051C.1
tttattttccttggcatgctgtttacaacaggggggttttttaacatcttgcgggggaagaacaaacgcaaggctccaggaccagtgtacacaattggttgggaggccacactcaaccgatctttgaaagaatatactcccatttattggcccccgcgattataatcagtgccagatgctggaagaggcactaaccagcatccccccacggtgcatggtacagagatagattcatcggttcgcatgagcaagggttggtcccaccctctattgtacacgcagcaagcatataccaagagtctg

SEQ ID NO: 139877 - DNA, 2367 bp, Zea mays
  unsure (1)..(2367): unsure at all n locations
  Clone ID: MRT4577_59052C.1
ggcattttcatacttagcacactttatcaaacaatataatgtcaaacaatgcgcaaagcagcacatttgcttgacaaaataaaatgacgtctattccaagcagcagcagcttaaattatgttgatcacacagccagatcattccaacagtaaaaaggaaggaaagaaaaaaaaatacaaatgcagacaacattcagtttattgtataaaaggtagcgaaactacagccccaaggctgccgcctgcgtgatgcattggggtctcatcagtaacagccaggcctcccttcccttcctcctctcaaactctacgcaacaaaactaacaatgtctgcctcggttcagtgcaatattatcagtggagcacctactgttctgggctacatcaagcctgcatccatctattgtctcaccttcaattctgtgcccttggcaaagctgtcttatgcagattcaatcctcgaccactcatgttgaaccaacatctggagctgtccaaagtttcacctttttgtccacaccagcagtcgccaaaataaaaacatgcacgccaccattgggaattgtccgtggagcccaagcaatgccagttatatcaccttcatgtgctttgtcagctgtatccaaaactgcaccagtttccacaagtaaccattgcaacgttgatccacttgttacagccagaattttaccatcaggagagactgtcatgtgatcatactggcaaacagaacctttagagtcatgaagtggaattggcataactctcaaggtttttggatcctcatcaaggtggtatcttacattaatgttccatactcgaatggaaccatctttggatgcagtaataatttgctcagaattgggagcaaagcacaagcaagtaacagcactcttatgacccttgagttgcataactttattaacctccttcactgaaccatccttcgagtaaactatctcccacaccttgacatcagcagtaaaagccgcagcagctatgaagcgaccatttggggatatgtcagccatattattttttaactgattggtgtcaactgtaccaaactccttcccactcttcccatgccaaactttgatatcagttgcttctgagcatgaaatgataatagtgctcccatcaccagacccatgagttgcacgggccgctgcaaggttgagcacagactccttgccatgtatcttggggtgactccacttgatttcaggtggagaaagctttccctgcagtttgttttccgcggttggaggagcgctaacatccgcatacatataaagagatgatcccagaagcgcctgcgccgccacaacgacagatgatgacccctctgagaaagtaacagccgtagggtgcgctccagctggcaagtttatcctaagaatcttgaagctcttgctagaggtatcatcgatcctgaataccctgatggctccatcagcacatacggtaactaggttgcaggcgtcattggagaaggcaagtgcagtgacggagtcagtatgccccctcaaggtgttgacatcaagatggtggtgcttcttggccgcgtccttgtcggccgcgtggtgatgcgggcggagatggcccttcttgtactgggcctggttggaggggcggacatgcttaggctggtccggggcggcggcggtttcggtgggagggatgtgggcgatggcggcgcgcttgcggcggaggtagccggcgaggaagacgagggcgatggcggcaccgaggacggcggagacgaggggcacagtaaacgaggacacgagtgaggccgccatctggccttggcttgctggctgcggcgggcggtggcggatcgggcggcgcgtggtgaaggcgagagaagagaaggggagggcttttcccaagtatttcctttttttttcaacggctgnntcttttttttttttttttttttttgtttttttttttttggcagacaacattcagtttattgtataaaaggtagggaaactacagccccaaggctgccgcctgcgtgatgcattggggtctaataagtaacagccaggcctcccttcccttcctcctttcaaactctacgcaacaaaactaacaatgtctgcctcggttcagtgcaatattatcaggggagcacctactgttctgggctacatcaagcctgcatccatctattgtctcaccttcaattctgtgcccttggcaaagctgtcttatgcagattcaatcctcgaccactcatgttgaaccaacatctggagctgtccaaagtttcacctttttgtccacaccagcagtcgccaaataaaaacatgcccgccaccattgggaattgtccgtggagcccaagcaatgccag

SEQ ID NO: 139878 - DNA, 1576 bp, Zea mays
  Clone ID: MRT4577_59053C.1
cattggtacctcgagccggcgggcccagcatccgtatccctccatcagtccctcgggccatccctagcttcatcccaattcttgttcgtgcagctgctcgtggcagcctgagaccaggcgcgaggatgctggcggtgttcagcggcgaggtggtggaggtgccggcggagctggtggcggcggggagccggacgccgtcgcccaagacgaaggcgtccgagctcgtcgcgcgcttcctggggaccagctgccccgccgccgtgtccgtgcgcctcgccgacctcggccacctcgcctactcccacgccaaccaggccctcctccgcccaaggtactgtactactacatacgctgcctactccgctgcggtccgcagacgcgagccagcgccatggatggacgcagtgctgtgctccccgttccacgcaagcgccatggatggacaggcatggtcgttcgcggcgaaggacgaggtgttctgcctgttcgagggggtgctggacaacctggggcggctgagccagcagtacgggctgtccaagggcgccaacgaggtgctcctggtcatcgaggcctacaaggcgctgcgggaccgggcgccgtacccggccagcctcatgctcgcgcagctcgccggcgcctacgccttcgtgctcttcgacgcgtccaccaactcgctcctcgtcgcgtcgggcggcgacgtgcccctcttctggggcgtcaccgccgacggctgcgtcgccttctccgacgacatcgacgtgctcaaaggctcctgcggcaagtccctcgcgcctttcccgcaaggttgcttctactctaatgcccttggaggattgaagtgctacgagaatcccaagaacaaagtgactgccgttcctgcaaacgaggaggaaatctgcggcgcaaccttccaggtaagatcggttcctttctcgaagaaagaattcagttccatgcatgcactagttcgtcaggcctccatcatcatcggtctcatgcgatgtttagaaaggaaggatccagagaccagaggttaacttgaaatggatgctacacaattcagatgttgccagtgagctgaaaagcggaaccgaagaagaagaaagaactcctacaacatttctctgaaaaacttgttcctgcactgcaggtggaaggggctacggtgctcacagcgctgcattaggagatgaggtgtcttcctccgtctccaggcctggactgggggcaactgtacatggtgcctggtggtgtaatgtaacataacggcaatggcatatgcagctgatcctggtctgcctgtatcatctcctcccacccgtaaagagaagttctttctgccgccatcgccatggtcagtcagagcttctctgctatagctgctggatgtgttgtgtgttgcgtctgtatcgtctctagtttgttcgacttacgtggaaacctgagatcagaccgggtatcgagcggctgcttgcatggatggaatgctgtaatcatctgtagtgacaactccattttccttgtcaaaaaaaaaaaaaaaaagggcggcccggacgcgtggcggacgcgtggg

SEQ ID NO: 139879 - DNA, 195 bp, Zea mays
  Clone ID: MRT4577_59054C.1
agttatttgtcttttttttttttttttttggcccgagaaacataaaaacgagggatgaaagcctcgtctcatggaccaacaaaaagacgatacaccgaaaatggatctactgcttaaagctgcccaacccactgccgaagatcccgagtgcacctgtaggtgctgggtactttcaagaaaccctggatatacccc

SEQ ID NO: 139880 - DNA, 168 bp, Zea mays
  unsure (1)..(168): unsure at all n locations
  Clone ID: MRT4577_59055C.1
tttttnnnnnnnnnntgttnngtgttaaaatatgattagtanttgttaaagtaacaatcnggcaaccttattcgaaggaaacatgttctacaccctttaattgacctttttttaaaaaaaactactttattttgtacatacacaacacaacaccggtattaggataaa

SEQ ID NO: 139881 - DNA, 1242 bp, Zea mays
  Clone ID: MRT4577_59056C.1
cattgggtacctcgaggccggccgggctcccagcatccgtatccctccatcagtccgtcgggccatccctagcttcatcccaattcttgttcgtgcagctgctggtggcagcctgagaccaggcgcgaggatgctggcggtgttcagcggcgaggtggtggaggtgccggcggagctggtggcggcggggagccggacgccgtcgcccaagacgaaggcgtccgagctcgtcgcgcgcttcctggggaccagctgccccgccgccgtgtccgtgcgcctcgccgacctcggccacctcgcctactcccacgccaaccaggccctcctccgcccaaggtcgttcgcggcgaaggacgaggtgttctgcctgttcgagggggtgctggacaacctggggcggctgagccagcagtacgggctgtccaagggcgccaacgaggtgctcctggtcatcgaggcctacaaggcgctgcgggaccgggcgccgtacccggccagcctcatgctcgcgcagctcgccggcgcctacgccttcgtgctcttcgacgcgtccaccaactcgctcctcgtcgcgtcgggcggcgacgtgcccctcttctggggcgtcaccgccgacggctgcgtcgccttctccgacgacatcgacgtgctcaaaggctcctgcggcaagtccctcgcgcctttcccgcaaggttgcttctactctaatgcccttggaggattgaagtgctacgagaatcccaagaacaaagtgactgccgttcctgcaaacgaggaggaaatctgcggcgcaaccttccaggtggaaggagctacggtgctcacagcgctgcattaggagatgaggtgtcttcctccgtctccaggcctggactgggggcaactgtacatggtgcctggtggtgtaatgtaacataacggcaatggcatatgcagctgatcctggtctgcctgtatcatcatctcctcccacccgtaaagagaagttctttctgccgccatcgccatggtcagtcagagcttctctgctatagctgctggatgtgttgtgtgttgcgtctgtatcgtctctactccctagtttgttcgacttacgtggaaacctgagatcagaccgggtatcgagcggctgcttgcatggatggaatgctgtaatcatctgtagtgacaactccattttccttgtcagactgtggcgcatggtccttctgtgcctcgtggatggatgcactgcgattgttg

SEQ ID NO: 139882 - DNA, 1092 bp, Zea mays
  Clone ID: MRT4577_59058C.1
ccggccggctctcccgtgtcccaacatcccacagggagcgtagtgctctgtgcctgtgggctgtggcgcggcgcggtgcctcgtcacctcacgcctcacgccccgaacagaggcgtccgtccgacaccttccgcctcaagccgccgcgccgtcccctgcccgcgagctcaaaagtcagagccgcacgcaagaagcagaagcgccccggggccgccgccaaaggctgcgcagattacctacccacagcactcccagtctcccacagcccaagcaacatccggtatcaatatcacaagctcaaaagtcagagtcgggaaggatcggagaatggctgcgcaggcggcgcaatgcaggtcgctatgtttcccggcgtagatgcttcgttcgttctttcttgcgttcgtggatgggttcatgcattggcccccttcccagcatccgtttcttttcttttcttttcatttggaaactctggtggcaccattcccttttcttttctttacatttggatcgactccagcatcattccctttcctttttttcgaaactgggggctaggagtgtcagttcttgcattgcattgagctgcttgctggtggctccgcatttccagtgggatccttcctagtaccaaatctctgagctggctagctctgcatttgtgcgtcgtcgcattgattgcagggtgagcggtggggattgcggtggcggtggcatgaggaaaatggagtgcctgacaagctggcgtctctcctagccgacccccagtctcagcagcaaaacaacagggagtccgttctcccggcactgcggcgggtgcagaagcacctgcgttacaccatgaaccaggaacttgccgcgccaaccaggagctttacgcccaccgagcgagcgtgccacactaggaaaccgtgtagttcacatcggtgtccaaaattcggttgtctgcctccgtgaattgttcgtagtgctgtgttttgcagttatttatacatagctgtttaggggagggaagtatctgtacaaaatggaataaggtcgctcatgtgaatgctggccccactcttttattaaccaacagagtgaatctct

SEQ ID NO: 139883 - DNA, 446 bp, Zea mays
  Clone ID: MRT4577_59059C.1
ggctcccgcctggggcgctctcccggctagcactgaaccgcacgtgcggactgtgcgagacacggaccatgacctatagcacccgcacggagaacgactgccaaggaggaggcgctggtcgtccaatggatcgagagtcgccgacacctcgagcaggttctgctagatacacgtgttcgcgcactactccgatagcggccgcgtgatgccgtccaccgccgcactgcgcgcggagcgtggctgactcacgccacacgcggtccggacctgggaagggcaccgcttctgtgaacaccttgacgaggatctgcatatgcgacttgttttacaacatccctgctgacgggcacacgataatcatcgttgtcgccatcgcctaggagcacgggttacatgctctctgttgctcgcgtaagccatctagtatgcacgctcaagtcctacgt

SEQ ID NO: 139884 - DNA, 599 bp, Zea mays
  Clone ID: MRT4577_5905C.1
cctaggcatcgtttatactcctttatagcgcccgcgtatgtacggggtttcacctgaaatagaagaacgcggcagacgacggccggcgtgcggcgtgacctcggcgttggggagcggcggccgctgacggtgattcccttttactttactggacccgcggccgagagctgcagagatagaccgacgagctgctgccgccgctgctctccggccgccccgcgcagattcagatagatcgatcgaccggagccatgcctctccctgcgaaccttgtaatggggtccgccttcgtcgcgctcggcgtcgcgctcctcgccggcttcctctacgtcgccgtctggtccaaggccctcgcgccgagcgacaactggttcttgctcgccgttcaaaacgacaggtattactgcttgcttgtgcccctgacggtccccgtcataatcgtggctgtgtacctgcattggctgagcatgaagatgtttaagcatgcgtgaggagtagccgtgctaaacaaaatccatgttgttgagaatcatcgtaggcatcacgagttcatcacacttaagattgcaatattttttctatataagacaaatttccta

SEQ ID NO: 139885 - DNA, 438 bp, Zea mays
  Clone ID: MRT4577_59060C.1
ttttttttttttttttaaccaatctgacccagttcaccggagctttgtgtgtgggacccgcaagcgagatggacggcggagataggttgtgtggccagccactgagccacacacacacatgcggcagtgctttcccgatccctaattccctacgacgtacgtacgtacataagtaaggcgatcgacgacgaattgtcgggcgtctgtctaaagcgacacatggcccagccgctccgtcgacgacgatcgcgtgaagctccacaggtcgtcgtcgccgccgccgagcagcctgttggcggtagcggagtataatcaggcgaggccgtcgccgtccgcgctggcgtcgaagcagctgccgagctggtccgcggcggctgcctgcccgttgaggtgcaacgccaccatccggtccatcatgacccagcccgtgatcccgtt

SEQ ID NO: 139886 - DNA, 624 bp, Zea mays
  Clone ID: MRT4577_59061C.1
gactccctctcgttgcgagccggcgacgctgccgctgatgcaacaccacagacatggacgtccgctactcgtcgtacgtaggccgcagcctctcatcatcggcgcgttgctgacaagcccgcctgcctcgcctcctctagggtgtcgtcatgtaaacaaacggcatcctcaaggatgtggacgacctggataatacccccccccccatcgcgatgcccgagatgctgcccagtgcctgctccttcgacgaattcccattatggcacccgctgccataccctatgctatagctctagtattactgcacattcgtctaccgccggagtaagcctgcgtatctaattgggtatctgtcagcaccaagaagttccgacgccgtatccacaactgtgcacagatctgtccatgccattttctgggaacacagttaacctgctgttgaaagaccgtgggtacggctctccagatgatcagtgcggatggacttttccgcagaaagcatatcttgaatgcacacatctgtccacactgtgcagagaaggctcgattaaagtctgttcttgcgggacttgactgtacatacttctatggcaatgcttcactgactcttatctgctctgaaga

SEQ ID NO: 139887 - DNA, 434 bp, Zea mays
  Clone ID: MRT4577_59062C.1
aaaggggggaaaggttaacaagaacataaggggggtacatataaaaatagcaggaacgcggcctttatttttagggaatcacaaactacacattgggtaacaaactatggggaatatatacaggaacgaccaatacaatggccaaaaaactttccgactataatatggaccccggaaaatggggcatagctttgtaatcgggaacgggggaacagctataaaagggggtaaaaaactaggacccccctggggacggggaaagaaaaccagttcgttgggggggagcggctaaaatatttcgccccaccttacaatttttaggggctaaaacccttggggaaaaaaccccaggggttggaaggaaagctggggcaagcctgaacaagaacctttgacactgtttaaggaaggatgccagcgttgcaaatgtttgc

SEQ ID NO: 139888 - DNA, 239 bp, Zea mays
  Clone ID: MRT4577_59063C.1
attgacaagcacatgtttcatgacatgttctatgaagggcaaaggttacgccttcaagagcgagatgttgcttatggagagtatccacaaatccaatgctgataaggccagagagaagacactatcagaccagtttgatgccaagcgctccaagaccaatgctagccgttataggtatattgttatgatatgagaaaggttggcccaccgtccataataaataacaccatctttctcat

SEQ ID NO: 139889 - DNA, 422 bp, Zea mays
  unsure (1)..(422): unsure at all n locations
  Clone ID: MRT4577_59064C.1
aacaagcgcaccacacccaccaggggggggaagggcgagaacaaaaaaaacngccagcaccgaggaccacaagccccaacacaacgccgagggggacaccagacaaaacccggagcaccagcagagagacacgcacgacaccacaaacagaccgaaacagacaggcacccaccacangcggaggggggggccaccanacacgccgcagaagggcgccaacaacgacgacacgaagggcaanaacgaccacgagaccgagggacccgacaacaacaccagaagccgaaaaacgaacacgggacaccaacaaacngaacaaccaacacaagcaaaacaaagagggggacaacaaaaaaaaacacaanctacaaacccaacaacaaaaaaaaccaaacaacaaagaacaaacaaaacgagagaac

SEQ ID NO: 139890 - DNA, 923 bp, Zea mays
  Clone ID: MRT4577_59065C.1
tgttgtctcccgccatccggcttaacaaggagatcaatcctcagttaccaccgtcgtgacaatctcatcgccactaaggttcagttgtgtcgggtaaacatatgtatgttcagaagagctagagagagagagaaaaaaagaaacaggctacaatacatatgaacacctataatgcacaacatacaggggagagaaacagaaagatcaggcccgcatcaagcaaccagcacagcggcagcagggcagatgcacctgccgccggcacatacatttacacaggcctacagctggagagaggccaaggggcgagcaagaacagcttcgcatggcttacatatacattggtcttgagctgcctaggcccggggacgcttgggtacagggacgaaccggccttgcacggggtccttcaaccaccgcgacgagcgggtctgtttgactcggtccatgaaaaggcggtgcctctcgtactctagtttctggatgactatgccgttcagtagaagctccacgctgaaaacactagcacctttctcgagtagtggcgcacaagcttcgtagtcttcttcgcacgagattaccagcaggtcaggaggcactccctttccctccattatggatcgtcctaccctctctagcggctgccctgatgatgacttaaccaagctagtcatcactacttgacttggtttaacatttgatgttacaaagactctttttcccagaagaagagggtgtttgcaagctgaggccagtgatataagcatgctgaaacctatctccttttcctttttttcgtccctcataatatatttcctttcatcaataaaacagcctgcttgtccacaattttcaagccacattgatgtaactactggcttgcccatagttattgcttgtagcatattatttgtgcgcaaaac

SEQ ID NO: 139891 - DNA, 2842 bp, Zea mays
  Clone ID: MRT4577_59066C.1
aaggtctggagtttcttcaaggcactcatctgttgcctgagaagcttgatccccagagtgtggcttgttttttccgctatacagctggtttggataagaatcttgttggagatttcctaggcaatcatgatgagttttgtgttcaggtgcttcatgagttcgctcagacctttgatttccaggagatgaacctggatacagctctgcgtctatttttggagactttccggcttcctggtgaatctcagaagatacagagggttcttgaggccttctcagacagatactatgagcagtcccctcagtctttcgcaaacaaggacactgctctactgctgtcatattccattataatgctgaacactgatcagcataacatgcaagtgaagaagaagatgactgaggacgacttcatcaagaacaatagaaacataaatgggggcagtgatctcccacgtgagatgttgtctgagctatatcactcaatctgccgaaatgagattaagacaacacctgagcagggtttgggatattttgaaatgtctcctagtcgttggatagatctaatgcggaagtcaaaatctacgtccccatatatcatcggtgactctcagcctttcctggaccatgatatgtttgctgttatgtctggccctactattgctgccattgcagtggtattcgatcattcggagcatgaagaagttcttttgacttgtatagaaggctttttgggtgttgcaaagatatctgcatttcatcatctcgaggatgttctggacgatcttgttgtttctctatgcaaattcacgactctcttgaatacttctttggttgaggagccagttactgcctttggagatgaccttaaagctaggttggcaactgagacattatttactatagctaacagatatggggattatatacgcaccggctggaggaatgtattggattgcatcctgaggctgcataaacttgggcttctccctgcccgtgttgctagtgatgcagctgatgattccgaacttcctgctgaagcagtccaacgaaaggctgctcctagttcagttcccccatctcatattccagtgatgggcacacctcgcaaatcatccggactcatgggaagatttagtcagctgctctctcttgacagtgaaagaacaagatcacaaccaactgagcagcaacttgccgctcaccagaggactcttcaacaattcagaaatgccgcatcgatagtatatttacagagagcaagttcttgcagcctgagcgactactgcaacttgccaaggctctgatttgggctgcaggccggcctcaaaaggttgccagttcgcctgatgacgaggatacagcagttttctgcttggagctgctgattgccataacccttaataatcgagacaggatcgtgctcctctggcaaggtgtatacgagcatattgccagcatagttcagtccacagttatgccgtgtgctctcgtggagaaagctatttttggactcctgaggatatgccagaggttgctaccatacaaggagaatcttgctgatgaattactgaggtcgttgcagttagttctcaagctcgacgcacgggtagcagatgcgtattgtgagaacatcacacaggaggttgcacggctcgtcaaagcaaatgcggcacatataaagtcacagatgggctggagaacagtaatattgctgctctccattacagcacgccatccagatgcttccgaagtcggttttgaggctatcgtgttcatcatgacagagggggctcacctttcactagcgaactatggcttctgcatcgatgcggcacggcagtttgccgagtctagagttggtttagctgataggtctgtccgtgccctggacttgatgtccgactccgtcagaaaccttgccttgtggtcccaagagataaaagcgacgacatttgaagaaggcgagaaagggccggaggcgataagggagatgtggctcaggctgctgcaagcactgaagaaactgagcctggatcagagggaggaggtgcgaaaccatgcgctggcttctctccagcgatgcctaacatccacgggagaactctgcctccagtccgcgacgtggtcccatgcctttgacctcgtcatattctccttgctcgatgatttgctggagatcagccagaaccactcccagaaggactacagaaacatggaagggtcacttgtgctcgccatgaaactggttgcgaaggtatacctccagctcttgccggaccttttcggcctaagcagtttctgcaagctgtggctgggggtcctgagccggatggagaagtacgtcaaggtcaaggtccgaggcaagcggagcgaccggctgcaggaggtggtcccggacctgctcaagaacatcctgctcgtgatgaagagcaagggcatccttgcgaagaggagcacgatcgggggcgacagcctgtgggagctgacgtggcttcacgcgaacaacatctcgaccagtctgctgcctgatgtttttccaagccaggagtacgagcaacagagcagcaccggtagcccaagagggcccagtcctgttgaggcgtagcggtcaatgttttaacttgtgtgcgaccgtgtgtgtatgttttatttgttttactaggtttactactgctcgtgccctaatccattgaaagtgtaaggtttcgatattgtgattgcgtttcgcctccacggcaagtactatagcatgtgccctaatccattgaaaaacatgcttatgtttctgtgaattatttagttactagtccataatcctatcagaatgctcatttttgct

SEQ ID NO: 139892 - DNA, 266 bp, Zea mays
  Clone ID: MRT4577_59067C.1
taaaacttcactagtaatccacacatacaactctaaattatgctacagtgtttaaatgtaaattagtggggaaggagggagttgtgagttgataacctgaaatatattttttctataactttgatgttgcagtcactgagtttctaagaagtagtcctaaaccatggtggataagacatggatcaatgatgatgctaggtacaaattcattataacacaaatataaatgtgatatctatagcttaaatactaatccattacaagag

SEQ ID NO: 139893 - DNA, 285 bp, Zea mays
  Clone ID: MRT4577_59068C.1
cgcgtcttccttaccctacgctactggtcctcctggccccacttccccgcaagagcggctgccgcagctgcgaggtccgtaccccacatcggcgagcggcggcggaaccgccggaggcaaaggcaagatgttcgggcgcgcgccgaaaaagagcgacatcaccaagtactacgagatcctcggggtgcccaagtcggcgtcccagaacgatctcaagaaggcctaccgcaaggctgctataaagaaccaccccgacaaggccggtgaccccgaaaagtttaagga

SEQ ID NO: 139894 - DNA, 358 bp, Zea mays
  Clone ID: MRT4577_59069C.1
gggcccaactaaaatgcaccctatgtatcatcctttttaaggccccccatttaacaggaaaaaaaatcggcccctgcgcgcggctttttaccccaaggggtgcaaaacaaccgcgggggttaaaatgaaaaacaaaaggggggggtcaaaaaaaaaaaaaaaaaaaaaaccccccgaaccccgcccttattttttaaacgcgggtgcgggccggccggcagggcagcctttaaaaaaagacggaaaccaccgggggaaaaaaacccccttgggggggaggattcttaaccactaaacccccccggggggaaagggggccccccccggggaaagggaggtggaaaacccccccgcgggg

SEQ ID NO: 139895 - DNA, 263 bp, Zea mays
  Clone ID: MRT4577_5906C.1
cttgatcgtgaaaagatatggtcaagactgacaacaagtgaaagcattgaggttctggaaaaggatcttgcaatatttggtttttttgttgctttgggtagaagcacacaaggatatttgtctttcaagggtttgactgatttggatgattcactgaatggtattgtaaggtatcttatcggtgggagtgtactatattatccacagctgtcctcgattagttcatatcaactgtatgtggaggtagtctgtgaagagctcga

SEQ ID NO: 139896 - DNA, 380 bp, Zea mays
  Clone ID: MRT4577_59070C.1
aaccacattagctttggctgggggattatgtatctcttgctcatagtctttcatcaactccagccattttcgttgcctcatgtttaactctgactgggtaaatatatattcgagactcttgtggtctgtataaatatcacacttctgctcatatagataatgcctccaggtcttcagtgcatgaaccactactgccaactccaagtcatgtgtggggtaattcctctcatgaattttcaactgtcgggacgagtatgccactactctcccttcttgcattagcacacaacccagtccggtgtatgaagcatcacaattcactgagaaggcctcgcgaacatctggtagaatcaacccatggtgcttgtttaactttttta

SEQ ID NO: 139897 - DNA, 294 bp, Zea mays
  Clone ID: MRT4577_59071C.1
attcggctcgagcgacttgctgcagttttgttctgcgcccctcctttccggctccacggtggcgtcgtacaccacacagcggggtcgagtcacccgatccctccatggcggtggcggtggccgcggtcgcgcctgccacgactgcggaggacgaggcgcgcctgctgtgtctggaggagcaggcggagcacggcgcaagcggggcctgaaactacctgtgcctcgcccgccggttgcgcgcccgtcggcccgaccacgtccttggcatcggcctcgctgtactaaacagcgcct

SEQ ID NO: 139898 - DNA, 581 bp, Zea mays
  unsure (1)..(581): unsure at all n locations
  Clone ID: MRT4577_59072C.1
ccccgcgtccngacgcccacgcacgggtccatccttctgtccacgctcgcgccgccagggcgctcgagctcgccgtcgtcatctcgtcgggccgccgcctcgcagcttcgcccgcggctctggtccgcgccccgccaaggcccagccccaagctgccagcggcctccggcgttgctcgccgctcactgcgcgccgtctcgcgctctcgcgccctcgcccagtcctgctctcccttcgtcgctccgcggctccgccggcgtctgggcatccggccttcgggctttggtggcgccccccaccggccaccggcccaccccagcgggcagcggccactgcaactctgcggctctgccaggaacaaggaggaacagtggcgattctgccagggacagggaggagcagtggcagacaacgtccttccttttgtttggcccggggcttcggaattatctggagccgctactgcccccagcgttcggactcccgggtcgcaggcagccacgtctcgtcctggctctgggctcgccgcgctatcgtctcggccattcgctccgacgtccgtattcaatagatttgcccta

SEQ ID NO: 139899 - DNA, 266 bp, Zea mays
  Clone ID: MRT4577_59073C.1
aattccctcgtctacccacacatcctgattcaaacacactctacccttttttcttacaccttccaatcatcccacgagaaagatcttttaaataattagccaggttcttatacccttaattcacttctcactctactttaaatcataaatcttcccattaacatcgatctaatacactcctattttaacatccacacactcattataaaactcaatctacatctatccatacactttacctcaaaacaatctaattccttacctac

SEQ ID NO: 139900 - DNA, 349 bp, Zea mays
  unsure (1)..(349): unsure at all n locations
  Clone ID: MRT4577_59074C.1
cagggaacacacganacnagggagcaanaaaagccaccggggncancacnccgggggcgagggcggcncacccagcnggcagcaggggagggccncnccgccgcgannccaggcggccaaacgcaagggggaggcgnagagaaacccaaaccaagcgggggggggaccaacggcccccgcaaagggngccggnncaagggcancaacggcagcgcgggcgaggagaacccagggccgccaccaacaacgcgcnaccagaacagccgggggcngaaccnggccgngncgccgnngccggaggcncgagggcnccncccggnggcggggcggggcnccaacgccaccgggg

SEQ ID NO: 139901 - DNA, 412 bp, Zea mays
  Clone ID: MRT4577_59075C.1
cagcacctaagtcattacctgcacctactcctgtgagctcgccgcctacagaagtgaagtcctctcctccaccaaccccagttagctcaccaccaccagcgccaaagtcggcacctccacctactccagtgagctcggcacctacagaactgaagtcctgtccaccaccagccgcagtgagctcaccaccatcagcgccaaagtctgcacctgacacctgctcctgtaagcttgccacctgctgaagtcaattcttgcctaccaccatgaccgattagctatccaccacatcgggccgagtcaccacctacaccggcccctatgtgctcacttcctccccctgtgaagtctgcacgtgcaccaacgcccggcagtaaggcaccacctacaatgaagttctcaccgacgccag

SEQ ID NO: 139902 - DNA, 289 bp, Zea mays
  Clone ID: MRT4577_59076C.1
ttgaacctctttgtcaacgacgtattaattttcgtttccactccacatccaattggcaacacgtactaacttggaactgcacctctgcatgatatcacaacggagattgctaaaaccaatggtcctacttgctataatacggattaaatgttctcaatagataatgcattatgcagcattagtcaacaaaatgattcgattatagacctttcaacagtggtgtcgacagtgatcaacacagcactcgagacgatgatttctggtgccaattcatcgacgaaatcagatt

SEQ ID NO: 139903 - DNA, 1451 bp, Zea mays
  Clone ID: MRT4577_59077C.1
cctcgagacgttgggtacctcgcggccggcgggggcatcgctccctctcagcttcctcattggccatccttcgtcttccatggagaggctccttgccggcctactactcggcttcctattattgatcgcgtcagtaggaagccatgcaactcgtgctccagatcagtactggaagtctgctcttcccgacactcccatgccgagctccctctcccaactcctcaacaccccagctggcaagggcggcgtcggtggaggcagcagcggcaagaagcccggcggcaccacggtgggagttgggaaagggggagtgggcgttaacgttaaccctaccaaacccggcggcgccggtacaaccgttggcgttggcaaaggtggcgtcggcgtcggcgtcaatcccgggtacggcaagccgggtggcaccacggtgggcgttggcaagggcggggttggcgtccacgtgaacccgggcaagaagcccgtccacgtccccgtcggccctttccagtacgagtacgccgcatcggagacgcagttgcacgacgaccccagcgtggcgctcttcttccgagaggaggacctgcagcccggtaagaagacgaccgtccagttcgccagcaccgcgatggccggcgccaagttcctcccgcgaagcgatgccgaggccatcccgttctcctcgcagaaggtgcccgagatcctcgcccgcctctcggtggacccggactccgtggaggcggcggagatggcgcagacgctgcacgactgcgaggcgcccgcggccaggggcgagaggaaggcgtgcgccacgtcgctggaatccatggtggactttgccaccgccagcctcgggaccagccacgtgagggccgcgtcgacggtcgtggggagggagggctcgccgaggcaggagtacaccgtgacaggcgtgaagcgggcgggcggcgggcgcctggtggcctgccacgcggagccgtacgcgtacgccgtgttcgcgtgccacttgacgcagcagacgcgggcgtactcggtgtcgatgctgggcagggacggcacggccgtggacgctgtcgcggtgtgccacgccgacacgtccggctggaaccccaagcacgtcgcgttccaggtgctcagggtgaagcccggcacggtgccgatctgccacttcctgccgcaggaccacgtcgtctggacccgcggcggctgagagtggtcgccgtttgcatgcactggtcatgacgccgccgtttgcttagattatgtttgtatagtttcgaataatcagacatctctgttacttctgctagctctcaggctaagcaagcttctaattgatctccgacgacgcttgttggatctacttctctggagacatctgatgatgaattgaatgcacctcacgatcacgacaaaaaaaaaaaaaaaaaggaaaaacccgaggggggaaaccg

SEQ ID NO: 139904 - DNA, 840 bp, Zea mays
  unsure (1)..(840): unsure at all n locations
  Clone ID: MRT4577_59078C.1
aattcggcacgaggggtttgcatgcaggttgcatcggtaggaagccatgcagctcgtgctccggccgggagtactggaagtctgctcttcccgacactcccatgccgacctccctctcccaactcctagacgccgctccaggtataacaacagacagctccagaccttcatcaaatcatcagtagataagatacttcgtataggcatgtgcctgtcccatcatacaaacatacgtgccaacgccacctcttcaattccctgcttgttcgcagccggcggcggcacgaccgtcaacgtcggctggggcggtgttcacgtcgatgctgggcacggtaagcccgggggtacgacggttgacgtaggcaagggcggcgtcggcgtcaacgttaaccctggcaggagcggcaagcccggcggcacgacggttggcgtcgggaagggcggagtcggcgttaacgtcaacccgggatacggaaagcccggcggcaccaccgttggcgtcggaaagggtggcgttggcgttaacgtcaaccccggcaagcccgtggcacaacggtcggcgtcggcaagggcggagtgggcgtcaacgtcaatcccggcaaaccggccggtggtgccggtacaaccgttggcgttggcaaaggcggcgtgggcgtgggcgtcaatcccgggcacggcaagccgggcggcaccacggtcggcgttggcaaggggcgggggttggcggttcacgtgaaacccgggaaagaagcccgtccacgtcaacgtctcccctttcatctacacgtacgncccgcgtcggggacgcagctgcacgacgaccccagcgtggcgctcttc

SEQ ID NO: 139905 - DNA, 180 bp, Zea mays
  Clone ID: MRT4577_59079C.1
tagggtttagtggccacgcttttgtttattttaccatcaggaatacatctttaatcagttaccctatcgtatctattatcttatctcaaagtttactctatagttagtgtaatctataatgcaaaattttcatacattttatatgatgtgctgcagacagccttaggccgtgtttgtttc

SEQ ID NO: 139906 - DNA, 1932 bp, Zea mays
  Clone ID: MRT4577_5907C.1
ccggccgggaaaaaggagagcctacagtggtttatcggcgcaccttcgaatcctattcgttgggctcgctttctgatcgggcgtgacttggccccacaaactcttctccaataaattacgacccccagccaagctttggagtgcggttcccaaccatggcggcctcccccacttcctccctcgccccgccggtggtgcctatggagcttcacgccggcaaccgcgaccgcctcgtcgccgcgctccgcggccacatctccgcctccgcgcgcccgctccacggcctcgtcctccttcagggcggggaggagaagacacggtactgcaccgatcacctcgagctcttcaggcaggagagctacttcgcctatctctttggagtgcaggaaccagggttctacggcgcaattgacatcgcctctggacagtcaattttgttcgctccaagattgccagctgactatgctgtttggatgggtgaaataaaacctttgtcgtacttcagggatacatacaaggttgatatggtcttctatgttgatgagattgcaagggttgtgcaagatcatttcgggaaccatggaaagcctcttctgtttctgctacatgggaggaatactgactctggaaatttctcaaagcctgctagttttgaggggatggagaagtttgatactgatttaattacacttcatccaattttaaccgaatgtcgtgtgattaaatctgatctggagcttgctctcatccggtatgctaatgatgtcagttctgaagctcacattgaggttatgagacgagcaaggccaggcatgaaggaatatcaattagaaagtatcttccttcaccatgtttatatgtatggaggttgccgacattgctcttatacatgtatatgtgctactggagataatagtgctgttctacattatggacatgcggcagctccaaatgaccggactttgaatgatggagacatggcactaatggatatgggagctgaataccatttctatggatctgatatcacatgctcataccctataaatgggaaattcaacagaagtcagacaataatatacaatgctgtgcttaaggctcataatgctgttatatcagacatgcggcctggagttaattggatggatatgcacaaattagcagaacgggcaatacttgaatctctcaggaaggaacaaattgtacaaggggatgttgatgatatgatggctcaaaggttaggggctgttttcatgcctcatggtcttggccacttacttggtattgacacccatgatccaggaggctaccctgagggattggagaggcccaaggatccaggactgagctccttgcggaccacaagagaactgaaagaaggaatggttatcacagtggagccaggctgctatttcattgatgctttgctaactaaaacaagggatgatccaatttcctcaaagttcttcaactggcaagaggttgaaaagtataaaagctttggtggcgttcgcattgaaagtgatgtgtatgtgacggctcaaggatgccggaacctcacaaactgcccgagagagacctgggagatcgaggctgtaatggctggcgcaccatggcctctgccggcttcaagttctatggtggtagcagcagagaatagcaatgacatatctaaagcgtcgtaattttctctatgctcaatccatatcccgagttgaaacaaattcgacctggattcttatattcaataaatagtgaggctgaggcgcaaaacattgttggattgatggctggaaaacatttcatacgctcacttaatttgtaagctttctgttatgtgtttgagatcgatggggaaacgtttagctaaaaaaaaaaaaaaaaaagcggccaaaaaaaaaaaaaaaaaagggcggccgccaccgcggtgga

SEQ ID NO: 139907 - DNA, 597 bp, Zea mays
  Clone ID: MRT4577_59080C.1
cttcctcattggccatccttcgtcttccatggagaggctccttgccggcctactactcggcttcctattattgatcgcgtcagtaggaagccatgcaactcgtgctccagatcagtactggaagtctgctcttcccgacactcccatgccgagctccctctcccaactcctcaacaccccagctggtctttatcactactagatacgtgttgtatagggaggctcgtccatcgtacaaacatactacgtaataacaccggtcgatctcttcaattgcctgcgtgttcgtaggcaagggcggcgtcggtggaggcagcagcggcaagaagcccggcggcaccacggtgggagttgggaaagggggagtgggcgttaacgttaaccctaccaaacccggcggcgccggtacaaccgttggcgttggcaaaggtggcgtctgcgtcggcgtcaatcccgggtacggcaagccgggtggcaccacggtgggcgttggcaagggcggggttggcgtccacgtgaacccgggcaagaagcccgtccacgtccccgttggccctttccaatacgagtacgccgcatcggatacgcagttgcacg

SEQ ID NO: 139908 - DNA, 1770 bp, Zea mays
  Clone ID: MRT4577_59081C.1
accgggccggaaaaccattgcctcgaggcgggccgggatcgtctgcaactgcatcgctcgctctctcctttcactgggagtctgggaacatctatcagctcgctcattggccatctttggcttccatggagaggctcattgccggcctacttggcttcctattggttgcatcggtaggaagccatgcagctcgtgctccggatcagtactggaagtctgctcttcccgacactcccatgccgacctccctctcccaactcctcgacgccgctccagccggcggcggcacgaccgtcaacgtcggctggggcggtgtccacgtcgatgctgggcacggtaagcccgggggtacgacagttgacgtaggcaagggcggcgtcggcgtcaacgttaaccctggcaggagcggcaagcccggcggcacgacggttggcgtcgggaagggcggagtcggcgttaacgtcaacccgggctacggaaagcccggcggcaccaccgttggcgtcgggaagggtgacgttggcgttaacgtcaaccccggcaagcccggtggcacaacggtcggcgtcggcaagggcggagtgggcgtcaaagtcaatcccggcaaaccggccggtggtgccggtacaaccgttggcgttggcaaaggcggcgtgggcgtgggcgtcaatcccgggcacggcaagccgggcggcaccacggtcggcgttggcaagggcggggttggcgttcacgtgaacccgggaaagaagcccgtccacgtcaacgtctcccctttcatctacacgtacgccgcgtcggagacgcagctgcacgacgaccccagcgtggcgctcttcttccaggagaaggacctgcagcccggtaagaagatgaccgtccagttcgccagcaccgggacgaccggcgccaagttcctcccgcggagcgaggccgaggccatcccgttctcctcgcagaaggtgcccgagatcctcgcccgcctctcggtggacccggactccgtcgaggcggcggagatggcgcagacgctgcgcgactgcgaggcgcccgcggccaagggcgagaagaaggcgtgcgccacgtcgctggagtccatggtggacttcgccaccgccagcctcgggaccaggcacgtgagggccgtgtcgaccgtcgtggcgaaggagggatcgccgaagcaggagtacacggtgaccggcgtggagcgcgctgccggcggcaccgacgacgacggccgggccgtggcctgccacgcggagccgtacgcgtacgccgtgttcgcgtgccacctgacgcggcagacgcgggcgtactcggtgtcgatgctcggcagggacggcacggccgtggacgctgtcgcggtgtgccacgccgacacgtccggctggaaccccaagcacgtcgccttccaaatgctcaacgtgaagcccggcaccgtgccggtctgccacttcctgccgcaggaccacgtcgtctggacccccagcggctgagtctgctggatgaccgccgtttgctcgcgtcgcgccgcctggagtgatttgttatgttccagtggcctctaggcatactgtcatattattattataccgaggtatcacgagtttgcttatgtttccagtacttgatgcttgtatggatatggtggtgtagccagctcagcatgtatcaacccacctgcttaattctgttgtatatagttttaaataaacagacaacctctatatggttactgccctcagcctaggacgaacatatctgttatgt

SEQ ID NO: 139909 - DNA, 295 bp, Zea mays
  Clone ID: MRT4577_59082C.1
atattctagtacaaagtataataaaactagatgtataataaaccctttaaatcattggtaagtgtacaagtggtggaactgaagcatttactggacaaagtaatgttactctaatggttacttgctcgtgcgttgccacactgtgttataatttgcttcatttccttgctatttgatacatagtgtgcatttctctgtcactgtaactattgtaatgacaaattttcatcttactgccaatcaaaatgacattgataggaatgaactccagaggctgggcctgaacagggaggtg

SEQ ID NO: 139910 - DNA, 458 bp, Zea mays
  Clone ID: MRT4577_59083C.1
ggccggccaaattttttggggggcaatactttggagggccaatccattggcccccctcccggaaagggcccttccgaaacaactgggggaaaaaaccgttttcccctttgggccggccccacccaaaagttttgacctttttaggccctggaagggggcaaaccccgggcctggtccaaaaaaaaaaaccgccctttaaattggggggaaaaaacccacccggccaagccccccagtgccccgtcctagggaccacccggaattttttgggaatttactttttgggggcccgccctttcccaaggggggggcccttttttgaaccaggcccttgaaacaggggggtttttttttaaaaaaaaccggttttcccttttggaagttttggctcccaattggggggggggaaaaaggcatctttggccttcccaaaaccggttgggaccccccttttggaa

SEQ ID NO: 139911 - DNA, 2073 bp, Zea mays
  Clone ID: MRT4577_59084C.1
cggacgcgtgggcggacgcgtgggtgaggcttcttttagatgaacaagccttaattgaacccgttgccgcaggcacgacagcacttgaatcacttcggtcggtatcccctaaagctgagggggtttccctttctgatagtgaaaaagggtttactgaagtcattctgtcaaggctacttgctagacctgatgctgctcctctctattcagaagctgtccgccttcttggcaagcttcaggagtcccttgttatggatgtgaaatggattttacaagggcaagatgctattcttggccgcaggtcaacaagacagcagcttgttcatattgcccaacgaaagtgcctttgttgaaagacacaggtttggaaaccatggggttggtccagcttgcttagcgatgccattcctaataaaactgcaaaaaggaagttggaagtcacatcaattgaggaaggagaagttgtggatgacactgttgatgctaaaaggcctaccaagactccccctcatagtgttgatagaagctttgaagggattagatcgataaataaatatttaaccgagaaagcccttgctgaattagtattgccttgcatcgacagaagttctgctgatatccgtggtatactttctgttgatttgaccaaacagatgggggctattagtgaacatatcaaagcaatagcattgaatggtgctaaacaagctggttcagtcccttcaggtaatgaagtgccatcaaacaaatcaagtggtcgtaaaggaattcgaggtggaagcccaaacattggcagaagagctccggttggtaatgacccaagccctccgtcggcttctgctctgagggcagcattgtggttacgcctccaattcatcattaggttgcttccagtaatcatggcagataggagcatgagacaaacacttgcttctgcaatcctaggcctgcttgcaacgcgcatgatttatgaagatgcagatctgccccttccacctaccaatgcaactgctttaaggcgggaggtggattccctgctggagcctcccctggacgtcctgcttgatcggcctggtgaaagtctttttgagaggcttttatgtgttctccatgcacttcttggcagctacaaaccaagttggctgaagtcaaggtcagcctctaggtcgacaattagaagccaacgagatttttcagcatttgataacgaagcagccgagggcttacagtccgcgttggaccacatggaattgcctgaaacaatcaggcggaggatccaagcagccatgcctcttcttccaccatccaggcgcccttgtatgcaatgccaacctccgcagttgtcgttggctgcattatcaccactccagagcagtacctctggtgtaggtcctcaacagaaaagttcttgtgtgagttgggtgcccactaacgtatcagtcagaagcaaggcagcattgccttctcatgaccctgaaacggaggtagatccatggagcttgctggaagatggcacaaactgccccccctccacagcatctggaagcaatggctcgagtggagtgacgggagaccatgctaatctgaaagcttccagctggcttaagggtgccgtgagggtgaggaggacagaactgacctacattgggtctgtagatgacgacagctgatacgtgtatgattatcttggtgaattggaggcaaagaatttggtgtcacttgttggcatttgtgtcgtgtgcaagttaaaagcaccaactgcatcgaattctttgagagctctgtaccacaaggtggaatggaaaccatatggcttttggttggttgttgtagtgttagaatacatcgctgcccccgatttgttttagggcctgtgggggcggctgtatatagttggaatccatttctggattcaatgggggagcttatttgagaatcaggcaggaagccatgtagtagatttctagccaagagccctgtacttgttttttttttgggtctgagatgtaattgtcatgtcacatatattcttttgatctaaggctgacggaagttgcattgcctatttgtttt

SEQ ID NO: 139912 - DNA, 339 bp, Zea mays
  Clone ID: MRT4577_59085C.1
attcgttcgtttatattttttttttttgtttatctttttctattttttattttcttgtgttggttttttctttttgtttagtttttaatttgtgttgtcttttttgtttgatttttattttttatttgttttttttttcgaggggaaaaaagcggggcaaattgtccacggtgattgtggggggggagtatttttatacaataagactggggcaagaaaaaaatgattgcccgcggggtgcttttctccccttaaaagctttggcccgcaatgattgggggggatgataaagcccaccgtgggggggggggagcgaattttatcattgatctaccactt

SEQ ID NO: 139913 - DNA, 735 bp, Zea mays
  Clone ID: MRT4577_59086C.1
gttcccccaccggaggcttaagacttcaccttcctccgtacgtacgtacctcctctccgccgtagcctggatatccatgacgagaggagatgcgcgaagccttcatgatcatcgacgagaaagtactcaccaatcgttcatccagcgaggtccagctacgaatgcatacttcgaatgccttctggaccatcacctcttgcgaacgatagtccacaatatttgtcgcctcatcattgtatgagatgacatagataggtatcgaatataaatgataaactacatgacacttcgaaatggaatcgcatacctgaatacataatgcttagaaaagaccctacacatgccttgcacagtgcctgctgaatggcatggactggatgcaccacgtctcaaatagacccgtaagataaactgctgaacaccaatactgatatccatgcttgaagagcaccagtggcaactatcgtccggcagaggctggagagcttatctactctcccagcgcatgcttgtgaagccgatgactatgtactgtgacactagcatcactcctgtgagccaaagacggacccagcctagctcgtgagtacgttgcgtaggaagctgctgaatgcattgcgttttcctgcattgcgctgtaacatggatcaccgagctgaaagcctctgaggtattgcctgggacgggacccaaataatgttgctctgaatacaatatattgtctatttgatcatc

SEQ ID NO: 139914 - DNA, 720 bp, Zea mays
  unsure (1)..(720): unsure at all n locations
  Clone ID: MRT4577_59087C.1
aattcggcacgagggccaagtccgcttcatcttcacgccgccgagcactaaatgagccgcgacgagaagcaaaggttcaccaagacgcgccttcttccctcccgggtggtttggaaacgcgaaagtgagagcgtcccggatcggtcgactggaacaagaggacgcccacgaccccgctttggacgcgacggctgcaactgcctcaccgtaaccttcttcctcgccttcgaccgccgtcgcgcgcgcttgccgaccgtccgtcctagagctgactgaaacacgcacgcgccaaaggggtatggagaagcctggcgagcttgtgaaatggtcactcatattggaaaatagcgaaagtgcggcacttatgagaatcgagttcctcgtcgtggccatcgcgttcatcttcctcctgatgtcattcttagacatgttccgtcgccagtcgcgccattcctacatcaagtacctcttgctcgtcctcgacgccatcagcgactccacattcatctacaccattgggttgatgcagagcgcaccattcaagaaagacctgttctccgtatgggcactcctactggtcaacctccgggtcaatgcctgcttcatctcggcatacggcatccctgaccaagacaacagccgcattaacgagtcangaaaggtgatggcgcttctccgggtcggcttcttagtcgggacgaacaacagtcagtttaagca

SEQ ID NO: 139915 - DNA, 799 bp, Zea mays
  Clone ID: MRT4577_59088C.1
cattgggtacctcgaggccggccgggaccagaacaagccaccgagactgacctctgcatccatccatggcgaccaagagcagcgtcaccggcaatgccgccgctaagtcttcggcgccaaaagcagccgaggagcaggtgtgcacgctcctctccaagcggctccagcgcgtgtcgtgccactgcctccgcatcgccgcggcggtcctcgtcgtctacagtttcgccgtcacggcgtggcgcgtgcgtcaccagccgcaggacctggccttcgtcgctgccgccttatttctccttgccgagctccaggcgtgcctccgacgcgccgagcggctcgcgccggaatcgcccgccggggagaggcgccgagtgcgggccgccgtgtgggcgctgtccaccgccctcagctgcgcgttcgcctaccgcgtggccgcggtcatgccgccgccgctggccgtcctcgtctggtgcattaccgcgtccgtcggcctcgtcggtctgtgtctgcttgtgctctgcagagaccaacagtatcaagcgctccgcaacgacgatgccgcctgcgactgcgacagaagggcctctgccaagactagtcctactgatgaattggtctaaagcattcagattcaggggggcaagaaattacaaagagtttttctgaaaatgtcttggattttggtattgattttcgtgctaaaaaaaaaaaaaaaaaatcgtccctctaaatacctcgcttggaacgacgtcatctaccaacttcagatgaagagtagtgccctgcattttcgttcatcacg

SEQ ID NO: 139916 - DNA, 116 bp, Zea mays
  Clone ID: MRT4577_59089C.1
ttcacaaccgcataagaagcctcggttgatggaaagttttaattcgccgaggaaggaccaggaggttgaggaggttgttctttctgtaaacgctgttacctcgaccattttccctt

SEQ ID NO: 139917 - DNA, 147 bp, Zea mays
  unsure (1)..(147): unsure at all n locations
  Clone ID: MRT4577_5908C.1
cgtgagagcacctcatcgagcagaatgccatgtctgtcagtgccctttggagtaccgcacgaaaattgaggtacacagaacacctgtatttttcatgctacttcgcggtaccaaaatgccnggcaaagaaatgaagtcaaattatga

SEQ ID NO: 139918 - DNA, 118 bp, Zea mays
  Clone ID: MRT4577_59090C.1
gacccctgatcagataagaaacctcgatgaaccccctctcgaatcgtcacgagtgacagagttagacaccacccatgctgtccccggccggatacatgactgtaactagctagctagg

SEQ ID NO: 139919 - DNA, 244 bp, Zea mays
  unsure (1)..(244): unsure at all n locations
  Clone ID: MRT4577_59091C.1
tgcggacggaggggttcaagactataatgtcttggagccgctgactagctacctatagctagttaactcgttcagcggggaggagtaacggagtgttacgcatcaccatgggccggaagtgtgagcaaagacctcggtgaaccatctgcgtgggggggggggggggggtttcnnttccttctctacntctcctttacaatattgttgtccctgcccccgctgcgcgcggggtgggggggttttt

SEQ ID NO: 139920 - DNA, 803 bp, Zea mays
  Clone ID: MRT4577_59092C.1
atcttcctcgtataaccctagaggctctcctcgcactccacgaatccttggtgagctccgtgcttccgcccaatcccccctctctccgatcctcctccccctcgctctccccgcctcacgacgagccgcccgcggccagttgcaggcccctcctcgcacgctggatctgtcgcggcagctcccgccggccgcctactactactgcctgcttttcgcggcggcggctgggctcatcggcggcgtcgcgcactatatgcttcctcggaagcgggaggtcgtcgccagcgaggtcgataacttgcagaagaaaacccgccccgctgccgccgacgacgccatggccaggcccacggagatcgacgaggacctccacagccgccagctcgccgtgtacggccgcgagaccatgaagcgtctcttcgcctccaacgtcctcgtctccgggctccagggcctcggcgccgaaatcgcaaagaaccttgtgcttgcgggtgtcaagtctgtaactttgcatgatgatggtaatgtggagctatgggacttgtcaagcaactttttcctctcagagaaggatgttgggcaaaaccgtgctcaagcttgtgttctgaagctacaagatctcaacaatgcagttgtcatctccactctaactggtgatttgaccaaggagcacctttctaagttccaggctgtagtctttactgatatcaccttagaaaaggcagttgagtttgatgattactgccacaaccatcagccacccattgctttcattaagtctgaagtccgtggtctttttggca

SEQ ID NO: 139921 - DNA, 735 bp, Zea mays
  Clone ID: MRT4577_59093C.1
taggggccttttttttttttttttttaaaaaaaatcaatgaagtcatataatcaacgacagcactgactggatgacagaagaacgaaccacaaattgtgctaaaattttgacatcaagggggtacagtacattggttttcaaaacaggaaaagtccattatcccataggtgagagaactaagccctgaaacgcattcctgaacttaggtacgaggagcggcagcagggggagctgctgtggcagcagcacctgggcgcggtgggccctgacctggccttgggccatcatcccggcgcctgaaacgctgcgggggctcacggttcctcctgttctcacgagagcggacacggacaatgtgcgcatggattgcgcatgagacacagtgatgaacctttgcgtacaatttgggaagaacatatccatcatgcacacaagcctcctgcacgtccctcacagcagcctgctcaacaatgttcctcaccaagaaccgcttgatagccttatcctttggacagcacttggcgcagttggagcagcgtatgtacttgacgtggccgcgcccgtgcttgttgcgtccgccgttcctccgcttgaacgtcatggctgggagatctgcaatccgtcgctgagggcggctagggttcgctgcttgaagcgatggcggcggatcgcaaccggtgtgcggggaaggtgtccccggccggcctcgagggtcccattcgcccttaggagtg

SEQ ID NO: 139922 - DNA, 735 bp, Zea mays
  unsure (1)..(735): unsure at all n locations
  Clone ID: MRT4577_59094C.1
tggtacgcctgcaggttccggtccggaattcccgggtcgacccacgcgtccgttttttttttttttttttttctgagaagtcctgaaagtaatctccaggaccaggactctgcttccagcctctggagttgtgcctagtcgaagtgcccccctccttgggccccacccgccatgagagctgtcagtgtgtggtattgctgcccatggggactactgctgctacactgtctgtgcagcttcagtgtggggtctccgtctccttctatcagcccagagaagaaggtaggaagccaggggctgaggttccggctggctggctttcctagaaagccctatgaaggtcgagtggagatacagcgagctggtgaatggggcaccatctgtgatgatgacttcacgctgcaggctgcccatgtcctctgccgggagctgggcttcacagaagccacagggtggactcatagtgccaaatatggccctggaacaggccgaatctggttggacaatctgagctgcagggggactgaaggaagtgtgacagaatgcgcctctcggggctggggaaacagtgactgtacccatgatgaggatgcccggggtcatctgcaaggaccagcgccttcccggtttctcagactccaacgtcattganggtggagcatcagttgcaagtggaaggaggtgcgactccgacctgcggtggagtgggggaaagagacccctgcctgtgactga

SEQ ID NO: 139923 - DNA, 228 bp, Zea mays
  Clone ID: MRT4577_59095C.1
tgctcgcgtgcgcagcaccatcaccgacctgggattctgtcacctcctgttcccaacaacccccgtcctattgcgcttgccgatcaagttatcccgattgacaggaggcctccacccaaccacactgcccgcttaagcccaaagacgtttctccagactctactctgattctcacgatggcggctgacgacacgcacaccgcactagatcctactacaacgcgccgcc

SEQ ID NO: 139924 - DNA, 824 bp, Zea mays
  Clone ID: MRT4577_59096C.1
gatatttacagctgttcctcttcctccgttctccagatttcttggctccctgggctccctgtcttgcccggagattgcaatcttgcggagctcttctttggtttcttgttccatgctgggagccatggatgagaggatcccgccgccccctttcttccagtactcgccgtctggcgtccattcttcccctcaccaccacaaccccatcaggtcgtctgcctccgagagggagaggtatattgctgagttacttgccgagaggcagaagctagttcctttcctgcaagttcttccattttgtaacaggcttttaaaccaagaaattctgcgggcatcttctttgccacctaacccaaattttgttgaacctgagagattcgattatggtagcccgttaagattagctggccaccctatgaacggtcaaccaatggatatggagggatggactggaatgcatgcagagcatatggggatacaccattcaccatccatgggctggaatggtggtcctggagttgttggcggccctgttgtgaagaaacttgtcaggatggatgttccagcagaaaagtatccaaatttcaactttgttggtcgtttgttggggccacgaggaaactctctgaaaagagttgaagctacaacacaatgtagagtctatattcgtggacgtggttcagtgaaagatactgtgaaggaaaacaagcttagagataagcctggctatgagcacttaaacgaaccactgcatgtgcttatcgaagctgagttccgggcggatattgttgatgtgcgactaaaccaggctgtggtcatactgg

SEQ ID NO: 139925 - DNA, 333 bp, Zea mays
  Clone ID: MRT4577_59097C.1
cgcgggcgccgccaccgtcacctacgcaacaccagacgcttcagctttccagcactcggagctcgcgcgcgcgacggcccaccatgatcatgcccaagaagaaccccaatgagatctttacgtacctttttcagggagggcgtgctgattcccaaaaaggactacaacctgccgaaccacccacagattgatgtccccaacctccaggggatcaacctaatgcaaagcttcaagtccaaggagtatgtcaaagagaccttctcctggcagtactactactggtacctcaccaacgatggcattgagcacctacgcaactacctgaacctcccg

SEQ ID NO: 139926 - DNA, 457 bp, Zea mays
  Clone ID: MRT4577_59098C.1
ctgaccaacaacagttagccaaggcggtggcggaacaggtctttctggcgatcgccaatattaaattgcgggaaaggttggaaaatcagagtatccgggaccccctcacggggttatttaaccgtcgttatttagaacaatttttcttacaagagattggccgggccaagcgctataaccattccattggggtaattatgggagacattgaccatttcaagcaattcaatgaccaactggggcacgatgccggcgaccacgtactgaaaaccattgggcgcattctgcaaagcaatattcgcggttctgacattgcttgtcggtatggtggggaagaaatgaccattgttttgccccaaacctccctggaagataccctagtcaaggctgaatccctccgtcaggcgatcgcctcctggaagtggaatacaaaggaaaggaattgggcacattgacc

SEQ ID NO: 139927 - DNA, 284 bp, Zea mays
  Clone ID: MRT4577_59099C.1
gtcatacaaagctgctgttgaagaagggatcaccaatggttttggcatgggttctgttttctgcatttttttctcgagctacggtttggccatatggtatggcggaaagttggttcttagtaaaggttactctggaggagatgtcatcaacatcttgtttgctataatgaccggggcaatgtctttaggtaacgcaacaccctgcatggcagcctttgcagaaggacaatccgcggcatacagactgttcacaacgatcaagaggaaaccagagattgacccag

SEQ ID NO: 139928 - DNA, 257 bp, Zea mays
  Clone ID: MRT4577_5909C.1
gaaattcttttattgtagtttcttttgcacggtcatttctaatatcctgttcgtgcatgttatgatcaattgtaccagcttctgccgccacctcgatccacatgctgatgataacgtatacgtttacgcactgcgtacgcagggtggaagtgcaggactgcagacacgtccaaaaaaaaaagaaaaagaaatgtacgcgtcgctcgctcttgtcagtcttcttcggtaccaaaccggaaagaaatggcagggttgga

SEQ ID NO: 139929 - DNA, 615 bp, Zea mays
  Clone ID: MRT4577_590C.1
accatctcacccatctctttcccccgccaagagcagcaacgagctgtgtgttcttgctagctctgaagctcaagcgcgagcttgctagaagaagcatctctccccagtctgccatatagcagtaccatggcggcatcggtggcctgcgccttcttcttcgacgccgagccggtgggcgagcccggcatgccggcgctggacgcgtgcgcgctctgcgccaagccgctggcgcgtgacagcgacgtcttcatgtacagaggggacacgcccttctgcagcgaggagtgccgccacgagcagatgcacctcgacgccgtctccgccaggcaggccgcccggagggtgcagcgattctccgcggaggcggagtgccaccgtgggcagcggcagtccaggaaggtgtccatcgccagctagccgcggaaagtctttgtttggatcgacaagatctgaatgaattctgaagaaaacgacctctgtattctgaagaaccatcgatgtctcttgggaggcgtctgatgtttccgtctctccgggtaccagatgcagcctggcgccgcctacgagaggcaaggcagccaggcagggcagcatcagtcggcaccaagcatcata

SEQ ID NO: 139930 - DNA, 585 bp, Zea mays
  unsure (1)..(585): unsure at all n locations
  Clone ID: MRT4577_59100C.1
ccgggctaaaactagtggtttacatcagncagcttcggtacttagttttctcatgatggnttgtatctaggaattggaagttggggcattgattactaattatttggtgatgccgatgtgttagctcacacattgctttacaaaatgtactcatatttgttcagccaccagttgctgataattatatcggcgtttcctgttcagtgggacacagcaggccaggaaaggttcaggacaattacgagcagctactaccgaggagctcatggaatcattatcgtgtatgacgtgacagacatggagagcttcaataacatcaagcagtggctgagtgagattgataggtatgccagtgacaacgtatgcaagctcctagttgggaacaagtgtgatttggttgacagtaaggttgttgacactgaaaaggcaaaggtatccttttgcttatgcttctctttaaaacactagccataattgtgatgctgggacagctaaccaagacaacttttgcaagtcgcaaacaagaatgaacatgatgaagggaagaatgtaatttctgtttgttatgaaagtatagtgatttgt

SEQ ID NO: 139931 - DNA, 153 bp, Zea mays
  Clone ID: MRT4577_59101C.1
ccgacgcgtccggcgaggcatcggaatgtatacatagctccgtacagtgagcactgtgcggcattcgacccgtcggcctgtgcatgtgcttcatctatgtaggcaactccgcctacatccagaacattgcatggcgcgtgagcgaccagacta

SEQ ID NO: 139932 - DNA, 430 bp, Zea mays
  Clone ID: MRT4577_59102C.1
tccagatcatccaggctcccagaatcagcctaagtgtgtcgtgccagcatgaaaggcacggccacggcgtgcccgtgtcggccccgaaaaatcaaatacacaaacttataggctcttaagcgtgttgcgcggacgggaggggtgtaagaggagcctcagaggggaggaaggagagggaagcggtggctgggaggtgagcaggtggcgtcgtgatggatgggggcaagggcgagtatgggagaggtgatagttggagtcaggagatggggatgggatgagcctatctcgacaggagtggggagtttagtaggttagactatagttaatgcgggagccaaatggctaggagaaaatttacctttgccataagcctttttccctcttttgtcttgaaggcctaaatccctcatttgggcctattggtgtttta

SEQ ID NO: 139933 - DNA, 475 bp, Zea mays
  Clone ID: MRT4577_59103C.1
cacccttctagaactaccatttatggagaagctgccccgttgcctaaggcgcgacacaggagccggacgcgggtgcgaataagcttgaccacgccgcgaggcatcatggatgtgctgaagcgattcctgaaagattgcggtggtcacaggagaaacaaacgataggcctagaatatgccaaccgctagctctcaaggatgctacagctatgcttacaggaagggatgaaaaacgaggcaaaagatgctcccgacacccttgcccgtgaatgccaactcccaaatatgatattccatcagatggacgtcaaatatgatcatagagccaccacattctctcctgctgtcgaaagaagaatcgtaagctcgacattttagtgaacaatgcaccttttaagaagtgtacacaaaggaacgcctgaaagctctcaatatggatgcatagacatggacatttggctgggcaaggtaatctt

SEQ ID NO: 139934 - DNA, 224 bp, Zea mays
  Clone ID: MRT4577_59104C.1
aaaaacaaactgaaccaaacccagaaaagcgacctttctttcataacaaaaatataatcaagcccaccctgtctaatatcaaaatacaacaaccccggcaacgggaggcagctctttaaccaatacatgaatccgtgaccgactttaggcctcttaaagccatgggaattcaaaaagaaacaaagctagctgcaatacaaccttagctactagccactttttaa

SEQ ID NO: 139935 - DNA, 424 bp, Zea mays
  Clone ID: MRT4577_59105C.1
gccttctcgtgttcttggagtgctccatccatctagctccgtgcgagagacagatcagatatagagatacaccgagatagagagtcccagcaagccatggcgatcgcacgttacgtgatcaattgcagagacgccttgccgtggaaggacgccaagactgtgtccatctccgaggtgtaggtatcgcccccgcacaccatggaggtgcgtgtcaagatcctctacacctcgctctgccacatcgacgtctacttctgggagggcaaggctcaaaccccgttgttcccaagtgatcttaggtcgcgatgcgatatatatctcgaagacccttcgagacggcgtgaccgatttcgcgccacgcgactatcttctccctgtgctcacccgcgagtgcacgtagtgttcccattgcgattcttaggag

SEQ ID NO: 139936 - DNA, 346 bp, Zea mays
  Clone ID: MRT4577_59106C.1
gggcacgccatccctgggtgtacattttcaaagacattatcggatttttatcagctttcgaactttcatgggcccaagctacacaaagggtagatggtggaaccaacacaagaggtggggttcaaaccccatggccacaagaagagctcagggaaccagaagggatcgggggacccttcatttgggaacgtttggtgggcaattgccgctgtaaccattggaccccggaggggaaaccaacccggcccaaacccaaatttacgggttggattgggtcttacgggggggccctcaaaagaaccttaatttgacggggttgggctgtgcattattcgggccccttgaa

SEQ ID NO: 139937 - DNA, 166 bp, Zea mays
  Clone ID: MRT4577_59107C.1
cccggcagtgcgagttgctgactccctccttccgaactgcacagctggccgacggccatgcccggtggctgccggccccggcctggctctccatcctcaggcctggccgctggctcgtacccgttgacgcatgctacgctagcctagcgaaccagcccgacactcg

SEQ ID NO: 139938 - DNA, 161 bp, Zea mays
  Clone ID: MRT4577_59108C.1
ctcgagccgattcggctcgaggcggacggtcatgatgcacgccaactcggagtcggacgttacgagcctggcggcgtcgactccgtcgcggtcgccgaagcggtgcggcggcgctgtctacggcggctactacgttcagagcccgtcgcgggagtcgctcg

SEQ ID NO: 139939 - DNA, 263 bp, Zea mays
  Clone ID: MRT4577_59109C.1
gtttttggggaaaacttaagagaactgcgccgtaatgcaccaagaagaaaagaaatgcccgggtcaaagggagctggacagaatacaaggcccgcccatgggggcccgcaacacagcaaactgaaaaactccatcaaacggaacaaccccgtagactgcacgaagtacggcagtaaggaaagaaagagccttaaccccagtcatctcccaagactgcaattgactcgcggccaaatgaaacgacagatctacactaggagcac

SEQ ID NO: 139940 - DNA, 302 bp, Zea mays
  Clone ID: MRT4577_5910C.1
ccggccgggccgggatttcaacaacaaaccgcacaacggagcgattctcctcctcattccgagtacttctcgatttccacgatgtcggcgcgcgcaaaggtcgcaaagaggctgtctagaggccgtcggcaagcgccaccgcaaggtgctgcgcgacaacatccagagcatcacgaagacgacgatccgaagaatgaacaggagggccgccgacaagcgcatttctggcctcatctaccaggagacccgcggagtgctcaagatcttcctcgagaacgtcatcggcgattccgagatctaca

SEQ ID NO: 139941 - DNA, 357 bp, Zea mays
  unsure (1)..(357): unsure at all n locations
  Clone ID: MRT4577_59110C.1
ngtgattttcatcgaccctggaccgaacaacagcggctttataaagagcctggggtctttcaaacctgggaggctggccttcattaaccaccaacactgggtgatgccatacactaatcacatcaacgaactccctaccagctaccagaaagctgatctctanaaatacaaggatgaccccggcacaactctcctaggccttgacggataggacttaccaatgcttataccattccacatcgatctaacctcttctcaccaccaaaatgaacacctccatgaccacagcacagaacacactacacctgacactgggtacgacaccatcacccccggaaggtcttcaacctgcgaact

SEQ ID NO: 139942 - DNA, 407 bp, Zea mays
  Clone ID: MRT4577_59111C.1
ggccctggacctttgggctgctttatgtgcgtggctgattagtcgtgaggtgagactgtgctgtctcctaagtagtcgatggatgttaagtggtagcctatgattgtggctatggataataggacttctaagctggatgcggaggtttctagagctaaggcgaagtcggtggaggatacggcggtgtgtggtgtgtcgctacgtgggtcgggtagatcggggtcgctgttggtgtcgaatttgtggtaggtgcgttgtggttttgatgcgtcgcttgcgcttggttcggatccttttggtgttgatgatgttcgtcctatggggtcgcatttggtggagtagtcgtagtcctagagtctttattcgtagagtactggtggtagctctgagagttcggataattggac

SEQ ID NO: 139943 - DNA, 261 bp, Zea mays
  Clone ID: MRT4577_59112C.1
gatgagcacaataggaccaactggcagccaaaatatttgctcttactcttggtcttttgaggctgtcgcaccatttccaagctccagctctatgcttcttttccccgaccttaccacgggcttggatggaaaacccaattttaaccctcagaccaacgcatacagtcttactataccctgtctcacatatagcctatatagtccttgggcttatgccaaaatagcaacactcacactggctgcaaactgtgctacttacac

SEQ ID NO: 139944 - DNA, 298 bp, Zea mays
  Clone ID: MRT4577_59113C.1
gcagcatcgtctctagttgggttctcctctcctagctagccagcacctgcagatctgctcgtggccttgattttggggaacgaagcgatggctcacagcggccccgtggtttcctgcatgctgctcctggtgggggcacaactgctcatggtggtgatggccacacaaacatctgcggcggcggcggcggcggcgggcgaccaacaacgcggagctggacgcctgctgctgtggcaggtgacctgccactacagcgcttgtaactgccgtacttgcccaacatatgggtgggcgtgct

SEQ ID NO: 139945 - DNA, 558 bp, Zea mays
  Clone ID: MRT4577_59114C.1
agagatctgggggggggggggggggggtccctccccacctgtagacacctgcacaggaggcgtctcttgatattcttttggcgtaggcagcagacacattagctacgcaccccggtcttcccccttcggcggttccctagggaaatccggtattacgacaggtctcaacgataatcttaaatacttacggaaacttagagtataacctgactaacgaagagagggacgttaagttcatagaatggttgtgtacgaaggtgcctacgatggtcaaccaaattccctgggggactacaaaccagaacgatactaggagtgtcgggaccagagccgcttggtagttgggaactccctgtgccaaggtcggctggataaggacaccgccaacgaccgagactgatagtacctagaaggggtacaaattcactaagaccaggttcaccaacgggtttaaggaggccactgggacgctctcggggtacgcgggaacccccggaagtagggatcgttataagacgacaacggagacgagggcgaaggaggaaagaacccgcccag

SEQ ID NO: 139946 - DNA, 179 bp, Zea mays
  Clone ID: MRT4577_59115C.1
taccaatcctcatgctaatgcaagagatcctgatcacagcaaacccgtcccggtggagatagattacaacacctgtacgatacctcagccactagtcacaatttgacgagggttcggtaacgatatagggaacattccatagagggtacgttatttggttccaagcctttagcccccca

SEQ ID NO: 139947 - DNA, 368 bp, Zea mays
  Clone ID: MRT4577_59116C.1
cgcgtgcgcgggtcccctatagagcgcgcgctcttttttttttttttttgtgtgaaaagcagcatcaaaagagagtgggcaatggatagttttcccatatacccccaaaggattcacgggggcatggctccttacacaggcatgctgacatcatactctattgatgtgcgtgatcacaattactactggatccggatcgatgcgcaacctatatgcatcaatgcatctcacaagtgactaactctgtctactccgtggatcggatcccaaagacaagcaacccatggctgaaccctggcctctctgttcactttttcaagaattcttggatgcttctgcagatgaaccactagaagtctcaaccttga

SEQ ID NO: 139948 - DNA, 372 bp, Zea mays
  Clone ID: MRT4577_59117C.1
tcgatgcacccgtcgtaagctcggaattcggctcgagaatgcaccctgctatttcaccttcccgccaaaaatgggggatggctattgacagactagggggctcagggcccccgcaaacatacgatgattgcatgactaatatgttggttcatcatcaatatatacggaagacaggagcgtaggcctctttaggaagatatccggtcaggctcatactccccaatagaatcgtgatggatggaagaactcactgcattcatatccctcagagtgagtcagtagaatcggctagatggctatgttgacgaggtttgccgaaaactcagatgcttgtcaacgttgatatcaccctaaaggaagtcaaggaccgac

SEQ ID NO: 139949 - DNA, 406 bp, Zea mays
  Clone ID: MRT4577_59118C.1
atttcgagcattgaaaaacacaccaagctttgtttcctatcaacaacttaacaacatggggtaccaagatattagccctgcttgcgctacttgcccttttagcgagcacaacaaatgcgttcattattccacaatgctcacttgctcctagtgacataataccacagttgcttctaccagctactttaatgagctttgaacactcaaccatgcaagcctacatgctacaacacgtgcttgaggctagcgtcttacaccaacaaaatgcctaattgcaacaacaatttctgggcacatttaaactctacaaaccattttaactcaacagcaacaacagtttctgccagcattgagccaactagttgtgttgaaccctgtcttctactatcaacagaagctacttgta

SEQ ID NO: 139950 - DNA, 250 bp, Zea mays
  Clone ID: MRT4577_59119C.1
atgatagtgatagtgatgatgaatttgattcaccttcctatgatgaattagctaacttgcttaaggaatacactcaaatcattagaaagtcaaaggctaaatgtgataagttaaaagatgaaaatgaatttttaactgccaaatatgacatagttgtaaaagctagtgatgatatgaaagaagaaaacaaaactatgtcatccactgtaaatgagcttaaatcctccctaaaagatgctaagaataagtg

SEQ ID NO: 139951 - DNA, 208 bp, Zea mays
  Clone ID: MRT4577_5911C.1
agacactagagaaaagtttttttttttttttatcttaatggaataaaacaggattagatgcagggataaaacaagagagataatgctgggggctgaaattacaaagatcaaaataattcttggcttttagaatagtgtgacgcttccttgggatcacatagtatatcctgttccttgcatttctaaaaatatagaacgctcatttttt

SEQ ID NO: 139952 - DNA, 576 bp, Zea mays
  Clone ID: MRT4577_59120C.1
cttctcctcccaccccctcgccgccgcaggctttgaccccatcgcccctccgtcctcttcgtctccggcaggccaggcagttaacagctccagcagccatagcaaaggagaagatccacatcagcattgtggccattgctcatgtcgactctggcaagtcaaccacgactggccacctcatctacaagcttgtaggcattgacaagcgcgcgattgagatggtttgagaaggaagccgctgacatgacacaagatgactttcaagtatgcctgggtgcttgacaagctcaggggtgaccgcgagagggggatcaccattgatattgctctgcgcaaattcgagaccaccaagtactcctgcactgtcattgatgctcctgtgcaccgtgatttcatcaagaacatgatcaccgggacctcccaggctgattgtgctgtgcttatcattgactccaccactggggggtttgacgctgccatctccactgcaggatccaaccgtgagcaccctctccctgctgtcactctctgcgtgaagcagaggatatgttgctgaaacccacggatgccaccact

SEQ ID NO: 139953 - DNA, 1334 bp, Zea mays
  Clone ID: MRT4577_59121C.1
gggtaccctccggggccggccggggtcttcccccctcgtcgacccacagaaccttcgactcgtcgccactggagaagtggctggctacctccgattcagcacgtaaagaaagcaaaccgcccgcagttccgttccgcaagaccagatcgcccgcttttctcctccggtcctctcctccctcccctctcccctgagccctgatcgaatcgatccacggtgccggcggacgcctcgacccctccagttccatccaatccacgagtgaacagatggcgtcgcagtgggctgctccgccgccgggctactcggccgggcacgggcaggcgtacggcgaccagcagctggccacgccgccgcctcaggcagcgacggccgtggccgtgacggcggcgagcaacggcgtgggcaacccctacgtcgtcgtcacccccgcgtctgccgcaccgtccacctgccagaccgtcaggaaggcgctgggccgctacggcaagctgctcgaggacggaacccgcaaggccgccgacgccaccggcaacatctggcaccacctccggacggcgccgaacatggcggacgcggcggtggcgcggctgacgcaggggaccaaggtgtacgcggagggcggccacgacagggtgttctaccagacgttcggcgccatgcccggggagcagctccgcaaggcctacgcctgctacctctccacctcctcggggcccgtcatcggcacgctctacctctccacggcgcgcctcgccttctgcagcgacagcccgctctgctaccagggccctgccggccagccgcacgagtgcatgtactacaaggtggtgcttcctctgagccaggtgacatccgtgaacccttcttccagcatgcgcaaccgggcagaaaggtacattcagatcaggaccatggataaccacgagttctggttcatggggttcgtgaactacgacaaggccctcaagaatctctacgaggccctgcagcaccgcgatgtcagcgcccaccagcgctgctgatgctgatcaggcttgggttaggtcctacagtcctactgctacttatttcgtccatgatgaactgtgatacctttatctcatctgatgttcttgatgaataagagaaccaccgaaaactcctggtgtgcttgcgtcgctaatctgatcggtgcagagagaatatggtgcatctcacaaaataacatttctttaatccttaataaaaaaaaaaaaagccaaatttttttcatggtcatggagtccattacaatgctgcaggcctgatcctccatatacaaacttcaaccttgcaatagcatattagactct

SEQ ID NO: 139954 - DNA, 974 bp, Zea mays
  Clone ID: MRT4577_59122C.1
cctgagcacatttaggctaccagcacaaggacaggctacacaacatagacgcctactaatacactcatacccagcgagcacgacagcgcttggatcgggcaaaacggcatcgtcacgaggagggggagtgcccgctgcccgggtgggcgcgcgagggaccatgcatgcatgtatttatgtattcagtgctctgcttaacagcctccaatgcaacctccgtccgtgcatggctcgcacagtcgtgctctgatttcgtctcgtcctcccgccgtccccttgccttcgcacacgccaaaactttagctgcacatatgctctcctcactcctcttctgctcgtctggaagtcccaaatccgggtggggaagaaagaacacttcgctggtgtgagagcttgaagctgccagcatgatctggctgctcaaacgccgccggtgctcgttcggtggcgcttcaccagatcatgttgcagcttcactctctcgcaaccagcgtagggcggcaaagcaccgtggaggctccggacaatgaattccttcgccgtaggcactcgcgttggcgtcgctcatcgacgacgagaagaagcttggcgactgcaagttcaacctctagaagcagtcctacgtggtcgtatgcgccgctgtgtacatcaagctccggcgcagctgccacttggacacggtccagagcggtggcaccgcgctgtccatcgtcaagcagggggaccttgtggtcgtcggcgactctcgggttgttctgggcaccacatccgacgatgacgccatcatgtcgtccagctcatcgtccaactaaagcccaacctgccacaggagtagcgtatccggtggtgcaacggcaggggtactacctcgctgatgaacccgggtgcacttcgttttgcagcccagccaagagtcgtcgatactcgccatgtcgcgcgtgttcgacactactatatcgaggactgtagagtca

SEQ ID NO: 139955 - DNA, 205 bp, Zea mays
  Clone ID: MRT4577_59123C.1
ggattaacacatacagggggccaatgaaagtatgaggcggggtttaactgtgcacaatcgtaactaaggggaaacaagggaccccaatcctcgggcactttggaaaaaaatgcctgaaactaaaaaatcgatctgcaggtgatcaatgaggaattgaactcaaaagcgctgtgggggctttggttcgccattgtgagctttcaat

SEQ ID NO: 139956 - DNA, 503 bp, Zea mays
  unsure (1)..(503): unsure at all n locations
  Clone ID: MRT4577_59124C.1
gcactttgatgctataaatattaagaatagtttttctataaatttaattaaatgtaaaatagtttgataaatgaacaagtagtaaagaagagaggatagatggaggatagggagaagaaaagaatggaaagaagacaaagaagagacggggtcgccagaacgaggatactcgctcatagtgctcgcgaaagcgagttgcctggatggagaggtcgatccgtcgatggagccatggtactgaactggcgctgtcgcgttgaccatgcaccattactctagtagtctgatgggccatggatctttgttggctaatgcccctcgtgtcaaatcttggtaccctgccaattgaaccagcactttatgtgggcctcatgtcggccagaaatagtaccatccgcgtttcggattccgattggttcggtcgcctggtcgatcgctcacagtctgcaggtcggtcgcttcgtcgccttcttctnncgcttcatcgtcagatgagaaagttt

SEQ ID NO: 139957 - DNA, 300 bp, Zea mays
  Clone ID: MRT4577_59125C.1
aaaaaaaaaaaaaaaaaaaaaatttagggatatattttttatttttttttattttttatttttaatagctcccgaagtgcttaatttggaaaaaattgtccaggggggtttcccagtttcccaacacaaaacttctcggggggggaacacctatggttttcaccttgtagatgggagtcgttgtccccccccaaaaaaaaaggactcgaaaaagaacaaaaaaaaggccccctttccctggagttcatcttttggggcaggcaacgaacctcatccccgatattgggggatttcagattt

SEQ ID NO: 139958 - DNA, 225 bp, Zea mays
  Clone ID: MRT4577_59126C.1
attcggctcgaggagcaactacgctttgttttaatagctgcaaggacgccttcagaaccaggaaattgatcaaatagatgttgatctacacgaaactatgccgtctggcttcaaggcctatgcaaagtaagtgatggccgacgctattgaaatcggaaactatctaaaaagcaagggctaccaaatagttactgatgcaactgacaaccacattgttatacggga

SEQ ID NO: 139959 - DNA, 327 bp, Zea mays
  unsure (1)..(327): unsure at all n locations
  Clone ID: MRT4577_59127C.1
ngagtccgcagcagaactcacaaacaagctcgcatatatctgccaccaccatcgagtagttctccaccgtgacgccgtgccatccctctgtgccggcatggagttcgccggagaagtcgacgacttcgctctcgacctcatccgcgagcacctcctcggcggcgacggtggtgtccaggcgacggcgaaccatgatcaggcgggccccttttgcgacgacgtcaccttcccggggctgccaccttccgcggcagaaccacaagcgcacacgcagcggcccatgttcttcccgcagcagcagcagcagcagtaggagaatcagcagat

SEQ ID NO: 139960 - DNA, 512 bp, Zea mays
  Clone ID: MRT4577_59128C.1
cggttccagcaggcgtactaactttccccaatgagagtcgtattttagcttggaataaacttagatgaactagaataattaaattattaccaattttttaataaaaaaaaaattacacattaacaactttgtttaaaatgaaaaacacaattttaattgaataaaaatccataaaagttaatccacggaatatatgtgttcgaccccaacttaaacatacattcttctgtcgcaaacctgtacatttacttcccgtacaccgaatctcacaaaaggctaacctcccttaacccagagattgaagagcttctgtacaaacaaaccgagaacacggagcacaagttcgttctgaactacaggaacaagccaatcatattctccatggctcgtctcgaccgagtgaataacttgactggactggtggatctgtacggacggaacaagcggctgcaggagcttgtgaaccatttggtcgtctgtagcgaccatgagaaccctttcaaggacaatga

SEQ ID NO: 139961 - DNA, 168 bp, Zea mays
  Clone ID: MRT4577_59129C.1
gatgagcacacaaatgcagtcgaatcagactagtaactccgtaggcgacagcagagcccctatcggcaattatagagtctcgtgctaacatgatgaccaagatgcttctagacgcgtgagcagacataattgaacgacttcgggccagtcaccagaatgtaaagatgg

SEQ ID NO: 139962 - DNA, 199 bp, Zea mays
  Clone ID: MRT4577_5912C.1
tgatcctctgcttgtttcaaacgcctcacaaagaggtcgatggtcttgttagctgcaggggtgactttttacagcatcggcgtactaagtggctcacaatctatacaacattaactctcttgattcacgagtttgttgattgttacgatatgccctttgattcaagataagaacttctgaacccttacctttactttta

SEQ ID NO: 139963 - DNA, 253 bp, Zea mays
  unsure (1)..(253): unsure at all n locations
  Clone ID: MRT4577_59130C.1
ctagcatgaacataacaaggtcgtctttttctacctacaacatgactaccngcggggggtaacttaagagagggcggggcgtcattacatcttaattctactcgtgccaaaacattgactatcccaccatctcagagtgcttgaagaactgccaatcgtaaatcactctagtatagaaaacgaataaactcgtctctgctatcttaaaaaaaataactaaacacatataaattaaaatacggcctccctttaa

SEQ ID NO: 139964 - DNA, 243 bp, Zea mays
  Clone ID: MRT4577_59131C.1
tggaccagcggcagcggcaacggtgccggcaagaagcaggccgcgcgctccactctccgaccccggccgaaacaaaggtgatggcgcagctgccgccgagggcgccggggggcgccgcgccgcaagaccactggtcggcggcgggggagttcctggggttggcagtggacaggcgcggttggcgccctcgatgcgttggtgtcatagccttgtcgttgtgtgcgtaaatgcctcttgtagcct

SEQ ID NO: 139965 - DNA, 348 bp, Zea mays
  Clone ID: MRT4577_59132C.1
aaacaccacatttatttatgattataaccatatgctgccgctcgtttgaaattgggacaccagattacatctggttcaagaaaccagctgacgcacgacttatttggcaaaccaagcacaaacttgggtaaggaaaaaccattcatgggctattggcagaaacaatggttaaactactttcagaagaaggtccaaccactggtggggggataaccaccgggaaaaccgaaaaccagggggagggtaacctcctttgggttattaaacaccacaaaggagggaccccacgggaggggggcgccccctaagaaatacgctgctaaaaggggggaaacaccctccaagtct

SEQ ID NO: 139966 - DNA, 431 bp, Zea mays
  Clone ID: MRT4577_59133C.1
cggactcgttggtttttcgaaaagctttgaataaggcaaaccaatcaaatttgggtaaaaaagtcaaacgaattataaattaggacggagggagtaactattaacacctccacttgctaatggttagctggtctattaatatgcctgtttagatccccacttgctaattttagctgcaagctatcggcgctaaccgatggaaacaggctacgtatcctcatgggtctccaaatccaatacatgtccatgcaggtccgtgggctcccatgcgcgcacaatttccatgtggagtgcatcgaccagtggcttcggctgaatgtcaagtgcccaccgtgccggtgctccgtcttccccaacctggacctgagtgcgttgaacaatctttggtcgaccagcgagccggaccattcatcctgcagcgccagcaatgt

SEQ ID NO: 139967 - DNA, 1041 bp, Zea mays
  Clone ID: MRT4577_59134C.1
tgggacctcgtcgaggcgggccgctctctgtctcccggcacctatctcccctccccatgtgggcggcctcgagctctgcttaggtctcacagctgtgctctcgttggttgggtgatccgccccttgtcggctcctttcaactcgagagctccgggacagcgagatctgcgctgtcgccgccttacctttcttgcgagctcgcgtgcaggcaggcactgagcagtgagctcccccccgtcttcctcagcctcgtttcccctctcgttgctggatctggctcgcaagatccaatctttcgtgccccctttctccaaagatcctcgcttgggtggttcttcctggagattgctgggaggatgcagcacgaccagaagaagaaggcaccttcagagatggattttttcacagagtatggcgaaggcagcaggtacaagatagaagaggtcataggcaaaggcagctacggcgtggtttgctctgccgtggacactcatactggcgaaaaggtcgctataaagaagataaacgacatcttcgagcatgtgtctgatgcgacgcggatactccgggagatcaagctgcttaggctcctgcggcatccggatattgtggaaataaagcatatcctgctccctccgtcgaggagggagttcagggatatatatgttgtctttgaactcatggagtctgatctgcaccaagttataaaggctaacgatgacttgaccccagagcattaccagtttttcttgtatcaattgcttcgaggattgaaatacatacatacagcaaatgtattccatcgagatctcaaaccaaaaaatattctggcaaatgctgattgtaagctcaaaatatgtgattttggcctagcaagagtagctttcagtgatactccaaccgcgatcttttggacagattatgttgcaactaggtggtaccgagcaccggagctgtgtggatcatttttctcaaagtatacaccagcgatagatatatggagtattttgggtgtatatttgcggaactattaactgggaa

SEQ ID NO: 139968 - DNA, 2333 bp, Zea mays
  unsure (1)..(2333): unsure at all n locations
  Clone ID: MRT4577_59135C.1
tggggctagtggccggaaagaaaaaaaaaaaaaaaaggcagggccgggttctctcacacactccactccacgtccccctccttcaaatcctaccaacacccaagcacaaggagagagaagccgccgccgccgccatggacaatattgaggtgaggaggaggaagaagaaagggagaagcagcggacgccgccaggggggacgggtacaggcggtcctgcgcgccggcctcgtcgccatggccttcgccctcctctgcctctgctcctccacgccctccgccattgccctcaccccagacggcgaggcgttgctggagctcaagctggccttcaacgccaccgtgcagcggctcaccagctggcgtcccagcgaccccaacccctgcggctgggagggcatctcctgctccgtccctgacctcagggtccaatccataaacctcccattcatgcagctcgggggcatcatttcgcccagcatcgggaggctcgacaagctgcagagactagctctgcaccagaacagcttgcacggcccaatccctgcagagatcaagaactgcaccgagctcagggcaatttacctgagagccaactacctgcaaggaggcatcccttcagagattggcgagctcgtgcacctcaccatcttggacctgtcaagcaatctgctgaggggcacaataccggcctcgatcggaagcctcactcacctgcgctttctgaacctgtctactaacttcttctccggagagatcccaaatgctggtgtcctcggaaccttcaaaagcagctcgttcgttggaaatctggagctctgtggcctgtccatccagcgtgcttgccgtggaaccctcggctttcctgctgtgttgccacattccgatccgctctcttcggctggtgtttctccaatcaataacaacaagacgtcacactttctcaatggcgtcgtgatcggctcgatgtcaaccttggctcttgccttggtagccgtacttgggttcctatggatctgcttgctgtccaggaagaagagcattggtggaaactatgtaaagatggacaaacagactgttcctgatggtgcaaagcttgtgacataccagtggaaccttccatattcatcaagcgagattattagaaggttggagctgcttgatgaagaggacgtggtcggttgtgggggctttggcacggtgtacaggatggtgatggatgatggcacgtcgtttgccgtcaagaggattgacctcagccgcgaaagtcgcgacaggaccttcgagaaggagcttgagattctgggcagcatcaggcacataaaccttgtcaatctgcgaggctactgccggctccccacagcgaagctactcgtatatgatttcgttgagctgggcagcttggaatgctaccttcatggagatgaacaagaggagcagccattgaactggaacgcgcggatgaaaatcgcgcttggctcggctcgaggcctggcatatctgcaccacgattgctcgcccgggatcgtgcatagggacatcaaagccagtaacatcctgctggatagaagcttggagcctcgtgtctccgattttggcctcgcgaggctgcttgtagacagtgctgcccacgttaccaccgtcgtcgcgggcacctttggatacctagcaccagagtacttgcaaaacgggcatgctactgagaaatcagacgtgtatagctttggagtgcttatgctggagctagtgaccggaaagaggccgaccgattcttgcttcatcaagaagggactgaacattgttggctggctgaacaccctaactggggagcaccggctggaggatatcatcgatgagcgatgcggcgatgtggaggtggaagccgtggaagccatccttgacatcgcagccatgtgcaccgacgcagacccggggcagcggccatcgatgagcgctgtcctcaagatgctggaggaggagatcttgtccccctgcatgagcgagctgtgctacgagcagcacctggagctctgagctgaggaggaagatgttgctggctgcgtgcgtgaagcgtcatggatgagactgaagtttttgtactgtagatacaacgatgatggatgagtgtaggtgatgttttgtgtgctcttagggccaatgaagaacagtaagcagcagttcgtgagtgaagaaggatcgtccattgggcgtactgccctgatacgataccggttggctgcacatgagcggccggccttgtgcctcgcttgcgaattgcaaccaaaaggctgacgagaaaactccatgtgttaatgtttttnnnattcnaccaac

SEQ ID NO: 139969 - DNA, 1050 bp, Zea mays
  Clone ID: MRT4577_59136C.1
atggcagggaagagggaagcgacacaacgcgctgacgaatccggggcgaccaaaatttgcgctccgcgggcgggcgggcgctgggaccccgtggctttggctttcccaatcgcctgcctgtgttttgtcgctcggggcggcggggccccgccattgaaggccgcgacctggaccgataagctccgcctctggtttcatttggcggctgtgctaccccgcccaccgtatgtatggacagaagaactggatggaccgagctgccagctggcgaggccccgcatcgacaccccgcgtgttacaatattttgtgaccaatccaaggggctcgacgaacacatccccaagatgcaaacaatagaattgctggggctacgcaccatcgggacccacgctgcaggcatcagcgtcggggctgcttatcgtcgggccgcacccgcgcgacgcgctgtatggtggcctggcgggaccgcgcctgagacacccgcgataaggccatggtcgctgcgggctgcaccgccggggggcctcatcagagcccgcacagagcggcggggccgcgcccgcggccggagtgccacgccggcaccgctcttgctgccgatggtccccatgtcggggctacgccctcgtcagggccgcgcgccgccgatgtcgtgcgccggggccgcgctctacgctggcgtcgtgccgcgcaagcaatggccaggggcctccgcgcagccgggaccacgcccgcgcgcgctgctgccggatgaggccgctaggggcctgctcgcccgggccggcgggggcacgcctgcccgtgccgacgggccgcgcacccgcgtgcgccggggggttgcgcccgcgccgccagggcccccacccacgagcagccggggaggccgcgcccgtgctcgccggggggccgcgctcgcccgccaccgcggaggaccgcgcgcccgcgcgccgggcggccagggccgcgcccgtacagccgccgggggaggccggggacaggggctgccgagccgacggggcccgcaagccattgggtccgcacctgactga

SEQ ID NO: 139970 - DNA, 930 bp, Zea mays
  Clone ID: MRT4577_59137C.1
cctcacttgactcctcagctaccacccccgtctcccccctccatgtgggcggcctcgagctctgcttaaatcacagctgtgtccgggcggggggggatccgcccccctgtcggattctttcacctccgagctctgggacaggggagatctgtggtgtcgcagcctcgcctttcttgtacgcgcgcgtgtgggcactcagcagcaccttcagaaatggacttttttacagagtatggcgaggggagcaggtacaagatagaagaggtcatagggaaaggcagttacggtgtggtttgctctgccttggacactcatactggtgaaaaggtcgccataaagaagataaatgacatctttgagcatgtgtctgatgcgacaaggatacttagggaaatcaagttgcttagactcctgcggcatccggatatcgtggaaataaagcatattctacttcctccatcaaggagggaattcagggatatttacgtcgtgtttgaacttatggagtctgatttgcaccaagttataaaggctaatgatgacttaaccccagagcattatcagttcttcttgtatcagttgcttcgaggtttgaaatacatacacacagcaaatgtattccatcgagatctcaaaccaaaaaatattctggcaaatgctgattgtaagctcaaaatatgtgattttggcctagcaagagtagctttcagtgatactccaaccgcgatcttttggacagattatgttgcaactaggtggtaccgagcaccggagctgtgtggatcctttttctcaaagtatacaccagcgatagatatatggagtattggttgtatatttgcagaactattaactggaaaaccgcttttcccgggaaaaaatgtggtacatcaacttgatataattacagatctcatgggaacaccttct

SEQ ID NO: 139971 - DNA, 2710 bp, Zea mays
  Clone ID: MRT4577_59138C.1
cattgggtacctcgaggccggccgagatagaaaaaaagttgaaaatacaaatatggaaataaggggtgagcagtactacacatgggaaattgtaatactcattaaagattcacagttggtcattactaggggctcctaatctgtctgtttccgctgtgtccttttagtggcactaacatgcctgatatgactgatgcatctttcaatagcttattgcctcacttgactcctcagctaccacccccgtctcccccctccatgtgggcggcctcgagctcggcttaaatcacagctgtgttcgtttgttgggtgatccgcccccctgtcggattctttcacctccgagctctgggacagggagatccgcggtgtcgcagcctcgcctttgttgtacgcgcgcgtgtgggcactcagcagcaccttcagaaatggattttttcaacgagcaccaggcggcatgcccgaggatctttccaagggtatgctcaaagagcagacacggaagacacatccatatcctgcttctgttgcaagtaaatttccaccacatgttcctcaaggtgatgttgcaaggcctggtaaagcagttggttcggtgatgcagtacagcccatgtccagcgcctgctgccgagcgatatgagcaacgaagaatcgctaggcacccagcagttgccccaaacaatatcccttctggaagctcatatccccagaagaagccagacctgcaggagtgagacaggtgaaggccgaaagccatatggatgcgaaccatgctcggcagccaaagccatatgcagccaacaaactacctcctacctttcttaggcgtagtaataacctgcaacactagcgagtcgcttccgtcagcagttcaaatccgcatatttttacgccatatgaatattttaagctcacactatgcgattttgtcttagcaaaagtagatttcagtggttctgcaaacctccgttttttttcccgatattcgtaaatcgaggtggtaccgaacactagtagctgtgtggatccttcttctcccaatatacaccaggaatagttatatggcagtattaggttttatattcgcagaattattaactggaaaaccgcttttcccggggaaaaaatgtggtacatcaacttgatataattacagatctcattggaacaccttctcccgaagcaatatcgaggattcgtaatgaaaaggccaggcgctacttgagtagtatgaggcgtaaaaagcctataccgtttacgcagaagttcccaaatgcagatccacttgcattatgtttgttagagcgaatgctcgcttttgagccaaaagacaggccaagtgctgaagaggctcttgctcatccttattttaagaatatagccaatgtggatagagagccttctgcacaagctgtcacaaagcttgaatttgaattcgagaggcggagagttacaaaggaagacataagggagcttatatatagggaaattcttgagtatcatccaaagatgttgaaggaatttattgagggaactgagtcaagtggtttcatgtacccaagtgcagtagataattttaaaaagcagtttgcataccttgaggaacattatgccaagggatctacaggaactccacctgagaggcaacataactcattgccacggccttctgttgtctattcagacaaccaatcacaaagcacggccaatataacagaggatctttccaagtgtataatcagagaaaatgcacagaagacacagcaatataatgcttcagttgcaaataaatttccaccccatgttcctcaaggtgctgctgcaaggcctggtaaagcagttggttcggtgctgcagtacaacctctctcaagcatctgctgctgagcaatatgagcagcgaagaattgctaggcacccagcagttgccccaaacaacatcccttctggaagctcataccccagaagaagccagacctgcaagagtgagacaggtgatgccgaaagccatatggatgcgaaccaagctcggcagccaaagccatatgcagcgaacaaactacctgctaccgttgatagtcgtggtggtcactggtaggatttctgcggtgcaccagaaagccattccaaaccgtttcttaacacgttatcagtatcgattacttctgctgagtgctacattattctgacaaatccagaaatgtagttctgtacagatttgtgttctttttccggatacctgaataccgaaagactgtacaactgtagtttctgattcccactccttgtcgctattcaatcactaaaggatctgtccctggtggagaagaaccggcagattcaatgcaatgttcttgactgacgttgtcatggattttgttcttcaacctggtagctctgaagacgaattgaatagctgctagtttctgctaatcatctacagtcaggtgcagagtgttctgggagctagttctgaacatcactgtcacgctgtaatctgcacgttcctgagctcctaacttctaagcatgccactaccgtatccctttgtaatttaatcagctgtaccatccagtactctgtttacatttgtagaaacgctctgcaaagaagctattatgtgggagtttctttgctattattataaatgttctgttgttataaaaaaaaagtttttgtttattataaacgtcatgtcgttataagccc

SEQ ID NO: 139972 - DNA, 2478 bp, Zea mays
  Clone ID: MRT4577_59139C.1
cattgggtacctcgaggccggccggggatccgcccccctgtcggattctttcacctccgagctctgggacaggggagatctgtggtgtcgcagcctcgcctttcttgtacgcgcgcgtgtgggcactcagcagtgagctcccgtcttccccagcctcattttcccccctttcttgctggatctggctcgcaagatccgacctttcgtgcctaccttggctaaagtttctcgcttggttggctcgcgttgactgctgagaggatgcagcacgaccagaagaagaaggcaccttcagaaatggacttttttacagagtatggcgaggggagcaggtacaagatagaagaggtcatagggaaaggcagttacggtgtggtttgctctgccttggacactcatactggtgaaaaggtcgccataaagaagataaatgacatctttgagcatgtgtctgatgcgacaaggatacttagggaaatcaagttgcttagactcctgcggcatccggatatcgtggaaataaagcatattctacttcctccatcaaggagggaattcagggatatttacgtcgtgtttgaacttatggagtctgatttgcaccaagttataaaggctaatgatgacttaaccccagagcattatcagttcttcttgtatcagttgcttcgaggtttgaaatacatacacacagcaaatgtattccatcgagatctcaaaccaaaaaatattctggcaaatgctgattgtaagctcaaaatatgtgattttggcctagcaagagtagctttcagtgatactccaaccgcgatcttttggacagattatcagacccggcaagacgaccaaacttcctacgaaggcagaaccgcattctcgcgtcggcttgcttttaactgaatccagcccaccgcttctcgcacgtcgccatggacgcggtcgattctgtggtggatcccctccgcgacttcgccaaggacagcgtccgcctcgtcaagcgctgccacaagcctgaccgcaaggagttcaccaaggtggcagcgcggacggcgatagggttcgtcgtcatgggcttcgtcggcttcttcgtcaagctcatcttcattcccatcaacaacattatcgtcggttccggctaggctcagggcgcgactagcatgggagtagtgcgatacttttgagagcaagggatagcgaggatcttggtctttggaatagtattgttaatgacattttttttccggttgtgtttctggagtaaatcgttgaacgacaaggcttcaggatgtctggatgtggattctgggagacggagagtcactaaagatgacataagggaacttatatatagagaaattcttgagtatcatccaaagatgttgaaagaatttattgagggaactgagtcaagtggtttcatgtacccaagtgcagtagataattttaaaaagcagtttgcataccttgaggaacattatgccaagggatctacgggaactccacctgagaggcaacataactcattgccacggccttctgttgtctattcagacaaccaatcacaaagcacggccaatataacagaggatctttccaagtgtataatcagagaaaatgcacagaagacacagcaatataatgcttcagttgcaaataaatttccaccccatgttcctcaaggtgctgctgcaaggcctggtaaagcagttggttcggtgctgcagtacaacctctctcaagcatctgctgctgagcaatatgagcagcgaagggctgctaggcacccagcagttgccccaaacaacatcccttctggaagctcataccccagaagaaatcagacctgcaagagcgagacaggcgacactgagaggatggacgtgaaccaagctgggcagccgaagccctatgcagcaaacaaactacctgcaactgttgatggtcgcggcggccattggtagatctccgcgttgtgtaacacgttatcagcatctgttacttatgctaagcgctacattattctgacaaattcagaaatgtagttctgtacagatccgtattctttccccggattcctaagtactgtagaacggtgctcgaaatcgctgggtttccacctcctgtcgctattcattcactgaaagatctgctggctggtggagatttgtcagactgaagtatactggaagctcactggcaacagcgggaactcaagcaagcagagttcttgactgacgttgtcatttgttcttcagcctggtaggtctaacgagctgaatactggtagttcctgtgaatcatctacacgtcaggtgcagaattctgttgagctagctaggaggtgcaagcatgttgtacgcttctgaatatcaaagtcattgatgtaatctacaagtttgagttctatcttctgattatgtggctactgtattttgtaatttagttaactatactactaagcacttcgtttacgtttat

SEQ ID NO: 139973 - DNA, 1503 bp, Zea mays
  Clone ID: MRT4577_5913C.1
cctcgaggccggccgggccgggagggaagacggccttttctaaaccttcgctgctgcttcgcaacggtgccgcggcttcggacagggctctcgcgacgcgatcggccatggcggcgtctctgcgggcctcgtcctccctccgctcgcgcctcctctcgttctcctcggggtgttctctgtgtccgtggcgtctcctcctctcctcacctgtccactcggacgccccccaccagaccgaaaccctcgctttcgacgagatccagctgtcgccggagaagccggctaccgccactgccttcgtcctgcacggcctcctcggttccggccgcaactggcgctccttctctcgcgccctcgtctccgaactccgtaaccgctccccttcagacgagtggaggatggttctcgtggacttgaggaaccatggcagatcggctgggatcaaggggctcggcccaccccacaacatatctactgccgccaaggacctcgctgatttagtgaaggcccgtggttggccatggccggatgttgttgtgggtcactccatgggtggaaaagtcgctctagatttcgcggagagctgctctcgcggtgtgtatggagattctgctaatcttcccaaacagctctgggtccttgattctgtccctggacaagtagaaacagagaacagtgatggtgaagttgaacaggttttgcaaacgctagcgagtcttccttcttcacttccatcacgcaagtgggttgtcgaccacatgctcagccttggattttcgaagtctctttcagaatggatcggcagtaacttgaagaaggacaacgatcatgtgacctgggctttcaatcttcaggctgccatagacatgtttagttcttatagggaaagggactattggtcggtgctggaacacccacctaaggatttggagattgcaatagtgcaagcagagcacagtgatcgatgggtccctgatgacgttcaaaggctaaaagcattagccgggagagagtccaagcctgatgtaggaaaagtgtcacttcacgttctccctaactctggccactgggttcatgtggacaatccgaaagggctactcgagatcatggtacctaactttctatcagcagttcaaaattgagtggtaccttcaatcagaaccttcatttattgtgacatattgagtttgacaacccatgggataacgtttcctctctcatattgttgcccaacaagaattctttgcttcttttctgaggaaatagtgcacccttctgttaataatcgagagaaaagtatacataatcccatgttctctttctgcagattattggatgttgtaaaaaagagagaccactgcttaatattacatttttcctaccctgaataagaacagatactgcattgccaatcaaaaaaaaaaaaaaacaaccgtagaaagcttttacaaacttatgtacctgttttgttcaggggaagagatcctctatgactttgttcct

SEQ ID NO: 139974 - DNA, 667 bp, Zea mays
  Clone ID: MRT4577_59140C.1
ggcatgcaggtggtcgctgcttgcaggcaggctgccgggccgaaagaaatgaaataagaactactggaaccgcacgctgggcccgggggccggcggcagcagggtcgtcttcgcgccggacaccggctcgcacgccaccccggcggcggcggggagccgcgagatgaccggcggccagaagggcgccgctcctcgcgcggacctcggctcgcccggctccgcagcagtagtgtgggcgcccaaggccgcgcggtgcacgggcgggctcttcttccaccgggacacgccgcacgcgggcgggacagagacgccgacgccgacgccaatgatggccggtggtggaggaggagaagcacggtcgtcggacgactgcagctcggcggcgtcggtatctcccctcgtaggaagcagccagcacgacccgtgcttctccggcgacggcggcgacggcgactggatggacgacgtgagggccctggcgtcgtttctcgagtccgacgaggagtggctccgctgtcacacggccgagcagcttgtgtagacaacaagtacacgtacggagtacaattatatatagccatgcgtatgtgtatacttttttcccttctccaatctaaacagaaatacgtatgcgtatgaaatagtatcggtttcctgctgcatacat

SEQ ID NO: 139975 - DNA, 781 bp, Zea mays
  unsure (1)..(781): unsure at all n locations
  Clone ID: MRT4577_59141C.1
gacccacgcgtccgaaaatcccattaccattctcgaaaccaaaacagcactaggtccagtcaagcagcaagttttggattacttatctctttttcttcgataatgttgtattattttggagaactgatatctaccgtacacaataaatctttgaatcatcattattggttctgcataattttaactgctaatcctagacttattttatgcatcacttcatctgacaggtgatgttgcaaggcctggtaaagcagttggttcggtgatgcagtacagcccatgtccagcgcctgctgccgagcgatatgagcaacgaagaatcgctaggcacccagcagttgccccaaacaatatcccttctggaagctcataccccagaagaagccagacctgcaagagtgagacaggtgatgccgaaagccatatggatgcgaaccaagctcggcagccaaagccatatgcagcgaacaaactacctgctaccgttgatagtcgtggtggtcactggtaggatttctgcggtgcaccagaaagccattccaaaccgtttcttaacatgttatcagtatcgattacttctgctgagtgctacattattctgacaaatccagaaatgtagttctgtacagatttgtgttctttttccggatacctgaataccgaaagactgtacaactgtagtttctgattcctactccttgtcgctattcaatcgctaaaggatctgtccctggtggagaagaccggcagattcaatgcaatgntcttgactgacgtcatg

SEQ ID NO: 139976 - DNA, 289 bp, Zea mays
  Clone ID: MRT4577_59142C.1
tcgcccactcgtccgcccactcgtcctttgactcttgggcggacgcgtaggtctagagcgaagtctgcctcccttcttgggcatgtttaccgactacagggtgaacgtattcattacagcagcacctaacatgaccatgattgtaatcataatactagtaccagtcgcaatctcatttctacagtgcttaaacctatcaatcaacctaaccgactaagggctactatggatgaaggactggaatcgtgcatcaatctcgctcacaattcttacctggacgaccgcggaa

SEQ ID NO: 139977 - DNA, 446 bp, Zea mays
  unsure (1)..(446): unsure at all n locations
  Clone ID: MRT4577_59143C.1
actaagaatgggctttttgtgctgcctaacgaggagatctcagggatatgcacaaatcttacggaatgcgggcgggtcacggacttaacggttacatgcatttgtagaactgacggtgaccactgctggctcaaggaagcataacatgcgagcggtgccagctcagagggtggctgtgtcaaacgacgatgcgtgcacctgcaccagataaactaaagcgccgacaccggagagagagagctggatgcgctagctgagctgcgcacccatagggcgggcggcttgcgcttttattacccttgcggaggggactctttgcctgtgtgcgggagataaacagcatctcggccatgacgccggcaaagccgtcgtcgatgaggggcccgacccattacaccgaatggtggggccacttacatctgaggagggcgcgaccacacngacac

SEQ ID NO: 139978 - DNA, 445 bp, Zea mays
  Clone ID: MRT4577_59144C.1
ccgacgcgtgcgcggacgcgtgggcaccatggaccgcgcgatactgaccaatgtccacctggagaacggagaagagtggcacgtgaactccctgctataagcgaggaacaactaggccggggacccctgcccggtattgtactgcggaccggacggcttggacccgagccgggactgcagcgtgctgcgcggctccgaggtgtctagctaggttgcgctgagttagagaagggccctgactaaccgactgaaggccggacagaccagggcggcgtacagggccgtcgccatgatcttgatgaacaaggagagggaggggtacaccatctaaggcgaggcgcacgtgctcccagctttgcacgtgagctaccagtcctggtccaagatcctagcctacttgaactccactgccaacgggacggcaagcatcaacttaaggggacaa

SEQ ID NO: 139979 - DNA, 238 bp, Zea mays
  Clone ID: MRT4577_59145C.1
gaaactgcacggttgggtatgagtttcttttattacaaaaagggaaggagcagcattcataggtgtggagcaccgatcaacttgaaaccaaaaccagaggtgcgttgggcctcaaagattatcgtcgatcaggcctatgaatgctgctccttccctttttgtaataaaagaaactgcacggttgggtatgagttggatttcctcttgcctttctgttgctctggactcttatggctgc

SEQ ID NO: 139980 - DNA, 389 bp, Zea mays
  unsure (1)..(389): unsure at all n locations
  Clone ID: MRT4577_59146C.1
cgggtccgacccacgccgtcncggaccccttacgtccttcgcttcgtcgccgccgtccgtctgtcgtcgtttacgtccccgcacctcgctttcattgtcgtggtcgcccaagatgaccgaagtcgcactaagaagggcaggaattgtttnggcaatatatggaacccaggtatnnggtgctagcttgcgtaagccaaatcaagaaagatggaagggtatctcatgcattccaagtaccttttgcgaagttctgtgggaaagtttggctgtgaaagaggaaaagcaagttggaaatttgtggggtgcaaaggacctgtgggaaaggtgaaagggctggtggtgctttacanccatgatacactgctagttgcggtcatccgtcagggagc

SEQ ID NO: 139981 - DNA, 236 bp, Zea mays
  Clone ID: MRT4577_59147C.1
aaattcattacaaaacacaaccccaaaacatttaaaaaaaacactcattttttttattgtaaattgaagaaggggctactacttatattggtaccgcacaccaacaaagttgtttttaagaaagaaaaaacacaccaccaggtgcccttcaaataaaatactcatacattcacttctttgattaggatgttctaatgacaaatcttattttaaaaacacctttccaagaaatcttt

SEQ ID NO: 139982 - DNA, 214 bp, Zea mays
  Clone ID: MRT4577_59148C.1
cccacgcgtccgcccacgcgtccgcggctccgtgctcaacttcctccacgtgttccgacctctgctgaacatcactggggagttcacggctgaggacgtcgaggcggcgcttatcactcccaacgagattctagatgatgtgcatatgccactgctaaaggctgcctgtattgtgttaccaagtttggaatgggatgctgccttcagtttatag

SEQ ID NO: 139983 - DNA, 365 bp, Zea mays
  Clone ID: MRT4577_59149C.1
gacggccgcgtggaccctcgagcgcggcgcgcttgacaccacaaccattaaaccacaaaagcaagcggaggcggacaagcaccacatcagacagcatggactgactacacacagaaacaacggcccagaagggcgcaagaccacgccagtcgacccgacaccaagccatgagggcggcgccgcagcgacaccgctagtggcggaagcagggggagccgacgcgccggaggcgcgggggccacccagctccacggagcacaggcagaggcggcaatgcctgcccactgtgcgtacgaatccctgcagggctaaggcctgacgacaattcgtaagcatgggaatagctgagccctgagaagaaaggg

SEQ ID NO: 139984 - DNA, 324 bp, Zea mays
  Clone ID: MRT4577_5914C.1
cggacgcgtgttctttctgtaaactccataaattatcattcttggacatgtctggttgtctcaacctagttagcttgccagaatcattttgtgacctccgttccttggaaaaccttaacttgtcatccttccatgaacttagagagttgccgttaggcaatcatcaagaactcctcatactggacatgtccaattgtcataaaatccaaattttacccatgtcattttgcaatctcctacatttagaaggatctcaatttgtcatgctgttatgaacttcaagaactgccagaagattttggaaaaaaatcgtgggctttcgta

SEQ ID NO: 139985 - DNA, 471 bp, Zea mays
  Clone ID: MRT4577_59150C.1
caacaagagagagtagaaaagccattatagagagttgcgcgtcgctgcgcacttgccgcaccttcctaggtcaccactatgactgatgtaataccgtgcgaatcttgcactgcattcaatgcttcattatgtagtatatctctgcgcagacactcgtgcatcactatcgcaatacctgtacttgttcgatgctgaattctacaggattgacgcctactcgactagcgagcgacttgacatatcattaattgcagattccatcctgtccgctttccggcatatcaatctgtaaggccatactacattaaagtgtcaaacatcgcctgattagaataggaattgcgactactgcggtcttcacttctgtctgtcgctaattcagttgctgctgccagtaagatgcgaggacaatatatcggatcctcagatcattgaactaggggatctactgaatctggagatccacttttc

SEQ ID NO: 139986 - DNA, 258 bp, Zea mays
  Clone ID: MRT4577_59151C.1
tctttgacgctgggaggcgctgcctttctgtatggcttgctaaaaggcggggactggttgggcttctaccgctgccgggccttggcgaccttttgtccgcgaataggtacgacatgtaaaagactaaccgcccgccagtacccttgctgatggccactatccacaaacctgaggacgcccttcagctaggcgaaccattaaacgatgatcggaaaatgacgatcctgacgtatactgatgtattcctcaaaagggcag

SEQ ID NO: 139987 - DNA, 195 bp, Zea mays
  Clone ID: MRT4577_59152C.1
ttgcagccctagtgaaacctcgctcgcggaggtttgtaaaatggtgggttttctcgctcctgccgtgaaccacgctgcagcccagcctgtccttaggagcgacccggacggacggagcacggcgagttactcactgccccacctgccggctactgcctcacagagcaccaagcggaggagggacctgaccgctac

SEQ ID NO: 139988 - DNA, 351 bp, Zea mays
  Clone ID: MRT4577_59153C.1
gcatgttgtctctcgctctcgctctcatcaaaatgaagggtacgacataccgcggggggggaaaatcctgccggttctagcggcggtgcacctggactcgtcgctgtacgaggatcccagccggttcaacccttggagatggaagagcaacaacgcgccaagcagcttcatgccgtacggcggcgggccgcggctgtgcgccgggtcggagctggccaagctggagatggccatcttcctgcaccacctggtgctcaacttccggtgggagctggcggagccggaccaggccttcgtctaccctttcgtcgacttccccaagggcctcccgatcagggtccagcgggtcgc

SEQ ID NO: 139989 - DNA, 267 bp, Zea mays
  Clone ID: MRT4577_59154C.1
gtattctggtgtcctagcgtagaggaacccaccattctcccgaatttggtggttgactctactgcggtgacgatactgtaggggaggtcctgcggcaaaatagctcgatgccagaataaaaaaccctagctagagttggcgagtgggggtggaggcgcggctgctcgtcacgacatcgagtttcagcgccgcccgcgagatccccggatgtgatgctggtcccctgttagggagagctgcggcaatggctggctaaggcgggtcgac

SEQ ID NO: 139990 - DNA, 297 bp, Zea mays
  Clone ID: MRT4577_59155C.1
tttggggaaactgaaaaaaacacaatgtttaaaccattcggagcatcacagggagtggaagcaatctgagatacatgatttaaggaatggttaaatagtacatgcacaattaaatgctacctgctgaaacgaaccttggctgggattacttcaccaccaagttaaaacaactttccctcgaaacaggagactgaaccgggggttctaacaaggagctttactgcgtgagagtaaccactcaaccaactcgtatccaaaagagaatatcttttcttagaaagtgggtgggggacatca

SEQ ID NO: 139991 - DNA, 427 bp, Zea mays
  unsure (1)..(427): unsure at all n locations
  Clone ID: MRT4577_59156C.1
aaaaaaaaattttttttttttttttaantatcatattacacatttttaaccccatttttacacacattaaaattcaattactttacagtatcatacatttactccatatttcaaatccacctttttnacaagcttgggcgggcagacttaattcatacaaccccacaaatttcttttaaaaatccccactacacatttgggctttgacatttaaccactttctttttacagaaccaaactatcattttttcactacaccccccaaaagcttaatcacaattaattgccatttttaatttttgggcccactggaaccattttctaaaactcttttataaaccaaaaaacattttagcccttctttttaaaacccgccttattttccccaaaacaaatttattcccaccaactttcaaaacaatcccac

SEQ ID NO: 139992 - DNA, 1143 bp, Zea mays
  Clone ID: MRT4577_59157C.1
ggaccctcgaggccggccgggatgttccggcagtctcgccattcgccggttttgcgcatcccctccctccctccatctctctctgcgttcgtggtgctcggccatggcggactaccacttcgtgtacaaggacgttgagggggcgagcacacagtgggacgacatccagcgccgcctcgggaacctgcccccgaagccggagcccttcaagccgccgcccttcgcccccaaggtcgacgccggcgagcagcccaagtccaaggaatggctcgacgagcgcgaggccgaagagctcgaggaactcgaggacgaccttgatgacgaccgcttcctcgagcagtacaggaagatgaggcttgccgagctgagggaggccgcaaaagccgcgcgatttggtagtatagttcccatcactggctcggacttcgtgcgggaggtgtctcaggcaccatcagatgtttgggttgtggtcttcctctacaaggatgggatacctgaatgtggattgcttcagaattgtttggaggaattggctacaagatacccagcgacaaagtttgttaaaattatctccacggactgcatccccaactacccagataggaatgttcctacaatactggtgtataacaacagtgctgtcaaagggacttatgttggtttgcagaagtttggtggaaagagatgcacacctgaatctgttgcattagccctttgccagtcagacccggtactgaatgatgggcatggtggcagcgattcatctcgggacaatgtcatagaaggtgttcgcaggaagttcatcgagaaggttgtagcccagcatgaagagcgggaagaagaggatagtgactaagcgtatattgtttgtgtttgttttcctcagctggcagatccaatttggttccaacgttcactgatcttatgtgattttgtgggtgaaatttgccagggttttctgattacctggttgtgcgggtgaagcttttaacagtttatggatcatattgcgttacagttagagatgtctgtggggtcagcaaaatcttggtgttagtaacctttttgagctgtaacataacttctttatcttatttaagagatcaaagatgattagtgcacttatatagttgcatgagaaat

SEQ ID NO: 139993 - DNA, 543 bp, Zea mays
  unsure (1)..(543): unsure at all n locations
  Clone ID: MRT4577_59158C.1
cccgggntcgacccagcgtccgctcccgcgtccgcgcacgcgtgcgcatcagaaataatataatgagaagagagcatctgagcagcagacaagcatgcgtacattatgcgaacagacgaaatggaaattcataaacgaacactaacttcgagcattaggacgaaatgctagaagctcaaaacttggaaaaacgttgggagatcctacttgagctaattgaggtacaaccgaattagaaccaattggagagaaatatagaaggatggcacagactgtctgtcaaaagggacgcgcaccttggatggctaatgagagcggccttgtagaggcgcattaagtgcgggggaggtagaggttactcagagctatatcgatacccttgagatagtgttactgcctggtatggtatgtattttggatttntttgtcaagatgtaaatcgggtggtctctttaaggtgtagatttagggctttatggagggtttagatttaaaaatttagttaaggtgatggtataaaaaattggttatggagatggttag

SEQ ID NO: 139994 - DNA, 307 bp, Zea mays
  Clone ID: MRT4577_59159C.1
gcttcatccgccgaaccgaggagctgtcccaagttttaagtttcagggacatttttcttcctagtgcagaaaacgcagggcagcggcctggtgtctgccccaaaaggcagcccgggtgcggtttcctggtgcagttgtggggacactgaatccgaccgcctctcctgctccaggccacgctgctcctgtcgtttctgtgcatgcctgcgctactgccggtggcttcccgccttctattgctacgccggctctgctgtccatggcttctggagacctgcgtcccagcgtcgccggctcgggctccggt

SEQ ID NO: 139995 - DNA, 511 bp, Zea mays
  Clone ID: MRT4577_5915C.1
ggaagaccaaaactgtagagatggacagatcggcggggtacaaagcaggaagcacccgctaatccatgaaggggtggggggcgatagctaccttaattagttgacggggattttgcccaccattccggctccttgatgcggctcgcaaaaaaagccgtaggtccccggcccggggagggggacggagtaggtctcccctggcccgttggggtactcctcctgcgagatcttgggggggtaaaccccgttcggccccttttttttctcaaaaacaactttgggcgggaagccggccttgttcttaaatgggagggggtccccggccttgacgggaaactggctgggcttaaaaaaagcccgccgttgcctgcccccagaaacacctcctgggccatggcacccccggaaagcagggccctggcaaccattgccacggggggggggccggtggccttgcgggagggggcccccacggggaaggacctctttttgacccgggccgggctggccc

SEQ ID NO: 139996 - DNA, 1188 bp, Zea mays
  Clone ID: MRT4577_59160C.1
agtcgagccgggccgggccggggtccaaaaaaaaaatctccaactcgtcacttcgcttccccacttctccattccattgcggttctgcgagcccctacctccctgtggtgcttggccatggcggactaccacttcgtgtataaggacgtggagggggcgagcacagagtgggacgacatccagcgccgcctcgggaacttgcccccgaagccggagcccttcaagccgccgcccttcgccccgaaggttgacgccgacgagcagcccaagtccaaggaatggcttgacgtgcgcgagcccgaagagctcgaggaactagaggacgatctggatgacgaccgcttcctcgagaagtacaggaagatgaggctcgcagagctgagggaagccgcaaaagccgcgcgatttggtactatacttcccatcactggctccgacttcgtgcgggaggtatcgcaggcacaatcagatgtttgggttgtggtcttcctctacaaggatgggatacctgaatgtggattgcttcagaattgtttggaagaattggctactaggtatccagcgacgaagtttgttaaaattatctccacagactgcatccccaactacccagataggaatgttcctacaatactggtgtataacaacagtgctgtcaaagggacttatgttggtttgcagaagtttggtggaaagagatgcacacctgaatctgttgcgttagccctttgccagtcagacccggtactgaatgatgggcatggtggcagcgattcatctcggggcaatgtcttcgaaggtgttcgcaggaagttcatagagaaggttgtggcccagcatgaagagcgggaagaagaggacagtgactaagctaatacttgtgtttgttttccgcagctggcggatccaatttggttccaatgtttactgatcttatgtgatttttgtgggtgaaatttgccagagttttctgatacctggctgtgcggctgaagtttttgaaagttcacgggtcttattgcctacctttcagctgtaacacagctccattattatattgttaagagatcagagatgattagtgcacttgtataattgcatgagaaaaaatccagccaaactttgaatccacagtatttcactatcttgaacatttctcaacacaaaaaaaaaaaaaaaaaagcggcc

SEQ ID NO: 139997 - DNA, 183 bp, Zea mays
  Clone ID: MRT4577_59161C.1
gacaaggatatagagaatatattagtactagatatatgtagctgatcaaagacaaacaatgcctctctctagaaagagacaaggatatagagaatatattagtactagatatatgtagctgatcaaagacaaactgtataacgcatgtcaattattttcattcatacatgatacatgaggttg

SEQ ID NO: 139998 - DNA, 297 bp, Zea mays
  Clone ID: MRT4577_59162C.1
cattgactaccgcgactatcttcgatggttgtctcgtggcaattccagatctcacaactcttcatggattgctttctgccgtctgtctcgtaccagaatcactggatacaagcgtaaggttctcggtgtcccatccgagaagctttcgggtgacgtcccacgtgcccgtatcaccaacatcttcttttcagagattcttggtcccctggtcttggttgcagtcacactcgttccttatctcttcatcaacgctcgtactggtgtaaccaggatggtcaaaaggcgacctacgccctt

SEQ ID NO: 139999 - DNA, 351 bp, Zea mays
  Clone ID: MRT4577_59163C.1
agtcgtgtgtcgtccagaacacacacaatcaacgagagggagcctgttacgcagaagggtgcgaaacatttaacgctacatgtcaggtccccctcaacagtatctataccctacaaggacgagggactactttgctcccacttaacaggaatcagacgtccaggtatagttcaccttaatgagccaatagtcctgaacgacaactgtcaccacggcggccgactgagctcttaacggacgggcgtattcgcacgtcctacccggtgtttggccgagtcctagacaaggccgcggcgccggcgccttaggcgccccttgggcggctgttccagctggagcggtcgcggacct

SEQ ID NO: 140000 - DNA, 383 bp, Zea mays
  Clone ID: MRT4577_59164C.1
aaagctgggcatgtactcctacaagaggcagtcggctccgtggtcagaagatgagctgggctctctttggatcggggttaggaggtaccgcatgaataactggaatgcaatgctgatggacagtcggctgcggttctcaatctcaaggatgcccgaggaccttgctaagcaatgggacaaggagcagaacaaacttgagggtcctgcgcaagctgactgctatcttggacgagctttttgctgtcgatgctcaaagtctggatgtggcgggggccaagcccaaacgggcctttcattgggcgaatattaccttggtagagcttcatgctcttgatgctacaagatcttagttcttggggcccagacagaccttttattgggcg

SEQ ID NO: 140001 - DNA, 508 bp, Zea mays
  Clone ID: MRT4577_59165C.1
gacaacataggaagcgacacatattctaccaacagtggcaaccaaaatattacggttaacttatgctagcttggtgctattcctagacaagtagctgctaccgggaccaatgtacagcagtgctgacaagctcctatagcttacactacttccaacaaacctgtcaccataggggtccctagtaagggaaaacccaattcatcaagccctatcatgatcacaacatgacaatcgacatggggcattttaccttcataacccttggtcctgagccaacgaataatcaatatgacagggcatctcactcatgatagcatcttgttgggctcatactcatggacagcacctgcttctgcaggcagcttgagcgctacaaaccttgctcggctactttcacttgcatcaaaatgacatgacgccacctcaccgaccaatagatcttggaggcctattagccacagcagtggcaatggagacatctagctgagacttcccacctccccaatat

SEQ ID NO: 140002 - DNA, 419 bp, Zea mays
  Clone ID: MRT4577_59166C.1
aaaaatcccgtccctatccgccacggcacactcatcgccatgcccgccgccatgccctctccgccgggccgcctcctcgcttctatccctctccgctgccacgctccgacccagcagccctccaccaccgccgcccgcggcctcctcctccgcggcgcgtgctccccggttgtcaagcgtgtcccggacggtggcgggtggctcctctggcaccagtccggcccccgcgtggcgctctccacctctatggacggtctccgctggagcgccccagtatcccccgacccactgctaccctcagaggattgggggacgttcgataccgcctgtgttcgcccctccgacgtccttttggcctccggcctcgcggggttctcccgctgcttgccgttctctgccggatggtgcgtgttctgcgc

SEQ ID NO: 140003 - DNA, 847 bp, Zea mays
  Clone ID: MRT4577_59167C.1
cacaatcctatggctaacccgaggccaatcagaatgcctggaaatctctttcagtggtggaactaacaaatagttgctcccgagaatccatgattttaaccattatgaactccataagagatttaccagacttggagttagagaatataaggagtcaactgctgcgtgatttctcccctgatgacgtgtgcccaagtagcgctcactttcttgaatcacctggcaagattgcaccgtcatgttctgatgatgacaccgactacgactatcaagaggctgaacttatcgatctgagaaatgacaacaatacttatttggaagcctctgcaactacactggcggctatagctattcctgtgcccacaacaaatcttctcagtatcgatgaacttctagaaacagtcgtgaatgatgtgtcatctcagaccggagggcaatgtttggtgtcaatggccggagacatcccattccaggagatgactagcccctgtgaggccttttcgatgggaaagccccccaagatgtccctgctcatgagcttcaagcaaaacaagcaagcggccatggtcgtcgtgcctgacaatcagagcccaaacccgttcctcctgcagagcatcagtgccggcgaggcacaggttgctggcgacgtccagcagccgttcctgaggctgcccccgtcgagcccctacgacaacttcctcaaggctgctggctgctgatttccccttgcagaaaccctcccgtgtaaccaaccgaatgtatcgtgtgtgtacagtggccgtctgcctcaatcttattacaaactaaacaagggtttggatattacatgctgacttgttttcggatc

SEQ ID NO: 140004 - DNA, 580 bp, Zea mays
  unsure (1)..(580): unsure at all n locations
  Clone ID: MRT4577_59168C.1
gatagaaccaaacatatgggntcttcagctccatacaaaatacattccaaagcagcaatgaggagccgcaccatcgttctataaaatactgttaagctactcaactccctttacatgctacgggttcacaatttaaactacagcttcaagttctgtcagctatcttctcagagcaaacgaaagtttgataggcgctgtcaatagaaatcaggcttgttagtaccctgattttcagtcaggctggagtgcagttagtttcaccgaacaatacttccatcaaacaataaacggtttattcttctctttttacaaggagcagaaaaccgaaattggagactactttgcaagtttgcatggacaggacccagtgactcctatcagtactttcacctgcatgttgctgagcgattcgatcttttaccttccatcgcatccttctttttcctacagtctgagcaaagataaggaccaccccatggtgttgatggggctgagcagcagccacctacattgtccgtcattaaaccttcgaatggttcttggtccacttggcagattgcacagcgaaatgggggcagat

SEQ ID NO: 140005 - DNA, 311 bp, Zea mays
  Clone ID: MRT4577_59169C.1
caagaacaggctcaaggttatgggttctgtgatttccgactgggagggcaatgatcgcagcactactcctgctcacgccaactactctgactcaattgaggctggggtaggagctggaaatgacatgatcatggtgccatgcagatacacacaacttatgctggatcttgcgacacaagttcacaacaaggtcatgcccatgagcagcatttgcgacgccctatagaggatcattccggccacgatcaccatgggtctgtacgagagcacatactctgactgtagcatagccgacttgattgggacgcaag

SEQ ID NO: 140006 - DNA, 502 bp, Zea mays
  Clone ID: MRT4577_5916C.1
tgggcatgactccgcgtatggctttgtgaccagaataagatcgaggttattggctcttatttaaccaaatccatcgtccaactaacatgtaaactctctcctccctctatataaaaggggaacaaactgaatactatgggcatacattcagaggcacatgagtctcccaacacagatacacaatcctaacaaactaaagaggtcgctacgccacctctttggaggattcatccagaaacatagggattcattctcacatagggtccaataacctataactcttgctagagcaaagtgcaaagggaaactaggtggtcatggtgctatgttggttcttgaagttataattttcttcgcctttgtgttcattagtcgataagtaggaaaataatataagatattatgcctatcatagccttaacctatctaaactgaccacatgtaggtttttgatcatgccagatttaatacgtcacttgcctgcgttctctctaatattctt

SEQ ID NO: 140007 - DNA, 1556 bp, Zea mays
  unsure (1)..(1556): unsure at all n locations
  Clone ID: MRT4577_59170C.1
tcgaggccggccgggataagaaggaaatacttcaatcaagcctccttgaaattttgttttttgttgggggtggaggaggtaaacatcgcacactcaatgacaggtgcagtaaatgccagctgcgactgattagatatcacatgaaagtaggccttttgtgctttgactctagtctatcctaattagcttgagattaaaaaggctttcttgttgttgcaaagcatacaattcacatgtttacattgtacattaatagcgcattatcattgttcatgtcatttgtgttgcttccatatgttttttttataatcaatgaaggtcctaagctttatgtgccacaactaatcgtagatggatccattccttcaggtctggtacatgagaacaaacttcagaggctgtgaaggactatacggaagatccatcaacatcctatggctcacccgaggacaatcagaatgccttgaaatctctttcagtggtggaactaacaaatagttgctcccgagaatccatgattttaaccattatgaactccataagagatttaccagacttggagttagagaatataaggagtcaactgctgcgtgatttctcccctgatgacgtgtgcccaagtagcgctcactttcttgaatcacctggcaagattgcaccgccatgttctgatgatgacaccgactacgactatcaagaggtacacggaaattttgagcaggctgaacttatcgatctgagaaatgacaacaatacttatttggaagcctctgcaactacactggcggctatagctattcctgtgcccacaacaaatcttctcagtatcgatgaacttctagaaacagtcgtgaatgatgtgtcatctcagaccggagggcaatgtttggtgtcaatggccggagacatcccattccaggagatgactagccactgtgaggccttttcgatgggaaagcaccacaagatgtccctgctcatgagcttcaagcaaaacaagcaagcggccatggtcgtcgtgcctgacaatcaggttagccacgctgaagcagcacatacctccgacaagcagagcacaaacccgttcctcctgcagagcatcagtgccggcgaggcacaggttgctggcgacgtccagcagccgttcctgaggctgccaccgtcgagcccctacgacaacttcctcaaggctgctggctgctgatttccacttgcagaaaccctgccgtgtaaccaaccgaatgtatcgtgtgtgtacagtggccgtctgcctcaatcttattacaaactaaacaagggtttggatattacatgctgacttgttttcggatcatgccagggtcaatccaaaattcatttaattgtaggattccaaagcaaagggaatgatagatatataaggagaaaatgttgaaatctaaaatagatcgtctccaacggcttatctatatggccgtactaacactgttttacattgtatactgtatcgttggtagagtgaaggttcnatataaaaataaagaaaaaaaaaaaagagtaaaaaaaaaaanaagggc

SEQ ID NO: 140008 - DNA, 226 bp, Zea mays
  unsure (1)..(226): unsure at all n locations
  Clone ID: MRT4577_59171C.1
agcctaataattcaacatagcctttttttataatatgatacataactgttcttcataganttttaacaacagatagatggataatatttttgtttccatccattacaaatttcactcctacacatacatcattactgtaaatctatttcttatctcatccctcattaaatatccaccatctataatctttctaagaaatacaatgacaataatccatccattacat

SEQ ID NO: 140009 - DNA, 177 bp, Zea mays
  unsure (1)..(177): unsure at all n locations
  Clone ID: MRT4577_59172C.1
tantggaactgttcctgtttggcgtgtttgaactgttatcatcaagccgtggatggttgatacctttggtcctaattgccttactacttaagtgaaattcttttaaaatcaccatttttcctttcaagtagccctttttttttaccattttttcttcaatatttaaaaatttttctt

SEQ ID NO: 140010 - DNA, 201 bp, Zea mays
  Clone ID: MRT4577_59173C.1
gggaggagaatattaagaaaagaattaataaatttattagttgtaaaaaaaggtacatgtaaaatgccaatggtaatgggaggtattggtttaaaggcgattaacattttgaattagaagttaaaattaaaattagtagtgacagacattttagaaagaaagagatttgttctgtttgaaaggattgataagaataaatta

SEQ ID NO: 140011 - DNA, 290 bp, Zea mays
  Clone ID: MRT4577_59174C.1
atagtgagtcgtattatactgccgttgggaaggccgccgccgcctccaccgccgccacagcttcttccacgactggtgacggttcatcgtccgggggtgcctggcgtaccgccggactccgcttcaacgagtcggcgccccgtgagcgtgaatcatccctgacaaaataacttggagctgtactgtgttgtcttttacagttacacgcacgtacgtacgaactgccgtcagctgtaattttcttgttcgtcaatctgagctgtaattttcgactctaccagctacgtgca

SEQ ID NO: 140012 - DNA, 525 bp, Zea mays
  unsure (1)..(525): unsure at all n locations
  Clone ID: MRT4577_59175C.1
gggttgtggtgtttttttttttttttttttttttttttttttttttttttttttttttttttttttttttttttttttttttttttttttttttttccccccaaaggaatcccttttttcatcacctgttgggtcatttttttcaaacccgcagacggggggntaacccccccaattaaccaaaccccccttaacaaaagatccatcttttaatcccctttttccccccctttaaaaaaccaaacccccccccacgggttttccccccccccccccccttgaaatcctgtttaattaatccaaaaacaccttcccctccatggaccgggccgaccaatggccgtcttaaaaagacccccccaacctttcaaaaattgttttttggaacccctcccccctgtgggtgccccccttttttaaccccccccttcccgtggggggggccccccccccgaacccccggaaggccacccttgcaaggccccccttctttttctcccccaccttgaacccctcctttttttt

SEQ ID NO: 140013 - DNA, 371 bp, Zea mays
  Clone ID: MRT4577_59176C.1
cgtctcgctcgcctcggacctcgccgtgcggcacactcgcagcgcgttccacttgttgggtgctggtggatttgcgtccgggccccgaaccgatcgagtcttttgcgatggcagcagcggctagtctccaaggggccgggcgatcagctgggagacttcgtcaggccgcgtcactggccggcaaggccagcactacccgaggagggccgtgcacgcctcgtcgtacgacacgaacccggaggagcaggtgcgcccggcgttcgtgccggacgatgtgatcagcagtgcagggagccccgacaagtactggagcccacagcccaagaccggcgtgttctggccggcggttgtggacaccaaccagctgggcg

SEQ ID NO: 140014 - DNA, 206 bp, Zea mays
  unsure (1)..(206): unsure at all n locations
  Clone ID: MRT4577_59177C.1
cgagcaggaggcggacaaggtaagcagcaatcgcaggaaccctagcgccgccgcnaccgcaggaatgggtatcgacctcgtcggcggtgggaggaataagagacangcgcactgcgcccagtctgacgatgtctacctcaggctcctcgtccagctctaccgtttcttggtcaggagaccaagagcaattcaacgctgtcttctca

SEQ ID NO: 140015 - DNA, 338 bp, Zea mays
  unsure (1)..(338): unsure at all n locations
  Clone ID: MRT4577_59178C.1
ggccgccagtgtgctgagacttgccctttccancnncncgaaagaaggggggggaattcaaaanacatncccacaacaattncaatttccaccancaacataaaaaaaattncaatccattcttactaaatcccaaaccanatatantatntntcacacctcaanttctacaaacattcaacaaaattaacatagggggggggggagacaacaattttcttcancncanncctcctnncctccctctcaaactctaccannntcannatntcaccctcactaacaaancccttnacnttcctcatnatnanaccnttctnntcatccaaaaacttccc

SEQ ID NO: 140016 - DNA, 108 bp, Zea mays
  Clone ID: MRT4577_59179C.1
ggccgtcacaccaaatgctacaatacagccgactgatagtcgccgggcacgtgggtacttcctggactggcgtgtgccgcagagaaacgcttctggaaacttgcgccg

SEQ ID NO: 140017 - DNA, 848 bp, Zea mays
  Clone ID: MRT4577_5917C.1
ctgacttctcccagatccagatcgtttccccagatctagatcgcaggcgtgaagggcaactgttaccagattgcaatctattcccgagcttcgaggaatcgacgattaagatttggtgaaccaccggtcctgagatcaagctcttcgagtcctacgagatcgaagaccctgagcatctgtttggtgaagttaccaatgtaccaatggaatatccagtacttcagtcttcagcaacctatcaggcccgctcccggccaacctcacgtggacctaatggcatgtggtgttcagtggtcatgtggttaatggaatatcaacacgaggtggttatgatccaatgtggatgaacttcggaaatgaagatactgagaatatcaaacctgctttctaacttttgagtcagaggaaatgagaggttgccaccaattgcaagtccaaaccatatgcatccattgccctgggtgcctaatttatgtggaaatggtttcagtccatggaatgagatgcattctgaggtatctgtactagctactaaacatgttttgccatttctggtcattcattatttgtggctcaagttccagtgatatcaaattagtccggatttgtgatctttgaattcaacatcagctagatcatggagacgacgatcctgaccaatggcaagatcttctatctttattttaaatgatgtgcatgtcctgaggaatctgcactagctaataaaattgtttttccttttccattcgttcattatctatgtctcaagttctggtgatgtcaaattggtttggagttgtgatctttgatttgaatctcaatctttgatttcaatctcagctggatcc

SEQ ID NO: 140018 - DNA, 312 bp, Zea mays
  Clone ID: MRT4577_59180C.1
aacatatttttttttttctttccatgtagttatttttacagggggaggttttaatgtaaaaaatgggggttttttacccaaaaaccaataaaaaaaaaggccagaccaccacaaaaccccccggataaagggggcaacccccaaccccccaaaaaaaacggcacagggggggcgggaacaacccgcctaaagaaccagaacccaggggccgcctcagggcccaacaaaaaccacaaggtgaaggggccctggaatctttggggcaaaaacaaggcatggaaccccccaaaaaccctccagagtgggcccccc

SEQ ID NO: 140019 - DNA, 372 bp, Zea mays
  Clone ID: MRT4577_59181C.1
gccacgcgtaggggcgccatggacgtctgcttgccctaccccgacctggactaggtgatcaagcacgccagggacatcgagacggccgcctccttctaccacgccgacttgggctacaccgagcggcgcctctaccagcgccacatgtacgcggagctggagcgcgtcgcgagcaccatgccatagacgccgcattaccatcggtagacggacgagctgacggatccggctcagctatctgactcatactacagccttaggagctccgtggatgtctgcttaggcaacgcatgcttgactcgtgaggcaagaccgccgaagacgtaaatgcaaccgcggagcactcgctacgagaagcgccatgtataacaa

SEQ ID NO: 140020 - DNA, 456 bp, Zea mays
  Clone ID: MRT4577_59182C.1
ggctgcatgatcaggtgaaccagaagaaatgcagattacataagctagataaatcaattcaagatacaaagaatattgaggagaggagcttggagcaacatgctatgaacaaattggttgaaagagcatacagaaaactcaaggtagttgaaatttctcttcacatgattgttcttcttaaatcaatgttagtgctgcatgagattacaaatgtcctggctctgctattttagtcgtggtctggggagatataagatgtccgtccattgctttgacaaagaccgttatcttttcttttgatttttttcttaagttggtgaatgtaattttggtctccccatgttggatggtacttgctcctttaaccttaatatatattttcgcctggaaaaaggggtaatatgtattagttgcattgaccttgatcctgattgcatctcttctttatgatatgta

SEQ ID NO: 140021 - DNA, 816 bp, Zea mays
  Clone ID: MRT4577_59183C.1
cggacgcgtgggctcagccgccgtcgtctccgtcggtccgccgcacctccccccatcaccgcctcactaaaaccctaatccctagccgccatggcggctgttgcggcgacggtgacgaggacgacgatggggaaggcggtgacgaggaggatgatgatgaggaggtggatggggaggagaaggaggcggcaggggttgtggagatctccgacgaagacgacgacgacggtgacggggaggcggacgacgacgacgacgatgacggggatgacgacgacgacgacgacgaggactcagacgacgaggaagaggtcgacggtgaagacgatcaggaggcgggactgggaaccgagtatctggttcagcctcttgggcgggctgaagacgaagagcactcgagcgactttgaaccggaagaaaacggtgaggatgccgacgatgaggagatcgatgaagaggacgatgacggtgaggactctgtgaaggcgcagacttctacgaagaggaagaggtcaggcgacgacgaagaagacgacgacgacggggatgatgatggtgacgatgatgacgatgggaggccaccatcaaagcgatagtatggttagctctagttttgtagctgtgtccttgggtgtttggtaggtaggtagtgctgctgatgttggtttagaagaactcatcatcacctggaatgtgtgtgatttgaaaattagcctgcggcttgggtctgtctatgcctggccgatggatgaatgatgaaggtcttgtaattgttgctgcttctttcatgttgatgaactcgcactgattccctgt

SEQ ID NO: 140022 - DNA, 1142 bp, Zea mays
  unsure (1)..(1142): unsure at all n locations
  Clone ID: MRT4577_59184C.1
gttctgcctcccctctcattgctgcctcgcgcccggccgggaaggctctccctgttcggccatacgcacaaccgctctctctccctctcgaagcgacgcagaaccgctcgccatcgtcgcggtcgcctcctgtccctctcctctctctttgccgctgccctcctctaagcatctccctctcctactccctcctctcaaagcacttgttggccccccaccgccgcatctgcatcccataatcgcctacgccatcgccgccgccttcgggtccttctcgctcagcctcgactgctcgctcatcttcaccgaggcgctcctcacccccgccatcccctccgtgtcggcgtgcgccggcggcatcttgcccagtctcagccgatttatccttcggtctgttagggccttatcaaaccgccgccacggcgaactcgcgccgctgccatgttcgcctcgcgcacccaccatctcctcaacaacgttcaaaccgccaaccacgacatcctcctccacaacccgacctctcacgcatcccaacttggtgcggcgtaaacgcgcagcagcacttcgcctcggtcgaccacggcctgcccccaggcgttgacatccagatccatctcgctccgatctacattcgagaagtttgtctctggcatcgattccccaatctgaatcattgccgacgtcttctttgggtggacggtcgaagtcacgcgcacgcacatcccacacttgttcctccccggcggtgcattcagcaacaccgtcttcttctccgtgtcggagcacctcgggccataggggcagacccgtgaacgacattcttttggcgtgtcacgacctcctgtcgcaagctcgatgctctccccatcgacacgtgagccccttggagggagccccgacctagattttactgagagtttctcctcatcaacctagatctcagtttctctggactttactgagcactcaacattgtgtttttttggttgctggtaaattgctcatttactgctatagttgattagtaaatataccggtattagtatttatatagttactggttacttgtaatataaacattnttcattgaagcgcgtatatggtttgtaaaataccagaacagggtcagtacttttatcatt

SEQ ID NO: 140023 - DNA, 744 bp, Zea mays
  Clone ID: MRT4577_59185C.1
gaagccggcagtagaggcggaggctgacgagcgagcggcggaggagatggcacctaagaaggcagcggctgccaagaaagcggccgaggaagttgaggtggaggaggtggtggacggggacgaggcggtcgatggggagggcgacggtgacgaggacgacgacgacgacgacgaggactcagacgacgaggaagaggtcgacggtgaagacgatcaggaggaggagctgggaaccgagtatctggttcagcctcttgggcgggctgaagacgaagagcactcgagcgactttgaaccggaagaaaacggtgagggtgccgacgatgaggagatcgatgaagaggacgatgacggtgaggactctgtgaaggcgcagacctctacgaagaggaagaggtcaggcgacgaagaagaagaagacgacgacgatggggatgatgatggtgacgatgatgacgatgggaggccaccatcaaagcgatagtatggttagctctagttttgtagctgtgtccttgggtgtttggtaggtaggtagtgctgctgatgttggtttagaagaactcatcatcacctgggatatgtgtgtgatttggcttggccgatggatgaatgatgaaggtcttgtacttgttgctgcttctttcatgttgatgaactcgcactgattcactgtacatgctagcttctaattgtctgtctagacagctttatgggtttaactagaatcggatttttttccct

SEQ ID NO: 140024 - DNA, 230 bp, Zea mays
  Clone ID: MRT4577_59186C.1
attgattcctcagtgtaggctcgcgtactgatctaagtgttcgcgtcgtgcgatatggggctgcacatgacctctagtatagctaggcggtgcagaggtaggaaccattaatagttctgcggttacgccttgggcatgacctgcgacatttgcatctatgcgatctgagtccctactcttggctctgcaaacctgctgttgagagccatatacacgagactaagaatctt

SEQ ID NO: 140025 - DNA, 935 bp, Zea mays
  Clone ID: MRT4577_59187C.1
gacgcgggcggctgaacgcgggccgggaccgaagcatcacccaatcagatccgatttcgtagagatgaagccggcagtagaggcggaggctgacgagcgagcggcggaggagatggcacctaagaaggcagcggctgccaagaaagcggccgaggaagttgaggtggaggaggtggtggacggggacgaggcggtcgatggggagggcgacggtgacgaggacgacgatggggaaggcggtgacgaggaggatgatgatgaggaggtggatggggaggagaaggaggcggcaggggttgtggagatctccgacgaagacgacgacgacggtgacggggaggcggacgacgacgacgacgatgacggggatgacgacgacgacgacgacgaggactcagacgacgaggaagaggtcgacggtgaagacgatcaggaggaggagctgggaaccgagtatctggttcagcctcttgggcgggctgaagacgaagagcactcgagcgactttgaaccggaagaaaacggtgagggtgccgacgatgaggagatcgatgaagaggacgatgacggtgaggactctgtgaaggcgcagacctctacgaagaggaagaggtcaggcgacgaagaagaagaagacgacgacgatggggatgatgatggtgacgatgatgacgatgggaggccaccatcaaagcgatagtatggttagctctagttttgtagctgtgtccttgggtgtttggtaggtaggtagtgctgctgatgttggtttagaagaactcatcatcacctgggatatgtgtgtgatttggcttggccgatggatgaatgatgaaggtcttgtacttgttgctgcttctttcatgttgatgaactcgcactgattcactgtacaagctagattctaattgtctgtctagacatctagaccggtt

SEQ ID NO: 140026 - DNA, 263 bp, Zea mays
  Clone ID: MRT4577_59188C.1
agctgaggaaggcggcgcatgctgggtcttggtgccagtgactttgagtttggagtagatcccagtgctgatcctgagatctcgctggcccttcgtgtctctatggaagagcagcggcagcggcaggaggaggaggcacgacgggctgctgcagcctctgcagctgacgctggaattgccttatctgggactgaaggtgaacgagactcagatgatgccctactgaagatgaccatcagccagcaggagtttggccgtgcggg

SEQ ID NO: 140027 - DNA, 442 bp, Zea mays
  Clone ID: MRT4577_59189C.1
gagattacggaagcttcgcttgatttgggatttttagggttttctttctgcggagacgactccgagagaccaacagtgatttgacaatgacgctacctccaggtctttactccggcaccagctctcttgctctggtggctcgtgcttcggcttttgggttgggtctcgtctatgggaacatgaagctcaaggtccttaagatcaaatcgatgtcacagaagaaggttgaagccaccgctcatcattaaaccactcttctttctttacaataagatgccaaaagctgggggtgatgtctccccggttagtttgatttcttctttcatgattcatcctttagcataagaaggaacaaatgtgtttttgaaaagcatattatacggttttaagacctttttggagccataattgccattggcttaaaacccgagtcaagaacatc

SEQ ID NO: 140028 - DNA, 358 bp, Zea mays
  unsure (1)..(358): unsure at all n locations
  Clone ID: MRT4577_5918C.1
cgacaggtataaatagaatttagtttcagaatcaaattatggggatgacttaggaagaatgttatctactgtattaatctcagtagctatgtgcaagaaaaacatccataatcgctttgtgcaatctttcacaatagacaacagagagggactacatgctgaagtactaaaaattcctgggacaaatactttttgcgttgattgaaaaggtataaaatatctttcagttccatgtccctatcagaatacaataacgcaatgcagacattgtgccatgtggattcactctaaagatttgtctggtataagggggagaggcatcaaaggggggccccccaaaaaaaaaaanncccccccc

SEQ ID NO: 140029 - DNA, 234 bp, Zea mays
  Clone ID: MRT4577_59190C.1
aacagcgctaacaccatcaattattatgctgttcaaataatcaaacacgaggggaacataggcaaatatagaccggtttttaagggttccgctgaagaagatattgcatagcattgcacactaacataggtcatatacactataaaagggtaatcggtgggaaggctcatttcaaaaccaccaaaatctcaatgtttaattgttgaaccgcttcaaaataatccacaagcaact

SEQ ID NO: 140030 - DNA, 411 bp, Zea mays
  unsure (1)..(411): unsure at all n locations
  Clone ID: MRT4577_59191C.1
gtctagccctctgacaccagtgctaanaaaaggaaccanatgtcaaggttgtggaagtcttcgttggaagatccggaagaggaaaagactttataaggtaagcggtggctaatggctgtaatggttctcatcggtatatgtttctttatcttctccaacattactgcttggatgcctttactgctttgaataaaaagtttgaaattgtaactatgttttcttctttctaattttctgcccacattttcatctggtataagtgcaagccaacagtgtcgccctgtatcctaggaggattcttaacttagttccgtgcggatacatctatattaagctcaagtcaaagtcgatttgtttatcaacacaatttgcctccttttaggcctgaaacacaatttgcctctcgttaca

SEQ ID NO: 140031 - DNA, 284 bp, Zea mays
  Clone ID: MRT4577_59192C.1
ggttgtctctgtttcctgtggaggagaaggccagcatgagatcagacatcatcttattcagttaatcaatcagagattgaaagtattgattcacttcttctcgatatatcaatgctacgtgctgcaactgataattttgctgagagcaataggcttggtgaaggaggttttggtacagtctataagggtgtccttcctgacaaccaagaaattgcggtgaagaggctctcacagagctcagggcgcggcgtacaggagctgacccgtgagctcgctgcggttgc

SEQ ID NO: 140032 - DNA, 358 bp, Zea mays
  unsure (1)..(358): unsure at all n locations
  Clone ID: MRT4577_59193C.1
ttctgctaatgtccattgtgtgaagggtttatttttgtttttacggtctcaaactcaaataataggataaaaaaatttccctctttcttacaagacttacgcacaccgagtcgagttggcgatgttttctcagttacaaatgaagccactcttgcttccacgatgctgggtgcatgcatgctgccctctgaaatcaccattcaaggtttctgtcgctggagaaccgatacagtgacgatgcatgcactagtgcctgctgaattattttagcttcgctaatcagatgcagtaccgacatacatttatacagntcttgttgttattgtagtctgaggtaatccatgtgattaatgctcag

SEQ ID NO: 140033 - DNA, 528 bp, Zea mays
  Clone ID: MRT4577_59194C.1
tttttttttttttttttttttttttttttttttttttttttttttttttttttttcaagcagcagagcagggcattttgcaggcttttaaacagcggcacctttgtccaaggcagcccaacaaaatcaggctgggtcctatttgacaagagcgaaagggggccaactaagttatcactgctccatcaaaacaaacagattccttacctacaggggaccccataggccctaaattgtttaaccctgaacttccactttccttgggaagaataaaaggacaaaaactccgggccctgttcctccgcttttttaataagaatctccctgaacctttccacctttgccccctaacagtactcctccccagtttttttattaacccactggatgttaagaaaagccccctccgaagccttgttcagcccctcacccacagggggctttttgctgccgcccttgaaaacacccacctcccggtggtaaaactccattatggcctccagatccaggcccctaaggtccgtttccc

SEQ ID NO: 140034 - DNA, 2292 bp, Zea mays
  Clone ID: MRT4577_59195C.1
cgcctccgggttggccgcgagccgggaaagcgaccgcccctcctcttctcctccctttctctcgtctcgtcggctcctagctcctcctcctcgctcgccaagggagacgcacccggtccattcgtcctctcctcctatcgcctccccctctcctccccggagatccccgctaccgaaggattatcccgtgcagaggcccactagtatatcagcttggagttgaggagaatggctgttggtgggactcaaccagtccttaggaagtacctaggcgccctcaaggacacgacgactgtgagcttggcaaaagtgaacagtgattataaggaattggacattgcaatcgtcaaggccacaaaccatgttgagcgcccatcgaaggagaagtacataagagaaattttccattccatttctgctgctaggccacgggcagatgtagcctattgcattcatgcccttgctagacgtctttcgaagacgcgcaactgggcggttgcgctcaagacattgattgtcattcatcgcgcccttcgggaagttgatcccacttttcgtgaagagcttattagttatggcagatctaggtcccatatgttgaacatggcctactttaaggatgactctagtgcagaagcttgggattattctgcatgggtgcgcatttatgctttatatttagaggagaggctcgaatgtttccgagtgttgaagtatgatgtagaaacagatcctccgagaactaaggatcttgatactgttgctttgcttgatcatctaccatcattgcagcaactccttttccgtcttcttgcttgccagccacaaggagcgtcgtcttacaatgttataatccagcatgcactctcaatggttgctttagagagtattaagatctacactgcgattagtgatggaacaatcaatctagttgacaagttcttcgagatgcaaagaaatgatgctgttagggcacttgatgtatacaaaagagcaactaaccaggctgaacgactttcagagttttatgaagtgtgcaaaactatacacattgggcgtggtgagaaattcctgaaaatcgagcagcctccagcatcattcctgaataccatggaggagtatgttagagatgctccaacaggtcaaaaagagaaggctatactagcgatagaatacaaaaaagagccagaggaggaagaaaaaccgtcctcacctcctgcggctccagaaccagaaccggaacaagtgcctgagccagaacccgagccagtgaaagaggaagcaccagaagctgaaccagatttgctgggtctgaacgaacccaaccctgctgcaactgcgatagaagagcagaatgctttggcgctagccattgttccgatagatgatgctccgaaagctgctcccacttttggaaatggagtcactggctgggaactggcccttgtgacagcaccaagttcaaatgagaccgccgttgccccaagcaagaaactggccggtggtctggacttgctgacccttgacagcctgtacgacgaggcgaaccggagagcgagccagccagcaagctacaacccctgggaggcgacccccgccgcgcctgccccgatgatgaccatggcgccggtgatgcacgacccgttctacgcctcgaacgggtacgctgcgccgcacggcgtgcagatggcggcgatggcgcagcagcagcaggccttcatgctgcagcagcagcagatgatgacgatggccccggcgcagccggtggtccaccacccgatgcagatgcagcagaaccccgcgaacccgttcggcaaccccttcgcggccgccggcatgccgctccacgccgggcccggcaacgtgtacacggggctgatctgatccggtccggcggtcgatttcttggtctgcattagcgctgctgttaccacatcattcattcttttttgcccaagttttcttgttgccattgtgagaaggaaatttgtagcacagacacagacacaggtagagtgtattatagcgtcggtcggagtgtatagcaagcagggggtcgtcatcagtggtatcccgtacgtagaaggtgattgcatgtatattatacacacagagtttggtcacctgttcatgtgcagttgagagtccattcttgcggcgaggagacgcggcacggcgctacgtcgagattgagattggattattcttagtgaacataacactggatacggttgaataatgcagcagctattctttttagtaaaaaaaaaaaaaaaaaaggcccctagggcc

SEQ ID NO: 140035 - DNA, 368 bp, Zea mays
  Clone ID: MRT4577_59196C.1
aaaacaaaaaaggggtttttgcccctttccaacttccaagccaaaagggggggctggggcccctaacctttcacaaaataatttaaagttttgtagggggggcccccatacaaactgttaccagtgttttggatggggcaaaaggttaaaaacaacccttaaacaacattttttttagggaaaaatactgacaggccccgggctacaactaaagggggttttgttgcatcccaaaaaaatgcccctccaagcaaaatgcccccgggggccccccaaaaacctccctaaaatcaattgggtttatttgcaaggccgttcctttatttttaagaagaatccctcctaaatccctaatttttggggcaaaa

SEQ ID NO: 140036 - DNA, 1852 bp, Zea mays
  Clone ID: MRT4577_59197C.1
ccggccgggagcctccgggttggccgagccaggaaagctaccgctcctcctcttcttctcctccctccctggctccctccctccctctcgtctcctcgccaagaacgcactgagtccattcctcctcttcccctcctatcgcctctctctgcccctctcctccccggagattcctgctcctcccgactcccaagggttatcctattcactctgcctgctgccaaggccaactaggatatcaactaggaggagttgaggaggaatggctgttggcggaactcaaccggtcctcaggaagtacctaggtgccctcaaggacacaacgactgtgagcctggcaaaagtgaacagtgattataaggaattggatattgcaattgtcaaggccacaaaccatgttgagcgtccatcaaaggagaagtacataagagaaattttccattccatttctgctgctaggccacgggcagatgtagcttattgcattcatgcccttgctagacgtctttcgaagacgcgcaattgggcggttgcgctaaagacattgatcgtcattcatcgtgcccttcgggaagttgatcccacttttcgtgaagagcttcttaattatggcagatctaggtcacatatgttgaacatggcctactttaaggatgactctagtgcagaagcttgggactattctgcatgggtgcgcatttatgctttatatttagaggagagactcgaatgtttccgagtgttgaagtatgatgtagaaacagatcctccgaggactaaggatcttgatactgttgatttgcttgatcatctgccacaattgcagcaactcctttttcgtcttcttgcttgccagccacaaggagcgtcatcttacaatgttataatccagcatgcactctcaatggttgctttagagagtgttaagatctacactgcaattagcgatggaacaatcaatctagttgacaagttcttcgagatgcaaaggaatgatgctgttagggcacttgatgtatacaaaagagcaactaaccaggctgaacgactttcagaatttcatgaagtgtgtaaaactatacacattgggcgtggtgagaaattcctgaaaatcgagcagcctccagcatcattcctgcagactatggaggactatgttagagatgctccaacaggtcaaaaacaaaagactatactagcgatagaatacaaaaaagagccagaggaggaagaaaaaccggcctcccctcctcctgctccagaacaggaaccggaacaagagcctgagccagaacccgaaccagtgaaagaggaagcaccagaagccgagccggacttgctgggtctgaacgaaccgagccctgctgcgaccgcgatagaagagcagaatgctttggcgctagcaattgtcccgatagatgatgttccgggagctgctcctacttttgagaacggagtcacaggctgggaactggccctggtgacagcaccgagttcgaccgagaccgccgttgccccaagcaagaaactggccggtggtctggacttgctgacccttgatagcctgtacgacgaggcgaaccggagagcgagccagccggcgagctacaacccctgggatgcaaccgcgtctgccccgatgatgaccaccatggcgccggcgatgcacgatccgttctacgcctcgaacgggtacgcggcgccgcacggcgtgcagatggcggcgatggctcaccaccagcagcagcagcaggttttcatgctgcagcagcagatgatggcgccggcgccggcggtccaccacccgatgcagatgcagcagaaccccgcgaaccctttcggcaaccccttc

SEQ ID NO: 140037 - DNA, 289 bp, Zea mays
  Clone ID: MRT4577_59198C.1
aaacgaaaacttatttttttttggggaaggtcaccacagggcccgagtttttgggacccccccttacaaacaaccattaggggttagggcctttacaccttaccaaaccaaaccttggacactaaccaacttaatccaccccctcgatcttgggaccaggaccggtcccaccagaggggggattcttatccatgccaggaggagggcccatgcccgggcccttgccctgggacatttttgggaggagggggggggagaacccctcaagctcctttattttggttttgaa

SEQ ID NO: 140038 - DNA, 798 bp, Zea mays
  Clone ID: MRT4577_59199C.1
gtgcggcgctcgaggcggccgggttccgcgtttcctccacggtcacccgcgcgtccggacagcggcggcggcggcggcactccgagctttcgcgacatggcgatgcggttggctgcggccgcggccgccgcgttcgtgcggcgcctggcgccggcgcgcccaccagtacctatcctggcggcagcatctacggcggaagcggtgacgtgcgggcgcggggacaagaaaaccaagcgcgggaagcggttcaagggctcctacggcaacgcccgaccgaagcgtgagaagaagattgagcgcatcaaggaccgcgtcgaggtgccccgttccactccctggcccctccccttcaagcttatctgagcgcctcccctcggtccgccgggggtaccttgggtttgctgcgacagttgctgctacttcgccgtttccaaatagctgcacgcgctgcacgggcgtgtgtttcctttgtttttaattgtttctcaattgtgtggcgtcagatatgtactgccgccgaactgctgtggttcaagcaatatccttttggatggaagtgaagagatatgtttctgtccatcattcctcttctgttagtgtatgcataattggaaaattaatggatcctttattatgttaatagagttgttgaaggatatcagcttagattggattgtctcttttttatattctactgtcaaattataggcgtcttgaatttcaaggtgttcaagctacatgtgcctgtacgataatttgcttgtgaaattataacttgctgaatgtatgtcatgtgtt

SEQ ID NO: 140039 - DNA, 351 bp, Zea mays
  Clone ID: MRT4577_5919C.1
actgtttattttttcatgccgatggttattgctaagtgacagatactctcaaaacataagcatcctccacccattcaagcgtgcatcgcccgggccattttgcatggcgctaaaccagctgaactggtcgtgagcaacataggataaagacagctgttacctatatattaccatacggacattcggacaggtcagtaagcaccgcatgcatcaaatgggcaggcaaaagctgtattaaagctcgctgggatctgtgatggccaggacacttttgaaggcagtggaatgaagcactggctaagacattcatgcaggatagcagccgtccggcgctggcactggcttgctggt

SEQ ID NO: 140040 - DNA, 124 bp, Zea mays
  unsure (1)..(124): unsure at all n locations
  Clone ID: MRT4577_591C.1
ttttcctgggatgtctgcatttatgcagggcacactggtgccggcagcccgactggttggaaggaggtaggggtagtatnaaaatcaggtaggtgtggttgtgctcgtgcagtgtcggcaggcg

SEQ ID NO: 140041 - DNA, 817 bp, Zea mays
  Clone ID: MRT4577_59200C.1
ctcgaggccggccgtcgggaggagtaaagtttgtcttgggcctcgcaagttgctaccctcttcctcaccttcactcctcttcctcgtttcccccacggtcaatcgggtgatctgacggcggcggcggcggcggcggcggcactccgagcttccgcaacatggcgacgcggttggctgcggccgcggccgccacgttcatgcggcgcctggccccagcgcgcccaccagtacctatcctggcggcagcatctacggcggaggcggtgacgtgcgggcgcggggacaagaaaaccaagcgcgggaagcggttcaagggctcctacggcaacgcccgaccgaagcgtgagaagaagattgagcgcatcaaggaccgcgtcgaggtgccccgttccactccctggcccctccccttcaagcttatctgagcgcctcccctcggtccgccggggggtaccttgggtttgctgcgacagttgctgctacttcgccgtttccaaatagccgcacgcgctgcacgggcgtgtgtttcctttgtttttaattgtttctcaattgtgtggcgtcagatatgtactgccgccgaactgctgtggttcaagcaatatccttttggatggaagtgaagagatgtgtttctgtccatcattcttcttctgttagtgtatgcataattggaaaaattaatggatcctttattcatcagcagttaatgatgttaaaaacgcctgtcaaatgtcaatagagttgttgaaggatatcagcttagattggatcatctcttttttatgttctactgtcttcagtcacatgccattca

SEQ ID NO: 140042 - DNA, 554 bp, Zea mays
  Clone ID: MRT4577_59201C.1
ggagaaacccaaaagaaccttctttttgggggaccggattgggccctttttccaccagccctaacgtggggccttccgtagggggtcctgggtttttgccccaatcccgcccagggggaacccccctttaagggaccggaccggggaaccccaaccacttgggggaacacccgtccgtcctattttaaaccagacctaaaaggggattcctgttggaaagcccctgggggggattcccggggggttcccctttcggttcgaagggttgggggtaaaccaccttttagggaacctcggccggcccgtttgggttttgggggcaggggccccgttcattgggaccaccccttttttgattttgggtaagcccccccccaacccgttggaccccctccgggccttgggggtccaacgtcaattcttgggggtccccctgcccaaggtccacttggtgggagggggggttggccgggtcctccaccaccaaattcccaccagggccctgaacctggtgggggtgggggcccacaaaccccttttcgggttgggcctca

SEQ ID NO: 140043 - DNA, 301 bp, Zea mays
  Clone ID: MRT4577_59202C.1
gggagggaaggggttttttattgaccaaaagggtagcaacagttgcaattgggaagtccgaatttacagcattaaaataaagggtgggcatacataccttatttgggatttataaaaactaatttttggaatggggggataacttacactaaaaaggcaccagcctttgggggatttaacttacgtgcacaaaaaactaaacacaggaggggcgggtttaaagcattgcaaaaactgctttttgttgagagtttcaaagggggggttggaaacataaaaatacccttttttttggctttcc

SEQ ID NO: 140044 - DNA, 443 bp, Zea mays
  Clone ID: MRT4577_59203C.1
gcacgagtagaagtcgttttctggggggagctccatcgtcgggaagaggggtcatggctcaccacggacaaaagcacttcttttgacccgaatacatgaagccatgaaagtaatggttgaggggagggggaagcaagtacctgatgatcttttgggtcaatacgggtagtttatgatcaagctggtgtgggaggctcaccacggacaaaagacggcacactgagcttgcacagtcaggattttgacagctgttgtcaacgaaggcgagaatggtgtactctaagctcagcaatttccagaaaaaatcgttaacttgcaagttagtttcaatatttctagcatattccaatcacagcatcgtccagcgcacacccatccaatttaggggcttcttggtgggctctcaggccccagtaagaactccaatccctagatctcttttc

SEQ ID NO: 140045 - DNA, 318 bp, Zea mays
  Clone ID: MRT4577_59204C.1
gagctcatctagtcgggggccgcccttttttttttttttcacctaagctcagcctgaggcgctataaaaacttttacaggaaaatgattcctggccaacacgtaccagaatagggttctctcagggatagcaacacataatttacacccgtttttttaatatgccctcatgttaatgccaaaaaagtgggattaaaaggacaaaataagctatgtgtctcaggctacagctgctatcacatgtcatgtattcctgtggcaggaaccccaaaatagttagatccagttcttttacaatggcctaacaaacaacccccac

SEQ ID NO: 140046 - DNA, 1034 bp, Zea mays
  unsure (1)..(1034): unsure at all n locations
  Clone ID: MRT4577_59205C.1
cgcttccctcacatcctcctcatcctacgtcgcgccggcatggttcccggcgccacgagtccgccacctggagctcatcgtcatgctcgccggcggcgtctacgggttcgccacccagatgctggcctactcgccgatgcccttcaacgccgacggctccatcccgccggaacgcctgccgaaccacgagcacgccatcatgtacgcctcgctcctcgtctacgccggctccgccatctacctcgaccgccaccgccaccgccaccggcacacgacgctctgcatgctcctcctggcggcggtcttcgcgcaggagctgttcgtgttccacgtccactccacggaccacgcgggcgtcgagggccggctccactggttcctgcaggccgccgcggcgacgtgcctcgccaccgcgctcctcggcgccgccggcggntggtggtgggctccccgcggaggttcagttcgcggtgagcctcgtccggtccgcgtccctcgcgttccaggggctgtggggcgtcgtcatcggcgtcgtgtggatcccagggatggctcccaagggctgcttcctcgacgacggtggcgtcaacctgcgctgccacggcgaggacagcctgcaccacgccgtggctgtcgtcaacctgcagttcggatggtgcttcgtcctggtgacggtgttggtgctcggggtttacgtgtacgtgtgcaaaatgtacacagctggagatggggaggtatacgggcggctgccggaagcggaagctggagacgaggacgaccaccaccacgacatgaagacacgcaactgtaagctggcggtgcacgacgtgcatgagttcatgtccatggagatcgacgtctaaattaactaggagcatacaccgcgcgttgttgcgcgaattgcggattaatggattgtgtagtatgatgatgtgtagactatacttatttgtcttgttgacgtgaagactacagttgtcatgtatgctattggattttaattgtatatgtggtggtgcattgcatgttgagat

SEQ ID NO: 140047 - DNA, 2283 bp, Zea mays
  Clone ID: MRT4577_59206C.1
gggctttcccgtcccccatccttgtaggaaactcggtacccgcttttgggccttccctttgcccctactcgtcttccccaccgaagcagggtgatgcggagggcgtcgccttcgctgtctccggcgaggggcccggcggtcttcgccgccgcggtcgtggtgtttctgccggtcttattccccgggttgttctcccctcttggccacgctttcccttctgtcttctcggagtggaatgcccctaagccaatgcatccttctcttttgaatgaggccttgcgatggacagctacagacggacaaaagaaagatctatggtcacccttgccatatcaggggtggaaaccatgcttaacgccatcagtttctcacaaattacctctggaaccaagtggatacatccaagtatttcttgatggtggattgaaccaacaaagaatggggatatgtgatgccattgcagttgcaaagattcttaatgctactcttgtgatcccacatcttgaagtaaaccctgtttggaaggattcaagctcatttgaagaaatttttgatgtggatcactttatcaactccctaaaagatgaagtttccattatcaaagtgcttccaaaagaattttcttggagcacaagagagtactatggcacaggcatccgtgctacaagaataaaaactgcacctcttcatgcctcagcaaattggtatttggagaatgtcagtcctatcctgcaaagctatgggattgttgcgatcgctcccttttctcaccgccttgcatttgatgatttgcctgtggatcttcaacgcttgcgttgtaaagttaacttccaagctctggtcttccgttctcacattatctcacttggagaaacacttgtgaagcgcttgaggtctccggtccgggttcattccagtaaatctatccatcaagttgtaggagacacaaatcaagctgaaaaatatgcagttttgcatctccgttttgataaggatatggctgcacattctgcatgtgactttggaggtggcagagctgaacagctagctcttgctaagtacaggcaagttatatggcaaggaagggtattaaattcacagctaactgatgaggagcttcggaacacaggacgctgcccattgaccccagaagagattgggctgttactggtagcccttggctttgacaacagaactcgactctatcttgcatctcacaaggtatatggtggagaagccaggatctctagcttgcgcaaactatttccgttgatggaggacaagaggagccttgcatctgaagatgaacttgctaatgttgaagggaaggcttctgttctagcagctcttgactattatatcagcatgcatagcgacattttcatatctgcatctcctggaaacatgcacaatgctttggtggctcaccgaagctatgagaacttgaagaccataaggccaaacatggcactgcttgggcgcacctttgcgaataagagcatggagtggccagagtttcagcaggttgtacaggcaggacacaaaggaagatacgggcaaatccggttgagaaaggcaacgcaatccatctacacttatcctgcacctgactgtatgtgccaaggataggctactggtttcaaaatttcagaaaaccaatcggttctgcagcaaatgaaggtcgaggatcgccgtctcaaatgttgcattgcggttagtacattccagctgccactagatatgcaagtttgatttttttgggacagctgctatgtactggatctctctctctctctctctctctctctctctctctctcttcacaatacagtttggtgcagatgcagtttatagatattctcatattcgtggttgtgacgggtgttaagatatcacacttgccattaacactttgcgctcttcagcttctacatctattttaatgcatcatgtattcttcctggacctgttcagatattcaacttgtgcccaatcattatacctcctttgggcttcccccccccccaagcaattgttactagaatttgtcttggtcgtttaagttttgccccctgaatggagccctttgtgctactgattttttggtaaaccgatgatcgtgagaattagattggaaggctttctggaatggttagggtgtaatgttgtacaataatctaattcgcattggtttggccctagttcagttgaatgatgttgacggggttgaaggcaaacataatgtatttgttgtagtcatcaaacgtgttgcgcacaattcac

SEQ ID NO: 140048 - DNA, 128 bp, Zea mays
  Clone ID: MRT4577_59207C.1
ttatttttttttttaaagaccgactcttgaaagtaagttaacgatcactagcggactcgtcctgaacacaaacaaggctccacaggtgcaggcatgggacaatgcggaggactctatatcgtcaacaa

SEQ ID NO: 140049 - DNA, 518 bp, Zea mays
  Clone ID: MRT4577_59208C.1
cccacgcgttcgaaagattcttaatgctactcttgtgatcccacatcttgaagtaaaccctgtttggaaggattcaaggtgcctctgtagtttgaaactatatattccatgttctcctgttgaggcagaaatatttttttttatatattatactgggtcattttttcctggctgcagctcatttgaagaaatttttgatgtggatcactttatcaactccctaaaagatgaagtttccattatcaaagtgcttccaaaagaattttcttggagcacaagagagtactatggcacaggcattcgtgctacaagaataaaaactgcacctcttcatgcctcagcaaattggtatttggagaatgtcagtcctatcctgcaaagctatgggattgttgcgatcgctcccttttctcaccgccttgcatttgatgatctgcctgtggatcttcaacgcttgcgttgtaaagttaactttcaagctctggtcttccgttctcacattatcttacttggagaaa

SEQ ID NO: 140050 - DNA, 271 bp, Zea mays
  Clone ID: MRT4577_59209C.1
tttttgtagggacactcattgtcacttataagggtgtttgatttttgtgttgaaaaaacaatttgcagggaagtagttctagacaagaggctcctgttaaacaaagaagtgacttgcgttttgcaatcaatggtttactttggggcttggtaccggagaattccagcggagtacagtacgatagtgggttacatttgggtaccctggggtaagttcacgggccgtcgttttcctcaacaggggtgggaaaatcacagttatcaacccattt

SEQ ID NO: 140051 - DNA, 538 bp, Zea mays
  unsure (1)..(538): unsure at all n locations
  Clone ID: MRT4577_5920C.1
ggggagaaggncggggagaagggagcgncaaancaagaacaagncanaccccaaggccaggnacggccgcggngccccngaccccaagangaggancgacgaggccggcaggaagagaaagggcgccgacgagcnccccaacggcgngcaccnngncncnngggagaaggagaacggcaccagggaggcnncggaggcggcccgnanggccggcaacaagnacaggaccaagnccgcaggaaaggangccnnccacncnacgggnccgggnncaccccnnccagggcccncggancaacaagaggcnnacgagagcaggggcaganaggcnccagacgggaaggaggggcgccnnnggcaagccncagggcaccggggcnaggggggacannggacaggnacnccnnnccgggcgangcaaggacaacaaggcngcacaggccagngaagcncggcgacgcgccaagaccaagccccccggccggcaaaagaccaccgagagcagaaagcggggcgncaccaagnncagccgggccga

SEQ ID NO: 140052 - DNA, 2231 bp, Zea mays
  Clone ID: MRT4577_59210C.1
tggaaccctagtgccctcatctgtctaaaaccctagttcggtgaagcactagcctgagcggcggcgcggaccggcgagacgactgaccgaacgagtgcgccagagagctccctgcaaaccttgccgcgcagtaaatggaacgcagacgtgcagacaaggaggaggcagaagagccgctgaggcccgaggaggaagaagatgaggaggacgaagaggaggggtgggacgactggtgctccgacggcgaagatgttggcggtgggctgctgtgtttgttctgtagctcgagtttcgactccgagagctcactcttcgagcactgcgccgccgagcactgctttgatttccacatgattgtgaaggagctggggctggatttctacagctgcatcaagctcatcaactttgtccgctccaaggttgcagagaaaaaatgctggagctgtggccaagcattctcttccaacacagaactctgcagccacttgcacacagtggagaattgcctaattgagggaaaggtgccatgggaggacgatgtgtacttgaaacctttcatggaagatgactcccttttgcacagcttgtcaatcgatgacgatgatgaagatggggactgtggagtgtcaatggaaaagggacaatattcagctgggaatgaggttttagctgaaccatgggggaacaagctgagcagcatatcagaaagaaatgattctgacatcagtgctcaatttcagcaagagtgtactattggtagtacacaaagggaagtcagagagtcccttcatgtggcgattgatggccacctaaaggttgcacgtgctagtgttaattccaaagcatcaaaactgtggatgataactactttggatcttatagttcatttggtatccacagggagatgctcggtgataaagtcagaacagatgcttacagagatgcaattttaggcaatcctagcctaataagtggagcaactgtactagatgttggttgtggcacaggaattctaagtctttttgcagctagggctggtgcatctagagttgttgctgttgatgggagtgcaaagatggcttctgtggctacccaagttgcaaagaataatggtctgttgtatgatgagaacgtggaagcagaacagaagcaaggcagtgctcaagttataagtgtcgtacatacaaaggctgaagagctaaaccagaaaatacaagtcccacaaaatggctttgatctattagtgagtgaatggatgggatattgcctgctgtacgaatccatgctaagttctgtcatatatgcacgtgatcattttctaaaacctggtggtgctattctcccagatactgcaatgattcttggtgctggcttcgggaaaggtggaactagcttgccattttgggaaaatggatatggctttgatatgtcatgtattggcaaagaagtaacttcaacttcagctcgatttcctgtagttgatgtactgtcttctcaggatattgtgacagagactgctgtactccattcctttgatcttgcaagtatgaaggaaagtgagatggattttactgcaagctttgagctgatgctcagtgaaagtagtgccactgtgtcaggagtgacctggtgctatggcattgtcttgtggtttgacacggggtttaccgacagattctgcaaggagaagcctgttgtcctctccacctctcccttctctacaccaactcactggtcacagacaatcttcacctttgaagagcccattgcaatggcgaaggaggaatcaaccctgggttcatctgcattggctggcacagatgagtgcccagctacggcgctcaggtctcggatcagcatcgtgagggcatctgagcaccgcagcatagacatatcggttgaaaccacagcaatcagttcagatggccggaagcgcagctggcctgttcagatattcaacttgtgaccaatcattatacctctttgggcttcctaccaccacaagcaattgttactagaatttgtcttggtcgtttaagttttgcacactgaatggagcactttgtgctactgattttttggtaaaacgatgatcgtgagaattagattggaaggctttctggaatggttagggcgtaatgttgtacaataatataattcgcaatggtttggccctggttcctaaaaaaaaaaaaaaaaaaaaaaaaaaaaaaaaaaaaaaaaaaaaagag

SEQ ID NO: 140053 - DNA, 359 bp, Zea mays
  unsure (1)..(359): unsure at all n locations
  Clone ID: MRT4577_59211C.1
gtgaaaacccaattgttcaaccctacaggatccaacaggcaatcgcaacaggcagcttacgattatcacccttgttcctccaacaaccgtcagccctattacagcagtaccttggtccattggggccaacatcagcacacactcacactggctgcaacctgtgatactctacacatagtcttcatcccactggctgatgaactctgtgtattgcacacatacattcaccgctgtgctgctacccagcattcttcattcaaccactagcagncattggaactctgctgcttatttacagcagcaacaactactaccattcagccagctagctgatgtgagccctgctgcctttcttgaca

SEQ ID NO: 140054 - DNA, 231 bp, Zea mays
  unsure (1)..(231): unsure at all n locations
  Clone ID: MRT4577_59212C.1
gctggaagcnacacagccagcagagnnccagaggggnanggngccactggggcgccagaanacccgangnnaaagcagnncncacnnncaggnggcagaaagagcgcgcnnccnanggaacagcaancacanncgaggggngagcaaacacaacagcaaggggaaaccgcccgnagnccncccagcannagaacggaacacgaaaggccannggaancaggcagngcagag

SEQ ID NO: 140055 - DNA, 1142 bp, Zea mays
  Clone ID: MRT4577_59213C.1
ccggccgggctagaaccctagtgcgccctcatctgtctaaaaccctagttcggtgaagcactagcctgagcggcggcgcggaccggcgagacgactgaccgaacgagtgcgccagagagctccctgcaaaccttgccgcgcagtaaatggaacgcagacgtgcagacaaggaggaggcagaagagccgctgaggcccgaggaggaagaagatgaggaggacgaagaggaggggtgggacgactggtgctccgacggcgaagatgttggcggtgggctgctgtgtttgttctgtagctcgagtttcgactccgagagctcactcttcgagcactgcgccgccgagcactgctttgatttccacatgattgtgaaggagctggggctggatttctacagctgcatcaagctcatcaactttgtccgctccaaggtatatggtgagaaggcaggatctctagcttgcgcaaactatttccgttgatggaggacaagaggagccttgcatctgaagatgaacttgctaatgttgaagggaaggcttctgttctagcagctcttgactattatatcagcatgcatagcgacattttcatctctgcatctcctggaaatatgcacaatgctttggtggctcaccgaagccatgggaactggaagaccataaggccaaacatggcactgcttgggcgcacctttgcgaataagagcatggagtggccagagtttcagcaggttgtacaggcaggacacaaaggaagatacgggcaaatccggttgagaaaggcaacgcaatccatctacacttatcctgcacctgactgtatgtgccaaggataggctactggtttcaaaatttcagaaaaccaatcggttctgcagcaaatgaaggtcgaggatcgccgtctcaaatgttgcattgcggttagtacattccagctgccactagatatgcaagtttgatttttttgggacagctgctatgtactggatctcttctctctctctctccctctctctctctctctctctctctctctctctctctctctctctcttcacaatacagtttggtgcagatgcagtttatagatattctcatattcgtggttgtgacgggtgttaagatatcacacttgccacg

SEQ ID NO: 140056 - DNA, 1017 bp, Zea mays
  Clone ID: MRT4577_59214C.1
ctcgaggccggccgggccggactcctggctcccactcccacccgagcagcagcagaggctgccggcagcacctcccccgcgctctcccgctgcgctatcgccgccgcatcaacctcccgccgcgtcgtcctctgatcgactcggatggccgaggtcacgccgcccgccgacgggcagccggcatcgtggtctgagatcccgcgggacctggccggcatggtgctctgcctccttccggcctatgcggatcgcgcccgcttcgctgccgtgtgcccgcagtggcgcgccgccgcgcggctgctcgccccttccttgcccccggcgctgccactgctcgcgctcccgaacggcatcttctacagcctcccctacagcaagccctgccgcttccctggctccggttgcgtcgggtacaagggcgccgcctttggcagctggctcgtcttcccgcgcgacgaaggctgcttcttggtcgaccctttcgctggggccaccgtgacgctccctgcactgtcttccgtccggctccgtccaccaaatgcagctgataattacgtcaagtatcaggagcgtgctacacccaatggcagacattatgtcacgtggctggatatcagagactccaagcatgtgcccacattaaacaagctgatcatgtgctctccaaacctcgtcgctgcatttgttggcacaggacacataagtcagattctgatgtgccagccaggcgcttcctcatggtctgttcgcgcatatgatccgtgtgctgcatttgaagacatggctttctatcagggcaagctctacgcccttgatgatgatgaaaacctcctcgtggtcgacatcagccaagaccaaagcactggcgacccacatgtctgtcgaattggacaggtcatcaagggtgatcccgaccatttgtttgatgcttggatgccagatgacactactggcagaaagaagctgtacctagtcgagtcatgtggtgcattgctgatggtacgcaagaaggtatgc

SEQ ID NO: 140057 - DNA, 368 bp, Zea mays
  Clone ID: MRT4577_59215C.1
cccggtggacgtatgcgtactagcatccactcacaaatgcctccgaactgccgaacagcaccatcgacctgggcttcgcggacttcgtcggcaaggccgtcaacgtcccctcatcgtccgccttccgctaggcccccgtcacgatgctcaagactgctctgaaggccaaaccagatcaagactgccaaaccctacggtactgcccctaccctgacctgcacctgggaccactgcccgacaagccgccaagctacctgactgtccaattcccgggccactaccggtgcgacaccgcacggctacaggccaacctacaaacgttatgactgaactggcagctgcaactgatccactcccgctaccacatg

SEQ ID NO: 140058 - DNA, 444 bp, Zea mays
  Clone ID: MRT4577_59216C.1
ggggcgctccctccctcctccaccgctctcatatgacatatcatctcccccacattacatggagagggatgcccgggatacgctaccgttggcaggtgcagctctccctctctccactcccgcttgcgaagtctccggaggtgccgaggtgctcggcgcgacttcttcgccgccgtctacagaggcggagtccggcgaccgacctcccgcacgacaaagggggtaagcgggtggatccgcggggcctcacgcaagaagagccgtgtgaacggattcagcaaccaaggagtccggattgaagctcccactggtcgacttcatcgccgcaaccgccgttcaaccgtgtctgtcgttgattcaacgaggctccttcaccggacgggtctccgctgatccagagctcgagctccccgccatcgatctacttctttagatttccacatc

SEQ ID NO: 140059 - DNA, 248 bp, Zea mays
  Clone ID: MRT4577_59217C.1
ccactcacgcaaccggaaatctctatggtttcttccatttgatcatactcttgatagcgatgatgcaactgacctggctactatagttttctatggatggttcattcggcctcttacataaggtatcgattcagacatcatgctggaagatgttggtgatcggcttctacagttcactgaaacataggccgcacttgtcactggtcacatattatttttcttggtggcatgtattacgtcagtcaggt

SEQ ID NO: 140060 - DNA, 435 bp, Zea mays
  Clone ID: MRT4577_59218C.1
aaaccggaaaacgggttttttttcctaataaaaaaaggggaatcaaaactggacatttgggggggggggaaaatccgcctttcggaaaaaaggggggcccatccagattttagtccggcccggaacgggaggccccaaaaaaaatgcttgcccacaaaaggcaaaaaaaaaaaccccttggttggagctttggggggaaccaaaattttacgggagggtacgtagaaaaaccccccgctttaaagggcaatttcccccccccccggaagggtttaaaggaggacccccccccggccccttaaaggggggttttttttaaaaaacccctgcccctggtaaaagcggggctggcctaaatccttgatggcgggggcctggaacccaaacctccccttgggggggccaaattggtgggcccccggggggggcttgccc

SEQ ID NO: 140061 - DNA, 434 bp, Zea mays
  Clone ID: MRT4577_59219C.1
gggaatgaagaacgtaacaaagaaaaaaaagggagcgcaaaaaaccaaacataaaaaaagaaaaaaaaacatgaaagcgaatacacaaatgggcgcgcgcttgtaccggggccgctcttacgtccccgcgccttcgtggtacatggctctgcactggcggcccgtcagtgacttcactgacacgtaacgtgcacagcctcctacttggataactcctgggggtctccaacgttactcgactacgttgcacaacccattttctccatttggcgtgtgggcgagggggaccaacccgagcgcccttcccatggatatggaactgctggagctgatggagttcgcccctgtgggcggccacttaatctcccacaggtaccgggatcacctggagacgaacattctactgggggactacctacaccgcctgatttccg

SEQ ID NO: 140062 - DNA, 500 bp, Zea mays
  Clone ID: MRT4577_5921C.1
aaaaaaaaaaaaaaaaaaaaaaaaaaaaaaaaaaaacaaaaaaaaaaaaaaaaaaaaaaaaaaataaaacctaaaaacaaaaccacacaaaaggacaaaatataaaaaaatttccttcttcgtgcgggccccctctaggggggatttttggggatttccttccccttgggggccttttgtccttcttttttgggggcccatttccccctttgggggggggaataccatttcattgcccgactttttccacttgcggaattggaaaatccttgcggttccccaatttaataggttggcagaacttcccctttttcccagttggtgtaatacctaaagggccaatgcagtccccctttcccaacagttttccaccctaatgggtaattggtccccccttttggggcccatttaatcgcggggggggtggggggttccccttagggttaccttttctttttccaggcccttagcgcccgttctttcggtttttttcctttttt

SEQ ID NO: 140063 - DNA, 261 bp, Zea mays
  Clone ID: MRT4577_59220C.1
cccacgcgtccgcctacacatacctcgaccccaccatcgagcttatctcctcccgtctaggggacgactaccacgaagcagctggtggagcataaaagccgccgatccatatcatacgaacgagttgtccactaatactccggctcatgccgtagatccctacgtacgccgtccgacagacatggtccggttctcctagcagtcgtacgtactctgatggcgctggcgcccgcgcctgcgcgcgcccgtccaccctggggc

SEQ ID NO: 140064 - DNA, 364 bp, Zea mays
  Clone ID: MRT4577_59221C.1
ctatgagcacgctgccctcgtccctaagctcggcatgaggtcgaggctgcgtgaacacctgccgactgatgcaggcctgcagagggactcctgccctgatcaatgctgcagtcctctgcccgctacagatcattgaggaggaagcatggcatgagtgtccgcatgggtcctgagagtcgcgcgagcagcgaagcaactcacggatggtcggatggagggcaatgaccagctgctgagctgctgctgctcctcctggtcgaccatcagtttgtatttgtccatgcctcgtgtagccggtcgccttcttgccctggcttgggcagtttcagaaagcgggcaggccccgtgaggcgtggacagagac

SEQ ID NO: 140065 - DNA, 136 bp, Zea mays
  Clone ID: MRT4577_59222C.1
agatcgagctgcgaccttgaatgtctcaagtagttctatgttaatgaagacaaggatgtctggaaggtggacagactttatgaactatatcagaaccttgccgtgacgcatagcgtcatctttgttaacacccggc

SEQ ID NO: 140066 - DNA, 220 bp, Zea mays
  unsure (1)..(220): unsure at all n locations
  Clone ID: MRT4577_59223C.1
tgaattcggcacgagggtccaaccctcctccttcccctgcccctcccggcgcttccgaggaggagagggctcttcaattccccaaccgattccaaccccacccgggaagagtaaactacagcgacgcgcctgccacttctccttcctccaccaagtcctcgctcgccagcccgcgctgcagcggccgccgggctcgtcgtccgatggggtgcttcncgtt

SEQ ID NO: 140067 - DNA, 261 bp, Zea mays
  Clone ID: MRT4577_59224C.1
ccggccgggaccgcattagcgcagagactggcgtcttcgtactcgcctatctccgcgactcaaagcttcttccatttcctaccgccgccgctgcagctccaccccattccgtcgacaccatgatgggagtgcatctctgatccacatctggccaatgcctggtatccatggtctgaaaacgcgctgctatggagctttacttagcctccatgcatgcccattcacggctcattgctcaccatgccccggcgacaaaaccat

SEQ ID NO: 140068 - DNA, 1101 bp, Zea mays
  Clone ID: MRT4577_59225C.1
ctcgaggccggccgggctaatcgccacggccacactactctacctccgcgcggcgatgcggagcagaagcaatggaggtgctcagctccagccgcttcgctagggcaatcctcccgaacctcctcgacccggccatcaggatcctcagcaagcccccttgccgccgccgccgcgccgttcagaccctagcatccaacgcccacgcccccaccgccgcgccgtcgccgtcgccctcacttgctctgctcctcgccaccgcgctgcggggcggccggacgggaggggagctacccgacctcgcgaccgcggccactggcggggccgggataggaacgctgctgatgagcaccacggcggcggcggtgaccaaggcacgggagagcccgtacctgctggcgctggccgccaacccgaccttcgtgtcggggctggtggcgtgggcggtggcgcaggccgccaaggcgctgctcacctccgtcgtcgagcggcggtgggacctgcggatgctcttcagctccggcgggatgccgtcctcgcacaccgcgctgtgcaccgcgctcaccgcctccgtcgcgctctgccatggtgtcagcgacgcgctcttccccgtttgtctcggtttcagtcttatagttatgtacgatgccacgggcgtcaggcgccacgccggaatgcaggccgaggtactcaataagatcgttgaggacctgtttgaaggccatccgattagcgaaagaaaacttaaggagttgttaggacatactccgtcacaggtctttgctggagcgattttaggcatcctggtggcatggtattgctgccaaggttgtattgttcccatgtgacgttgttatagtatgaatgatccagaaatggaactgttccatcgcgtggattttgcatgtagtgtgaccagtgttctggaaagtatttggtcttgactagtttgatcattggtaagatggcaactattgcccttcttgtctggaattttcctgtatatatgtaacctgatagtatgaaacaatcaagatatccatcctttaaactttaaagtctcaatgccaagttgaggctcaatttattcgtgattcaattgac

SEQ ID NO: 140069 - DNA, 715 bp, Zea mays
  Clone ID: MRT4577_59226C.1
tgggtacctcgaggccggccgggccgggatcccaaagagcacgcagtgcagcacggaagcaacacttcctgcactcactgctagctgctcacaccatagtagtaacagtccatcactagtcaccaccaatggctcccaaggttgcgctcttccttgccctcagcctcctcttcgccgccgccgcgcatggctgcgaaccctactgtcccggcccagccgtcccaacgccgccagtcctgccgacgccatcgtcgcacagccacgggcgctgcccatcgtcaaagagggtatattgaagggttgaccaagtacaccttcgaacagaaataatactcaagcagtgcaagcatgaaaatgaagctgagaagcttcggttccgtgttttggacacacaactaaggatcagtaagaggaagcgataagatcttcaaggcttggacaacatgtctaatgatggaaaatacttttatacccttaaaatatattgtagtttgtgtgtatagttctgaggacataattgtaatttttatgaagttgtaccccaccactataaatagaggtacaatgcacagaggacactttgtataagatattcaaggcttggacatgattctgggaaatttgtgatgtatatgtgatgattatgtgatatatattttggttgtttggatgcgataacaaaagcaaaaaaaaaaaaaaaaaagcccctagggcc

SEQ ID NO: 140070 - DNA, 2397 bp, Zea mays
  Clone ID: MRT4577_59227C.1
gagagagagttgggtgcagtgcagcagtgcagagagcagagacggagcggagcgaccgagagagagagagaggggaagtttaataatatatcccatcactcacacgccacggcatcattcgccgcctccttcctcctcccgctcgtcgcggttccaactccgtccaccaggagcgcgccccgcccgctgtccgttagctcgccactcagctcttaggcggagcagcaagacccgcagtgcgtgggagtggcagcacggttgggagaggaaaaagtgatgtacaagcagctgcagacggaatcagagagaacccaaggactagtagaataaagttcatgaagctgggctcggactacgaaggatccgtgcgcaacctgcccaacgtggataacgaagcatccagagtcactagataagcaggtgacgagcctgagcgcgagggagagccgccagcaccaccggaccagcgacagcgagcacaggggcggcggcaggaacagcttcaaagaccagctcgggggcctcctgccgcagtcgcggttcaggaggatcttcgagaagctgctggagcagcaagggccaaggcgagcaaggcggtaaaggctcggagacgtctggcagctcccagagccccccgttgtcagcaaagcctgcagaagtgaagccatcccatcttcccgctgttaggaacaggaggtattgtgttttatagttttttttggatatctcgtagctggaaggactctatcattgttctccagagcacaaaggctctatcaccatggtctgaagagctgaaggttgtgggtagatgtatcgatgccatcgcttcgaaggtggctgcggatcctgccaatgtaacctggtcatacagtcatagtagcaagaaaggaggagcttgtgctgaaatagtcgagccagcaggaaagccatcaatagctccaaaagattggtgggttgaggacttgtgtgaactggatgttgacctgtacaagagagtcatggttgctatcaaatccaaggggagaatgtcacctgaactgataggagaggcacttaaagcctatgcagttagatggctgccagactcctacgatgcattagttgccgaggattacatgaggaggaatcaatgtctggttgagacaataatatggttgctgccttctgacaagagctcgggatgttcttgcagatttctcctgaaactgttgaaagtggccatactagtcggaggcggggagcacgtgaaggaagagcttatcaggaggatcagcttccagttgcacaaagctactgttaaggatctcttgttacctgccacttcgcctaatgatggtacctatgatgttcggctggtgcataatcttgtccagagatttgttgcaagaacagcgctgtctcataacggcggtttcattgagaagtccgacgaaaagatgattgagctcaacttcgagcaagaatccattttgtcggtaggagagcttgttgatggctacctgtctgaagtagcttcggatcaagacctttcgttgtctatgttcgttgaactggcgactgccgtgccagaggtggctaggcctgttcatgacaacctgtactatgcagtcgatgcatatctcaaggaacacccagacataaacaagtccgagaagaagaagatttgcagtctggtggatgtcaagaagctcagcgcagatgcatccgcgcacgccacacaaaacgaccgcctgcctctccggttggtggttcaggtcctcttcttccagcagctgagggccggcccaagcaaagaactcgccctgattgacaatggagaacacgcttgcacacggcctacgcaggatcaatgtgaccgtggtgaaaggcggataccgaagcatccaaactcactgaataagcaggtgacaagcctgagcgcgagagagagccagcagcaccggatcagcgagcacaggggcggcaggaacagctttaaagaccagcttgggggcctcctgctgcagtcgcgatccaggaggatctttgacaagctgtggagcagcaaagggcagggcgagcatggcgggaaaggctcggagacgtctggtagctcgcagagcccaccgttgtcagcaaagcctgcagaagtgaagccctcccctcttccccctcttaggggcaggaggtactctgtttcttagttttttttgggggtgggggctctcctagtttagggctctgggataggttgttgtacagaaggtatcatctgctgccaatccctttttgttttgtacgcagatcaatctgctgttctatgtgatgatccatgccgtagcttttactgtagcgtaatttcaactgggagcaaatatttaccagggcctgagttgttaaaaatgtttcaatggc

SEQ ID NO: 140071 - DNA, 424 bp, Zea mays
  Clone ID: MRT4577_59228C.1
tcctctacagccgccctccttttttttttttttcaatagttataaatcaagcttcacttctgagcacgaatttttttatgaacattcttacaaaatcccacatacaggccataataatgcttgccttgaacaaacaatgaagaactcttatcctgtccgctataaaaaaaaccacaaatgttacatgcttctatgatcaaacctaaaaatgacacgtacaatttcctcacctaaaactgacatatttttgacacttttaaaatttacaccttaacttgcatgtccccttttaaatattcattcaattctaaattatactccggcacctgaactttgaagaggcttgaatcactcctcttaaacattctttacaaaaatgccaccccttaaattgacacaccattatatataacctttatccaaa

SEQ ID NO: 140072 - DNA, 313 bp, Zea mays
  Clone ID: MRT4577_59229C.1
caaaccttgtattgttttttttttttgaccctaaaagaccgatgcaatttacatggtagtatggcaatgtaatccatttggtaacatttacaaaatcacaggctcttgggaccccaaaagatttaaaacgtggtgcatatacacaacaccctccttcttcggaaaggaatgtccataccgttctaacacatttaatgatacatcaacagttttattttaacctaattgaactggtcccaatcatgttagctttatgttaaaaaaacacggagaggctgagaattataacttgcccatgccttactaaaacttc

SEQ ID NO: 140073 - DNA, 345 bp, Zea mays
  Clone ID: MRT4577_5922C.1
tctagacatctaggacctgatctaccactgtctatttctttgtgctacatttatggtaccggttgagaaatttcaaaagtttaggcccttttgcaactttatatcttcttgctagggctgtttcctgggctcgttttcatttaagcatggtgggaccactacatgacctaagctcagggttgccaatagtgggccaaaatctaatggagatgggcgggcttcgagatcaaatacctcagctttttaatttgcgagcatcgaatactaggatacactttattgaccgattgcgcatgtcttgagcttatgcttttgtggtggttcatatacaaacactccaaatgc

SEQ ID NO: 140074 - DNA, 270 bp, Zea mays
  Clone ID: MRT4577_59230C.1
tttcctcggacgcgagagcggacgcgcggggggaggaggccataaagacacggccccgacccccacgaaccgccaggaaccgcacgacgggccgaggaccaacggaagcacagcactggcaggagcacaggcaaccgccaagggaaggacaaagagccggggagaccccagaccaagagaaccgaggatgaacacacgagcccgaggcagggggacgcagacagaggaaggaacgcacggcaagggagctcaaagggccacacgcgagac

SEQ ID NO: 140075 - DNA, 308 bp, Zea mays
  Clone ID: MRT4577_59231C.1
taaagagagtcgtattacgaggtgtcgtctcgatccctcacggtcactgtcgaagccgtcatcttccgcaacgacgaggctgatgttactgcgcgaatgggagctacatgtcggagggagtaggacatggaggtgtttatccttccggtattcgacttttgaatccgaatggccactgccgaggagcactcggtggctccagacttctactctgatgcgttaagcagtgatgaagcttctcaatcgctcaaagtggagcatcgcctttctcagatcattgctgctactcagtttgtggaggaaccaca

SEQ ID NO: 140076 - DNA, 1820 bp, Zea mays
  Clone ID: MRT4577_59232C.1
gcatccaaactcacacacactgaaaattcggcaccgacgaactataaaaaacaagcaggacgacgccagccgaggcccaaatacacaagaacacatcgcctatccagtatccaccgacctagctcatcgcgaccaaagaaaaggacacagcaactcagcaagacccccatcttccatagctctagctactagctactagtttcaggcctgcggctcgtgaacacctcatctttttagccacttttgccaccaccgacgacgaccgatcgatcagctagcagctaggccatcccgcgcgcgtcacgaggaacccacggccggcgtcgccattgttgtcgctgtaacttgcaagctttccctagcatcggcccttttccccttccttttccctcgctcgtcctcgtgctagctgtgtataaaagcgcgtcgctagcgcgctcatggagcagcagcagcatcaggaggtgaggaggaacaggaaaggcgtgctgcaggtgcaggacggctctgagatccgggctctcgtggagaacaaggcggagttcgctaggttcgtcgacgacaggttccggaagctcgacgccgatggcgacgggaggctgtcggtgaaagagctccagccggccgtcgctgacatcggtgccgccatcgggctgccggccagagggtcgtcgccgcaggcggaccacatctacgcggaggtcctaaacgagttcactcgcgggaagcaagagtcggtgggcaaggccgagttccagcgcgtgctgtccgacatcctcctcgggatggcggccgggctgaagagggacccgatcgtcatcctcaggataaacggggaggacctgagcgagttcgtggagagcccgaggtacgagcctgaagccgtggccatattttcgcaggccgtggggggccctaccaataccaacgacgccacgctgcgccagtgcctgctggccgctgtcggagagctcaccatcgaccacggcatgccaccggcttctgatccctgggtcatggagaacgtcgtggagcccgcgttccaagagctgcctgctagtcccacacagcagctaaccctcgacgagcctgttccctccgtcaggaggctactgtcgaacaagttcgagttcgacaagctgctggactctgtgtggagagaggtcccgaaagaacgcaaggacaagcaggcgtcgaaagagtacctccggatcgcgctcgacaggatcgccgattcggcgggcctgccgcctctgggggccgtcggtcaggtggatgccgtggtgaacgaggcgttcaagatggcgaaagccgacgacctcagggcggtggacgaggcggagttcaagaagctgctgaccgaggttcttggggccgtcatgctgcagctggacgccagccccgtcgctgtctccaccaacaccgtcgtccacgagcccatgtgcacctcctcctcctcctccgcgctgctgtcgcccacgccgctgtctccgatggtgtcctctcctgctagtgaataggagaagacttgacaactgagtgaggagatgacgatggagatggatcacaccggcccgtcacgctcagtttttctttttctgtgtcaccgggtactaataacatgttaggaacttgtgggtttttatgtcgcttataacttctcgtcgaaataaggcttttctaagcttttgagtagttgtgaacattttaagcaatcgtgaacagatggtggttgatatgtgtccagtatgaatttttaattgtgaacatgtggtggttgattaattatgaacactacgtacacactaaaaatcattaca

SEQ ID NO: 140077 - DNA, 1441 bp, Zea mays
  Clone ID: MRT4577_59233C.1
cctcgaggccggccggaaaaaaaaaataaaaaaaaaaaaaaaaaaaaagcagcagcatcaggaggtgaggaggaacaggaaaggcgtgctgcaggtgcaggacggctctgagatccgggctctcgtggagaacaaggcggagttcgctaggttcgtcgacgacaggttccggaagctcgacgccgatggcgacgggaggctgtcggtgaaagagctccagccggccgtcgctgacatcggtgccgccatcgggctgccggccaaagggtcgtcgccgcaggcggaccacatctacgcggaggtcctaaacgagttcactcgcgggaagcaagagtcggtgggcaaggccgagttccagcgcgtgctgtccgacatcctcctcgggatggcggctgggctgaagagggacccgatcgtcatcctcaggataaacggggaggacctgagcgagttcgtggagagcccgaggtacgagcctgaagccctggccatattttcgcaagccgtggggcctaccaacgacgccacgctgcgccagtgcctgctggccgctgtgggagagctcaccatcgaccatggcatgccaccggcttctgatccctgggtcatggagaacgtcgtggagcccgcgttgcaagagctgcctgctagtgctacccagcagctcgagctcgaccagcctgttccctcccaggaagccttcctccaggaattcaggagacttgtgggcgccatcaccctgagactgcgacagcaccctgtgatcgtcgcccatacggagaacaacttcgacgggagtggcgtcaggaggctactgtcgaacaagttcgagttcgacaagctgctggactctgtgtggagagaggtcccgaaagaacgcaaggacaagcaggcgtcgaaagagtacctccggatcgcgctcgacaggatcgccgattcggcgggcctgccgcctctgggggccgtcggtcaggtggatgccgtggtgaacgaggcgttcagcacgaggaaagccgacgacctcagggcggtggacgaggcggagttcaagaagctgctgaccgaggttcttggggccgtcatgctgcagctggacgccagccccgtcgctgtctccaccaacaccgtcgtccacgagcccatgtgcacctcctcctcctcctccgcgctgctgtcgcccacgccgctgtctccgatggtgtcctctcctgctagtgaataggagaagacttgacaactgagtgaggagatgacgatggagatggatcacaccggcccgtcacgctcagtttttctttttctgtgtcaccgggtactaataacatgttaggaacttgtgggtttttatgtcgcttataacttctcgtcgaaataaggcttttctaagcttttgagtaaaaaaaaaaaaaaaaaaaaaaactcgagactagttctctcgtgc

SEQ ID NO: 140078 - DNA, 618 bp, Zea mays
  Clone ID: MRT4577_59234C.1
ggagtttttttttttcttttttttttttttttttttttttttttttttttttttttttttttttttttttttttttttttttttttttaggttcgggggaggggtagtcctaaaataaaaaccaaggggaaaaacccccccatgaaccaagttttacattaagcagaaacctaattaaaaatcaatccaaaaaaaaaaaagggggggggaatgaccccaattttacgtttttacctaaaaggggaaagggcataaattttaaaaaatatttggaccccctcggggggtaaagaaaggggctttgggctcaccaaaaagggggggaaaaatttttcctcaaggaggggggggaacggccctttcctaaaatgggggccgggggttttttcacctttgggggggggattcctgagttcggggaaaaaggaaatggggttgaccccaactttttcacccaagggggagggggagaccttaagggcctaaaaaaactttttgggggaaaaactttccatccctaaaagcttttttgcccaagcagccaggtggattgaaatttttttttttggggcccccccccccggaataaaaaattttttggtgaccaagccccttttg

SEQ ID NO: 140079 - DNA, 390 bp, Zea mays
  Clone ID: MRT4577_59235C.1
gaagatatttccacgaccaactgctggtctctctcgtgccattgatcaatgccagactgtgaagtacaacatgaattcaagggctgggagaggctttacccttgaagatttgaaagctttgtgtattccaaaaaggcttggtccaaccattgacattactgtggaataactgctcatgaacaaatacctagaggagcttcacgccaatgtccagaggcttaagacatatctagccaagctggttatattgccaaggcgtgctcataaggtctaggctgctgactctactctggaggagcttaacaatgctacgcagtatcagggtgactacatgccaattactttcggtgagaagcgctatgtcaaggtcgtgaacgtcacagatgaaat

SEQ ID NO: 140080 - DNA, 597 bp, Zea mays
  Clone ID: MRT4577_59236C.1
cattgggtacctcgaggccggccgggagctatggtagtacttagttgcttgagcctcgcggcggcacagacggcgcgtacgatgatgcacagcggatgtgaactacagcggcagacagatcaccggaatggcatgctaatgaatctccagccccgtggcggaggatgggcacccaacggtggccggcgccatggaatccggacggctgatgttcactggctcctgcttcatttatgaaccaacttcatcgcggagtgatcgtatgctgcctaaggagacctctacagcagctgctgcttgtgctttcttgcgattggagtctctgctcgtgcttcttggaagggttgcttatgactgatgaatggctatgggccgtgagtgcttgtgatctgcatccctaggtgcacacttggttatgacacatcctcacagctggtgtacgaacaaatatagacgatttgaacttattctagaacgatgtatgggagcaaccgaggtaaagcaatgcttccttccagggatgcataatatatcgtctatctaaatccctgtctactatgattctgcttaaaaagaaagacaaagaaagcggaactg

SEQ ID NO: 140081 - DNA, 418 bp, Zea mays
  unsure (1)..(418): unsure at all n locations
  Clone ID: MRT4577_59237C.1
ccaacccttccggccgaaccccccttaaatttttttttccaacaggtttttaccctgggcggacagccccggttattgtggggaaatttaatctnaatgggattagatcattgcaattgttgtttttaaacaagaaatgcttattaagcccaagtaataacttcgctttgactacttccttgccttttgaccaaaccgcccgtcgccaaaaaaaaaaaaaaaaaaaataaaaaaaaaaaaaaaaaaaaaaaaaaaaaaaaaaaaaaaaaaaaaaaaaaggggccgccccttttaaagattcaaagttatcttccccttccttccaacttaataatttttttttggtttaccttaaattaaattaattgcccgtcttttaaaaacttcttaattggaaaaaccttggcttacccaaatt

SEQ ID NO: 140082 - DNA, 970 bp, Zea mays
  Clone ID: MRT4577_59238C.1
gccatggattgcttcttgtgccccatgtcctgctgcgacgacctcctcgtcctccacggcgccggcggacaggccggcaccggcagctgctgcggctccacggccagcgacgagtacgggtccagcgaggaggacggcgccacgtggggcagcctgtggaacctcgacggcgccggggaggtgtgcacgctgtggtagagatcgattcgctaacctgccgctgccggccgtactgcagcggcaagccgcgcgcatgccgttctgcttgaggggagggaacagccgaacaggtgatcgtcgtcgtcgtcgtcgtgtggtgctggtggataaggacggaacggaacaactgctaccgcgtacgttcactttgcagccgcatcactgcatcagcagctataccgcgcgccgcctgagccgaggacacgtgtgtcgttaagctccggtgaaccgaacttttttgtgcatggaaaacaaacaagtttttccgctagctggcggccatccgtacctgaaaaactaacggacacgagggacaaatttagggaggtttaatttatagtgagtaatttttagtttctttattttattttattttagtctctaaattactaaatacggaaactaaaactattttttagtttctatatttaacaatttagggattaagttgaaataaaataaagaaactaaaacttagtctctaaaaccaaacactacaatactccactgtcatttgttgtgagtccagtcttaccaaagtgcctattttacccatgttaaacacttcccagttaacacctcgcagttaaacaggcgtcgttgtttgcctttacggcaacgctactgttgtaagtttacttctgctctacacacgatatagcatggccatgttcagttgcacgaggattaggagagattgagaggattaaatatcttccgattcaactcaaaaaaaaaaaaaaaaaaaaaa

SEQ ID NO: 140083 - DNA, 265 bp, Zea mays
  Clone ID: MRT4577_59239C.1
gcgttagaatcatggagatcctggggccttacctactagcgggatcgactgaagagacgcctgctagtgcgttaggtaggaagctcgatccccacagaaaagagcgagtggtctgtcagctgcgagatagaaccggagtgagcagggtccctagaggccggttcctggtctgtgctgctctcctggaagccatggtacaggcagatctcagggcgatccccatgtgagggcagcggctctgcctggtattccaccgcagtacaac

SEQ ID NO: 140084 - DNA, 221 bp, Zea mays
  Clone ID: MRT4577_5923C.1
attgatacgaactagcaacatacatagtgaagtacactagcaacatcttagcaccatgggcagccaaaattttggcattcctggccttcttggtttttcaacaagccgtggttccgggaatattattccacaatggttaacaacaatacctctttccggtgacagccgcgagatttgaatacccaactatacaatcctacaggctacaagaggccatcgca

SEQ ID NO: 140085 - DNA, 519 bp, Zea mays
  Clone ID: MRT4577_59240C.1
aatccacaaacggaccagatggtttagacttcacttatctcttcacatcatcgcgaagccagatccccgatgcgatctgtgcgatgaaatatggcgactccgacgccggaaatacgccccgccgactcgctcctcctcctcgtcatcggtggagacctcccctccgccgagagcgccgatctcgatatctccaaggcatatcgtagagatgatctcgacctcacatatcgattcgcgacgtcgcttctcgcaaggttgataatgttggaccagaccctggctctcgagtcttaatggcttgtcgaaatattccatcataagaacttgacaattattagatgattccccaaagaaggaaaaaagtgggaacaaagtactgtactgccaaatggaaaaggtcgaacatgtggatctccccagtaaatgacaatattttctacatagctgaaccaacctcaggaatattcatggacactggaattgtatgaggttactgtgcaagctcgcgctcgaatactc

SEQ ID NO: 140086 - DNA, 620 bp, Zea mays
  Clone ID: MRT4577_59241C.1
cagaacataagaagatcgcgaacatcaaataaaacagactgctacagtcactctcatatgccaaaaagccaaattgtgtcaaaataccaacaaaaaagacacgaagaaaatgcaacttcaactacaaccaatctcgcaggattcgaacagacaagaaacatgggttctctgctttaatctaattgttatctttctcaaaaaaaaaccattccttaacgaccttcatgcatcaaaggcggataaagcctagcgtgcaccagcagggagttttagttactgtctgaaaccgccattttccactaaccctatatgcttcaaagaaccctccagaatttgcattttttgagaatatgaaagaggtgggaccgctcaaaattggcctcttgggggcctagcctcaccctctgagactcttatttgtcttccatccaaatctgctccattcaaggaattgatcgccttctgaacctcttgggaagagctaagtgtcacaaatccaaaacccttggatctaccgctgtccctgtcgtagataaccctagcttcaactacctgttcttgctcgttaaacaagttctcaagtgccatgtcatcaacaccccaagaaaggttgcccacgt

SEQ ID NO: 140087 - DNA, 291 bp, Zea mays
  Clone ID: MRT4577_59242C.1
atgcgcgcaaggaattggaaaacggtgcaggggcttacccggtccacgtgcgccggcgggttcttgaactccggtgagcgtgattgggctattccggtgacgagggcccccgggtcaagcttgagcaagtctcacggcttcaccaggaagctaaatgagggcctggatcgaacggaggaggacgggagaggggctggccacggtggttactctcgggcggcactggcgggtcgcgaggaggtcgccggagctaatggctggctcgggcaagtccggcgaggtacggaggag

SEQ ID NO: 140088 - DNA, 137 bp, Zea mays
  Clone ID: MRT4577_59243C.1
cgcgcactgcttcaagtgcacgcatcccagctgcctggtgaagaagaaggttgagcgctcgcgcgatgggcacgtcacggagatcatctacaagggcacgcgcaaccacccgatgcccacgcagagccgccggccag

SEQ ID NO: 140089 - DNA, 344 bp, Zea mays
  Clone ID: MRT4577_59244C.1
acccacgcgtccggccattggttacaccatattcattgatctctgttgtcggcttttaggactttaggcgtgatatggccttttagggttaagagggagaccatgttacttatattcagccccagcgagttgatgtctttgacatgctgctctgggactgcccgaggcacctgggatcttccagccacagggattgtaactaggcttgctgtcagaatgatttgtaaatgttccaccaggggcggccactgggagcacaggttgtgaccttgggacataaaccagagggcgttcgacccatgtatctttcaagaggtgttgcacaacgtctttggttttggagg

SEQ ID NO: 140090 - DNA, 352 bp, Zea mays
  Clone ID: MRT4577_59245C.1
ctggccaccaaacacagagatgttccttgtgctgttttctcgttagtcacacaatcttattcactttcagttgaatggtgttgtttgcatctttctaatccagccaagttgcatggttgcacatatgctttacagtttgcagcacaatgattgcagttttagtcaaaccagattgcatattttttgtttaatagttctttcaacgaagcacctgtggtttacttggcatcacaggtgtttgcatgtttctggttctctgtgtagattttttgtactcattttcttctaaacccgttgctgaaatatttaactgataacatggaaaaaattgctggtggtttacttgtttctg

SEQ ID NO: 140091 - DNA, 510 bp, Zea mays
  unsure (1)..(510): unsure at all n locations
  Clone ID: MRT4577_59246C.1
ccggctggcgcgtcgacgacctcctcttcgacgaccccgcgttctcagcggcatcgaaggccagcggctacagcgacgacggccacgagcaggtgccgtccctggacgccgatctgttcgacgtggtggccagcggccggccggggaagcgcggcggcgtgtggtcgaccggcgccggagcgctgggcttcgacaaggcgacgccggcgtccgtcgtggccgtcccgacgcaggggttcgtgagggagatgagctggaactccgacagcgacagcgacgtgttcgcggtgccggagttcccgcacccgccgccggccaagaaggcgcggccggcgccggcgtcgactttctggtgcttctgagctgtctctactgtatcagtccggtccggcctgtgtgtacttgcccgtgcgtgtgtgtgagcttcttgctgttgntactgcatatatacttaccagttaccactagtagctagcgggcgcttaatgcaagttaattaaggttactgca

SEQ ID NO: 140092 - DNA, 447 bp, Zea mays
  Clone ID: MRT4577_59247C.1
ctcacgcgtctgctccttctactccgcctgttccatccactacaaggatcgccatgtccggctcaggggaacaccacttcgaatcgaaggccgacactagggcgtacaaaacctacccgcaacaggctggcaccgttcgtaaaaacagcttcatcgtcatcaagaaccgtccctgcaaggttgtttaggtttctacctccaagactggtaagcatggccacgccaaatgccactttgtcaccatatacatattcaatgggaaaaagcttgaagatattgctccttcatcacacaactgttacttaagttaatatctgtctgttctctggttatctaacttattttgatagttcacttcatatgttactgacaagttcaatattttttatattccaaatgtgaaccgcactgagtatcaacttattgatatatcctaggattgatttg

SEQ ID NO: 140093 - DNA, 682 bp, Zea mays
  unsure (1)..(682): unsure at all n locations
  Clone ID: MRT4577_59248C.1
gggagctcaggcctcaaaaanaaanagcccgcgccacgccacgccacgccgccgtggacatggaggtggagctggagcacggcggggatgaaggcggcgacagagggagcgagtcctcctcctcctcctccaagaggagcttcggcgcttcttcggacgcaaccgtcagcagcacaccaagcaagctgcaagccctgaggtttgcagaggacctctcgctgccgtcggtgcaggtggtggtgatgagcgccaacatggggtgttcgcactgccggcagcgggtcgccaacgtcgtctccaagatgaacggcctgctggactacatggtggacttcgggaagaaggaggtgacggtgcgcgggaaggtggtgcataccaagaagaagaagaagaggcacatgagggcactgctgggtgcagcaggagcaggttgggacgacgcccgatcggcggcgtctttgcccggcggccatgccaggacgctgtcctggttttgggggtgctacagctcatgacggccatagctagtatagtctttatataatactaatatataccgcatatatatagagagactatcatacgtctgtatgttacatttatatgtaactagtaggagctgcgtatatatagttgttgtattaataatctgttagtagtaaaatatttcttctcctggtcc

SEQ ID NO: 140094 - DNA, 412 bp, Zea mays
  Clone ID: MRT4577_5924C.1
attcggctcgagatatgaactacatcttcttttgggttaccacaggattattctacggatagtgacttgcatcatccggtgttagattgcttctcagtggtttcatcttttcaagacaatatatctgcgtataaactgttgttgttttagcaaggattgagatgctttttttttgtttaggaacttcagattgtaaacatgaacatggtctagctgagggagcagtctgcagcacagagcattattctggaacttactttgtagatccgaggcatttagacatgtaggggcactgtattcactctgagggtgatacatcccaaggcccttggcaagatctaggcatacatgaagaacaagagagctgcatgtttatctctatgcaagccaatgaaagcggtggggctttgag

SEQ ID NO: 140095 - DNA, 398 bp, Zea mays
  Clone ID: MRT4577_59250C.1
aatgcatatatacaggaaacacacaagatgccgggggggcggttttaccattcttgtacagtcatgacataatgctggaacgatacacgctgggtggttgtctgcataacacgtgattcatggaactgaccatgcagagtggcagccatgactggtcaaccatgtactcttgtaccattgtgccattcatgccaaggaaagcaagagactgtaggtttaggcttgggtacgcagccacacgcgcttgactgccctggctgaatgagacgctgatcctcccgactggaacatgagccgttatgtaacgccatggcaagaactggtcgaagtggcggaagagaccatggtgaccttacagaagcacattgacacagctaagcacaactcgactacgaatg

SEQ ID NO: 140096 - DNA, 234 bp, Zea mays
  Clone ID: MRT4577_59251C.1
cttccgttaatcttaacagtggccgttgcgcgttcctctttgtcctcccacccaggctgcacagcgagctgcagagaacgcgtttcgcttgcctagagttgatgagcaggtccacagggcggtaatggccgcgaacagggcggccacggccgctcgagtggcggcgatcaaggcagggggggacaggatggatgggaagttttgtgaaaaaaaaaaaaaaaaaaaaaaggaaaa

SEQ ID NO: 140097 - DNA, 827 bp, Zea mays
  unsure (1)..(827): unsure at all n locations
  Clone ID: MRT4577_59252C.1
ccgtcgctcctccctaccgctctcgcacgacgagcccacagatgcggcaagatcgaatccatggcgagagctagcagaagccgcgggcttggtgcttgaaccctcgatccttcttggaggtcccccccgttccttctccttgcattgctcgcgttcctcgacgcgagcagaccagcacagagagaagaagaaaaaaaaaggagggttctttctcgcgtttcttctgtctattctgcggttctttcttgggagcagtaatgaggcggcatgggtggcagctcccgtaccatcctctccaggtggtggccgtgtccgtcttcttggcgctggccttcgcgttctacgtcttcttcgcacccttcgttgggaggaatgtgttccagtacgtggtcatagggctctacactcccctgcaaacccagctgatcccggggtcttcaaatcaaagaagtatctgagcttgtacggaagcggcaaacacaggcatctgaaggaatgcagaaagggttcttcagatgttcggttacaacttgagggaactggagaaaagcaagagcatgaggtcgcagcatctagcgagatgtcaatgactcaatacaaggacaatattccatcttgcatgagttcaactttctctgcatttctccttctattctaccctctgtcttttgttctctcctgctgtcagtcacatgaatggtcctctgaacagaagncacggaaggaagggatgtttttctgcagtctatggtgaagtccagtgttgaagtatagtaagcatttgcagagtttgtgacaaatggtggtggatggttttgatcatcact

SEQ ID NO: 140098 - DNA, 234 bp, Zea mays
  Clone ID: MRT4577_59253C.1
tcgttcacgcgtccgactatgcactttgagctgactagttgctacaccgaaggacctatgccgtacaggaaccgagaacgcgtgaactaaaggtgtaccggtccatcgacgtgaggcggagattggtacaagagcaaactagccgtgatcctacagcgaagaatttacacatctcacagtaactctattagaggctcgagtctggttagtacattggacatacactgaacgcaa

SEQ ID NO: 140099 - DNA, 489 bp, Zea mays
  unsure (1)..(489): unsure at all n locations
  Clone ID: MRT4577_59254C.1
tcccggggaaanaatccccggcttgatcgatacacaattctaaaaatcgagggggggcggttgtgatataataaaaattgcttcgggactgacacagctccacaatgctagccctgtacaaactaaactggtccattgtatgtgtccccaaagatcctaatcgacatcaccaatctaaaggctaaccagcacgccaatcatagggggggggggggtgcataagacctctaatcagccttcatatacccctgtctaagagcaattattaaatcgtcaagcgcagattactagctatactcccctttccttccctgcacactggagcctgtactggacaattctgtaccacccacctttgtcctttgctataaaggcatgatacatacccgtagacataaaaaaatcgtactcagccgtaaattaggaccctgcatgtgcatccttcgggacgcgaaatcacacttcatctataccgatcatctgttattc

SEQ ID NO: 140100 - DNA, 307 bp, Zea mays
  unsure (1)..(307): unsure at all n locations
  Clone ID: MRT4577_59255C.1
tgcatgcgcgtcgagcgcagattgttctgattctcatgttcaattgactatcccacatgagactacagtttataggcagtgaggaattgtatcttcctgggaaatgtccttccagcaacttcagaggaatgggaaagtgttaatcttacgtgaagcataggagcctggactaggggcagagagaaagaagcagcagcccaccttctttggggttgcacatgtgcctatgtcgngtacattggtacctgactgtggctcagatctgcgtcgcagcagcgagagaagagacactccatatccgatgaga

SEQ ID NO: 140101 - DNA, 122 bp, Zea mays
  Clone ID: MRT4577_59256C.1
ttgtcttatcatgttccacacatagcacggattgacggactttgtgctctttctatattctattcacaaagcatcctcatctctccccatgcctctcttactgagctcactttcttttataa

SEQ ID NO: 140102 - DNA, 472 bp, Zea mays
  Clone ID: MRT4577_59257C.1
gcgaggtgccacacccccattgaaaatgggccgttcgcttgttctgccatgcgctcatgcgtgctgcatactgtacctgggaataaccacttgtactcatgcgactgcagcactgacgcacgtgaatgctagggatgaactctggaatgcttctcggacgaccgggctgctcaaacaggatctgatgcacaaagtcctcacccaggcctgtgacctacttgacctgaacaagcgctttgcggacctcataccaacactctatgaccaaaaggtgctcactaaacacctaaacacctttcttctcgctcaagctcataaacttaacggccgtcaacttttcgtcaaagacgttcaccctgttgtcaagtacttcacggtggctgtcaaagacgactacactgttgatctgccgcttgaccaaatgctgctaaaccttctgctgcaaactatcgactcgggttctattccgaac

SEQ ID NO: 140103 - DNA, 631 bp, Zea mays
  unsure (1)..(631): unsure at all n locations
  Clone ID: MRT4577_59258C.1
tctttcgcggncgcgtgggnaaaaaaaaaaaaaaaaaaaaaaaaaaaaaaaaaaaaaaaaaaaaaaaaaaaaaaaaaaaaaaaaaaaaaaaaaaaaaaaaaaaaaaaaaaaaaaaaaaaaaaaaaaaaaaaaaaaaaaaaaaaaaaaaaaaaaaaaaaaataaaaaaaaaaaaggggggccctttttgggggtgggggggtggggcccccttctttccaacttttttttttttttttggggcccctaaatttattttattggcccgggtttttaaaccgtggggtggggaaaaccctggggttcccccattttattgctttggaagaacttccctttttccccggttgggtttttgggaagggggcccccccgtttgccttttccaaaattttgccccccttaatgggaaatgggacccccccttttccgggctttttagccgggggggtgggggggtttcccccccgtttaccctttccttttccagggcccttaccccccttttttttggtttttttcctttctttttccccccttttggcggtttttccccttaagtttttaaatggggggttctttttgggttcccgttttagtttttacggccctttccccccaaaaacttttttt

SEQ ID NO: 140104 - DNA, 404 bp, Zea mays
  Clone ID: MRT4577_59259C.1
gggcaggaaaaaaacccgggttttttttaaaaaaaaaccgccgggccgggcccttttttttcacaggggtttttggggttccctgcctgggaaagggggggcccacagttttacccattccaaaggcttcaccggaatccattttgggcccccccctccacaaggaaatcattttttagccgggcctgaactttttttgggggggcccccaggggaatcccttttgcagctttttcagcgggggaaaaacagggcttgaaaaaccccccatcccggtttggccacccccccaactttccaggggtgtcctttgccccgagggaatttgcccagggcatgaccccccccctttagggggggacccccatgccaaaaattgaagcgatgtttaggtaaaaagcctt

SEQ ID NO: 140105 - DNA, 726 bp, Zea mays
  Clone ID: MRT4577_5925C.1
ataatcaggaagctaccaaaccagatcggccttccccctcctgcgagaaagatcagatccgctttggcctccatcgaatcaaattcccaaatccctccgccgcacgccatggcttcttttccgctgctctttttaccgccgccggttgtcggccacgaatcgggcttgttcaaccctcgcgttgacgtgggcggagaagctctgtccaccgcggcggccgcctacaccaccacaagcaacgactgccgagtccgcgtctccgtgcggctcgaactcccccccgcggagtcctacctgcacatgcaaaccgacgacacgctcctcaaagatcccttggtgctggctgcctgcggcgacctcctcctcgtccacatggtcgtccacgacgctgccgatgatctgtcgtgcaagcagaacctcttcgtatacaaggcccaccccactcgcccgtcgctcagtcgtctccccaatcccgacaccttcaccggctgggcccaatcttgtggcatcgtcccctgtgacgacgggggtttcgttgtggcttcttttcggacaatcaagactgacttagatctgcaaacaggattggcgatggagcgtgtcgagttcttgcactattctcctgccaccggacactgggatttgaagagtccaacaatgccctacgatggcgaggccctcaagccgtgcctatgggagacagatcaggtattctcctatccagat

SEQ ID NO: 140106 - DNA, 356 bp, Zea mays
  Clone ID: MRT4577_59260C.1
gctagctttctcgtctcttggcacggatcagctagacaggctaattggttctgtaaggagggggtacgttgcgatcgaggtcatggtcatgtcggggatctctctggacggtggcgccgaggtccgaaccggaccacgggtcggagcggcagccgacagcaatgctgggcggagggatgggctccctccttatcatcaagctgaagttggtggccttcattatggtgtactgggcatctggcctaggcccggtcatcgacctcgtggtcttcatcagcactaccgtggacctcctaggcatgtttcgcctcgactacactgcgttgtaagccaccaagttgttcaatgcagatgac

SEQ ID NO: 140107 - DNA, 582 bp, Zea mays
  unsure (1)..(582): unsure at all n locations
  Clone ID: MRT4577_59261C.1
tttttttnnnnnnnnnnnnnnnnnnnatttatggatggcaattaataactaccgcgcacgtcgtacaaggtccaaacagaatggaaaccttgaacacgcatgcatgcctaataattaaccatatatcagtgctccgacggcgggggagtacagctgatgtgcacgtcactggatcgacacgacgccctggcagccgatttcgcgcccccgaccaccccatcaagaaaccgccgcgccaacacggaacgcagcagcgccgccgccggcctcccgttcctcaacccgaccccgacgacgtcatcgtcctgttgcttgccgcgcgcagatgtcgccgtcgttgccgatgacaatgccgcggcggcggcgccaccgccttcctcggcacgggtgctgctactagtagtcctgcttccgtcatcgtcctccgtcgtcgtcgtctccactgccgccacgcgtccagttccggtctcggcggcggctcggtggtggtgcgagcgcgactctgcacggtgggcgggcgctggcgaggccgtgggatcaacgcgcggtcgtcgtcgccgttccttcgtggacaacaacggc

SEQ ID NO: 140108 - DNA, 642 bp, Zea mays
  unsure (1)..(642): unsure at all n locations
  Clone ID: MRT4577_59262C.1
tcgagggcnncggccgggcacggaattacttctcactggtggccgtgatcatactcagaggaggagagacctacatgtgttgctgcttgtgactcccccaacccactatgaaaaaaaaccttctctcggcccctgacgcctgacgagagagtttgtagtatgctgccattcggtcgctgcctccttttcggcacgccgctggaatgcgtcatcgctgtcatgggtggtctcccatccctcggcgacgacgtaatatgaaactagaaagatcgcctgcagtctgcacctttgcacatggactatgcgcctatctcaggccgtacctcagcgacctgccatgggccaccgactctgaaagcattgcttgccttgactgcccgatcctctcatttctctctctcctcctcgctagtgtctgcggcgccctgatggtctctgactactggacagcgaatgtgagtctcctttgatcctgctctgattcttctacgctggccgtctcaaggcttgcgatcggaatcggttgtgcaaccagataacagatgttccgctctgctcagagagattcacgaaatctgaacacaagtaggatagagtgagggcgagaagaacaaggcgttgctggacatcgaaagagagtgc

SEQ ID NO: 140109 - DNA, 1182 bp, Zea mays
  Clone ID: MRT4577_59263C.1
gtgtttgttttttttttttttttttttttttttttttttggccgtcagaaacggggtacaaattgcactgccattgccttgccgccgagatctcacgattcaataacagaacaaagaatagcccagactgctgtcgaggtagaacagtagtaacatcaatgtattcgacacacacaaaaacatggatccaactaactccagtaggaccagtacaggcaaaaatgataatgcatctggttttcttctaatacaaatcccaccgccagatatactcggaatactccattaactcgaagcactagaagagaccaagagggtctaatatcttatggtgacgcttaggcttaggaggtgttggcttgggccttgttgaggatcacaccctcgtacttgacctggaaccacttcatggcgtcctccttagtgaccctgtgctggatcccaacacggggacttggcacctgcggcgacgggcgacacggtacccagcacgctcaaggacgacgtagaagtccatgccgtagataccagtagatggatcatacttgatgccaagatcaatgtgctcttggataccaaatccaaagcagccagtgtcactgaagttcctcctcagcagctcgtactccttcaccttcaagccactctccagcagctgcattgccttctcaccccgcaccgtcacatagcatgcgatcttctcattgcgccggatcccaaacgacctcacagtgtaccttgccttggagaataccggtgactggccgctcagctgctccagtaccttggcggcgcgggtgaggcgatcaccgctctcgccgacggagatgttgagcacgagcttctggaccttcatctcccgcatcgggttcgactgcttcttctccgacgcctcatcggccctctcaaacgacgcccccacctcgtcgggcaccacaatctgggtaatttgtataaggtgaaagaggagttgacgttgcaggatctgattccgtggtggcttctgcggtagcgtcctctgctggtgtagatgtttgtgtggcagcaaattgagtcgctgttgctagtgctggttggcttttagcatcgccaggtaaaggtagtagagcctgcccgatttcctcgtagatgaaatgaaggaattttgtaaaccataaatttttgccatgaatattcaaaaac

SEQ ID NO: 140110 - DNA, 356 bp, Zea mays
  Clone ID: MRT4577_59264C.1
cggacacgtgctctgacacgtgggattcgttcatcacctctacaaaattgcccaccaggatcaaactatagcctttctggcatagacattcaaccttcccctgttacacctcaatatgatgatcttcttgatggtacttcctcaatcacatctcttccctattagaatactgcttaccatacaatcacagcattccatattgcaacctacatgatcacattccttttcaaaaagcaacctggaaaacctcaggagactacaagtaatgcttcttctacaaatctagcaactactgcattaacatatttacacttccatgcagcccttccaaagttcatacagcagcgtatcgaccc

SEQ ID NO: 140111 - DNA, 229 bp, Zea mays
  Clone ID: MRT4577_59265C.1
ggccccaaaaccaaatttttggaatgccgggttttttaaaaaaagcggccaactttaaccatgggcccgttttttaaaacaacaatttttccaataaaattgaagggggtaaaacccctttccgggggaaaaaacagggtttattgtgtttaaacaaaccctccatttggatgataactttcaccacctttcctttgggggcctccatgatgggaaaattttggccatt

SEQ ID NO: 140112 - DNA, 272 bp, Zea mays
  unsure (1)..(272): unsure at all n locations
  Clone ID: MRT4577_59266C.1
cttgcgccaagggaaacccttgtgttggtccagccgcccctcggcccgccggaccaatcccaccccatcccaacgctatccgctgccctcgctgcgcccccctcctcttccacctggtccgccaccttccccaatgcatgacatcccaccctaccccaccggccccgtcgccgttgaggaggaggcgtccccacccccgtccgnanaggcagcagggatctataccgggcatggagctggcgctcgccttcgcgaagccctggcctcgggcg

SEQ ID NO: 140113 - DNA, 246 bp, Zea mays
  Clone ID: MRT4577_59267C.1
aaaaaaaaaaaaaacaagaaaaaaaataaatataacaaaaagaaaaaagaaaaagaaagaggaaaataaataaaagtttcaaacaaggaataagtaacttaaatcacgacaataaaacgtgacacggatgcgggccgcggctgaagtgacgatctctaccttgacatggaacgacataaagattccatgcagtcgcgtagttatgattccataagccaccgcttgtcatattcaccaatgcggaag

SEQ ID NO: 140114 - DNA, 1090 bp, Zea mays
  Clone ID: MRT4577_59268C.1
caacgggcggagccggacgtaagacctctgagccgtgcacatttactgtgggtgaggcgcgccgcctgtcaaactggcaggtgatgtgcctcagcattaaatgtgccatgtctactccactgacaagcgatatgctgcctcagtatttaatgtgccctgtcactctactggcggacggcgattagaccatcccgcaggcggtgtgcctgtccattcccgtggcagacggcacgtccatactatcgcatgtgccacgatcatcatcactcgtacattgccagggaagctttcgctggacgccaatgctacgcagaccgcggatatcagggtacaagaagattgcactggcgactagcattagttgctccaagtattacgtctgttatgttcctgggcccacatgtcggggctcagcacccttgtacgtgcccccttgagctataaaaggggaggcacgcagcgttacagactcaagctcactcagacacacttagacccagctcaggctcacaagttcatacaagctctcaagctcaatacatcacacattggagtagggtattacgctccagcggcccgaaccactcttaaacccttatgtgttcttgtgttcgttcatcgcttagtagacaggcaaaacacttaggtccctccttatcttaggatttagggcaggtgcattccgccacccggtcggagattttctctccgacaacttgttaagtagagaactacagatcaaactctatacaaatatgtacttatgtgatacttatctcacaggttcaagagagtatgggatggagataggcaccattggacttggagtggaggacaagatgttaccattttgcatttccatggagcgtggagacttctgagtgcttcaatctttttattaaaaatcagtctgagcgatgatgagtctaaagagactaagactatatcataatctacgatggatttaatctataaggtggatatatcacatatggttgccaatcttgtatatttcatatttgcatggttgtagttgcactgttgcaatcttaagacctgtatagttgcatatttgattgtgtttttagag

SEQ ID NO: 140115 - DNA, 784 bp, Zea mays
  Clone ID: MRT4577_59269C.1
gcacgaggcctaccatggtggtgacgggtgacggagaattagggttcgattccggagagggagcctgagaaacggctaccacatccttcttgattgttatttctccgactccccggccggcaggtgggacatgagcaaccaaccaaccatggcggcggcccccgtgcgcgcttgggtgctggtgctggcgctggcgctggcgtgcgggctgctccagctgcggccgtccgacgccgcggcgccagcccagccggttgcggtggcggcaacgatggtgtcgtcgggcgccgcgaagcccaagtgcgtgcccggcgccaagaacgacaaggcgtgccgcgtcggtgccgtgcacgacccggagaaccaggaggaggagggctccagcgtcaccctcaaggcgcccgccgccgcgcccgacgacagcgacggcagcgactacaacgaccccgacgagcccaacgacaaccagctcatcgtcgtcggccactgaagctgccgcgcgccgacccatggatcatgcatggagattcgactgggtggatggagtggaccggccggttaacggatctctcggtgctaattcgtgatcttgaccggtggaagcagatggggtttgcatgtttgtttcattcttgcattgattgttcgttgttaactagtgtatgatgaatcggtcgttaacgcttattaatcaaaaaaaaaaaaaaaaatttgcggcctgttcaaaaataaatttatggacaaaataaaattttgacacgtataaattgtaaataatacatag

SEQ ID NO: 140116 - DNA, 237 bp, Zea mays
  Clone ID: MRT4577_5926C.1
actagttctagatcgcaagcggccgcccttttttttttttttttttttttttgtaaagaatcaatgtcacatctccattactcataacaaaatgttctatcaatttcgactccaaaatatttccaacaagattttggtcgtactaaaaacagagaaagggagaggtgacattgattctttacaaaaaaaaaaattgtgatatgaaatgtgggtcgctcgtgatgaagatttttggag

SEQ ID NO: 140117 - DNA, 253 bp, Zea mays
  Clone ID: MRT4577_59270C.1
gaaccaccttgcaccgaccgcgcacgtctacatcggccacttgaacgatagatagagaggcacgagggatccggcgcttgttaccggacattccctgatcctaatgcacgcctgtctgcggcttgaagcccatactggggagggccattgccgctatcctggctctgccgttaacccggtttactaaagacaagctcggactgctggtgaaatcacttgcccgatcggggacaaaccagtctgatgtcgctga

SEQ ID NO: 140118 - DNA, 392 bp, Zea mays
  Clone ID: MRT4577_59271C.1
cccacgcgtacgcctgcctccacatcgcctgcatctatggccacgagaggttctgcagggacgtcctggcgctgacgacgaacagccagcagtctccggcggcggcgcctcttctcgtgaccatcaacgcggatggcgagacgccgctgctcgccgccgtggccagcggccacgtctccgtggccttgtttatcctcgggcgctgtcgggaggagcggctgagcgaggcgatcctgacgcaggacaagcgcgggttcaacgcgctgcaccacgccatccgcaacgggcaccgggggctcgccctccagctggtcgacgcggagcccggcctgtcgaaagccgtgaacaaacacgacgagtcgcccttgttcatcgcggtgatgaggaactac

SEQ ID NO: 140119 - DNA, 264 bp, Zea mays
  Clone ID: MRT4577_59272C.1
ttggtttttttggcgccggatgggtccttcttctggagactcttgaagactccaacaggaaccgaatgcctcatgtcgcggacggcaaacctacccaggggaggatacgcggagaatgtctccaccaccataggctcggagggaatcatcctcaccataccagcatcaccgctcataaggaactcgggctccttctcgagctccttgccagatcgcctgccgatcttggaaaagagctcagcaaacttgaccgcgatgagggag

SEQ ID NO: 140120 - DNA, 172 bp, Zea mays
  Clone ID: MRT4577_59273C.1
cgggtaggctcctcacctcgtttccatgtaaaagcacgtggagtgtgacctagtgtctgtgtttgacgagattttgtgtaagaattcttaaatgtacatgtatatttatatatgcctgttaaatataaaaaaaaaaaaaaaaaaaaaaaaaaaaaaaaaaaaggggacaata

SEQ ID NO: 140121 - DNA, 712 bp, Zea mays
  Clone ID: MRT4577_59274C.1
attgggtacctcgaggccggccgggtttgtgttgctttcttggatgataatgagtcgcaaaaaatactcaagctttgcatgcaaggcatgcatagtgacagaatcacaaggtacacctgttaaatttgtgaagggttgagctaccttcagtactaattcaactccatctgtttggagatattatgctgaggtaatggttcagtatattcagggaccagcgttgtctgcatggtgcagttgcacagttctgcctatgttcactttccaaaagtaaatttagatttccctgcattttaactaacctattacaatggtcatggtcttgaacttttgatcaatgttgccctctcttttacaaggttctgtctaatgtgaaaaagagtctgatttgtgcctgcagcttcgaaatttggtatgggctacgtccaagcatgacatctacctagtatcacattactcaattcgtcattggtcagcattgagtggtgtcgatactgaacttatcaacgtccaaggacacgtggcaccaagggagaagcatgcaggaagtttatcagagggtttttatcagactcaagttagtaccttggcagtcaaggacaatttactggtagctggtgggtttcaaggagagctgatctgtaaacaccttgatcgggaaggtattagtttttgctgtcgaacaacttatgggtgatatgctattacaaat

SEQ ID NO: 140122 - DNA, 256 bp, Zea mays
  Clone ID: MRT4577_59275C.1
tcaaccattatgtgtgctcatgatgggaccagtgcaccgcttggagcgggttcagcaaaaacttgagggagaacttgggggaacaaatacgcactgtgcgtaccctatgagaaggtgtgtatccgaggtggtgtccaacagttgtaaaccgcatgactggggcctatttgtacccgtcgaaaactacacatgggcttggcacggccccccgccccttatatttttacgccatgcttgcagtgcacctgggctagat

SEQ ID NO: 140123 - DNA, 444 bp, Zea mays
  Clone ID: MRT4577_59276C.1
cgggaagcaaaggacctggccgggggggagagaaaaaaaaagagaaaggaaagaaaaaaccaacagcaaagggacacggcgacccgcagcaaaaccgaacgacagagacgacccacgggacgagcaacaaactcacgcaggagccagctagctaaccagcccccgggggggggccgacgggcgcggacaaatcactgcccgggggcttgcaggcgacgaaacagacgcactgggggtggttcgatgttgggcaaccccaggacccgctggaaggcctccggccaagaatggacggcccccagcaacgcctggaacacccggggggcggcgctcaagccgaacatgggcagctcccacatgggccaataacggccgcgacacaagcacggggagggggagttcccgcggaacacgaagccgacctcgcggacaccgaggcagggg

SEQ ID NO: 140124 - DNA, 720 bp, Zea mays
  Clone ID: MRT4577_59277C.1
cggacgcgtgggccgggctccggcaccggcgccaccaaagctctggcagcagcagattcaccgtcctacaaggagctacagaagaagtttggcagttcgaaagaactgatcgagtcggcgaggagcatcatcacgtcgaaagaagcgccagctgcggtggcagatctaacgagccgcgtcgaagtggcgaagcaagtctctgcctgcagctacgagacgggcacgagctggggtcaggaggttggctgggtgtacgggtccatgaccgaggacgtcctgacggggcagcgcatccacgccgccggctggaggtcggcgctcctgagcccggacccaccggcgttcctcggcggcgcgcccaccggcgggcccgccagcctcacccagtacaagagatgggcgacgggcctgctggagatcgtcctcagccgccacaacccgttcctcctctccgcgtccaagcgcctccgtttccggcagtgcctcgcctaccttgtcatcgacgtgtggcccgtcagggcgcccttcgagctctgctacgcgctgctcggaccctactgcctcatcgccaaccgctctttcttgccaaaggcatcggagcccgggttcgtcgtcccgctggcgctgttcctggcctacaacgcgtacaacctgggcgagtacgtggactgccggctgtcggcgcgcgcctggtggaacaactcagcgatgcagcggatc

SEQ ID NO: 140125 - DNA, 565 bp, Zea mays
  Clone ID: MRT4577_59278C.1
acacattaatttaactttaccaagacctgcttttgtgacactgttacctcgttgtagcatggcacagcgtcacagaactctcatgcacaagctagctctctttatctggctgccatgggcgaccacacacacatgcacctaacaatatgtataaccacccgtcagtgagcaacgaccaggagcgctatccggattggcacctcaaaactgaaaagagccatccccatggacacggaaactcactaatagtagtccctagctttaggttattatctttggatcacgcacatgcgccttgtgtaaccgtctcaattgctgaatgaaggacggggcataggtttcaggaagctccatcactcgtgataatcttgctcgctcctgattatccttttcataatcctcgtgattgacctgccacttgtacttgtaacactcctcttgattttcctcctcttcctccttggcaggagccttgttatcttcatggctctcgcacttgttgatggcagcgatggccttattgcactcgagctcgagctggatagccttgggtacatagggagcc

SEQ ID NO: 140126 - DNA, 181 bp, Zea mays
  Clone ID: MRT4577_59279C.1
ggatgcactagctgacacaggttaccatgtggcctgactaaattgcgcactggactggaatagccactgcttcaccgatcgatactcagcctgtcatgtcgattactgctcagcatgcgaccatgactaccatgaggatgaaccgcaagcaatgcgacgagctgcaatgatgataccgcta

SEQ ID NO: 140127 - DNA, 311 bp, Zea mays
  Clone ID: MRT4577_5927C.1
ttttatttatttttttcacaaggctcccattaccgacaagactgctacctcagaagtaactccacccctaaatactgaaggacaaaatcctgttgtacaggatcctcccacatatggtgccccaaagtttgatagaacccctctgacagaagcaactcctgaactggttggaaggaatatttccactcaaactgcagttgttgaacctcgccatgtatcacgtgaacaatgtgctcgccaattatttaagttcatttattcccaacaactagacccgagcatgaccatcattgattttggaggatatggtg

SEQ ID NO: 140128 - DNA, 1051 bp, Zea mays
  unsure (1)..(1051): unsure at all n locations
  Clone ID: MRT4577_59280C.1
ccggccggggtgattcgcccgccgcccgccagtcgaataggtcagtgtgcacgcgtgaccgcgaaaagttgtttcgacctcctcggctgctgctttccgctgacctcgccgtgccattgagatgtcatagaacctgccgagccggtcgcaggcgcgaggagaatggggacggaggccgacgccgcagccgtggactcgcttcggtcgcagatcccgttccagaccgacggggagctcatcctcccgccgcgcgatgtggggctcgtcctcgtcgacctctgcaacggcttctgcaccgtcggcgccgggaacctcgctcctgttgcgccaaataagcagataagtaaaatggtggaagaggccgctaggctctctaagctgttctgtgatagaaacctgccgatctttgcattcctggatacccattatccagataagccggagccaccgtatcctcctcactgtatcattggtactggggaggagaacttcgttccagacctggagtggttggaaaaggagccaaatgtgactataaagaggaaaagttatattgacggttacatcagctgcatagaggaggacgggtctagtgtttttgttgactgggtgggaaaatatcagatcaaaactatcttggttcttgcgatatgcacggacatctctcgaaagcattgagcaagctcaactcttacgagatatcgtgatttattcagaggggtgcgcctacatatgactttcctgttgagatcgctatgaatatcaaaggagctctttgcccatcctcaggtaccgtatcactgatgtccatacattaaaaaatatcagccgtgcactatgggaattttcagatgaccacaatcacatttgtacatatgtaaaaagaatgaacgaaaaattaacctcggagaaaaaactaaacctagaaattttcaagatgaaactgctcaatccatttacacattagggtgattgctttttctccatatacaacacctttacaaaatttatttcatgccaacatcaagaaaagtttgcaaatgcaangaaa

SEQ ID NO: 140129 - DNA, 1264 bp, Zea mays
  Clone ID: MRT4577_59281C.1
cattgggtacctcgaggccggccgggattaagatctgtagtgcgtgcagcaggtactcggccggccgggagtgtgcacgcgtgaccgcgaaaagctgtttagacctcctctcctctcctcggctgctgccttccgctgacctcgccgtgccattgagatgtcatagaacctgccgagccggtcgcaggcgcgaggagaatggggacggaggccgacgccgcagccgtggactcgcttcggtcgcagatcccgttccagaccgacggggagctcatcctcccgccgcgcgatgtggggctcgtcctcgtcgacctctgcaacggcttctgcaccgtcggcgccgggaacctcgctcctgttgcgccaaataagcagataagtaaaatggtggaagaggccgctaggctctctaagctgttctgtgatagaaacctgccgatctttgcattcctggatacccattatccagataagccggagccaccgtatcctcctcattgtatcattggtactggggaggagaacttcgttccagacctggagtggttggaaaaggagccaaatgtgactataaagaggaaaagttgtattgacggttacatcagctgcatagaggaggacgggtctagtgtttttgttgactgggtgggaaaatatcagatcaaaactgtcttggtactcgggatatgcacggacatctgtgttttggattttgcaagctcaactctggctgctcgaaatattgaccgagtgcctccattacgagatgtcgtgatttattcagaggggtgcgctacatatgaccttcctgttgagatcgctatgaatatcaaaggagctcttgcccatcctcaggacctgatgcatcatattggactctatatggccaaaggaaggggtgcaaaggttgttgacagggtggttattgaaccttgaataaaaaaaacttccctcatcgtagtgatgttgctagagtttcctgtcttctcatccttccattgtaacaatcagatatatatgcgtcttagcataaagttgttgagatactaatgctagcgacaactatgttgacttgtcgagtatgtagagatgggctcatcattttgtggtgagcttgtacatatttcctgagattactttgtcctgccaaacatgcgccagttctccattggttgctaatgttcggctctgggattgtatattcgtatttaataaaagtactccctcctattccaattcgaaaaaaaaaaaaaaaaaagcggcc

SEQ ID NO: 140130 - DNA, 1069 bp, Zea mays
  Clone ID: MRT4577_59282C.1
cacgttgtcctctgttccatccccgttcgttccacgaaccaaaccaaacacgctccacaaaaagaggtcagtgtggacgcttgacggcgaaaattatatagacttctactcggctgcatctttgctccggtcgatgcacgacaagaggagaatggggacggaggccgacgccgcagccgtggacctactccggtcgcagatcccgttccagaccgacggggagttcgttctcccgccgcgcggcgtcgggctcgtcctcgtcgacctctgcaacggcttctgcaccgtcggcgccgggaacctcgctcctgttgcaccaaacaagcagatcagtaagatggtggaagaggccgcgaggctctctaagctgttctgtgatagaaacctaccaatatttgcattcctggatacccattatccagataagccggaaccaccatatccccctcattgtattattggtactggggaggaggactttgttccagatctggagtggttggaaaaggagccaaatgtgactataaagaggaaaagttgtattgatgggtatatcagctgcatagagaaggacgggtctagtgtttttgctgattggattggaaaatatcagataaaaactgtcttggtgctcgggatatgcacggacatctgtgttttggattttgcaagctcaactctggctgctcgaaatattgaccgagtgcctccattacaggatgtcgtgatttattcaggggggtgtgctacatatgaccttcctgttgagattgctactaatatcaaaggagctcttgcccatccacaggatctgatgcatcatattggactctatatggccaaaggaaggggtgcaaagatagttgacagggtggttattgaaccttgaataaaaaaactttccctcgtcacagtgatgttgctagggtttccttccattgtaacaaccagatatatatatgcatcttggcagaaagttgttgagattttttataatgctagcgacaactatatattttttttaaaaaaaaaaaaaaaaaaaaaaaaaaaaaaaaaaaaaaaagggcgg

SEQ ID NO: 140131 - DNA, 279 bp, Zea mays
  Clone ID: MRT4577_59283C.1
atcacgcgacgagctcggattcggctcgcgcccagagcagtggcgagtcgcagcgcgtctccgcaacgcgggccgcaacatcgaccggcagatccgagacgtgcagagggcggacacgcaggtggagacggccatcagggaggccgctaagcgcaacgacatcggatccgccaaggcgctggccaaagcggtggtgcgctcgaggccggcagtcaaccgactgtacgagcacaaggcccagctgcaatccatctccatgcagcttggcgaaatcgttgc

SEQ ID NO: 140132 - DNA, 913 bp, Zea mays
  Clone ID: MRT4577_59284C.1
cctcgaggccggccgggccgggagattagctccctctgcttcctacccctctaaaccgaactgcttctgctttgctcttcatctttggagtgaactttggtctaacgattcagaagtgaaagctgctaataggagctgcacaactgagagaataattccagaggggctctttctcttccgtcaaaggggttcaccgatgtcgataaagatgaaggggatcttcaaagggctgaagataatttctcaaatgtttgcgcataaggagcaggagatggagattgggtaccctacagatgtaaagcatgtggctcacattggtctgggcaccagtgacacatctccaagctggatggctgaattcaagggaacagatgattcatcagcaggctctgtgagcacagctgcgcagtcaaggcagacttcttgggcctctgcagacttcgagcagccgagaagcatgctgcccatcgacatcttccaggacaagaggcccgggcaaaagaacccggacgtgcaaaggggggaaaaaaaggcgaggaggaagaagacgaagaagaacagagcgtcgtccccgcccgtttcgtccgcaaggtcgttttccgcgaggtccacagcctcgtttgcgacggcgtacgaccccttcagcgagtcccaaagagggttcccggtcgcctaaatgaatggcgcgccccggccggacggaaacaaccaccatgcgtgcgtgaactgtaaatgctttcggattagggagacagacagcttggtttggattgtttgattctttgtttcttttttttctcggaatctttccagtaatgtgtacaatggagatggaaagggagatcgaatcaagttagtgctgagcaaaaaaaaaaaaaaaaaaaaaaaaaaaaaaagaaaaaaaaaaaaaaaa

SEQ ID NO: 140133 - DNA, 287 bp, Zea mays
  unsure (1)..(287): unsure at all n locations
  Clone ID: MRT4577_59285C.1
gggtccacccacgcttccggtcaagggcccgncaccgcttgcgctttgtttattcccagcccaacctccccggagggcggggatccgatcgccaggggcccaccgcccacgccagccggcagctgcactggcccacataaataatcgtgcgcagctagcaagtgcgacttaaacgaaacggaagaactctggctgagcggaggccgactttgctccgactacgccttgcagcaaacactggcgctgcgcaagcccacataccggtacatatactacacgatgctgct

SEQ ID NO: 140134 - DNA, 191 bp, Zea mays
  Clone ID: MRT4577_59286C.1
caattcaaagcggcccaaacctgtataaatctacgagcaataccgacgtgcctctgcacataccatcgagtcgcaatctacaacgtcgtcctacccaaaagcatcacgtgggtaatctgtggtgcacagtcgggtcacaaacaccgacaccatgcctaattttttcttcaacttacttttctccataaagt

SEQ ID NO: 140135 - DNA, 384 bp, Zea mays
  Clone ID: MRT4577_59287C.1
aagctgagacccgggcaggtacacctccgcaaaattccggtcgacccacacgctcttaggccaaggataccacttcctgggcacggggatctttaagctcatcagggggaccgccaccgacgccggcggataagctcgacccggctggcttaggctggctagcctgagacgatatgatcggggagagacttactagcagacttccccactggtacctgaagatcagcgaggtaggggcctacattggggcggccatggacctcttcatgatccacacgggcttctactagaaggacactgtcttggaggcagaaaaacgagtctgcgaaaacaagccagaaggccaagcaatgagagaagatctgaatcaatgccgcaagcatg

SEQ ID NO: 140136 - DNA, 339 bp, Zea mays
  Clone ID: MRT4577_59288C.1
cccaaacgaggaccagaacaaaacaccctctatagttcaaaaaaaattaaacagtgctaaacagcggaattaacatcccaaaacacaccggcggagacaatgaacaacatgtccattccttgccaagcctcagggccacttgtgggccttcaaagcaccaacaaaaacatagttagaacactgccgttcattttcctaccgttttttgagacggcacagggaaaaacaaatgctccaaaaccatttgttaaaaccctgaacaactaggtctcgcgacacaccaggttttgtgggacaaggcctcttggggggcatgataaattatgccccaactaaggc

SEQ ID NO: 140137 - DNA, 537 bp, Zea mays
  Clone ID: MRT4577_59289C.1
attcttctctctatacaccttgcctctttgggagttgcgagcgacgaatcgacccccactcgacgaagaacggcgcgccgccgacgaactgccttctcgtcacaggcgagagctctctccacagcatgctccgtgataccatcacaatctcatgcgcagaatctcccaccatcaaccacgtgaaatgcaggatcccggagaaggatcaaatgacgatgtaccaatactgcatcaacataacctcaccagaaatgtagaatgcgcgtactatcgtcgaatattattgccaaaaatagtcgaagctgctgctggagtttggccacacacaaggttgatggaatttgatctactacattctgataatgatggatgaaactattgacctcttcaagaaggtgaagctctccgtgctccagtactacgatagtgacgacaccatctcaaatgacacgacgtcttcggagggctgatgccattcccgatggtttggacatttgcttatgtagatcgatcacatctactgacactacatgagaa

SEQ ID NO: 140138 - DNA, 136 bp, Zea mays
  Clone ID: MRT4577_5928C.1
atcaggaacagggtttccacaatatagcaggtaattagttttgacgtaacacccatttgtccaaaccacaacaattgtgatggctaaagaccaaggagggacttgttggcaaaaaataaaaattttgaaatttttt

SEQ ID NO: 140139 - DNA, 491 bp, Zea mays
  Clone ID: MRT4577_59290C.1
gggggggggcggccccacccttcgggcgggttttttttgaaggggggggggaataacaagggttcatggtcgggatggctttccgggggaaacacccggggggggggggggattgccgacaaaaacacggttccttaatggaaaaggggggttttcctgggccattttttacccgcccgatttcaagggcaaaaaaaacaggggtttaaaaagggggtccttaatgaaaaaagaagcttttttcgggccccccggacctgggggggtttaagggctggaaaaaggcctttccaaaacttaggggggggcttaccagggggcgggggggttcctttcccaaagtgggaaaaccttttggcgacctttcaccctggaaacgtttttatgatccccgcccccctctcaaaaacttttttcactttttggaaaaatttttaaccctttttggttgggagcttgggggttttacactgggagcaaaaatttttttt

SEQ ID NO: 140140 - DNA, 283 bp, Zea mays
  Clone ID: MRT4577_59291C.1
atctttacaattggtttacctcaggatgacgtgcagataaatgggtgaaggataaaccgttgagacgtggccccactggtaggatggtcctcttgtacttcgtgtgctccgacccatggtgacgatgacacaccctggtggcatgcccgtgtatgttagtttagcgttgtctgcattgttctagagtgaaacaggtgtcaggctgtcactgttcacacaaatttttaataagaaacatttaccaagggagcatctttggactctctgtttttaaaaccttctg

SEQ ID NO: 140141 - DNA, 269 bp, Zea mays
  Clone ID: MRT4577_59292C.1
atgaggcctcagcagctgcaattggcttacagcacatgcgttgttacatgttatgggtgaggacctacatacactcttacacaagcagtcacttaaccttctccagcaaggcagttgtggggttcaccaggatttagtgcctgatcttttttttgggaatgggcggttatgaatgtgttggtcttctgagggcagctaaagacaatgggagtgtgagtgagtgtgcatgtgtctgaagttcaccattgcccccacctgcacctagcaag

SEQ ID NO: 140142 - DNA, 641 bp, Zea mays
  Clone ID: MRT4577_59293C.1
cgggagttcgccggccgtacgtcgtcgtcagtgtcgtgtactcgttttcccttccaaggcacccgttgcgagggcggaggcgccgatggccggggcgggggcgggtgcgggagcgggggcgctggccgggctcgcagcgtgcgcgacgctggcgtgcaacgtcgcaggcgccgtgctcttcctcctcagccaagacgacgagcggctgcggcgcgggtgtgcggcgaggttgggcgctggcggcgtcgcgtcgcagccggtggaggagtgcggggatgaagaggcgctcgcgccggacgccgtcctcaacctcgagctcggcgacccgacgatgtaccgggcgttctggcgggaggttggggactgcggcgccaccgtgatccgcgggtgccaggggatgagctacttctccgacgacgacgccgtgctctgctggttcctcgagccggagctggagcgcgaggtgcgccgactccaccgcatcgttggaaacgccgtcgtcgacggctaccacctcgtggtcggcaccggcgccacccagctctaccaggccgccatgtacgcgctcagttcgccggcgcgccgggaccagcccgtacccgtcgtctcgccggcgccgtactactcttcctatccgccgc

SEQ ID NO: 140143 - DNA, 570 bp, Zea mays
  Clone ID: MRT4577_59294C.1
tccgtaaaaaaaaaaaaaaaaaaaaaaaaaaggggggggggggaaaaaaaaaaaaaaaaaaaaaaaaaaaaaaaaaaaaaaaaaaaataaaaaaaaaaaaaataaaaaaaaaaaaaaataaaaaaaaaataaaatattatataaaagaaacctaaaattaaaattaactagacctattttttacatctttttggggtggggggggtttgtttttccccaatttattcgctttgttggactttcttttttcccccgttgtcttaaaaaccatgggcccctccccaatcccctttcccaaaaatatcccttttttaatggcttttgggactctccttatagcccccctttaacccctttgtttttggtggttacccccattttgaccttttcttttcccattttcttagcccccgttcctttgggttttttccttttttttctcccctattcccccgtttttccgggttattttttaaattggggctccctttttgggttccgttttaacgctttacggtacttttccccctaaaattttttttagggttttggtttttttaggggcccttt

SEQ ID NO: 140144 - DNA, 645 bp, Zea mays
  unsure (1)..(645): unsure at all n locations
  Clone ID: MRT4577_59295C.1
cccgggnaggccattgtttcttggnacaccatnatcactgcttttgtgcagnaacgattttgatctggaggcctgttgctcgtttatcagatgcaaaaatcaggttttgcagctgatttagtgacattgactgcagttctctctgctgcgtcaaatacaggagaccttcatattggtaaacaagcccacagttatcttataaggcatggcattgagggtgagggattggagagctatctgatcgacatgtatgccaagtccggtcgcatagaaatagctcagagagtatttgatgactatggtaacgccaaaagagatgaagtcacctggaatgccatgatagcagggtacacacagactgggcatcctgaacaagcaatcttggcattccgggcaatgattgaggcatgtcttgaacctacttcagtgacacttgcctcggtgctccctgcatgtgatcctctaggaggaggtttgtgtgcggggaagcagatccattgttttgctttgcgccgctgtttggacaccaatgtcttcgtaggtactgctcttgttgacatgtactccaagtgcggtgagatttctactgcagaacatgtctttgctgatatgactgagaagagcactgtctcctatacaaccatg

SEQ ID NO: 140145 - DNA, 527 bp, Zea mays
  Clone ID: MRT4577_59296C.1
ccggccggggcagcaaacccatttgaccacaatgatccatttgccatgtcaaacagctttgcaccaccatcaaatgtgcagttagctatgatggcagagcagcagcaatattaccatgcacagcagcagcagtattatcagatacagcagcagcaccagatggtgatgttgccgcctcaaacataccagcagcagtcgcagtattctgccccttctcaatctggattatccaatccttttggtgatccattcagtagcctcgtcacgatggctaatccaccaaagcaaagcaattcaaatttagtctgaattgtttttttttcgtgtctactgctcccactaattcagaccatacacaacattgacaattttgaggagcaacttgtacagttcaaaaactttgaatactgtatcttaacgatgcgctgtactgcagtagtgctcacatttggaaactattatgatctgaaatgttaatataatacacagttttgagttgcaaaaaaaaaaaaaaaaaatttgcggcc

SEQ ID NO: 140146 - DNA, 338 bp, Zea mays
  Clone ID: MRT4577_59297C.1
gggacgggaaggagagcgggccgccgcccagtgccagcagccccgcgacgccgacgaagaggcccttgctggcgcgggcgcacccgatggcgacttcgccaccgaggcgcgacgctacggcgacggagcctctcgtgcgcagcccgtggacgagcaccttctactaagtggcgcttactagcatctcgttgcgcggatagccgtgggggggggggggatccgctaaataaatcccgccacgtcggggtcgcagaggagaattgtggactctggaacagacccgtcggccctgcagtccggcgggtacagggagataagtgaccccttcgtccagaaaa

SEQ ID NO: 140147 - DNA, 289 bp, Zea mays
  unsure (1)..(289): unsure at all n locations
  Clone ID: MRT4577_59298C.1
cgccgccacgcgtcgggtcttagacatagcttatcactcagagcgcagaaaacccgtcgcaccatgaggggttgctcgtgcctgctctcctggcttcgtgnagcgcagctcaccatacaacggcggtgggctgcagccaccgcgcggtcattaccgccgcggtgcatctgcacctcggttacctgcacctccggtcatctccaccgcggtcacctgccgcgccggccacctgcaccgccggccatgtgccgccgcggtcatctgccgccgcaccatgccactaccctac

SEQ ID NO: 140148 - DNA, 1395 bp, Zea mays
  Clone ID: MRT4577_59299C.1
atgccgccgaagaagacagcagcgccaggggctgcactgcagccactggacacgaaccaggagacgctttctctccgtgaagccagaaaccagaagagaaaggctactagcccaacacttcaggaggaggagttggaccaggaaatcagggacctggaagtcattcatcagcaggtgcagaggaagaaggagaagatggcccgtccggccgatctgcagaagaagattgatgaagctgctgaagagatgcgtcatcttacacaggatgaccaggaccgaaggcctcagcacagggagcttcgtcaagagagctcatacaacgacgatgaatggtacgatgattttcatcatggcaacttcacttttgatgacacttctcccctggcagcagaattgcaggctattccatggccacaatcctacaagccaccacagttgtccatgtacgatgggcactcggatccaaagcaattcttaatgagttatgaggcaacaatatcctcatatggaggcaacgccgctgtcatggcaaagtacttcgtcatgacagtccaaaatgtggcccagacatggtattcctctctgcgaccaggcacaattacgtcatggcagaagctcaaagacatgctggtcactagcttccaaggtgtccagacgaagccagttactgctcaagcattgttccaatgtacacaataccagaaagaataccttcagacgaatgtccgaaggttcctgcgactaagagcgcaagcacccatagtgcccaatgatattgtcattgaggccatgatcaagggacttaggccaggacccacatctaagtattttgctagaaagccgccacaaactttgaagaagctgcttcagaaaatggatgagtacatccgggccgacaacgactttcgccaaagaagggaggaggcctacagattctccgagatgaccaggggcttcggaggaaggcttcatcctaggcatgtccgctccattcacaactccaatgccaatgatgaaagggccaacaatgctcaacatggtcatcaaaattctcagtcttcaagcatgactcctttcagaccaccagctctgaggggtagaggaggaagaagtttcagtggaggaaggtttggcagccaacccaggaaactgtactgtcttttttgtggcgaggataaaggccacacaacaaggacatgccatgttaccattcagaagcagaaggaaattgctgaagctggagcgcgacaaagtcagccgaagcaggttttacataccgcttcatgctactctccgtatgtcccagagtatgtaggcaatcaacagcctacgacctctgttcggcaagtcactctcaagcttcttaggcccagttgccactgccaccactgctag

SEQ ID NO: 140149 - DNA, 228 bp, Zea mays
  Clone ID: MRT4577_5929C.1
aagcaccggatcctcaagatcggccgcccccggggcggccgcatccaacaaatttagcctgttgatacaaagagaacgcaatgaacctaatgaccatagagcccaagaaaaaaggcgcaaaaaaacacggactacagccaaaaccaactgaggaacaccgcgtgcacgaggcgaatttttttgacaacgaacacagcaagtaagggcagaaagacatcatgaagcgcc

SEQ ID NO: 140150 - DNA, 363 bp, Zea mays
  Clone ID: MRT4577_592C.1
attcggctcgagccccgatccgatgctctcggccgcctgcgcccctcctgtccgacgcctccgcttcgtccgcgctgcgcggctgcctcgagctcgagaccgcgtgagctgtataggggattatctcttccttgtggggggatgctgcggagcgaacgctgaggagcgacgactagttttgattcacgtgttgagggtctctagaatccatggggtcggagaagggaggagcgaacgctattggctgcggcgggatcttcaacccattcgattggtagcgaaagtcacgcaggaagctggtctccaactcgcccgaggggtccaagcttgttaagaggagcgaagaaaccttgctatcagggc

SEQ ID NO: 140151 - DNA, 700 bp, Zea mays
  unsure (1)..(700): unsure at all n locations
  Clone ID: MRT4577_59300C.1
cattgggaccctcgaggccggccggggccagcctgccactgaggagtgaggaaccctaagcggcgcactgtgcaggcgacggcggcgcgctaccggcgacggccgacgggggatacggcgacatcgtccccctcgacccctcctccatccccgacgcggcggcgccagactgcaggtgttgaatgctgatttgttgtggcctgttacgtcttcacccgttcatatatattaaacttgaagaaccacgtggttgaagaaaagcccactgaaaatgagtaatacatcatcttcgtcaagtgggatgtgatatatgctgatattccaaagctcattccatttattgatcggtccaggccacgcgctacgccgtcacggtcgctcctcccgtgacgcagccgccgctaggcgccgcctatttctcggacaaagtcgctcgccaccatggtggcagcgcctgctgccgcagaagccagcggcgagagtaaaaacgaattcctcatacgcngacgacgcgccggggctactcgccgctctcaaggagatgaaggacggactggacctcgtcaggggcaaggttgaggccatcacgcggaaggtcaaggcgaaccagttgccggcggccaaccgggatcgggtacctagaagcgaagaacacctgctccttggctattgccaggacatcgtctactacctcctccgc

SEQ ID NO: 140152 - DNA, 647 bp, Zea mays
  Clone ID: MRT4577_59301C.1
cccacgcgtccgcaacagagctgccagcctgccactgaggagtgaggatccgctaagcggcgcactgtgcaggcgacagcggcgcgctaccggcgacggccgacgggggatacggcgacatcgtccccctcgacccctcctccatccccgacgcggcggcgccagactgcaggtgttgaatgctgatttgttgtggcctgttgcgtcttcaccagttcatacattaaacttgaagaaccacgtggttgaagaaaagcccactgaaaatgagtaatacatcatcttcgtcaagtgggatgtgatatatgctgatattccaaagctcattccatttattgatctgccgtgccaatttgccagttgggctgttccctccctaaaccccagcgtcgcctccgacgagtcaccgctccgtcggctgcttgctgcagtccacgccacgcgctacgccgtcacggtcgctcctcccgtgacgcagccgtcgctaggcgccgcctatttctcggacaaagtcgctcgccaccatggcggcagcgtcggctgccgcagaagccagcggcgagagtaaaaacgaattcctcatacgcgacgacgcgccagggctactcgccgctctcaaggagatgaaggacggactggacctcgtc

SEQ ID NO: 140153 - DNA, 871 bp, Zea mays
  unsure (1)..(871): unsure at all n locations
  Clone ID: MRT4577_59302C.1
aattcggcacgaggaaacaacagagctgccagcctgccactgaggagtgaggaaccctaagcggcgcactgtgcaggcgaaggcggcgcgctaccggcgacggccgacgggggatacggcgacatcgtccccctcgacccctcctccatccccgacgcggcggcgccagactgcaggtgctggactagagtcgaatgctaggcggatgctagctgctaggtgttgaatgctgatttgttgtggcctgttacgtcttcacccgttcatatattaaacttgaagaaccacgtggttgaagaaaagcccactgaaaatgagtaatacatcatcttcgtcaagtgggatgtgatatatgctgatattccaaagctcattccatttattgatcggccttgccaatttgccagttgggctgttccctccctaaaccccagcgtcgcctccgacgagtcaccgctccgtcgtctgcttgctgcagtccaggccacgcgctacgccgtcacggtcgctcctcccgtgacgcagccgccgctaggcgccgcctatttctcggacaaagtcgctcgccaccatggtggcagcgcctgctgccgcagaagccagcggcgagagtaaaaacgaattcctcatacgcgacgacgcgccggggctactcgccgctctcaaggagatgaaggacggactggacctcgtcaggggcaaggttgaggccatcacgcggaaggtcaaggcgaaccagttgccggcggccaacgggatcgggtacctagaagcgaagaaccacctgctccttggctattgccaggacatcgtctactacctcctccgcnaggncaaggngctctcggtggatggccaccccgtcgtacag

SEQ ID NO: 140154 - DNA, 358 bp, Zea mays
  Clone ID: MRT4577_59303C.1
aactttatggtccgctgctggcagtaccatggcgtccgctgaagccccactgctccacatcgcggccgaggttttgccgccattagcttcggcggcagtcctcttcctcgccgtcgcaatcacctacggccatctgacggtgatgggtcgccacgtcgccgccgtccccgtggccggcgcgggcaacgcgcgggctcggctcgggctttcatttcggctatgcgttcgcggacgctcgactatcggttcggacaagccgcaggggggcggggatacggtgccagctcgcgcgctcgcctgctgagatctcccgcgtgctagcgggcgacagcacgttttttcgggatgacgctgatca

SEQ ID NO: 140155 - DNA, 476 bp, Zea mays
  Clone ID: MRT4577_59304C.1
ggaaaaaaaacctggggcccttttttgaactttatatagcattcagccaatgggggggtcaaaatcacgagaaagaggtcgggaaacactcccgttttaaactccatactagatggcctccagaaaaaaccccaacccaaaaagaggaacttttggctcactttcctttatgccaaccatgctaaaaaaaggggcatgcatcgaccacccctaaattgttttttgggaagcccgaataaaggacatccccataattttgcgctggcccggacccaggggggggcccaccctcagccccgggagtagacccagcagccctggccccaaactggttatacattgccgggccaatttggataacctcctggttaaaagaaaacaggcatccttaaaactctggggggacccaccaaatattgcctttttgagctccgggagcttaaaatccaccttttttttcaggggaggggggactt

SEQ ID NO: 140156 - DNA, 261 bp, Zea mays
  Clone ID: MRT4577_59305C.1
cgctttacaacgttggcgttgggaaccgagtggagactagctagtgaagaccagagcagacatggcgagatcactggcgcacgcgacgctgctcctcgtcggtgccgtcgtggcggtggcggactgctggaccacggggggcggcgagaacgaggaggtggcgggaatatgcaagaagacgaggggcccggtggcgtgcgttggcgcagggggtaagggggggggcaggcgcggggccgccgggggcccggtgggggcggt

SEQ ID NO: 140157 - DNA, 261 bp, Zea mays
  unsure (1)..(261): unsure at all n locations
  Clone ID: MRT4577_59306C.1
tttcttttccttttgccccttgagtgaatgttttttttcgctngccggcctcgggggngaccctttagctcttctgcctctctggcccngcccgtagtcttcattgcgtctcgggtcgccgctccctattgccctctctacccactgtacagggcctcctgctctgatggccctcagcccccgctctgctttccgccgcttctcccgagcggagcgccgcaccccggacgcccctcttgcgggcggcgctcggcggccccc

SEQ ID NO: 140158 - DNA, 461 bp, Zea mays
  Clone ID: MRT4577_59307C.1
ggggggccccaaccccccaggggaaaacccctcccctatatacacgtgcaaattttggcgccccacgggccccaaaaaaaaaaagggggccgggcaaaattcgggcgggcaaccacctagcacccaaaaaaagttttttggccccgccccggggagatcaaatctactggggggggcccaaaaacccccaggctccaagggggtcccgagctttttttttgaggggtcaggggaaccccaaaaacggggacgttgtccccgggacccctttttagagcgacccccaaaaaaaaaacccctgcggcttgggcacagggggcggggggggaaccacaacccccgggggacaaaaaccacaatgcgccccggggacccctgtttttgtgccccacttgggtttgccggggcccacatttgcatgcccctttgggggggaccacattccacaaaccatattttgg

SEQ ID NO: 140159 - DNA, 431 bp, Zea mays
  Clone ID: MRT4577_59308C.1
cgggtgggggggtttttttttttttttttttttttggttttttttttttttttttttttttttttttttttttttttggccccccccggaggaaacaaggggtttttttttcccttcttaatggcaaagggcaacttgggggggggcccattcccgggggggggggggtggttcttttttttggcccacccctcaccgcatactggggacaagggaccgcttaaccttaggtcactccgggcggggggtctttgccttcttaggggacttgggggcctttttgggagactttgcctccttgctcccccccctggaccccttttccgccgtctttttgggccgccgaacagggttgattttggggggcccaccgccgggaggggtggttaccccccccaaccgtttcccaggcccctcgttgttcccggtcg

SEQ ID NO: 140160 - DNA, 448 bp, Zea mays
  Clone ID: MRT4577_59309C.1
gggccaaaatttaatttaaaaggaaactttttaaaattccaaaacaggggttaaacgggggaaattttttggccccaggagggccaaaaccccttaaaagcttttaggggggaagggacttccggcagttaggggaccaaaccactttgcctccaaaaaccaaagggggaaaacgggcccaaaatacccttttcccacaaaattgggggaaaatggcccccccagggggttcgaaaaaccccggggctgtttgggactttggcactaacccccaataagggaagggttttggccctttgggggttgcccttggcgcccccaaaaaagccccttgggaagaaaacccaaaaccctttttttaggggttaaaaacccgggttaaaaaagggggtaaaggggtaaaaaaatttaaaaaccaggtggggggaacccaaaaatttgggggttt

SEQ ID NO: 140161 - DNA, 806 bp, Zea mays
  Clone ID: MRT4577_5930C.1
attgggtacctcgaggccggccggggcctctcccgcgacccgtaccccgcctcccggttcaaccaaatccctctcgcctcatccccaccagcgcaaagccgccctatcgtcctgtcgtgagaagcaatggcgggccgtggcaaggcgattggcgctggtgccgcgaagaaggcgacgtcaaggagctccaaggctgggctgcagtttcccgtcggcaggatcgctcggttcctcaaggcccggcaagtacgccgagcgcgtgggcgccggcgcccctgtctacctcgcagctgtcctcgagtacctcgccgctgaggtcctggagcttgctgggaacgcagcgagggataacaagaagacccgcgtccgatcgtgccgcgtcacatccagctcgccgtgcgcaacgacgaggagctgaccaagctgcttggtggtgccaccatcgcgagcggcggcgttatgcccaacatccaccagcacctcctccccaagaaggctggctcgtccaaggcttccaccgtcgatgacgatgacaactgaagctgcccactggagaaggcattcgctaccgtcttgtttcctaggtttagcacgcagttagtcggcatgtctttgagagagttcgatgtgtttgggaatgacaatagttcctttcttggttccctaagatcgttgattcagatgtgaatacggctaaaatttttgggctatgcaactcagggacgtatcgtttgaaaagaaatggaaggacgttaaagcttgaacaattctggtgcgttttgaaaaaaaaaaaaaaaaaaaaaaaa

SEQ ID NO: 140162 - DNA, 304 bp, Zea mays
  unsure (1)..(304): unsure at all n locations
  Clone ID: MRT4577_59310C.1
gccggnnagagcattcactaacacacaaagggcaagnagcactagtcaaccttcctaacagcactgggtaccaagatatttgccctccttgcactcctttccctttctgtgagcgcaacaactgcattcattactccacaatgctcacttgctcctaatgccattattccacaggtcctcccatcaattacatcaatgggcatctaacaccctattgtgcaagcctgtaggctacaacaagcgcttgcccaattacaacaacaatccttggcacatctaaccatacaaaccatgattacgcaac

SEQ ID NO: 140163 - DNA, 894 bp, Zea mays
  unsure (1)..(894): unsure at all n locations
  Clone ID: MRT4577_59311C.1
cattgggtacctcgaggccggccgggacagtttcaactccccggcccatccgtgggagagaacagggctttcgcccctggcctaaacaaggtcgggaagggtttccccgagctcaccctctccactcgtgcacccgccgccacttcctttctctcgcgcacccgacgtcgcatcctctctcgtgcagttggggccagctgttgggccgaggtcgacgacggggtcgacctctccgtggagacagccaaggcggccgtgagccacgccgccacgagccaccacgagcacggcggcgagctcagcgatctggagtcggatctggtggggcggcagaagactggctgctcgtcgtcgccggcgcggcaaacgccggctgcagagctgatcgtgccgccagcacagcagatctagcaattccaggtgaagagaagagagccgatttgtgcttgctaatcactggcggagacctacagtgctacttgcatgtgtgcgttgcgtgcagatccagcaattccaggatttttgccacaccatgtgtgcgttgcgtgcttcgaatggattgaaatccaaatccatttcgtcttgccactgcactacacctgcacgcctgcatctgcacgcccggccgagctcttgaccggtgggggaccttttaagttttgttatggtgcacaaccaatagtttcntctgtgttgggcctgctttggtgggtcttttcattattcagcagnggaactttagttttgttatggtgcacaaccaatagttctctgtgttggtctgcttgtgngtcttttcattattcagcaagttgctattttcagttttgttcgaactttttangttgtgtaactcttttagtttgtttgaactctttagtaaatctgctattt

SEQ ID NO: 140164 - DNA, 413 bp, Zea mays
  Clone ID: MRT4577_59312C.1
acccccccgggggggggggggggggggggaattccaaccccctggggggcgtttttagggggtcccagctcggacccaaacttgggggaaaaaggggaaaaagtgtttcctggggaaaaatgttttcccctcaaaattcccccaaaaatacaagccggaagcaaaaagggaaaaaccgggggggcccaaaggggggcccaacccaaattaattgggggggccccactgccccttttccaaggggaaaacctggggggccccttgttttaaaaaaacggcccacccccggggagggggggtttgcgttttgggggcttttcccctttcttggtaaatgactccctggcctcgggcgttcgggtggggggggggggtttagctcacttaaaggggggaaaacggttttccaaaaa

SEQ ID NO: 140165 - DNA, 1135 bp, Zea mays
  unsure (1)..(1135): unsure at all n locations
  Clone ID: MRT4577_59313C.1
cgttcatcatcgcttgctcctatgctcgccgtgtcctgctgaagaacatgtccacgaagtcgatacaggcgcagtccgaaaccagcaagctagctgccgacgcggtctccaacctccgcaccgtcaccgccttctcgtcccagggccgcgtcctacgcctcttcggccaggcgcaggacgggccgcacagggagagcgtccggcagtcgtggttcgcgggtctagggctcagcgcctccgtgagggcacctttggtagccgaggatctcaggagaataccgacccattccctgccttccaaacccacgcgctaaattatcccagagcgnnnnnnnnttatgtttggtgacccaactccccggcccaatccgtggcggccgggagggctttcgcccccggcctcacaaggtcgggaagggtttcctcgagctcaccctctccactcgtgcacccgccgccacttcctttctctcgcgcacccgacgtcgcatcctctctcgtgcagttggggccagctgttgggccgaggtcgacgacggggtcgacctctccgtggagacagccaaggcggccgtgagccacgccgccacgagccaccacgagcacgacggcgagctcagcgatctggagtcggatctggtggggcggcagaagactggctgctcgtcgtcgccggcggcaacaacgccggctgcagagctgatcgtgccgccagcacagcagatctagcaattccaggtggtacaaaagggtttttcatcaacaagtggtcaccaaaagaagaactgaaacatcaagatggtgtttgcttctacgttttaccattgaggatatgatggtaaactgaagtcatgtattatgctatgcattcagaagatgatgctaaactgaataagcacatcaatctgatttttctatgcattgagactatgtttgtattattgttatgcaatgcaatctatgcactaaaacgttcaacccaaaaaaaaaaaaaaaaaaggcgcccaaaaaaaaaaaaaaaaaaaaaaagagaaagaaaatatgtacaaaacataataacaatgagaaagatatgagaatgataatagaagaggagcttgttagtaagattatgtgatgtgaaatctatgggggg

SEQ ID NO: 140166 - DNA, 284 bp, Zea mays
  Clone ID: MRT4577_59314C.1
aaatgtgctcccggtaaccgccttgtccctgacacctgaagagagcagccgttgttagcagaaagtcaagcacgcgatccgatctgaaagggggagagagaagaacataggggaggcctcgcaaatgggatacatatgctccatgccaacgccgacaggctggacgtgtgatcgcggagggacgtgctttttcttgcctgcctggtctggccgattgagatagcatatcgctgaacgataccccactggcgaattctattgactgccagccccagcaacggaac

SEQ ID NO: 140167 - DNA, 559 bp, Zea mays
  unsure (1)..(559): unsure at all n locations
  Clone ID: MRT4577_59315C.1
cgacccacgcgtncgcgttcgatgggaacattggcctatatccatttgtttttacagagcctgcagaaaggagaagtgctaataggctgcgtggtacgatgatcacaaaggcaatgatatctgtaactagggatgtcatcagacgttatgtaatcgacaagttgttgcctcacatcaaagcaaagtgcccagctgaggataggcatagcacaatttggatactagacaattgtagaacaaacattgctgttgatgatcctgagctgcacaagaagatggatgggaattcggttgatgtgccagcctgcaaattccgcagactgtaatgtgttggatcggagttttttgcagctatacagtcgtcgctgtttcggagtggtatgccgcctcgcttctgtcgaaggagtctggcacacgtagttctgctgttggagctgtcacggtgacagattcggcgagacatggccgtgtttagttcacaaatttttttggatggatacactgtagcacttttgtttttatttaataaatattgtccaattatagagtaattaggttc

SEQ ID NO: 140168 - DNA, 465 bp, Zea mays
  Clone ID: MRT4577_59316C.1
tttataaagataccactttattgccttgcaacacttaacgaaactagatgatgtcaagccttgagactcaattgcctagcacggtttcttaagccaaatctgacatgctaagacgatctgcagagtgaactttctgatgacacctgaagccacaggtcctcttgtatgaaattctatacctccttttcttggacagcctatgctcgaaccagatagctgagtccttggggtacctctcaaaagtctcgcagtgcacgttctccatgccaaacaggaatgtgtacccatgcctccactcgaatcagtcaagcagtgaccacgcaaagtccccaatgactgtgggaccatgatatattgccttgtcgagctcagctatgtaatccctataataacggattcctactgggggatgcacaccctgagtaatactgacatcaccaggctggtccattacgtgatcagcaa

SEQ ID NO: 140169 - DNA, 491 bp, Zea mays
  Clone ID: MRT4577_59317C.1
aaaaaaataagggcgaaatcataattgaaagtccctaaaaaactttggcgaaaactacattaatattgctcgacaatacaaacaatataacttttagagctctaacacatagcatagtactatcaatttatatcgacaccaacacagcttattcacagtgacgaagaagttgccgcagagacgctgaaacctttgaccttacaaaggtacgaacaaaagtagttatcacatactatactgacatagtcacgtacacacacgatgacagacaaaacgccgttcatgttgggctacaattacaatgacagctatatagtatgcttgcattcccatccaagacaacttacagaacatcaatcagcttcctgacggccgccatcaccccgcgcgcgtgtacgtcgcaatggaccgccaccgggagcctcccgatccgctgcgccagctcaatggcctgcgccggcatggactgccgacgagtcgtcgtcgtcagc

SEQ ID NO: 140170 - DNA, 807 bp, Zea mays
  Clone ID: MRT4577_59318C.1
ccggccggggcacccagatgccacctgccgctgccggccgccactgctgccggcggccacgtccgcggcgctgaccaccgcccgcctcgccatgccccgcatcctcctcgcccagttctcccgccgccggctccacgctcacctctcgcgtcccctcgccattctctcgaacgccttctcggcgtccgccgcctcgtctcggccgcgcccgccgccgctcccgccactctctccgctgctcccagcgcgccccgaggacgcgcgcctcgtagccgcgtcctcgtccgccatcgccgccgccttccacgactggttccacgagtcccgcaactccgcttctgcgccgacaccgcccaaggcgctcgacgcgatctacgaggcgctcgcgtccgatgagacggccccgctagaggcgctcccgctctcggagacgctcgtcctcgccgtgctccgccaccatccgagggggttccacaacgacgccgccctgctgctgctccgcctcaagttcttcgactggtcgggccgtcaccggcgctaccaccacacgcgggcctcctaccacaccgtcttccgcctcgttagatgcgcgcgccgcaatgccgtccttctcgattggctccaccgcttcttcgacacctccgcgagaggcgaccacctgcgtttacacgacacgctcatcatcggctatgccatcgcgggcgacccgcagcgcgggctcaacatcttcggccgcatgcgcttccacggcctcgaccccgaccccgtctctttacgtatcctcctcaactccctggtcgatgcgtc

SEQ ID NO: 140171 - DNA, 1917 bp, Zea mays
  Clone ID: MRT4577_59319C.1
catgctacagagtaaatctccagatggaaattctccaaatgattcatgatgcaaaaattaaattctctgatcattctatcctaaggattgttcaaatgttgggtcgatatggaaattggaaatgtgttttgcaagtggttgaatggctccagtcacatgaaaggttcaaatcctacaagagcaggtatatttacacaacagttctcgatgttctagggaaggcaaagagaccattcgaggcgttgaatgtattttataccatgcagaaccaattgtcatcttatcctgacatggcagcttatcattgtattgctgttactcttgggcaagctggtcttataaaagaattatttgatgtgattgattgcatgtgttctcctcctaggaagaagttcaaattgagccctcttcagaattgggatcctcgcttggaaccagaccttattgtatacaatgcagttttgaatgcttgtgtgcaacaaaagcaatgggaaggggcattttgggtactgcaacagttgaaagagaagaacatttgtccaacaaattcaacatatggtcttgttatggaggtaatgcttgtctgtggaaagtacaatttggtttatgagttcttcaataaggtggataaatcatcaatacctggtgctctgaactataaagttcttgtaaatgcactttggagagaaggaaagattgatgaagcagtgatggctgtgaaggatatggaaagtcgtggaattgttggttctgctagtctgtattatgacctagctcgatgcctttgcagtggtggacggtgcaaagaagcacttctccaggttgaaaagatatgcaaggttgccaacaaaccgctggttgttacctacacaggactcattcagacttgcatagacaatggtggcatggaagatgctaaatacatattcaaccacatgtgcaactactgttcacctaattctgttacttgcaacatcatgatgaagtcatatattaaacatggaatgcttgaagacgcgaaagacctgctccatgatattctgaattgcaggataaggagtaaagcggattctaatcaagtggcaaccgctgacaagtttactttcaatactttcatggaggcctgtgctgcagcaaaaaggtggaatgacttcgagtatgcgtttcgtgagatgttattgaatgggtaccatttcgatgagcgaagacaccttcggatggtacttgacgcttttaggcatgggaaggaacagctgttggatgatctatggcactacctgtgccgtcacagccgtgtcccgccctcccctgtcataatggaaagattctgcctaaaactgatgcagggagatacactggcggcgatctcctgcgtcagcagcttccatgagggcaagatatgcaacgtctcctccatgtcatggctcaatctgctgagccgcaatgcagataggctgaaggaggagcatgttaccaagttagctcatgaactcaacagcctcattagcttgaggagttcctctgatagcattagtcttagcctgtaccaaaaaattattagtagctgtacggcattcctctctggagccacagttgtagaaaaggcaccttctggccaataggtggtgttacagaaattataataaccacagttagtaaattctagtactccaaatcataattaccacgactgatggagtgtattgcattcaacgtttggttatcggtacaaagttagaaatggaaaattttcacgtaaggaattagttctttttttagtataatacaaaggctgatttgggagcataagcgataaagcttgctttgtttgattaattttatactggttactttcaaattcacaagtcataataccatgagcatcatttatcgaaaaaaaaaaaaaaaaaagcggcc

SEQ ID NO: 140172 - DNA, 371 bp, Zea mays
  Clone ID: MRT4577_5931C.1
ccccccggtgttccacgtgtccgtcaactccggcaccgtgctcatggacgccaacttcgtggccaaggtgacagtcaccgacaactggcacaacgccgctgccgcagacgctgttaacttgtgccgcacgttctgaacccgaattccgaaccatgcgtgtgtgtgtgtgtgtgttttgtttggcagctatcggatgtcggcgtggtcagccacgacgtgaggctcgccaccaccgactccttccaaggtctctctatccgctccccaactcttcccaccccccacagcccacaggttcccgatctgcgccggccgcgctcatacctatcttcttgctgcgttgttcgctcgcctgctgtgcctgtgcatgc

SEQ ID NO: 140173 - DNA, 166 bp, Zea mays
  Clone ID: MRT4577_59320C.1
taggcatttttatataagtattgcgaggagaacaaaacagtatcaattagtatcgaacttgaacactcaatgtttacactttacattgaaatactgccgttaggacatgttatttctgagtacaaaaaaacaaaaaaaaaaaaaaaaaaaaaaaaaaaaaaaagga

SEQ ID NO: 140174 - DNA, 1353 bp, Zea mays
  Clone ID: MRT4577_59321C.1
ggcttcctcctacccaacccaccgccccactccaccttttccttccccgccggccgccgcgcagcgcgagcggagtcgccctctccagtagagtaggagtgacgtctctacccatccacctcagccccctcttttccttccccacacgcgccgcgcgagcggagtttcagaattccgcatcgaatcggaagggttccgctcaccgagaaaattggcctggggggggcgtccgtcctcagcgtcgtgcgttcggatgccaaggagggaacaacaactggggtttcagcaaaggatcggacaaacacaatattggcacttgcgtctcctaattccaaaccggaggacttcaacagcccagggcatatttttcctcttaaatacagagaaggtggtgtgttaaaaagggctggacatactgaagcatcggtggaccttgctatgttagctgggttacctcctgttgcagttctttgtgaaattgttgatgatgatgatggctccatggctttgttaccaaaactgcaacaatttgcaaagagggagaacctgaagataatatcaattgcagacctgataagatataggagaaagagagtgttatggtcgttagatcgtggcgttgcccatggggacggacacgccgtcaacgaagatgatgtgacgaaatttggcgttgttcctggggatgggcgcgccaacgtccaggacgtggtgacaaaattggcaggtgatggtgcccatggagatagggacgccggttgccaagatggtgtgacgaaggtggcatgtggcgcaacccatagagatggcgacgtcggttgccaggacggcgtgatgaaggtgacatgcggcgcagtccatggagatggggacgccggttgccaggatgacaccacgaaattggcagcagaagccataggatcagatcgaaacccaaggggtattgggctgggtcacaagcttcaagcatacaacttacaagatgatgggcgcgatactgtcgaggcaaacttggagctagggctgcctgctgactcgcgggagtacggtataggtgcacagatattacgccatcttggtgccaggaccatgcggctgatgactaacaaccctgccaagtacactggactcaagggctatggtttaagtgtccttggtagagtgccattgctaacaccgataaccaccgagaataggcgctatatggaaacaaagcgattgaagatggggcatgtttatggaagccgctccagtaatcatgcaaacggcagtggcttggctggtgctggcgagagagaggagcaggatcagaatgacagtgctggcgtgcaagagcgaactccagaagcttga

SEQ ID NO: 140175 - DNA, 201 bp, Zea mays
  Clone ID: MRT4577_59322C.1
accaacatctgatcaaagctggttaagatgctcgtctgacctcttggtataaagaattgagcctcttgaaccctatgaattttctgcagattcctgctctggatgtttcaaagcccatgattattccaatctgtgctgttataaagtctcagtcaacaggacacttggcagcttatggaaacttggaaactggagccatcc

SEQ ID NO: 140176 - DNA, 375 bp, Zea mays
  Clone ID: MRT4577_59323C.1
atacctttctcggccttttggctaagatcaagtgtagtatctgttcttatcagtttaatatctgatatgtgaactatgtgttcacttcgatattaaatttattttttgtgggggagggtccgtatagtagcttgctacttggtcctcgtgtgtcgctcgggcgttgcacttctgcccgagccaggcgcatcccaaccagttcaaatcaaatttcgtgttctctgcttaaacggcttacagtagtttgttttcaatttattttgattgcggaatcttgttgtattaccggttaagatgatttttatcttgtatatgtccacagaccagtaatcagataaatctatattgaacagaaaagtgacttccacgcacctc

SEQ ID NO: 140177 - DNA, 265 bp, Zea mays
  Clone ID: MRT4577_59324C.1
cctcgagggcgtttcctcctccagaggcctgcacgcggggcgcgggccccgtaggctctccatcgaaggcaacattggcctgcactgcccaaagtcttgggcacttgctggatatgatgttccgggagtcagcacgatggtcctacacattccagacattttccttttcgagccgcctgaatgtttaactggagcccttccctgagaaactcttacaggccaggacgccagtacagatctttgagaggtctgtgtacgtgacagg

SEQ ID NO: 140178 - DNA, 544 bp, Zea mays
  unsure (1)..(544): unsure at all n locations
  Clone ID: MRT4577_59325C.1
gtacaatttaacaccttacatactccagagcagtggggggggacnaccaatagatccataaacttcatgaaaacaaccttcgccagcatagttacagatgagccgtgagttaaggctgatcctcatctatgcgtaagattaccgtagcaaactctcaaggtacacaccattactcgattatttatatatcttttatctacctaaggcggggggggttagcacacaaaaattacccaactacattagctcccgaacaccaagagaatcattcattccgaaaacacaaccttaaggaatgaattaactgaactcttaatcatattgttgactaggatatcccaatctaaatgagtacatctataaagttgcgaaaagaaatgatcctatgtatcttctataggaaaaaactgaacccaaaaatatccctataatttctacaaatacaataacgtgcataacattcgacctatattggtcatatggcttagagataagttaccacacatcaacttaacattgtctatatcaagacacattactttct

SEQ ID NO: 140179 - DNA, 434 bp, Zea mays
  Clone ID: MRT4577_59326C.1
atttttattttatattaatccttatcacatctcgcggcgaccaaggggaactttttcgttagatctgtaacaagtacatcatcgagacttgactgaattatgcacattacctttggagcatggtgcattgaattacagggaggagaaaacaaagggtgcccaaacacaagcatgtctgttcttattttatctatataaataattaacttacaaagatcaaaatacaagttcctgcaggaaaatttcattaccgactggaaaaataaacatcgggctagccatcctttgagcaaaacaccaactgttggagatgttgcgcacataccttaaccactctgagaggaaagagccaggcatgacaaccctttcgccggtgagagctccgaaagagtccctctgggcccgcaccaggtaggccaggcatcctgtccttg

SEQ ID NO: 140180 - DNA, 321 bp, Zea mays
  Clone ID: MRT4577_59327C.1
gggaaaacagaaggggagaattttggcctaagggaggcccccaagttcttttttttttgcaacaataataatttatgaaataaaatcccgcccccaaacttaaaaatttacggggggggcccagttgttgtcaaacaaggggggaaaccaagggtttggggtttacctggggcgggttttttccgacccaaggggccccaaaaaaagggttggggagggaaaaaattagttggggtccaggtgggttaaggaaaaccctggcaattttttcccttgcaaaaaaaaaggactgggccccttaaaaggtttaaaaaaccggga

SEQ ID NO: 140181 - DNA, 359 bp, Zea mays
  Clone ID: MRT4577_59328C.1
ggcatccccccttcaacttgggtatgaccaccttttcaactttatacaaaaatgcctgggggggggaagccacccctggttcccttacatggcaaagaaccgccatcttcttcccccccggcaactaaaaaaaaaacaaaccctggcccacccccccaaccgggggccgatttatatctacaaaacaagggcccccaaaggccaaaacaaagcagcagcaaccaacaaaaaaccccggccaggagtagcttacattttacaggccacagcacaaacacaaaacctaaaaaccttgctgacaaaaccccgaaaacaaaaaaacaattttcaccccccttaacccgctgctgtgtgggggg

SEQ ID NO: 140182 - DNA, 114 bp, Zea mays
  Clone ID: MRT4577_59329C.1
cccacgcgtccgcacgagttcagaaccgactcgtgcttgtatccagacctgttttaaggctgtctgaactctaccgttgcccgttggtgtcattttagcgccctttttttggtc

SEQ ID NO: 140183 - DNA, 1309 bp, Zea mays
  Clone ID: MRT4577_5932C.1
cattgggtacctcttccattgggtacctcgaggccggccgggcattcgcctctcccgcgacccgtaccccgcctcccggttcaaccaaatccctctcgcctcatccccaccagcgcaaagccgccctatcgtcctgtcgtgagaagcaatggcgggccgtggcaaggcgattggcgctggtgccgcgaagaaggcgacgtcaaggagctccaaggctgggctgcagtttcccgtcggcaggatcgctcggttcctcaaggccggcaagtacgccgagcgcgtgggcgccggcgcccctgtctacctcgccgctgtcctcgagtacctcgccgctgaggttcgtgccccgtttccatttcgccttaactgtgggtttcgcatcgggtcgctgtcgctgccgtcctatctggttgttgctccgtgtgcggtgcgacagctcctagatctgaatcgaatagtctcgttgatttgttgcataattataaattgattgaataatatacttactaacttgaaaggattcgtctccggcattatctgcacttttgctttattggtgacaaaaacaatttctctggatcatttgctagaatagtaaatctatctagttgtcctataattaagctgtcatcagtaattttgtacatcaaacgttctagaaacatgagctaaatgcatctttactatttttgcctgtatcattctgtctcggcttcgccttttatcccgcgaaaccccaagcgccagaagcaaatttcatctgacctaccttttcgtttttatgcgatgcttcaacaggtcctggagcttgctgggaacgcagcgagggataacaagaagacccgcatcgtgccgcgtcacatccagctcgccgtgcgcaacgacgaggagctgaccaagctgcttggtggtgccaccatcgcgagcggcggcgttatgcccaacatccaccagcacctcctccccaagaaggctggctcgtccaaggcttccaccgtcgatgacgatgacaactgaagctgcccactggagaagaggcattcgctaccgtcttgtttcctaggtttagcacgcagttagtcagcatgtctttgagagctcgatgtgtttgggaatgacaatagctcctttcttggttccctaagatcgttgattcagatgtgaatacggctaaggtttttgggctatgcaactctgggacgtacgccagttgatttgatcgtttgaaaagaaatggaaggacgttaaagcttgagcaaaaaaaaaaaaaaaaaaaaaaaaaaaagtactctgcgttgttaccactgct

SEQ ID NO: 140184 - DNA, 288 bp, Zea mays
  Clone ID: MRT4577_59330C.1
acattcgttagcgaccaggtcgcggggctcgtcccgccgcatatagcacagcgggtggctgctatttgcggcctgcagcaaccaactccatgcccctacgctgctgccggcggggtcccccactgaagaaactatgtgctgtaatatagccactggctagctagctagttgagtcatttagcggtgattattgaatcataatgtgtcacgcatcaccatggctggcactgacagagtgagcaatgacctgaatgaacaattgaaatgaaaagaagaaagcattggtcc

SEQ ID NO: 140185 - DNA, 448 bp, Zea mays
  Clone ID: MRT4577_59331C.1
atcgccggcgtcgacgccgacggcgacggctgcgtcgggttcgaggagttcaagatgatgatgcgcggcccccagccccagccccaggccggcgccggagtgactgccgtgccggacaaggccaaggaggagtgacgggtgtaggtgtaggtgtactcaccagggcatcagtctgggggaagggatcgagttcctctgcctcttctgttgctttcacctcctctggagaggcatgaaaatactcaacttgctgcataagactacttattactgtacttggggcctgggggacaaaatttctctccatgactactagtctactaccatgtagatgtaggagtttatattatatcgtgcaatatatactacctattatctacagtattattatgtatatactgtggcgtgtccgatttcctgagccagatcagacccgtcttgtttgcct

SEQ ID NO: 140186 - DNA, 1796 bp, Zea mays
  unsure (1)..(1796): unsure at all n locations
  Clone ID: MRT4577_59332C.1
ttttttttttttttttttaataggaacgagcaatttctttttaaaaataggaacgagcaatatctattttatttaattgtgctaatcaagatttaaaactcaaagatatctgactgtgacaccatatattaaattatatgtaccaattaaacttaaattgatggagagagatgtggaatccacttattctaatggtcacatccgtgcattgactagcactagctcaaggcctcaagtattttctgtacagtgacctggcaatcgccaaagcatcacccgtggccttcacggcgtacacctcctttccggactgccactcgttggaatacgagatccagtccttcctccactcctccagctggaagctccggttctcttgcaggctcctcgttaagtaggcgaagtactttgacgcccttggaaggtagtagctcttcagcagcccgctccaaaacttattggcgtagtcatgcagtttactctgctcggtctccgtgttgtcataccacatcgtcacctgtgttctggcgttccactcgtactgctggcgttccttttcagttatagcaaggctttttgcactttccagccaggggcccagcagaaagttatcatcagcagctagtagcgtatcgatatccacgatgatctcaagaaatttcctcgcgtgagcattcaggccatacgaatctttcttttggtacgaactcatcgcatcaaggtacacttcattcgctagtttggataggcactgcctagttaggtcgacaaggtcatacctatacgtgagactttctgaaaatgtgcttcctgcatcaagaaatagttcaagggctttgacggcctccttcgtagagtaccacagatgcggctgcggtaggattccagacacctcgcttaagaaaaacctcctatggtttctcgtaattgacatgccccttcgtttagaaacctgataagtaactgagctgggacttatgtctggaaattcaactatatagtctttattatggtccgcaatcccatcagtgcaattgtatattgtatgatacaaatatctccaagctttctctatgtcagcatttgcttgaccatatctcctataggagtatgtttttagccaatcctcaacctcaaccttcttattatgaaatgccatttcagacataagttcataaacaactggattgtgcctcattccctccatgcacatgccaacgccaatcattgttgaattgtaacttgtacgggcatcaatggggccagatgaaattgaatcaagtatgccatacatttcaatgttcccaccaaagttgtgtaacatgcaccagatgtatggtacgccgtaaaactgagaggacattttccaaatgggcttgacatcagcaaataaatcgagaactatcatcttaccaattggaacagagtgaagtagtgctttcatttgtggctccttccagaatgcagcatctgagtagaataaccaaccctgcattaaccatactgcattcttgttacctcgggacattgcttcatagatagcagaaccaagtgatgaaatatatgccggttcatctgttggtggagtattctcattgaatgtgtcacagttatagatgttggttacatcaccgtactcttttatctgttgcctgataaaagcctgccccatatctataaacaatgaatcagaaggatcaagaagataagtgcaacaccacttaggattagcatcaactgtattccttctcccgtncacccacgcgtccgcccacgcggccggacccacgcgnccg

SEQ ID NO: 140187 - DNA, 514 bp, Zea mays
  Clone ID: MRT4577_59333C.1
aaaacctctatggttctcgtaatgacatgccccttcgtttaaaaacataagtagttgagctgctgcttatgtctctgaaatccaatatatagtctttattatggtccgcaatcccatcagtgcaattgtatattgtatgatacaaatatctccaagctttctctatgtcagcatttgcttgaccatatctcctacaggagtatgtttttagccaatcctcatgtaaacaaggtcgcagaaagcatgtctaccaagaaactacacaaattacaaatgtttggtgttttggacaatccttctctgatgcacaggtcaacatttaactcaaggcagaaaacttcaattaatcccgatctcactcaacctcaaccttcttattatgaaatgccatttcagacataagttcataaacaactggattgtgctctattccctccatgcacatgccaacgccaatcattgttgaattgtaacctgacgcgtgggtcggcccgggaattcctgacctatacct

SEQ ID NO: 140188 - DNA, 644 bp, Zea mays
  Clone ID: MRT4577_59334C.1
cattgggtacctcgaggccggccgggaattggttcaccatgcttctccttcaggtcatccttcttggactcctctccctgcacgcgccgtccaactcagccaccgccacggacacggtgtcccctggcaatggcctcgccggcagcagcaggctcgtctccaacaacagcaagttcgcgctgggcttcttcaggatggacagcaagtccttcaactacgccaccaacccatacacttacctcggcatctggttcaacaaggtccccaagctaactccgctctggagcgccaacggcgagagcccggtcatggaccccgcctcaccggagctcgccaccgccggcgacgggaacttggtcatcctggaccaggccaccaggtccgtcatctggtctacccatgccaacaccaccaccaacgacaccgtcgccgtgctccagaacaacggcaacctcgtcctccggagctcctccaactcgtccaccgtcttctggcagagcttcgactacccgaccgacaccttcttcgccggagcaaagattggctgggacaaggtaaccggtctgaaccgccgccttgtttcgaggaagaacttgatagatcaggcccctggcctgtacactggggagataaaaagaatgggg

SEQ ID NO: 140189 - DNA, 503 bp, Zea mays
  Clone ID: MRT4577_59335C.1
tagatagcagaaccaagtgatgaaatatacgccggttcatctgttggtggagtattctcattgaatgtgtcacagttatagatgttggttacatcaccgtactcttttatctgttgcctgataaaagcctgccccacatctataaacaatgaatcagaaggatcaagaagataagtgcaacaccacttaggattagcatcaactgtattccaatcaccaagtcgcgtaatgttggctgacggaaataattttgcgaaaatagctgggacatttcctgagaacgatggaagaacagggaccatcccaagctcaatcatccgggatagaattttcttctgcaatgccaattgttgatccaaccagttttgtgacagtggtccaccccacccatgcaagttccccattctagcccaagcaaggaaagctggtccaccaaaaaaatcatctaaatctctgtcggtaacattaaaactcttaaaaaccttctgccagatagattcctg

SEQ ID NO: 140190 - DNA, 466 bp, Zea mays
  Clone ID: MRT4577_59336C.1
agaacgtgcctcttgttgcatcgacacagatgtacaatacaatgggacatataggacgttttattcaacaaggagcgtttgaatgcaataaaagttcaacccccgatttaattaaatggacaaaagcatgctgaggatggatcatttggagatgctgctggggaagcccctcccggtgactcccggctaggagaagggcttgagcagttcgtacggaacgatccgggcgccacaaaggttcttgaggtgcaggctgttgttgcactcggagccgaacccctcgatctccttaatcctgccggcgatcttctagaacgcggcattaaacatgggcttcgcctgccaggacggctaggcgaactctcctatgtactccttgtggctcgagtgcgacgagaggatggccagcgttagaatgaccttgaaggcctgcatttgcatgggcagtatgaccagcagcgtggtt

SEQ ID NO: 140191 - DNA, 334 bp, Zea mays
  unsure (1)..(334): unsure at all n locations
  Clone ID: MRT4577_59337C.1
aggaaacccacttattccgcgtgggtcaccagcatctcttcgaatttgaatcaagtaaagtgtcaaagagaaaacttgttctggggactgttcactgaacttagcagattatgcatctgctagataatcctaccattgtctgtgcctagcagtgcaacagacctggtcccatcactccatgtatgcctcttatcaaatatatggctccatgtattgggctatcaagatttattttggcttgtggttcttgttagataactacattatgtgacatttagtgttatnttctctttccagcttactttaagcctggcagaagtaagagtatctcaac

SEQ ID NO: 140192 - DNA, 363 bp, Zea mays
  Clone ID: MRT4577_59338C.1
tttttcaatcggcacttctgtaaaagcagctgctgcttactttggaactgcactagtaaagcttgattgctaggcaacattgctcaaagtacctgataatgatagcttatgaccctgacatgagttattgaaagttgctattggatccatagatgcagtcggactgtattttgccttgacacaaatgacccacagaaacatatctcataattataagttccaggctgttggacttggttgggctattgctgcttcaattctgcaccgactggcacctttctggattgtagcaaagaaggctcgaacttacatgggagtacatatcacaaggccttgaagtaaatgctatatctgtgatgaccc

SEQ ID NO: 140193 - DNA, 154 bp, Zea mays
  Clone ID: MRT4577_59339C.1
gtacaaaccacgagaaattgcccttgattgccctgctgtctcacataccatttacatagtaaggatacacagatacccatcagttagccgtcctattgttcatggcagggggacaaacaactaaaacgtcctagaatacagtttgttttggaac

SEQ ID NO: 140194 - DNA, 405 bp, Zea mays
  unsure (1)..(405): unsure at all n locations
  Clone ID: MRT4577_5933C.1
aagaacgaagggcccggaagaaagacgaccagcccaagggcgacccanaanggacgaccnagggnnggccgccccnaggggccgcgcccccncncnannaaaacaggagcngcgccnccnnnaanncccgagnnnngnnnnacaggagcccgagcnacccncgaacacgcgcaaaacngcgcnggcggcggggagncagaacnccacccccgaggaaaagaaaagaaggcgcgcaccacaccccggggcgggcnncgaaggcgcacagcaaacgaacnncgngancaggccgagcacgcaccagcaagggcgggaaccacagggagcggggncagcagaagcagaggcgccccgggcccgcccgncgcagacggaacgcaaggggcaacaaccgccaaaaacgga

SEQ ID NO: 140195 - DNA, 796 bp, Zea mays
  unsure (1)..(796): unsure at all n locations
  Clone ID: MRT4577_59340C.1
ccgggaaaaaaaaactctcagctcactcgtttcctgcccgccgccgccagtggtcctcgcctcgctgcctagtagccaaaggtcaccgcggcgccgctagagctcctcggctcgctgcccagcagccaaaggtcatcgcaccgccgccagcccattcattctcgtccttggctcgccgccccctcagcccaagctcaccgcttcctctgacaagatggtggggaagggagccaaggccacagccgccaagtcggcggacaaggacaaggggaagaagaccgacggccccgtctcgcgctcttcccgcgccgcaccccaggctttttgtttgcatcgacccttgtttgaaaattacgacagtgttggctcatgtgtttggaaacctgtacatgttcacgcacattgttaaaattttggggccagataaagatttagaggtggaagacattgttaacactttgccgaccaagaaccttgtgataaggtgtgatcgagttatgaaaactgtgaggcctggcaagaaaaagctatcgtcatggcctgctcatttggagatacataatggctacaaccctttgcttctgagaggaccaagtcaccaagtcatctcccaagaagaatagaatacctgagacaaccgcagttgattttaagccatacgttggtccaatctataatgcgatactgggacgttttggtcaatcaagatcaggatcaggaggatgggtaatgaaattacaagatttacagctgccagggaaagtttntgactgcttgcttttgataacaatgctta

SEQ ID NO: 140196 - DNA, 334 bp, Zea mays
  Clone ID: MRT4577_59341C.1
ggccagtagagatggttggctgctgtatcaccctttcgacatccgcgccatcctaatcgtaatcgcttactcatcctggacgaggtgactggcttgctgcatccttacaacgaaaccctttgtcaatgtcctcctgtggtggtgattactgcttgatcctcttagcttgatcaacatacatctgcgaccataccccatggtcctagaggaggaggtttaatctgtaccatctctttgatattcatttggactactacttgtgcatgctattccaaagatcgctgctctggcaagcaattcgacttcgctcagaatatcaccatttgaatgcctt

SEQ ID NO: 140197 - DNA, 319 bp, Zea mays
  Clone ID: MRT4577_59342C.1
gtaggcaatgaacttatgcttgtgtttttttcacgatctgccctccatgacaggggcctgcttgccagagatcaggacttgctagaccaccgctagaggctagccgtcgcgaacggactgattaccacttcagcatgatatgcacttgctatgatcgtgcacctgcagacacggcgtgaccgccactgcgccgtgctgatcatgtcaaggtgcgctggcagcgaacttcttgtgagggaccagaataagtcccaccacttcacaggtggaacgtgttcctatggagactatagtcgatgacggcttaaagctagtcttc

SEQ ID NO: 140198 - DNA, 380 bp, Zea mays
  Clone ID: MRT4577_59343C.1
caagctcgctataagcagccagagattcaggacaagagaccacgatcctaacacacagcgtctctgtcatcttcgatcgcggcggcaccaaaggtcgcgacgtggacggcgatggacgctccggccatgttcacgcgcaagcacgtccccgaggacatcggcctccggaacatcggcgtcggcgaagcggaggacgatggagccgggggccaggcccagctgcaccgcgacgagaagcagcacaagccggtgctgaagaaggttaaggagaaggtgaagaagatcaagagcaccctcgctggccacggccacggccacgacggtgagcacggcggcgacgagcgcatgggagacgaagacgcatatgccggcagcgacag

SEQ ID NO: 140199 - DNA, 726 bp, Zea mays
  Clone ID: MRT4577_59344C.1
cggccgcgtgggcgagccaatgtttattacttctgcgggtgctcgaggccggccgggagttggagctcggaacgaatcgagccggggcccacttcgatcgaaacgagatggctccggggaagcgaggcaaggccaaaggggcggcgccgccgccgcccaccgcggcggcgagtaccggagctgtagggttccctggctgcctccgcctgatgccgccgtcgaccgtggccatatctatacacgccaagcccggctccaaggtcgccaccatcacagagattggggacgaggcggtgggcgtgcagatcgacgcgccggcgagggatggcgaagccaacgccgcgcttgtcgactttatcagctcggtacttggggtgaagaaaagagaagtgtctataggctcgggttctaaatcgagggaaaaggttgtgctggtacaagatgcgactcttgaaggtgtctacgatgctctgaagaagtcttgtaattgtgcatgaggtatgtacgttaatcctggagttaacttgaatgggcagggcatgtgaatgcttttctgatacgtaacctatttgcgatgtgatcctgttccagcttgcaaacacaagttagaaaatgaagtgagacgaggctgaattgatcgttctcttccttaagctgtcagaataataatgcatatatgtcaatgcgatgatggtatagggaatgcagatgcaccagacattaccg

SEQ ID NO: 140200 - DNA, 690 bp, Zea mays
  Clone ID: MRT4577_59345C.1
ctccggggaagcgaggcaaggccaaaggggcggcgccgccgccgcccaccgcggcggcgagtaccggagctgtagggttccctggctgcctccgcctgatgccgccgtcgaccgtggccatatctatacacgccaagcccggctccaaggtcgccaccatcacagagattggggacgaggcggtgggcgtgcagatcgacgcgccggcgagggatggcgaagccaacgccgcgcttgtcgactttatcagctcggtacttggggtgaagaaaagagaagtgtctataggctcgggttctaaatcgagggaaaaggttgtgctggtacaagatgcgactcttgaaggtgtctacgatgctctgaagaagtcttgtaattgtgcatgagcttgcaaacacaagttagaaaatgaagtgagacgaggctgaattgttcgttcttggttgattttgtgacaagtggatcacgggggatcgaagggaattgagggggaaatgaactaattttcccctcaatcctctccgatcctcccgtgatccctggtcatcaaatcagctctaagctgtcagaataataatgcatatatgtcaatgcgatgatggtatagggaatgcagatgcaccagacattactgaaccttggtttgtatggctatctgcattgcacccgtggagacacgtacgtgctgac

SEQ ID NO: 140201 - DNA, 468 bp, Zea mays
  Clone ID: MRT4577_59346C.1
gacccaaggaaaacgccgcacctacaacaaaacaagctttttaattaataacccaacgctgtgagcaatcatctcaggagcaaaaataaaaacaccaaggggcggagacactggttgagccccccgacctgaccttttttccacccaggagtcaaccgattaaccaactccctgcaaaggctactgcgagggctcccacacactgttgctccaagacaccccccaaaaacaaaaaaaagcaactcctgaaactgaaccctttccggtgtagcgcctatcccccttttattttcaccccccgagctctcttgactgaggagcgagccaccccctttggatggggccgataaataaaaaccacctctggagattctcgacagggatggttaaaacaacaggtgcgaagaaaccatcccctggaccttctcgagggccatgcccggagacagcacgtaactagaaccaaca

SEQ ID NO: 140202 - DNA, 293 bp, Zea mays
  Clone ID: MRT4577_59347C.1
tctcactcgtccaaccaaacatacgtcttcagcataaacatttcattaaaggaccaagggtaccttaagtgagccacacatttgtctccttactactttcagaactgaaccttgatctaaggtcagaaactcaaacctactgtcccacttagtgaacaccaataccttatatagtgtattaggacattccctctccccaaatttcaaaaactctattatgctattgaatacgaccttcatgctgattataccataactattttcttaggaaacaattacaacacctacacttt

SEQ ID NO: 140203 - DNA, 747 bp, Zea mays
  Clone ID: MRT4577_59348C.1
ggccgcttttttttttttttttttcgacagaccaaacgtaaggattttacacgtacgtagaacatcactgtttaaaaaaaacgaacacggcccaaaaagaagtaaagaagatcaaaatctcatgacgacaccacaaactcactaagacctagcttcctagttcctatattgctaacatactgcaacatcaaacatatcaaattacaggtacaatggaaccagaaccactgaccaggccagttcacttcttcttttgcctcgcaactgattctttagctacggcgtgcgctgcttggctgacaaaagacgacttcttcatattacccttagggtcgagggcttttctaatcttgaatacagcccacgcagctccgagaacatttcctgtagcgtggaggtaattgtgtgtggcttcacctgcttgttcaccgtatctgtgtgttacaacagaagtggtcacaactgaggatgtctgcatcacatttttgccagacacttcaacagcatcccatattttcccaaatccatcaagtgaagcaagaataacttcaccaggcattaacttgaaaaacttttgtgctggtttggagttcaacacggtgcttgtgacaaagccagtgactttcagaacaccagacaggattgagtttgccaccctgttggacatctttgtaaccctcctagccctcttcatccttctgagagtgctgggcttcacctgggtcggcttcgtgctgggacccacgc

SEQ ID NO: 140204 - DNA, 739 bp, Zea mays
  Clone ID: MRT4577_59349C.1
ggtacgcctgcagtaccggtccgggttccgtcgtgcccggccggggagatggctccggggaagcgaggcaaggccaaaggggcggcggcgccgctgcccaccgcggcggcgagtaccggagctgtagggttccctggctgcctccgcctgatgccgccgtcgaccgtggccatatctatacacgccaagcccggctccaaggtcgccaccatcacagagattggggacgaggcggtgggcgtgcagatcgacgcgccggcgagggatggcgaagccaacgccgcgcttgtcgactttatcagctcggtacttggggtgaagaaaagagaagtgtctataggctcgggttctaaatcgagggaaaaggttgtgctggtacaagatgcgactcttgaaggtgtctacgatgctctgaagaagtcttgtaattgtgcatgaggtatgtacggtaatcctggagttaacttgaatgggcagggcatatgaatgcttttctgatacgtaacctatttgcgatgtgatcctgttccagcttgcaaacacaagtttgaaaatgaagtgagacgaggctgaattgttcgttcttggttgattttgtgacaagtggatcacgggggatcgaagggaattgagggggaaatgaactaattttcccctcaatcctctccgatcctcccgtgatccctggtcatcaaatcagctttaagctgtcagaataataatgcatatatgtcaatgc

SEQ ID NO: 140205 - DNA, 2032 bp, Zea mays
  Clone ID: MRT4577_5934C.1
cggggtactatatagattattataagacagagggaatggtctttgcctcgcagcttcttggttggtgactcggcgcttggcggatcctgagcccgagccttgccggagggagaaggggagagagcggaggagaaaccacctttctttccgtttcagacaagctcccagctttgaccgccgccgccgccgccgccgctgtgtgtgtgtgctcccttagtagttagtccctgtcgcgtcccggatcggagctcccctccgtgcacgggacaccgccggtccgggcgtctccactcccccccggatcgatcagctccgcctccgcaagataggcaagcaatgaggtgcctgcctttcttgcatggagacaccaaagagaaggatccagtcactaagtcggcctctctacggtccatgagcacaacatcaacggagcgcgatgtccgctccggttcagacttcacctccttgaatgtttccgacatgagcgccgagtcgataaggaggacgcagtaccccagcttcactgaccgcccgtctaacctgagggtgttctcctttgctgaactgaagagtgccacccgcaacttcagccggtctctcatggttggcgagggtggctttggctgtgtgtacaggggtgtcatcaagacctccgatgaaccgaacgaacgaattgagatcgctgttaagcagttgaatcgtaaaggacttcaggggcagaaggagtggttaacagagatgaatgtgcttggaattgtggatcatccaaacctagttaaacttataggctactgtgctgaagatgatgagaggggagtacaacggcttttagtgtacgaatatatgcctaatggaagtgtggatgatcacttgtcgagtaggtcaacttctactctgtcatggccaatgagactaaaagtagctcttgattctgctcggggactgaagtatctgcatgaagaaatggaattccaggttattttccgggacctgaaaacatctaacattttgttggatgagaactggaatgctaaactgtcagactttggtttggctaggcatggaccagcagaaggtctgacccatgtctccacagcggtggtcgggactctaggctacgcagctccagagtacatgcagactgggcgcctgaccgcgaagagcgacatatggagctacggcgtcctcctgtacgagctgatcaccggccgccgccccatcgaccggaaccgcccaaagagcgagcagaagctcctggactgggtgaagccgtacatctcggacgtgaaacggttccccatcatcgtcgacccgcggctggaggggcactacaacctcaagtccatgacgaagctgtccagtgtggcgaaccggtgcctggtccggatgcccaagtcccgccccaagatgagcgaggtgtacgacatggtgcagaagatcgtggactgcgtggggaccggcccgccgcagcccccgctgctgcactaccacggctcggcctctgagcctggccctggcgacaagcgcgccaggaaagggtcggtgaagaggaggaggctctgggagctcaggttcggctgccggcacatcgtgtggcgcggctggaagcctgcgatcgtgaaggacctctgaggagggcggggtggctccggtgctgtaagtacagtagctagctagctgttcatagagacggtggtaacagtttgttccaccgtgtagtgcttggttggtatatagggtgagttcatgcttgcataataccagtcgagaagaagaagaagaaaggtgcacagttgagtggggtggcgttggagtggagtacatagagtagtgctgtgtgtaatttccagtgcaacttctgctgctggctttcttcgtctttgggacaagtttggtgtggtcttcggggatgattcagatacccattcccttgtatgccatttttgactgatgtccagggacccagcgcaccctggtctcattcatttcttcgtccaaaaaaaaaaaaaaaaaaaaaaaaaacaacaaaccc

SEQ ID NO: 140206 - DNA, 1170 bp, Zea mays
  Clone ID: MRT4577_59350C.1
gaccctcgaggttcggccgggacactcaactccctcgattagtaataacaggaaaaccatccgccggaggccggagggcagattctccaccaccgcctccaccccgccctcacgacgcgaatctgcggcgaacccccctctcgtattccttctcgccgccctgccccgagcgcaccgtttagaggccgccaggctccggcacccccgcccgcccgggctcgcctggggtcgggatgccctgctgcccgccgtcgctgctcggagtcggcccacggctgcgctccttcctccgcgactacgacgcgctccagtccctcgccctcgtactcatctacctccagattggttgtgcactgatcggatcacttggggcattgttcaatggggttcttgtgatcaacctggtgattggtctattcgctgttgttgcaattgagagcagtagccagagacttggtcggacatatgctgtccttctcttctttgctgtcgtccttgacgttgcttggtttatactcttctcacatgctatctggactattaatcctgatgataagtatggtcaactgtttgttttttcactcagacttgcattgtggatgcaaatcattgggttttcagtcaggtttttgtcttcgttcttatggattcagatgtatagattagggccttctttcaccactccaacatattttgaaaccaaccatgaagcaagaactagtttcttgagccctagatctgattcagttagacggaattccatggcagaccacgcgttagggggttcaatctatgatccttcttactactcgtcactgttcgaggatgttcgaaacaatgcatgcaatcatcagggtgataaacaaagtggtagtaatgacagtggttcaacatccgcgggccagtcaccacgacttaaatcttttgcttgtagatctcttctggctaatgatgtggaaagtggactaagaagaccgttgaactcctaggataaaacagcgggctcatgttgaaggtggaccatattttggtaacctaaatcctgtagccatctttctcttaaacatagaggcttacacaccgcagcagttcatttctcggaccagtgggaagggggctgtccagcgaaaggagcttggcaaatactgtaactgtgacttcatgtgggca

SEQ ID NO: 140207 - DNA, 494 bp, Zea mays
  unsure (1)..(494): unsure at all n locations
  Clone ID: MRT4577_59351C.1
acttagttagctcggctgagtacttgctttttgtttggttgtcttgatcattatgtgactttaattcttatatccttgaaatgggccttcattcggcagaagttgaatttaatgaagtcgtggtattcatgctcataattacttcatcaatttttgttttagattggttgtgcgctgattgggtcacttggggcattgttcaatggggttcttgtgatcaacctagtgattggtctattttctgttgttgcaatcgagagcagcagccagagacttggccggacatatgctgcccttctcttctttgctgtcgtccttgacgttgcttggtttatactcttctcccatgctatctggactattaatcctgatgagaagtatggtgaactttttngttttctcactcagactaacattggggatgcaaataattgggttttcagttaggtttttgcttcattcttatggattcaaaagtatagaataggggcttt

SEQ ID NO: 140208 - DNA, 1000 bp, Zea mays
  unsure (1)..(1000): unsure at all n locations
  Clone ID: MRT4577_59352C.1
atttttaaaaaatttaaaaaaaaanntaatattttttttttttttaggggtattattaatattttataaaatttttataattttttttttttttttttaatggtttttttttttttttaagaaattgttagtaacagaccaaacgtaaggattttacacgtacgtagaacatcactgtttaaaaaaacgaacacggcccaaaaaaagaagtaaagaagatcaaaatctaatgacgacaccacaaactcactaagacctagcttcctaggtgtcgtttggttcccaaaatgtaacgtaaatggtaacggtaatgatttacattcgattaccagcggtaacaaatttgaataggctggtaacaatttctagtgtggtatccgattacggttagacttaaacaaacatgatcaaacgttatttgttatctattacattacaaacatataaaccaaacagcaacttagttcctatattgctaacatactgcaacatcaaacatatcaaattacaggtacaatggaaccaccgaccaggccagttcacttcttcttttgcctcgcaactgattctttagctacggcgtgcgctgcttggctgacaaaagacttcttcatattacccttagggtcgagggcttttctaatcttgaatacagcccacgcagctccgagaacatttcctgtagcgtggaggtaattgtgtgtggcttcacctgcttgttcaccgtatctgcatcaatcgaaccattaaactcttctagagggaaaaattaagtgggtggcaaaatttttgccgttagtgacttatgtgttagtgacacacgaaggacggcaaatagctaaatgcccccttctagagttctagtatcaaccatatagttcactggaacttagtttttcattgactaatagccaggtggcaaccagacaagagccgagccgtttctacgcataagtaggtgtaaaatcatgttatggaacaaggttttnntaaaagaaac

SEQ ID NO: 140209 - DNA, 1278 bp, Zea mays
  unsure (1)..(1278): unsure at all n locations
  Clone ID: MRT4577_59353C.1
cattggaacctcgaggccggccgggaggacaagacgacagaggctaacactagttatcacatccaccataacagaccatggctaccgcctcagcttcgctagctcttgtcatgttcgcctgcccttctccttgcaggcacggcgttcagtgatgataccgtacccatacccttgttggagcggttcaaagcctggcaggctgaatacaaccgcacatatgcgaccccagaggaattccagcaacgcttcatggtctacagcgagaatgtccggttcatcaagaccatgaaccagctgtcgaccgggagctcatatgagctcggtgagaaccaattcaccgacctcaccgaggaggagttcaaggacacatatcttatgaagctcgacgagcagccccctgcagctgaggccatggcaccgaccgtcggcaccatgagcacagcaggcatgtccaacggcaacaacaccggcgaggctcccaacagtgtggactggaggaccaagggagcagtgacgccggtcaagaaccagcaacaatgtggctcttgctgggcgtttgcaacggtggcgtccatcgaaggtgtgcacaagataaagacaggtcgtctcgtgtcactgtcggagcaagagattgtggattgcgaccgtggggggaataaccatggctgccatggtggtcactctagttctgccatggagtgggtcacccgcaacggcggcctgaccaccgagtcggactacccatatgtgggtaggcagggacaatgcatgagcgacaagcttggtcatcatgcggccaagatccgtggccggcaggcagtgcagggcaagaacgagggcgcgctacagcatgcagtggcggggcggccggtggccgtaagcatcaatgcaagcagggccttccagttctacaagcgcgggattttctcaggcccctgcaacaccacccggaaccacgccgtcacggtggtcgggtatggagccaacgctagtggccacaagtactggattgtcaagaactcatggggtgagaggtggggagagaagggctacgtgcgaatgcagaggggtgttagggctagggagggcgtgtgcggcatcgccatagcgcccttctatgcggtgatgtgagagtaccgtctctccccatactagttaccagttgcattctgattctaaacaagtatgggtgtcatcttggagaagaatgcatggaattaaataaactacagctcaccgagggatggtacatggttntttagaaaataaanataattt

SEQ ID NO: 140210 - DNA, 713 bp, Zea mays
  Clone ID: MRT4577_59354C.1
tgccggccgaggcttcctccaggctctccccccatcttctcccccaagttcatcttgtgcagttgtgctaacacgcggcgccccaggccctccggcgccgcccacctccaccgcctggaatccaggacatccggcgccgcccacctccgtcccctgtctgctgcctcgactcaactgttttgctgcgatggggttattcaggggcagcttcactctcttggtgggaatgggatgtggtgtctatatagctcagaactacaacgttccgaacgtcaagaagctattcaacacatatgtttttctggcaaagcacatcgaggaaacctaccgtaagccgaagaagaaagacgatgattgatcctttcacatttggtatctctgttatgccctggagcatgtggaaatgtgcatttttgaaattgtgaaggcaattttggttatggacaagttttttaactccagtggaaaatgttagctgtgaaatttccagttgctgtaatagtttttggtcgtattggaccatgggcttctagagcctcccctttttgctcgtgttcctgtgcctgggaaatgcactggactttgttgttgaagtgcggcgatggataatctagcatcatcagtgtgtttttcatgttaacataaggatggggtgatatatttatttgaacctagatttgccgaaatatatatattgacacaggttcttcctc

SEQ ID NO: 140211 - DNA, 354 bp, Zea mays
  Clone ID: MRT4577_59355C.1
acgatcactcgccagattgacgccaccgttccctaccaacaatgccgactcgagatgcggaggaagaggcatgctaataggaggagtctgaaagtcttcctaccgaacaaacattagcacatgggcgatctgatcctatagaatgtcttggtcaagatcgcctatcagcacctgcgtctcctgtgtagcagcaccatctccggcgccctgtccaggaccttcgaggcgccgctagagacgatctacactcactagattgtcggctacatcaacgtctactccattgacagggtgtgccattggatcattcagaacgacagatgatcctgtctgttccactgcaacgacttgtac

SEQ ID NO: 140212 - DNA, 5759 bp, Zea mays
  Clone ID: MRT4577_59356C.1
aaaaaaaaaaaaaaaaaaaaaaaaaaaaaaaaaaaaaaaaaaaaaaaaaaaaaaaaaaaaaaaaaccggggaaaaccatccgccggaggccggagggcagattctccaccaccgcctccaccccgccctcacgacgcgaatctgcggcgaacccccctctcgtattccttctcgccgccctgccccgagcgcaccgtttagaggccgccaggctccggcacccccgcccgcccgggctcgcctggggtcgggatgccctgctgcccgccgtcgctgctcggagtcggcccacggttgcgctccttcctccgcgactacgacgcgctccagtccctcgccctcgaactcatctacctccgttcagactctcaaactccctcgattgtaataacagagaaaaaaaccatccgccggaggccggagggcagattctccaccatcgcctccactccaccctcactacgcgaatccgcggcgaacccccctctcggattccttctctcctccccgccccgatcgcgtcgtccagagaccgccaggctccggcgcccccgcccgcccgggctcgccgggggtcgggatgccctgctgctcgccgtcgctgctcggagtcgggccgcgggtgcgctcctttctccgcgactacgacgccctccagtccctcgccctcgcactcatctacctccaggtgcgcattcccctcgtatgtcgcctcagaaggccggatcggcctggcccaccggcggcttgccgctccccgcgagatcggccaacttctgctcttgtactcgctgctgctcttgctgttagcgcctgtgatgtgaaacctggtgacggtatcgggtttgagcgtcctctagtgtttcctaccgtagtgggcgatattttagctgcctcagttttgtcagtaattctagtagttgaacgcgacggggaattgtagtttggtctgatccaattcagatagggttccgcttattttatattttaggcgtgaggttgcttgatgcttgggttttgaactagtaggcttctggatgaagtttcaaggttcagttacgtttagagataactgcgccttgcagcttaatactgtggtttatgttctctgaatttggtcagtttctgttgttgtctttgtgtttcttacattgttggagacaatcatgcgtcagcttttgttagatgcaactaaggtgccgtttggttcctaaaatgtaacgtaaatggtaacggtaatggtttgcattcgattactagcggtaacaaatgggaataggctggtatcaattctagtgttggtatccgattacggttggacttaaacaaacatgatttaactttatttgatacctattacattacaaatttgtgaaccaaacatcacctaagtgaatcccttagacgtgattatgttgaattagctaccaagttggtgaaacagtgaacggaaactggtcggtttacaatgtgatgacgcttggctattattagcattttacatagttagctcggctgagtacttgctttttgtttggttctcttgatcattatgcgactttaattcttatatccttgaaatgggccttcattcggcagaagttgaatttaatgaagtcgtgatattcatgctcataattacttcatcaatttttgttttagattggttgtgcgctgattgggtcacttggggcattgttcaatggggttcttgtgatcaacctagtgattggtctatttgctgttgttgcaatcgagagcagcagccagagacttggccggacatatgctgtccttctcttctttgctgtcgtccttgacgttgcttggtttatactcttctcccatgctatctggtatgtcttcggtagccaccatctatcagtttagttaccctgatgttttcatttggtacaatgtgaagtttggcacctagaaaggaatgttgtattctctatattcgaatgcttaattgactgattttttgactgggtttctttattcatctttcaccatgacataactaattgttttcaatgttgtataacagttgatctgtcaatgacttgtcatgcaatgactacctatataggttctgagttctaatatatcactagagtcattactatgatcattgaaacttagaactttgaagcacaagttgttcggtactccatcaagtgaagctttagcatgtgtgatcatatattctaaaccattgctttcatatgtttaggaacatttaaattatacttgcaaaattatatgtatagatttgtcgtcaaattttattttggtaacattctaattttgcaaggtttaataaagttgttacagtagaggttagtttggcatcatgtatcagtgtgaaaagcattacttgttgtgacatgactgactggaaagtgcatgtgttctattggacaagtgtagagaatttttcttatataatttttgttaggcacggcaacattcttgtagtgttataatctgtttcctaactttgtcttctaattatactggactattaatcctgatgagaagtatggtgaactttttgttttctcactcagactagcattgtggatgcaaataattgggttttcagttaggtttttgtcttcattcttatggattcaaatgtatagattaggggcttcttccagcacgccaacatattttgaaaccaaccatgaagcaagaattagtttcttaagccctagatctgattcagttagacggagtcctacggcagatgatatattgggaggttcgatctatgatccttcttactactcgtcactgttcgaggatgtccgaaacaatgcatgcaatcatcagggtgataaacaaagtggtagtaatgacagtggttcaacatctgcaggccagacaccacgacttaaatcttttgctaatgatgtggaaggtggactaaaaagaccgttgaactcctagggataaaacaacgggctcatcttgggaacctaaatcctgtagccaccgttctctttgaagcatagaggtttgcacaccgcagcagtttatttctcagaccagcgggaagggggtgtccaacgaaaggagcttggcaaatactgtaacggcgactgcctgtgttgccgagcatccacagcagcatcggtgccattttggagcaccgttcgtactcagcgagcttgagccggatgtttctgcaaatagctgtccaatgttggtgttgcatatcgacctatgccatgcgatatgtttactgcccatcatgtcccatttttcagacctctcttcctgtttcttttaactaccaaggaaaatgaagcaagtagttcgttagttctttagtcacttagttattttctagctgtaggctggcagttgcttctcttctagcattttggtcattgttcatagcatttgtgttgacaaggaacagatctctagatcagtgaaaggaaacaaatgtaagtttcattctgttctagaaagagctgtgatccctattggatgcatgagttttgttagaaatgttgcagggttttcacacgaaattgttctggacccacaagttatacaagtcaaattagtctattttatgcgccgctttttttttttttttttttttttttttttttttttttttttttaccgaaacatcaccctcacgtattccttctgaagcacctttttttttttttttttttttttttttaacgttttttttaacggtaatgatttgcattcgattaccagcggtaacaaatttgaataggctggtaacaatttctagtgtggtatccgattacggttagacttaaacaaacatgatcaaacgttatttgttatctattacattacaaacatataaaccaaacagcaacttagttcctatattgctaacatactgcaacatcaaacatatcaaattacagggccaagggaacccaccgaccaggccagttcacttttttttttgcctcgcaactgattctttaactacggggggcgctgcttggctgacaaaaaacttcttcatattacccttagggtggggggcttttctaatcttgaatacagcccacgcagctccgaaaacatttcctgtagcggggagggaattggggggggcttcacctgcttgttcaccgtatctgggggttacaacagaagggggcacaactgaggatgtctgcatcacatttttgccaaacacttccacagcatcccatattttcccaaatccatcaagggaagcaagaataacttcgccaggcattaacttgaaaaacttttgggctggtttggagttcaacacggggcttgtgacaaagccagtgactttcaaaacaccagacaggattgagtttgccaccctgttggacatctttgtaaccctcctagccctcttcatccttctgagagtgctgggcttcacctgggtcggcttcgtgctgggacccacgctcttcttcatcacttcttccccacgccgcaggccccccgccgtgatgtcaccgcaccagatgatgcccctcactagctgccccgatccccgggcgatcagccgcgccaccgacgagctgtaatcgtccacgttcggcgctattgtcgtccagaacgccgcggacttctcctcaacaacctccttcttatccccgacagcttcttccggcgtgatctcggccactgccctcgcgtccatgacctctgacttctccttcgccgccgtctccacctgcttcaccgagaaggtggtgtactcctcgaggaccctgtccagctccgccaatacttcctcctgccccttcccaacgaccgtgaggccgtagctcagcgccgcctccgcgtccgcttcggcaccgtccgcgtcatccttgtcgtccgggtggtccgtgtgtgggacatggagcgagaagaagtagtgcgcggggtcgagcttgaccgccgcgacatcgcgggccagcggccactggacgggctcctgctcggcgccagcgtcagaccgcccgctgctgaacaagcggaagaggccgcggcggtggtggggcttctcgtggatcaggcgcgcgaggacggcgacggagtggtccccctggcggaggcgcacgatggagagcgtgccagcgccgagatcgacgctgcggtcggggtcgatgaggtggagctgcgccccagggacagcgatgatggtctcctctgtggtgggcggtggcggtgccgcgtcctcttcgaccgtctcggggaagaggttctgtgcgagctcgttggggtcgacggtggggtagagggagttgcccgtggcggcgccggcgccggcgcaggtggaggtggtgggtgcggagaagaaaggggtattgagatcagggtgggactggtccacatccgggtagaggctctgcttggcattcgaggaagcgaaagccatggttgcgtagctggtcggttgcgcttagcttgctgcggatcgagtcgagcgaggggaagtggggaaacagaaatgggagaggtgggattttattacggaaagaaccaagtggtgaaggcgacggttgctgtggcgctcagggacgcggagacttctgcccgttggccgtcggcaggctggtaccgtttctcaaaccgaaccacacctggggcacagatgtgggtgcggagatggtggtggcagcggatccggcaagccgataagacgagaagactttcccggccgggaagggggcgaacgacgcgtagatgtcgcggcgaaaggcggtcgtgggggc

SEQ ID NO: 140213 - DNA, 1742 bp, Zea mays
  Clone ID: MRT4577_59357C.1
gcacgagctggaggttcctgcaagccccccgatgaactcagagagttgcaagacaccaaaggcaaggagcctggtcaagagcccaagttcgatgatgctcctgagctacttgaacaaggcaccatcaaaccaaggctacagtccgcaaaaggcttatggatctcggcccagaccgagatcaaagtccccccttcccagtatcgcgccttcggaagtgttcagggaagcgaagtctaccagcaagaggtttgcaagccctcctccacagcgaagaggatctgaaaagagtatctatggcaaatcgtttgctagacaggtgtcggatattggtcagagtcctgattggtgttcaactccagtggtatctggtaagcacaagtctcaaaagaatagtgcttggtcaaggaaatccagcggtggaaggaggattagcgcagtaaaccctgcggatgatcgtagggcgcagatggttagaatgaatcaggcggtgcagacgacgttcgattggacgctcgatccatccaagctgcttgttgggcacaggtttgctagtggagcgtgtagccggctgtacaaggggttctatgatgagaagccagttgcaattaaatttatccgccaacctgatgatgacgacaatgggaagatggctgcaatgcttgagaagcagtataacagtgagatcaattcattatctcatctgtaccacaagaatgtgatcaagcttgtagcagcctacaaatgcccaccagttttttacattattaccgagttccttcctggaggctcaataaggtcatacctaaacaatccagagaaccaccccatccctctagagagaaccatatccatcgctctcgatgtcgcccgtggcttggagtacatacattctcaggggatcgttcaccgtgacatcaagcccgagaacattctcttcgacgagaacctctgcgtgaagatcgctgatttcggcattgcctgccaggaggccttatgcgatgtgctcgtggaggacgaaggcacttacaggtggatggcgcccgagatgatcaagcagaaggcgtacaaccgaaaggtcgacgtctacagcttcggactgctcttgtgggagatggtgtccggtagaatcccttacgagaacctgaccccttaccaggtggcttacgcagtagccaacaggaaattgacgccaacaatttccccagaatgtccaccagccctcagatccctaattgaggagtgctgcgccttgcggcctgacaagaggcccgacttctggcagatcgtgaaagtgctggaacagttccactccgttctcttggagggtggctgcctcgacacacccaagagcggccccggcacctgccaggatcccaagaagcggctcatgcggtggattcagaaactgaagccgaagcatagcacctgagtaaccaaactcttatagttgtagcatcgttgcagccgcagtttttgtcaggttgggtatgctcagtagtttagatctcgattcaaggaaccagcgttccaaggatgctcgtagctgtgcatccgctgatctgcaatatagatcttacagtacatggttatgcttttgcgtttttgccttctcccttgctgaatttacctgcaggttattatcatgataccgtagcatgtgcctctcactcgttgaggtgaaaacaacaggaaaagcaaaagggggtatgcttaatacaattcttgcgcctttcccttctgtt

SEQ ID NO: 140214 - DNA, 376 bp, Zea mays
  Clone ID: MRT4577_59358C.1
gaaggcatgaaaacctggaccatggcgggtagtacagacagtctttttgatgacgagtctaggaaggctattatgctgctaaaaggcttaaaaggaactcgcctgttcataccaaggattgtgatcagggagttggattccatgaagcagcgggagggcctgttcagacggtcaacgaaggcgacctccatcctgcaatggatcgaggagtgcatggcaagggagagctggtggatccacgtacagagctcggccgacatgttcccggtagcaccaaccccgcccgcgaccccttcagcgcagcgcatctacgaggagatcgagatcagctccggctccttcaacccgatgatggcgtagatcggccctcgaagct

SEQ ID NO: 140215 - DNA, 150 bp, Zea mays
  Clone ID: MRT4577_5935C.1
atcacgcgtacggagaagagttgttcaagggttatgctacgagttgcgtggcggtccgcaggggcattctacgagtggtcaaggaccggttgtacattgtatacgagaaagcattagtcataattagctcactgcactaactcatagctt

SEQ ID NO: 140216 - DNA, 393 bp, Zea mays
  Clone ID: MRT4577_59360C.1
gcgccctcctcgtcagtagggtccggagcaacgagaaggtcgtggtgctgtcaaacagcgtcacgctcgagatcaaagccatggcagagggcctgccatgcgagggagccaaggagttccgcgagtccctcgtggacccgtcctccaggcggttcatgtgggcggccagcgccccacgggggtcggcctggtcctgcctggacgcgtccgcgctggcggagaactactacaacagccgccaccacgctatgaagcggagggttctggtggcggcgaggccctccgagtccgaggccgccaagggcctgaagctgatcctgcgtcacaattccctgtacgcgcaggccacggacgccgtcaacaagacgccgctggtatcgctggccacggtgt

SEQ ID NO: 140217 - DNA, 185 bp, Zea mays
  unsure (1)..(185): unsure at all n locations
  Clone ID: MRT4577_59361C.1
tagtgtgttttctatgagtaatcgagagaaccaatgagcttgcgggtgcagtgagctagcctcaaaacaacatcttgtnaatgctattcttacttacattataaatcacctcatatgtacctgctgggtccctgcttcctttcatgaaaaattcacttttttgcagcaatccagcgcttttgaac

SEQ ID NO: 140218 - DNA, 1453 bp, Zea mays
  Clone ID: MRT4577_59362C.1
cccaggtttttttttctgttctcagtaagttgttggagtgattgtatctgtatgcttcatatgaatgccttctgtttttagtatcgcatctgacattacctatctttatgctgggcagtgtaatggccacgaatcaggtagtgctggacaaggcatgaaaacctggaccatggtggctaatacagacagtcttctgcaatgcgagtctaggtgcgctattatgctgctaaaaggcttaaaaggaactcgcctgttcataccaaggattggtaagctcagagcaaatgcagctgttgtgtaaatgttgtgcaaactcatcctgaaatgctctggagaccatcaccaaaggttttgctaactgaggcagtacatacgtttctctttacagtgatcagggagttggattccatgaagcagcgggagggcctgttcagacggtcaacgaaggcgacctccatcctgcaatggatcgaggagtgcatggcaagggagagctggtggatccacgtccagagctcggccgacatgttcccggtagcaccaaccccgcccgcgaccccttcagcgcagcgcatcgacgaggagatcgagatcagctccggctccttcaacccgatgatggcgttgttcggccctcgaagctccgccgcgctcgcggatatgatatctcccagacccgaggaccgcgtcctcgactgcgccctcctcgtcagtagggtccggagcaacgagaaggtcgtggtgctgtcaaacagcgtcacgctcaagatcaaagccatggcagaggttagtacggtaaccacccaaacccaaccctgcctgcttgctgtgtgcgttcgaactgaacctggttgtgttgcgttgcccgcggcgcagggcctgccatgcgagggagccaaggagttccgcgagtccctcgtggacccgtcctccaggcggttcatgtgggcggccagcgccccacgggggtcggcctggtcctgcctggacgcgtccgcgctggcggagaactactacaacagccgccaccacgctatgaagcggagggttctggtggcggcgaggccctccgagtccgaggccgccaagggcctgaagctgatcctgcgtcacaattccctgtacgcgcaggccacggacgccgtcaacaagacgccgctggtatcgctggccgcggtgtgagatcccccgccctcggttcttgttttggcgtgttgttgtcatgatttccatgccgagcgaaactgtgggccgtgtgcagactttgaacaggacaccgtcagtggtttcgttttgggccatcatgagtttttgagtttgtgcctttagctagcgcagcgaccgactagtgggtgagcaggaagctcccgagggcaggcagtgtctttgactctgtcttgtggacgtattctacacacatctctcgactgagatacgaatgttttttttctac

SEQ ID NO: 140219 - DNA, 253 bp, Zea mays
  Clone ID: MRT4577_59363C.1
cttgtacctcgacagcggccgccatcactagagcggcggcactagcaaatgcatggctgaccggcaccagcaaccaaccccactttgcgtacatcaactcgtatcaaagacaccacactcacacaaacatcactcaccaccagagccaaattgacactctcaccaatttgcacacagaatacacaaccgccacaagtataccgttacgtcaggtatacctactaagggagccaactaacactaattgcaccat

SEQ ID NO: 140220 - DNA, 547 bp, Zea mays
  Clone ID: MRT4577_59364C.1
aaatgataagggaatgcattaactacggtttgaacttgagatctgatgctgtgacaaacagccacgtatccactggataccaaacggccgccgatattgcgaaactgtgcgaattcttgtgtaagtatggtcctgtgcttcgctatgaacccggcttcgtgtattcggtcgcgttccacacgcagcggctgactcatccgatgcccatatgttgtacgatttgactcaatggccttgtgctccaccagctttgtcaggtttttaatctccaatagtacatcactgaagtatcttcacaagctttgctggggtgtcaccctttttctgaattgctttcagagcttgtctgggtcagaatctgcattaccaacaccattgtaaacgtatcagacttccaacatctcaaaatttggttagcttctagtgagccgggaacgaaaagactcctctgatcactcttccatgtgaagccagacatctcatgccacgcctctctatcatcattattcaagacaccggaaatgttacccgcataattttacttaaa

SEQ ID NO: 140221 - DNA, 400 bp, Zea mays
  Clone ID: MRT4577_59365C.1
tttcacccgcctcccacatccccatggggggcctccagatggccagccggtcgaatctactcattcctcggctaaaatgagatagatttagcacatacagggagggcaagacggtaaccagatcgatgccaacctctgggaggcagtctgtgaagaacactgactagacactacatgtcagcccacagacgcttctgacctttagttacagcgcgtcaatgactactacaatgaggcatattgtggaccggtctgagactagctctctacaaatggacctaggacctgagacaatatacagtgttcgcactgaaccctataggcagatctttcgcactaacaactctgtgtataggaactctcgtgctggtaacaactgggacaacgggcattatactga

SEQ ID NO: 140222 - DNA, 387 bp, Zea mays
  unsure (1)..(387): unsure at all n locations
  Clone ID: MRT4577_59366C.1
ggggtgggtgttttttacgtgtatgtgtttgtgtgaaatttaaaaaccatgcttttaaaatatacaaataaattttggccagcttatcgtttaatgtntttgtgtnttgaattcaattcttttttgggattngnaaagtattcctttgggggggggcgggggttgattncattttaataaactttnatattcatggggggggatgcgtatncattttggccaatcacttttgctaatgctnattttatttttgaattgaatgatttttgtgtgcacgctgngctgattgtgtgtttggttgaagnntttttgacttgttgcggtgtgntgaacattgtggtttgnngtgggtttgtgttggtgtggggttggggttgttggggggtg

SEQ ID NO: 140223 - DNA, 267 bp, Zea mays
  Clone ID: MRT4577_59367C.1
taaatccctagtaagccgccatggtgaagtactcaagggagcctgacaatccaaccaagtcttgcaaggctagaggcgccgaccttagggttcattttaagatcactagggaaactgcctttgcaatcaggaagttgcccttggttaaagctaaaaggtacttggaagatgttcttgcgcacaagctggccattccgttcagacgtttctgtcgtggtgttggaaggacagctcaagcaaagaatagacactctaatggccaaggaa

SEQ ID NO: 140224 - DNA, 293 bp, Zea mays
  Clone ID: MRT4577_59368C.1
ttttgggtaattttatcagttttaatggattattatattgtacatgttacatgatagctggtttcttggtttttcataacaaaaaccgactacaaatccaaggaccaacagaaacgcccataactgagttataaaaaccctgggacaagaaaaaaaatcggtaccaattcggtcaatcattctgctgaacacccacacttttcagcttagaaaaaaaatcgttctgagaatcctgaacctattgatcaaaataatcaggctttaaaacaggggtattcaaaactagtgggccc

SEQ ID NO: 140225 - DNA, 141 bp, Zea mays
  Clone ID: MRT4577_59369C.1
cggcctgggagtcagcggcccgagcgggaagcgccgggcgagcccactgtgcggccgtcgtgggggaagcgaaggttcctgattccacctacctcctaagtgaaggcttccgaccctggagaggaggcggcgccctgtatc

SEQ ID NO: 140226 - DNA, 341 bp, Zea mays
  Clone ID: MRT4577_5936C.1
cccaaggaaatccggggcccggccctttaaaggtccccttcacccaaattcaacagaagtttgttccgaaaaaatttttgccggcttttaaaaatggggttggttccaattaacccttgaccggcttcactggggcccgccccccttttaaaggggtttttagcctaaaacccgggattttattataacaggcgctgccaaggcttttaatattttggctgaacaggacctttctttttggttcttaagcaactaatttttccctcctgtggggggggaggggtgggccaaaccggcccataaattcctgggctctggtggggatggccaattaggggggg

SEQ ID NO: 140227 - DNA, 682 bp, Zea mays
  Clone ID: MRT4577_59370C.1
ccggccggagcagtcgcttcatcttttatacccgtcactgacttttgctgtgacccaactgtgcgcccaacatgccttttaacaccgaacttacgagggcccttggcatcagagtgcccgttgtgcagggaggtatgcaatgggtgggatacgctgagcttgcttcggctgtcagcaacgcaggtggtcttgggatattgaccgccctcacccaaccgacccccgaagaccttcgcaaggagatccggagatgccgaaccatgactaacaagccttttggcgtcaacctgaccctccttcccgccatggttcctccggactatggcgcgtacgcccgtgtcatcatcgaggagaaggtcaacatcgtcgagacggcaggaaacagccctggcccagttatcaggcaactgaaagctgctggcacaatcatcctacacaagtgcactaccatcaggcacgcacagtctgctgtcaagcttggtgttgacttcctatccattgacggcttcgagtgcgccggccacgttggcgagacggacattaccaacttcattctgctcagcagagcccgccagtcgctcggcgtaccgttcatcgcttcaggaggctttgccgatggtcagggtttggctgccgcgcttgccctcggcgcgtgcggtatcaacatgggcacccgattcat

SEQ ID NO: 140228 - DNA, 175 bp, Zea mays
  unsure (1)..(175): unsure at all n locations
  Clone ID: MRT4577_59371C.1
tctgtagggcaatgtctcagcgaggattgggtggctgttgcttttgactagtagggtctctcaanctntnccatacttggaggatgcactggagaggatgaaggacagccttcctccgaagcattattgattttgacatgtgtataacaactcgcgtaaatgattacatggcata

SEQ ID NO: 140229 - DNA, 350 bp, Zea mays
  Clone ID: MRT4577_59372C.1
atcacaaattcaatattccaggtgaaatgcaaacaagaagatcgaagtatttttttttcaagaaaaaaaacgtgtaactaactaactaactgatggctgatggtgctatagcctatagtagcaccgagaaggaagtacaccattagattaggggatagattagtaggtgagtttcaactgatgtcagggccgggcgaggaatcttttccttttcctacggattttactaaccatggaacatgcaaaggttccttcttctcatcactcttctgttctccctccatctgactgcagttggcgcgtcaggacaacagcagccggagctccagtgcagggcaacggcagtggcg

SEQ ID NO: 140230 - DNA, 258 bp, Zea mays
  Clone ID: MRT4577_59373C.1
attataaacccaactttatttgggggggggggtttattaaatatagagtccacccccaaccattcaaatcaaaaaaaagtgattgagcaaagacaccttgtatgagaggaaaacggctagctgctaaactaaagagtcctgaacaaagagctacttcattaattttatcaaagccggacgtatcttaggcagaaaaagattgggcggacatattattgacaccgaggatatgcaaattgaggaggggcaaggctcaaa

SEQ ID NO: 140231 - DNA, 261 bp, Zea mays
  Clone ID: MRT4577_59374C.1
gggttccaaaagcatggggtctttgctcaagaaaaatttatgctttaacagtgatgaatgggccacgagggtgggttcgctagcatgtggggcgaggaaacaacaccaaaggggggcgggggttatagaagacctctgcccttagaggagggggcaaaaaaaaaaacggcccggcggggaaatgggataaaaccgtgtgcgggggctttttattgggggggggggaaataaaaaaaacgtttttgaaaaaaaagggccccc

SEQ ID NO: 140232 - DNA, 620 bp, Zea mays
  Clone ID: MRT4577_59375C.1
ataatctctctctctctcacaaacatcatctcctccacctctcaaccaagccaaggccaagagcccagtgaagcagcggccatggagggcaaggaggaggacgtgcggctgggcgcgaaccgctactcggagcaccagcccatcggcacggcggcgcagggcggcggcgcggacgagaaggactacaaggagccgcccccggcccccttcttcgaggccggggagctcacctcctggtccttctaccgggcggggatcgccgagttcctggccaccttcctcttcctctacatctcggtgctcaccgtgatgggcgtggtgggcaacccgtccgggtccaagtgcggcacggtcggcatccagggcatcgcctggagcttcggcggcatgatcttcgtgctcgtctactgcaccgccggcatctccggcggccacatcaaccccgcggtcaccttcgggctgttcctggccaggaagctgtcgctcaccagggccgtgttctacatcgtgatgcagtgcctgggcgccatatgcggcgccggcgtggtgaaggggttccagaccacgctgtaccagggcaacggcggcggcgccaactccgtcgcgcccgggtacaccaa

SEQ ID NO: 140233 - DNA, 342 bp, Zea mays
  Clone ID: MRT4577_59376C.1
gttggatttatctctgctcttatatcctttttcctaagtcttaaatacaaaagtttgtttctagcatatgaatgaatagttgcacacctgtaataattggtctgttgatctaatgtaatgtacttttactttttcatcagatgtattatggagcatattttgataaattcaatatcttgtcctttagccaacttacacaggaaatttgttgacatacctattttttttctcgaatgcgtagtgcgcatcattatattaagaagaaaagatttattggcatacctatttgctatgttcttctcacctaatacattagtagttagtgcatctgcagtgctgact

SEQ ID NO: 140234 - DNA, 325 bp, Zea mays
  Clone ID: MRT4577_59377C.1
attcacaacaggtttatttaaaattacatgggtttcattttttttttatattatctcatttattcacatttatatgataccaaattattatttttttattattctttgttcatatatggaataataacatacatcatgcggttttaagaaaaaacaggaggattcccaactctatagcctccaaacccccaatgattaaatggcctcttcaggaggaggaattataggccggttgttctggcctgcgctaaaaaggaacgcttgacccactctcactaaaacaaagggctgaagcttcccttctccttgaaaagctgggagaaat

SEQ ID NO: 140235 - DNA, 1765 bp, Zea mays
  unsure (1)..(1765): unsure at all n locations
  Clone ID: MRT4577_59378C.1
actcctaagggcgattgggtttctcgaggccggccgggaaaacaatcatgactcgtctctgtccccttcacctcctcctcatcgctgccgcggcggcgtctgccagcggtgccgacgaggcgcacgtctccgtcgcggtcgcggagaagggcttggccttcgccaaggacgtgcttatcagcgaggccgtgcggtcgctgacccctcttctcctccccggggtggagaaggccgtccgcgtgcccttccttggcggcatccgcgttgccgcctccaacatcacgctattccacctagacgtcggggacaactccactatcttccccggggactcgggccttctcgtcgtcgcctccggcatcaccgccaacatcagtatgcattggagctactgctacgattcgtggttgtttcccatagagatcaccgacagcggaacggcctcaatcctggttcaaggaatggaagttgggataaccatggttataaagaacaagaatgggagtttggctctgtctgtttcacagtgtggttgttatgtgaaggacctagtgatatccctggatggtggagcatcttggttttatcaagggtttataaatgcttttgaagatcatattaaagctgcagttgagaaggcagtacctgaaaatatcattgaaggcgcttggaaactggactcctttctgcaaggtctccccaggaccatcagtttggacgacgtcgcggccttcaacttgactttcattaatgatccacactatggcaattcttcaattgagttcgatatcaatgggttgattacttcagcggttgctgagacagccaatctgcagaagcatccacaactttctttggcttgtggtggtgcatcaaaaatgcttttgctctcacttgatgaagatgtattcaattcagcactagaagttcattttaaggctggttcaatgcattgggttgttgacaaagtccctgatcaatctctactgaacacagctaattggaaatttatcattcctcgtttatactggaattacccaaatgacgatatactgctaaatatctcaatggcctcatccccggtgataagggttacatcagaaaaaattgaagctaccattaatggagacatgataattgatgttgtagataacaaggagatagttccagttgcatgcatctcagtgattgtcagtgcttcaggtgttgtggatgcatcaggcaataaagtatatggtagagttggattagataatttctcccttgcgttgaagtggagtaaaattggcaacttccatatgtctttgattcagggagtgattcgggttctcctgaacacagtatgcatgccgtatttgaactcacggcttgggaatggattgatcttgcccgtggtccatggtttcacacttcaagacgtctacgttttaacctctgctgagcagctgacgctttgttcggatgtcaccttcaacgcaagcagcatggcgagtttattatgatacagggaagtgcgtgtctggcgtatttcatttagcgttgaagtacaacactcgcacatatgtgtacattatattgtacatactacacaacatctcgttataaatattgtttacattcaattcaaaaaaaaaaaaaaagcaaacatctgtggtgcatgccatttatgcttcntagaatgtctccatatnttgtattctacacattatatattgaactctggaaattgctggcgctccaaatccacaccttctagagctgcgac

SEQ ID NO: 140236 - DNA, 717 bp, Zea mays
  Clone ID: MRT4577_59379C.1
cactcctatgggcgattgggtccctcgaggccaaaaaggccgggatcacaacaaaaggcgcaagcaccgcacggagagcaagcaagaaagcaaccaccgcactgccactacctaacaatggcccgcgcctacgtgtttctcgtcgtgctcctcctggccgctgtcatcgtggcaccgttcgcgggagcgacgcgtgtcgacgtcgttgagggcaggtccatggcgtccgccgacgcgccggaggccgccgcaccatcacccgggcctgactccgcctcgtcaccggactcctcgtcggatgcgccctccagcagcagctcctcggactagatagctagccgctcgacgcacgatctcgctctccatctacacggcgatcgagttctagctttgtcggcatgcaatgcaaaattccgattcttcgggaataatcaagcaccaaaggaatgtgcttgcatcactcactactagtaccttgtttttatatatgtttcctctcctgacgctctccgattttaatcttcatgtatgcaacatatgtgatgaatggaaaaatcgatttgtatttgttagtcagtcagtctgtataacaacgccgtcgggtttctgaaaccaagcaatgtatataaatgcaacaggaattacattctgtaattaaacaacctgttaaaagaggacttgatggctctcaaaaaaaaaaaaaaaaaaggggcggcc

SEQ ID NO: 140237 - DNA, 347 bp, Zea mays
  Clone ID: MRT4577_5937C.1
tggacccacgcgtccgccgcgccccatcgctttcccgttccccatcccgaccgactgctcccccgcccccgcaccagcctaaaggcatcgccggcgccgcaacatcggtgaggaagcccgcacccctgcccggatcccatggccaacagcaacctcccgtggcggatcatcaaggagactcagcccctgctcagcgagccagcaccggggatcagcgcgtcgccctcggaggagaacatgcgccacctcaacattatggggctagggccggcgcagtaaacctatgaaagtggagcccttaaagctgaaccctctttacctgaagaatactccatggctgccccaaa

SEQ ID NO: 140238 - DNA, 386 bp, Zea mays
  unsure (1)..(386): unsure at all n locations
  Clone ID: MRT4577_59380C.1
agcagtggtaacaacgcagagtacgcggggtctgtgattttcttccttaagttgttagcttgacaatctggtgcccttttgacctacatacataatgagctctgatacgcggcccgtaaagagagttcagttgaaaatggaattcgtattcgcactgtacagccacattcactttcaaccttccaagaaaccaaatcaatacacggttgtaaaaaaaaaaaaaggaaaaaaaaaaaaaaaaaaaaaaaaaaaagnaagaaaaaggaaagcaaaaaaaaagaaaaagaaaaaaaaaaaaaagggctgggggggggaaccacgggtaaagggcggatttttgggcattcccggcggttcgggggggttccgagctttttgccggcctt

SEQ ID NO: 140239 - DNA, 1670 bp, Zea mays
  Clone ID: MRT4577_59381C.1
ccacaccaccttcctctcctcgctctccctattctggacggccgactcgcttctgtgaggcttccaagtctgccattcccttggaggaggcactggatctggaatgggcacgcttctcatttcaaagatcagagaggagtaccctgatcggatgatgctgacattttctgtgtttccctcgcccaaggtgtcagacactgttgttgagccatacaatgcaaccctgtctgtccatcagttggttgagaacgctgatgaatgcatggttcttgacaacgaagcactttatgacatttgcttccgaactctgaagctgacgacccctagctttggagacttgaaccacttgatcagtgcaacgatgagtggtgtcacttgctgcctccgcttcccaggacagcttaactctgacctgcgcaagcttgcagtcaacctgatcccgttccctcggctccacttcttcatggttggctttgcgccactcacctcgcgtggctcgcagcagtaccgtgcgctcaccgtccctgagctaacccagcagatgtgggatgccaagaacatgatgtgtgctgctgacccacgccatggtcgctatctcacagcctctgccatgttccgtggcaagatgagcactaaggaggttgatgagcaaatgattaatgtccagaacaagaactcgtcctactttgtggagtggatccccaacaacgtcaagtccagtgtttgtgatatccctccgcgtggcctctccatggcctccaccttcattggcaactccacgtccatccaggagatgttccgccgtgtgagcgagcagttcactgctatgttcaggaggaaggctttcttgcattggtacactggtgagggcatggatgagatggagttcaccgaagctgagagcaacatgaacgatctggtgtcggagtaccagcagtaccaggatgccactgctgatgaggaggcggaatacgaggacgaggaggccatccaagacgagtaagagtggtttgggccctgcctcatttgtacccttgtttcctttcattccggggcttgcctatggtttgcttgttgtatttgctcaagttatgcggtatgtagtagtactttcgtgcgtagcatgctgtatgctaccacaaagactttgttcacctgcactgcttgatatgccagccatggcatatgtgacgagtatttcattattttaaaaaaaaaaaaaaaaaaaaaaaaaaaaaaaaaaaaaaaaaaaaaaaaaaaaaaaaaaaccaaaaaaaaaaaaaaaaaaaaaaaaaaaaaaaaaaaaaaaaaaaaaaaaaaaaaaaaaaaaaaaaaaaaaaaaaaaaggggggcccttttaaaagaaccaaatttaactacccgggcatgcaaaaaaaaaattttttttatggggccccaaaattaaattaacgggcccgggtttaaaaaccgggggacggggaaaaaccctggggttccccaaattaaatcccttgaaaaaaaacccccttttcccaagtggggtaaaaaacaaaaaaagccccaaacaaaccccctttcaaaaaattgcccccccctaaatgggaaaagggaaccccccctttaaggggccaaaaaacccggggggggggggggttacccccaagggaacccttaaatttggaaagccc

SEQ ID NO: 140240 - DNA, 358 bp, Zea mays
  Clone ID: MRT4577_59382C.1
cgtttctgtgaactccatctcatccatgccctcaccagtgtaccaatgcaagagatggagttcaccgaagctgagagcaacatgaacgatctggtgtccgagtaccagcagtaccaggatgccactgctgatgaggaggcggaatacgaggacgaggaggccatccaagacgagtaaggggggggtgggcgctgccacatttgtacccttgtttcctttcattccggggcttgcctatggtttgcttgttgtattcgctcaagttatgcggtatgtagtagtactttcgtgcgtagcatttcacctgcactgcttgatatgccagccatggcatatgtgacgagtatttcattatttt

SEQ ID NO: 140241 - DNA, 812 bp, Zea mays
  Clone ID: MRT4577_59383C.1
gatttctttaccacaccctgctctcgctcttgttgtgacggtcgattcgcttgtacaagtgaccacccttccgctcccttctcacctatagctagcaaccttgagatccagccaagatccagccatgagggagattctccacatccagggtggacagtgcggcaaccagatcggttccaagttctgggaggtcgtctgcgacgagcatggtatcgaccccaccggacgctatgtcggcacctccgacctccagctcgagcgcgtcaatgtctactacaacgaggcctcatgcggccgcttcgtgccgcgcgccgtgctcatggacctcgagcccggcaccatggacagcgtccgcaccgggccgtacggacagatcttccggcccgacaactttgtcttcggccagtctggcgcagggaacaactgggccaagggccactacacagagggcgctgagctcatcgactctgtgcttgacgtcgtgaggaaagaggcggagaactgcgactgccttcaaggattccaagtttgccattcccttggaggaggcacaggatctggaatgggcacccttctcatctcaaagatcagggaggagtaccctgatcggatgatgctcactttttctgtctttccctcacccaaggtttcagacactgttgttgagccatacaacgcaacactgtcagtccatcagttggttgagaatgccgatgaatgcatggttcttgacaatgaggcactttacgacatttgcttccgaactctgaagcttacgacggcttagctttggagactgaaccacttgatca

SEQ ID NO: 140242 - DNA, 1915 bp, Zea mays
  Clone ID: MRT4577_59384C.1
gccggccgggtcgggaaaaaaattttaccacaccaccttcctctcctcgctctccctattctggacggccgactcgcttctgtgagctcccctcccacctgcagctaccggccttagatccagccatgagggagattctccacatccagggcggccagtgcggtaaccagatcggttccaagttctgggaggtcgtctgcgacgagcatggtatcgatcccaccggacgctatgtcggcacctccgacctccagctcgagcgcgtcaatgtctactacaacgaggcctcatgcggccgcttcgtgccgcgcgctgtgctcatggacctcgagcctggcaccatggacagcgtccgcaccggaccgtacggccagatcttccgccccgacaactttgtcttcggacagtctggcgcggggaacaactgggccaagggccactacacagagggcgcagagctcattgactccgtgcttgacgttgtcagaaaggaggctgagaactgcgactgcctccaaggcttccaagtctgccattcccttggaggaggcactggatctggaatgggcacgcttctcatttcaaagatcagagaggagtaccctgatcggatgatgctgacattttctgtctttccctcgcccaaggtgtcagacactgttgttgagccatacaatgcaaccctgtctgtccatcagttggttgagaatgctgatgaatgcatggttcttgacaatgaagcactttatgacatttgcttccgaactctgaagctgacgacccctagctttggagacttgaaccacttgatcagtgcaacgatgagtggtgtcacttgctgcctccgcttcccaggacagcttaactctgacctgcgcaagcttgcagtcaacctgatcccgttccctcggctccacttcttcatggtcggctttgcgccactcacctcgcgtggctcgcagcagtaccgtgcactcactgtccctgagctaacccagcagatgtgggatgccaagaacatgatgtgtgctgctgacccacgccatggtcgttatctcacagcctctgccatgttccgtggcaagatgagcactaaggaggttgatgagcaaatgattaatgtccagaacaagaactcgtcctactttgtggagtggatccccaacaacgtcaagtccagtgtttgtgatatccctccgcgtggcctctccatggcctccaccttcattggcaactccacgtccatccaggagatgttccgccgtgtgagcgagcagttcactgctatgttcaggaggaaggctttcttgcattggtacactggtgagggcatggatgagatggagttcaccgaagctgagagcaacatgaacgatctggtgtccgagtaccagcagtaccaggatgccactgctgatgaggaggcggaatacgaggacgaggaggccatccaagacgagtaagggtggtttgggccctgccacatttgtacccttgtttcctttcattccggggcttgcctatcgtttgcttgttgtatttgctcaagttatgcggtatgtagtagtactttcgtgcgtagcatgctgtatgctaccacaaagactttgttcacctgcactgcttgatatgccagccatggcatatgtgacgagtatttcattattttatctgcttgcttgctccaaaaaaaaaaaaaaaaaaaaaaaaaaaaaaaaaaaaaaaaaaaaaaaaaaaaaaaaaaaaaaaaaaaaaaaaaaaaaaaaaaaaaaaaaaaaaaaaaaaaaaaaaaaaaaaaaaaaaaaaaaagggggggcggcctttttaaaaaaaccaaagttaataaaccgggcgtagaaaggtaaaattttttttttggggcccccaaatataattcaatggcccgggttttaaa

SEQ ID NO: 140243 - DNA, 575 bp, Zea mays
  Clone ID: MRT4577_59385C.1
gccggccgggccgggaaggaaacactccgatcctgcctgcccatttccggcctcgcgctctagatcttatcttccgtgactcgaatctgaccgggggaagaatcacttccaccagtacatcctggacacgagcgtgtacccgcgggagccggagagcatgaaggagctccgcgagatcaccgccaagcacccatggaacctgatgacgacctccgccgacgaggggcagttcctgaacatgctcatcaagctcatcggcgccaagaagaccatggagatcggcgtctacaccggctactccctcctcgccacggcgctcgccctcccggaggacggcacgacaaggacgactacctcaactaccacgagcggctgctgaagctggtgaagctgggcggcctcatcggctacgacaacacgctgtggaacggctccgtcgtgctccccgacgacgcgcccatgcgcaagtacatccgcttctaccgcgacttcgtgctcgtcctcaacaaggcgctcgccgccgacgaccgcgtcgagatctgccagctccccgtcggcgacggcgtcaccctctg

SEQ ID NO: 140244 - DNA, 182 bp, Zea mays
  Clone ID: MRT4577_59386C.1
ctctgaactaaacatcacacactgagaatctcttcataatctaggcacagataatctttaacactaaactactgtgaaattctacagcattaagtactgtatatcgccctgtacttggataggctggctaactcgtaggaagagagcactgtatggtatccttttgctttattcaccagcat

SEQ ID NO: 140245 - DNA, 1855 bp, Zea mays
  Clone ID: MRT4577_59387C.1
ccacgcgtccgcggacgcgtggggccggcgccaggcggccgaggccgacgacggcgaacacgtctgggccgcccctccggtgccctagcccccacacgcccactataaaatcagctccatttctggacactctcatttcatttaccacaccctgctctcgctcttgttgtgacggtcgattcgcttgtacaaggtagcaaccttgagatccagccaagatccagccatgagggagattctccacatccagggtggacagtgcggcaaccagatcggttccaagttctgggaggtcgtctgcgacgagcatggtatcgaccccaccggacgctatgtcggcacctccgacctccagctcgagcgcgtcaatgtctactacaacgaggcctcatgcggccgcttcgtgccgcgcgctgtgctcatggacctcgagcctggcaccatggacagcgtccgcaccggaccgtacggccagatcttccgccccgacaactttgtcttcggacagtctggcgcggggaacaactgggccaagggccactacacagagggcgcagagctcattgactccgtgcttgacgttgtcagaaaggaggctgagaactgcgactgcctccaaggcttccaagtctgccattcccttggaggaggcactggatctggaatgggcacgcttctcatttcaaagatcagagaggagtaccctgatcggatgatgctgacattttctgtgtttccctcgcccaaggtgtcagacactgttgttgagccatacaatgcaaccctgtctgtccatcagttggttgagaacgctgatgaatgcatggttcttgacaacgaagcactttatgacatttgcttccgaactctgaagctgacgacccctagctttggagacttgaaccacttgatcagtgcaacgatgagtggtgtcacttgctgcctccgcttcccaggacagcttaactctgacctgcgcaagcttgcagtcaacctgatcccgttccctcggctccacttcttcatggttggctttgcgccactcacctcgcgtggctcgcagcagtaccgtgcgctcaccgtccctgagctaacccagcagatgtgggatgccaagaacatgatgtgtgctgctgacccacgccatggtcgctatctcacagcctctgccatgttccgtggcaagatgagcactaaggaggttgatgagcaaatgattaatgtccagaacaagaactcgtcctactttgtggagtggatccccaacaacgtcaagtccagtgtttgtgatatccctccgcgtggcctctccatggcctccaccttcattggcaactccacgtccatccaggagatgttccgccgtgtgagcgagcagttcactgctatgttcaggaggaaggctttcttgcattggtacactggtgagggcatggatgagatggagttcaccgaagctgagagcaacatgaacgatctggtgtccgagtaccagcagtaccaggatgccactgctgatgaggaggcggaatatgaggacgaggaggccatccaagacgagtaagggtggtttgggccctgccacatttgtacccttgtttcctttcattccggggcttgcctatggtttgcttgttgtattcgctcaagttatgcggtatgtagtagtaccttcgtgcgtagcatgctgtatgctaccacaaagactttgtttcacctgcaccgcttgatatgccagccatggcatatgtgacgagtatttcattattttatctgcttgcttgctcctgtgatggttccttcctatgacattgaatgcgaatttgcccattggtcacgttggatttgcaaaaaa

SEQ ID NO: 140246 - DNA, 792 bp, Zea mays
  unsure (1)..(792): unsure at all n locations
  Clone ID: MRT4577_59388C.1
gatactagttgcagtgacacagttccacgcagcagatcagagagtctgcaggtacgctagcgatctagctgccgctgtgctgcgtacagtacgtagtaccatggacgaagaaagtggacactctgctggccctcaacctcctcttcttcgccttcgccgacgcatgcggctgcaggtgcggcggatcctgccctagtccaggcggcggtggcggtggcggtggaggatctggtggtggtggtggtgaagcgtgtgggggatgggagtgtgtacccgcggatagccggagagcatgaaggagctgcgcgagatcaccgccaagcacccatggaacctgatgaccacctccgccgacgagggccagttcctcaacatgctcatcaagctcatcggcgccaagaagaccatggagatcggcgtctacaccggctactcgctcctcgccaccgcgctcgcactcccggaggacggcacgatcttggccatggacatcaaccgcgagaactacgagctaggccttccctgcatcaacaaggccggcgtgggccacaagatcgacttccgcgagggccccgcgctccccgtcctggacgacctcgtggcggacaaggagcagcacgggtcgttcgacttcgccttcgtggacgccgacaaggacaactacctcagctaccacgagcggctcctgaagctggtgaggncccgncggctcatcggctacgacaacacgctgtggaacggctccgtcgtgctccccgacgacgcgcccatgcgcaagtacatccgcttcta

SEQ ID NO: 140247 - DNA, 1081 bp, Zea mays
  Clone ID: MRT4577_59389C.1
accctgatcggatgatgctgacattttctgtctttccctcgcccaaggtgtcagacactgttgttgagccatacaatgcaaccctgtctgtccatcagttggttgagaacgctgatgaatgcatggttcttgataacgaagcactctatgacatttgcttccgaactctgaagctgacgactcctagctttggagacttgaaccacctgataagtgcaacgatgagtggtgtcacttgctgccttcgcttcccaggacagcttaactctgacctgcgcaagcttgcagtcaacctgatcccgttccctcggctccacttcttcatggtcggctttgcgccactcacctcgcgtggctcgcagcagtaccgtgcgctcaccgtccctgagctaacccaacagatgtgggatgccaagaacatgatgtgtgctgctgacccacgccatggtcgctatctcacagcctctgccatgttccgtggcaagatgagcactaaggaggttgatgagcaaatgattaatgtccagaacaagaactcgtcctactttgtggagtggatccccaacaacgtcaagtccagtgtttgtgatatccctccgcgtggcctctccatggcctccaccttcattggcaactccacctccatccaggagatgttccgccgtgtgagcgagcagttcactgctatgttcaggaggaaggctttcttgcattggtacactggtgagggcatggatgagatggagttcaccgaagctgagagcaacatgaacgatctggtgtcggagtaccagcagtaccaggatgccactgctgatgaggaggcggaatacgaggacgaggaggccatccaagacgagtaagggtggtttgcgccctgctacatttgtacccttgtttgctttcattctggggcttgcctatggtttgcttgttgtatttgctcaagttatgcggtatgtagtagtactttcgtgcgtagcatgctgtatgctaccacaaagactttgttcacctgcactgcttgatatgccatggcatatgtgacgagtatttcattattgtttcactgtgcttgctc

SEQ ID NO: 140248 - DNA, 476 bp, Zea mays
  Clone ID: MRT4577_5938C.1
gaccatcatagaacgtcacgcggctgttagattcattaaaaccaaaactttattatgaccatgcatagatgatgggtcataccacacatgataaggtgcgtgcgtgttactgcattgttgcatgtatagagggtaagagagggttagaggatgatatcccaaatatcaggaatacctggtagggactggggggaatcaaacactgccacggggaaaggggctgccaatgggctgctctgatctgttaggaatgcatgacaataagggtaaattttagctactgctatagcagttatagctgcaccttgtagcctgttgagtgctcctggcaatgacattggagctgttgtgatatttactggccctgctgatattgctgaggctgttgtaaaagctgctgcttgccatgaccctggaattgtagttgatgttgttgctcatggctgtgtccttggtgaagagcatggctctgatcg

SEQ ID NO: 140249 - DNA, 738 bp, Zea mays
  Clone ID: MRT4577_59390C.1
acagtattagactatagtagcactcatgaggttagtgctgcaaaagtaacacagtaaagacgcctttggaactgtgcaaatggaagtagaagcgcctctagaagcagtgcaattggaagcagaagcttttaaggtcgacagggctgaagcgtgcagacacctggtcagtccaattgtggtgaaactcgaagacaaattctgtgatcaaaatgctagagctcttgtcgctgaacgtgaagattgcacgctcatgactgaggcagtggtggcactggctacagactattcaaaagagaacattccggttttgcatgagaatatacaagctaatgtggatgcgagttcattagttgaggtgctgacccagaagttatcctccatttctcttggggaggataactctaacgtggctctcaggtcctgcagtgaatgaggtttggatggtatgctggttgttattttattaccctcttgttatctgtaggcaaccgtaccgcagctgacgagtccaattcccttaacctgcttgtggtgtaaaatccttgtgcacagagctttatagaactaagattttctattgtatgcatgaaaacctcatctttgtctattgccggtttgcaagtaaagtgtgtttgtttggtaattatattttactttgtttagtaattaaaaaaaaaaacctagagagcctgtttgtaactgctatacgagtgggtattttttgtgggagagggtctg

SEQ ID NO: 140250 - DNA, 2115 bp, Zea mays
  Clone ID: MRT4577_59391C.1
cctcgagccggcgggcgggatccaaaatctggacttgagtgaagtgtgggcttgactgcttattttatttttaattatttttggaatacttttgttttttattatcttcggaaaatttcgaaatttaaaatcggtaaaaaaaaaaaaaaaaaaaaaaaaaaaaaaaaaaaaaaaattttttttttcatttaccacaccaccttcctctcctcgctctccctattctggacggccgactcgcttctgtgagctaccggccttagatccagccatgagggagattctccacatccagggcggccagtgcggcaaccagatcggttcaaaattctgggaggtcgtctgcgacgagcatggtatcgatcccaccggacgctatgtcggcacctccgacctccagctcgagcgcgtcaatgtctactacaacgaggcctcatgcggccgcttcgtgccgcgcgctgtgctcatggacctcgagcctggcaccatggacagcgtccgcaccggaccgtacggccagatcttccgccccgacaactttgtcttcggacagtctggcgcggggaacaactgggccaagggccactacacagagggcgcagagctcattgactccgtgcttgacgttgtcagaaaggaggctgagaactgcgactgcctccaaggcttccaagtctgccattcccttggaggaggcactggatctggaatgggcacgcttctcatttcaaagatcagagaggagtaccctgatcggatgatgctgacattttctgtctttccctcgcccaaggtgtcagacactgttgttgagccatacaatgcaaccctgtctgtccatcagttggttgagaacgctgatgaatgcatggttcttgacaacgaagcactttatgacatttgcttccgaactctgaagctgacgacccctagctttggagacttgaaccacttgatcagtgcaacgatgagtggtgtcacttgctgcctccgcttcccaggacagcttaactctgacctgcgcaagcttgcagtcaacctgatcccgttccctcggctccacttcttcatggttggctttgcgccactcacctcgcgtggctcgcagcagtaccgtgcgctcactgtccctgagctaacccagcagatgtgggatgccaagaacatgatgtgtgctgctgacccacgccatggtcgttatctcacagcctctgccatgttccgtggcaagatgagcactaaggaggttgatgagcaaatgattaatgtccagaacaagaactcgtcctattttgtggagtggatccccaacaacgtcaagtccagtgtttgtgatatccctccgcgtggcctctccatggcctccaccttcattggcaactccacgtccatccaggagatgttccgccgtgtgagcgagcagttcactgctatgttcaggaggaaggctttcttgcattggtacactggtgagggcatggatgagatggagttcaccgaagctgagagcaacatgaacgatctggtgtccgagtaccagcagtaccaggatgccactgctgatgaggaggcggaatacgaggacgaggaggccatccaagacgagtaagggtggtttgggccctgccacatttgtacccttgtttcctttcattccggggcttgcctatggtttgcttgttgtattcgctcaagttatgcggtatgtagtagtactttcgtgcgtagcatgctgtatgctaccacaaagactttgtttcacctgcaccgcttgatatgccagccatggcatatgtgacgagtatttcattattttatctgcttgcttgctccaaaaaaaaaaaaaaaaaagcggccgcatgaggcctcgttgtagtagacattgacgcgctcgagctggaggtcggaggtgccgacatagcgtccggtgggatcgataccatgctcgtcgcagacgacctcccagaattttgaaccgatctggttgccgcactggccgccctggatgtggagaatctccctcatggctggatctaaggccggtagctcacagaagcgagtcggccgtccagaatagggagagcgaggagaggaaggtggtgtggtaaatgacct

SEQ ID NO: 140251 - DNA, 2030 bp, Zea mays
  Clone ID: MRT4577_59392C.1
actcaattttttttcaaatccaagcgccccaaagggccgttttcgaacccgacgctgccgtccgtccgatgggaacgatctgccggcgccaggcggccgaggccgacgacggcgaacacgtctgggccgcccctccggtgccctagcccccacacgcccactataaaatcagctccatttctggacactctcatttcatttaccacaccctgctctcgctcttgttgtgacggtcgattcgcttgtacaagctagcaaccttgagatccagccaagatccagccatgagggagattctccacatccagggtggacagtgcggcaaccagatcggttccaagttctgggaggtcgtctgcgacgagcatggtatcgaccccaccggacgctatgtcggcacctccgacctccagctcgagcgcgtcaatgtctactacaacgaggcctcatgcggccgcttcgtgccgcgcgccgtgctcatggacctcgagcccggcaccatggacagcgtccgcaccgggccgtacggacagatcttccggcccgacaactttgtcttcggccagtctggcgcagggaacaactgggccaagggccactacacagagggcgctgagctcatcgactctgtgcttgacgtcgtgaggaaagaggcggagaactgcgactgccttcaaggattccaagtttgccattcccttggaggaggcacaggatctggaatgggcacccttctcatctcaaagatcagggaggagtaccctgatcgggatgatgctcactttttctgtctttccctcacccaaggtttcagacactgttgttgagccatacaacgcaacactgtcagtccatcagttggttgagaatgccgatgaatgcatggttcttgacaatgaggcactttacgacatttgcttccgaactctgaagcttacgacgcctagctttggagacctgaaccacttgatcagtgcaacaatgagtggagtgacttgctgcctccgcttccctggacagctgaactcggacctgcgcaagctcgcagtcaacctgattccattccctcgcctgcacttctttatggtcggctttgcgccactcacctcgcgtggctcgcagcagtaccgtgctctcactgtccctgagctaacccagcagatgtgggatgccaagaacatgatgtgtgctgctgacccgcgtcatggccgctatctcacagcatctgccatgttccgtggaaagatgagcaccaaggaggtggacgagcaaatgatcaatgtccagaacaagaactcgtcctacttcgtggagtggatccccaacaatgtgaagtccagtgtttgtgatatcccgccgcgcggcctctccatggcctccaccttcattggcaattccacctccatccaggagatgttccgccgtgtgagcgagcagttcactgctatgttcaggaggaaagctttcttgcattggtacactggcgagggcatggatgagatggagttcaccgaagctgagagcaacatgaacgatctggtgtctgagtaccagcagtaccaggatgccactgcagatgaggaggaatacgaggacgaggaggaggtccatgacgagtaaggtgatcttggaccctgctgcatattgtaccgtctctggacctggctttctttcaagctggagcttaggtttggttgttgtattcgaacatgctatgatgggtatgatgtagtagtactttcgtgggtagcatgctgtatgctaccacttgccctctttcacctagctgcttgatttgctacttgtccgacctcttgtgtcgttggacctcaatcccatcgctcttgccagaaccacatttgccgttgtgccatttagtgaatccttgtatgattgcctgccatcgtagttctttctccaggatctagatgcagctgatatttcctaatttgtacttgcgcgttcagtctacatgaaagaaaaatcatcaggtttgcgaaggcaaaaggtgccgacgcgcccacaccagc

SEQ ID NO: 140252 - DNA, 574 bp, Zea mays
  Clone ID: MRT4577_59393C.1
aaaaaaataaataattaagagaggttttggaagccattattctcgtatttattgttacactcttgttacttttatatcctactggctttctacttatgtatgcatgcaaaaacacggcagtcaaaatgatcaattggactcccacttagtattgaagcacatgacgaagggaggaaagatagtaaaaaatgctgtcttacaatgaaagggcctgtacgtaattataaagcgtggtctaaagaactacatatagtgatcttctaccacactttaaatgctctgtatgatattatactatgaatctacatgctaccgaccagtacattgaaatagttgtctaaagcaacttcttttttcactgcatccacttactttcagtcaatgcactgtcacaagaatcgaagataggttcttcattgaatgaatccaaggggggggagaataatgatacgagagaagactagcatggattatagtaactgtaaaaacgtgctggttcatgcctacagcatctttcatgcttatagaaggcgccagatgctgcactcgagatcctttaaaaaaaaaaaagaac

SEQ ID NO: 140253 - DNA, 573 bp, Zea mays
  Clone ID: MRT4577_59394C.1
actacgggcggtggtccgcgcgctcctattgtggttgcgacgactgggtgatctctgcctgcccccgtgtcccgctcccagccctcaggcgacgacgcggcccgctcagcccttcgccgtccatgcacagccctagtccggcgactgataacttcctacaatgctaggacatgctcgcctgcctgtctctctgcgggcatctcatattgcgggccctacatacgggccaccctgtcctggaataacttccccctcagctttcccctaactgtgctccgcacgatacctggacgtccgagcccggaaaaaggtaccgaggacggctactgagccgtgatgaggtcaacgccaacaaatctactctgacagagatagtgtccggatttgagaacgtattgaatgcgggtccctggttaggatgaatgcaaaggactcttgcctggtatggagttctcgatgttataatcgcgactgcatgcatcagacgtgctgattttactctgaagctgactacagtgtgatgaacgtcgcatcgttgaagctcgctctgtcacatcgggtgtgactattgta

SEQ ID NO: 140254 - DNA, 1433 bp, Zea mays
  Clone ID: MRT4577_59395C.1
cattccatattaaaaaaaaaaaaaaactcctcctcggatttgctgccagtatggacgaaatcattgattatggtctggacgtctgcttgtaatcaatcatgacttgtgtaatcttgcttgcggccatcagtatcgatcaaatatcaatcgcgctcattccataaaaaaaaaaaaaaaactcctcctcggatttgctgccagtatggacgaaatcattgattatggtctggacgcttgcttgtaatcaatcatgacttgggtaatcttgcttgcggccatcagtatcgatcaaatatcaatcgcgctcattccataaaaaaaaaaaaaaaaactcctcctcgaggccggccgagaaaaacattgggtacctcgaggccggccgggaatttccaagagagacagagagagcgtgtggatttgggggagcttcttcactggagagtggagagctccggtagcgaggcgaaggaaggaagagggaggaggggaatcagagaggtctccccgatggcggactggggccccgtgatcgtagcgacggtgctgttcgtggtcctcacgccggggctgctctgcacgctgccgggccggggccgcgtcgcagagttcggcagcatgcacaccagcggcctggccatcctcgtccacgccgtcctctacttcgcgctcatcaccatcttcctcatcgccatcggcatccacgtctacgcgggctagtagccgcccggagcaggatgcgatatacggagtagtaggttgcgccgccgccgtgatccagatcaagatctgtttttttttctttgttccttttcgctctctctctctctctgccctcctcctcggatttgctgccagtatggacgaaatcattgattatggtctggacgtctgcttgtaatcaatcatgacttgtgtaatcttgcttgcggccatcagtatcgatcaaatatcaatcgcgctcattccatattttttttaaataaaaaaaaaaaaaaaaaagcaaaaaaaaaaaaaaaaaaatcgcaaaaaaaaaaaaaaaaaggtcttccgtccacatttacgccggctagctagggccgggtgttttttagtccacacccccttcgtctcttcctctcatcatcggcccctgctagccgcctagtcatatgcgtccgcagtcttcgtttggcggatgatgcgcgcatgctagcttagctgcggcgaacaattaatccggacgccggataccccgcagtatgttggtatttattatgggattgttatggtgttttatattgttccagctccttccgtcgtcttaacgcttggttgcgcatccatttcactgaagatggtccggccgggctcttgattcagtctgaacagttgtgtgtgtgtgtatgtgtttatacaagactcagaatgaacacttactggctgttggtttgatt

SEQ ID NO: 140255 - DNA, 311 bp, Zea mays
  Clone ID: MRT4577_59396C.1
gccggcagctgaccggcaacacggccatggagagctgcagaacgcggccttagctttttttttttctttgttaagtaatgcttttaaactactctatctttttaacatgaggcgggccctatgatatatgcaaccaaaacataaagatgaccatgcaaagaatataggggacgcctcgcaggaaaaaggggggggtgtgactggattattaacctgggacgagaaaaagacaatggggggggggatcgggcttggggccattgggggccgctgggcgcgcgctccgggggccccgggcgcccccccgggcg

SEQ ID NO: 140256 - DNA, 536 bp, Zea mays
  unsure (1)..(536): unsure at all n locations
  Clone ID: MRT4577_59397C.1
cttattataattattaattataatatttttgttttaattattgcaattaatcttgtaaacaattattattcaaaccgatcgataacccccgcacacacacacacgaacacacattcacacacaaacacacttttctaatcaaattatctaaattacgcttttattgtgatcatttttctctcgaaatattgctgcacaaatcttaattaatttcaactatttgtaactaaattcgcaaacaatgtcgtcattgtttataaaagcagcaattctattttattataccaatcttttgtctaagtctggtccgagtgtttattttcagacactcgaaccctttcacgtgcattttaattggttgttcttcttcgcttctccggaaatccaaattggattttaaatcatttgactagtttcgattactttcaattaattgtcatttcaatgtaaaatgtcttctcttttcgttttttgtacttggcacctncgaccttntcttttccgtgacaantaattgtgcacactctttattatat

SEQ ID NO: 140257 - DNA, 737 bp, Zea mays
  Clone ID: MRT4577_59398C.1
attgggaccctcgaggccggccgttacttttttctaaaaatattttctccctgtcgatttctggcaagagccttgccggtgattattaaaaaaaaaaaaaaaaaaaaaaaaaaaaaaaaaaaaaaaaaaaaaaaaaaaaaaaaaaaaaaaaaaaaaccatttgtttctctgggagcgccaaatcaaatcactgacaaacctcaacggcgccgggctgaaccctgaaaggtttgaatccagaaggaacatgccattgccactgaacttcaaaaacagggacgctaaatttgttatgttaacggatgatttatacaattttgaccttccaaacgacagaaaaagtttcttctctccactcccgtcaatccaaacctcgccccccccctcgaaaatgtcagaattcccaggggggctctcaactcttaccagttacgggagcaaaaaagcaagtaaaaggggatgaaaaactaggttgcgcccaaatgccgaactaacaaaaagttcatggatgctgccatatgaaggaaggaaggccaatgaacattacaggaactgattgtaaaatttgggggaggaacatcccttccagaaagcgaagttttttttttagcgggtttgatgaggcctaaggtcttactgtgccagtgacggttagggtggaacaaaatgtgaactcggttatctgcgggggtttccagttacagaaaagggcagaggaagtgcatattcaaggctcg

SEQ ID NO: 140258 - DNA, 224 bp, Zea mays
  unsure (1)..(224): unsure at all n locations
  Clone ID: MRT4577_59399C.1
acgcgtncggaccccttctatattacaatcgattccactctttctttttctaactgccaggcgcctgcatagagcgtgatttctcatgaccggggtgccctaaacacaattcacaagctcattcataacaacaacgttctctgggtacaccctgacaatgccctacttcatctccttacgatcacctcccctttcgacacttatcaaactcctgatactgtcac

SEQ ID NO: 140259 - DNA, 348 bp, Zea mays
  Clone ID: MRT4577_5939C.1
gtacaagcttgcttagctgcttgatgttccccgggttggaatctggcatcaggctggctgtgatgcgattatgactgcactgtccctcatgaagcttatagaggccttcttaaacgggttaactgataaatattctggtgagtaacatggtcttggctttgatgctgtcaagaccacctatgctcaatgtgtcatggattattcaattaaagatgaactatttatgaaaattgagtaatctgattggagtcttcgtctgactgatctcaaaggcatacttgggttattgacataacggatttgatcactattttgctaaccaaaaatgccagtcgctatttgaggtcc

SEQ ID NO: 140260 - DNA, 697 bp, Zea mays
  unsure (1)..(697): unsure at all n locations
  Clone ID: MRT4577_593C.1
ccccgatccgatgctcccggccgcctccgcccctcctctccgccgcctccgcttcgtccgcgctgcgcggctgcctcgagctcgagaccgcgtcggctgtataggtgattttctcttccttttggggggatgctgcggagcgaacgctgaggagcgacgacgagttttgattcaggtgtagagggtttctagaatcgatggggtcggagaagggtggagcgaaggttattggcggcggcgggatcttcaacctatttgattggaagcgaaagtcgcgcaagaagctgttctccaactcgcccgaggggtccaagcttgttaagaggagcgaagaaaccttgctatcagggcgtctccacttgggtgatgatgatgaaggaattggtgtatcaagcttcaaggggagcagcgactacagctgtgcgtcttcagtgaccgatgaggaagtgcgtgagatgaaggcgccaggtgtggtggccaggctcatgggcttggacgccatgcccacctcgggcgttccagaaccgtactgcacacctttccgagacacaagattgttcagggacagccacagcctcaagaggagccctgagtactcaatgaatgaccagttcagtcatgttcctcanagagtcgatggctatatcaggaagccattggatctccgagcaccaaagatgccaagcagccccgattg

SEQ ID NO: 140261 - DNA, 760 bp, Zea mays
  Clone ID: MRT4577_59400C.1
cttgttggctataatactgactatgttggtgctatatctgctattgaggatggaataaaagcatcagaatcagaaccaacagatccagacaaatcaccactggctggaaggctttttgttgttataggggctggtggtgcgggaaaagcactagcatatggggcaaaagagaaaggagcaagagttgtaattgcaaaccggacctttgcacgagcacaagaacttgccaacttaattggtgggcctgcattgactcttgcggatttggaaaactaccatccagaggaagggatgattcttgcaaatacaacagccattggaatgcatccaaatgtgaatgaaactcctctatctaagcaagcactcagatcttatgctgttgtgtttgatgcggtctacacaccaaaagagaccagacttctccgagaagctgcagaatgtggagccacagttgttagtggtctggagatgtttatacggcaagctatgggccagtttgagcatttcactggcatgccagtggatgattacaaattccgagcaattgcaagttcattggacaatcctaacaccatgaagcctcgtctgtgagagattcatccatgcccacaaacttccttgtttttcctttttagattcggattcagtgatcagtttgcctctcagccattgtaaattaatttgatgttccgagctgaaacattttggtgtgccttatttgtatcagcatgaacagcagtgggtttgaatcagtctcttc

SEQ ID NO: 140262 - DNA, 329 bp, Zea mays
  Clone ID: MRT4577_59401C.1
ggcacactttctatttacttgaggatgccggccgcgctcctcaatggggtccccgaataactgacaagatggtgggccaaacaggggctaccgatctccggaagccaacacactgctccgactgtccggggattcaagcagtatggagtacttgaacttaaagatcggacacctcagcgacggattctgcaggcactggagtctgctctgccttcaagcatgatacaggtaaggcgatatgaactcacccggggaaatgggcatacatcgagcactactatttgacgcaaaccgataggatggatggccaaatcgtggatctatgagga

SEQ ID NO: 140263 - DNA, 4667 bp, Zea mays
  Clone ID: MRT4577_59402C.1
gtcgatggtctgcgtgccggcgacggcgcgggcgccgcgggagatggcggcggagctggccgccgccgccgcgctcggcgctgacgtggcggagcttcgcctcgactgcctcgccgggttcgcgccgcgcagggacctgcccgtcatcctcgccaagccccgcccgctccccgccctcgtcacctacaggcccaagtgggaaggaggcgaatacgaaggcgatgacgaatcacggtttgaggctctgctattggcaatggagctgggagctgaatatgtggatgtcgagcttaaggtggctgacaaatttatgaaacttatttctgggaggaaacctgataactgtaaacttatagtttcatcccacaactatgagaccactccatcgtccgaggaacttgcaaatttggtggctcagattcaagcaacgggggctgatatcgtgaaaatagctacaaccgctactgaaattgttgatgtggcaaaaatgtttcaaatacttgttcactgccagcgggctgtcactgcccactctgcgacgatccagccggagggaggcgcgcaagacgtaacccgggagcgggcggcgtacaacgagggaatttttttaaccaagccagaaatttgcccccgactgggatcgaatctaggacctgaaagtgctactcagaagccttaaccattatgctagaggtcctttcgcaagaaaagcaggtgccaatcattgggctggtgatgaacgacagaggttttatttctcgggttctttgcccaaaatatggtggattccttacttttgggtcactcaagaaaggaaaagagtctgcacctgcacagccaactgctgcagacttgataaatctgtacaatattaggcagatagggccagacactaaggtctttggtataattggtaaaccagttggccatagcaaaagcccaattttgcataatgaagctttcagatctgtgggtttcaacgctgtgtatgtgccatttttggtggatgacttggctaaatttcttgatacatactcttcaccagactttgctggcttcagttgcacaattccacacaaagaagctgctgttaggtgctgtgacgaggtcgatcccattgccagggacattggagctgttaacacaattgttagaagacctgatggaaagcttgttggctataatactgactatgttggtgctatatctgctattgaggatggaataaaagcatcagaatcagaaccaacagatccagacaaatcaccactggctggaaggctttttgttgttataggggctggtggtgcgggaaaagcactagcatatggggcaaaagagaaaggagcaagagttgtaattgcaaaccgtacctttgcacgagcacaagaacttgccaacttaattggtgggcctgcattgactcttgcggatttggaaaactaccatccagaggaagggatgattcttgcaaatacaacagccattggaatgcatccaaatgtgaatgaaactcctctatctaagcaagcactcagatcttatgctgttgtgtttgatgcggtctacacaccaaaagagaccagacttctccgagaagctgcagaatgtggagccacagttgttagtggtctggagatgtttatacgccaagctatgggccagtttgagcatttcacgggcatgccagctccagatagcttgatgcgtgatattgttctgacaaagacatagtgagtggacgattacaaattccgagcaattgcaagttcattggacaatcctaacaccatgaagcctcgtctgtgagagattcatccatgcccacaaacttccttgtttttcctttttagattcggattcagtgatcagtttgcctctcagccattgtaaattaatttgatgttccgagctgaaacattttggtgtgccttatttgtatcagcatgaacagcagtcatcgtgggtttgaatcagtctcttagcatttgcgttccgaaatcaacgaaaaacagctcctggccgtctgatgtgctggcaaatatgtttcaactgatgttccctgcatagcacgacttgcagacgtttggccaaactcctccctccacttcccaaattgggggtgttgcacttttgtttccagcccctgatatcggccaggtagcgccggcccctaccgttgggctgctggtggccgacaggggtctaatacttgttcactgccaggaaaagcaggtgccaatcattgggctgctgatgaacgacagaggttttatttctcgggttctttgcccaaaatatggtggattccttacttttgggtcactcaagaaaggaaaagagtctgcacctgcacagccaactgctgcagacttgataaatctgtacaatattaggcagagaaggccagacactaaggtctttggtataattggtaatcaaggtggccatagcaaaagcccaattttgcataatgaagctttcacatcagtgggtttcaacgctttcaatgttccatttttggtggactccatcgtccgaggaacttgcaaatttggtggctcagattcaagcaacgggggctgatatcgtgaaaatagctacaaccgctactgaaattgttgatgtggcaaaaatgtttcaaatacttgttcactgccaggaaaagcaggtgccaatcattgggctgctgatgaacgacagaggttttatttctcgggttctttgcccaaaatatggtggattccttacttttgggtcactcaagaaaggaaaagagtctgcacctgcacagccaactgctgcagacttgataaatctgtacaatattaggcagatagggccagacactaaggtctttggtataattggtaaaccagttggccatagcaaaagcccaattttgcataatgaagctttcagatcagtgggtttcaacgctgtgtatgttccatttttggtggatgacttggctaaatttcttgatacatactcttcaccagactttgctggcttcagttgcacaattccacacaaagaagctgctgttcggtgctgtgacgaggtcgatcccattgccagggacattggagctgttaacacaattgttagaagacctgatggaaagcttgttggctataatactgactatgttggtgctatatctgctattgaggatggaataaaagcatcagaatcagaaccaacagatccagacaaatcaccactggctggaaggctttttgttgttataggggctggtggtgcgggaaaagcactagcatatggggcaaaagagaaaggagcaagagttgtaattgcaaaccgtacctttgcacgagcacaagaacttgccaacttaattggtgggcctgcattgactcttgcggatttggaaaactaccatccagaggaagggatgattcttgcaaatacaacagccattggaatgcatccaaatgtgaatgaaactcctctatctaagcaagcactcagatcttatgctgttgtgtttgatgcggtctacacaccaaaagagaccagacttctccgagaagctgcagaatgtggagccacagttgttagtggtctggagatgtttatacggcaagctatgggccagtttgagcatttcacgggcatgccagctccagatagcttgatgcgtgatattgttctgacaaagacatagtgaggtttgtccaaagagcaagcttcccttccatcgtaatttctgcacaattgattccagttgtgtcccctcctcgtccttcccgcatcttcctcaacttgtagaatccacattctttttatctcaggtgtggacataggattcatcttatgacatttttcttattacctaccaagatagagtttcattctctttgaagtatttgaatgttgtttattcagcaaacaatacaccatttcaacaatgtttaagagttcttactcctctcatcaaggctgcaaggattgttagatctttgatttgtgcaagcagtgtgacgcaatcagttttatgtggctaaagtatgtgcatccactgactgatcataatgaatggcagctacttctacttaatagttcttcccttactttcagtggatgattacaaattccgagcaattgcaagttcattggacaatcctaacaccatgaagcctcgtctgtgagagattcatccatgcccacaaacttccttgtttttcctttttagattcggattcagtgatcagtttgcctctcagccattgtaaattaatttgatgttccgagctgaaacatttggtgtgccttatttgtatcagcatgaacagcagtgggtttgaatagttctcgcattatttgcgcatcccagctccagatagcttgatgcgtgatattgttctgacaaagacatagtgagtggatgattacgaattccgagcaattgcaagttcattggacaatcctaacaccatgaagcctcgtctgtgagagttcattccaggcccacaactttccttgtttttcctttttagattcggattcagtgatcagtttgcctctcagccattgtaaattaatttgatgttccgagctgaaacattttggtgtgccttatttgtatcagcatgaacagcagtcggtttggattagtctcagcctctttgcatttgcgttcc

SEQ ID NO: 140264 - DNA, 491 bp, Zea mays
  Clone ID: MRT4577_59403C.1
ccggccgggattccaatgttaatttatcctctataacgtaacttccgacgccggctctcatgactatgcggctatgcagtatcctgcaccaggtgagatgcgagaaagaggaccgtctactcgacaaacatggatgaactggggacccgatgtgaaggatgagcagatgggaaatactgctctactggggtctaggatgacgagaagggactgcctatcaggaagataaattctcaagcttcaacacaaattctcatgatatctaaagtcaaggatggactaactgggctggcaaaggctgaatagaggtagatataaatatttagatatctcctctatgttgacaaagtgggtgcgaatgatgaaggacttgaagatgcgtatagcgctcacatcaaagacgaaccaagtgcatggcaatctgctgaccacatcgacgttgatctcctcggaggcaggcaaatgaactggcccccaggataagaatatct

SEQ ID NO: 140265 - DNA, 333 bp, Zea mays
  unsure (1)..(333): unsure at all n locations
  Clone ID: MRT4577_59404C.1
ccgagaccanctcccacaacacttttattttttacacccccgacaacctacagggacctgtcacaatataacggaccaggggcacccacaaacacataataaaccataatggtacttttatgattaccaaaacaaccttaacgaaacagccctcacccttcataatcaacaaaactccagtaatcaaaccaatcttacctgactccccttgataacacacacaaaaacattacgatgaactcacctaaacaatataggacaaatacgataaacacaaatactacaacattaacaaaaaacatgctgaagaccacaacaacatcaaccaaccct

SEQ ID NO: 140266 - DNA, 322 bp, Zea mays
  Clone ID: MRT4577_59405C.1
accatgctgctttgttcctcgcacctggggtgggtccctccccggagcctcccctgtcaccttggctggattcactgccaagctctccaggttcccgcataaggcggtatgcccaagctcatggccaggcgcccacccgcgggcgatcgcaggttcagcggtggatccgcgttggccctgtccaccacatccatatcccccaggcacgtgcgctctacaccgcgccacgacgaccgaaacgtctactcatacggcagcgttggaccgcgtgcttacgctcgctggtggcgctcatgtcacccactgtgacgtcggcttactg

SEQ ID NO: 140267 - DNA, 342 bp, Zea mays
  Clone ID: MRT4577_59406C.1
gatcggcgcatgcgctcgcgaggaggagagcaccccagcgacccgctgggctcatgcggcagacgcctgttaggatgaacgcggtcgggtacgcgctgtcgcccttccagcagacggtattgccgggggtgtggaaggtacatcaccgccaagatccaccacacggtcaccgagaactggatatgcagcacgctcctccttatccgcgtcttctgcacctaccaagacgccatgtggtacaaggagcaggagaagctttcctacagatattaaatgcgctggccttcacagactagccttggatttaacatttgtttgatcaatgtcagttcaactcccttt

SEQ ID NO: 140268 - DNA, 163 bp, Zea mays
  Clone ID: MRT4577_59407C.1
ggggaccctccgggtctcggccggggaactagacatacccggagctcagaccgcagggacatccatccacccgcgtctgtgcgcccggaagagggcacggacaggaccactccaggagggaaggcagaagaaggccgcggcggggatacaaggtccggcggca

SEQ ID NO: 140269 - DNA, 198 bp, Zea mays
  Clone ID: MRT4577_59408C.1
aagaaatagatcggttttgaagcgcggggaacacgagaaatgatgctatgctctgaatctctcatgatgcatccacatcagtcatcatcttcattagaaactctggtctgtggttgattttacaggttttgcggagggggggtttgcttctgacggcctactgcgatcgacgacgcctgccttatatgtactggccct

SEQ ID NO: 140270 - DNA, 459 bp, Zea mays
  unsure (1)..(459): unsure at all n locations
  Clone ID: MRT4577_59409C.1
gcacaaacgggggggggggganacagnnacacagcagcngaacancaaacccancgccggccaggcncngagcaaacgccaaagccggcaacggggcaccnacggaccggaccccagncacccaccccacacccnaccncgcncgcagncgcagcnnccgcgggacgcacacnacggcgcggggcacgcaccgacgacacggcggcgcagcnnagggaggagnaagganagggacncgccanacagggaggcancgcagcgggccaccccgncnagcgancgaacacagncgacggggaacgccggccggnccggncagnnggggagcgcgacggcggccccgngcacgaggggcngggnggcgngcgcgacgcccncggccncccgcnccaccggcncccggcacgccncccgcgcgcccggcnccgncaggcgcnggacgaacgcggcgaagcggcg

SEQ ID NO: 140271 - DNA, 247 bp, Zea mays
  unsure (1)..(247): unsure at all n locations
  Clone ID: MRT4577_5940C.1
gggggggggggggggnntattattgtggtggggggtataaataggggggggggggggtgggttnagtggagggatgaatttaatanatgnagatttaatanangagnaaagaatttattttaagaganattgaaaggttnnaatngtgtttaagtgggananttaagagggggggtgaatagtgattagtgatttgtgagagtgtgattngtgtttnatttggtggtnttgttggttggntttttaa

SEQ ID NO: 140272 - DNA, 263 bp, Zea mays
  Clone ID: MRT4577_59410C.1
ccggggcgacctacacactgatcacttggcatacgccattcaaccgaaaactggttgacacgggagagaatatatttttcgttctaggttctttccgtgccacatattatgcattgggtggatttctgtacgctacatacacccacataacccgcaagggaaagcaaaaaatgaagcctaagttaggtgggggggctaatggacccattcaatcctcgcggacaatgcatgcttgtatgggctgcattggccctgaccgtccg

SEQ ID NO: 140273 - DNA, 850 bp, Zea mays
  unsure (1)..(850): unsure at all n locations
  Clone ID: MRT4577_59411C.1
ccggccgggttcttcctatggaactttgttattggcttatcacctgcataatgtcatcgaggatttggagctgatgttataatgacaccaggatcttgaaaaaatggatctgaacactgatgtgatgtgctaaagaagcttgataagcactaggatattgtcgtcaatatttaatgagatgagcctattattgatacatatgagatggcaagccagtcacgcttctatgatgctccaatagaagcgtcaaactcaaggataacctattattcttggctcatgtcgcagtggtgttagtccaagattggcatcgacctcatagcacctatggtaatttattagatttcaagttcggctccaaggtacagctaacacgtcgctcgcctcctcctttttgtcctgcatccccgtaagcactgttgtctcctagtttggttcgcaggtggagaccaccgccactcttgttgatcacgtgtgcatcgttcaagcgcaaagcgaatttgcctaccacatcaagttctaccccgatctacaacaatcactgctcttcagcgatagaagaacggctcggggtgacaatcaccatcatcctacaacttgtctttctcaagtttgactgcaagatgttgcttctaattgattctccatctaggatctaggacatcaacactattagctaccttgtctcgattatatgtttcttgtcacgagcaattgcgagaggtaaagatacttacagcaagagaaatgagtgcttctcanatgtaacatacaaagaatattgtgtacaaagaagttcacttcttagtctttgtatttgtgatatacacattgtagtataattttgatt

SEQ ID NO: 140274 - DNA, 645 bp, Zea mays
  Clone ID: MRT4577_59412C.1
atgtccagctttgtttgatcgaggcgtttatttctattgttagtaatttatagatttcaagttcggctccaaggtacagctaacacgtcgctcgcctcctcctttttgtcctgcatccccgtaagcactgttgtctcctagtttggttcgcaggtggagaccaccgccactcttgttgatcacgtgtgcatcgttcaagcgcaaagcgaatttgcctaccacatcaagttctaccccgatctacaacaatcactgctcttcaggtgatctggctattagttttcagtgtggcgtgctttggtggaatatctctaataacggggcgtgtatcagcgatagaagaacggctcggggtgacaatcaccatcatcctacaacttgtctttctcaagtttgactgcaagatgttgcttctaattgattctccatctaggatctaggacatcaacactattagctaccttgtctcgattatatgtttcttgtcacgagcaattgcgagaggtaaagatacttacagcaagagaaatgagtgcttctcaaatgtaacatacaaagaatattgtgtacaaagaagttcacttcttagtctttgtatttgtgatatacacattgtagtataatttgatttgttccaatttagtt

SEQ ID NO: 140275 - DNA, 407 bp, Zea mays
  Clone ID: MRT4577_59413C.1
caccattgttgttgtttttctttctttacttggaggagggcccacctaactggactacgtacgccttgctgggtaccaatggccatgtggttacttttggttgagcctgatcccctaaccaaaaaactgcacctgcttttatggcgtccaaacgaactgggaaatactgttcttcagattctaccacttgcttgcccgttggcacctcgatcacgcatttgccttaccaaagccaaggaattccatccgggccataggtttggactttgcacaacctgaccttgactatcacctcaccctaaatggacattggcattaggcggctgtgggtgcccatcctttgctacttgagcaaactgccgcagattctcgacaacagaacctatggcgaagctaccatcaccggg

SEQ ID NO: 140276 - DNA, 474 bp, Zea mays
  Clone ID: MRT4577_59414C.1
ctttaaaaaaaaaaaaaaaaaaaaaaaaaaaaaaaaaaaaaaaaaaaaaaaaaaaaaaaaaaaaaaaaaaaaaaaaaaaaaaaaaaaaaaaaaaaaaaaggtaagaaaatatttaaagaaacaaagggttgcctcctttttgggtgtcccattttttgttccccttttttgccacttatttgtttttttttgggggccgtttttttagtttatttgggggggttttttcgctttccccatttgaaaacccttggctttccccccttttttgcctttgggcctaatccccttttggccccttgggttaatctttaaaaggccttacccgttcttttttcccaactgttgcgcgccctgtattggcccattggaacccccctttttgcgggggttttaaccggggtggttgggtggttttcccgccccttacccccccttttttccatttttttacggcccttttttttggttttt

SEQ ID NO: 140277 - DNA, 295 bp, Zea mays
  Clone ID: MRT4577_59415C.1
tcggttcagattcccgggccgacccacgcgtacgatccatatcagcatatcggcaattctcttagaggatcgtcgaacagaacaccatgaagggggacattgatctcgtcgtgtgcctggctctgtcagctgccagcgcctctgcaatgcagatgccctgcccctgcgcgttgcttcagggctagtacggcgctggcgccggcctgacgacgatgatgggcgccggcggactgcacccctacgctgagtacctgaggcagccttaatgcagcccgctagctgcgacgccctacta

SEQ ID NO: 140278 - DNA, 1499 bp, Zea mays
  Clone ID: MRT4577_59416C.1
cacgggcgcacctgccggccgggaaacccagccgcatactcgcggcaattctcgccgcgcacgatgctccgtctccccaccctcaccgcccttaaaccctcaacccccgccctcagcttgaaccgtgtcggctgcagccatggccgccgccgccgcaagctcatctttgtctcatccgctcctccgccgtcttcttcgtcttcacggcctccgaagccgacgtcgaacccggaaccaccaaagcccacacatgaggcccgcaaccggaacccggatggatccaccgaggcagggttccccacaaccaagccccggaagccacgccgtgggcgccgcagcgagtcggcggccgtggaggacttcgtccgcaaccgccttgagcaggtctttgcctccatccaggagcgcaaccccgacgtcctcgagggcaaaggcgacatcctgaagccgaaggccgatgtggagcgattaccagacgacgagggagagggagaaggagaaggaggagaacagaagcccgtggtggaagaggaggacccgagctggccgctggatgccgatgtcggatgggggatccgggcctcagagtacttcgacaagcactcgatcagaaatgtcacagtggacggggtggagatcgattgggaaggggacgtcgacgaggggtgggtcaaggaaatcaattgcttggagtgggagagcttcgcattccaccccagccccttagtcgtcctagtcttcgagcgctacaacagggctgctgacaattggaagtttcttcaagaattggaaaaggctgctaaggtgtactggaatgctaaagatcgcttacctcctcggacagtcaaagttgatataaatattgagagggatttggcatatgcacttcaagtaagagaatgtccacaattattgttccttaggggaaacaagatcttatatagagaaaaagagataaggactgcagatgagctggttcaaatgattgcccatttctactacaatgcaaagaggccatcttgcgttaatcctgaggccgttgcttctttctagttcttgtatagaattgtcgacatagtgttttcatcctcaaccggtgtgttggtgctagtttttttactggaagaagaagctcccttattcaatcattttccaggacatggtgctcggatagtgtggaattgatatgactaaacgaaaaccaagaaaaacatctaaatgctggttgggaaagtgtgaactaaattatgtatcattctgattagtagtatagtgtaacaaaatacaacttccaggggagagtgcttagatcattttatcggttagctatattagatgatttcaaagttgactgcaaactttgtcatggagcaaaacttatttcggttccctcttataatgagaggacaatatattttggtgtaggttgaacgcgtactcttgtggtgttttaactcttttcccgttctagaaactgggactacattcggatgaagaac

SEQ ID NO: 140279 - DNA, 1363 bp, Zea mays
  unsure (1)..(1363): unsure at all n locations
  Clone ID: MRT4577_59417C.1
tttttttttttttttttcaagaaaattattcagattacttactttggtgaatataaagcaaaccagactgcataatcgacagggttacactaggcatgccgatatgcggcaatttccgacctacgacacacggtacacaccaaacggcaaacgtacaatacaaacacaaacgaaagccggcccatccatttttattttctttgtcacacgccaacaatctagtaacaaccagctaatacacacgacagcagctgaatagtatatgcagaatacccataatcttgcttcgtccagcactgactgccgtacgtcggtaaactcgcggtgccatttttttagctgtccgaggctgcagctgccgcgtcggcctgcctctgtttggcgtattcgacgaggccatcgacgtcgggcagcaccgccttggccgctccgagcgcgccgaacctctccacgaacgcgctcagccgcggggtcctcgtggcgtcgaagagcctcatcccgtacagcttctcggcggcgtgcacccacgcgaccagcgctcccagcgtcacgtccaggtacccgacgctgtcgccgccgaagaagggcttgccctcggagatctccgtgaaggcggcctccaggttctcggccgcggcgagcgcctgcttcagcgcctcggccttttcctcctgcgtcttggcccttgctgattgcagccagaaggctaggagcttgtcgtcaatgtaggcaccccagaagcgagccacggcgcgctggtgcgggtcggcagggagaagggacgggccagtgccggcgaaggcctcatcgatgtactgcacgatgatctgcgactcgcacacaggcttgccgttgtggaggagcacgggcaccttcttgtgcaccgggttggactcgaggagcagctcgctcttgccgccggagaggtcctcctccacgtcctcgtagctcaggcccttgaagctgagcgcgagcttcacccgcaggacgaatgggctcgcccacgcccccagcagcttgagttcatcgtcacctcctccggccattattgtgctcgtttgtgctgccgcattgtaagtggcagagtggccttgctgcctacgatccactgagatccagccccgcgtcgcacggattcgtctgcaaaggattcagcacgccgcccgttgggaagggagcttcgaggcggcccgccgcggcgcgtcggccgggcgggctgagccaatggcacgggcccttggggcgcgaacgccctaactcgggtcggggcgggcggcgagcttaggctccggttgcttgcttggtttctgacttcgaggcgttcggtcctgttcccgcncgcggtttctttgcgcctctggct

SEQ ID NO: 140280 - DNA, 441 bp, Zea mays
  unsure (1)..(441): unsure at all n locations
  Clone ID: MRT4577_59418C.1
gcaccnnancagacccggcacgctttcgcgccancnaagncgaggggaggggccggcggcgacgacangggcaacgacgccgcgagggcggccacgacgccaggggcgcgcgcgcgccagngagggagaaccgcaaggacaacccgcagcccgacagcccgacggagcacccgncgacgaacnacgaggacaagcagcgcgccaggggggggcagagcccgcaggggngggcgccccggagcccccggccggcggaggcggaggagnncgggagcaaccccggcaacagcgacgacgacaacgagcagccgnncgcggacgccagccccagggaggacagcagagcgcncaaggcggagcgggacgngccgcgccnagacgccagccnaaccggcagaccgcagcccgacacacagcggaggcagcgccngcnggcgcggg

SEQ ID NO: 140281 - DNA, 688 bp, Zea mays
  Clone ID: MRT4577_59419C.1
ggaccctcgaggccggccgggactcacttgcgtttcctccccatgcctacggatgtgacactgctgtgttagcctggccttccatgcggacccacatggcggttgcacccgcgttacctaccttttagcgctttttcacgaccccgtctacagttgcttcgggagaggatttggggattcgcatggtagcatcttgatgcccctcctcgtcgagccggtcaaagcatcgtctacacagcgaacgcatgtcgcagcagtgtcgtggcatgggcgtcggcacgatgctcctcttcaaggccataaggagtttgcctgagtttggattgatgtcgttcgtgacctagatcgtgtggaggcagccatgtgtgcaggtgtttgagaggtgaactatctaggagtcgagaaggtaacaaggcaataaaagctgctccacctgagaggatttcaaaattacagcaagtgcaagtttaagagggcatatcttttagttcccaagattgtttaatgcaaataagcacttgttagaaaggtctcttcgtctactttcaagtggtatcaaatttcaggttgctagagatcttcatctttcttatttatttacctacattccaattttactcaaagatgtatttagatcagaaaatcatctaaaacattttgagctaaaaaaaaaaaaaaaaaagcggcc

SEQ ID NO: 140282 - DNA, 440 bp, Zea mays
  Clone ID: MRT4577_5941C.1
ctcacgggccgacacaagcctcaagaggacatctgagcatcgcttctgatgaccactctaactctgtaaggttacaaagctgcagcagcagttcaacagcttgtgtaaacctgctcgctaaggctaaaaaaaaaaaaaaaaaaaaaaaaaaaaaaaaaaaaaaaaaaaaaaaaaaaaaaaaaaaaaaaaaaaaaaaaaaaaaaaaaaaaaaaaaaaaaaaaaaaaaaaaaaaaaaaaaaaaaaaagggggggccccccaaaaggttcaaacttaagttacccttaaatgaaatttaaaacccctccaaaagggccaccaaatttaatttaaggggccttcttttaaaaagtcctaaacgggaaaaacccggggttaaccaaattaaacccctttgaagaaaaaccccttttcccaaacgggggtaaaaacaaaaaggccc

SEQ ID NO: 140283 - DNA, 186 bp, Zea mays
  unsure (1)..(186): unsure at all n locations
  Clone ID: MRT4577_59420C.1
aaggttgctgagcagcgctagctcctaccgtactccggctcgtgctcaggcgctcatgccatgtgttcccaccgagcttccacgcgatggcgttctatgtattccccttcacgcggcctggtctcccancaactgcatgtccctgagnacgtgcgaggaccgcctggccatcgcctatgacaacat

SEQ ID NO: 140284 - DNA, 529 bp, Zea mays
  Clone ID: MRT4577_59421C.1
ctcctatggcgagattgaggaggggccgctgggtttagacaagcagacgggcaagttccggggctttgcactgttcgtatacaagacaccagaaggtgcgcaggcctccctagtggacacggtgaaggtaattgacggccaccagcttgtatgcaagcttgccttagacgggaagaaggagaagcaggggcaatcacagcaacctggacctggcaatcaccaccagcagcagatactgccgggtggtccgcaggacattcagggagggcttgggcttgggtcacaaatgggagcacagtatggtgtccctgggactggtatgccttcatttggttttggtggtgttggcggcgggtttgggggtccaaatccttatggtaacatgccatcttccatgggtggaggtggcgcaggtggtttagggtcgatgggaagccaggtgcccagtggtttggctagtgctggggctggtgcatttgggcctggcggattgggtggtggttcatatggtgtatcatctcagttcggt

SEQ ID NO: 140285 - DNA, 717 bp, Zea mays
  Clone ID: MRT4577_59422C.1
ttgggaccctcgaggccggccgggaacgtcattccgctcgtctctctcgctcacatcaactctccaggcaaaatatcctgggcgcgatggatgcaacgccagcgagcaagaaggccacgccggccgccgccgtcgccgacgcggtcccgcccgctgcgcagcaggcggcggagcagctgtcgtcgcccgaatccgtcgccggcgtgagggcgagcggcagcgaggacgacgacgagcaggtggagaggttctacgcgctgctggacaacatccgcgccatgaggggcatggtcagcaccggcggcgcggcaccggggaggaagcgggcgcgcgacgacgagcccccgtggcggccggcgttccggatggaggacttcgagctggaggaattcgactccggctccgcggggtgcgacgggggaaagaagaagagggagagcagcgcgagggagtgcgagccgtcgacacgtgacaggaatcagaatacacagccctggtccaatttgcacgtctttcacatttacgatgatatatgatgctaattgcctattaggagcatgtgtcgtatgctctcttcaactctgtcacatgtataattatgactttctgatgtcctactactccctagtccctagtagcagcatgttgcctgtgtagttcgtatttttcttataatgtacaacttattaaaagtaaaaaaaagatcaaagttgccct

SEQ ID NO: 140286 - DNA, 413 bp, Zea mays
  unsure (1)..(413): unsure at all n locations
  Clone ID: MRT4577_59423C.1
aaaatgggtttttttttttttttnttgttggtnnggaggggggggggggtgtnaaagnaagttgganaaaggggaaaaattgttgtagttgtaagagggttgnggggttagnngnaaattgttggtagaaagggagnaattgttgttgtgtnaagaaggaagnanggtttgttgnagttagntggttaaatggtagtagtatttgttgnttgaaataagnagnggggtttagtgnggnnaattggttaaatggaagaagttgttgttgttgagagtaggnagtagttagttggttaaatggtaatagttgttggtggaaataagnaggagggtttagtgtagaaagttggttgaatggaagaaattgttgttgttgagagtggggagaaaggtttgnnaagattatttggttg

SEQ ID NO: 140287 - DNA, 1222 bp, Zea mays
  Clone ID: MRT4577_59424C.1
cttctatgtcgcgctcttgggcaacaaaactgcagtcactggaggcagcaggaaggtcatcaatagtaaagcagatgaccatatttttatctattactcagatcacgggggccctggtgttcttggtatgcccaatctaccatatctttatgctggtgacttcatgaaggtgttaagagaaaaacatgcttcaaatagctatgccaaaatggttatatatattgaagcatgtgaaagtggcagtatatttgagggattaatgccagaagaccttaatatttatgtcacgactgcatccaatgcagaagaaagtagctggggtacatactgtccaggaatggaaccaccgcctccttctgagtacattacctgcctaggtgatctatatagtgtctcttggatggaagacagtgagactaacaatctgaaggaggaaacaataaaggaacaatatgaagtggtgaagaagcgtacttcagacttcaatagctatggtgcaggctctcacgtcatggaatatggtgacaagaccttcaagggcgagaagctttacctttatcaaggttttgatcctgcaaatgccaatgtcacaaataagctgctttggtcaggccaagaggctgtggtcaaccaaagggatgcagatattctcttcctatggaagaggtatgagctcttacatgagaagtctgaagagaagcaggaagttctgagggagatcaccggaacagtaaggcataggaagcatctggacaacagcatcaacttcatcggaaagcttctcttcggggctgagaaagggccttccacacttgaggccgtcaggcctcccggccagccactcgtcgatgattgggactgcttgaagcaaatggtacggatcttcgaatcccattgcggatcgctcactcagtacggtatgaggcatatgagggcgttcgcaaatatatgcaacagtggcacgcctggcgcttcgatgaagcgagcgagcatgggtgcttgtggcggctacaactcggcgagatggagcccgttggctcagggctacagcgcttgatcttctgaaaggttccggggatatgagtgtgtatactgtaaaagttggcctttgtgcctctgtaatgtacgtagcagttgtcttgtatatatctcggtggtgtgtttctgacttggtatgtttcgccaggtcataatatagacgaaagtgcctgcagctttgcag

SEQ ID NO: 140288 - DNA, 2539 bp, Zea mays
  Clone ID: MRT4577_59425C.1
tttatgtatgatgacacttgccaatagtgcacgtgatccaaaggcaggcgattatcatgaaccacccacagggcgaaaatgtttatgcgtgggggtgcaaaggactacactgggcaccaagtcactactaagaacttctatgcagttatacttgagcaacaaaactgcattcactgaaggcaggaggatggacataaatagtgaagcagatgaccatatttttatctattaccaaacatccacttgacttgattacttcgtcttgaatcatatttttttgttaatttggagatggccacttggttccatgatgaataaccataatattactacttgacagtgagactaacaatctgaaggaggaaacagtaaaggaacaatatgaagtggtgagtctggacttgccttctaggcatttcatttgatcgctttataaacttgtacttagtcacagcattgtgcacaggtgaagaagcgtacttcagacttcaatagctatggtgcaggctctcacgtcatggaatatggtgacaagaccttcaaggaagagaagctttacctttatcaaggttttgatccgtcagtagaaagcgcaggcgtgttggaggatgcagtgacagtcgcaatcaggtacgctggtgaagataagcgctaaggcagctctagtcagaggagcgaggctggcgtccgctctgtccaacggtgtaaccacggcccccttccgagtacattacctgcctaggtgatctatatagtgtctcttggatggaagacagtgagactaacaatctgaaggaggaaacaataaaggaacaatatgaagtggtgaagaagcgtacttcggaccctggtgttcttggtatgcccaatctcgtcatgcaatatggtgacaacaccttgaaggtgttaagagaaaaacatgcttcaaatagctatgccaaaatggttatatatattgaagcatgtgaaagtggcagtatatttgagggattaatgccagaagaccttaatatttatgtcacgacggcatccaatgcagaagaaagtagctggggtacatactgtccaggaatggaaccaccgcctccttctgagtacattacctgcctaggtgatctatatagtgtctcttggatggaagacagtgagactaacaatctgaaggaggaaacagtaaaggaacaatatgaagtggtgaagaagcgtacttcagacttcaatagctatggtgcaggctctcacgtcatggaatatggtgacaagaccttcaaggaagagaagctttacctttatcaaggttttgatcctgcaaatgccaatgtcacaaataagctgctttggtcaggccaagaggctgtggtcaaccaaagggatgcagatattctcttcctatggaagaggtatgagctcttacatgagaagtctgaagagaagcaggaagttctgagggagatcaccggaacagtaaggcataggaagcatctggacaacagcatcaacttcatcggaaagcttctcttcggggctgagaaagggccttccacacttgaggccgtcagacctcccggccagccactcgtcgatgattgggactgcttgaagcaaatggtacggatcttcgaatcccattgcggatcgctcactcagtacggtatgaggcatatgagggcgttcgcaaatatatgcaacagtggcacgcctggcgcttcgatgaagcgagcgagcatgggtgcttgtggcggctacaactcggcgagatggagcccgttggctcagggctacagcgcttgatcttctgaaaggttccggggatatggatgtgtatagtcttatctgtgaagtactgtatactgtaaaagttggcctttgtgcctctgtaatgtacgtagcagttgtcttgtatatgtctcggtggtgtgtttctgacttggtatgtttcgccaggtcataataatagacgaaagtggcctgcagcttgcaagccaatccggtgtagtagactagtagtagtagttcacaatcaggcctatgggccatttctgagaacagagacatgacactgattgggacagcttaaagcaaatggtagggatcttcgaatcccattgcggatcgctcactcagtacggtatgaggcatatgagggcgttcgcaaatatatgcaacagtggcacgcctggcgcttcgatgaagcgagcgagcatgggtgcttgtggcggctacaactcggcaaaatggagcccgttggctcagggctacagcgcttgatcttttgaaaggttccggggatatggatgtgtatagtcttatctgtgaagtactgtatcctgtaaaagttggcctttgtgcctctgtaatgtacgtagcagttgtcttgtatatgtctcggtggtgtgtttctgacttggtatgtttcgccaggtcataataatagacgaaagtggcctgcagcttgcaagccaaaaaaaaaaaaaaaaaaaaaaaaaaaaaaaaaaaaaaaaaaaaaaaaaaaagggcggccctcgcgatctagaactag

SEQ ID NO: 140289 - DNA, 319 bp, Zea mays
  Clone ID: MRT4577_59426C.1
cgcaaccgaggggtggggctagccacggtggcagcactgcacataaccactattctccgtcgtctgggtgtgagatactggacaacgaacatcgagtactcttttactataaataatctacacaagggcgcgtcaactactagtgagctccaaagacgccctaattaatctcggaccactgcctgtgggcgtactttctctctctatacaagatacgccttatagcttgaggcatacatagctacaactggcatctcagacacagtgaaatccactcacaattacacacaggatcactatcgaaggcatggagtgtttc

SEQ ID NO: 140290 - DNA, 899 bp, Zea mays
  Clone ID: MRT4577_59427C.1
cactcctaagggcgattgggatcctcgaggccggccggggtcatccagcagccccattgcagtttcgagttcctggctggtggcgtggcacctcgttccctccgatcgagtccgcgactaagatacaccccgactcgctagcgagcaggcaggcagaatggagcgccacgccgagaagccgctcctcgtgctgccctcctgcctcctcttccttgtcctcctcctcgccccgctcgtctccgccgtccccacgccaagaagcctgcgcctggggagccaccagcagcagcagccgccggctctgaagctcagttcctctcaggacacgacggcgatcgcggcggcgatgatgaaaaacacgggcaggccgacggcgagggtggacgtggaggtgaacgactaccagccgtccggccccaacaaccgccacgacccacccaagggtcccggaagaccttgaacgggggccggctcagctggacgacgacccggccaatcaataatccttctccgtcgtcgtcgtcgtcacaccggtagtacaaagtgcgtcgcttgtgctagctcctctactctagttctagtagaaattaaggtcgtcgaaacaaagtcacctagctgcgttttgtatatatatacaccggccgcgcgtgtgtgtatggctgctgtgtgcaaggcacatcggtcatcggtgcagtgggttggggttggtcttaggctggttaattggttgctgttcgtcggaaagaactccactgcatgcagatcgatttgcatctcctgctgcaggtgcccgtacagtgtaccagcagattgagattgtccagcttgttagttctgtgcctccgacgatcttgatatactcttatatcatacattcatactatagtatatccatcagc

SEQ ID NO: 140291 - DNA, 360 bp, Zea mays
  Clone ID: MRT4577_59428C.1
gaagattgcgtccaagctgccggccgatgacaagacgaagatcgcggacgccatgggcgcggacattagctgtctggacaccaaccagctcgccgaggcggacgagttcgaggacaagatgaacgagctggagagcctctgaaaccacatcatcgccaagatgtaccagggcgcgggtgaagacatgggcgactctggcagcatggacgaggacgcccacgttggcagcgaccaccctggccccaagatcgaggaggtggactaaccatgttgtagtcagtcttgagcgtgctgcagtagctggctggcccaatccctgacgtgagttatcgacggctgtcggagcggagtgtccgctta

SEQ ID NO: 140292 - DNA, 867 bp, Zea mays
  Clone ID: MRT4577_59429C.1
ggcgaattggggccctctgaggccggccggaaaaaaaaaaaaaaaaaaaaaaaaaattgcagtttcaggattcctggcacctcgtccgctccgagtccgcgactctttcactgagatacatacaccccgactcgctagcgagcaggcaggcagaatggagcgccacgccgagaagccgctcctcgtgctgccctcctgcctcctcctcctccttgtcctcctcctcgccccgcttgtctccgccgtccccacgccaagtgagcctcggccatggcctccgctaactcccaccctcccccgctgtttcctctctcggtctcggctgctgattttgcctgtgcgatcgcaggaagcctgcgcctggggagccgcagcagcagcatccgccggctctgaagctcagttcctctcaggagacgacggcgatcgcggcggcgatgatgaacacgggcaggccgacggcgaggatggacgtggaggtgaacgactaccagccgtcgggccccaacaaccgccacgacccacccaagggtcctggaagaacttgaacggggctcagctggacgacgtacgcgcgcccccaataatccttctccttcgtcgtcgtcgtcttcaccggtagtacaaagtgcgttgcttgtgctagctcatgtgtatatatataccggccgcgcgtgtggtatggccgtgtgcaagcacatcggtgggtcgttaagttgtgttggttgctgttcgtcagaaagaactgcactgcatgcagatcgatttcgtaccccgctgcaggtgccggtacagtatctatcagcaaaagcagcatcactgctcaaaaaaaaaaaaaagaaaaaaaaaaaaaaaaaggcggccctc

SEQ ID NO: 140293 - DNA, 273 bp, Zea mays
  unsure (1)..(273): unsure at all n locations
  Clone ID: MRT4577_5942C.1
tggaagacctagctgccagagaattgctgtaccaacaccagcataataaaaggatgagctgccccgccatggcacagctcctctccaataccctggactacaagcgattcttcccatattacgccttcaatgtgctcggtgggcttgacagcgaggggaaaggatgcgtgtcctcctatggtggaatgggtccctggcatagagcatgctacaggactcatgacattgcaagcaggcctttcanagtcaatgcgggggctgtacatgcatatg

SEQ ID NO: 140294 - DNA, 467 bp, Zea mays
  Clone ID: MRT4577_59430C.1
tcgcccacgcgtccgcacccgggcgtggcggatgccgcagtggtggggcggcccaacgagtactggtgcgagatgccgtgctcatttgtgacgctcacggagggcgcggacggcagcgtgcgcgcctaggaggtggtggcgttctgccacgcgcgcctgccgtggtacatgactccccggacggtggtcgttcgtggacgagctgcccaatacagccacggggaaggtgcagatgttcgcgctccgggatcatgccaatgccatgggcagtatctccagctccgagcatcatgatggtgcacggacgaggagcaagctctgatctgaactaacatgcccacatggatgtctactccattccactgacgagtatttgagcagcaacaaacctaattgtgctgaactgtgctgtgctgtgcttggacatgtatagaaagagaatcaccactctcagcgatacagattcg

SEQ ID NO: 140295 - DNA, 595 bp, Zea mays
  Clone ID: MRT4577_59431C.1
gtttcttcctgtgtccaatactataacttgttctaagtttggtgtcttagcaacaagaaaaggttaggataaagaatcaggcacaagtgtggagaagctctcgagagattaaatactttcaagatgggaagtacactactacatggtaaaggtacaaaaggaagtattaatctttttgcgtatttatatcttacttaaatgttggtagtgcatatgctcaataagtaagggggagttttgatactgtgtctctcctccttaacaccctgctgtcccttgacatcatcctatgttcttgcttgaaatatggttttggagtttgatgtcaaagggggagaatttgtgcattaaagcttatctcaacctgagaggaaagcttaggacttatcctaaggggtgatgtgttagtttgggttgagcgtgatgaattatttggcttctatagtgtaatagatagtcatgtggttaatggtggacttatcctaaggggtgatgtgttagtttgggttgagcgcgatgaattatttggcttctatagtgtaatagatagtcatgtggttaatggtgctttaagattgctttaaattggtatctt

SEQ ID NO: 140296 - DNA, 542 bp, Zea mays
  Clone ID: MRT4577_59432C.1
ctgcagtagttctcatgttctgaatctccagcctgctgtatcacctggctcttttgcaatgttcaagcgctactaccacaaaaggttgcatataataatcatgtagatagaggattcattaagtaaagttagaatgaggagccatatgtggctggataataagcaattactttggttagaagatggggggcctataagagggagaaatagtttattcaaaaaggcctcgcataaatttcagttagtactctcgtggagctttgagcaaccagatgcttaaatggacatttcctcaatcatctatgaagtcttatttcccttctcctcctcataatagtttcttaataagccacagttacaatgatagtgatactaatatcctatttcttctcccaacacatatagcttggaacactctctggtgtggagtactgagcgccgctggtgataacttttcgcctttatatatatgctttattcatgccttgttgatataaaaatggagaaagaagatcttaggtttctaattttatttggcatat

SEQ ID NO: 140297 - DNA, 430 bp, Zea mays
  Clone ID: MRT4577_59433C.1
cgggcgacccaggcgtccgtctatacattaatgcctccttgcaacaccttttttttttcaaccaactgactatttcaaacggggcggcttacttacaacagcggcagacatttacttaatccactatcagttgctaacccatttgccgctgccttcctacagcagcaacaattgctgccatacaaccagttctctttgataaaccctttcttgtccaggcaccaacccacctttggaggtcccatcttttaaattacatattaaacgtactccattatgttgccctaattccatcatgtttttcctagaaaaaatcaatatattgattgagatgtattccaatttatttctcaaaaaaaaaaaaaaaaaaggcttcccttttatagtatccatgcttacttaccctttcattctacatattaactttttc

SEQ ID NO: 140298 - DNA, 326 bp, Zea mays
  Clone ID: MRT4577_59434C.1
gcccggactggggacttccttatttctgccaagccacaaacatcaaataaaatactttattatcgaactataactgatatgaaatctaaaagagggcaccaccacatgatgggatgctggtagaacactgctgggttggccaaagcaagatgtatgaaaggcaacaagtgttgcacttgctggacggtgccacacgctaggcgcactcgtgctgctagaacggtacagctgcggtcgcgccacgaagggaggagggctgacaccagctagctggctgactggcatcatcagtggctgctggaaataagcaggatagtttcccgcga

SEQ ID NO: 140299 - DNA, 269 bp, Zea mays
  Clone ID: MRT4577_59435C.1
actgaaaacgagctgatcccagtgatcagaacattattagtgatctgttccaactacatgtaacatcagcaattcagcatggttcagatcatatcatatgcttctccttggggttctcttggtagactaagaattaccaaaaaagcaaattattccttaacaacacaaattaatcgtcaggagaagccatgccaaaaagcaaattattcctttacaacacaaaatagtccgcgggaggaggcattggtttctggataggtgatcaacac

SEQ ID NO: 140300 - DNA, 313 bp, Zea mays
  Clone ID: MRT4577_59436C.1
aatcatgattcatcgtagtcgtataggcaccaaaacaaatttgcaacactaattatgtaactgcaaaaaccatgaagctggtgcttgtggttattgctttcactggtttagtaataagaggttcttggacacagacaggcggctgcagctgtggtcaacaacaaagccttgtgcagtaacattattcacaacaacattattcacaaaaacaacaacattattcaccaccacaacattacctgtaggaggaacaccaacaacaacatgtttacatgctaccacaaaaacatctgtatcaacaagaagttcatgt

SEQ ID NO: 140301 - DNA, 351 bp, Zea mays
  unsure (1)..(351): unsure at all n locations
  Clone ID: MRT4577_59437C.1
acttcaagcctaataataacttcttttgaattactcccatctcntcccaaaacacacaaaatttaccaacaatttatacacataatcttccacttnccaaaccatcaaaattattttcctcattatacccatattaacanaaatttcttccaaaatttattcatcatcttctccattttatatcaaacctacnttaataactttttcaaattaaacnncatcnantaaaactcttttctcctcncntctttcttaaaactcctaaacttctcccaccanntattacccctttccttcctcaccaccctcttctttaccttaaaaattttttccaaaatatantctaccaac

SEQ ID NO: 140302 - DNA, 226 bp, Zea mays
  Clone ID: MRT4577_59438C.1
attcggctcgagggcgatccaactttttttttaacgaccagcgtacttgttttgtgtgaggtttttttcaatattaccttggcatgagcaccacttgcaatgacgtaagcggtttgcaacaaatggactacttgtttcatgaatgctcaaacacaaaaattcatttcaagattttgcagtctagattcagcaccacttacatgtcattactggtggacaagggatc

SEQ ID NO: 140303 - DNA, 485 bp, Zea mays
  Clone ID: MRT4577_59439C.1
ggcgcgccgctggggggggggggggggtgtttttttttttttttttttttttataacagcggcgagcgttgctgtgccaatcatatttataactgagccacgtgctatgaggaggacatatccgtgatttataccggggaacatttgccctcaaaccatttttggggggggggggggaaaacagaaaatgaaatccgacttctcctaggggacacgcaccaccattttatcgagccaatacatcaaatcaccggttggggttttccccttgcggccgtgtatgcggggggggagaaaaaaagagggggtcatgtgactgcgcttttggggtgggcggagggtcacaaaccttcaaagatgaaaaattgcgggggtaagccttttttttgaggcccttacatgtgctaatttgaaccgggtgtggcaacacaaggggggggggcgttactagggctgggacccctagggggggtgccaccaccacc

SEQ ID NO: 140304 - DNA, 515 bp, Zea mays
  Clone ID: MRT4577_5943C.1
gacgtaccgtgggaaagggctaaaggcaaaggaatctgcgtccgccacgactacgcggagactacctgcaacgcgcggccaccctggtgcatccggccaagatcggatggcgggcagcgatgtatctcgatgccagccaaaaagcaggccatgtgctatgggggactgcacatacgggcctcgggatacgtttccctgcaagaggcagcagcaggtgtgtctatgaccaacaacttgccgactgtgcgctcgcatcctacaatgctcctatgcatcgggagccatcgcatgacgggacctcttcaaatagcgataaactcaaaggagagccagacactagcggacttgtacgctaacgaaaggggcactggaaaccacaggcctaccattgacagtggtggagtaaacgttcccggactaggctaacatgaccctgagtaataaggtggaactgaaggatgctgtctttatggttcggccagaggcatttgccttcacggcgatcactggtttca

SEQ ID NO: 140305 - DNA, 875 bp, Zea mays
  Clone ID: MRT4577_59440C.1
aaaaactctggcatcgtcactccaaatcagccgctaattagggctgcattcatccacctcgtgcttatcgcctactccaacgccgactcctgctcgtcggtcgtcggctcgtcgcctcgtcgagctctctccgcccctccagcctagcctagcctagcccctcttgctcactgcgtcgtctccagaatccggcctacgaccgttggcggctggtgccccctccggcaatcggtggtcatggtctgtccctgctcaccccattcagatccgctatgcgcgaggcgcaactggatctatcgtattcctggctgctctctccctctccgcgggcgatgcgcctctctagtttgaccggcgtccgtccaaccggtgttgagcgtgccttcgcaggcccccttctctgccttcgatgagtgcatttggtgagtggtgacacaactgggcagagtggtgaactagtgattgatgcgcttgccggcgacttgcgaactgggtcagaatcgagttctcatcttcctatccctttgtgtgatactactactctgtatgtggaaaaaataattattccctggtttaatattatttgttcttaagtctgaaaattcactgatatagttcatttggtgttgtgatttttagtccttagctattagagaatgatgtctggtaatacctgaatcggccactgcattttattatccctgttgttattaaatttggctattagataataccagcgttttttattatcctgaatcggccactgcattttttagtccttagctattagagaatgatgtctgaaaattcactcgtatagataaggaacgttgtctagcaacaagagagatcatgtcacaaaaaatcctcaaggc

SEQ ID NO: 140306 - DNA, 329 bp, Zea mays
  Clone ID: MRT4577_59441C.1
ggaggaatacaaatatatgtcatgctgaaaggatacatacacaagataaagggacctgcacaaataataaagcattgtctagagcaaaaggaaaagcacgcgcaaacgcacaacaacacatcaaacagtcactactgcatttctaaccagcgtgcatctaaacaccggactttattccgcggtggacacgtccaatggagatatatgcaggaaggtggacgcccaaggtgtcaaggctttactagcaacggaaggacatggccgtccggcggactagcacaggtcttgcagcgacacatgcagaagtaaagtcatgaacaggcctgcta

SEQ ID NO: 140307 - DNA, 648 bp, Zea mays
  Clone ID: MRT4577_59442C.1
ccggcccgggaaaatatttaaaaaaaaaaaaaaaaaaaaaaaaaaaaaaaaaaaaaaaaaaaaaaaaaaaaaaaaaaaaaaaaaaaaaaaaaaaaaaaaaaaaaaaaaaaaaaaaaaaaaaaaaaaaaaaaaaacccttttttttccctaagccattccccaagggggggctttttacctctttgggggggaaaacaaggcccttaatttcttcttaaaggggattaaaaaacccctgaaattgggttaaaaggcccggaaggccaaggggtttggaaatgggtgccccaaaaaaaacccctttttttaaagggccctgggttttttgaccccccgggttttttttccgaaaccccaaaaaaacggggggaaagcccttactgggattttttaaaaaaatctggggggcccaaacccggggaaaattttttttaaaccttggggggttaaaaaaaaggaaaaatgcccgctaaaaacctttggaaaggaaaagggcaaggcccacctttttttaaaaacccggaaaaggggggggcccccaaaaaagggttgggaaaaaaaagttaaagggagggggcttaaaataccctttccccccggggggaaaaatttttcaaaaattttccctttttttcccccggggaaaaa

SEQ ID NO: 140308 - DNA, 370 bp, Zea mays
  Clone ID: MRT4577_59443C.1
taacttgaccttaacgcgctttttttttttttttttttttttttttacaaaaaacttttttttatgaggactaaatcatgacattagatgtataatgccaagcaaaacccaccccttgcacagtcgcgggacgaatacggggaaactgaccgcgtgatgggaaaccaaatacagtgcttggacccagcggggaccattggcctaggactacttatgccatgagtggagcccgtggctgtcggtcgaaaaaacatgggggacgccggacagcaccgacacgggggggtacgtacgcagacttttttgactcttctctctttttttggtcctctcgctttttttctttcctctctttcttctttcctctctc

SEQ ID NO: 140309 - DNA, 499 bp, Zea mays
  Clone ID: MRT4577_59444C.1
ccggccggggaatgccggcccagttagcctggcaagtggcaaccctagctctccctgtcggcgtgtccctgactccctatccagcggccgagcggcggctgcagctatctcccagtctccatgtccggctgtccctgtccagcgaagtggcagttgcggctctctccctcgctctaatctctggtccactctccacttctctagtgcaaggagcaggcagccagcagtccagcaccagcaaggcacggtcgccaggcgccagcggcaaggccgtaaagcaaccagcgcaaggagcaagcagcaagcacatcacggctggcttgcatgaggattgcttccctgtgctgctgctgtcttggactcacgggaaaaagttgtgtttagtgtgttatcttgctctaatgttctctattacgtgttatatgtaagagcaaatattgtttcactgttgaatattaaatattctattctaccctaaaaaaaaaaaaaaaaagcggcc

SEQ ID NO: 140310 - DNA, 368 bp, Zea mays
  Clone ID: MRT4577_59445C.1
cggctcgagaacaaatttataaaaaagcccaagctactactgtcttgctagtgtcacttcgcagggatgagtacaataaagtgagtggcttggacaatgcaaagcaaatctgggataccgtcaagatatcacatgagggtaacaacgccaccatgatcaccaagatggaactggtggaaggctagctggggaggttcgcgatgataaagggagaggagccaacacagacctacaacaggctcaaaaccctggtcaacaaaatctgaagctatggaatcacaacatggacggatcatgacgttgttccactcatgctcaggttatttacagcaattgacccttattttgtgaaccttatttttgaaaac

SEQ ID NO: 140311 - DNA, 370 bp, Zea mays
  unsure (1)..(370): unsure at all n locations
  Clone ID: MRT4577_59446C.1
aggcaataatatgctttgttcgtttcatgttcgtagtccttattcatgtatgatgtgatgatctcccctctgatttgtgtaagttgttcacttgctaatctctttctcgcttctcagaggtaaggactaatgaagttactggtatgcacctaggacattggtttagttgatttccgttctaaaatggtagtgaatgactgaaacttgccagtggaaaccagttcataaggtggcaaggggaggcatggtgagtccggccctttccaatcgcctaggtttaggcacatcagcacatgtaaggtgaggcaaggtgatgccatatgccagagcgtaacaaggngcttgcccagtccaccagacagctcatatg

SEQ ID NO: 140312 - DNA, 281 bp, Zea mays
  Clone ID: MRT4577_59447C.1
cttggactgcatggaaagagtgaggatcacattgatattatgtggatgcgtgtacatctcaatcgatcaggagtaggagctccagtgccagaaggagttcaactttgcctctgcacttggacatagccgaggatcaagtcatgacgcacagcctaagctcgccggcatgaggtatccgattgttctcaaggatacaatctgtgaacccagagcaggaaacagacaacttccacgctgtggcggcctggctgggacagcacacagcatacttccatccgtgc

SEQ ID NO: 140313 - DNA, 462 bp, Zea mays
  Clone ID: MRT4577_59448C.1
cattgggtacctcgaggccggccgggacttcgtccacaccgcaccgatggtaccactcctcttcctcccaaagacatccttgctactaccgatccttcacgttcgccaccgctgattcgtccatcatcctcatccgccgtggtcttcctccgtagattttttcagatcaggccacatgcggagaaggatgacctccgccgccgcagtcgcagagaagcgtggtgacctctagacagatgccgccccttaccgtgtcgctgatattgactcctgcgacggagcgctcgccgacggatatcccggcggacacaccgtatgagacggcgacaagctatccggaatctggagcctcctctggaacaatgagtaggaatagctcttcattgagcgcaacgtcgcattcttccacgatgtcgacgacgacatgatcctggatatccaaggggcccgatcctcccccta

SEQ ID NO: 140314 - DNA, 234 bp, Zea mays
  unsure (1)..(234): unsure at all n locations
  Clone ID: MRT4577_59449C.1
cccgcacgacacgacaccaagtcgaggagctcgngagggcaccgataatggccggcgtgaactccatcgtcgtcgggctcaagcccgtcgcggcagtgccgcaggccgacgccgcctcatcgccggcgaagcgggtgcagctggccgcgcccgagggccgtcgcgccgttctgctcgatctggcggacgtgttcgccgtcacggtcacaaccggntcggccaaggccacgatct

SEQ ID NO: 140315 - DNA, 307 bp, Zea mays
  Clone ID: MRT4577_5944C.1
tcgcggacgcgtgggcaggtacctcttctcactctatatcaaactacagtacacgaataactgcgacgtggtactacttttctatgtttatgaattagactgagttgatataatattaatcttaatgttgtggactttaacatatgtactttaggacatataagaaatattaagctattgctgtaatggagacctgagaatacatctcaagtatcaggactcaggagtcaggagtgacatcgcagcatgggaaccactctttactcttaaggtggtagccaaaagaagaagaaaaaagtcattccga

SEQ ID NO: 140316 - DNA, 410 bp, Zea mays
  Clone ID: MRT4577_59450C.1
aaaatcatcagtaccgtgttttttatgacaaaactgtattatttaaaactggcaccactcaacaatgtgctcacagttaagattgctactaatagcatctgcggtgcacagaaatcactgtcatggagcaaacaggattgactactgtctcatcatacacttgaagtcctctaaagctgcagcttaccaaatactccgtgcctgtagtctcagttctacgcatcttcctgcgatgtcgaaactgggaaacttattggtgacgggatcttgagttgagcggttctctccaagatttcctttggcttctaggtggtcacctattgtcacatttctggtcatcttctccatgtcggattcataaggcactccctttcatgctccttatgtaagacaatctttttggacttttt

SEQ ID NO: 140317 - DNA, 379 bp, Zea mays
  Clone ID: MRT4577_59451C.1
gcgtccggagcaccatcgacatggacagcacgattctacaccgaacacatccgctacctattaccaggacatcatgaggaggaactaaccccatcatggatactctgcacaatgccaaaacaaaacgctcatcgtcaactgttccttctctaacaccactaacctagtcttacccatgctctaactttccactgatgctgatgctattacgtgcacctgatctctaccttcttataactctaactaactattctatacttcttatcgagaatgttcacttgagctaacatatatcttacaactatccataattcataatattttaaagttactcctactaaccacttctctaaccactcaactcaatctactgtaaaac

SEQ ID NO: 140318 - DNA, 414 bp, Zea mays
  Clone ID: MRT4577_59452C.1
gggccgagggtcgacccaagcgtcagcccacgcgtccgcggacgcgtgggcggccgcgtgggggctgccagcgcttcattcgagatgttcgcagtaccaaagtagacagtgccgttcgtgatgctcgtatacacgaagacgatcccttgcgcggtattgtctaactgcctctggaaagagtatttcacaagcgcagccagatcaaccagatgtttccccttgctggaagtgtacgatatggccgcataagaatctccatggtcttccgaagtgtgcatgtacaactaccaagagatatgctgggctgggactacgggactgtggatatcaaaccctctgtaaaggctattgacgtgccggaggacctaaagccccttcgactcaaggtccgcacgccattggaacgcgcaaagc

SEQ ID NO: 140319 - DNA, 207 bp, Zea mays
  Clone ID: MRT4577_59453C.1
cctaatggttacctccaacaattttcctccaatcaaacttaggggttggggaccctgccgggactaccgccaccaaccttggacgctatcttaaggggccaacagttcccaacagatccctcccctgctatggagatcgtgcagaaccctaaagcatacccactggctgatgcgcagctgaccatgggtatcctcaatgtcatccat

SEQ ID NO: 140320 - DNA, 411 bp, Zea mays
  Clone ID: MRT4577_59454C.1
catctgttttatttttttttttttttttttttttttcggggaattgttttgttaaaaccttcaaagtgtcttttagactgctcctagcttagcaccaaagacccaaagtgtgcttagagttttcttgttcccagttttgctattcttctgtcaaagtttctcgccccctgtccctgtttttccccactgctgtggtagtaacacatctcgtgcccttttttttttttttccctttttcagtgccgttctggtgttcctcttcgtcggtgaccttggtcctggccttttttcttttgcccaccccgttgcctgcagtggcattggctttggccggccttttttcccccccccgttcgcggcctgtgttccgaaatgctccggttccttggccaacctctttcctgttttctg

SEQ ID NO: 140321 - DNA, 1639 bp, Zea mays
  Clone ID: MRT4577_59455C.1
agcgatcagaaatattatcaggtacctttgtgcatcgcggatgaagaatctaccttctccagagatggaaggagttgatactcttctgatgtatctttatagagcacttcatcttgttgatgacatggagaagctcgcatcatctcagaatagctgtattgtggatgaactggaatcccttttggatgactctggacatttgcggacacttgctttcttgtatggcagcaaaggaatgtgctccaaagccctttctatatggcgtgtactggcaaggaattatagtgcaggtttgtggaaggatctgtctgagaatgattcttgtggaactttggttactaaaaggtctggcgaggaaattgccgctgtagaagcagccaagatcctcaaagcattatctgatgaggaccttgttctggaacatcttggatgggtggcagacattgatcaagatctagcgattgcagttttaacatctgagacgagggaaaatcaactctcaccagaaaaggttgttgcttctgttgatacagaaaaggttgtgatccatcaaagatatttgcagtggttgattgagggtcagggctgcgatgatcctcactatcacacatcatatgctctttcactggccaaatctgcaattgaagcagttgatatggagtctaaatatagagggaaagatgatagtgaaattgattctgatgcacagtttgtttattcagtaagagaaagcttgcaattgtttctgcaagcttcagacctgtatgacccagaagatgtgctcgatgtcatagcagaatcagagctatggctggaaaaggcaatattgtataggaagatgggccaagagaatattgtacttcagatactagcattgaagctggaggatagtgaagctgctgagcagtattgcgcagagattggtcgagatgatgcttatattcagcttttgggcttgtatttggaccctcaaaacgggaaggagcctatgtttacagcagctgtacgacttcttcataatcatggtgaatcgttggaccccatacaagtattggagaaattatctcctgatatgcctctccagctggcatcagacacaattttacggacactgagggcccgagtgcaccatcatcgtcaaggacagatagtccataatctatcacgtgcgacaaacctggacgtgcggttgacaagactggaggagagatcgaggcatgtgcagctaaccgatgagagtatctgcgactcctgtcgagctcgcctcggcaccaagctatttgctatgtacccaaatgactcggttgtttgctacaggtgctatcgatcccagcaaggtgaattttcatcagggcatggtcgtagcatgaggaaatatgttatattcaaacaaagctggcttgtaagtaaataaatagcgaggaaggaatgaaaagtggtgttcttaaggccagcattcggctgtggctgctttaaaatgggcaccaagttttttgtctggataggctctctggaaacttgaccagggtgttgtatattctttttgaggccaatgaatgaatatatcccaaaaaaaaaaaaaaaaaaaaaaaaaaaaaaaaaaaaaaaaaaagaagggcggccgccgacagatgagctc

SEQ ID NO: 140322 - DNA, 865 bp, Zea mays
  Clone ID: MRT4577_59456C.1
attgggacctcgagccggccggatcgttgtcccgccgagtcgccgactgatcacttctcttccagcgagtacacacatcacacagcgaagggcagcgcatcgtgctgcggcggccggaggtgatcgacaagcacctctctaggaataataaataatggcgcagttggtggacaaggcgaaggggttcgtcgccgacaagctggccaacatccagaagccggaggcggagctggccgacgtcacggtggggcacgtgggccgcgatggcgccacgctggcggggcgcgtggacgtgcgcaacccgtactcgcacgccatcccggtgtgtgaggtgacctacacgctgcggagcgccgggcggacggtggcgtcagggacggtgcccgacccggggtcgctcgccggcgacggggctaccacgcgcctcgacgtgcccgtcaaggtgccctacgacttcctggttagcctcgccaaggacgccggcagggactgggacatcgattatgagatgcgtgtcgggctcaccgttgacctccccgtcgtcggcaaactcacgctgccgctcaccaagtccggcgagctcaagctccccaccctctccagcatcttctgatcgatcgatctgcgtgctgctcgctcgatccgtaactgcggccttgcgtgttcatgactgatctgcctactcgataatatgtaaaccgctctcttgagtgttgttgttgtgctgcttgagtagtacgagacctaataataataaactacagtgatgtgtattatgcaagtttcagaccaataaataataatacgaaaaagacgcgtctgcacattcctatttaaactgatatataaattattaaaatatttg

SEQ ID NO: 140323 - DNA, 1008 bp, Zea mays
  Clone ID: MRT4577_59457C.1
caacaattattgtattactgttgcacatgatcctatggtatgtgaggaatctcaaaaaagttactgcattgttgattcctaagtacaaggtactcattgcatctttaatgcacaattggtacatcctgtaacagctgctgtgctgcaatgtgcatttttgcctttatgttgtgccatacactagtttctggaaaaaagaatctaaaccataatgttgtgccagaaattatctcctgatatgcctctccagctggcatcagacacaattttacggacactgagggcccgagtgcaccatcatcgtcaaggacaggtgaacatatttttttgggtgaagttttattttggtattgaacagttgaacggcattgtggatcattgcctagacctaactgagtttgtttcaggttaagcttatgagagatgctgtcttaccagttgaatttctttgctcctatatgatcctttgcatgttttagatagtccataatctatcgcgtgcgacaaacctggacgtgcggttgacaagactggaggagagatcgaggcatgtgcagctaaccgatgagagtatctgcgactcctgtcgagctcgcctcggcaccaagctatttgctatgtacccaaatgactcggttgtttgctacaggtgctatcgatcccagcaaggtgaatcttcatcagggcatggtcgtagcatgaggaaagatgttatattcaaacagagctggcttgtaagtagatagatagcgaggaaggaatgaagagtggtgatcttgaggccagcattcggctgtggctgctctgaaatgggcaccaagttttttgtctggataggctctctggaaacttgaccagggtgttgtatattctttttgaggccaatgaatgaatatatacaaatacaggcatacagcataccggtggatgtctagtctgttcttccgttttttttgtactttagttttttttgacaaaatttaatatccacacctgtagtgggactat

SEQ ID NO: 140324 - DNA, 432 bp, Zea mays
  Clone ID: MRT4577_59458C.1
atcgatacctcaacctccaattaatcaattcagcaaacatcattctaatccccaaaaaggaaggcgcggaggtagctggggacttcagacctataagcctcatccattctttcattaagattatcaccaaaaccctggctcttcgtctggcgccgagaatgaatgagttagtttcaccttgccaaagtgccttcattcaaaaaaggagcattcatgaaaacttccttgcagttagaagcgctgttaggcgcttccagcgtattaattcgcccacgctattcctcaagctagacattgaaaaagcttttgactccgtccgctgggattacttgattgccttactccgcaatttgggattccctgtgaggtggactgactggatcgcttctatcctctccacctcaacatcaagagtgctcgttaacgggggtc

SEQ ID NO: 140325 - DNA, 164 bp, Zea mays
  Clone ID: MRT4577_59459C.1
cagccaccgatctacgtggggactggctaatcgatcttgctcagatcatatgaactgtggcgcaatgatcgcttacccacattactgtgatccgagcaatttcccgtcctgcgaagccaaacgcgttcttaataggctgggttacaagcgaaagagggaaagag

SEQ ID NO: 140326 - DNA, 1027 bp, Zea mays
  Clone ID: MRT4577_5945C.1
gactattccctcaagcttggtatagcatttggattgacgggaaaatggagctcatagttgatccgctgcttattctcgagaggtacctctggcgtggaaaatacgcattcgcggtggctgtccacaagcatcataggagcatctacgaggagggcgacgcgatcaagcgacggaagcgctacgcccgccctttggttgatcttcagatgaagatgtactattacgaggggatggagccttggagcccgaagaaaaagatgcctagcggacgacggcgtcctcctcgctgctctcggccgcggtcgcctccacaccgctgcacgcacgcaccagggtgctcgtcgtcccgcggatcgcgacgcagctctcatccacggaggaggatgtcagcgagccttcgacgacaccaccagctccgacgaggacaccgaactggcggaggaggtgtccaacggcttcttcatcgtcgccaggctgccgccgtcgccgacgtccgaggacccgagcccggcggcggggacgacttgggcactgcggaggagtcgctggacaggactagactctaccgcgcgcgccatggcgctgctggtaggcacgcggctgtcctcgctctcctcggcgtcctcctcgccgctctcgcctgcccatcgacggcggattgaggaacatgcaaacatcggccagtgaagggacagcagcaaacaccggacgacgctggggagactccctctctacggactcctctggctggcacgcaccttcgatgttggccgcgaactcgtcgattgcgaggaccagcgccgggactggcggcggctccattgccgacgagctcagctgcagccgagcgtgggaagaagccgaacgaagaagaatgaggagtcccgagtttgatctgttatgagtaacgaagagcagttcttcaacgaaacaaaacggccaccctgtactttagttttcggttgatgacactcggcagcgagtaaacctctgcacgatatcaaatttgcaaacaaacggcagttat

SEQ ID NO: 140327 - DNA, 306 bp, Zea mays
  Clone ID: MRT4577_59460C.1
ggttattatttttttttttattttttaaggagcgcatatggagcaaaagcacaaacaacgttaaagctggcaaataagaatttgtacaaccccccacactgaaaagggtacaaaatggacatttctgaatttacattagaccggcggcttttttttaaatgcccaagccaaaccgttggcaccatcttatggacgccaaggtttgcgcccaaaaagagggtaacatcttgtagccaatgcggggcggactgtcacacccattgcgcttcaaaccagaagagttttttaaccaccggggacccttta

SEQ ID NO: 140328 - DNA, 321 bp, Zea mays
  Clone ID: MRT4577_59461C.1
tcttattctttttttttgttgttctttttttttatttttctttatagaccgcttattgagaggcgtggaaccaaacggccaaaaaaacaccaggggggcggacacaaacaaatcatgaatatatcgggtgtttttgcggggggacaaaaacatgcagaactttcgctcaagagcggcggaagaaaccagagaggggacggggctctaaaacacgcgttaatgtttgaacgcggggcgcccctatacactaaaggatcacgtttggggagcccccctaatcatagtcctaactccatggtgagagaagttgttatgggctca

SEQ ID NO: 140329 - DNA, 270 bp, Zea mays
  unsure (1)..(270): unsure at all n locations
  Clone ID: MRT4577_59462C.1
gacccccgaggctggccgggcctgtacagaaaaacttgaggccttgagctagtgctagtcaatgcacggatgtgaccattagaataagtggattcncacatctctctccatcaatttaagtttaattatacatgtgccttaaaacttctaaaaaaaaaaaaaaaaaaaaaaaaaacaaaaaaaaaaaaaaaaaagtggacggccagaacagatcgcaccagcgcgccgcctttttgggttcttgcgttgataagaggcaacacatgcagc

SEQ ID NO: 140330 - DNA, 180 bp, Zea mays
  Clone ID: MRT4577_59463C.1
ggaatcaaagtatttttggttacaccgaaaactgctgttcaaattcatgaaatttttgggttctttttccaggaaagggcttctttagattgaacacttgtagaaaacaccaagttgggcttcaagcaaggctttcaaccatagtcttttaccaatattttaaaaacttacacgccttat

SEQ ID NO: 140331 - DNA, 403 bp, Zea mays
  Clone ID: MRT4577_59464C.1
cgccacggacggtgggatcctgtagaccggacacccttcgtccttttttttttttttttttttatctagcccaacacaaaccaggattagggcaaaaaagggtcaggactgctctcccaaaacaaaaacggtaacaataagatattctacccttcaccgttacatttaaacatgtccctgtgaaagaacaaccactttaaaacttagcacagttccagatgccttttttttgtgtcggcttataaactgcttctcatagaacacacattccttccaagtgaatgatgggacctgtaccacgaaaacttcttttactgctacggagacggtcaacataaccccttcctattaaggcggagataaactagggtgagggtcaccgggcccatggcaccctgggcca

SEQ ID NO: 140332 - DNA, 270 bp, Zea mays
  Clone ID: MRT4577_59465C.1
ctaagagaggcctcgcactcgcttatcttaacgttctgcttatcgctgcagtagctaccgtcgtagtagtaaacactggcaactactctagggtagacaagcgagtggaatttagggactcctgggacctatcctgtaccgtcggagaggtaagtgcggcgatcaaggtgattgtttgcccgtcagcgtccaggacactactgggcctcacatttgcatttgcgccgatggatggaccaattttgacggcatttgtgattaccaacgaaa

SEQ ID NO: 140333 - DNA, 498 bp, Zea mays
  Clone ID: MRT4577_59466C.1
cattctttctgaatcgtttcgcttgtgtgcttgccttgttcatacttgtttgtttttttcgctttgttcacccgttccgtcaggacgataccagggacgacaattccgggacttccacaggcgcggtcatctaagatggcgtttaaagggacggcctggatcggcaggaactgaaacgttttgaagtggattaacacccctctattggaattgaaggaaattgaatccccttgaatgcccttgcaaacagacaagagctaacaagccctaaagggtttgtaattttataaaataacgcaggggaacttggtatgccctgcctggctgtggccccttattctccaactttgatttgaactgaacggtaggacatagaaactgaaaaatccttagctgcttccacccgctttaacaggcttgaattcctagacttcctcaaaggtttcccatggattttaccaacccttagcttctaagatttaatatgcttcactttcc

SEQ ID NO: 140334 - DNA, 820 bp, Zea mays
  unsure (1)..(820): unsure at all n locations
  Clone ID: MRT4577_59467C.1
ctcgaggccggccgggataatagttccctcacctcactcactcgtgaggaacagacaagccacccaccctccttgatatcctacatacgcatctatcgaagaaggacatgtgcgacgccatggaggcctacagagcggcgtccagaagctcaagaccgacgtgtatgacaataagccggctctgttcaaccctttcactgccgttcaggtccctgagtacatggtgctcgactgctccgactcacgcttgtgcccttcgcaggacctggatctgccgccagctcgaggtcttcttccatgcgcaacatcgccgtgatggtgccggcctactacaagaccacgtacaccggcatcattgtccgccatctgagtacgacgcgtgcgccctcaacgagtacgttctcgcggtcatcggccacctgtgctgtggtgtcatccgggcgctgctctccctccatgcagtgctccccactacttccacttctgctagaactgacacgagatccgcttccctgcctaggtcgatgtgaagaaagagtaggcactcgtgctcttctatgaccagtgctccctcctgtagaatgaggccgagaatgcgtctctgcagaacctcgagacctacgcccttcatccacagaacggctggacaaggctaccctcaacctgatcagcgcccactacgacttctggtccgtgaacttcctcgtatggctaacttatgcaacactacgctcagctcacggcttcntcgtcacaacttctatatcttcatgaatatatatatgcactacctatgtgtacctaccgatatgctaatgcg

SEQ ID NO: 140335 - DNA, 311 bp, Zea mays
  Clone ID: MRT4577_59468C.1
ggcgggtcccaccaccgccggccctgactagtgtatatataaccgcgaagtggtggtgcaaaccgagtgcagtaaagcttgcgacgctgtagtgggatctctctccgttctactgtgctgtgctctgtgcatgccaccattgctgctgcagagaaggtgaacacaaacagggagcgctagtggtagatggacgcagcagaacatcacgtggaggagaccaaggaggaggaagcagcgcaggtgatggagacgacgacggcgcactctcggttcgggaggatctgcgtcttctgcggaagcagccaggggaa

SEQ ID NO: 140336 - DNA, 173 bp, Zea mays
  unsure (1)..(173): unsure at all n locations
  Clone ID: MRT4577_59469C.1
tttttttttattttnaaataattttggctagtttgatgtntantntggctatgtgccctcaacaaaacatgatgctntgttnttctcaattattttggtatttttttttgggttgacatgccanttatatatgaagacaagatatgtataccaggcgggatgccattttaggt

SEQ ID NO: 140337 - DNA, 358 bp, Zea mays
  unsure (1)..(358): unsure at all n locations
  Clone ID: MRT4577_5946C.1
aatcatagatgctcttggccccgagatctcaaatgtttcattacttttgggttgctgcttcattcatgtccctgagggggcttccccctccagcctgaatgtttctctgtgctcggtttgagaagggtgaacacttcctcttggggagtgcctgcgtcgggnttttcgngtggtttgccgtgtcctgcgtggctccttccgccggtactcgtctgtgggtttttgggctgtgcttctggtttttggcttcctgcctttgtgggttcctcctttgctggttcctgttcctgtcgtggccttttgcctgtcttttttgtggtttgttgttccctcttgggtttgttctggtcttgcctgc

SEQ ID NO: 140338 - DNA, 807 bp, Zea mays
  unsure (1)..(807): unsure at all n locations
  Clone ID: MRT4577_59470C.1
ccggccgggaaactctcccctcctcttcacggccgcgcctgcgacacccatccgccgccacgccatggccaagtacaacgtggtgcagaagaacaagcgccagtgcaatcaggaccgcaagcgcgccgcgcatggggagcccgggaccggcaagctcaagcagcggaccgcgcccgtctccatgtccggcaagcggaagaagaagctcgagcgccgcctcaaccggaagcagaaagaggctgcgatgattaaggcgctggagaacaacatgggggatgtcgacatggtctcagttgaagagtcttcagaagctgcaaagggcaagtcccaagtgaagttcagtgtgaagaaaaactcaagaatacagataaagagattaaagggcaaaggtaccacggtgctcaaattaatagtaatacatcaattgaaacaccattttccttcttggaaatgattgggtattgtttgaggcatgtaatcatggtgatgcactctgcaggcaggaagaaagccaaaaatgcaaaaccacctgccaaggagaaagttgatgccatggtagaatgacagttgatgccatggtagcatgacggacaagactacatacatccatccctttgtatgttttctcagagtttgcagcatggaccgacctcaccgaacactggcgcgtgtctcttgcatcttctgcctgaatgttaaatagaggctacttaggcctggtgttaatgtacttcaaacatgaatctacctttaatagtggactatgcgaatttgttcanaaaaaaaaaaaaaataaaaatataaaaa

SEQ ID NO: 140339 - DNA, 265 bp, Zea mays
  unsure (1)..(265): unsure at all n locations
  Clone ID: MRT4577_59471C.1
anngcacatgtcgangcccccatcnctgggtcgatagtanttgccgcagtactgcttaaaantaggcggctatggtanaatangcctcanantcattctcaancccctgacaaaananatagcctacnccttccttgtactatnnctatgaggcataattataacaagctccatctgcntacgacgaacagnnctaaaatcgctcattggcntgactcntcaatcagccanatagccctcgtggnctntgccattctcntccaaa

SEQ ID NO: 140340 - DNA, 808 bp, Zea mays
  Clone ID: MRT4577_59472C.1
cattgggtacctcggggccgctcggggctaggctggctctcccctcctcttccacggccgcgcctgcgacacccatccgccgccacgccatggccaagtacaacgtggtgcagaagaacaagcgccagtgcaatcaggaccgcaagcgcgccgcgcatggggagcccgggaccggcaagctcaagcagcggaccgcgcccgtctccatgtccggcaagcggaagaagaagctcgagcgccgcctcaaccggaagcagaaagaggctgcgatgattaaggcgctggagaacaacatgggggatgtcgacatggtctcagttgaagagtcttcagaagctgcaaagggcaagtcccaagtgaagttcagtgtgaagaaaaactcaagaatacagataaagagattaaagggcaaaggcaggaagaaagccaaaaatgcaaaaccacctgccaaggagaaagttgatgccatggtagcatgacggacaagactgcatacatccctttgtatgttttctcagagtttgcagcatggaccgacctcaccgaacactggcgcgtgaactgtctcttgcatcttctgcctgaatgctaaatagaagctacttaggcctggcgttaatgtacttcaaacatgaatctacctttaatagtggactatgcgaatttgttcatgttcttattacgtttatggagatgcttcattgtgaatgtcggcttctatagtaagcaactagcataatcttatcccccccatcccagcatcggatggcaattgttgtaatcaggcataggcgcatagccaatccgc

SEQ ID NO: 140341 - DNA, 157 bp, Zea mays
  Clone ID: MRT4577_59473C.1
ttatagctacattagttgttagtgttattatacatgcaccgatgcacgtggttagagattcaatttattttttggatgcatacagatggttacagatgtaatgatttggataattttgcctgatacagagctgcggtactgtactgcacttctcggc

SEQ ID NO: 140342 - DNA, 795 bp, Zea mays
  unsure (1)..(795): unsure at all n locations
  Clone ID: MRT4577_59474C.1
gccggccggtccgggcctctcccctcctcttccacggccgcgcctgcgacacccatccgccgccacgccatggccaagtacaacgtggtgcagaagaacaagcgccagtgcaatcaggaccgcaagcgcgccgcgcatggggagcccgggaccggcaagctcaagcagcggaccgcgcccgtctccatgtccggcaagcggaagaagaagctcgagcgccgcctcaaccggaagcagaaagaggctgcgatgattaaggcgctggagaacaacatgggggatgtcgacatgatctcagttgaagggtcttcagaagctgcaaagggcaagtcccaagtgaagttcagtgtgaagaaaaactcaagaatacagataaagagattaaagggcaaaggcaggaagaaagccaaaaatgcaaaaccacctgccaaggagagagttgatgccatggtagaatgacagttgatgccatggtaccatgacggacaagactacatacatccctttgtatgttttctcagagtttgcagcatggaccgacctcaccgaacactggcgcgtgtctcttgcatcttctgcctgaatgttaaatagaagctacttaggcctggtgttaatgtacttcaaacatgaatctacctttaatagtggactatgcgaatttgttcatgttcttattgcgtttatggagatgcttcattgtgaatgtcggcttctatagtaagcaactagcataatcttatcccccacattcaaaaaaaaaaaaaaaatgcggcctatcgagnctcagctttt

SEQ ID NO: 140343 - DNA, 536 bp, Zea mays
  Clone ID: MRT4577_59475C.1
gtttgggggttttttttttttttttttttttttttttttttttttttttttttttttttttttttttttttttttttttttttttttttcccacaaccatcaaaaaaaaactttattatggacctaaaccccaaaaaaaatcaaaaggggggggcccccgaagaggggttttgggaaaaaccctggggggtttgaaaaaccaagggggtggaagggcaacaattggggcagttgaaaaaggggcccaccgttaggcccaacgggctggaaaaacggaaacaactggggttgggaaaaaaagggagcagggcccaccccacctacctggctaaagggaaaaaattgttgctgctgaaaaaaaccgggaaagtccaaggctgctagtggggaaaaagaaaaaaattgcgggggggaggcaaaaggaacctggctaaaggggatttgttgttgttgcaaaaaaaaagcaaagttcaaggaccctagtgggtgaaaggaaaaaaactgtttttcctaaaaagaaggcaaaaaggtttcca

SEQ ID NO: 140344 - DNA, 103 bp, Zea mays
  Clone ID: MRT4577_59476C.1
gggacgcctgatccgacacatggacagacgcgtctgcgacgatggcgtaagatacagacggtcctgatactctcggcaatgctattaatgacgctcgtgctgg

SEQ ID NO: 140345 - DNA, 382 bp, Zea mays
  Clone ID: MRT4577_59477C.1
atgttttttttttttttttcccgaacaatactggattgattgcctccgggcacgaattggatcggaagaccaggttaatcggtacagggaattaatgataagagcactcttggttgttttaaaccaatggggggttgagggtacaacaaaggccaaatctagtatgacaatctaaaatgcccaaattaatgttaacaaatttgaggaagacgactgtaaactacagccataaaaggccgttggtcgaagactgatccattgaaatttacacacacaaaaaaaaggctccgcagccacctctatctgtgtgtccagaggaaaactttattagtaggctaattaaagctggaaatgggcctgaaaataagctaggggggaggga

SEQ ID NO: 140346 - DNA, 475 bp, Zea mays
  Clone ID: MRT4577_59478C.1
accaaaaaacaaaaaacggggcgccgttaacaacgccggaacagaaaaaacccgggcggaacccaactaaatcgcctaaaagaacaacccccttacaccagcgggcgaaaaaaaaaaaaggcccgaaccaaacacccttcccaacaaaagcgcaacctgaaaggcaaaagggaccccccccgaagcggcgcataaaacccagaaggggagggggatacgcccaaaaaaaccgctacacttgccaaggcccaaaagcccgcccccatggagaaaattcccttcctatatcgacaaggacgccagccttccccagaaagcccaaaaaggggggcccccaaaaagggcccaaaaaaacccaaacaaaacctaaccccaaaaaaccaagaaagggggaaggcccacaaaagggcccccccccaaaaaaaaccctataccccttaaccgaaataccaccaaaaaaaaaaagccccggtcc

SEQ ID NO: 140347 - DNA, 194 bp, Zea mays
  Clone ID: MRT4577_59479C.1
aaccctaaccccaaaggcccttgtagaaaacaaaaaccccccaaaacagaaagcagaaaccgcccccgcgattttattataaaatacaaatgcgcccgaaagaacaacaccccggaccggaccccaagaaaaaatacccagggggcgagggccctaggccaaagggcaccaccccctgccggaaagaaaccccc

SEQ ID NO: 140348 - DNA, 458 bp, Zea mays
  unsure (1)..(458): unsure at all n locations
  Clone ID: MRT4577_5947C.1
cgtccggcggatagaggaggaatatttttccctgagtgagtcacgcgcccgnggngactncgggcggggattcgtttttggacttggaggtggccaagaccgngatcgtggtccaagaggccgtggaagacgtggaggccgtgcctcggaagaaacgaaatgggttccagtgaccaaactaggtcgtctagtggctgacaataaaataacgaagctagagcagatctatcttcattctctcccagtaaaggagtaccaaatcatagatcatcttgttggtcctacgttgaaagacgaggttattaagatcatgcttgttcagaaacaaaccagagctggtcaaaggactagattcaaggcctttgttgttgttggtgatggaaatggtcatgtaggtttgggtgtcaagttgtctaaggaagttgctactgccattagaggagctattatttttgcta

SEQ ID NO: 140349 - DNA, 150 bp, Zea mays
  Clone ID: MRT4577_59480C.1
gacaagcgtacgatcacacaagcccaggttcaacgactgaagctggccacagtaacaagcaagggactacacaagacaagacacaccaccataacagccgggatgaacgcggagattaagccaccaacgctgcacgaaaccaaagtacct

SEQ ID NO: 140350 - DNA, 376 bp, Zea mays
  Clone ID: MRT4577_59481C.1
attggttataatagtagtagtagaagagaaaatagaaaaggcaagccattccagccaccaaaaacacttgtactatgttcctgtgaccttttggaggctttcaacctgtcaggaatcaggatatttgatgcatccaattatctaaatccaacaaatcttggtattatgcttactgtataatcatggtcgtattattttttagtctgttgatatttcactggcataaattgtttcttctgtgctttcatatccactatgtaacccatgttttattgtttgtagagaactacaatttatgctcaagtcaatgctgctcttcgcaaaataagagacacatcagagtttgtccaatcttttgcatcagagcatcttaaga

SEQ ID NO: 140351 - DNA, 255 bp, Zea mays
  Clone ID: MRT4577_59482C.1
gctcactagtcggcggccgcccttttttttgttttataccactgtgcggttattcgagttgtcagccatttgttgcgccttcttgtccacaatacacggggaggggtcttattgtggaacccgttaccagctctctaggttgacaggaaaccacattggttgtggataaactatatggaccttcctaagtgggtcccccccggtttttttttgtgaaaccttttggcaaaacaccatataccttcttaaaatttt

SEQ ID NO: 140352 - DNA, 811 bp, Zea mays
  Clone ID: MRT4577_59483C.1
cgctccgctccactccagtcggtcctactagtcctaccctccccgcctccccggcatcccttcgccatagcagcaccagacagcagagcaccaaacccacacttctttcacctcccctgccccctcctccattctccatcgcaatccgccgccgccgatggcgaggccgacgcgcgcgctcctgctcccgctcctcctgctcctggtgctggcccgcgcgtcgggcgacgtgccggcggcggcgtccctcggctgggacctccgcgtggtgggcgcgggagaggacgaggagttcggcttccctggcggggactccgtggcgtgccgggtgctgcagggcggcggctacctcagctacggcgcgctgcgcagggacaacgtgccctgctccgtccggggagcctcctactacaactgccgccccggcgggcaggctaacccctactcgcgcggctgctccgccatcacacgctgccgcggctgatctcggcgtccgccaataggaagaggaggttcatatccgtttatcctgcgccgttgttggctgatacggagaaaatcattcatctccctccctgcccctttaatcgattattggtacatgtacgctactctctctctctctctctttgttgattgattttgtttctcttgttgattgattttaacgagaatgattgtgttggttgtgggttatgactggagtatctctctctcgctccggtcctgtaaattccatgattttcgagcagctggtgtataaactacaaactgatgatgacgatttccccgctaaaaaaaaaaaaaaaaa

SEQ ID NO: 140353 - DNA, 504 bp, Zea mays
  Clone ID: MRT4577_59484C.1
tggcttggaacctttgggctgatttatgtgcttgtttatgtgcttgtgtttgcgcattagggttatggtgatgcggatgcgcggctgtttgcgtctcttggttttggtgcttttcctgtgtttcattctgttgatgtgtcttgttaggatcgttaggtgggtcattctgcttcttaggctaaggctgatggttgtgcgtggcggaaggctggtagtcggactcttggttatcattattctcctgctattcgttttgtgccttctgctattgttggtggtaatggtgtttttggtgtccttgggcctaggccttagattattatgcatcgttatgctgaggcccaaccaggagtgagaggaagtagagattacggtcattctctcagtcgtcgtcttcgttgccgttcggcgcggcaacaatctctctcactctctctctctctctcgcttgtcgtcggtgccatcatcgtagcagcgtagcgacgtgggacgcaaaggaggggc

SEQ ID NO: 140354 - DNA, 165 bp, Zea mays
  Clone ID: MRT4577_59485C.1
gggtatgggtttttttttagagcggggtacaaatatctttaatttttttcctgtttccaattttcatccaatcaaaattcatacatcattctagccggaaactttacattaaagcctggaaaccctaataatgagctaactcacaaaattgcattacacttactt

SEQ ID NO: 140355 - DNA, 142 bp, Zea mays
  Clone ID: MRT4577_59486C.1
acttagggaaagctgctccctgagtaccgtccgatacggccgccaccgtcggtgctgagaagcggcttcttttgacacagacagtgtgctttcacagtgcgtaccgaccttacatcaatgtgcttgcactgttgaacagact

SEQ ID NO: 140356 - DNA, 591 bp, Zea mays
  Clone ID: MRT4577_59487C.1
ccggccgggctcccttcccttctcctctcttccccgaaagagaggtcgcggacggaacccttccaccctcacctcatcccacaaccttcgattccttcacgatcttacctcgcgcgctcgccgattcctcgatcgagtcccgcgcgattcgctttctggtcggattctctcccccgaagcatgcagccggaccagcctgtgatcagcttgcgccccggcggcggcggcggcccgcgcgccggccgcctcttctcccccgccttcgccacctccgtctctggagacttcctccgcccgcacggcgggggcgcctccggcatctccaaggtgaggaaggctcgatctggatggatgacttgctatccgtagcgagttcgattggtctgcggcggggcgggaggcggagatccgggggaaacgatcggatctcctttttaggggcgctacttaattgtagatgagcttgtcttggtgcctcgtctcatttcgttgtcagatatggggagatttagtagtcttcacgcctcttaatgagtttttatttataagatgttggtgcgtaccaaaaaaaaaaaaaaaaaatttgcggcc

SEQ ID NO: 140357 - DNA, 197 bp, Zea mays
  Clone ID: MRT4577_59488C.1
aactggggctctgagggtggggtttattttcaatgaaagcagggttacttttgctcacacaggactcgcacaagcctacccaggctcggcgcagcttgcatatgtactgtgatccaggctatgagcattcaacaccctaacccatcgtataacttccgctatgggttacctggcgggtttaaaagcatgcgggcgcc

SEQ ID NO: 140358 - DNA, 1308 bp, Zea mays
  Clone ID: MRT4577_5948C.1
atttcgagtggccgccctttttttttttttttttttttttgggcctgccacaccatgctgggtgccgcgcgcccctggttacaaaggatatgcatcgagacacaacagcgagagggaggagacatataactgagtaaactctgatagtggcgggcgcatttggttgtctccatctgatcagcaagcagagccgacagagcacctgagaacgccggcatccttggtcagcgacttcacttggttggagctggctgccgcgaaggcctggtgcttgttgtaattcggccgcaccctgctacccgtctgcttgaagacagcgccgttcaggaaggagtccccgatggaggcccagtcccattccctccccgcgaccggcatccttctcgtcaccttcttgttatctgctgcggcggaggccacgaacaggttgccctggctcttgacgcttggtcccatgcttcctccaatggcgtagtctttccatcccaagtatacattgttcacaacgtgagcgtagccatgcctaatcctcggcatgcgctggttgacgctcggcccgaaccggttgaacgcgacagtgacgcgcatccgtcggtcctcggcgtggccgtcgtcgtggccgagcagcatgaccttgtcgtggttgaagaaccagttgttggagatggtcacgtcggtggatccgaccgtcacgtccagcagcccggacgcgcaccgcgacagcgagttgtggtcgatccacaccttggcgctcgacaccagccggatggcgtcgccgtccatgccgccggccggctgcacggcgccgccgggcctgacggccaggccctccggctgcgagcggcagccgtggatgtgcagcccgtggatgatgacgctgctcacccggtgcagcacgatgcccgccccgccggcgatgtgcacgtcggcgccgcgcccgtcgatggccgtgaagctcttcacgaacagcggctgcgccagcctgatgtgcatgtccctctggaaggtgatccacaccttcccgcccagcaccgtcgcgccgtaccgcagcgtgcccgggcgcggccgcaccgggtcgtccccggggtccgtcaccgtgtacgggatgaccccgggcccgcggttctgccgcatcttcccggcgaagcccaccgagcacgcggccagccgctgccggttcgcggcccagttgggctgcccgcgccagcaccggtcgatgacgttcgcgccgtcgacgaccttcgtcgtcactgccccgtggaggaggatcgaaaggaagacgatcgcgagcacttctttggaggccat

SEQ ID NO: 140359 - DNA, 2439 bp, Zea mays
  Clone ID: MRT4577_59490C.1
cattgggtacctcgaggccggccgggatggtcggtcgtcaatcggccacgattcccagtcttcaccaattattactgcctttcgtccacagctactcatcaatgtgatcgacatgaacctcgcgtccgcggtgcgagtgttcttgtcctactacctgctggtccaacggtggatggggtccgagcagggcggaggcgtgttcgatcaggggggccatagcgtcagcctcacccgcctcgacgaagcaagggccccgccgaggtgcgccgtgcggtcgtccccgtccagcgcggccagcctgccgccgaagccgctgctcgtcgccgcgccgcgcgagactggggagtacccggtgatcctgttcctacacggctacctcgccgtcaactccttctactcccagctgttcgagcacgtcgcctcccatggctttatcgtcgtcggacctcagctgtacaccatatctggggccgacaccaccgaggagatcaactcagcggcggccgtcatcgactggctagccaccgggctgccgtcaactctgccactcggcgtccgcgcgaacctaaccaaggtgtccatctccggccacagtcgcggcgggaaggtggcgttcgcgctggcgttgggccacgccaaggccaagctcgctgtccctctcgccgccgtcgtcgccgtggacccggtggacggcatgggcgtgggcaagcagacaccgccgccgatcctcacgggcaggcacggctcgctgcacgtgggtgcccccgccatggtcatcggcacggggctcggcgagctgccccgcggctcactgctcccgccgtgcgcgccccggggcgtcagtcacgcggccttctacgacgagctgcacggcgcggcaccagcgtgccacctggtggtcagggactacgggcacacggacatgatggacgacgacacgccgggcgccagggggatgctcacgcgcaccatctgcaggagcggcggggccagggcgcccatgcgccgcttcgtggccggcgccaccgtcgcgttcctcaagaaatgggtggctggggacgccgcggcgatggacagcatcacggcgcggccggaccaggcccccgtcgcgctgtccgtggtggagtttggagatgagaaagcgatagcttagctgctagagaatatgtgatatctgcaggcactagccactcaggcaggttggtgacgacgttgaaattgcagatgaaattaaggccctgtttcaatcccgtgagataaactttagcagcttttttttagccacttttagccatttgtaatctaaacatgagagctaatggtgataattgaaactaaactttagcacttcaattcatatagctaaagtttagccggaagctaaagtttatcccgtgagattgaaacggggccttaaactaccatacatgttgtcttcaacaacgagatttaacagcttaggaacaaaatctccaagctagtagctagctaataataagtggtccatgacatttcagccccacccccctccatcatgggtggagctgcagaagagcaaatcggtggctgctgacctcctgcagcccaggtgactgctgtctggctgctgctgctcgcctgactggcatggcactggaagggggatgatgcgagctgctgctggccaccaccaaaggcatagcagtatgggttgtaataagcattattgttggtgctagtgaaagccggcagtgagctgttctgctgctgctgctgctgctcctcccatggctcagcatcgtagaggccgacgtcgttgatgctgtagcgctgcttccttgtggtgctctcctgcctccggaagtacttctgtgcatggctggagacctgcaccggcgtcttagtggtgacgaagtccttggagatgttcttccaattgccgcgcccgtacacacgcaggccacgcaggaaattcctgtgctcctccagagtccaaaacctccctgcacgttgttggttatcctgtcgaggaacagcaactaatttcctacggcgctgttcctccagcagcatcctcttcgccttcatctcgtctgctaaatacccatccatcgtcctgctgtgcaccccaccagagttgagcaggagctggttgctgctcagctctgccccactgtttatcatctccaccacaagctcaacgtacaagtcagttacctggcgcttatccttccctgggaacattgcctggagctcatccagaatgtcgtcgttcgtgctgttgctggcgccgtgacaagcgatgagagatctcaccatctcgatctcgttggcactccagtcgacgttgaaccttgggtccatgtccatcggccggggttagctaagctagctagttagtttttttgagggttcagtatactacaacacttgcgctgaatctcccggccggcctcgagg

SEQ ID NO: 140360 - DNA, 238 bp, Zea mays
  Clone ID: MRT4577_59491C.1
gcccttggtttccagaatttctagagtgggtgggcatgattccagtcaatgggggaccgcccgtgtctaagcatgtgcaatggagaggagggagatgaggtcattgtttgtcattgagtcttctctcagaatcagcgagcccagctgtagggtggggggcaggctccctcatggcagggtccttggggtaccccttttcctctcagcccctccctgtgtgcggcctctccacctctca

SEQ ID NO: 140361 - DNA, 246 bp, Zea mays
  Clone ID: MRT4577_59493C.1
aggggtataatggagtaagaacaaccacattattatgggtgggatgaacaattatatatgcctgggcattattaaggtttgggttttatggaaaaaagatgttgaaaaaaaaaaaaaaaaattatggaaaaaaaagaaaaaattaattgataaaaagataataaaataagaggttggaccttgcccggagggccgttaaaaaggggaaattttgaaaatgtccatcacagtggcggcctttggagc

SEQ ID NO: 140362 - DNA, 711 bp, Zea mays
  Clone ID: MRT4577_59494C.1
atggaagcttcggggaggcgcattgtggcggtcctaaataggccacgtatgaagctcgagaacccggcaggatcccaactacctcccgtggcattacaacggattcacgaggagtacgccgcggacagccaacggtcttctgtgcgccatgggaagaagaaagatggctcacaaagtggacccacatgtaagcgccacaaacgaaaaagaaaagggaagagcgtagagtgggctggcgcgggtgagaaggaaccgcattcgcatgatacgccactttacctcctaaatctattttgtcatgggattcaatcggccattaatgaaggacgattgaaatttcaggaaatgcaggtagacacggagcccttttcgatgaacatgatcgactttgagggcaagagggtcctgattcggccaagcacagccgatgaaggcaaaaacaaagaaataatcatcaacgcaagagaggccaatgagaatcataatatttcttacaggaaagtggtggcagagaagactcctgatggaggggagactcttaaggtgaccatcacaaccttcagcactggagggcaagcgcataccaaggagcaggagcccgtgctgcgcatcttggatggaccaacccatagatgcaaacggtccaggaccacgccggacggtccggagaattccagcggatggtccggttatactcaagacccgcaatga

SEQ ID NO: 140363 - DNA, 737 bp, Zea mays
  unsure (1)..(737): unsure at all n locations
  Clone ID: MRT4577_59495C.1
tgggggtacccccgagtctggccgggtttgcaggattttcagtgaactcctatactgtgagcactggactactcattatgtttttttgtaggattacaagtttattatgtttttctaggtaaggcagccaattaagaacaaaaattccaaaaaaaagtattgtcccttcattcttgaaggagtaaaaactgagaaccacgtgatttgctctcatgaaccaaaactggctaactactaatattcatgtgctaacagaatgttgggccattcactattctgtttccacctacgatatcttgtattaatggtgcttttgctgatttctgtaaaccggctggtggatagataatcagctatattgttgacagatagtcagttgcacaattacttgttgataaggcgattgaactgtggggttttaacagggagtttgaagtcctatttggtgccaagctcctaaactgaggaggcaaaacaggcacgcaagtaactgttgtttctgtgctccaaacttagatgttctaagttctccatggttaggaaatatctcttctttctgtgcacctaatccaagttacaggtacctccaagattttatttaatgttgttaatctacttcagtatcgtgtagctgcaagctggatgtgaaccactgattgtgttatgtangggtttcaatcctagcattgntcacgtngtatgacangtgtggtcgggcatgagattttgactattga

SEQ ID NO: 140364 - DNA, 327 bp, Zea mays
  Clone ID: MRT4577_59496C.1
atggaagcttcggggaggcgcattgtggcggtcctaaataggccacgtatgaagcccgagaacacggcaggatcccaactacctcccgtggcattacaacggattcacgaggagtacggcgcggacatccaacggacttctgtgcgccatgggaagaagaaagatggctcacaaagcggacccacatgtaagcgccacaaacgaaaaagaaaagggaagagcgtagagtgggctggcgcgggtgagaagattactcaacaactcatcccactcaatcaaagatccaaattagacaagtatcataagaacaagcattcaagcatatag

SEQ ID NO: 140365 - DNA, 409 bp, Zea mays
  Clone ID: MRT4577_59497C.1
acctcagtctgtaccgcgccaaggtggagcaggtccggcagcaccgggcgcagctcaagcgggagatctccgactccgtcgccgaggtcgccgccatctgcgccaccatcggcgagcctccctccaccgtgcacacggcctgctcctcgctccagggcacagggagcctcaaggaggagctgggcctgatcgcgccggagctggcggagatgaggcggaggagggacgagaggcggcgcgagttcgcagacgtcacccagcgggtcgccaggatccaggaggagttgaacctgcagctaggtggcgggcagggccagtctgaagctcacgccgccgccgtcatcgtcgacgtcgacggctccgacctgacgacgaccaagctcgacgagctccgagcctatctgcagca

SEQ ID NO: 140366 - DNA, 474 bp, Zea mays
  unsure (1)..(474): unsure at all n locations
  Clone ID: MRT4577_59498C.1
nnnnnnnnnnnnnannnnnngnnngnnnannnnnnngnnnnnnnagggcccatcactggaacaactagtagcgtacatgtttcgccatgtgacaagaacaaaagtacacttttttcaaatcttgagccgaaatccttggaaaaaaagcagttttccattcttcccggcccaaaaaatggctccaacttttaaaagcctattaaaaactggacagacccgacttgtccatttgtttgtcaaactggttttggaatgggccaccattcaccatcgacagattcctggtttttaagtccggaaaagggtcagcttttcctggttttgggaagggtaaacaaacccccaaagctaaacttttttcattgaaaagtttgaaaaatgcaataaacccccgttgttaaaagtttttgaattaaaacttgaaccaatcaaagggtctgcgtcaagataaagtgcaaaatgacctcctccccc

SEQ ID NO: 140367 - DNA, 1368 bp, Zea mays
  Clone ID: MRT4577_59499C.1
gtcataaaccctcctccataggccgcttcgcctgccttgctctctcagcgcgctcgtgtaggcgtcgccatcttcgcttctcttctccacatttctgcggtatcccggcgtacggctgcgatccatacacgcccaatccaaaccctacctaaaactccgcctcgtgcctccggggccgggctcacactcgtaggcaaggagtgccgttccgtggtgggtggaaattggaatcaccaaaaatgccctccgtccaccaccacctcctcctcctgctgctgctcgccgcctcggccgcggcggcagccaccgctggaggacctgatggttcgtggaatcagccggttggtctcggaggacatagaactatggtgttgacgagagtgcgaagagaaccagaggtagaaattcccagtgttgggagaggcggatgaagtgcaccagaaattaagcgaggagcctggcttggcgcatggcaagtcatatgagaagggatggattaacaaggtcaagctcagcatttcaggtgacctcaattcgctcatggatgatgataagtactcgaaattctgcgaagaagaagacaaccattgaagaaatcacctcctgggctgcctcgtgtgacttcctttttttttggttttatttttaaaaaaaaaaaaaaaaaaaaaaaaaaaaaaaaaaaaaaaaaaaaaaaaaaaaaattctaccattttggcaaccccgcagggaaaaaaaaagggcgaaacgaggccaccagctcaccgccgagcggaagcggcgccgagcaaccaacccctctcctcgtccgccgccgtctccccggaccatggccttccccaccgggctgaaggatctgatgtatgctgactctcatgaatgggggaaagttgggggtgattcagcaaccggggggattactgactatgcccagtatcaattgggtgagcttgttgttgtggacctaccaaaagttggcatcagggtatcccagggaaagacctttggttctgttgagagtgtgaatggagccagcgatatctattcaccagtgtctggagaggtggttgaagtgaacgagaaactaagtgacttgcctggaggggtgaatacaagtccatatgagaagggatggattatgaaggtcaagctcagcaattcaggtgagctcaattcgctcatggatgatgacaagtactcgaaatactgcgaagaaggcaaccattgaagaaatcggagtgtcttctgaggaccaggacctgtttttcaagctttatcaattatcactggttatggtctggagaccagttgtgacaaattggcaaggttcatcgcaaggaataaatggtaggatttgccaatcctacgagg

SEQ ID NO: 140368 - DNA, 280 bp, Zea mays
  Clone ID: MRT4577_5949C.1
gtaccatcaagctctggaacactcttggtgactgcaagttcaccatcaccgagaagggccacaccgagtgggtgtcgtgcgtccgcttcagccctaacccccagaaccccgtcattgtctctgccggttgggacaagcttgtgaaggtctgggaactcgcttcctgccgccttcaaaccgaccacatcggacacactggatacatcaacaccgtcaccatctcccccgacggatccctctgcgcttccggtggcaaggacggtaccaccatgctctggga

SEQ ID NO: 140369 - DNA, 756 bp, Zea mays
  Clone ID: MRT4577_594C.1
tttttttttttttttgaacacaggtgctccagactaatgctcgactatcacaggtatacattgcgaggacgatctcgcaggaataagcaggcaaacaaaaatgcgtataacaacgaacaaaggggagcaagtcctcagcagttccaaaatcagggtctaccattaaaatccatttttttaggccatgcctcctgacaatacatatgatttttctgttgctagcttaagcagcagggatttaatcacatttgatattcctgtagattctccttacaaaaagggttgaccctagatagccaatagctccacaaagtatgcctaggccaaggcagaacatcagcgtgtagccgaaatagaaacttgtctggaagaagcctgacatctttgtcttcacatggtagtagtagatggagtacagatacacgtacagagcggttgacgctgcagaagaaaacgatgtcaggcttcttccagacaagtttctatttcggctacacgctgatgttctgccttggcctaggcatactttgtggagctattggctatctagggtcaaccctttttgtaaggagaatctacaggaatatcaaatgtgattaaatccctgctgcttaagctagcaacagaaagatcatatgtattgtcagtggaggcatggcctaaaaaaatggattttaatggtagaccctgattttggaactgctgaggacttgctcccctttgttcgttgttatacgcatttttgtttgcctgctt

SEQ ID NO: 140370 - DNA, 1697 bp, Zea mays
  Clone ID: MRT4577_59500C.1
ctcgagccgcccgtttctttccttgtggctcgttcatcgccgcctccatccaatacgggccgccccgcctgccttgctctctcagcgcgctcgtgtagtcgtcgccatcttcgcttctcttctccacatttctgcgctatcccggcgtacgggtgcgatccatacacgcccaatccaaaccctacctaaaactccggccccgtgggccgggctcacactcgtaggcacggagtgccgttccgtggtgggtggaatcaccaaaaatgccctccgtccaccaccacctcctcctcctgacgctcgccgccttggccgtggcggcagccaccgctagcgccggcggggacccgatagcaatcaaagcgcatttcgactcctgatgcgcgggccacgggaaggactactctacgcctgcggagcgcgccgtgcggctggacgggttcgaggacaacggtggtctgggcgcccgcacaagcctaccctcggatctcaccttccccggggcttcgcaccgtgctgaaggatctgaagtatgctgacactcatgaatgggtgaaagttgagggtgattcagcaaccggggggattactgaccgtggccacggccgggccgtgagcacgaggttagttttgcgaattcggagctcgcgccacgaaaaaacacttgcaccattttggcaaccccgcagggacaaaagaaaggcgaaacgaggccaccagctcaccgccgagcggaagcggcgccgagcaaccaacccctctcctcgtccgccgccgtctccccggaccatggccatggccgccgcctcctcccggctgctctgggcgtcccgcgccgccgcctacctcaggatctccaccttccccagggccttctccaccgtgctgaaggatctgaagtatgctgacactcatgaatgggtgaaagttgagggtgattcagcaaccgtggggattactgaccatgcccaggaccatttgggtgatgttgtttttttgtggagctaccagaagttggcatcagtgtatcccagggaaagaactttggtgctgttgagagtgtgaaggcaaccagcgatatcaattcaccagtgtctggagaggtggttgaagtgaacgagaaactaagtgaggagcctggattggtgaatgcaagtccatatgagaagggatggattatcaaggtcaagctcagcaattcaggtgacctcaattcgctcatggatgatgataagtactcgaaattctgcgaagaagaagacaaccattgaagaaatcagagtgtcttctgaacaccaggacctgtttttcaagctttatcagtgctctggttatggtctggagaccagctgtgacaaattggcaaggttcatcgcaaggaataaatgttaggatttgccaatcctacaagggcatgggaaatccaagtttgtgttgtcaatgacgtggtcatatttgatatttctttgtagttgtaatctcgtgaattccttcttttttcttaaaaaaagtactctttttgattccttcctatgcaaatttgtttaaaaaaaaaaaaaaaaaaggtgcttatccttttgtgctagtatgcaaaaaaaaaaaaaaaaaaaaaaaaaaaaaaaaaaaaaaactcgttttggggcgtgggtacctatcctgattattgtttgtcgttttttttatcttcttttttaatt

SEQ ID NO: 140371 - DNA, 358 bp, Zea mays
  Clone ID: MRT4577_59501C.1
caaaaaggggaccccacgttctattacgggtttaattaaaggaggactaaaaggccccccaaccaaggccaaacctttcaaattggttcatgaaacaaaaatataatactggaccatattttaaaaaggagcgcacaacccagggttccatgtataaggctacaaatttttgctgataaaattttaaccgcgtataaacctttaacaacccttgaatggaggcatgccggccaaaaaaaataaggggggggaaaccataaaaaaaccccatatatccacttgtgggaattacgtccactgaaagctggggggaaaatgcttccccaacccattaacaagccccaaaatgtccagggga

SEQ ID NO: 140372 - DNA, 2292 bp, Zea mays
  Clone ID: MRT4577_59502C.1
cattgggtacctcgaggccggccgggacttctatcctttcggcaaccccgttaggaaaaaataatggcgaaacgaggtcaccagctcaccgccgagcggaagcgtcgccgagcaaccaacccctctcctcgtccgccgtcgtctccccggaccatgtccatggtcgcctcctcccggtatgctctggacggcccgcgccgccgcctacctcaagatctccaccttccccagggccttctccaccgtgctgaaggatctgaagtatgctgacactcatgaatgggtgaaagttgagggtgattcagcaaccgtgaggattactgagcatgcccagaatcatttgagtgatggtgcttttgagtaggaggcgcagcgccaccaacttccaccattttggcaaccccgcagggaaaaaaaaagggcgaaacgaggccaccagctcaccgccgagcggaagcggcgccgagcaaccaacccctctcctcgtccgccgccgtctccccggaccatggccttccccaccgtgctgaaggatctgatgtatgctgactctcatgaatgggtgaaagttgtgggtgattcagcaaccgtggggattactgactatgcccagtatcaattgggtgaggtgatatgtgtgtatcagtgcacgcgtacgctgatgtttttgggcctgtgtagagggccgacggttgcaggtcactcggttcccgaggggtggtcgaagtgtccccgggaccatctggggggccttgattagttggagctactcgatataagcaggcacaggaaagcagggaagaactatgcgagtctcgtgagcaccaattactgttgactcagcaatcgcacaggcaaaccgataaggaataaggggaccccgagcacccggcggggggggaattcggaggcgcagcgccaccaacttccaccattttggcaaccccgcagggaaaaaaaaagggcgaaacgaggccaccagctcaccgccgagcggaagcggcgccgagcaaccaacccctctcctcgtccgccgccgtctccccggaccatggccttccccaccgtgctgaaggatctgatgtatgctgactctcatgaatgggtgaaagttgtgggtgattcagcaaccgtggggattactgactatgcccagtatcaattgggtgagcttgttgttgtggacctaccagaagttggcatcagtgtatcccagggaaagacctttggttctgttgagagtgtgaatggagccagcgatatctattcaccagtgtctggagaggtggttgaagtgaacgagaaactaagtgacttgcctggagtggtgaatacaagtccatatgagaagggatggattatgaaggtcaagctcagcaattcaggtgagctcaattcgctcatggatgatgacaagtactcgaaatactgcgaagaaggcaaccattgaagaaatcggagtgtcttctgaggaccaggacctgtttttcaagctttatcaattatcactggttatggtctggagaccagttgtgacaaattggcaaggttcatcgcaaggaataaatgttaggatttgccaatcctacgagggcatgggaaatccaagtttgtgttgtcaatgacgtggtcatatttgatatttctttgtagttgtaatctcgtgaattccttctttttcttaaaaaggactctttttgattccttcctatgcaaatttcttggtgcttttgcgaatggttaagatttttcagcaaaaaaaaaaaaaaaaaaaaaaaaaagaaacgaggccaccagctcaccgccgagcggaagcggcgccgagcaaccaacccctctcctcgtccgccgccgtctccccggaccatgtccatggccgcctcctcccggctgctctgggcgtcccgcgccgccgcctacctcaagatctccaccttccccagggccttctccaccgtgctgaaggatctgaagtatgctgacactcatgaatgggtgaaagttgagggtgattcagcaaccgtggggattactgaccatgcccaggatcatttgggtgatgttgtttttgtggagctaccagaagttggcatcagtgtatcccagggaaagaactttggtgctgttgagagtgtgaaggcaaccagcgatatcaattcaccagtgtctggagaggtggttgaagtgaacgagaaactaagtgaggagcctggaatgggtaatgcaagtccatatgagaaggatgggatatcaagggcaagctcaacaatttagggaccttaaatcgcttat

SEQ ID NO: 140373 - DNA, 484 bp, Zea mays
  Clone ID: MRT4577_59503C.1
aattcaactatgcacaaagtatcttttcatttaaggaataaattaagacccacaaatttgacctatttgcaatttttttctttaagaattaactactattacaaaaacaaataaaacaaaatttacattactataaaattcaccggtcggtatcaaggactccgaaaactctagccaacctcaaggacaagaaacagaggtaaatagcgagtaagcccccaccgacaagcttatcaagtctcatcttcttttttggcattatcacaagggcccaaagcaagcctaccattaagaaccctagtggctcaagcaacgaattgtcactaggaatgatgtagaccccggggtattcggccaacgaggagatgacaagtgggacacctagtccaattacccgggttgaatagcgggcctgcgtagcatccggaaagggctatctgagcaccatcgttgcctccgtgaaaagcccacgggcacattcgcg

SEQ ID NO: 140374 - DNA, 295 bp, Zea mays
  Clone ID: MRT4577_59504C.1
caaaacaggagttgcaaaggtgttcctaatttaccatactacatggtttcctcaaaatttacaggcctgtaaaattagccctcttctgccgactgcacataaacaaacaggatgggaagaaaaccttatgtggactttgcctcatcagagaagctaattaccttaacgagcgaaatttcctttaagaaagcaaaaaaaaatggttgaccttgtctcgaatatcaaaggtcacccagggagaccgaagtaaacgaagaaggccaagcttgagcaatgtttggccccttgcttaaaa

SEQ ID NO: 140375 - DNA, 379 bp, Zea mays
  unsure (1)..(379): unsure at all n locations
  Clone ID: MRT4577_59505C.1
aantnntggngaacaaaaccccccagctgcaccgnnggtggcggcccgctctangaactagtaggatctcttttggactgcnnaggaattcggcaccgagaaagagggtggcctcctcttagaccgccagccgccgcttcgtctcccttgagaaaggtgccgggaccccgaggatttggcccgagttcttagnngtagagaatacggttttgctttgtactcagccacggagtactgctggcgtctgggtggtgggtgaagggggagaaaattccgtgagaatctgttcccggatcagggcgtgccgagcttcgggaatcagggggtttcacacataagcttcgtcgatttgaatttgatgtactaatggagtctaagg

SEQ ID NO: 140376 - DNA, 208 bp, Zea mays
  Clone ID: MRT4577_59506C.1
ggcgcgttgggcgggcgggcttagccaatggcaccggccctttggccgcgaacagcctaacctgggtgggtgccgtccgacatcaaaggcatcagttagtcgcttagattcttacttacaagcgttcacttcttaatcggcacacacgtgctttttgccactgggtttttaacctaacgcgatgaccaattttgttaattaacggttt

SEQ ID NO: 140377 - DNA, 310 bp, Zea mays
  unsure (1)..(310): unsure at all n locations
  Clone ID: MRT4577_59507C.1
gcggctcaatctgcctatcaatctctatcatgacatcctcgtgcgaagcatagcgctagcccccttcgtactgttcagatgagaccgacgaagcatacggagaggaagtccactggcgggagggggccgaggttttttttgggggggtggaggggggnnannnnnncccggggaanaaaagagagagagagntgttcgggggggggggggggccggggagcttcggggaggatgcggaagcgccagatgagcacggagctgctgatacgtaagccggcggtccagcggctgggggcggagatcccccagg

SEQ ID NO: 140378 - DNA, 204 bp, Zea mays
  unsure (1)..(204): unsure at all n locations
  Clone ID: MRT4577_59508C.1
ggccacanaggaccagggcgcggngggagatggagaagagcttgtcggtgcggcggcttgaagatgaaggctgggcacgcgcgtagaagataaggccgctgaaaaaatcagagcaggagggcggcgggggatcaggtcgaggggatatttttcccttttttatttcttctttctttttttaacagagaatcacatatattttgg

SEQ ID NO: 140379 - DNA, 265 bp, Zea mays
  unsure (1)..(265): unsure at all n locations
  Clone ID: MRT4577_59509C.1
cggtaccggacacttcccgggncgagnccgctggngacctgcgcccgtgcccgctgctggtgagcctactcccgcngccgtacaggggccaggaggcctgccgcgccctggtgcctcaagggccgctcattggccaacctgctcctngnngtcgggcctgcccaacctggcgatgtcggtggctttggggccctgcacgcccgccttggcctgagggccgtgggnaaggtagggccactacctctgacgtnttcctggggccggg

SEQ ID NO: 140380 - DNA, 145 bp, Zea mays
  unsure (1)..(145): unsure at all n locations
  Clone ID: MRT4577_5950C.1
gtttgggtttttttggncagtcaaacaggtttgtggcacaggtttgtcttgggctngcagcctgctagctttccgcccgtcaaaatgcgtgctgcgcggctgttttacgttttctcggccttatgtgttttttttgaaagctttt

SEQ ID NO: 140381 - DNA, 489 bp, Zea mays
  Clone ID: MRT4577_59510C.1
ggaaaaacgaaggaaaaaccatttgatctaacgatcatcagttacaatgggcttgcaagcaaaagaataaataacccattaacaactagcccccactcccctaccactttggcatccatcatcacccccccccccatgaggcataaaacgggcgaagccctgggatccatcaacaggggccctgaaacccggcccaagaaaccagaaaaaaaagggagaacaaatccttttcaaaagcccaacctccacaggacgcaatccttttctccccccccccccaggaattcactggcacgaaaaggcataataataccctccccctgctttcgccaaaataaaggaaggggctacccatgcccttgcccttttccatcccgagaccgcccaaccttttttggggggccatccccttgaggggcccgggcgccttaagggccccgatgttgctgacgttgcccaagatcagcccgatgatgcccaagaagcccc

SEQ ID NO: 140382 - DNA, 419 bp, Zea mays
  Clone ID: MRT4577_59511C.1
cgcactcgtgcggacagcctctatgttcgctcttcactcgctccttgatggtctggggagggctactgacgcgatgatcgccgtaaaggttgcctgcttctgacgataccgtgatgtcttccagggtcgcgctcttagctttactgaaggtggtgcccatgttatctcgatcgacactgacagcttttgctctctcctagctcttaccgaggccgttgatgtctgtccgtagtatgacgtagctcgtatctcctacatactgctcacgagctctatcgacgctgatttcttcatgcgacacgtcatgccgagtacttatacatacgcacttcgtcgtgattgcgcagattttatccatggccgtagtcttctcatgtcacgtaccaaccaagcctgtgagtgcatcactgtccagtcct

SEQ ID NO: 140383 - DNA, 539 bp, Zea mays
  Clone ID: MRT4577_59512C.1
ctctatagacatagtaacatccccaaacctctagcgcgcgaaccacacaagtacgagacaactaaaggacatcaattactggccaaaatctgcagcttattcaaaacaaatccaatccttgcaacttgtaagtataataaaactgttgaaacttaaaaagtcgagcaaacctcatactcagctgttactagtccactagaagtctagaacatgttaaatgcaccattgatgcatttaacatgtagattcaaaaaaggcccaaatcaaaataagtaaatctttgaaaggattcagttgttgaccatgtgttcataatttgaaaacataaacaatcataatcaacagataatgattaaggcctctagcgtaatggtcaatgcttccgagtagcacccaggtcccgggttcgatccccctcggggacgaatttctggcttgattaaaaaatcctctcgctatgccccgtctgctctcgggttacgtcctgcacgccaccctccggctggaccgttgcagagtgggcggtgacggcctgctag

SEQ ID NO: 140384 - DNA, 746 bp, Zea mays
  unsure (1)..(746): unsure at all n locations
  Clone ID: MRT4577_59513C.1
ctccgctctggtgggtagatatatggtcacccttggtaacattggttttttatgtgatgctgaaagcgaagaatttgtggtggcagacctaatgattttgccgaaacacgatgatgcctcccaccatgatgatactccggtggtagccgggctttgtattttccggtcatgcagccctggggaggactggaaagccagcaaaccacgtatatgccataaggaggggcaaggcggggaattaatttggtggcacactgatgtcgttgtcccccatggagtttccctgtgctacatagattatttccgcggaatcctgtttttggatattctcagcaaatgcccgcggctcttgtatgtccggcttcctctaatgaaccctgttggtgatccttatgatagtgaaactggacgagggtgcccatcagcttttaggagcgtgtgtgttaccaatggcggaaccatgaagtttgttgaggttgtcaccagaaccgtctttctttcaggcagccagtcagctgctgcttcttcatttgcaatcaaagtttggaggcttagggaacatggcatgacatgggagaaagaaagtaccatccaagataccgagctctggtccctgcaggggtatggtgatctactccgtgtcccgccaacgttccctgttgtgagcatgaggaacccggatgtcatcttttgtgtgctgagcaatgggtgtttcggtgacgccaatgtgacatggntcattgcga

SEQ ID NO: 140385 - DNA, 843 bp, Zea mays
  Clone ID: MRT4577_59514C.1
gacgaataggacaggaacaaaaatccataatttactattagacacactcatggtgccaactggaagaactttgggcaaattggtgttttggggaccgatagtagctttcgtttcttgttggggtatgctaagcaatgcacgtgtgagccaggggttctcgtgaatctattttgtttctgtgtgatgaatgttctctgaatatcggggggtcaaattagtactgtgctgtgctgttatttggccagtcaaatgtcctttgtcgtttacaacttgtggtaccaacaagaatagatagatgtatgcaaacctggtgtttttgggaccaaaaaaaggccataccaaatgtgtggtggccaagtgctgtgaaaccctgtgttagtcagggattctcgtgattcagttttgcttttgctgggcccttctgaattttggtccagaagacttttgagctgaacagaaacaaaaagtgccaaaacactgctattatatttggctcatgtaagatattttaatttaaaagaaaggtgagcatatcgacgtacatgtgtcaaaaagtgcttgtccataatatattccataatatatcattgaggggaaaaaacagcctgcatcacagatcaacgagtgttgttctgtacactcgcatttgctttgatgatgtcaatagttaaaatagataatttcttatttgacagtaataaagtttctggttctttttgacgatttcttatttgactttattattttattatgatcaattataaaaatagtgtactacaaattattatggaaatatattacactttacaacaacaacaaattatatgtattatctttaaggct

SEQ ID NO: 140386 - DNA, 817 bp, Zea mays
  Clone ID: MRT4577_59515C.1
gccggccggtccgggatctgacatttatagatgtgatgagcttgtgtactggccggagaaagtattccaaagcttggtttctctgcggaggctatggattggcaattgcaagaacctaattggatatgcagcggcgaatgtccccgaccaggcaacttctggaaggagcgagcttttgccccatctagagtatctggagatatgggggtgccaaaatctggtagagttattcaactcctcccctgctctcaagagaatggaagttagagaatgttgtaagcttgagtccctatatggcaatcagttgttggatgaagctgctagtagtaccgatgacgtgacggcatccgcacatgttgaggagaagctatcaccatcatccctagaatctctaacaatattggactgtgacaggttgacagaggttgtcaatcttccttcgtctctcagggtaatagatattcagggttgcttcaaactacggttcatgtcagggcagctggatgcactcaataccttagcaatcaccaactgcccggagttgcgatcactggaaacatgcatcgtagatctcacgtcactggaaatcctcgctctgtgtggttgcaaaagcttgtcgtccttgcctagtgcgcgggcaggaggacgacaggaatattcatctcttcgtcagcttacgattacggtagcagggagacagtgcccaggtataaaatcgttgccttcaactctgcagcagcgactggacaacggcctcttggattttacgaacctagattcccgtcgtcgtgaagatcggcctccacgacggctgctt

SEQ ID NO: 140387 - DNA, 426 bp, Zea mays
  Clone ID: MRT4577_59516C.1
cccacgcgtccgtatcagtcgggttctttccgaaccatagcttccgcattctttaacccacaccgccacgccacctcgacacgatggccgacgatgatgctgccgctgctgcccgtcgtgctttggagcagcgtgttgctgctttcactgctgaagaacgccgcgaggctgcccgccaagaagctgcgcgcctggaggctgcgcgcctcgaggccgagcgccgtgacgctgcgcgcctggagcaggagcgacgcgatgctgacgcccatgccttggtcgccgccggcgaagttgctgcggctactgctgctcttcatgctcaagcagcggcgatcctcaacgtcaagtctctcgttcccatcgtcctcgacttcacgtcgccgcacttcaaccgatggcgtggcctcttcctcaacactctcgagc

SEQ ID NO: 140388 - DNA, 665 bp, Zea mays
  unsure (1)..(665): unsure at all n locations
  Clone ID: MRT4577_59517C.1
ctatcttgtgtgtactctcngaggctattctcgttttctatcaatctagaaatataagatgagtatatttagataaccaaataaagaagctattggaacgtatttttttataccaaaatctgtattcctagtaatttctaaacaaaagtgaagttcattcagatttgcactaaaaacgcctttgaccatctccaagagtctttttaaattccactctcaaaattatcatttagagaatcatttgaataaaaatcattttctatatcttttaaatcttcaacagcttttctatatcttgtttgcactctagagagtcatccagatatctatttttggctagcgagaaacccataagagcatctccaaaatactcttcatttttgctctttatttgactctttatttaccttttcataaagtctatatataacatctcactccaacggtatctagtttggctagctaggtgctcaggtggctagccaagtttggctagtgagggagccaatttggagagtcggataggttggtgagttagatagctagtctgttgaagatttattttactgttgagtacacaaaatttgacttaatgagccatttagctaatttgttagaaatgctctaatagaagactgctatttttggataatcatttaagtaag

SEQ ID NO: 140389 - DNA, 290 bp, Zea mays
  Clone ID: MRT4577_59518C.1
aggcacacggccctacggttgtattctctacagcggcacgccctacatatttttttatttgttaacccaaaccatactatctggctaggggagggtatttatttatgtactactcaacacataaacaatggtctactatgatcacgagtacaacgcatgtacagtcacacacttattataaacaaacaccagcaccatcatggcttacttaattatgaagaactcacactcactattgacgcacaacaccacatttttcttctaacggtcaaaagcgactattgcttctt

SEQ ID NO: 140390 - DNA, 218 bp, Zea mays
  Clone ID: MRT4577_59519C.1
atccttaaacccaagaattcaccttcgtcgcccataacgccataccttttgtgctatccagattaccaccaaaactgaaccttgaaccctatctcgaatggtatcaacgactcattcttaaattacgaaagcttcaatcacaaaatgttctactgctcccaacataaatataataccacatgttatattgaaacatatatatccatcatccatatacc

SEQ ID NO: 140391 - DNA, 396 bp, Zea mays
  Clone ID: MRT4577_5951C.1
tctcaccgcatcacctctccctccggggcgcgcgtccgggtacagcgctagagtcactcaccaccatgcaggcggcggcggcggcggcgaatggcgcgggcgacgtgcagaagcctccgccgccgcagttcgcgccgactcacttcgtgccgttccacgccgtcgcgccgccgcgggcagcagcggtcgcactgggttccccggcgccgcatcagccggggcaggaggagaacaagagcgtctgggtcggcgacctccattactggatggacgagaactacctacacagctgcttcggctacaccggcgaggttgtggcgatcaaagttatccgcaacaagcagactgggcagtccgaaggatacgggttcgtcgagttctacagccacgctgggg

SEQ ID NO: 140392 - DNA, 508 bp, Zea mays
  unsure (1)..(508): unsure at all n locations
  Clone ID: MRT4577_59520C.1
agcagttttacctttctttaaagacgtttattttgtttaattctcttgaataagatggagtttcgaatcttatgatgcaagcaggcagacaaggcatccatgctggatgaaatcattgattatgtgaaatttcttcagcttcaggtcaaggtatgtctgtgaacattttttttgggaacaagcacaagtaacttttctggtttggcaaaagatgattaacattcttcccttttacctggtttcattcaggtgttgagcatgagtaggctaggagctccaggagcagttcttccccttctcgcagaatctcagactgaggtgccaaaccttctaatttccttcaacttccaggaatccttgcaaaagtattgttgattttataattggtgacatagacttcttatctttttttttcatctgtatgcccaactgcaatgcctcaaacaaattctgctatgacatgatagcttattacagcagntctttttttttggtgcatacatcatgc

SEQ ID NO: 140393 - DNA, 362 bp, Zea mays
  Clone ID: MRT4577_59521C.1
gttgtgtgtttttttttttttttttttttttttttttttttttttttttttttgggggcaaacagttttttttttgccaggaaccgtatccaaaattggagaccacccattttttttgaaaaccaaacgccctgcctttggggaataactaacgacccatttccaaaatacaattaaaggggttttggtggaccacctttaattcaaaaaccgtaaaaaaagggccagccttaactgaaacgtccttcttcaaaaagaattttttattttttctgtccgggcaatttttaacttgtttgccacacctatttctgggggaaaatccttaacggcgtgtttatagacacttgttttttttttta

SEQ ID NO: 140394 - DNA, 270 bp, Zea mays
  Clone ID: MRT4577_59522C.1
cggctcgagctttcaacgtataaaatagcagaacaagattttacttatttctaccctgatgatccacccacatttatcttcagtcctgctaacagacgaagagggagacctcacaaacgaatacatattagtcaagaggacaatgttgctaataaacagactcttgcaagttataggagcaaagctactaaagaaagcgataaacttatgaaccaagcagaaatgaagtcactggcttttgcaaaggctaaattgaaaagagaaaacgca

SEQ ID NO: 140395 - DNA, 1301 bp, Zea mays
  unsure (1)..(1301): unsure at all n locations
  Clone ID: MRT4577_59523C.1
gaaccttcagatggagaagcagccaaggtgtttttatgtaacaatgctacatgtgggcacttttaccacccgaaatgtgttgcccaacaacttcaccccatcgacattgatgaagcctcagaattggagaagaaaataacagaagggttttcatttacatgcccaattcactggtgctttcattgcaaaggtttggaggatagaacacaagaacctttgcaatttgctgtttgcagacgctgtccaaagtcatatcacagaaagtgtttaccaagcgaaatttcctttgacgaaaatgaagaggacgatatcatcatacgggcttgggaattatcaaaaagaattttgatatactgcctggaccatgagattgatagtgaacttgagacacctgtcagagatcatatcaagtttccaaagattgaaaaaccacttcaatttgtaaagaagggagctagcttgttgcctaagaagagaaagaggacttacagtgagtcagttcgtgagcaacctcccagagatactgtgaagaggaaaagcanggttcgcatgcaagaaagcgagcaaaacaaacaagacaccagagaagtttctgtgaagagtttcactcaaaacgttgttgacacacctgtaaagaaaaaaggcaagttgaaagagaataacagttgccttatgtggccaaggatcattttgtaagcagtccaaaatctgtgaaagagcaagaacaagagttggtacctttgcccttatctggaatcaggaaaagttcatttcctaaagtggacagtgaaattgaaaagagggtgattagcatactgggaaatgaaatctcttcgttgacaataaaagatgtaacaaggaactgcagtttgccatcaactcatgtatactctggcagaccaactgacaagatgccactaggaaaaattgagcgttctgttcaggctgtagaagctgctttaaaaaagctgaaaaatggaggtagtgtcaatgatgctaaagcagtatgtgaacctgatgttttaagacagcttgcaaggtggcattcaaagcagatctgcaatagatgtggttctgacttctgaagcacgatatatattttgttaatttatgtctcagtcggtactcggcttgttctttcaattttctacactaaactgtcatcatcaataaatctttcgtgggtttcatttccatgtgagtatcttggttttaagttgtactggcaggcatatcctaagttagtacattgtacgtttatctctatttgatggaaatgatgttatgaatatattgtttct

SEQ ID NO: 140396 - DNA, 424 bp, Zea mays
  Clone ID: MRT4577_59524C.1
acccaccatccctatagggctgagaacacttttacaagatactattttcctttccaatgtcattggactatttaaaaagagtagcggctctccttccctcattttcctacatctagcaacacgagcacctcacaatgaatagatggttatcattcttttaatgatcttttaaataatacaattgctaacacggcacgcaacatacaaattgatgaacaccaggacctccactactacatataacattactttgacttcaagcctcatcttcactttacgccatgtctcaacttattctgttcgggaccttgaccttagaaaacctacaccctcaaagaaccctcctagacgacagtttaaaacaactacagcagacgtacttaacaatacttattttaacaatgttatattcctctacaacttt

SEQ ID NO: 140397 - DNA, 362 bp, Zea mays
  Clone ID: MRT4577_59525C.1
gccacgcgttcatcctacgtccagccactcgtatgctcgttctggcacccgaatacatgcgaagtctttgtttgataaacctcatgagcttgctttgctagttctcatggatgtggcttatagtcattcatgcattaatactgtggatgggttgaatggtattgatggtacaaatacacattactgtcacagaggtgcaccagcacatcactcgatgtgagactctcgactatttacatatggaatctggctagtttctagatttcatctttcaaatgctacatggtagctggcggattataagtctgatggctgcgcatatagtgctgtgactgacatgattttgcctcatgaaggattac

SEQ ID NO: 140398 - DNA, 1102 bp, Zea mays
  Clone ID: MRT4577_59526C.1
ccggccaccacgacgcggttaactcgggacggaagcaacgcaactcggcacgaagaaggaaaagccaccaccggttcctccgccgtccccgcggtttcagttccttgcttgcttgcttgctcttgctctccctctctcgtggaagccagccacacaaggcagaaagagagagtgacgttgtgttccatcccgttccgctgaagcaaccgctctcctacaccaaaccacccacaccactctaggtctctagccgatgcgatggatgtggatccagcagcggaccagcggaggaagaacaagggcgggctggagtcggagctggagcgccactacgacgacctgcagcgggagatgatgctgatggccgccgatcggccgcacaagcaactgcaacagcatcgacgtcacgggcaccgccccgatctgctccagaactgcgacctgcccccaccggccaagctcttcggccccgtacccaccctgcagaggctggagaccgctgctgccaaggaccacaaggccgacgacggcctgctgcgggcgctgcgcctgtcgcagtcgcgcgcgcgggaggcggaggacaagctggcggccgcgggcgccaccaacgtcgacctcgcggcgctgctcgtgcgggactccgtcgcgctctccgcccaccgccgctgggtcatgatgctggaggccgagaattccctgctccgaggaccacgacgagatgcggatggtccggaaccggaccacggagccggcggggtggccgcgtggtgggtcgcgctcgccgtctgcgtcggcgtcgccggcgtcggcctcgcgctcggcaggttcctctgctgaacaactgtgatggatcattctccttccttcctgctgctgtagaaagtgtaaatctacttcgagacgacgatcgatcgatcaatcaatcagtcaaaaaaaaaactgtaaatactgctacagtagtacggagtaggattggtctccaagttaaagtacccattcctgcacgctttctgctttagcttgtggaaacaatctgttgagaatttaatgcctgccgtgaggttcccagtcaaaaaaaaaaaaaaaaaacaccaaaaacaca

SEQ ID NO: 140399 - DNA, 274 bp, Zea mays
  Clone ID: MRT4577_59527C.1
gtccgtccgtattccggtcgacccacgctcgtaaacacttaaattttaccgtgttcgaagagccgttgccagaagcggtgaatgaggtggtggagaagctttaggaggggaaaaagctctactaggagggtgtctataggaagaaggccgcccccgccgcctagaatgataataaggccgaccctgccgccgagaatgataagaatgttaggaagccttggagcaggaagtccaagtccgtcttgctgtaccacccgccctattttgagatgat

SEQ ID NO: 140400 - DNA, 271 bp, Zea mays
  Clone ID: MRT4577_59528C.1
tttggttttactgacccccgcctccccggatagcggttgggatatcttgcctgatgtggcgctatcttttctcctttctaacccgttgggtggctacaagtctaagttacacaactgtggatagcacttggatgtatacagacgtctcagccctccgactccaagactctattcttctgcgagaagccggacaccgcctttggcatcaggaaccccgaggagatcgatatggggtacccggcggcgactgaggctaggcggcggcagaagc

SEQ ID NO: 140401 - DNA, 450 bp, Zea mays
  Clone ID: MRT4577_59529C.1
atatactcacttcattctaaaatggaattcgttttaattaaatatacatccattaattataacttacatcttttaatcaagctatgaatatgctctttcgaacgtgggcgaactataggaatattttttatggcatccgttgctaagcacggtcaatccattttttgtacattttgcacaacagtgacgtctaacatgacatgtacgagcagaaaaaagaactgacaaatgcatttttctttggcgaggcacatctctcagctcgcgcgctcgtctttcctctgtttgatcagcttgaagaggctgggcatcaccttcttcttcctcttgatggtgaacgagggcgtccgcgggttccggatccccgccgacgaagacacggacgaccgccgcgccccggacgcgtgggtcgtcgccgacaccctggtcgaccgccgtcgcgggtacgcg

SEQ ID NO: 140402 - DNA, 268 bp, Zea mays
  Clone ID: MRT4577_5952C.1
ccgaaaaaggtgtcaacaatactataattttactatggtaaaataatattctagtacttatattatatacaattgtaaactatagttcttcgtactttaaaactaaaactatagtattctataactgcattaccaaacagacaatcaaatgtaatggaacggttagccgtttttttttggggagagttcatttctgcctttctttgagcgcccaattgtggccatcatacggcctaaacccatgtggacgtggccgtcttttgaggaa

SEQ ID NO: 140403 - DNA, 940 bp, Zea mays
  Clone ID: MRT4577_59530C.1
atatactcacttcattctaaaatataattcgttttaattaaatatacatccattaattataacttacatccattaatcaagctatgaatatgctctttcgaacgtgggcgaaagagagaactaaaaagagcgggggggtagaactataggaatattttttatggcatccgttgctaagcacggtcaaaccatttttttgtacattttgcacaacagtgacgtctaacatgacatgtacgagcagaaaaaagaactgacaaatgcatttttctttggcgaggcacatctctcagctcgcgcgctcgtctttcctctgtttgatcagcttgaagaggctgggcatcaccttcttcttcctcttgatggtgaacgagggcgtccgcgggttccggatccccgccgacgaagacacggacgaccgccgcgccctcgtcctccgcatcgtcgccgacaccctggtcgaccgccgtcgcgggtacgcgcacagcagcccgtcccgctccgccaccgcgttcaggtcgtatagctcctgctccagcgccttctgctcgcccgccgcgctctccgcctccgccgccgcctcggcctccctggcgcgcagctcggctgtcacgcgctccgtggcctccgcgcgcgccgccagctccttctcgccggccttgagcgcctgcacccacgcctgcgccgcggacaccttcttgtcggccaccacgcggaccagcgccgcgcgcccgctcaggtactcgtactcgaaccgcgagatggttatggtccccgaccgccgtgacgccctcgcctgcattgtgccttccacggcggccttgagcttcttcatcgccgcggcctcggctgtattcgccccctccccctccttcacagactgctgcatcagagcaagagtcgctgcgatctcggcgttcgcgttctagaggacgcgtgg

SEQ ID NO: 140404 - DNA, 1791 bp, Zea mays
  unsure (1)..(1791): unsure at all n locations
  Clone ID: MRT4577_59531C.1
gttggtatgagggaagnatgtaatggaaaacaagatctgccgcatctgatcctggcgatgatgagaacagtatagccatggagtttctggcttctttagatggggaagaaaatgatttcttcaaggatcgacgagctaagaaattggaaaagaataaaatatgtgaagtagcagatgctaccagcaagacatcaagtcaaggtagctcaaagaatccagttgttcccaatcataaggaggaagctgaattgcttgctacagaggagctagaagaatttgatgatcaggaaaacaagtcctccatgatgttacaggaagaaactgatgagtcatgcaatagtcagttatcgggtataggaaacaagtcttcaaccggtggatggtttgtttcagagggagaagctgtacttcttgctcatggagatggcacatgctcctattatgacattgcaaaccatgagttcaaatctgagtacaagcctcccagcttggtatcaaataatatgtggggcgattgctggttgattcgtgccccaggcgtagatggatgttctggtagatttgttgttgctgcatcagctgggaatgcattggagcctgggttttgcagctgggattactataccagagaagtaaaatcatttcatgtcgaggaggaagcttctcaaacttttgctccaacatcaagggctattcttggtgctctctctaatgtaggctcatcaagatccagctctgctctgtcaaatacagagaggcagcaatggtggtataaaccgtgcggacctctcctgctatctactgctagcaagcaaaagatggtcacagcttatgatatacgtgacggtgatgttgtgatgaaatgggaagttagcaatctagtaatgggaatggaatactccagcccactacaatggcgtagcagggggaaagtagtaattgctgggagtgaatcaatagggctgtgggatgtgaattcacttaacccacaacccttgttgtctgttgcttctggtaagaaagtgtactgccttcacgtgaataacactgatgctgaggtgggcggcggagtgcgtcaaagggttagttcatctgaggtggaaggaaatgatggtgttttcagcacacaggaaagtgtcaatgtatttgattttcgtgtacctgctggcattgggcttaaaatagcaagacatggcggcacagcaaactcaatcttttcacgtggggactcggtatttattggtagcacagaaggaaggctgcaaataaaaggagggtcaagatcacgagttcagcaatactcgttgagaaaggggaaacttgtcgccacctatgagttacccgaattcaacgctcatatccatcactctgcgataacccaagtatggggcgactcaaaccttgtcttggctgcatgtggtatggggctgttcgcctttgacacgtttaaggaagacacgcagccaacctacagctttgaccgtggaaacaccattgcagcgagagaagctattggccctgatgatctgtactgtcctacatttgactactcatcatcaagggttcttctcgtctcaagagaccgcccggcacattggaggtacttgtaggctgtagctagctatttcttgtttattttgtgtgcaacatgccatgtaatatatgcactttgtttatgcttcacatgtggtgtcatctgccgtgtcaaccatctcgcgctttcactgtaatattatctagtttttacccctgcaattataaattattttcagtcttctgtacttcaaaaaa

SEQ ID NO: 140405 - DNA, 249 bp, Zea mays
  Clone ID: MRT4577_59532C.1
attcccggttcggccggacgcgtccggtcagttggaggaggcacacttttgttaggaaaactatcacacttacacgggctctaccctgcggggtggtccttagggaaggtactacacacatcaccggaccacttgtttgtttagttacaactacgcactacattacgtatcaccctagctcggtgctctacaaagctgccatctgctgcagcaacatctcgagcggcacatactatgactgcatgccca

SEQ ID NO: 140406 - DNA, 248 bp, Zea mays
  Clone ID: MRT4577_59533C.1
ggcaacaaagtgccagtggctccaggtaaattcaagagtaaaatatcctctgtcgggtttgtttccgactgttttggactgacccaaatagcgattaagtctgtctagggctctaacggcggcggggctgatgatgcttccctttcccttaaaaaggaaaaggtttttcccccgcgggcgggttaagatttacattattggggggttttttacttttttagaacagggaacacattcctttgatactt

SEQ ID NO: 140407 - DNA, 142 bp, Zea mays
  Clone ID: MRT4577_59535C.1
acgtaaactcctcttctacctccttctctcaactttcacaatttctttactcaaaccttattcggtctcctgggctctactatcactatccactacattcccatatatccatcacactgtacatttcgaaaactatactaca

SEQ ID NO: 140408 - DNA, 686 bp, Zea mays
  Clone ID: MRT4577_59536C.1
gcgcccttacgcgcccgagaaccggcgacatcaaaattcttacaggtcaccagcataactttgagaagaacctgttgaagtgtagctggtcacccgataaccgcaaggtcactgccgggagcgcggaccgcatggtctacatctgggacacaacgtcaaggcgcatcctgtacaagcttcctgggcacaacggttctgtcaatgagactgcgttccatcccactgagccgatcattggatcctgcggcagcgacaaacagatcttccttggggaactttaagtgactatggcagtggctggcaacccaatgccagaggctcccacatcactgggatgttcttgtgacactttgatgaggagaaaaagaggcactgacatccccattccttcgcctggaaatcggaatactcagtttggctgatcaggatttgtcatttgtagattgtcttagcctgtttagcccagttgttgacaaaccgctccatggctttgtactctctggctttccgaccttaaacttgatgcggtgcttgaagatcaccgattgaatgtactgtgtctagaacctcactctctggagcttgcctgttgtagttatgcacggctctatgccatattgttaatctttcctagtcacaagaaactagctggagaagtgatcttttagaaaaaaaaaaaaaaaaaa

SEQ ID NO: 140409 - DNA, 448 bp, Zea mays
  Clone ID: MRT4577_59537C.1
ggcacatgggtaaattctccactgccgttaacctctgggccgtgatctggaccacattcgcttctgttatcttcttcttccctacgtcccgacctgtgactggtgagaccatgaactatgcaattgtgttcatggcatttatcatgttgtgtgccatggtgtattggtatgtgcgagggaagaagttctatgctggtccactcaaggagactaccattcagggcgaaaataccggtggtatttgggagtcggttcctgtcgagacggaaaagacaaactagtgtgcacgtcacgaagtacggcttgatgaggaagaatgcttgcttgtaacttgtaaatcaatagttcgagttggttttggccacttgcttaagattatgtagttagcgatggaaggagaagacattatcttcgcttgctaattcgatcggctcaattcgtatctcct

SEQ ID NO: 140410 - DNA, 280 bp, Zea mays
  Clone ID: MRT4577_59538C.1
cggacgcgtgggttgcttctgaaagcgcaactataaataatgcttatcctgctggggtacgggacaccagagggtgggtgaggcagtatagagagcgacgtcaaagcatgatctctatgcatcaagatttgtcttctaagctattcggaagtacgcttaaaccctgcattagtggacgggggaacgaaataacgggatttaacgacttgtttcatttcaaagcacattgagttattgtctcaaaaacaaacgttggcgcaataactacaacaatattttt

SEQ ID NO: 140411 - DNA, 252 bp, Zea mays
  Clone ID: MRT4577_59539C.1
ccaaatgactcccaacttacattttagtagcagcaaagtagcacattattttgtacttgaaaaacgcactttggcatataacagtcgaccataaaggaattgcaatgatcctcgtggagcaaaaaaaaaacactagccaaactgtcataggaagaaacaatataacagcacagcagggattcacctgtctgtttatctacttcactcaggtgaatccctgctgtgctgtcataggaagaaacaatataacag

SEQ ID NO: 140412 - DNA, 479 bp, Zea mays
  Clone ID: MRT4577_5953C.1
cgggggcatgtactacgcggcgcccccgttctacaacggctacggttaccctgcggcggccccgttccctgatccaggcatgtacgctgctccagcattcggcgcctacccgttctatggcaatcagcagcaagtgagctgacctggactaccgcgacacgcacgcctcgctcggagctggagactggaggtgttaggcgcttaggtgtagctctcggtagaagaagaagaggaagaaggtagacgacgacggtttcttaggtgagctagataccgtgactagtctcgtatagtgcgatttgttatacgtgctatggtctagcgccgccgacgactgagagtccgagtgtccgacacacctattgactggccacggcatgtcgaattgaacgacaaaaagaatttctgatgtcctggagctgcatgcatgctaccttgaagcagaacaataagctaatggaatcctttggcctctgcta

SEQ ID NO: 140413 - DNA, 178 bp, Zea mays
  Clone ID: MRT4577_59540C.1
aatgcgccgccgggccccgagcacctagtggctgggaacacgggggaaaggtgatcgacctttaacaaatactggtcgcaaaccgggttgtttcttcaatgtttaacacagtctggggcgggaaaatcgctatcctacggtttgccctcaagaaagacacccgggacacgagggagga

SEQ ID NO: 140414 - DNA, 574 bp, Zea mays
  Clone ID: MRT4577_59541C.1
ccgacgctgcgccagcggggggggcctcactgccggccgggggcccccgttccaccccatctccagccccatggcgttgctgtcgcgcagtccccgatggttcacgccagctagtcaccgagcatccggcaacactggctgtagggtgtgcccgtacatccgtacgcaccttttttttcccattcacgtgactgcaatcaagtctatgggatggttgacaaaagactatctagacaagagtgggcgtagtacgtaactagtttgacgttgtacaggcgtcagcaggtatcggtaagcagctagtcaaaagcacgcaagcaggacgcatttgtcctcgatactttcgtgtaaatctctctctattttttttttcgaaattcgcgtgtatggtttggtttgacgttggtataacgtatggtagaataacgatcggaaatggcaatttagtcctcccgatcaattgttattgtaaaccactgacgaaagttaagtacagaagctgtaccagaagggtgaataaaaataccagcttaccattcataatttaatcaaaaaaaaaaaaaaaaaagtccac

SEQ ID NO: 140415 - DNA, 515 bp, Zea mays
  Clone ID: MRT4577_59542C.1
ctcgagtttttttttttttttttttttttttttttttttttttttttttttttttggttttttttttgggtttttttttttttttttttttttttttttttttttttttttcaaatccccggacaaccccaaccataagaggcagcccaattaaaggtggaccgccttaacggggttaaaaaatagttggaaaggcccaaaggaaacaaaaccccctccccgggccaagcctttaaaaaagggggggagggggccccccccccggaaggggcttcggcaaaccaaaagaaaaccttctaaagggggcccttgaaccccgggttttggggttccagggggcccccctttttacggggcccggggcaaacaaaacccgggtttggccccccccaaccccggccaaaagtttgtttcgggggaccaaaccctttggggccggtttttccctcggttaacaaggggggggggggggggacctcaaagggttttgggcccccccccttccctccaacccc

SEQ ID NO: 140416 - DNA, 456 bp, Zea mays
  Clone ID: MRT4577_59543C.1
gactctagaaaactaatcaaaataaacgcctcacctatcatctgagtttttcttgtcatcaagagcgaaagaatattgaaacccagaacatccaccagcttcaacgcttaagcgcagcatcttaccttcagaggatggttctttagcatgtaattcttttaatctctgcaagtgttgaatagctgagtgcaacataaacaagcatgaaaggggcggtatgaaaggaacgtgtatggcagtttgcttcctagtatacaaacagcatgtcctaagtcagcttggcaccaagcaatgctcctaatttgtcagaaagttcctcatataaatggaagtccaaatttagcaatccacaactcatttcgtcataatataccatcaccaatttatttcagtttcacaacatgcatcatgtttctaggatgtacagttcagcatgacccaaaacatttttatgtc

SEQ ID NO: 140417 - DNA, 693 bp, Zea mays
  Clone ID: MRT4577_59544C.1
aaaaaaaaaaaccacgtattcttttctctcagttattgttccagcagccgttcgcccaaatccattgccgctcctgccccaacgacgcacgccctcacctcttctgccatggcgctctcccaaccccttgttgccgctccctccacggccgctctccccctgctcggcgtacttgcgtctgcaggagcccgcccagcccctctctctggcgagcttgacccggcgtcgggccctggctgtcagctgtgtcaccagggttgtcctcctccgctgccactcgttggaccttgcccctgctgcgccgctggtagctcccctcgccctctcctccctggcgctcgtcctcgtctcccatgaacaagctcgtcctggcactagccctctccagctttgtgacactagcgccctcaagtcctatgccaacgcccccatcccctcccatctccttccccacgctaagtcccatggctgctgtcctccagccccatgctgtgacgcgccctgcaggtgttcgatggaatggccgtaaggagctttgtgttgtgtgcagcccctctgcgacactatcgacccccgatgaggtcctgttctcgccctgtcattttagcgctcgacctcgattactaatgtgtgaattgtgtgtatgtgtgtgttgatgaggagtgaaatccctgtgggtggatgttagtctgg

SEQ ID NO: 140418 - DNA, 304 bp, Zea mays
  Clone ID: MRT4577_59545C.1
cacatcgctctccttgccggcttgcactcgcccttagctcccgggcatggagctcgcccaagctccacctcccaagcgctctccctcacagccgcgctctcctccacctgcagctcgcccccatctcctcctctccccatggtggctccccctggatccctccctgcgcgggctccctgctccccatggttgtcggcttcccctacgagcagctcctccagggagcacggccttcctcctctcatgcgctctggagccgagctcctccttcaacaccggccgcggtgcttgccatgcaccaact

SEQ ID NO: 140419 - DNA, 1390 bp, Zea mays
  unsure (1)..(1390): unsure at all n locations
  Clone ID: MRT4577_59546C.1
ttgggtaagctagaaaaatttagggtttatagttttatacttctgaagctccgacataaaaatgttatgggtcatgatgaactgtacatcctagaaacatgatgcatgttgtgaaactgaaataaattggtgatggtatattatgacgaaatgagttgtggattgctaaatttggacttccatttatatgaggaactttctgacaaattaggagcattgcttggtgccaagctgacttaggacatgctgtttgtatactaggaagcaaactgccatacacgttcctttcataccgcccctttcatgcttgtttatgttgcactcagctattcaacactgggccgggctccatccggttctagcgaagtccgacggtgggatccgattgtggcaaagccacgcccgtgcagtgcgcccacagcaaatccctccagggcacaaggccaccactcaccagataccgaagccgtagcaaagcaaactagcaaatcaaggcaagtctggaacggccccaccgatccgacccgctcaaatcggattgccctcgtagtcgtttgtcatcgcgcgaccgattaccccgccgccgccgcgtcggcagcggcgatggcgtcgtcgttgtcgcgggcgctgctccgccgcgtcgcagaactggctagaggacgcctccgcgccaaccaccgcatgctctcatccgcgtcgtccaccgccgccatcgagagggcttcgcagttgccggcggaggcccaggccgtgcgcatgacggagggttgcgtgcggagattaaaagaattacatgctaaaaaaccatctgctgaaggtaagatgctgcgcttaagcgttgaagctggtggatgttctgggttccaatattctttcgctcttgatgacaagaaaaatgcagatgacaggttttttgagactgatggtgttagattggtcgtggatgacatctcatataatttcgtaaaaggtgccactgtggattacgaggaggaacttatacgttcaacatttgtggtttcaacaaatcccagtgctgttggaggctgcagttgcaagagttctttcatggtgaaatagcttcaatgttaccttgaagagatcaataaccggagttctgtagcgaaacatacgctttagatctgagtgtacaattggtattttttggtagctcttgagatgtttctttttgagttttattaccttaaagagaacaataaccagaaatatcaatcacaaactgtctggttcaatttgtatctcctaacatgtgaaatgatgacaaatttatgtacatgtaatcttatggctattccaaaaaaaaaaaagatttcttaacatttgactccatgtcgcttttacaaaannaaaaaaaaaaggccctagggcc

SEQ ID NO: 140420 - DNA, 254 bp, Zea mays
  unsure (1)..(254): unsure at all n locations
  Clone ID: MRT4577_59547C.1
tttttnntnnnnnnnccttaaaatacctttaggttaccatgaacaaatgtgattaaggcccatagctaagggcgaattaaactggggttagccccatatgctaccaagaaaaaccgaaccagtatgaagagaagcttcatgtaacacgtacaaacagcaggggtgtaactcaaaaccacaagcctcggcatgatgaagatttcaggggcaaagtgacgaagcagaccctatgcagcgagaaagaatgagaaaat

SEQ ID NO: 140421 - DNA, 390 bp, Zea mays
  Clone ID: MRT4577_59548C.1
gtggtggcttggtgaaaccctaaccttaacctagtcctttgataccatgtagaatattgtaagtggttgatgtactgataagagatggggtacaatatatagactcacaaccctaaccctaatgggccggcagcccaacagtggtgccggcccacgcacacagtctaacagagatgatcacgtcacagaaaatagggatatgattattgcatcccacatcatccctaaaccaaacacaaccttagtttgaagttacaacctgcgttatcctatatggtaaggtaaaatgctttacttcgaccccctttttttgtttttgctgtagagttattgaaatgaatcctgtggtaccggagacagtgtgactgtaagtagagatcatcacatttg

SEQ ID NO: 140422 - DNA, 327 bp, Zea mays
  unsure (1)..(327): unsure at all n locations
  Clone ID: MRT4577_59549C.1
cgggccggnnagtacagcaaagcatagtcacctgactatctatcgagcgagagagatagatgaaaggaatgtcgctagggtcaagagtggatagagtaaagctgcccagatcaaagttgaaggcctttcgcacacaggaaattggagcagccagcgcctggggcacctccgcgggcataatctcgcgaccatccaccaccacccggcgaaaaaacctgatcgacctgcttccgcgggcggctctgccgctcgctccgccctccgggaccgcgatgtcgggggcggaccatctgatggacccgaagcagggaccctagccgaacctgt

SEQ ID NO: 140423 - DNA, 1825 bp, Zea mays
  unsure (1)..(1825): unsure at all n locations
  Clone ID: MRT4577_5954C.1
ctccgccgcctgctttatttagcctagcttctcccgcgagctgctcctcctccaccgcacgagcctcttcttccctccactcgcctccaaatcttctctctcctttcctcctctcttctcaccgcatcacctctccctccggcgcgcgcgtccgggtacagcgctagagtcactcaccaccatgcaggcggcggcggcggcgaatggcgcgggcgacgtgcagaagcctcagcagcagccgctggtggcgggggcgccgcccccaccgccggcggcggccgtggtgccgccccattgggtcgccatgccgttcgcgccgcctcccggggccacggccatggtgatgcagccgcaccatatggcgcctccgccgccgcagttcgcgccgactcacttcgtgccgttccacgccgtcgcgccgccgcgggcacagtcggtgccagcagcggtcgcactgggttccccggcgccgcatcagcccgggcaggaggagaacaagagcgtctgggtcggcgacctccattactggatggacgagaactacctacacagctgcttcggctacaccggcgaggttgtggcgatcaaagttatccgcaacaagcagactgggcagtccgaaggatacgggttcgtcgcgttctacagccacgctgcggctgaaaaagttctcgaagggttttctggccatatcatgcccaacaccgaccagcctttcagcctaaactgggccgtcattggcgtcaggctgctggggtcctactctgcctcggaccattccatatacgtaggcgaccttgcctctgacgccaatgacgccacgctgctggaggccttctccagcaggtactgctctgtcaaaggtgcgaaagttgttatcgatgataacaacggtggatctaagggctatggcttcgtgaggtttggagctgaaagcgagaagacacaggccatgactgagatgaacagcgtgtattgctcgtcatggcccatgagaattggcacagcaactacgatgaaatcatcaggtacttctggatcgaatggttcagctgctcgtaggcaaagaggatcttagtcaggcgagatttcatttgtgaggattctcaaccggaaacagtgcgaagaggaccttaggcaaaccttctcccagtacggagagatttcttctgtaaagattccaatcaggaaacagtgaggctacgtgcgtctttcacagggccgcaacgcagaaaacgagcagttaagaggcgacgacggcaaccagtggaacaacgggggcatgtactacgcggcgcccccgttctacaacggctacggttaccctgcggcggccccgttccctgatccaggcatgtacgctgctccagcctacggtgcctacccgttctatggcaatcagcagcaagtgagctgacctggactaccgcgacacgcacgcctcgctcggagctggagactggaggtgttaggcgcttaggtgtagctctcggtagaagaagaagaggaagaaggtagacgacgacggtttcttaggtgagctagataccgtgactagtctcgtatagtgcgatttgttatacgtgctatggtctagcgcctccctcggctgagagtgcgagtgtcagtcacccctaatagctcgattcggtatgccggatatggtctagcgccgccgacgactgagagtccgagtgtccgacacacctattgactggccacggcatgtcgaattgaacgactggccgaatttctgatgtcctggagcnnnnnnnnnnntaccttgaagcagaacaataagctaatggaatcctttggcctctgc

SEQ ID NO: 140424 - DNA, 196 bp, Zea mays
  Clone ID: MRT4577_59550C.1
gccacgcatacgatcactcgtacgatcacgcatccaaagttttaaatcaaacagggagggttttttcttttcttatgcttatccactataatttggagatagatcccgagctcgttcaatcatttgaacatgtcactacttaattgtgccttgccttgcaaagtttttcttaagatctatatcgcttcatgtaata

SEQ ID NO: 140425 - DNA, 378 bp, Zea mays
  Clone ID: MRT4577_59551C.1
ggaacacagctctctggaggacaaaaacaacgggttgctattgcaagggccatcttgaaagacccaaaaatacttctactcgacgaggcaacaagtgctctggatgctgaaggagagcacattgttcaagatgcactggaccaagtgatggttagcaggaccaccattgttgtggcgcaccgactgtccacaattaaaggggcagatatgatcgtagtcatgaaagatggtgaagttgctgagaaggggaagcatgaataccttgtgggaaagggtggagtttatgcatcgctggtagaactacactccaagtcagcataaggatatatgggaacttcgatggattatttggtattacaaggagagcatttgcagtag

SEQ ID NO: 140426 - DNA, 257 bp, Zea mays
  Clone ID: MRT4577_59552C.1
aagtggagtaggtaccgttgttgctcttggtgttgaatcccacaccggctccgccatgggactagaggatgtacgaaggatgctcactggctccggagaccccaaagaggaagaagaggaagaattagtggaccccctgacaacagtgagagagcactgtgagcagttggagaagtgtgtagcagcccgggaacgactagagtcgtgtgataggcgcgtgtcttcccgatcacagacagaagaggattgtacagagg

SEQ ID NO: 140427 - DNA, 2033 bp, Zea mays
  Clone ID: MRT4577_59553C.1
attacaaaaaacaggaagggctcgttcgttttgagcggattgggccgttcttggccgtattctagacagaattaatgagtctggtttggaatccgtagaactgttcgttttgatgttggccggaaaggaaaccacatgattttgagtcaacccttcagtctttggcctggaacaaacacggacaatccaccttctagattggttcccagcctagaaacggacgagtgaccaggaataagtgtccactcaatcctggactggattggttactgatctgtttttgatccacgtctgccgaacggggccgaaacgaatgcgaactatgccatcaacatggaactaaactcagacaccctcctcttcctaactactatcatctcagcggctatccttgttgtgtgctcacttagccgccgcaaaccttcaccaggccccaagaagaagcggcctccaggcccatggcgtctccccttgatcggaaacctcctccacctagccacctcgcagccgcacgtcgcgctacgggatctggccaggaagcacggacccgtcatgtacctgcgtctgggccagatcgacgccgtcgtgatctcctcgcccgcggcggcacaggaggtgctccgggacaaggacgtcgccttcgcgtcgcggccgaacctgctcgtggcggacatcatcctctacggaagcatggacatgtcgttcgcgccgtacggcgcttactggaggatgctgcgcaagctctgcatgtccgagctgctcagcacacacaaggtgcggcagctcttggccgtccgtgacagcgagaccatttcgttggtcaggaaggtccgggctgccggcggccagagcggagagccggtcaatctgggcaggctggttttgtcctgctcgatggcgatcaccggcagggcgacgtttgggcagctgtgcggcgacgagctcatgtcggtcgtcgacgtggcggtgctgtacggtggcgggttctgcgccggggacctcttcccgtccctgtcgttcgtagacgtcgtcactgggttgacacgacggctgtggcgagcgcgccggcacctcgacggcatatttgacaagatcatcgccgagtgtgaggcacggcagcgacaggcgaagacgacgaccgggacaacgaacggagatggcgacggccttctcagcgtcttgcttaggatccgagacgagggggagaccggcatcagcatgactagtatcaaagcaatcttatttgacatgctcgccggcgggacggagaccacgtcgtcggccgcggagtggatcatgtcggagctgatgaggaacccggaggcaatggccaaggcgcaagccgaggtccgccgagtgctcgacggcaagagcccgcaagaccacgaagggcaaatggacaagctcagctacacgaggatggtggtgaaggagggcctgaggctgcacccggtgttccctctccttcttcctcgtctctgccgggagacgtgcgacgtcggcggcttcgaggtggcccagggcaccaaggtcatcgtcaacgcgtgggcgttggcgaggagccccgagcattggaagcatccggaggagttctggccggagagattcgccgacgacactagcgtcgccgcggcggcggactacgtagggtctcagtttgagtatatcccgttcgggagcggcaggaggatgtgccctggaaacacctttggcctcgccgcgctggagctcatggttgcgcggctgctctactacttcgactggagcctcccggatggaatgcggcctgacgagctggacatggacaccgtcgttggttcgaccatgcggagaagaaaccacctgcatctggttgcgtcaccgtgcaaggagatcgagagctgatgttggtgttgttctgatttactgaataaaagctgtcacttttgatatattgttatcattttcataaaaaataaaattcctcaatgcaccgatacaaaacggctaaaaggctgcaggaccatatatttttacaggcgaattcggttatc

SEQ ID NO: 140428 - DNA, 392 bp, Zea mays
  unsure (1)..(392): unsure at all n locations
  Clone ID: MRT4577_59554C.1
gaggncaaagacatattgcccatgtccaacaggggacacatttcacatgttcaacaaaaaacaaattgcacatgttttacataagaaacatggctaacagaacattgtccccctttatgggacattacagaacgttgtttaatgggtaacataagtaacacttcttgcttttgggtcccctttgggttttttttttttacactggacttgatggggcaggcaatgacagaggatcattttttaccaccaccacctttttttttttttgtctcacccttttaggctttggagcaattgggggggggggcatctgagtcatatactgggtcattacatggcctcatttggggaccaaactgaccacattttttggatttgggcctctttttccc

SEQ ID NO: 140429 - DNA, 242 bp, Zea mays
  Clone ID: MRT4577_59555C.1
gcaccgcggccgttgacttttctgctttaattccccatccccagctcccgaatccttcgtctcgtctccacacgcaacagcacccaagcagacagaagccagagagcaattggcagcgagggcaggaggcaagaagcggcgtcggcgtcggcgtcgacggcatggaccggaacctgagtgggttcctgatcgggtgcgcgggcaccccgtgacgctgctggcgtaccagcagacggcggtga

SEQ ID NO: 140430 - DNA, 982 bp, Zea mays
  Clone ID: MRT4577_59556C.1
agaaccaagacaagtcttatccctgcattttgctcagagactgcatcgaaagttcgaaacccaagacctttggctcagtgaaaagtcttctcaccattaaccgagacctattcttaaaagttgagcaataaatatctcaaatttgcaacttagttttgcctggttcagcttaagtacaagcttataagattacatgttccaactagattagaacaaaaagttcagcatcagctatgcaactatcacttcttgcaggcctctgctactgttcatgatctatatgactatctgtactgctcaggaagctgatagcctgtcatgactatcttatctgcaaacattttgccagtctttggcataatgtgccagtgcattgtcaagttgaattccttgccctttagattgcttccctggtcaataaatctgtacttatttgttgtatggatcaaaaacttggcatgctcctttgcaggtataatgccatcccaaagggaaacttgatttaaagcattttgtcgagtctcatactctgctgccacaaaaacaaatacctgttttgtgttccacgtgaaaagagatgaaaggtcagccgaaatgttcagcgtcatgctgacctcgtcattgccgttggcctccttctggaaccagtttatattcaagatcttgacggatgcggtgggtgtcagggtgttaaaattgtcggagaaggaggcggcgaagcacatcgcggccagtatggtgaccgcaaacgttgccaccgcgttggcgcggtgcccaaacgagtgcatcctgtcgcggctccgcttcctcccttaccgcgccacagcagccgagatcgccggacctcccctgccgctgctactccctccttcctcctgtcgcggcggcgccggcgacttcactgccgtttccttctctgtcttccttttttcgggaagtgcttccggaagagagagaagttagcccgtgcagtgcagatccc

SEQ ID NO: 140431 - DNA, 454 bp, Zea mays
  Clone ID: MRT4577_59557C.1
aaaacccgccaaagctttttgttttggaacggggattgtaataaatgggcccaagggttgcgggctttttcattattataaaacaggggcaacaaagggggcttatcccctcccaggtttcaggcggggttttccccggcaaacgaaccccccacttttttttttccgggcaaaccaacccccgggcttagccccacattcccaaacaattcaggggggaaaatcaaaacagggccttgccgcagatttaacaagagtttgacaaaccgccccaatcttggggccaacagttccattgccgccacatttattagtcgttgataacaggggacgccgaccttgaccgtgacccagggggggacatggaccctggccggggggaccttttatgaccccgccgaggcttctaattcttttggcctggtggggacctttttctttcttaacgaccatt

SEQ ID NO: 140432 - DNA, 129 bp, Zea mays
  Clone ID: MRT4577_59558C.1
ttagtacatcagcaagcaacatctgaatggaagaggggtcgtttaggatggccggggcgatagacaaacagcctgttgccgggcaggcagacaaacgtaagaggcaccagaccttgcgcagattccaac

SEQ ID NO: 140433 - DNA, 286 bp, Zea mays
  Clone ID: MRT4577_59559C.1
tagtagcaatgttccttcgagtagtcaaaatataactcttgctttggaccatgagctacaacatttgagtttggagagcaaactgaagaacagtaaaacgaatgttaagaaaacagcttctgtttctcactacaagccagaaccttggatgctccagagtgaaaatcaagaaatccgtaatcagctaagtcttgccattgttggtcatgttgattctgggaaatcaactttatgtggtcgattgcgacatgctctgggattgatttcaaaaaagcaaatgcataaa

SEQ ID NO: 140434 - DNA, 256 bp, Zea mays
  unsure (1)..(256): unsure at all n locations
  Clone ID: MRT4577_5955C.1
gagacgcgtggttcacggcttcaccttcgcaacttctagaagcttctttctaggctacctcgctcaccgtcccatgggcaacggcctctccccttgtctgtgccccagagccgagcgcggcgagacggcgcggctggtgttctggggtgggtcggcgaggatggccgacgagcggctgtccatcaccgccgntgacgtcactgcgcactctccgaccagcacctcgtctgcggcgcggactccttcttcatcggcc

SEQ ID NO: 140435 - DNA, 552 bp, Zea mays
  Clone ID: MRT4577_59560C.1
ggccgcttttttttttttttttttcttgtagcatccataggtgttaattgtacagctaatttctacagtgaatctgcatgtcactagcatgcaccaaaatatcaggcatcatttattcaaaccatcaaggaggtgcaaatccattttcataaccattgttgatttctttagtggatctgcactcgctcgtatgcatcaaaataccaggcagcatttattctcatgttagaaagagaaagaagtgataactacatgatctgataaaaaacaactgtacacctgttaggtgaaatgcgaataaaagggaaaaggtaggaaggtagccagagcacaagttcagaaacagcaaagaatagagtcaagattaaagttccctactgttacacttacatgtcatacttacgcaccacccaggtgatatcagtggaccagcagctacgaaccacatcagatgccgccatgccagctccagtcaaaaagtcccatcccgagtgtagacagcagcctctgggcctgacttcttttgcttcgccaaggatgtcatctaactta

SEQ ID NO: 140436 - DNA, 817 bp, Zea mays
  Clone ID: MRT4577_59561C.1
cattgggtacctcgaggccggccgggatcttccttgaaccctcctcccaccctcttttcatgtcctttctgactaagctcctgcggcccttcagcacaatgtccaacgcgcccgcacagcccatgacagtgccctcgggcgcacacacggccacccttgcagcgggctgtttctggggcgtcgagcatatgtaccgcaaagagtataaggacaagggtctatacgatgcgcgcgttggttacattggcggcgacaccgagaacccgggatacagagctgtgtgcagtggaaggaccggccacgccgaagcgctacaagtagtgtacgacccgacaaaagtaacctatcgctcgttgctggagttcttttacaaaatgcacgatcccacaacgccaaaccgtcagggtccagatgttggcacccaataccgctcagctatcttttaccacgatgccgagcaagagaagattgcgcgagaagtcacagacaaagtaaacaagcagtggtggaagggcgctgtagcaacagagattctgcctgcaggcaagtggtgggacgccgaggagtatcaccaactatacttggaccacaacccaggcggttacgaatgcccaagtcactttttgaggaaattcccgccgcttgaggattagaaggttggtcaagtggaaattagataccagaccggaagaggagacagcagcatcatgatacctatctcaatattcaacataaagtcctagaaaattcatcatttctcgcggatgcaatatatattttattctattgctaggaaaaaaaaaaaaaaaaagcggcc

SEQ ID NO: 140437 - DNA, 356 bp, Zea mays
  Clone ID: MRT4577_59562C.1
ttcatgtgtgtagtgtagtaattactttcacgattagaaaataaacgtgatcaggtgaggtgttttatttagcttctggtagtgtattaataagtgctaaggctatgttttgtatttgactgaactggggccatcatcgttcttgcgatttcaggtaaattggttcttggtaagctaaattatcatctatgttagttgggtcgatgaatggttgggctagatttcttagttgcgtacataatcttcaaatagacgtatgttgcgtgtcgggtcaaattaataatatgaaggttaagtctagagtttccagtggttagatgatagatgatgaggacattacctgcaacaagagtacg

SEQ ID NO: 140438 - DNA, 448 bp, Zea mays
  Clone ID: MRT4577_59563C.1
actcttaatttcttatttgttttgtttgttctttctattttttttcttttggtttaatccaaacatgcccatcgaggaggaggaacaaacttagtggatgcataacattgtctaggctaagaaataacaaagaagcttggaacatggcgtgcataaaagccttgtacctctcaaaaaattcatccaccaaaattagactgaaacagcgccctatccctttgcacccgtgtgagcgcggacttgccaaccagagggaactaactccggcgctgggaataacgcccttgcacgatctcctgaattaattagtgcgggagtcgtacctacggctgccatcaagagttaaccctcccccccacgggctttttacagccgggggacgagggaccacacccttcttgaagtcacgcccccctccttacttgtggccagatttaaacgcgtggac

SEQ ID NO: 140439 - DNA, 353 bp, Zea mays
  Clone ID: MRT4577_59564C.1
gaaggagttcacaaagttcatggaagggaaacaccgcatttatccttttcagatttgtatcctacacatggagaacggttcattaactactctgccccaaatccagagaaaatttacttaaatcagagaggtctccaaagacagcagtcgtcgatacaagtaaaagtggacaaaacctccttccaaacaaatcctggaagaacgatatcaagtaaaccaacaaagccaaggttcattcttcagcaggagaccagtggaagtatcatcgcttgcaaaattccagcattgctctttgaactcctatgtttgagatggtgaagtcgtgttataagagcttcagaccaccagtgaca

SEQ ID NO: 140440 - DNA, 363 bp, Zea mays
  Clone ID: MRT4577_59565C.1
ttcgaccacacgaggacacacgtcatacatggtccatgacctccattccactgtagcgataacgcttacagaattggtgcataccaatgtccgaggttcactggagccatcctccccaacagcaggagcttcctgtgcatgataatctgctgcctctcgttggctatccggagagatacaccagcactctgagctagggatcacacgtatccaaactggctattgtatcacacataagccaatgacaccatgcacagacgatctaacagcgagctcagtagagacacctctcagaggtgatcaggtgcccctgcaactcctgagcctgaagctgtggcaggctgcccttccagaggccaaggc

SEQ ID NO: 140441 - DNA, 402 bp, Zea mays
  unsure (1)..(402): unsure at all n locations
  Clone ID: MRT4577_59566C.1
cgggcgccacgaccaccgaaaagatcctgggcaagagcaaacacaccaagcggaagcgtaccgacgaacgaagcaacagcaacagggaccaggataggaggccagcctggcgctgcgcgacatcaaccgagaccacaacagagcgcaagcattacacgacagggcggaagagactatggtggctttaggcacacagaacccgccaccagnnactgngaancgggccgcccacaccgaacggcgcgagccaacaggctacaacaagcgctggcgacgagcgccaaacagcaagcaantaagcaacagaaacaccganccaagggacancaaacgcggcgggaccaccgcaacgcaacagcaacaacagnnccaaccaccacggacgcaaccacacgaggggaa

SEQ ID NO: 140442 - DNA, 608 bp, Zea mays
  Clone ID: MRT4577_59567C.1
tttttttttttttttttcgatgatgattataattatgattccacaaaaggcccagccttacgacgtgagcagtgctcccatctctcgcaccttatctcctattctgtacaagccaagtccaagcactgcaattattgttgtcattcgtctgtttcctcagcccccgggcttctgcttcaagagaggcatccgtccgtgacttcattatgggttcccaactctacagtttctctaattattgcttctgctgctgcttctcctgagaaaccgcgcgtctcttgtgagaaacgtgtcgcttccgctgggcgaggtctctcttcttctgctcgagatctcgcttcttagcgggctggacgacaccagctgtgtcgaatggcacaacgactccatctgcgtttgtcatggccggaacattgacatcgactcggcggacaagtgaagctgaagaagccgagacaagggcgaccaaggtgaagatagagaaacgcatcttggctgatatgagttgcaaatgggctttggtgggaacaacaattaagatgtcggcctgcgacgagaagaaacttgaaagagagtagtgaagagtggttaacaacgactaatgtggg

SEQ ID NO: 140443 - DNA, 512 bp, Zea mays
  Clone ID: MRT4577_59568C.1
gctggaggagtctgcgggaaccgagagctcatggtctccaatatcctaggagccgacgcgatggctagctagggatgaaaaggattgctcgcctggatgaccactgacgccaagaccgccgacaacgacaaggtgaagaccgcccccatctcacggccctccaccacgggcctccagcgggggtgttcggaccaatccaccgacagctgaagctgaggactcaagcccatggcctgctgggccgccattgcagtcgtctactttgacgtcatactgaaccacttaactgacgacgctctagagctgactggacaccctcgcgtggatttgaatgataagcggattatccatcagaccctacagactgcacatccctgatacgacgcactggacaccctgatgaaggtgaccatctgaagcggacgtgtgatcatgtacatccacaactccctgatctacaagtactcctgtgtgtgaagactactgaatgcacattgttagtttaaactggg

SEQ ID NO: 140444 - DNA, 878 bp, Zea mays
  Clone ID: MRT4577_59569C.1
gcaccaggacagcctcaccttggattttgaccacaacagcgacagttggagagagttgctagagtgagtatacctacctatagcataccatgtcgtccatacatcaactttttttttaatttactttctagccacaaggtatatatctatgtattcttttgttaggattccaaaaaaataaaactttaattagcttactatatagcatgtatgtatgtattatgtatacggataaaattttatagctataacaggtatatatatggatactacctagttagctaggaataataggaataaaaaaaccctagcttagtagatggtagcgtgtatatatagtttgtttgcttattatagttaattgcctgcctccctgatctcaccatgcatttttttctttgtctttgtcttttggtgcatgcaggcaaatgtcatggttgaacaaccccaatgatcagctgtgagaagaaatgacacacatatctctctcatactacataggagtacgtacgtcgtcagatgaagaactgatgaaaagttgaatgatatatatatgatagatggagagatcgagaaaccgtttctttgcattggattggttgttgcatgcacacttctttgaagatgtgaagtttgtaatctgttgataggataaaattaaggtggtttggcccactttgttttggctatatatgtacagattaaagaaccaacgcggcattataaatacatatatagatatatgctcacctaaacgatttcaatttgttgttttagtttttttttcttttgatttgcctttgcaaggagggcacacacatagatatacatatacttttgtaatgattagcttgtggcatatatatagggtaaatgag

SEQ ID NO: 140445 - DNA, 974 bp, Zea mays
  unsure (1)..(974): unsure at all n locations
  Clone ID: MRT4577_5956C.1
gacccacgcgtncgagcccagcaacatggccatctccctcaccctgtgtcctgtcacacacacgcaagccgccgtacggccacgaccgtctgacggttcatggaatacgaggttccgcggaccgcatcaccgcatgcaggtagtacaagtcgggtcaaaatgtgctgctgaatgcgcatgccctgctgcctcggctccgcgtcgttggttcaacgaaccgagcagccgcccagcttgtatattacccgcgctccccgttcttcggcagcccttcccttctttattcctggactagtagctaatctatctgctggtctcccttcagctgccgacgatcggagggatcgtcagctggctgtccgaaatcccgaacgagctttgcgggcggtagctctgcctctgaggctcatctcgatcccgtgtccaaaaaaaaggcagcatcatccatggaccggaggccgccggcgaggaggagaccaggcgatccccaccgcaggggcgcagcaatgcacggcgccgtcgagcagcagaagcagcaccgcgggcggcggccgcaaggaacggtgccgccgcagcagccgcctcccgcgggctacttcaccgcggagctgctgctggcgttcgtgttcgtggccgtgtcgctggcgttcctcccgctcgtgctgccgccgctctcgccgccgccgttcctgctgctgctggtgcccgtgggcctgctggccgtgctcctcgcgctcgcattcgtgccactcgacgcgcacagccacctcgtcgtcgtcggctctggctcgtcccgctgacgaggcggagagggtttaggccgccggcgccgccggcgccgtacatagaaatgatgtctagaatgagtcggatttagttgctggtttggttgattcaggatgtattttgctgtaaactggtcagatcggctggattgtaacgatcatggaacttgattagttggttcccatgcc

SEQ ID NO: 140446 - DNA, 1213 bp, Zea mays
  unsure (1)..(1213): unsure at all n locations
  Clone ID: MRT4577_59570C.1
ctctactgcgaagctccccccagttcccacggtttcccccacgacgccggggatgggcaagcggaaacagcgcggcagcggctacggataacccgccgcggaaggcggtgctggcggaggacacagcccctccaccgtgttcgtttccaacctcccctacaccttcaagtccttcgatctcgaggcggtgtttatgaagtggggtcggccctgtgtggtgctttatggtcggagagtagagtgtgcgtgttcnagcagcaaacatctgatgtaactgttaactcagagaacgaggaaacccacgcgtccgcccacgcgtccgcccacgcgtccgcccacgcgtccgcggacgaggggctttacatctgatgttatgttgccaaatgatcaaggattgctatgtgttactgctgatcagcagtttttgttctattgtcccaaaaggactgatgatggggcctttgaactgtctctatatagacgactaataggttataatgatgagattcttgacttgaagtttattggggaggaggaacaatatcttgctgtagctaccaacttggagcaggtccgtgtttatgatgttgcgtcgatgtcatgttcttatgtgcttgctggccacaccgaaataattgtttgcattgacacatgtgtatctcttgtaagacctggagctctgcttccgggaagacacttgttgtaactgggagcaaggataatactgtgaggttatgggatgctgaaagaaaaagctgtattggcattggcaaaggccatctgggagctgttggttctgttgccttctcgaagaaaacaaaggacttttttgttagtggcagcagcgatcgaaccatcaaggtatggacctgggacaacacacttggtgatgctgaggatgaagtccctcttaaagcaaaggctgttgtagctgcacatgataaagatattaattatctggcaatttcacctaatgatggtcttgtttgcagtggttctgaggacaccggactgcttgcatatggaaactccctaatctagtgctctctgttgcccttaaggggcacaaaagaggaatctggtcagttgagttttctcctgttgaacaatgtgtcatgacatcctctggtgatagaacaatcaaaatatggtccgttgctgatggctcatgcttgaagacatttgaaggtcatacatcaagtgttctgcgagc

SEQ ID NO: 140447 - DNA, 328 bp, Zea mays
  unsure (1)..(328): unsure at all n locations
  Clone ID: MRT4577_59571C.1
tttcacgacccttttaattttggcttgcatttatttgaaatttgacgacaaaggcattcattatattatgtcagcaagcaagccttaacactggctttgatccaagaccaaatcacttttttttccctttattggagaagcctcaaacacgcacttaaaatacgacccttaagagcaaacctcgagccagtccattactcgtcaatcgaaacctgagaactgncgtgaggaattgtgtccgatcatggctccccgcacacgttatacggctcttcccaaaccttctctacttaaaccagaccagtaggcgctctctgacaaccagccg

SEQ ID NO: 140448 - DNA, 327 bp, Zea mays
  Clone ID: MRT4577_59572C.1
gaaaaagccatccggaccgcagccggcaacccgtccggcaaggtgcgactcgatctgccgacgctggcccggatggaatccttgcccgatcccaagcaggtcctgttcgacgccctgcgcacggccagcgagctgtctgccaaccggcttcgcaagttcaaccccgaagagaagcggcatcgtgtctccgacctgatggacagcctggaccggctacgccagattccctcgttcgcgcacctggaagaccagatccgcgcccatttcgccgcctgaatttccccatgctgcaattcgacctcctcgccaccgaaggccatgcccgcc

SEQ ID NO: 140449 - DNA, 263 bp, Zea mays
  Clone ID: MRT4577_59573C.1
cttaaaatcttttccaatgaaccaaaaacaaataaacatttccaaacaaggcgtccaacatgcatccctaaagataagcaaaaaaaaagctttgggcaccacccttaaactaaatcatagggggaaaccatcaaagagccttttgggactcaaaaaactccagggcgttttttttccacaccgaaaaagttttccaaaaaactggtccctggaatggaaaaggaccaaacttatcggtgggaaccctctattatcccggggga

SEQ ID NO: 140450 - DNA, 310 bp, Zea mays
  Clone ID: MRT4577_59574C.1
ggggttattatttacatattgtttatggaaaccgtttatagaacaggacccctaaacaaaccccacgtgttgctgaagacaaaaacaagcaactgagaaaacaattaaaaaggaaccaaaaaagaaggggcaaacacaagaaaaggcacaagagaaaggttaaatacgaaaggcggggaaaaatctccctttaccacacacccccactaaaaactgctcaaaggacatccctactgtacactcaaaaaaaattactgagaccagctgtacaacacggggataatttattaccccgaccaaaatctggggg

SEQ ID NO: 140451 - DNA, 353 bp, Zea mays
  Clone ID: MRT4577_59575C.1
ctgaatccgtgctgtcgctaatttatatcaaggcacacttaagcatagtcacacaatagatgatgtgatggctacgtagtcatgccatcacttcaccacacaatcccaagtaacaaaacaactctaaccgaacttgccatttagccgatcgatttctaacccatttttttataccaccactacactacatatgcccaaacaattaaaccacaccgatcgaacttcttatcgagtaaaacctatacctccaatctactcacttcatccccaattataactagtcggctctccgattaacacacatgcgtaccaatttctcctctatgaacctttaatctacgccgacagcaacg

SEQ ID NO: 140452 - DNA, 505 bp, Zea mays
  Clone ID: MRT4577_59576C.1
gcagcggaaatctggttaccaaattttacaggttacaaaaattttataatattttatcggagtgattacaaaagtataagtttgaaatatatgctagctcaagtgatcatcctcaataagaagataaagactgggtatacttagatttataagaaggccgagcccaccggcacttaacaccatcacaacagcacaaggttagaacctgaaaaacaacatggaataaaaccctgagtatggaattactcagcaagtcttacccgactaaggaaaaggctctcaagggtatgctggataaataggagtcaaggagaggctttagcaaaaatcaacttatacttttgcagaagtagcttactaaagggagtccttactttcaatcttttaatgccatattaagtattaatagactttatttgcatctagtctaatttcacatcttatcaagacaacataatttttatccataggggtcacatcctgacttttggttgagggaaagtga

SEQ ID NO: 140453 - DNA, 639 bp, Zea mays
  Clone ID: MRT4577_59577C.1
aacacaaatcacacacaccaatattattgcagcggaaatcttactaccaaattttacaagttacaaaaattttatattattttatcggagtggttacaaaagtataagtttgaaatatatgctagctcaagggatcatcctcaataagaagtatagaagggttacttagacttataagaaggctgagcccaccggcacttaacaccatcaacaacagcacaaagttagaacctgagtaacactaggttagtgttgttagtcgatgagcacttgacgaccatcttcaggtttgtccatcagcatcgccttgcgaagaagcccacgcttagggtcgacttggctcgtcttccgcatcacgcgattaattaacgtaccgtttcaacagctgacacgaagccgcaagatcggtagtgattttccgatccagataatttgtcgagcgcttggggaatatcgcgctgctaacttcgtcttcacccgattcttgggatttcttggggatgcacgaacgacgacgaccttcgattgaagtctggggtaagctggtgaggtggggatcgagccggggatgacgtgtttgacgactcgacggcaaacgacgagatcgacgacgcgattgggaattaaagccgagcgagc

SEQ ID NO: 140454 - DNA, 699 bp, Zea mays
  Clone ID: MRT4577_59578C.1
caagcaggtgcattgtcgccactcctacaagcactgcatatcgcctctgatcaggacctccatgattctgtactgcgtgctatacacgcacttacatcagcccctgctgccaccagaatcctttgttcatcgccactgttctttgcacgacttacagacctcatatgcagctctggtagcttcctgttgcaacaaatggctgctgatatgattgctgatcttgcacctactgtgagcgatgacacaaagaggtgcatggcaccatgcattggtacactgattaagctgatggaggtggctaagccagcaacaatacaggagtcagctggtcgtgcactgcttgctctgtttaccttgaagtctaataggaagggttttgtcagggatgagaagagtttaacaatatttgtgcggatgcttgatccccggtttcaggagactgataagaagtatccactctcgatctttctagttcttgccatgggtggcgggaacgggacacgacgacgacttgttgatgctggttcttgtcagcatctacagaagctggctgatgctgatgtgcctggtgcaaagaaggctttgcagaggatatctaacaatcgtcttaaaagtttgttttccataggatggcaaaactagtccatatgctgcactggggtaatgattgatcttgtcttgacctctcttttttttttc

SEQ ID NO: 140455 - DNA, 841 bp, Zea mays
  Clone ID: MRT4577_59579C.1
cggggttcttaagaccggatcaggttcacgcagaccgagagcacagatacaccaccgtccagcctcttgccacggagggtacacgctactctcgccaccgctccacgcccatctcgtgttgtcttattccggccttagtctgcccgaggcaaggcttacccatgacgaggcatgtgaccagttaaagggtcctcgatcaacaagcctacatacgcgttaatccttaatcaacctgggtagaacatcacctgttcctaacccgagtctcaatttcagtatttccatccttaggattgtgtctgttccttaggatgaaagagcatcacagggaactttgcagtaagatcccactattgctccaaataaaaatattcttgcaggtagaagccatcctctcccgggttaaattgaggacaacctctatccacaagatctaagcaaggctaagcatttttgtaaatcatattttgatacttcacagaagtatctataaaggtatggatatcaaggaaagcaatgcatcaaagggtttcaaacaactcctatgaacctaatgcacatttcactagacttaagtgtgcgaaaggtatttaaaacacaaggaaaggggttgcatgcaccggggcttgcctggataacactaggttagtgttgttagggagtgtccacttgacgattatccctcggtcgagcacttgcttgattaaccatcttcaggttgattcgactgacgacgtcgtcttgcggagatgtccaatctctgcattatcctgggtcaacttggggtcgtcttccgcatcacgtgattaattatcgcaccttatgggattttctctcctgg

SEQ ID NO: 140456 - DNA, 716 bp, Zea mays
  Clone ID: MRT4577_5957C.1
ttttttttttttttttgtccaatataatcagagtacttattatatagcggaagtcttacaaaataaaatataaatatagatcgaactaaagttcatccttggcgccagaaagtcaactgggagatgccacctagatggctagatcgaatcgaactcctcgatgtgtggctccacttgaaccacctgttcttctcctgaggaaggagcaacgatgatcagtgccacggagcggggcggctacacggcggaggatgacggccgacgagcaattcccgccgttcgagtgctagtctctacggtccgagcgcgcgtacggtttccccgtggttcggcgaacacctcgacacacccttaggacccccaacttgaggattgagcaatggcactaacctgcgcatggcacaacacgagttaatggtctccagcgagcaattaaaaccccccaatgtataattccttctcccgcgaccctccatgcgtcaaggaatgatcacatgaaggctacgaacacaaccatacctgcggtggtgcggtacgggagtcaatttcctcccgcgtggtacggagccgaggtgccgccgagctctggttctcggttccgaccacgcctagccacgacaccgaagcagtcaccccgacgcgaacaggtcaacaccttccgccaggcccaaggtcagaaccccggcgggactatgcacgacaacaatgcgcaagta

SEQ ID NO: 140457 - DNA, 220 bp, Zea mays
  Clone ID: MRT4577_59580C.1
attcggctcgagatcaaacattacgtcatgattcacattgcacctacttccaactggaggggctatataaaccccatgggtccataaataactaagagcacaaacataagcattcattcattcagatttctatataacatatttttcttacctttctgaacatttcctccactaaaacattcccattgctagtatatcactttcacttatatcaataact

SEQ ID NO: 140458 - DNA, 335 bp, Zea mays
  unsure (1)..(335): unsure at all n locations
  Clone ID: MRT4577_59581C.1
nccttttnnnntttnnnnnnnnnnttnnnnnnntggttttttttttgggtttttttcgggaaacaaacccaaaaaattcggaatccccttttacgaaggggcccctactggttttattcttaaaccatccaacccccttcgtgaagaaaccgaaataaccaaaaaacgtcccaacccacatttttaaatggggggaacaaccattttgttttgttcacccccaaccaagtttaagggcaatcacccaaatgttccattccctgcaaagctaaacccgggggactggggctccctcaaggttgggtggctccatttggtcgggtggggggttcttt

SEQ ID NO: 140459 - DNA, 491 bp, Zea mays
  Clone ID: MRT4577_59582C.1
gggttggggtttttttttttttttttttttttttttggtttttttttttttttttttttttttttttttttttttttcccccccccaaaagggaagaaaaattgggttttcgagccacaacaaggggatcactcttaacaacaaagggggggggggggggaactatctatctttctggggggataaaaaatctatcgggggaaaaagggtttccaccatccagcaccaacgggtaaaaaggggggagggtgggattcatttacgggtaaacacccagcaccaacgggtaaacggccagggaaaaataggggggattatcaggcatcaagaaaattttcaagggattcttgggggaaaacaagacacttggctatccagaaacaagagttttcgggagaaaaagctggggggcctcaagcctgacattattaagggcaggatagggagcaatggcatccttgaaatcttggctagcagttgaaggggtatat

SEQ ID NO: 140460 - DNA, 758 bp, Zea mays
  Clone ID: MRT4577_59583C.1
ggccgctttttttttttttttttacagcggaaatcttattaccaaattttataggttacaaaaattttacattattttatcggagtgattacaaaagtataagtttgaaatatatgctagctcaagtgaccatcctcaataagaagtatagaagaagtacttagacttataagaaggccgagcccaccggcacttaacaccatcaacagcagcacaaaattaaaacctggaataaacactaggttagtgtttgttaggtggcgaccacttgacgatcagcctttgttccgatacttgcttcgtccatctatctttgggttaatccatcaatattatcttgcggagaagctcacactttccagcatcttgtggtcgactcagttttggtcctcgtttccacagctcacacgaatccgcgagatcggtagcgattttccggtccaggcaatttgtcgagcgcttggggaatatggcgctgctagcttcgtcttcacccgattcttgggatttcttgctgatgcacggaacgacgacgactttgagctaaagtcgggtgcgagctggtgaggtggggtcgaactgggactagaggacgacgaacgccatggcgggttagagactggatttaacaacgggtgttgtatcatggcaaatagaaaatcgatgatcgaccaagaaaggtgatcggcgagttgaacgactctgatgatttgacggccatagacgcagccgggataactaaaaatactacgacagct

SEQ ID NO: 140461 - DNA, 742 bp, Zea mays
  Clone ID: MRT4577_59584C.1
ggccgctttttttttttttttttgtagcggaaatcttattaccaaattttacaggttacaaaaattttacattattttatcggagtgattacaaaagtataagtttgaaatatatgctagctcaagtgaccatcctcattaagaagtatagaagaagtacttagacttataagaaggccgagcccaccggcacttaacaccatcatcagcagcacaaaactataccctgggtaacactatgttagtgtttgttagacgacgtccacttgacgatcatccttgtcctaacacttgatcaggcatgttcgttcataaacatctccatgcggagtagcccgcgcttggggtcgacttgagtcatcttccgcatcacgtgattaattatcgcaccgtttcaacagctgacacgaatcacgagatcggtagcgattttctgatccaggccatttatcgagcgcttggggaatatcgcgttgctagcttcgtcttcacccgattcttgggatttcttgatgacgcacggaattacgacgagatcgagtctggagcgagccggcgagatgggagtatggtcgacgactggcgaccactacaggctggagttggggtgaactgcgtgcagaggagcggatcggactcggcggccgagcagacccgacccagcagcgagagcaaacagagggggcgagctgggagttggacagagccgagctcgggcgactgggtgagatccgggctaggg

SEQ ID NO: 140462 - DNA, 271 bp, Zea mays
  unsure (1)..(271): unsure at all n locations
  Clone ID: MRT4577_59585C.1
taaagaccccancatcaatcgttctgttcatatactgcttcatctgtgtgtggtttctgggttttctatctttcttccacanccatcccaagagcacaaaccagatttgtaccctctcaactataataatatagttggattccacccgcacacatatagctgacaatccttaccttacacccaatgcatataacaattaatatctcattcctctaaaaagagagcctaaagccctatttcattttcacccattactaattctgattaaacc

SEQ ID NO: 140463 - DNA, 356 bp, Zea mays
  unsure (1)..(356): unsure at all n locations
  Clone ID: MRT4577_59586C.1
cctcgaggccggccgggccgggtttcaaactgagcgttagacgcaccccgttacangagccgacgtggagncagagagngggacgcagcgagcgggccgccggagttttaccccgaagaaagggggngaggcgccgggcggcgggggacgagaaggggacggcggggaggaagcggcggaggcgggacnacaggcgccggcagcaggacccggccgccgggaacagcggagcgccgcacgacaacaacaacaagcgcaggaacgccggcaaaaacgggccgggagagacgccgagggacggaggaacggccaaggacaccggggaggngacagaagaagacccaaacaagccccca

SEQ ID NO: 140464 - DNA, 1481 bp, Zea mays
  unsure (1)..(1481): unsure at all n locations
  Clone ID: MRT4577_59587C.1
gttgcagcggaaatcttactaccaaattttacaggttacaaaaattttacattagtttatcggagtgattacaaaagtataagtttgaaatatatatgctagctcaagggatcatcctcaataagaagtatagaagggttacttagacttataagaaggtcgagcccaccggcacttaacaccatcaacaacagcacaaagttagaacctgaaaaacaacagggaataaaaccctgagtatggaattactcagcaagtcttacccgactaaagaaaagactctcaagggtatgctggttatatgggagtcaaggtaaggcttttcaataatcaaagactctgttttgcagaaatgcttactaaagtggatccttaaaaatccaattttatttgtcaagttaagtagagttacctgtaactagagttctttctaccctagttcaatcactggtcctgcactagccaatttcttaacagaaacccatcatctttagtggaatgctacgtgtaagtcagtggccaagtctccataaccgcgaaggtacggcgatccgaatcgattatactcagctgaggatctccaatcacacgacatatgtagcacttaacccttgcatatgtcaacccgccaccggggttcttaagaccggatcaggttcacgcaaaccgagagcacagatacaccaccgtccagcctcttgccacggagggtacacgctactctcgccaccgctccacgcccatttcgtgttatcttattccggccttagtctgcccgaggcaaggcttacccatgacgaggcatgtgaccagttaaagggtcctcgatcatcaagcctacatacgcgttaatccttaatcaacctgggtagaacatcacctgttcctaacccaagtctcgatttacatacttccatccttaggattgtttctgttcccaaggatgaaaagagcatcacagggagctttgcagtaagatcccaccattgctccaaatgaaaatattcttgcaggtagaagccatcctttctcgagttaaattaaggacaacctctaaccacaagatctaagcaaggctaagcatttttgtaaatcatattttgatacttcacagaagtatctataaaggtatggatatcaaggaaagcaatgcatcaaagggtttcaagcaattcctatgaacctaatgcacatttcactagacttaagtgtgcgaaaagtatttaaaaacacaaggaaaggggttgcatgcaccggggcttgcctggaataaacactaggttagtgttgttaggtgacgtccgcttgacgatcatcttcaggtttgtccatcagcatcatcctgtggagtagcccgtgcttggggtcgacttgggtcgtcttccgcatcgcgcgattaattaacgtacctgaatggaatgcattatgcacatgaatgcatatcgatggaaatattcnccacgcgtccgcggacgcgtggg

SEQ ID NO: 140465 - DNA, 122 bp, Zea mays
  Clone ID: MRT4577_59588C.1
ccacttcaaggacccataggccatgcttgttattcaatggagtgaatgaaaatcccgcttaagccaattacaaaacgccctgatatctgttaaattggcgagcgttgtgttaaattggaata

SEQ ID NO: 140466 - DNA, 561 bp, Zea mays
  Clone ID: MRT4577_59589C.1
attgggggagggggaattttactaccaaattttacaggttacaaaaaaattacattagtttatcggagtgattacaaaagtataagttggaaatatatgctagctcaagggatcatcctcaataagaagtatagaaggggtccttagacttataagaaggccgagcccaccggcacttaacaccatcaacaacagcgcaaagttagaaccgttttaatagccgactcgaatccgcgaaatcggtggtgattttccgatccagacaattgtcgagcgcttggggaatatagggctgctagcttcgtcttcacccgattcttaggatcttttgctgacgcgcggaacgacgacgagattgaatatggagcgggctggcgaggacacgaatctagtgaggattctagcgacgacgaagttacgagcaagggaggacgggttcaacagctcgacgacaaacgcgagcacgcgtgaagcccgatggatgaggagcgaacgcacggatgggtcagactaggaccaaaggacgacgaacgacgcaacgacgggcagggagagatcacg

SEQ ID NO: 140467 - DNA, 403 bp, Zea mays
  Clone ID: MRT4577_5958C.1
atctcaatggaggctgcaattcaacaaacattgcaccaaaatatgctttataccgtaacattccacacattcaattccccctatatatccaaaccatcattttaacaaatcccacaaacaaaaattaaaacttacccagctatcccttgtaaccattctttatcttccaccaaaaaaggatacattccccccttacaaagtcaattcacattcctatttcccagctcgtccacatcaaaaccaaaaatataacttatcctttaaggccacaacccttacaaattaccttaataatagtctacttactgttgcacgcacttcactttttggtcttcccccggcatttcatactccttcttttacccctcctaggcattttaaccttgcttcctgcccatatctt

SEQ ID NO: 140468 - DNA, 1478 bp, Zea mays
  Clone ID: MRT4577_59590C.1
gcagcggaaatcttattaccaaattttacaagttacaaaaattttacattattttatcggagtgattacaaaagtataagtttgaaatatatgctggctcaagggaccatcctcaataagaagtatagaagggttacttagacttataagaaggccgagcccaccgacacttaacatcatcagcagcagcacaaaactataacatgaaaaataacagggaataaaaccctgagtatggaattactcagcaagacttacccgactaaagaaaagactctcaagggtatgcaggctagagggattcaaggtatggcttatcaagaatcaaagactctattttgcagaaaagcttactatgagtggatccttaaaatccatttttatttgtcaggttaagtaaggttacatgcatatagagttctttctaccctagttcaagcacttaaccaatactagccaatttcttatcaacccttcttgttcactggattgctacgtgtaagtcagtgaccaagtcttcatatctgagaagttacggcgatccgaatcgattaatactcagctgaggatctccaatcacacgacatatgtagcacttaacccttgcatatgtcaactctccaccgggtttcttaagaccagactgggttcacaccaaccgagagcacagatacaccaccgtccagcctcttgccacggagggtacacgctactcacgccatctctccactcccattgcatgttggcctttctggtattagtctgcctgaggcaaagcttgcccatgacgaggcatgtgaccaattaaagggtcctcagtcagcactcccacatcgacacggtccttaatcgactcagacggagacactacaccgagactcctttctcgtgcaagtcacccgcccggtctcagcttaatcatttcaacccaaagtttggtacctggcagaggtacatcttttccgatgttgaacccatcacggccatgatggatccaccatcaaattttattttcaaaaacgtcccacccacctttgccatatcatcttttgtaaaaacaaaacattttgtttttctaaagcaaggctaagcatcaaaaatcttttgtaaaacgggtgatcaaggaaggtaatcaaattcaaggaaggtaatgcagaaattgttttggcaatcaactcctatcacctaatgcatcaagcaagtgaaaaaggtttttaaaacacaaggaggtggcaaatgcaccggggcttgcctgagtaacactaggttagtgttggttaggcgatgagcacttgacgatcattctttgtcttggcacttgttaggtcatccatccttgcgttcgtccttcagcttcaccatgtggagtagcccgcgcttgaggtcgacttggttcgtcttccgtatcacgcgactaattaacataccatttcaacagctgccacgaatccacgagatcgatagcgattcccggccgg

SEQ ID NO: 140469 - DNA, 1822 bp, Zea mays
  Clone ID: MRT4577_59591C.1
acacatcaacatttttgcagcagaaatcttattaccaaattttacaagttacaaaaattttacattattttatcgaagtgattacaaaagtatacgtttgaaatatatactagctcaaatggccatcctcaataagaagtataaaaggagtacttagacttataagaaggccgagcccaacagcacttaacaccatcatcagcagcacaaatctatgacttaaaaaacaatagggaataaaaccctgagtacggaattactcagcaaggcttacccgactaaagaaaagactctcaagggtatgctggctagagggattcaaggtatggcttatcaagaatcaaagactctgtattgcagaaaagcttactatgagtggatccttaaaatccaattttacttatcaggttaagtaaagttacctgcatctagagttctttctaccctagttcaagcacttggcctatactagccgtcttttcatcatcccttcatcttcactggattgctacgtgtagggcagtgaccaagtattcataaccacgaaggtacggcgatccgaatcgattatactcagctgaggatcttcaatcacacgacatatgtagcacttaacccttgcatatgtcaactcgccaccggggttcttaagaccagatcaggttcacgccaaccgagagcacagatacaccaccgtccagcctcttgccacggagggtacacgctactctcaccatctctccactcccattgcgtggtatcttattctggtattagtctgctcgaggcaaagcttacccatgacgaggtatgtgaccagttaaaaggtcctcgatcatcaagtctacatcgacacggtccttaatcgactcagacggagacactacaccgagactcctttctcgtgcaagtcaactgcctggtctcagcttaattattacaacccaaattttggtacctagcagaggtacatcttttccaaatgttgaatccatcaaggcctttgacagattcaccatcaagttttattttcgaaaacattcccacccacttttgccacatcatcttttgtaaaacaaaacattttgtttttctaaagcaaggctaagcatcaaaatctttttgtaaaacgggtgatcaaggaaggtaatcaaattcaaggaaggtaatgcaggaattgttttagcaatcaactcctatcacctaatgcatcaagcaagtgaaaaagatttttaaaacacaaggaggtgacaaatgcaccggggcttgcctgagtaacactaggttagtgttgttagacaacgttcgcttgacgagcagcctttgtcttggtacttgatcgggttatccatctgcatcatcctgcgggttagcccgggcttggggtcgacttggcttgtcttccgcatcacgcgattatttaacgtaccgtttcaatagtcgactcaaatccgcgtgatcggtagtgattttccgatccaggcaatttatcgagcgcttggggaatatcgcgctgctagcttcgtcttcacccgatttttgggatttcttgctgacgcacggatcgacgacgatcttcgattgaaatcttcgaccgagcacttgataaacgatgcacaaggacctcgcttatttttgtctaatgtccgggattcggggttcgacgagatcgagcagagaagaacgaggttcgacaagctcgacgacgatacgagagggtgacgtatgtagagctgtaggtctggcgagctgacgcaagtgacagagacagccgcgtatggcagcagtgcgtcgacagtctatgaatttaggtgttttatcg

SEQ ID NO: 140470 - DNA, 283 bp, Zea mays
  Clone ID: MRT4577_59592C.1
cccacgcgtccggggatgaaaacctgtaagatagacaaaaaaaaaaaaaaaaaaaaaaaaaaaaaaaaaaaaaaaaaaaaaaaaaaaaaaggaaaaaagtataaaaaaaaaaaaaatacaaaaacaaaaagctgtaaaatagatgaaatctaatttaaatttcactggcctgtagttttacaacctaaaagatctggggggggccctgtttttgggaaccttgttttgtcttccgggaaatgcccctttttgcttttttttttttgccccctggtttaatttc

SEQ ID NO: 140471 - DNA, 694 bp, Zea mays
  Clone ID: MRT4577_59593C.1
aatacaaatcacacacaccaatattattgcagcgggaatcttactaccaaattttacaagttacaaaaattttatattagtttatcagagtgattacaaaagtataagtttgaaatatatgctagctcaagggatcatcctcaataagaagtatagaagggttacttagacttataagaaggccgagcccaccggcacttaacaccatcaacaatagcacaaagttagaacctgagtaacactaggttagtgttgttaggtgacgtccgcttgacgagtattcttcgaccgagcacttgcttgatttaaccatctttaggttgattcatcagcttcagcttgcagattagcccgcgcttagggtcgacttgggtcgtcttccgcatcgcgcgatcaattaacgtaccctgactaattcgacgcaatagtcgcaagcacgactacgggttccggttgacgtcatccaggagccttcttttctttggtaatcaattgctgaagatcttttcttcgattgaataattttgacgaattgaacttgagtcgcgcaggatgtccgagctttttggtcgcgcacttggtaaatatcacgctgctggcttcgtcttaattcgattcaaagaatttttgatgacgcacggaacgacgacggcacagaagggtgacgtatatagagctacacacgcgacacaat

SEQ ID NO: 140472 - DNA, 1042 bp, Zea mays
  unsure (1)..(1042): unsure at all n locations
  Clone ID: MRT4577_59594C.1
cgcccgtgcgtccctctcacgcagtgcgtccctctcacatcgcgccgccactccggtcgcgccgccaccttccctctccctctcaccgatccacggcgacgagctactgccgctctgccgctactgccgtctcatacgtacgaagacgagcgagggcagctactgccgctctgcgtacgccgccccgtcatcccaccgacctcacgtgttccgatgcaacgcagctgttcaagaacaggcaaaacagacacctctccaacaccccagatctcctgttcaagaacttgctccaggctagagataattcggcacgaagcactaaggacgaggtttcagttgtcaaaaagagtccaaaatgaggaagttcccatggcagaggaagctctggcggtaaacattaaccaaaccaatttaatcagttggaaatttgatagttctgatgaatagtctatgtaatccattaagctttaactgacttgtgtggaacagtgaaagctttgccataaacattttatgattttattgggtagttctataaattctattgtttgcatgcctgaaccttttccttctcgcagatgatatcacaatcatttaggcaggtcgttcttgatgtgaaagttggacccccttcatttgagaaaggtttagctgaggatattttgtctcttgtaagttctgtgtctcctttctagttttgcctagtgagtaatgacatgctttaaatagaatgtgttcttttctttaccgttcttgtacctcttggctcttcacatgtacctaccgtatctgtatcatattatcaaatttctagatcttaattgcaattactgtgcgctatgtacaggtcattcatcataataaagtgtttatgcacaaatgctttgactagctagtaaaattgttaattggttattttttcttgatcactttttgcttcagggaatgcatccatggcaagcttactgtgggcctatcagtagatatctagctagactcccctaatttgngtaatttatctctttctgggattccttatttc

SEQ ID NO: 140473 - DNA, 358 bp, Zea mays
  Clone ID: MRT4577_59595C.1
ccccgggcgaccaggagggatggaagcagttttgtggttgttcaatcccacatctttgggcttgggtacgtggctggctgcttatgttgtgcacaccgctgctaaatccgttcttgagcacctccttctatttgtaatcaagcttttgggtactcctgtcctgccctccagagtgaaagaggtctccccttttctggtcaaaatggttacacttgattatgtgtttctgtttacaaacagctggattgaatttctcttcactcagcatacattcctttatgcaatctctggtcctgtcgctttgtccttaagcgaattgagcttgctcaataccctcgtcgctttctttctccttttt

SEQ ID NO: 140474 - DNA, 492 bp, Zea mays
  Clone ID: MRT4577_59596C.1
gctaaactactgatacctggactcttttgcgcaggattgatttctcgtagcataactgtggtcgtcaaacactaagttgtgactaccctgcttaggatgtaaagtgtggaccgagtgccggggtgggcattgttaaattcatgaggacacaatgctagtggccaaagtgagaattatgctcttaggatgcacaaaccacaagactgctgctatattgactgttcaagagcacgaccagcatggccaagtgtggtctaattggcaagggagggatcattccccctattcatgactaaccaacaactttccatgctacactgggtcctacctggcctacatattcgtctacaggaaggaatcaagcttatcaaactgcactcatagctagggactaagagctgctatctatatcatggtacgacatgatctatatatcaatctaactaactctgaggtgatgaaattgcagattattcatcagatgtgggaaat

SEQ ID NO: 140475 - DNA, 193 bp, Zea mays
  Clone ID: MRT4577_59597C.1
gcttacccggcaaaaccaaaattattctggcgccaatttaaaacaaacgggcgttgattcagggcgcggaaagcctaaacaaacatgtaggcgcgtatatacccacatggcgggcggtttaaacccacaatttacgcgtttgcctttggacgggttggtgccaaaccatatccctaggccgactttggcaagc

SEQ ID NO: 140476 - DNA, 183 bp, Zea mays
  unsure (1)..(183): unsure at all n locations
  Clone ID: MRT4577_59598C.1
gaccgaccatggccaccggggccgacaaccgcgacggcatgggctaccagacccgcgncgggctccgactcgccgacgcgctctccttcccacccccattccccgccagcaacttcgacttctacccgctctccctccacgtcgcgctcagacttcttgccagcggcgcgggtggcgccactc

SEQ ID NO: 140477 - DNA, 2617 bp, Zea mays
  Clone ID: MRT4577_59599C.1
ctcgcgggtcgatacaagcctctaccccacgcgtccgcggagagagaggcagaggcaggcggccggtgcatgcatgccccgccctccctccgtgcgcccccgaagacctcctccgcccccggcgcggtgagctcgtgaccgcccggacggcacccgcctctgcggtttgaggctcgctgcacgcactccaataaaacaaaagaagcaaccatggcgtccatttccccggaggacattggcggggacgtcaatctgtccaagatcccggtggaggaggtgttcaagacgctgaaatgcgaccgcaaggggctgtccagcacggagggcgagaaccggctcaggacgttcgggcccaacaagctggaggagaagaaggagaacaacctcctcaagttcctgggcttcatgtggaacccgctctcgtgggtcatggagatggcggccatcatggccatcgcgctcgccaacggcggcggcagggcgcccgactggcaggacttcgtcggcatcgtctcgctgctcttcatcaactccaccatcagctacatcgaggaggccaacgccgggaacgccgcggcggcgctcatggccgggctggcgcccaagaccaagctgctgagggacggcaggtgggaggagcaggacgcgtcgatcctggtgcccggtgacatcatcagcatcaagctcggcgacatcatccccgccgacgcgaggctgctcgagggggacccgctcaagatcgaccagtcggcgctcaccggtgagtcgctccccgtgaacaagcaccctgggcaggaggtcttctcgggctccaccgtcaagcagggggagatcgaggccgtcgtcatcgccaccggcgtgcgcaccttcttcggcaaggcggcgcacctcgtcgacagcaccaacaacgtcggccacttccagcaggtgctcacggccatcggcaacttctgcatcatctccatcgctgccggcatgctggtcgaggtcattgtcatgtacccgatccagcaccgcgcgtaccgcgacggcatcgacaacctcctcgtcctgctcatcggcggcatccccatcgccatgcccaccgtgctctcggtcaccatggccatcggttcccaccgcctgtcgcagcagggggccatcacgaagcgcatgacggccatcgaggagatggccggcatggacatgctctgtagcgacaagaccggcaccctcaccctcaacaagctcaccgtcgacaagtccctcatcgaggtgtactccaagggcgtcgacagggacatggtgctcctctacgccgcgagggcctcccgcgtcgagaaccaggacgccattgacacctgcatcgtcaacatgctcgccgaccccaaggaggcccgcgctggcatccaggaggtccacttcctccccttcaacccggtcgagaagcgcacggccatcacctacatcgacggcaacggcgactggcacagggtcagcaagggcgctcccgagcagatcatcgagctctgcaacatgggcgccgaggccgagaagaaggtccatgccttgatcgacgggtacgccgaccgcggcctccggtcgctcggcgtgtcgtaccagcaggtgccggagaagagcaaggagagcgccggcgacccgtggcagttcattggcctcctgcccctgttcgacccgccgaggcacgacagcgcggagaccatccgccgcgcgctccacctgggcgtcaacgtgaagatgatcaccggcgctgtaccccccacgaggcatcatcagccaggcgctcatcttcgtgacgcggtcccggagctggtcgttcgtggagcggccgggcttcctcctgctcttcgccttcttcgccgcccagctggtggcgacgtgcatcgcggtgtacgccgactgggacttctgccgcatccaggggatcggctgggcgtggggcggcgccatctggatgttcagcatcgtcacctacatcccgctcgacgtgctcaagttcatgatccgcgccgcgctcaaagacaaggccacgggcaacaacgtccacaacaagtgatacgtttctctgggtgcttgtcgcggacggcgtttaggaacaaggactgcggcaagggccggcgatcgcgaggcacagtgggcggtagagcagagacactccacgggcctcaaccagctcgccaccacctcctcctccgaccttctaggcagcaaggactagcatgcagtccgagctcaccgaggaggcccgcaaaggtcgcaagatatacgtagctacagtcttctccggcgactagcccaccatctctagcgccgctgatgcggctgatctcgctggtctccagagaccgacggcgtccagcggtggccggaggagtcctgtgttcttcgtttccttaggtgtacttatgtgggttttggggtggcaagagagttttttttttgtgaactctggtgtatcggatcaagtgaatatgtacctacatgttgtgttcttaattctgcattgtacagctatacactatacaagggtacgggaatgctgaggtgtaacttccatgcaatatacttagttgtattcatctaatcatcaaactgccagcaactttttatttacttc

SEQ ID NO: 140478 - DNA, 363 bp, Zea mays
  Clone ID: MRT4577_5959C.1
gtataaatgtgaagttgcggcaattgagggtggaaagttgatggcaaatgctgatgcttgtgaattctggggtctctttggcggatttgcttctttaccaaaaaagacattttctgaacttaacgggaaagattctactttcactttaaaattgctttgtgtaaacaagggccaatttgcccctattgattgcgaaattcttaaaagggagctattagattcaacaaaatggtacctactagactgggggtctgaatttatgtctggatgggtagagaaacaactcttgaagaaaggaaaccaggcgggttaacttcttggggattactacgtggagggaaccggcaaaaatcttatattatt

SEQ ID NO: 140479 - DNA, 314 bp, Zea mays
  Clone ID: MRT4577_595C.1
cgtcctccgtgactccgtccaagccaagccatgtcccggttctcgctgtgccttgcggcggcgtgctgctgctgctgccttgcgctgctcctgccggcggcgcaaggccgtcctgacaccggcggcgaccatcgtccactgttctccgagccacacccacactccgatgccgtagagaagaaggcgacgccgtcgtggtcaccgcgtccgccgacggcaggtggcgtcgtcgtcacgcctgagctgcggacggtgcctgaaggcgcgaacccgctgcaccaccgcggcagtaccaccaggcacaggcaggagcg

SEQ ID NO: 140480 - DNA, 250 bp, Zea mays
  unsure (1)..(250): unsure at all n locations
  Clone ID: MRT4577_59600C.1
ccagccgtgagccatnatccatngcggcgaacaggaactactggtgtttctgcancgaccagtgcangagcgcgcanatggcggcggacgaggcggcggcggcgaaggccaaggccaaggccaaggccagggcggtgtcacgtggggccctgctgaccgccagggaagcggaaggcccgcagaggcgcggcaagggccgggccggctccgtcctggccctgggaccccaaggggggggtctcactcaagg

SEQ ID NO: 140481 - DNA, 3168 bp, Zea mays
  Clone ID: MRT4577_59601C.1
aaaaaaaaaaaaaaaaaaaaaaaaaaaaaaaaaaaaaaagaactacaccatctacgccgtgtccatcaccatccgcatcgtgctgggcttcctgctcgtcgcgctggtctggaagttcgacttcgcgcccttcatggtgctcatcattgccatcctcaacgacggcaccatcatgaccatctccaaggaccgcgtcaagccgtcgcccacccccgactcgtggaagctcaacgagatcttcgccaccggcatcgtgctcggcacctacatggccatcatcaccgccgtcttcttctacctcgcccacgacaccgacttcttcacggacgtgttcggcgtgaattcgatcaaggagaacgacagggagctgatggcggcgctgtacctccaagtaagcatcatcagccaggcgctcatcttcgtgacgcggtcccggagctggtcgttcgtggagcggccgggcttcctcctgctcttcgccttcttcgccgcccagctggtggcgacgtgcatcgcggtgtacgccgactgggacttctgccgcatccaggggatcggctgggcgtggggcggcgccatctggatgttcagcatcgtcacctacatctccgctcgacgtgctcaagttcatgatccgggcatggcgatggggatgccgccatgggcaaaggccgccacaacaagtgatacgtttctctgggtgcttgtcgcgggcggcgtttaggaccaaggcagcgacaagaccggcccccgaccctgagccacctcgggcgggacaagacacacactcagctggccgccaaccgcctcgaccagcacctgctgctccgaccttctgcgagggacgcactagcatacagcccggacgcaccggaggaggcccgcaaaggccgcctcgccgaccccaaggaggcccgcgccggcatcaaggaggtccacttcctccccttcaacccggttgagaagcgcacggccatcacctacatcgacggcaacggcgactggcacagggtcagcaagggcgcccccgagcagatcatcgagctgtgccggatgagcaaggatgccgagaagaagatccacgccctcatcgacggctacgccgaccgcggcctccgctccctgggcgtgtcgtaccagctggtccccgagaagagcaaggagagcgccggcgagccgtggcagttcatcggtctcctcccgctgttcgacccgccgcggcacgacagcgcggagaccatccgccgcgcgctccacctgggcgtgaacgtgaagatgatcaccggcgaccagctggccatcggcaaggagacggcgcggcgcctgggcatgggcagcaacatgtacccgtccaccaccctgctgggcgacaacaagaccggcgagatgggcggcctgaacatcgacgagctgatcgagaaggccgacgggttcgcgggggtgttcccggagcacaagtacgagatcgtgaagcggctgcaggaccggaagcacatctgcggcatgaccggggacggcgtgaacgacgcgccggcgctgaagaaggcggacatcggcatcgcggtggacgacgcgacggacgcggcccggagcgcgtcggacatcgtgctgacggagcccgggctgagcgtgatcgtgagcgccgtgctcaccagccgcgccatcttccagcgcatgaagaactacaccatctacgccgtgtccatcaccatccgcatcgtgctgggcttcctgctcgtcgcgctggtctggaagttcgacttcgcgcccttcatggtgctcatcattgccatcctcaacgacggcaccatcatgaccatctccaaggaccgcgtgaagccgtcgccgacgcccgactcgtggaagctcaaggagatcttcgccacgggcatcgtgctagggacctacatggcgctcgccacggcgctcttcttctacctggcgcacgacaccgacttcttcaccaacgccttcggcgtgcggtccatcaaggagaacgacaaggagctgatggcggcgctgtacctgcaagtgagcatcatcagccaggcgctcatcttcgtgacccggtcccggagctggtccttcgtggagcggcccggcgcgctgctggtgatcgccttcctggcggcgcagctggtggcgacgtgcatcgccgtgtacgccaactgggagttctgcaagatgcagggcatcggctggggctggggcggcgccatctgggcgttcagcgtcgtcacctacttcccgctggacgtgctcaagttcgccatccgctacgcgctctccggcaaggcctggaacaacatcaacaacaagacggccttcaccaaccgcaccgactacggcaagggcgagcgagaggcgcagtgggccacggcacagaggacgctgcacggcctcaaccaggccaccgccacctccgacctcttcggcgacaaccagggctaccgcgagctgtcggagctcgccgagcaggcggccaagcgcgccgaggtggccaggctcagggagctgcacacgctcaagggacacgtcgagtccgtcgtcaagctcaagggcctcgacattgacaccattcagcagagctacaccgtgtaaactcgactcagtttttttatttgcttttttttgcagacaaatacaaaccacacacatatatatatttgtaaagattcgttcgtattttcattttcaccgggaagatttgtaactgtcctcctccctccttgtaagttgctcctgtaaactcttcctgaattcatggcgtgtcgttgtagcaatcaccacttcctccctgtgaatgcccacagcgtgtcttggtaaaagcatgtatgtatgaatattggagtatatgttactactcagctccacgaaaaagcatctctagcgccgctgatgcggctgatctcgctggtctccggagaccgacggcgtccagcggtggccggaggagtcctgtgttcttcgtttccttaggtgtacttatgtgggttttggggtggcaagagagtttttttttgtgaactctggtgtatcggatcaagtgaatatgtacctacatgttgtgttcttaattctgcattgtacagctatacactatacaagggtacgggaatgctgaggtgtaacttccatgcaatatacttagttctattcatctaaaaa

SEQ ID NO: 140482 - DNA, 624 bp, Zea mays
  Clone ID: MRT4577_59602C.1
attccctatttcaatcagccgcattctcaacttgtctatctcgacccctggcggagtccgcgacactatgacccaatctacggaaagaacggagtacgatgtcaacccataggaggacagccaggactactcctcccacatcaattgctccgcgaagatgaagctcgctgagagagatgacattgtcaagactgccaggttcgaggagattcctccatatgatcctgattgcaactacgtcaggactgcctctgttgaaaagaagatctactatatatgaaggaatcacagcggtggaatttattaagatctaagcagcacagattagaaatgtctatcgcgcaacgcacttctattatagcaggtgctgctgagagcacgcaacatgctggaacagctgcataatatggtgatcatcgatgataatcccgaagcagaacttctcatcaacaatgatgctaggagggatctggacccacaggctggaagggtcacagcttaagcaggatcagtgtcgtctgttgtttatgaggagaaaggtccgatggtggataagactgagctctattggctctatctgctccaggaatgtctagttcatgaggactatataggtcattgcat

SEQ ID NO: 140483 - DNA, 113 bp, Zea mays
  Clone ID: MRT4577_59603C.1
gattactatgatctccataattccatccattccgtagaaatttacacatcatcgacgggtttcaattcaaacagacccgtcccccactaaaaaacaccttattctgactctat

SEQ ID NO: 140484 - DNA, 2076 bp, Zea mays
  Clone ID: MRT4577_59604C.1
gcagcggaaatcttattaccaaattttacaagttacaaaaattttacattattttatcggagtgattataaaagtataagtttgaaatatatgctagctcaaatgaccatcctcagtaagaagtatagaaggagtacttagacttataagaaggccgagcccaccggcacttaacaccatcaacaacagcacaaagttagaacctgagtaacactaggttagtgttgttaggtgacgtccgcttgacgagtatccttcgaccgagcacttgcttgatttaaccgtcttcaggttgattcatcagcttcagcttgcagattagcccacgcttggggtcggcttggttcttcttccgcatcacgcgattatttatcgtacctcatgagatgcatgatgcacatgtatgagcacatgtataacgagtataatatagataatctacgctaaaaagcatgaaacacttaaaaccaagcattaagcaccatggatatcacagcaggacagcgactatatccattaatcaaattgacatattacactagaaaatctatttttattcttagctttttattaactctctaaactgtgtaacttaattagttgatttagcgagctatctaaatcaatcatcacaatatacgcatgctaaattaataatatttattgtgaccaacaattctatttaatctatttatagacctagttaatgggaatacgaaccaacttaccctgactaattcgacgcgatagtcgcaagcatgactacgggttccggttgatgtcatccaggagccttcttttcttcggtaattaattgctgaagatcttttcttcgattgaataatttcgatgaattgaacttgagtcgcgcaagatgtccgagctttttggtcgcgcacttggtgaatatcacgctgctggcttcgtcttcactcgattcttggaatttcttgatgacgcacggaacgacgacgacacaggagggtgacgtatatagagctacacacgcgacacgatgacgaacgacgctgaccagcggaatcgatgacgcgatgagaattaaggccaagcgagccgagaggacgcaccggcgagcaggaaaaagactcgacgcgggagtttgacacgcacgcgaagcctattaccagcgacaacactatgatggcgatatgagcgaacgcgaatcggcgcgggccaaacaccggataaccatggcagcgacttgggcgagatccgaactagagcagcagcacaccggcaagtatggacggctggcgaactccggtttaggtgaatggaacgcgacacagggagctggtgcgcacgtagggactcgacgacggacagcggccatggatgacgtgtcgcgcggacggccgagcgggacatgaactggacagaaccgagcgcgcaggctccacggcgaaccgagaaaccggctacgcgcagggacagaggaccgcgcacgcaaggcgagcagcaaggcgacggcgcgcaggaacgggaagcctcgacagggcgctgtacggaggagttcggctgggactcggcagggaggagacctcggctgggggcttggcgcgcggcgaagcagacagcagagggagctcgcggccatggaggaataggggtgcgacggcaaggagctggggtcaagcagccggcgaccatggggaacagggccggccgagctggagccagggaccgctagggagggagctcggcgaactactcggctggctgggagaagacgcgcgaccaccagggggctctgagccgtgcgcgagcgagcagaaaacgggagggcgcgccatggagcagggcggtgaagatctggcggccggcgtgcttgagcagagagcaggagtaaggacgaccagagaagtaccgagcgaggccaaggaaattggtaggaacgaccagcgcgcgccagggaagacagagggagcagggcgcggcgtggccatggggagagggagagctcggcgagctcgcggctggggaggggctgggaggccaagcgccatgggagatggcgtggggagctcccacggccaagaatctgcgtacgatgag

SEQ ID NO: 140485 - DNA, 303 bp, Zea mays
  Clone ID: MRT4577_59605C.1
aagacaacttgaatcattgattcttgaagatatcgagcttctttcgcaccacagggagggggaggtcttgcaactgcggatcaagcttcagctgctgctcaagctgcaagcgcggcccgaagtaccctcacctggaggtgactagcacctacaggcagtcctccgtcgtgctcacattctaccccaataagaaaggcacgcccggattcgttgaggcctgcaaagcgtttatgccgagctcctatttctggcagtgatgaagctgctgcaaaagatggcgacacggctgctgatcacatgaaa

SEQ ID NO: 140486 - DNA, 1740 bp, Zea mays
  Clone ID: MRT4577_59606C.1
gacaccaatagtttgcagcggaaatcttattaccaaattttacaagttacaaaaattttacactatatttatcagagtgattacaaaagtataagtttgaaatatatgctagctcaagtgaccatcctcagtaagaagtataagggagttacttagatttataagaaggttgagcccaccggcacttaacaccatcatcagcagcacaaaactatgacctgaaaaacaacagggaataaaaccctgagtacaaaattactcagcaagacttacccaactaaagaaaagactctcaagctaagggtatgctggatttgggaatcaaggaaaagttttagcaagaatcaaattagatacttttgcagaaatagcttactaaagtgagtccttactttcaatattttaacgccagattaaatattaatagactatgtttgcatctggtctaatttcaccatctcatcaatacaacatcatttttattcatgaggttcacatcctgacttcggttgcaggtcagtgaccaagtcttcatgtccgagaagtaacggcgatccgaattgattaatacccagctaaggatctccaaccacacgacatatgtagcacttaacccttgcatatgtcaacttgccaccaggtttctcaagaccagaccgggttcacaccaatcgagagcacagatacaacaccgtccagcctcttggcacaaagggaacacgctactctcggcatctctccactcccattgtggggtgggctttcttgtattggtccgaccatggcaaagcttacccatgacgaggcatgtggccagtcaaagggtcttcggtcagcaagccacatcgaacgatccttaagcgatcaacaaggaaatacatcgagatttctctctcatgcaagtcacctgcctggtctcgtctttatcatttacaacccaaagtttggtacccccgggctgcaggaattcgagcttatcgataccgtcgacctcgaggggggacccggtacctgtcagaggtacatcttttccgatgttgaacccatcatggccttgatggattcaccatcaagtcttttctttgaaaacttcccatcccatatgaagcatcatctttgtttaaaaacattttgtttctagagccaagcctaaacaatcaaagaacttttaaataaaataggtatccgaggaatggtaaacaagttccagggaggaaatgtagcaattgttttaagcacacctactcctatcacctaatgcatcatttcaagtgataaagagtttaaaaccaccaggaaagggtaaatgcaccggggcttgccttgtgttgaaggaggttctgggtctgtcccacagatgtcaaaatagaagttgttctcaaccggtggattctcagcttgcgggacaacttcttcctcgactacatcctcttcttcattttctggaggtggctggccacggcaggacgtctcaccgcggcacagacaaccgattcggggaaaaatccgaattagggcgctacggtggacgatcgggagcgaggagtggttcacagggttcgtaacaactaggcggaacaggtcgaggcatcaatttatagaggaaggccgcgaggagggcgaatttgaatggagaagcgctcacggtgagaagggggaagagtcactagagttcgctaatgtggcgttcactcgttaacggtctacggcggtcactgccgagtcttcacagcttgcagg

SEQ ID NO: 140487 - DNA, 219 bp, Zea mays
  Clone ID: MRT4577_59607C.1
gagtttagctctaataatgctttatatatgaagtgaacttgttggcagtgcagttttataactaaactcttcatatataaagcattattgttactctattgaggcgaatataatttatattacaatgtaaaagcttctttaatactaaggatttttcgaggcttcaccaagtatcaaagtaataacacaaatgaagtgtcattattcaaaatagtcccc

SEQ ID NO: 140488 - DNA, 1151 bp, Zea mays
  unsure (1)..(1151): unsure at all n locations
  Clone ID: MRT4577_59608C.1
ggccgcttttttttttttttttttgcaagttacaaaaaaattatattattttatcggagtggttacaaaagtataagtttgaaatatatgctagctcaaatgaccatcctcaataagaagtatagaggggttacttagacttataagaaggccgagcccaccggcacttaacaccatcacagcagcacaaggttagaacctgagtaacactaggttagtgttggttaggcgatgagcacttgatgaccactctttgtcttggcacttgttaggtcatccatccttgggttcatccttcagcttcaccatgcggagtagcccgcgcttggggtcgacttgggtcatcttctccgcatcacgcgattatttatcgtccataattaactcgagctgaagttgcgagatcaacgatgatcctatggacgaggactcggatttgaagggccacgcggcaaaattattggaacggtggagtcttggatgtnggttgttgtcgaggcgattgacgactggttcgagctttttgtcgcgcactcggtgaatattactcggctagcttcgtcttcacccgacgcacagaacgacgacgggattatgtctggagcgagctgacgaagtggggttgagcagaggatgacgggtttgacgactcgacgccaaaacgcgaaccccgccagaaacccgatggatgaggagtgagcgcatgcggggcgagcagcacggatttgaagcgtagagaaatcaccaacagcgagacgaacagaacaaggtgtggtcgcgaacttaatggcagaatcggcggtagccgatgccagagcccacggcgagggagtttcgcagtttgtcgaggccgtggctgggcgaattttatggacaacaagccggcgatgcgggagctcgacacgctgcgcgcggcaaacaaagaaagagtgagctgcagcaaagggccggaccgagctcgcagcggatccgagctgggggctgaagtgagttgctcggcagggatttcggacgcgcgaccagtgaggcgatggccggacttggggaaagctgggcgccgaggacaggcttcaagctgagcgcgcacaggggagcttggggcgccgagcagggagctgggcggtcgcgaccaggaagagggcaggggtgag

SEQ ID NO: 140489 - DNA, 455 bp, Zea mays
  Clone ID: MRT4577_59609C.1
cgcgctcgcgggagctggctatcgtccgatcccgagagatctatgattagcgcattccagaccacctgcatcgatccttcatgaccagtgtatggtctataccaaaagcgtagctcacgtgtctccgagaggagaggaatgagatgaggtagtgcatcaacatgcacatgccggcaggaccagctacaagtagtctgcacatgctaccaactttactgccttgagcacggcattcagcctgatggaccgcgcctgaagatcgagactgcgacattatgatgatgacttcagtaccttctgcagtacgactgttgctgcaaaacacgctcaccacgcagtcttcacagagctagaacacactcgccgcgatgaggggcgcactcgcacactccatcgactctaccttcctggacagatgatcacagacacgcactgtgcagctaacagttgcaccc

SEQ ID NO: 140490 - DNA, 759 bp, Zea mays
  Clone ID: MRT4577_5960C.1
tgcttgcgccacaaccagacggcaggtaagggaggaggaggagagcggcggcgaagatggtgtcgctgaagctgcagaagcgcctggcctcgagcgtcctcaagtgcggcaagggcaaggtctggctcgaccccaatgaggtcaacgagatctccatggccaactcccggcagaacatccggaagctggtaaaggatggtttcatcatcaggaagcctcagaagatccactccaggtctcgtgcaaggagggcacatgaggccaagcagaagggccgtcactctggatatggtaagcgtaggggtaccagggaggctaggctccccaccaagatcctgtggatgcggaggatgcgcgtcctgaggcgccttctgcgcaagtaccgtgaggccaagaagatcgacaagcacatgtaccatgacatgtacctgaaggtcaagggtaacatgttcaagaacaagagggtcctcatggagagtatccacaagtccaaggctgagaaggcaagagagaagaccctctctgatcagtttgaggccaagcgcgccaagagcaaggcaagcagggagaggaagcatgccaggagggaggagagattggctcagggccccagagatcatgcaccagcaccagcggctgcagctccagctccagcagcagcggcaccaaagaaggccaaggccaagaagtgaaggtctgacatgaagctttagctttctggtattatgaagggttagcctgattttggagcatctgaag

SEQ ID NO: 140491 - DNA, 686 bp, Zea mays
  Clone ID: MRT4577_59610C.1
gtagcggaaatattattaccaaattttacaagttataaaaattttatattattttatcggagtgattacaaaagtataagtttgaatatatgctagctcaagtgaccatcctcaataagaagtatagaagggttacttagacttataagaaggccgagcccaccgtcacttaacaccatcacagcagcacaaggttagaacctgagtaacactaggttagtgttgttaggtgacgtccgcttgacgagtatgcttcgaccgagcacttacttgatttaaccatcttcaggttgattcatcagcttcagcttgcagattagcccgctcttggggtcgacttggcttgtcttccgcatcacgtgattaattaacgtaccataattaaatccggcttgaaatcgtgaaatggacgatgtctttcagctctaacttttcccctgaatacacggtgagtgtcgcatcgaatcacacttcttcttccacatcgagaattttcccgccacgtactaatttgttttcctccgcgtctaatcttctcggatctttagtgtagacgaggatggcgattgacggcattgacgtgccagcatgacgatgcatgacgacttgttggtgttgatgtgcaggaacgctgcgtcggcgtactgccggtggcgacgacggtcgggcactagggactggggcgc

SEQ ID NO: 140492 - DNA, 1469 bp, Zea mays
  Clone ID: MRT4577_59611C.1
cccccctttttttcttctgtttgaccagcaaaattaaagttcgtaatttttgttgcagcggaaatcttactaccaaattttacaagttacaaaaattttatattattttatcggagtgattacaaaagtataagtttgaaatatatgctagctcaaatgaccatcctcagtaagaagataaagactgggtatacttatataagaaggccgagcccaccggcacttaacaccatcacagcagcacaaagttatatcctgaaaaacaacagggaataaaaccctgagtatggaattactcagcaagtcttacccgactaaggaaaagactctcaagggtatgctggataaataggagtcaaggagaggctttagcaagaatcaacttagatacttttgcagaaatagcttactaaagtgagtccttactttcaatattttaacgccagattaaatattaatagactctgtttgcatctagtctaattccatcatctcatcaatacaacatcatttttttatccataatgttcacatcctgacttaggttgtagggaagtgaccaagtcttcataaccgcgaaggtacggcgatccgaatcaattatactcagctgaggatctccgatcacacgacatatgtagcacttaacccttgcatatgtcaacccgccaccgggattcttaagaccagaacaggttcacgcgaaccaagagcacagatacaccaccgtccagcctcttgccacagagggtacacgctactctcgccaccgctccacgcccattccgtgttatcttattcttgccttagtctgcccgaggcaaggcttacccatgacgaggcatgtgaccagttaaagggtcctcgatcagcacacctacatacgcattcaatccttaataaacctgggtagaacatcacctattcctagcccaagttccgatttaagtacttccatccttaggattgtttgtgttccttaggacgaaaagagcatcacagggaactttgcagtaagatcccaccatgctcccaatgaaaatatattctagcaggtagaagccatccttcctcaggataacccctgagctatgcagtattgcaaaggacaaactctatctgcctataagcagggctaagcatttttttgtaaatcataattttgatacttcaccagaagtatctatataggtatggatatcaaggtaggcaatgcatcaaagggtttccaagcaactcctataaacctaatgcacattcactagacttaaagtgtgtaaaaattatttaaaaacacaaggaaggggttgcatgcaccggggcttgcctggataacactaggttagtgttgttagaagtcgtccacttggcaatcatcttgcgaattagtccacccgttacgtcatcttggcctcgactcagctttggttctccgcatcacgtggtcaataaacgtacctaaatgattt

SEQ ID NO: 140493 - DNA, 710 bp, Zea mays
  Clone ID: MRT4577_59612C.1
ggccgcttttttttttttttttttgttgcagcggaaatcttactaccaaattttacaggttacaaaaattttacattagtttatcggagtgattacaaaagtataagtttgaaatatatatgctagctcaagggatcatcctcaataagaagtatagaagggttacttagacttataagaaggccgagcccaccggcacttaacaccatcaacaacagcacaaagttagaacctgagtaacactaggttagtgttgttagtcgatgagcacttgacgaccatcttcaggtttgtccatcagcatcgccttgcgaagaagcccacgcttggggtcgacttggctcgtcttccgcatcacgcgattaattaacgtaccgtttcaatagccgactcgaatcctcgagatcggtagtgattttccgatccaggcaattgtcgagcgcttggggaatatcgcgctgctagcttcgtcttcacccgattcttgggattcttgatgacgcgcgggacgataacgagattgtatctggagcgagctggcggggtagggttgagcaggggatgacgggttcaacgactcgacggcaaacgcgagcacgcacaaagcccgatgacaacgggaatcgagctcgtgacagaaagtgatgacgacgcggcacgacaagttggaacatgaacgcatcaacatggggctggattcaacgcgtgag

SEQ ID NO: 140494 - DNA, 2463 bp, Zea mays
  Clone ID: MRT4577_59613C.1
gcagcggaaatcttattaccaaattttacaggttacaaaaattttactttgtacatgatcggagtgattacaaaagtataagtttgaaatatatgctagctcaagtgaccatcctcattaagaagtatagaagagttacttagacttataagaaggccgagcccaccggcacttaacaccatcaacaacagcacaaagttaaaacctgaaaaacaacagggaataaaaccctgagtatggaattactcagcaagtcttacccgactaaggaaaagactctcaagggtatgctggatttgggaatcaaggagaggctttagcaaaaatcaacttagatacttttgcagaaatagcttactaaagtgagtccttactttcaatattttaatgccagattaagtattaatagactctatttgcatatggtctactttcaccatctcatcaatacaacatcatttttattcataatgttcacatcctgacttaggttgcaggtcagtgaccaagtcttcataaccgcgaaggtacgacgatccgaatcgattatactcagctgaggatctccaatcacacgacatatgtagcacttaacccttgcatatgtcaactcgccaccggggttcttaagaccagatcaggttcacgcgaaccgagagcacagatacaccaccgtccagcctcttgccacggagggtacacgctactctcgccaccgctccacgcccattccgtgttatcttattctggccttagtctacccgaggcaaagcttacccatgacgaggcatgtgaccagttaaagggtcctcggtcagcaggccaacatacgcatccaatccttaatcaacctgggtagaacatcacctgttcctaacccaagtcccgatttaagtacttccatccttaggattgtttgtgttccttaggatgaaaagagcatcacagggaactttgcagtaagatcccaccatgctcccaatgaaaatatattcttgcaggtagaagccatccttcctcaggataacccctgagctaggcagtattgcaaaagacaacctctaaccacaagatctaagcagggctaagcatttttgtaaatcatattttgatacttcaccagaagtatctataaaggtatggatatcaaggaaggcaatgcatcaaagggtttccaagcaactcctataaacctaatgcacatttcactagacttaaagtgtgcgaaaattatttaaaacacaaggaaggggttgcatgcaccggggcttgcctgggtaacactaggttagtgttgttagacgacgtccacttggcgaccattttcaggtttgtccatcagcatcatcctgcggattagcctgcgcttggggtcgacttgggttgtcttccgcatcgagcgattaattaacgtaccgtttccacagctgacacgaatccacgagatcggtagcgattttccgatccaagcaatttgtcgagcgcttagggaatatcgcgctgctagcttcgtcttcacccgattcttgggatttttttactgacgcgcggaacgacgacgagatcgtgtccgagtgaattttatgacgcggactggggaaggacttggcgataacaatgagctggagcgttggtgagcttgaaaattcaatggcgaaatcggcggcgaatagagagcttcgcgcgtggccaacagagaatttgcgcgcagaggaacgacaaggctgagcgcgcattagggagaaacgccggctgaagacagaaccgagctgggacttccacggaacggcacgtgggtggattccatggccagagcgagcactgctgaaggggaccgagctcgacaaaggcgcgagcgagcagagggcaaaacgcgggggaaaactggaggggagcttggcggccatggctggagcgccgcagcgcgcgacgctgggagatcggcatggcgcaggcgcgcagggaacttcacggctggaaggagaccagagagagagagacgcggtgcaggggagcttcagggaagaacggcgccatgggagcttcgacggcggctatggatagcgaaagctgtgcgcggccagccgaggagcaaggacgaccgcggtctggcgagctggaggccaaggtataaccagaggagcttggcgagggcagagcttcatggctgcacgatgctgaaacgaccaggcgaggtcgaccactgcaggggcggcagccaagcacgacgagcagggaagtacgcccaagaaaagctgagcacggagggagaagaactggagcgtgctgaggaggcaactgttgcgcgcctgccgttcaggcatgagatgaagatggagctcgatggagctggagaggctgagctggtctcgtcgggtaggagaaaaggcgtggacaacatgcgtatatgatgaaaatatcgcgtgaggagcggagttcgtcccggccggcctcgaggtaccc

SEQ ID NO: 140495 - DNA, 431 bp, Zea mays
  Clone ID: MRT4577_59614C.1
attcaaaaaccacaaaaaacttgagcaaaacccttacaaaagataatcagataagtagaatcaaaaaaacaaaactgtttttggcaacccaaattgccttaccccaacccactacaccatttttttttaaaaaaaacaaaaaactccttccctcccccccagctcaagcgaaaaccaaaaagaaaccctctaccccaccgcctttataaaaaagcaaatccctccaaaaaaaaaccgacaggccaatgtagcgaactttaaaacacacaaccgccccagtaaacttcaaaccctgtgctggcttcctaaaacccgtagtgggcaagcttgtagggaccccctatccgcacccttatttattccgcccgaaacttggtgaacttggtcaacttggcaccaaacttgcccaaatggaaaacaaaaaccttttc

SEQ ID NO: 140496 - DNA, 143 bp, Zea mays
  Clone ID: MRT4577_59615C.1
atgtaaaaaaaaaacgcagggtagaccaatcggtgaatgaacgggattggaacttaactgagatactagatgaaaggattggattattgacacatgcacaataaaaagaacatggttgaattagggatcatggcaaaattatt

SEQ ID NO: 140497 - DNA, 873 bp, Zea mays
  Clone ID: MRT4577_59616C.1
ctctcacctttttctttttctttttatttcctattcttttctttcaaattttcaaattcctatgtgggcagtaactcttccagttattgggcccacatgcacctgtccttgtcccaaagacctcaaacgactatgcgggggcaccagataacttaacaggatctgtccgattgccccaaggacatcggataaaccacttacaaccagaaccgcgggattaagtaacacaaatcacacacaccaatattgttgcagcggaaatcttactaccaaattttacaggttacaaaatttttacattattttatcggagtgattacaaaagtataagtttgaaatatatgctagctcaagagatcatcctcaataagaagataaagacggggtatacttatataagaaggccgagcccaccggcacttaacaccatcacaacagcacaaggttagaacctgaaaaacaacaggggaataaaaccctgagtatggaattactcagcaagtcttacccgactaaggaaaagactctcaagggtatgctggataaataggaatcaaggagaggctttagcaagaatcaacttagatacttttgcagaaatagcttactaaagtgagtccttactttcaatattttaacgccagattgaatattaatagacattgtttgcatctagtctaatttcatcatctcatcaatacaacatcatttttatccatcgtgttcacatcctgactttaggttgcagggaagtgaccaagtcttcataaccgcgaaggtacggcgatccgaatcgattatactcagctgaggatctccaatcacacgacatatgtagcacttaacccttgcatatgtcaacccgccaccggg

SEQ ID NO: 140498 - DNA, 315 bp, Zea mays
  Clone ID: MRT4577_59617C.1
tttgggctggtttatgtgcttgggaaatttcagttgttacactctatgactccactcctattaagttgagggaaggcgacgagtgacggcgtgtggtgcggcgcttgtcaacggtggtctggctgtgggtaagaagaatgggctggcccttcctatcactgatcgtattaagttagcggaggataagactacggacgctgttctgtctcagaagccttcgtaggagtgtactaaggctgttggtagtaacgtcggtaattctcgtgatcttgctattacgctctgtgagaagattaaggctattgcgattctcga

SEQ ID NO: 140499 - DNA, 2544 bp, Zea mays
  unsure (1)..(2544): unsure at all n locations
  Clone ID: MRT4577_59618C.1
atataaattttgttattttaatttagttgtttcactactacattgcaactatcagtatcatgcagacttcgatatatgtcatgatttgcatggtctcatcattggagagcacgtgccacacctaccggtagaagtttcgtcgcacgtcgttagtcatcaggcacacaccaccatacacgcttgcttaaacaaaaaggcaagtgtgtgtaagggtagttttacttattattactaaggtttggtatttacttatacttagtaattgctaataaaatcttgaccaactttgctcagcttcaacctttattttgttgatcagccttacacttcacatgaactcccacctttggtgagttcatgcacattatttcccacaacttgttgagctatgatcatgtgtgagcttgagagcacctagagggggggtgaataggtgatcctgtaaaacttgaaaacttaagccacaaaaacttggttaagcgttagcacagtaaatgccaagtggctagagaggagtctcaacaaaacacaataaccacaagaaatcaatcacagagatggcacggtggttatcccgtggttcggccaagaccaacgcttgcctactccacgttgtggcgtcccaacggacgagggttgcaatcaacccctctcaagcggtccaaagacccacttgaataccacggtgttttgcttgcttttctcaatcccgtttgcgaggaatctccacaacttggagcctctctgtggcagaacctcccaagctattgggcccacatgcacctgtccttgtctcaaagactttagacggctatgcatgtgcaccagataacttaacaggatctgtccgattgcccaaggacatcggataaaccacttacaaccagaaccgcgggattaagtaaacacaaatcacacacaccaacagtttacagcggaaatcttattaccaaattttacaagttacaaaaattttactttgtacatgatcggagtgattacaaaagtgattcaaagaaataactttgaactgatataaattatttgtagtttttgaaatatatgctagctcaagtgaccatcctcattaagaagtatagaagggttacttagacttataagaaggccgagcccaccggcacttaacaccatcacagcagcacaaagttatatcctgaaaaacaacagggaataaaaccctgagtatggaattactcagcaagacttacccgactaagaaaagactctcaagggtatgctggatctgggaatcaaggagaggctttagcaagaatcaacttagatacttttgcagaaatagcttactaaagtgagtccttactttcaatattttaacgccagattaaatattaatagactctgtttgcatctagtctaatttcaccatctcatcaatacaacatcatttttattcatgaggttcacatcctgacttaggttgtaggtcggagatcaagtctccactctccggggatataacggcgatccgaatcgatttactcggctgaggatctctaaccacacgacatatgtttctcgtaaaccttgcatgtctaccattcccacggatcctccacttcatgaacaggttcgcgccacccgagagcacaccaccctttttaggcggtcctttgccaggagggtacgtgccactctcgtcatctctccactcccagtgcgcgattgtcttttcatgtatggaatagccgggttcaagcttaccctgtcccatttccagggcatgtggctagttaagatagtccttgatcaacaggcctacatacgcatccaatccttaactaacctgggtagaacatcacctgttcctagcccaagtcccgatttaagtacttccatccttaggattgttcgtattccttaggatgaaaagagcattatagggaactntacagtaangatcccaaccatgctcccaataaaagtatccgtgcaggtagaggtcatccttcctcaggatcaacctgagctanggcataagtgcaaaggacaaactctatctgcctataagcagggctaagcatttttttgtaaatcatattttgatacttcaccagaagtatctatataggtatggatatcaaggtaggcaatgcatcaaagggtttccaagcaactcctataaacctaatgcacattcactagacttaagtgtgcgaaaagtatttaaaaacaaggaaggggttgcatgcaccggggcttgcctgggtaacactaggttagtgttgttagacgatgaccacttgacgatcatcctttgtcttcgcattgctccaattacccgtcttcagattaatccatcagcttcatcctgcggattagtccacccgttaggtcatcttggggtcgactcagctttatttgtccacatcacgtggtcaataaacatacctaaatgatttgcataatgcacatgaatgcatagcactgacttcattccacaactaaaattcctcgcataaaaatgccgatagcgcctaccggcaaagcactaaaattaccccg

SEQ ID NO: 140500 - DNA, 386 bp, Zea mays
  Clone ID: MRT4577_59619C.1
acaagctcgacacccacccagctcgctcgtcccagctgatcaggtcgagcacctagtagcgacctgctcgatcatcagtgtagagtgtcggtaggtgtctgtctctcttggtggctggttgcaacgggcatggctgacgtcgtttcgtcgggtgcccttgctgctggtgtgcctgggcgtcgctggtgtcctgctccttgagaccagccccatgggtccatgctcatacttaccgggagggcacggcggagctggtgacctaccccaggcggctgctgtcgctgacgctctaccgtacgtgcggctccgggttccagtcccggcacgagtacctgttcggcaagatcgacatgcagctgccgctgggggcggggactccaccggga

SEQ ID NO: 140501 - DNA, 142 bp, Zea mays
  Clone ID: MRT4577_5961C.1
caactacataatgatgacgttccattacttctatatcggtatcaaattaccccctgtacatcgacaggattgtcatcgtcacctggtgccacttatctcctcacctgcgatgcagtcgcagcatagtcctgatcctcatcac

SEQ ID NO: 140502 - DNA, 1585 bp, Zea mays
  unsure (1)..(1585): unsure at all n locations
  Clone ID: MRT4577_59620C.1
caccaacaatttgcagcggaaatcttattaccaaattttacaagttacatcggctttacattgtacatgatcggagtgattacaaaagtgattcaaaaaataactttgaactattataaattgtttataagtttgaaatatatgctagctcaagtgaccatcctcaataagaagtatagaagagttacttagacttataagaaggccgtgcccaccggcgcttaacaccaattacaatcaaaatgactcatgacctgcagcaacaatgggtaaaaccctaagtacgcaagtacttagcaagacttacccgactaaagaaaagactctcaagggtatgctggcttaagggagtcaaggtaaggcttatcaataatcaatgactctgtttgcagaaatgcttactaaagtggatccttaaaaatccaattttaatttgtcaggttaagtaagattacctataactagagttctttctaccctagttcaatcacttgacctgcactagccaatttcttaacaatcccttcatctttactggagttctacgtataagtcagtgacaaagtcttcataaccgcgaaggtacggcgatccgaatcgattatactcagctgaggatctccaatcacacgacatatgtagcacttaacccttgcatatgtcaacccgccaccggggttcttaagaccagatcaggttcacgtcaaccgagagcacagatacaccaccgtccagcctcttgcgacggagggtacacgctactctcgccaccgctccacgcccattccgtgttatcttattctggccttagtctacccgaggcaaggcttacccatgacgaggcatgtgaccagttaaagggtcctcggtcagcaggcctacatcgacacggtccttaatcgactcagacggagacactacaccgagactcctttctcgtgcaagtcacccgcccggtctcagctttatcatttcaacccaaagtttggtaactagcagaggtacatcttttccgatgttgaacccatcaaggccttgatggatccatcatcaagttttattttcgaaaacatcccacccactttgccatatcatcttttgtgaaaacaaaacattttgtttttctaaagcaaggctaagcatcaaaaatctttttgtaaaacagggatttcaaggaaggtaatcgaatccaaggaaggtaatgcaggaattgttttagtaatcaactcctatcacctaatgcatcaagcaagtgaaaaagatttttaaaacacaaggaggttgcaaatgcaccggggcttgccttcgtttataggtgagtcaggcttggatccgcagatgtcaaagtaaaaacaatttcctgcctgatgttccgcaggtggtggcggtgaagtcttctcttcttctacttcaacttcttcctcattttctaattataaccatatatatataataatgaatgccatgtaatgctcatgagagtgccaagataataagagtttattatctaaagtcttgaatacaactttccttcactgaactccgagaacttagggtttncggagtcaacagtgaagttcaaaga

SEQ ID NO: 140503 - DNA, 508 bp, Zea mays
  Clone ID: MRT4577_59621C.1
attcggctcgagcccaactgcaacaagttgcactaacgacgggcgaatgctacgaggtattttggttctcttatgattcatttaatctgttttaaatacttttagttactaaaactaaacagtgttgttttaaatacttttagttactaaaactaaacagtgtagagactaaaaatttagtctcctaactaaactttagtccctgtactaaagtaaccaaacaaccccttacttatccgacacttttgaatccctaggcatttggtaaatcggtagcaacagatgcatcacctttcttgcagattgacaaagcctccatgctggatgaagcgatcgagtacctcaaaaccctccagcttcaagttcaggtgacactaaaaccacctaattggaaatgtagcacggttctttcagatagatgcaaacataaatgcactgacaagatggtggctatctgacacgcagatgatggccatgggaagtggactgtgcattccttccatgctgc

SEQ ID NO: 140504 - DNA, 133 bp, Zea mays
  Clone ID: MRT4577_59622C.1
aaacaaatttctaacaaatccttgttgcagaaaacacgctgtgtggatatatactacctagaggggtgcatggctgaactgaatcaatgttaaacaacaacttctattaagatttcagagtttaagagaaagc

SEQ ID NO: 140505 - DNA, 1470 bp, Zea mays
  Clone ID: MRT4577_59623C.1
gggtacctcgagcgccgcccgggcaggtacgccggggggtgctccaaacaactgcactagacatctcaattaattagctaatgagcaagcggctgagctgcactcaagacaaactaccatggatcagtcaaacattagcaacaagcacatgacgatgacaaccctaatgctcctcctctgtgtcatagccattgcagattgcatttgccacgccgcagtggcagcccgggtggagccatccaccaccgtcggcagaactacaggaggagacgaggcgatgatgatggcgaggtacaagaagtggatggcgcagtatcgccggaagtacaaggacgacgccgagaaagcacaccgtttccaggtattcaaggcgaacgcggagtttattgacaggtctaacgctggaggaaagaagaagtacgtcctagggaccaaccagttcgccgacctgaccagcaaagagttcgcggccatgtacaccggtttgaggaaaccggcggcggtgccttccggggccaagcagatccctgcagctggttccaagtaccagaattttacgcgcctagatgatgatgtccaggttgattggaggcagcagggtgctgtcactcctgtcaagaaccaaggccaatgtggctgttgctgggcgttctctgcagtaggtgccatggaaggtttgatcatgataacgacaggaaacctggtctccctgtcggagcagcagattctagactgcgacgagtcagacgggaaccagggctgcaacggtggctacatggacaacgccttccagtacgtcatcaacaatggcggcgtcaccactgaggacgcctacccttactctgcagtccaagggacgtgccaaaacgtccagccagccgccaccatcagcggcttccaggacctgcccagcggcgacgagaacgcgctcgccaacgcagtcgccaaccagccggtgtctgttggcgtcgacggcggatcgagtcctttccagttttaccagggtggcatatacgacggggatggctgtggcacggacatgaaccatgcagtgacggcgatcggctacggcgccgatgaccagggaacccagtactggatcctcaagaactcctggggcacaggatggggtgagaacggtttcatgcagctacagatgggcgtcggcgcctgtggtatctccacgatggcctcctacccaactccatgaacacaaatcttcagataaagcgtagtatataccagtccatgcatatgactgcagaataaagcatggaagattaattacatgcgtgcatcaaggcatgctacgtactgtattaaaacttcggtactggccagatatatacacaaaggtagaatgtttgtgtgataatatagtaatgcttgtacgaatgcaaagaacatgacctttcaataataaataagattaggctaaaaaaaaaaaaaaaaaagcggccccacggtccg

SEQ ID NO: 140506 - DNA, 325 bp, Zea mays
  Clone ID: MRT4577_59624C.1
ctgtctctcattaccattagcattatctacttcatagcgcaaaagaaccccaagggcaccgggagggttttgctcgttgccctctctctcctggctcttactgcgagcgccatctcacacgcactcaaacgagtgttgctgttgccagacaccggcggcatttcatctaccaactacacgacactacacacctcatgatgacctgccacctaccatgcatctgccaccagcagtccacctgccaccaccattccacctatcaccacaggcacacgtaccgccgccggatcatctaacaacggcaccataccaactacataatcaa

SEQ ID NO: 140507 - DNA, 614 bp, Zea mays
  unsure (1)..(614): unsure at all n locations
  Clone ID: MRT4577_59625C.1
cccacgcgtccggaggccgccgccgtcaccgtggatgcgccgccatagtcgtcgttgttttcgtcgtcgttgttgtcgtgacgggcgtgggcggcaacatgcgacccacggatcatccaccgcgacatcaagtcggccaacatcctgctggacaacgacttcgaggccatggtcgccgacttcgggctggccaagctcacgaacgtgaaccacacgcacgtgtccacccgcgtcatgggcaccttcggctacctggcgccggagtacgcgtccagcggcaagctcacggagaagtcggacgtcttctcgtacggcgtcatgctgctggagctgctcaccggccgccgacccggcgaccgctcctcctacggccaggacggcctcgtcgactgggcgaggcaggccctgccgcgcgccctggccgacggcaactacgacgcgctggtagaccccaggctgcggggcgactacgacccgacggaggcggcgcgcgtcgtggccagcgccgcggcctctgtccgtcacgcggtgcgccgtcgtcccaagatgagccagatcgtcctggcgctgcaggggggcatgccgcttgaggacctcagcgacggngcgcccac

SEQ ID NO: 140508 - DNA, 311 bp, Zea mays
  Clone ID: MRT4577_59626C.1
ctgtgttggtttttttttttttttttttttttttcagggggacattttgtgatatgatcaaaaagacctggatcgccccccctagcttccgcgatctgccatcacagggaaaaagtctgctcacagaactgtttataattggctggacctaaccactgggggggggggggggccgccaccagggctggcccgtagcatgtgggtgacctcatagccttgtttggctccacccaccgtgcttaacttcctggggctgttcacgggcgctgggcgggttcctcctcctggaggggctggcgcggggattttcc

SEQ ID NO: 140509 - DNA, 266 bp, Zea mays
  Clone ID: MRT4577_59627C.1
aaaaaaaacaaccattttattttttcacataaaacaaccccgcccaaatcacaaactttttttaacaaaaccctttccttcacaccgtttgacccctaaaaaaaaaccccaatccaaaagtccccaacactttctatcccaggtaaaataaaccatcccatttgtttaaagttaagcctctcctctaaaacttctactcctttttttgaaaaccttccaatggaccctaaaattttttttcataaccccccccatttcactaattt

SEQ ID NO: 140510 - DNA, 267 bp, Zea mays
  Clone ID: MRT4577_59628C.1
gatcgtcaccccgggccttctcttactgtacatcgtcctaatcatactgggcgttcgcgggagctacctgatggccatcagcttctagaacaatcccttctattaattgctcatcatcgacatctagctcctcactaccgttgtgtcctaattggtcatctgccccatcacgctctaccactagcttttccacgtatacctcttatatttacaatcttacatgctcgttctactaactgctgcacctgtgctttcacattcctgctg

SEQ ID NO: 140511 - DNA, 398 bp, Zea mays
  Clone ID: MRT4577_59629C.1
ggaactagttaatctatagacttatatatcgtaatgtgttcaactggtggagccacagatttagcactgttgtaaatcggaaatagtgagtgatatgatcgtcggaagcatagcacgcaaaaacaagaaatgggacatggggtacatccttgagtggatgaatttatgctgtcatatagagcgcgaagtctgcttcctgcgagacaaaaagctatatgacgttcatacaagatggtgatgcaggatataacataagatcattgcttgttcagagaacagcgacatgtataaaaaatctatgatggtattactgcttagatgtatatttgagactgataagggcgatgtattcttggagataattgaatatttattagaaaaggggatgccgctctaaa

SEQ ID NO: 140512 - DNA, 353 bp, Zea mays
  Clone ID: MRT4577_5962C.1
tgcaaacaaaaaccgggcgtcaacccgtgtgtgtgtgggtcaaaacaggagcaaacaaaaggaacaacaggggtaccaacaccgaatccaaaggcagaacggacactaacacagggacagaagcgaacggtaacacgaaccgatagaaggataagagaactaacacgaagccaggacaggcccacacatcaggccctggaggcggcggcggcggctacggaagcggcaccaccaccctctggccgacgcgccgagcgcccacacggtccgtatcgggcgacaagaggctagggccgaccgacgcaggctcaccgccgccataaccgaggccacggcgcccgccaccataggcg

SEQ ID NO: 140513 - DNA, 350 bp, Zea mays
  unsure (1)..(350): unsure at all n locations
  Clone ID: MRT4577_59630C.1
cacgctggcaannggccgccgccgcatctcttggttcccgccgccgccgtccgcgaagcggcgccggcccacagacaaattggaatccgtccgggtcatggtccggccccattccgaatcttttttcttttttttccgncctcccggtggggggggggcggtgtnccncctgggcctcgccgcgcggctccggcggggggcggggcccgggagagggtcacggnggaggaggagaggcccgtgtcggtggggctggtacccatcgcctgcgtgcagctgctggactgggtccttggggaggcgcggcagctcctgctccccgtcggcctgctgggggggcccccctttcc

SEQ ID NO: 140514 - DNA, 586 bp, Zea mays
  Clone ID: MRT4577_59631C.1
gccggccggtccgggacagcatcaacatacagatgatactccatcatgaagcgatggccagaacgaagtggccggagcgtggatgatcatactgctgttactgcattgcatggcagctccaccgacggccatggccgcccgctctccgagcggaaccgtgacggatgactccctcgccactacgacgcaagtgacgatgctgtcggccactctgtgctacacgggggagacatgccaatacattggctgcctcactcctggttgctcctgaaactatagcgatcgtctatgctacatcatatttactcctggtgcttgaggtcattccgcaaaacctctaatcttacaatatggatgcgccggacgacgacgacactgcgctgcctttcctgagcttctgatctagtgatagcatgtttcactgcattgatggatgctttacagatatgcttattacttagccgggacatagaacggtcacagaagacatacgctgatctatatttacgacatctggggaactcataaatgctcaatagatgtcgtaggtgcgccaatctttgattcgcatgaagatctcggcccc

SEQ ID NO: 140515 - DNA, 329 bp, Zea mays
  Clone ID: MRT4577_59632C.1
ttttctttatggagcaagtacaggttgttggggttacttgcttgggaatgtatggtgctttattagcacataagaagtttgacacatgtatcatggatgaagctggacaaattacattgccggttttactgggacctttgatgcttgcaacaaagttaggactagtaggagaccattattaactttctccactggttcatagctctgaagctcgagaaaatgttatgggcatcagcttattttgcagattgacataagtacatttccaggcaatttcagtactgctatgcctctaccgtatgatatctggtatcatggagctcttaatt

SEQ ID NO: 140516 - DNA, 187 bp, Zea mays
  Clone ID: MRT4577_59633C.1
gcgtccacgcgtccgaagggacagtcggcaaagcggatccgtaacttatggaaaaggatcggctctgacggttgggctcgggggtcccggacccgaacccgtcagctgctggcggaatgctcgagctgctcgcgcggcgagagcgggccgtcgagtgccggccgggggacggaccgggaacgggccc

SEQ ID NO: 140517 - DNA, 249 bp, Zea mays
  Clone ID: MRT4577_59634C.1
tgctggactctagcggtcttagccttactgagacactgacgataagataagttgtgtgtgtaacagcctaacaggggatacaatagtgctgtctagggcagcgggcgaacaggcacactatcgctattacgtttctagcagccattactaggcgatatgcttgtttaaaaaaaaaaaaaaaaaaaaaaaaaaaaaaaaaaaaaaaaaaaaaaaaaaaaaaaaaaaaaaaaaagataaaaactatataat

SEQ ID NO: 140518 - DNA, 579 bp, Zea mays
  unsure (1)..(579): unsure at all n locations
  Clone ID: MRT4577_59636C.1
tgtgcntgaattctcccttaagcagtggtaacaacgcagagtactcagcttcctgaaactgtacagccataacatttgttatttttcttcaaatgtagaatgttttaaaaaaaaaaaaaaaaaaaaaaaaaaaaaaaaaaaaaaaaaaaaaaaaaaaaaaaaaaaaaaaaaaaaaaaaaaaattaaaaaaataaaaaaaaaaaaaaaaaaaaaaatgtcctttgcgttgtaaccactgttaaagggcaaattttgaaaaaatccataaaactgggggccgttcaaccatccataaaaaggccccaattcccccaaaagggagtggtataaaaattaactggccgtggtttaaaaacgtcgaaactgaaaaaaccctggggttacccaactaaatccccttgaaaaaaaaccccttttttccaactggcgaaaaagaaaaaaggccccaaccaatcccccttccaaaaaattgcccaccctaaaaggcaaatggccccccccttaaagggccaattaaacccgggggttgggggggttacccccagggtaaccgttaaatttgcaaggcccctagccccc

SEQ ID NO: 140519 - DNA, 316 bp, Zea mays
  Clone ID: MRT4577_59637C.1
gtgggggccggaaaaacaaaaggctctttttttacggcccataacttcattaaacaacacattgccaagccctcaaccaggttgtccccactgtgaatcttttatacaagtgcgtataaaaaacgacccaccttgtgatagaaactcacttattacaccattgattttcagccgtcccctgcaatatgcactcccttatggcccattgcaatattttaaaaaggcaatcagccttggctctaaccggaagggaaccgattcctctaattgatccacttctataaccctgtgcagaggcccttgatccagtccaaaa

SEQ ID NO: 140520 - DNA, 452 bp, Zea mays
  Clone ID: MRT4577_59638C.1
aaggaacacccttggggaaccaatatcacattaaaatcgggaaagggaactttttattttggggggggcacaaacatcatccaaaaaatttattatggaattacaactaaaaagcaatctaaaagaagggcccccccaaggaggggttggggggagggggccgctcggtctgtcaaagcaagggggacaaagggcaacaattggtggagttgaaaaaggggtgggggggtagcccaaaactggtgggaaaaagggagaaactggtgctgggtaaaaaaggaagcacgggttggtggaactagctgggtaaaggggagaagtatttggtggtgaaaaaaagcaggggggttaaggggggccaattggttaaaaggaaaaagttgttgttggtgaaagtagggaaaaactagctgggtgaaggggaaaaggtggtggtgaaaaaaaacaggagg

SEQ ID NO: 140521 - DNA, 410 bp, Zea mays
  Clone ID: MRT4577_59639C.1
gtattctctcactgcgataaattcctccgtctgtccttgcagcttatttcaaggtatgcaacatggctttcatgtggtttatcagcacgtaaagcttctgacaggagcccaaattcacctgcagatgctgaatgggcactgtctattcctatagaagatttcatatatgtaagttacatctgcaataatgtctgaactcgtcatgtcccaataggatctagcgtttttcattctgtactatggacctagctgcttaggactgaaattttgggtgctattgtcctatttattaacattattctatgtttctgtattaagtttatgcttagcttgaaatttctggagtttcgaagtagttataagatgactagttgcttcagaagtgctcagtaagtctgcaggaagtcact

SEQ ID NO: 140522 - DNA, 244 bp, Zea mays
  Clone ID: MRT4577_5963C.1
gggggccgggtttacggggtggggccctgcgtggtcctttaagttaaaaaaaaaccttttcacgtttatgtggtggcattagggccaaacaccacccccttatttttctgtactggtcacaaatgaaaaggtggcgacggggctctgatgatcaaacggggaacctgctgggtatgccacggagcaccactccgggcttgcccgcaagtttgacgactgtatagggtaccataacctgtcccgt

SEQ ID NO: 140523 - DNA, 215 bp, Zea mays
  Clone ID: MRT4577_59640C.1
tttgtattatgaacggaaaatccacgtagtgttattgtgtggacctcagggagtagacaagactgaaactgaaggacagaaaaaaaactacccgaagtgtggaattctgatgaaaatcgagccgtccacgcaaggccacctgctacagctgtcatagcccagccgtcactaaacctgacccattctgacgacatcctgaatatgaggagatcagg

SEQ ID NO: 140524 - DNA, 789 bp, Zea mays
  Clone ID: MRT4577_59641C.1
ctggagctcgcctgtctgctcacgacacacgcccagcgcctcgtcaagctcctccatgccggtgtccctgcttccgtactggccggcgagtggtctcgagctcccatggcgctcggacttctgctcgggttcaggctccctgcgcgcgagcctctgcgcgccctgtctctctcccttcgcgcgcgctgctccctgttggcccgcgcagtttcccggttgccgctcccggatttcttcctcggtgcctagctcggatttccctatccctccatggccggtcgttcctaccaattttcctggcctcgctcggtctgctgcctctgctccctgcgcgtccgactccgttcggccgagcgattttcccgtctttcgctgcgtcgcgcgctctccccagccgaggctcatgctccccacgcgtgtccctcggtctctactcggatttcgaccctgcccagctgttcctcctctctgctcgctctcctccatcgccgccgtgggctcgccggcgtggtccctgctctggccgccgtggtggcacgcgctgctcccctgagctctcccctgcgtacccggcctcaagtttcctcccatagcgccctgctccgtttactgctcgtcgcgcgcttggaatcctggctggcgctcagccccgttgtgcgcagatgaggttccgtcgtcaagcctgtcgaacctcgttcttctctgctcgatctcgtcgaaccccgaatcccggatattaaacaaaaataagtgaggtccctgtgtatcgcttatcaagtactcgattga

SEQ ID NO: 140525 - DNA, 807 bp, Zea mays
  unsure (1)..(807): unsure at all n locations
  Clone ID: MRT4577_59642C.1
cctcgcaacccacgaagaagaaaaaaagcccactccacgcctctcgtccaccacctcgcccgatccccaacctcctgatctcccccagtcccagcaatgcccacctcccgatctcccccagtcctagcgatgcccacctctccccgaccccgcctccacccggcgtcgccgcccacgcctccttctggcaagtcaccacccccgccccatccactcccgccccaccggcaagccgggcgccaccatgcccgcccttccctttgaccgatctcctccttcctcccccgtcaacaccgtgggagcacccatcccgccgccgagaccccagccggtgacgcggccaccgccacgcagccgcagtcacgcccctgccgccgacgccactacagcaccgaccccaaccgatgacgcgccacaccacctgctggagcacctcggggtccccggatccgacgaggatccttcaccgcccttcactcgccggcaaccacgagcactatcgcagattggacactatcctgcagctggagaagcggttgaacttcagcagtaggagtcaacgacctgcagctggtcgccgcgaaagacctctcccgcaacccaccgctgatccctccagcgtcgtcgcctctgcccgagctctcagtgacacgcccaagtgtcgtccgtcctacctcaacggtgttcctgctcatccacgccgctgatctagatcacggttgccccagccgccgcgaaggcctacagcgagttggtccggngtcgacatcctcctcccccgctgcttgcttgggtagccgtcgagcc

SEQ ID NO: 140526 - DNA, 1595 bp, Zea mays
  Clone ID: MRT4577_59643C.1
agcagcgggaaattttattaccaaattttacaggttacaaaaattttacaatattttatcggagtgattacaagagtataagtttgaaatatatgctagctcaaatgaccatcctcagtaagaagataaagacggggtatacttatataagaaggccgagcccaccggcacttaacaccatcacagcagcacaaagttatattatgaaaaacaacagggaataaaaccctgagtatagaattactcagcaagacttacccgactaaagaaaagactctcaaggatatgctggatttgggaaccaaggagaggctttagcaagaatcaacttagatacttttgcagaaatagcttactaaagtgagtccttactttcaatttttaacgccagattaaatattaatagactctgtttgcatctggtctaatttcaccatctcatcaatacaacatcatttttattcataatgttcacatcctgacttaggttgtaggtcggagatcaagtctccactctccggggatataacagcgatccgaatcgatttactcagctgaggatctctaaccacacgacatatgtttctcgtaaaccttgcatgtctaccattcccacggatcctccactgcaagaacaggtccgcgccacccgagagcacaccaccctttttaggcggtcctttgccaggagggtacgtgacactctcgccatctctccactcccagtgcgtgattgtcttttcatgtatggaatagccgggttcaagcttactctgtcccatttccagggcatgtggctagttaagatagtccttgatcaacaggcctacatacacatccaatccttaattgacccgggcagagcatcacctgttcctagcccaagtcgcgagttaaatacttccatccttaggattgttctgtgttccttaggatgaagagagcattataggaaactttgcagtaagatcccaccatgctcccaatgaaaatattcttgcagatagaaatcatccttcctcaggataaacctgagctaggcataagtgcaaaggacaaactctatctgcttataagcagggctaagcattttttgtaaattatattttgatacttcaccagaagtatctaaaaaaggaaaggatttcaaggtagccaatgcatcaaagggtttccaagcaactcctataaacctaatgcacattcactagacttaaagtgtgtaaaaataatttaaaaacacaaggaaggggttgcatgcaccaaggcttgcctagataacactaggttagtgtttgttaggtggcgaccacttggtgatcagcctttgttctgacacttgttccgtctgcccttcaggttggtccgactgacgacattgttgtacgaaaaaaaacactccttgcaccatcttgagggcaacttagttctggttctccgcatcacgtagttaattcacgtatctgaatgaaatgcattatgcacatgaatgcatagcactgacttcactgcacaactaaaattcctcgcatgaaatgcctaaagctcctatcggcaaagcactaaaattactaagcaaataactctagcttacc

SEQ ID NO: 140527 - DNA, 771 bp, Zea mays
  Clone ID: MRT4577_59644C.1
cggggtcttaatcaccccggtggcgagttgacatatgcaagggttaagtgctacatatgtcgtgtgattggagatcctcagctgagtataatcgattcggatcgccgtaacttcgcggatatgaagacttggtcactgccctacacgtagcaatccagtgaactgaagggatggtaaaaagacatctagtgcaggtcaagtgattgaactagggtagaaagaactctattttttgataattttacttaacctaacaagtaaaaatggatttttaaggatccacttttagcaagcatttctgcaaaacagagtctttgattcttgataagccataccttgaatccctctagccagcatacccttgagagtcttttctttagtcgggtaagtcttgctgagtaattccatactcagggttttattccctgttgttattcaggtcatagttttgtgctactgatgatggtgttaagtgccggtgggctcggccttcttataagtctaagtaacccttttatacttcttaatgaggatggtcacttgagctagcatatatttcaaacttatacttttgtaaccactccgataaaataatgtaaattttttgtaacttgtaaaatttggtaataaggtttccgctgcaaaaatattggtgtgtgtgatttgtgttacttaatcttgcgatcctggttgtaagtggtttatctggggtccttgggacactcggatggatcctgttaagttatctggtgcacatgcatagctatctga

SEQ ID NO: 140528 - DNA, 1796 bp, Zea mays
  Clone ID: MRT4577_59645C.1
acagcggaaatcttattaccaaattttacaaattacaaaatttttacttcgtacatgatcagagtgattgctacattgattcaaagaaagaaactttgaacggttatagattatttatagttttgaaatatatgctagctcaagtgaccatcctcaataagaagataaaggcggggtatacttatataagaaggccgagcccaccggcacttaacaccatcaacagcagcacaaaaactataacctgaaaaacaacagggaataaaaccctgagtatggaattactcagcaagacttacccgactaaagaaaagactctcaaggatatgctggatttgggaatcaaggagaggctttagctagaatcaacttagatacttttgcagaaatagcttactaaagtgagcccttactttcaatattttaacgccagattaaatatttaatagactctatttgcatctagtctaatttcatcatctcatcaatacaacatcatttttatccatagtgttcacatcttgacttaggttgtaggtcggagctcaagtctccactctccggggatataacggcgatccgaatcgatttactcagctgaggatttctaaccacacgacatatgtttcttgtaaaccttgatgtctactattcccacggatcctccactgcatgaacaggtccgcgccacccgagagtacaccaccccttttaggcgatccgttgccaggagggtacgtgtcactctcgccatctctccacgccaagtgcgcgattgtcttttcatgtatggaatagccgggttcaagcttaccctgtcccattctcagggcatgtggctagataggatagtccttgatcaacaggcctacatacgcatccaatccttaattgacccgggcggagcatcacctgttcctagcccaagtctcgatttaagtacttccatccttaggattgtttatgttcctaggatgaaaagagcatcacagggaactttgcagtaagatcccaccacgctctcactcaaaatattcttgcaggtagaagccatctttcctcaggataacccctgagcaaggccttaacgcaaaagacaacctctatccacaagatctgagcagggctaagcatttttgtaaatcatattttgatacttcaccagaagtatctaataaggtatggatatcaaggaaggcaatgcatcaaagggtttcaagcaactcctataaacctaatgcacatttcactagacttaaagtgtgcgaaaattatttaaaaacataaggaaggggttgcatgcaccggggcttgcctgagtaacactaggttagtgtttgttagcggacgatcacttgacgaccatccttttgttttggcacttgtttagattttccatctctagggttgtccatcagcatcatcatgcggagtagcccatgcttaacagcatcttgtggtcgactcagctctggtcctccgccttacgtgattaattaacgtacctggcagaataaaattcgggtcgcgcgtgtgctgtccacgggcttgggatttttgtcaagctcgcgatgcgcgacatcgacagagggcaagggtattgtgacgtcgcgggttggggctgcacagatcgaggtggagctcgctgcggtatttcatcgagcacttggcgagcgtcgcggacatatgtctgccccagcgtgctgctgctcgaactgagatagagagagacgagtagaggtggctaaggagttgggcgagctccatggtcggacctatgcggaccggtgaagcaa

SEQ ID NO: 140529 - DNA, 2245 bp, Zea mays
  Clone ID: MRT4577_59646C.1
aacatttttgcagcggaaatcttattaccaaattttacgggttacaaaaaatttacattattttatcggagtgattacaaaagtataagtttgaaatatatgctagctcaagtgaccatcctcaataagaagtatagaagaggtacttagacttataagaaggccgagcccaccggcacttaacaccatcacagcagcacaaagttatatcctgaaaaacaacagggaataaaaccctgagtatggaattactcagcaaggcttacccgactaaagaaaagactctcaagggtatgctggatttgggaatcaaggagaggctttagcaagaatcaacttagatacttttgcagaattagcttactaaagtgagtccttactttcaatattttaatgccagattaaatattaatagactctgtttgcatctggtctaatttcaccatctcatcaatacaacatcatttttattcatgaggttcacatcctgacttaggttgcagggcagcgatcaagtctccactctccggggatataacggcgatccgaatcgatttactcagttgaggatctctaaccacacgacatatgtttctcgtaaaccttacatgtctaccatccccacggatcctccactgcatgaacaggtccgcgccacccgagagcacaccaccctttttaggcgatcctttgccaggagggtacgtgccactctcgccatctctccactcccagtgcgcgattgtcttttcatgtatggaatagccgggttcaagcttaccctgtcccatttccagggcatgtggctagttaatatagtccttgatcaacaggcctacatacgcatccaatccttaactaacctgggtagaacatcacctgttcctagcccaagtcccgatttaagtacttccatccttaggattgtttatgttcctaggatgaaaagagcatcaaagggaactttgcagtaagatcccaacacgctctcaatgaaaatattcttgcaggtagaagccatctttcctcaggataacccctgagctaggccttaatgcaaaagacaacctctatccacaagatctgagcagggctaagcatttttgtaaatcatattttgatacttcaccagaagtatctataaaggtatggatatcaaggaaggcaatgcatcaaagggttccaagcaactcctataaacctaatgcacatttcactagacttaaagtgtgtaaaaattatttaaaaacacaaggaaggggttgcatgcaccggggcttgcctagaataaacactacgttagtgtttgttagacgacgaccacttggcgatcatccttttgttctgatacttgcttcgtctgtccatcttcagtttcgtccgtcagcatcatcttgtggagaaactcacgcgcgacgacatcttgtggtcgactcagttctgatcctccgtatcacgtagtcaataaacgtaccacgaagctgtgtgaacttgcgaagatctcccgctatacaaagatcatcggcagcgcatcacgacgaactccaaaaaccacgacggcgatgacgcaaagtgcggagacatgctacaaggatttgaagctgttggccacggcgagcagcaggagcgagggagcatcgcggcaatggaagagaggggaacgccggccatggaaggtgacggccgtggagaagcaatagtgaagaatcgtccctcgacgacacgctggtggccagccagaaagacaactcgagttgcgactaggggcgccagcaagagcacgttgccgcggctgatggaggcgaagaaaccggcgagcgtgcagaacacggtgcccaggcatgtgaccgagctcagcagggaaatccagccgggcgcaggaacacgccatgggagtagtgcagcgcgcacgcatgaaccaagctcgaagatgtcgagcaaagacggaagagactcgtccgacagccatggccgagcagcggaactccggcgtccatggcagggagaggaagacgcgagggagagataggaggagctcggctggagaggggcgagcaccagggagctcgtctggtgtccacgccatgaccgagcagggcgagctcgaagccggctatggaacgagctcggacagaggggccaggggcgcggcagagagcaactggtggagtgcgctggaatgagctggagagggatgtcgtgttggagaaatgaacgagctctgtacacggataagaccaagtac

SEQ ID NO: 140530 - DNA, 2274 bp, Zea mays
  Clone ID: MRT4577_59647C.1
acaaaaattttacattagtttatcggagtgattacaaaagtataagtttgaaatatatgctagctcaagggatcatcctcaataagaagtatagaagggttacttagacttataagaaggccgagcccaccggcacttaacaccatcaacaatagcacaaagttagaacctgaaaaacaacagggaataaaaccctgagtatggaattactcagcaagacttacccgactaaagaaaaagactctcaagggtatgctggcttaagggagtcaaggtatggcttatcaagaatcaaagactctgttttgcagaaaagcttactacgagtggatccttaaaatccaattttattgtcaggttaagtaaaattacctgcagctagagttctttctaccctagttcaatcactggtcctacactagccaatttctcaacaaaaaccctttatctttagtggaatgctacatgtaagtcagtggccaagtctccataaccgcggaggtacggcgatccgaatcgattatactcagctgaggatctccaatcacacgacatatgtagcacttaacccttgcatatgtcaacccgccaccggggttcttaagaccggatcaggttcacgcaaaccgagagcacagatacaccaccgtccagcctcttgccacggagggtacacgctactctcgccaccgctccacgcccatttcgtgtgatcttattccggccttagtctacccgaggcaaggcttacccatgacgaggcatgtgaccagttaaagggtcctcggtcagcaggcctacatcgacaaggtccttaatcgactcagacggagacactacaccgagactctcttctcgtgcatgtcacccgcccggtctcagcttaatcatttaaccccaaaggttggtacctggcagaggtacatcttttccgatgttgaatccatcacggccgtgatggattcaccatcaagttttatttttgaaaacaacccacccacctttgccacatcatattttgtaaaaacaaaacattttgtttttctaaagcaagactaagcatcaaaaatcttttataaaacgggtgatcaaggaaggtaatcaagttcaaggaaggtaatgcaggaattgttttagcaatcaactcctatcacctaatgcagcaatcaagtgagaaagattttaaaaacatcaaggaaggtggcaaatgcaccggggcttgcctgagtaacactaggttagtgttgttagtcgatgagcacttgacgaccatcttcaggtttatccatcagcatcgccttgcgaagaagcccacgcttggggtcgacttggctcatcttccgcatcacgcgattaattaacgtaccgtttcaatagccgactcgaatccgcgagatcggtagtgattttccgatccaggcaattgtcgagcgcttggggaatatcgcgctgctagcttcgttttcacccgattcttgggattcttgatgacgcgcgggacgataacaagattgtatctggagcgagctggcggggtagggttgagcaaaggatgacgggttcaacgactcgacggcaaacgcgagcacgcacaaagcccgatgacaacgggaatcgagctcgcgacagaaagtgatgacgacgcggcacgacaagctggaacatgaacgcgtcaacatggggctggattcagcgcgagagcttgacgcgtgcagagaaacagcacggcacagtaagcacagatgctgctacgacatgctgccagggagcaagtgtcgagcatgatgaggggatgagacaggtggaataggagcgcagagcagtggacctcgcaagatctccactaccggaccttcacaaacatgtgggtgaaggtttcagggagcggaggactgggagatcaagcacagagagaggacgtcggcgctcatggctggagctgggcgcggtctgctgggagatggagagatggagacgagcggcagagggaggaagcaagctgcgcgcggagaagatgctaggcgccgctactgggaaacctcagaggccgagcaggggaagggctccggcgagcgtacggccggcgagctgcgcgcatataaaatgaacagggcggcggcaaaaatatcacgcagtcagattttcttttctctcttttttttgtcggtgatcgaagatattttgatcacgatttctagcgataacaaaaaggtcgaccgtattgcgacacagtttgattcgattcgaaatctgataaatttacctgtggtctga

SEQ ID NO: 140531 - DNA, 2249 bp, Zea mays
  Clone ID: MRT4577_59648C.1
ttcttaagcagtggtaacaacgcagagtacgcgggattaagtaacacaaatcacacacaccaatattgttgcagcggaaatcttactaccaaattttacaggttacaaaaattttacattagtttatcggagtgattacaaaagtataagtttgaaatatatatgctagctcaagggatcatcctcaataagaagtatagaagggttacttagacttataagaaggccgagcccaccggcacttaacaccatcaacaacagcacaaagttagaacctgaaaaacaacagggaataaaaccctgagtatggaattactcagcaagtcttacccgactaaagaaaagactctcaagggtatgctggttatatgggagtcaaggtaaggcttttcaataatcaaagactctgttttgcagaaatgcttactaaagtggatccttaaaatccagttttatttgtcaagttaagtagaattacctgtaactagagttctttctaccctagttcaatcactgatcctgcactagccaatttcttaacaaaaacccatcatctttagtggaatgctacgtgtagggcagtgaccaagtcttcataaccgcgaaggtacggcgatccgaatcgattatactcagctgaggatctccaatcacacgacatatgtagcacttaacccttgcatatgtcaacccgccaccggggttcttaagaccggatcaggttcacgcaaaccgagagcacagatacaccaccgtccagcctcttgccacggagggtacacgctactctcgccaccgctccacgcccatttcgtgttatcttattccggccttagtctgcccgaggcaaggcttacccatgacgaggcatgtgaccagttaaagggtcctcgatcatcaagcctacatcgacaaggtccttaatcgactcagacggagacactacaccgagactcctttctcgtgcaagtcacccgcccggtctcagcttaatcatttcaaacccaaagtttggtacctggcagaggtacatcttttccagatgttgaatccatcaaggccctgatggatccaccatcaaattttattttcaaaaacctcccacccacttttgccacatcatcttttgtaaaaacaaaacattttgtttttctaaagcaaggctaagcatcaaaatcttttgtaaaacgggggatcaaggaaggtaatcaaattcaaggaaggtaatgcaggaattgttttagcaatcaactcctatcacctaatgcatcaagcaagtgagaaagattttaaaaatatcaagggaggtggcaaatgcaccggggcttgcctgagtaacactaggttagtgttgttagtcgatgagcacttgacgaccatcttcaggtttgtccatcagcatcgccttgcgaagaagcccacgcttggggtcgacttggctcgtcttccgcatcacgcgattaattaacgtaccgtttcaatagccgactcgaatcctcgagatcggtagtgattttccgatccaggcaattgtcgagcgcttggggaatatcgcgctgctagcttcgtcttcacccgattcttgggattcttgatgacgcgcgggacgataacgagattgtatctggagcgagctggcggggtagggttgagcaggggatgacgggttcaacgactcgacggcaaacgcgagcacgcacaaagcccgatgacaacgggaatcgagctcgtgacagaaagtgatgacgacgcggcacgacaagttggaacatgaacgcatcaacatggggctggattcagcgcgtgagcttgacgcgtgcagagaaacagcacggcacagtggagcatggaccaagcacagatgctgctacggcatgctgccagggagcaagtgtcgagcatgatgaggggatgagacaggtggaataggagcgcagagcagtggacctcgcaagatctccactaccggaccttcacaaacatgtgggtgaaggtttcagggagcggaggactgggagatcaagcacagagagaggacgtcggcgctcatggctggagctgggcgcggtctgctgggagatggagagatggagacgagcggcagagggaggaagcaagctgcgcgcggagaagatgctaggagccgctactgggaaacctcagaggccgagcaggggaagggctccggcgagcgtacggccggcgagctgcacgcatataaacccggcagaacccgagggtaccccaaa

SEQ ID NO: 140532 - DNA, 236 bp, Zea mays
  Clone ID: MRT4577_59649C.1
ggaattggaataccaactaataattaccacagtaactgggaggggaaaaaaaacaagaaacccatgaacaaacgggagggcggcggagaccacggggggtggtgaacgcaagacaagggggggcgcttgttaatgttcaccatggcgttttggaagcccaagaaccggtcgggcgttacgcactgggtgatgagccttgcccctggcttgtgggcccatggtttgacaaggattca

SEQ ID NO: 140533 - DNA, 796 bp, Zea mays
  Clone ID: MRT4577_5964C.1
ccggggttctgattctggtggtgaatttttatctgataattttcgccagatattgtccttagagggcactttagctcaactttcttgccctggtgctcatgcccaaaatggtgttgctgaacgcaaacatcgtcatattattgagagtgctcgtactcttttgatatcttcttttgttccttcacatttttggagtgaagctgtttccactgccgtgtatctcattaatagacaaccatcctcaaaactttctggcaaaacaccgggtgaaattctttttgggacatctccacgatatgatcatcttcgtgtgtttggctgtctatgttatgtcctgttaccaccacgtgaacagactaaattgactgctcaatctgttgagtgtgtctttcttggatacagtcctgaacacaaaggctatcgttgttatgatccatctactcgtcgtattcgaatttctagagatgtgagtttcaatgaaaatcgcccttttttttacaacaagtccacttacccctcatattatcccacagaatccacttctttcatgtgtcttccttccgttcctgatttttcatctgaaccatcatctttcacaaccacacctgatgttcttattcccataacatcaccttccatctccacatcatcttactcttccaaaccacctatcacccaaacctacattcgtcgttcctgctctattcctacggctggtcctgatactgatcctgtacctgattcttgtgctaacatactgagtctaatgatgttttttatcaggatatcgtcttcg

SEQ ID NO: 140534 - DNA, 1932 bp, Zea mays
  Clone ID: MRT4577_59650C.1
gcaaccaggcctccacacgtccagcttcgttcccaaatggcaagggcgcaagggcaggcattcctcttcctccttcctaatctgctctactgcaagggtttcaagcatcgggcggcggcagcgtgagctattggaggtgcgcgccgttcagttcatcagccgtcgcccgtccgggactcagggtcagcatctattttcctgacctatgatgacgactcaaggaggtttgcagccgacaagcaatgaagctaatctgtgcaccaacgacaatggtagccaacttagtacacggattgtggacgagattatggctgggaagaacgtcttctttgatcttcctgacaagttgactggtgagatgtggaccttgaaattccattgcattggagcacaacctggaaaagaaattgtcacagtaaatattgataaagcttatgttgccttttacaacgtggtgtacataaaatcgaaacttggatattctgggagggacttcttgttttacaagaaacgatgtggcattgatcgatccaggctattggcacttgattacatccaccaagaagagaccatgctgtctgataacattgatgagagaaaaataagttttgtgctcacaaaagatccacccagtgatctagaggtaagcataactcccatcaagcgtccaaggcagcgaacaaatgttgatgaagaaactatagaagtgtcgattgatgcatataaggagtggcttgcaataatattgtttaagtgcagatttaatggatgacttcagggaggatacgatcaaaacatataaagaatggttaaggcatcaaggcgatcttccagatatctgtaatgtggcagaacctcccaagttattgggcccacatgcacctgtccttgtctcaaagacctcagactgctatgcatgtgcaccacataacttaacaggatctgtccgagtgtcccaaggaccccggataaaccacttacaaccaagatggcaagattaagtaacacaaatcacacacaccaacagtttgcagcggaaatcttactaccaaattttacaggttacaaaaattttacattagtttatcggagtgattacaaaagtataagtttgaaatatatgctagctcaagggatcatcctcaataagaagtatagaagggttacttagacttataagaaggccgagcccaccggcacttaacaccatcacagcagcacaaagttatatcctgaaaaacaacagggaataaaaccctgagtatggaattactcagcaagtcttaaccgactaaggaaaagactctcaagggtatgctggataaataggaatcaaggagaggctttagcaagaatcaacttagatacttttgcagaaatagcttactaaagtgaatccttactttcaatgttttaacgccagattaaatattaatagactctgcttgcatctagtctaattcaccatctcatcaatacaacatcatttttattcatgaggttcacatcctgacttaggttgtagggaagtgaccaagtcttcataaccgcgaaggtacgacgatccgaatcgattatactcagctgaggatctccaatcacacgacatatgtagcacttaacccttgcatatgtcaacccgccaccggggttcttaataccagatcaggttcacgcaaaccgagagcacagatacaccaccgtccagcctcttgccacggagggtacacgctactctcgccaccgctccacgcccatttcgtgttatcttattctggtcttagtctgcccgaggcaaggcttacccatgacgaggcatgtgaccagttaaagggtcctcgatcagcacgcctacatacgcattcaatccttaatcaacctgggtagaacatcacctgttcctaacccaagtctcaatttaagtatcccggc

SEQ ID NO: 140535 - DNA, 784 bp, Zea mays
  Clone ID: MRT4577_59651C.1
cgggggccgcacggctttttgactgttgcaaatacccaatttcccagcaacaaaccggggagttcttggttgtttgccatcttgagcgatctgtggggaaaagactgagcgcggagggcagcacggggacaaggatctttaacaggagcgctccggtcttcatgagattgacctgcccgaaggcgaagggaccgtcctcatggtgggccgagctgagtaagaccacgcggatagcctttggctgcagctaggatctcagggtctctccaatgagcatccataccggcggcctcatagagacagttaccgggctcggcgctgatgtccgatggcgctgctgcaacattttatacacgcaagaccacgccgccgccggcatcgcgcgcgactcaggacgcgtgttcgcctgtaagggggagaccctagaggagtactggtggtgcaccgagcgctgcctcgactggggcgaggcgggcggccccgacctcatcgttgacgacggcggagacgccacgctgctcatccacgagggtgtcaaggccgaggaggattacgagaagaccggcaagatccccgatccggagtccaccgacaacgctgagttcaagatcgtgctcaccatcatccgcgacgggctcaaggctgaccccaagaagtaccgtaagatgaaggagaggcttgtcggcgtctctgaggagaccaccacgggtgtcaagaggctctaccagatgcaggagaccggcgccctcctctttcctgccattaacgtcaacgattccgtcac

SEQ ID NO: 140536 - DNA, 468 bp, Zea mays
  Clone ID: MRT4577_59652C.1
tggcttggaactttgggctgatttatgtgcttgggaaggggtatggcggagagcggagaatcggagatgtagtggagtttctgttcccctgactcggcttcgtcttcgtcgtttggcagtttgttgagggagatgtcgtcgattcgatgaatcgagtttatggatgagaaggaggggtatattatgtaggagattggaggagagtgtgtgtgtggacttattctgcacatatctcttctcctcctcttgcgcttccggtctagacccagccgtcgtgttgtcctccaggaccgaccgtcgtcctatttagcgactgtgctgctactcctgtgcccgtccaactgttcggccgtcgtactggccccccccccggcgccgcgcggccgggggcgtgggtataaggcccttcttcgcccagttcggaccggcgcaggaccctgacgcgactgacgttggttgaaaataaaa

SEQ ID NO: 140537 - DNA, 1230 bp, Zea mays
  Clone ID: MRT4577_59653C.1
ggccgcttttttttttttttttttggcgaattcgatgaacacgaccacaatcgtgtgctgacgtggtcaagataattgtggctagcaagcttgcgacagagcgataatggcgcgacatgacaaactgaaacagagatgccaacatgaggcttgattcaacgcgggggctcgacgcggaaacttgacacgccgtggcgagcagagaacttcgtgcgcgcactaggagagttccacacgggcagcaggggcgagcagcaggcgccgagctgcgcgcaggcacgcgacggctacggcaaggaagctgcgcgagctgggcgactgctcgtccgtcaagcagagcagggcagtcgtgccatgggaagaagcagcgcgcggcgagggaagcagactccggcaaatcccagggcgcggccatgggagactcggtaggggcacgaccgagcagaaatggagctcggcaaactccatgggcgagcagagcgcagggcgctccggccaggcgagcagggagagcacgccatgactggaaacttggggaataaataaaaaaacgcgacgcacagagagaagcggctgccagacgccataggagacgggcgccgagcaagcagaggagacggggcgcgatccgagctccacgacacacaggaagatgaagaaaagcggctcggctaggagatccggccaggtacggtcgtgaggagcttgtggcgcgccatgggagcttcacgagcgagatcggggcagggagagaaggggcgaccgagcgccgtctcccgcggcgagcaccgactagcagcagggcacggccatggatggagccgggttggagctggagggagctcggttgggactggtcagagggtcgcggctcgcgcaaggagcaaggaggaagacgcggtagaggggatgagcagcggacgcggctggagcagagctgggaaacgcagagctcacgcgcaggaaaaaaaaatggagcgccatggcaccactcgactggaagcagaccagagagagaaaaaggagtggctgcgcgctagaggagagatcgagcgaccgggcgacgaggaacagggacgccgtggccatgaaaagcagggggcagagcgagcttgcggccatggcaggggctccaaatcctgcgcagagaaaaacaggacagggacagggacagggacagggaagaagacgcctgaatccgagcaagggcttggccgggaagcgtcaagt

SEQ ID NO: 140538 - DNA, 349 bp, Zea mays
  Clone ID: MRT4577_59655C.1
gcagcggaaatcttattaccaaattttacaagttacaaaaattttatattattttatcggagtgattacaaaagtataagtttgaaatatatatgctagctcaagggatcatcctcaataagaagtatagaagggttacttagacttataagaaggccgagcccaccggcacttaacaccatcaacaacagcacaaagttagaacctgaataacactaggttagtgttgttagatgacgtccacttggcgatcagcttttgggtctgacacttgtttagtttatccatcttcaaattcgtccatcagcatcaccatacggagtagcccgcgcttggggtcgacttggat

SEQ ID NO: 140539 - DNA, 796 bp, Zea mays
  Clone ID: MRT4577_59656C.1
gccggccgttccgggaagcgaggcggcggccccgcgttctccgtctccgtctccgtctccgtccgcccggcgtaaagaaaaccctccctcaccacagccgccacgccatggccgaggagaccgacaccaggcctgcctccgcgggctcccgaggccgccccgcgcccgaggacgacgacagggaggagggcgagatcaccgacctcgcctgcgctccttccccgcccgccacgcacccgctcgagcactcctggaccttctggttcgacaacccgcagagcaagtccaagcaggccgcctgggggagctccatccgccccatacacaccttctccaccgtcgaggaattctgggggctttacaatgagttcggcccgtcgaagcccttcgctggcgctaggatctcggggtctctccacatgaccatccagaccgccgtcctcatcgagaccctcaccgcgctcggcgccgaggtccgctggtgctcctgcaacatcttctccacgcaggaccacgccgccgccgccatcgcgcgcgactcggccgccgtgttcgcctggaagggggagaccctcgaggagtactggtggtgcaccgagcgctgcctcgactggggcgaggcgggcggccccgacctcatcgtcgacgacggcggcgacgccacgctgctcatccacgagggtgtcaaggccgaggaggattacgagaagaccggcaagatccccgatccggagtccaccgacaacgctgagttcaagatcgtgctcaccatcatccgcgacgggctcaaggctga

SEQ ID NO: 140540 - DNA, 1115 bp, Zea mays
  unsure (1)..(1115): unsure at all n locations
  Clone ID: MRT4577_59657C.1
gggtacctcgaggccggaagggatgtagctaaatgatttatatcactgggagtaaggatatataatcaattagcagataatcggccttcctgtccagctctgcttggcggacagtcatgccggtggagggaaggaagaagggcgtgccggcgctggggtggtggctaatgctggtcggctccctccgcctcgcctccgtctggttcggcttctttgacatctgggcgctccgcgtcgccgtcttctcccagacggacatgactgatgttcatggccgtacttttggtgtctggactcttctgacctgcacgttgtgcttcctctgtgcactgaacctggaaaataggcctctgtatctggccaccttcctatcatttgtctacgctcttggccatttcctcacagagtacttgatatatcacaccatggctgcagcaaatctgagcacagttggcttctttgcaggaacgtcaatcatatggatgcttcttcagtggaattatcatgtgaatccccatggtgcccaagctgtgaagcagtcatgattgatgcttgggctgttagctttatgtggtccagggggaggaaggataccttagaaactgtcagaaaagctcatttcatacttcatttttcatcatgttattttgttgcatgagacatttttccaactgagtagggaatgaaaattcaaattatttctgccactgattgggggatggaattccaaacattgtaaaaggcgactgtatctagtatgcaggaggcttaacatcgaatttgtgaatattcaggcataccacctgttgagagctgagatacggtagggatatcttcagcaactcttctatcacatctcctatttcaaattctactctataaacaatgttgtctaagtggaaaacagtgacttgtatgatcacacgtggtctgttcgacacaaccttaaggacaaccttagagagctatatccatgttatcaaggtccttctagtcttccttatattttttgccttgnntgatggtgctgcatgttttgttcatgaaataccctgtacgntagcacatcacggtcaatattattcttggcagctttggaggagcattcgtcatgc

SEQ ID NO: 140541 - DNA, 384 bp, Zea mays
  Clone ID: MRT4577_59658C.1
gaaccaacaagcggctaagccagtgttaaaaacatgcggcacaggatgcaatacttgggaggctcagatatcaaaacaaacaacagttatagagtcgaacctcacgatgacacatgaacctaaatggtaccggagtgcgggaatcgacatataacgtggagacagtatctagttgtgcaccatatactcgggtgtagcactgaatttgtggtagcccatggcgaccccatagacaggatggaaaaaagccttacctgtcaccgtgaactcagcgggcacgaatggcatacattcgggattttgggcatacgctggtgacatccgatccaggatagagggggcagaaccgagcctgaagctcataacgaaaacctggcgcacagg

SEQ ID NO: 140542 - DNA, 398 bp, Zea mays
  Clone ID: MRT4577_59659C.1
catgcgccgccgcgtgcgcggggactctgagcgcgcgcgccctttttttttttttttttttatcttgtaagcaaaaggaaaggctaaaacattagttatttttctggtaccaacacaccacaacatttgtgcagcatgctaacaatgagaagcgcatagtgaaagattttcaaaacccaaaaggagctgacagccaaggacttgggaaaacacatggcagctaaataccatgggagaaaaaaatgctcttcaaatatatttaagcggatcaacactcgcacgacggtacaaccattaagcagcttgggggttagctgtgagcaaacgagcccgatgggaaaacttcggaggggggccttccttgagaggaagggttccagtaaccttgagaccactga

SEQ ID NO: 140543 - DNA, 1164 bp, Zea mays
  Clone ID: MRT4577_5965C.1
cgtttcgagtccaaatcatcatcattagcatcatccccagggtaggatcttccacctccagcatcaacatcatcatcactagctggacccggaacagtgtcaatcatgccagctgaatgtacttggttacagaggttggaataaatatttgaaggcttgtcttcaatagttgccacaccatcatacctttcttcaccctggcttgaaggaactgcaccaccagctaaccttctatttggttggggcttagaatgattatgacgccctttataaacaacttcagtaacttggccatcaagcgaacgctctaatagctttttaacttcacaattaggatgcgtgcacttgtaataacttctaggattttcacttcccttgacatgcttctgtccatatttacgccaattatagccatcctctgctgatttttcagctacattttcaatttgtgtttcctgagtagcattttcagaactattgatctggtgcatctctgatgtaccaacttcagcaggcatgttgtcagacggacaaactatcgaaacagtttggtttggagcaattgaagcatgtgctgtgtgactcgattcccgtgaacagagaggtttattttcagtcttcaaattgctagatggtgtggtatgatttgagctatatttttgcatagtgtcatgatggttttgattgttgactgaaggagccgccaaatgagaattgagatgaggcttgaattcaaaatcccgagaacctccatcttcctggccactaccagctgaattatccctaggtgaaggcattatgtccatatgagtgctcttgttgatgattgcagccatgctcagagtaccagttgtgggagacggttcaaccttgaagttgttgaggaggacgggggactcgaggagggcaccggggctgaacccggcggggatagtgaggcatggctcccgcgagatcggcagccgcgcgggggacatggccttgtacctcgcgccggcgccggcgagcgcggccacgcgtcgatccgccaggaccggcttctccggcgagcccccggggccggcggggaggtccccggagctagggttcggcgaatcggccattggcgggggggtggagaggtgagtgtaagggggaccccggccggcctcgaggtacccaatg

SEQ ID NO: 140544 - DNA, 376 bp, Zea mays
  Clone ID: MRT4577_59660C.1
cggacgcatggggtctaagaatggatcgagggccttacacaatcttgaattaagcactgtggttgcatagatggtgttgcatgccacatttgaccgatgaataatctgtatgcatgagacttgtcgcgtcttatcagccatgaaatcagtgcataaggccatggcacagaatgccgtaataatcttcgtcacaggcgctggtatatgctgtttccactccttattagccatcgtcacctaactacctaggggggcacacgaaggggattcaaacttactaacccttagagtgtgcaagtgaatgtattttttagagagagctaatactactgacttagctgaagtctagaactgatcgaccgggaaaacactgtgg

SEQ ID NO: 140545 - DNA, 397 bp, Zea mays
  Clone ID: MRT4577_59661C.1
cctcgataatatattttaaaagaatccaatattaggattgttcataggcaacaaactggttagcagccaaatacaatttataccgggctgagaatctagttaggttcagcaaacaataataattgaaccaccaacaacttatctccatctctttagtttttacacggagaagaagcatacttttgacacaagtcatgcttccttttcacctacatgctgtcgagcagctcggtctcttgccctccattgcgtctttctttttccgacactccagacaaagatacgggcctccccaaggcgcgtatggagaaaagcagtggctacctccattctcctccatcaatccttcaaatggttcttgggccacttggcagatcgcacagcgagaaggtggtga

SEQ ID NO: 140546 - DNA, 1011 bp, Zea mays
  Clone ID: MRT4577_59662C.1
catctatcacatggcttgcgttttgcaccatactagttgtaacataaaatggggaacttctcagatatatgtagcagctgcttaatgttcctttctcatgtacaggacaagctataccacatactgtatgctaaaagaactatgatgaccgaagcagttcagaaaatcgctcgtcctgaccgcctcacgggcccgcaggtacgtggcctttccctacccgggaggcctctggtagctatttcttctcgcgtgtcccggagcgggaaagtgggaactggcagtactcattccttctccagcgcttatggcttgctgtctctcgatcttttcgtgttccaagcctgttgatctaccaagctcctaatctcagtccttctctgatttgcatctattattttctgatgcaaaaccggtattgccttcacaagatctttcaaatttccctgcaccattttttcttcaaacaacttttctatctcagagacagaagaatcaagtcttcttttgaacgtagcttgcctttccagtgaggacaactctctttcaaggttttcagattccttgttagcactttcaaactttctcctcaaagagtcaagttccaaatccaaatctgaatccgaaatcccatctttttgtgattcatttgcacaagaactatcatcatcagcggccacaaaaccttcaggtacatcgaagcaatgtcgaaagcagaatttctcccagttggccattctcttatccagtcgatccttaacaacatggtgaatagcatttaatccccgctggagatccgtggccttctccgcagccgtggcggcgccgacacctggcgcggctgctgcctggaggcagtactcgaaggcctcggcgctgatgtcggcaatgatgccgtggacctcgttgacgaaaagctgcgggctcagccccagcgccgccgccaccgccgccgcggcgctctcgtcgccgtcttccatcgcccgcttcttcttccgactcttcaaactttct

SEQ ID NO: 140547 - DNA, 390 bp, Zea mays
  unsure (1)..(390): unsure at all n locations
  Clone ID: MRT4577_59663C.1
nttgngcacccgcactgaaaaagaaggggggggggggtttaacaatgggtgggggatcttcaatgcggatgggaggacctgctggaggccccggaccattgcggccgacacacgcagcaacgagaaacgccggttgccgaacctgcgaggctgcgcgcctgtaccggatgcggatgaggcaaaccgggaccagctggagcaagaggaggcacgccacggggccgacaacccgcgcgtggaggaccgcgccgtcgacatcaatgtgccagtacacctctacttgagcaggagaacacacgactaccaggaccgcgcactgcaagctcggtgaccgactccgctacagaaacaaggagctcctccacatctaggaaggcacagcattaggca

SEQ ID NO: 140548 - DNA, 1078 bp, Zea mays
  Clone ID: MRT4577_59664C.1
gcagcgcattgggtacctcgaggccggccgggatggacctacaaaccaagccggcgattctccgatcccaaccaggcaagcagtgtacgcagaaattgatgattcccccgctttgatctccgtacgtcctgtcatctcatcgatctgcttcgcatccacgcctgagcagactcatggtggcgttcatggcgagcagcggggccatgaaggcgtcgagcaggccaaccttcgtcacccctcgcagcttctttaactggggcaaaagcgcgagagaaaccgagacgccgccgccgcagctgcagttctcctaccacgacgtcgagccaccgttccccatgtcgctcgtggcaaaaacacacctcagagaccgtgagctcaggtgctgctacaaggccaccgtggacggcttcagtgctacggacttccaccggcggtgcgacttcaagggcccctgcgtcgtcgttggctacaccgacggtggcttccgtttcggcgggttcagcccggaggggtaccgaagcacggacgactactacgacacgctggacgcgttcctcttctactgggcggaatctacggaggtctcggcgccgcccgtggtgctgcccaaggtgggcgggagcggcgcggcgctgttcgactactcccgcggcgggccacagttcggcgccgacggcctgctcatcggcccgccgctcaccgccgtgatgggcgtgttcactggacccgactccagcgccggcgtcggcgacctccgcagcgctcgctcgcggcttggcctgtcgtacgcgaggcggccggacgggaaggagagcctgttcggcgacgagggcagggcccagctcgtggaggtgctcgtcttctgcaatccgcagatcgcgagcctgtactgactgctcattgttactagcttgcagctagagtctgtataaactattcattatcgcttaatttggagtctaaaacataccaataataacaatgtaaaattgtgggtacggttaattagttgattattaagttattgaaagatcaaataagtaatgacgaaattacaaaaaaaaaaaaaaaagcggcc

SEQ ID NO: 140549 - DNA, 362 bp, Zea mays
  Clone ID: MRT4577_59665C.1
tgctgcttgtggtgaaaagttctcaaattcatgctggatccaatgtagttgcgagttgccctggaaatatttctgttgcctgttccattttattttaaattttcgttaaagggttattcgttgaagattatagcgtcatcttcacagttaaatccaattggtttcagctggttattcgttgaggatgttttggacacaaatgagagagagagagagagagagagagagagagagagagagagagagagagagagagagagagagagagagagatgtgttcagcaaacaagcggtgctaccctacggccagaagttacagtattgaagctgcaagtaagatacgctcttttgttggttttggc

SEQ ID NO: 140550 - DNA, 341 bp, Zea mays
  Clone ID: MRT4577_59666C.1
tcctattttttttttgtactatttgtctcatggttgaaaccaataagaactccacgctcggtgagaaacaggggcctatcacccaaacaaattagtttccgtagactcctccaatcgtacatgactaaacggcactatctatgcacatgatgtatgagctcaatgccggttcttaaaaactttgtttaacagactgcgcctgtacatctgacatgggatctttttttttatcgcccttcctttaaggggtcaagatatacctgtgcaagttatctactgcctgaatcaatgaaaggggatcttcctgcagccgatatatttaccattgctagcgctgcctt

SEQ ID NO: 140551 - DNA, 350 bp, Zea mays
  Clone ID: MRT4577_59667C.1
atcttttccctggcgcgcttagaccgggtgaaaaaacatgacaggcctgatcgtagttgtacagcaagaacactcgcctgcagtgagctggtaaacctgctgatcgttgccggacaccacggaaaggagtccaaggacagtgcaggaccgggcttgttttaattatattttcagcctactaatcgagtgcaagttgaacgctcatttccagggtatcttgcttcaggtgaaccgaacatctaactgtgagcgtggccgttacatttgtgatacgaagggaccatctttgcaaactgggcactaccagagcagggtgactagcttttatcgattccattaccagcggtact

SEQ ID NO: 140552 - DNA, 255 bp, Zea mays
  Clone ID: MRT4577_59668C.1
accctttgcttgtccgcatgttagtagtcgcatcgagactagggacatatcttctgcagcgcacgttctgctacctctgctaccacgaactatccgaggcatcataacggccaaaacgggcagaatcaatgttgtctaggtcatatacgggtacagggtcctccagcggctgactattgatggctgtctcgggcctcacgagagtacagctgagtccgtaccggtgaatgctgctgcagtggcactggtggcggt

SEQ ID NO: 140553 - DNA, 336 bp, Zea mays
  Clone ID: MRT4577_59669C.1
aggaggaacagcaaaaccaaaagttcgcgcaatatcgttgaccgcaaccatgaccagaaggaagagcagttagtacaatccttgagggagttacttcttgcaagcaaacagctcccagataagtttgatgactactatgtccttctacggtatgcccattttatttattttctggaaaatttatgttatatattgtccttagactgacataatccacccaagtaacaggggaagagatgttttattcttcagtacttctaggatgcctgtttccttccagttttgcactgaagagatcatgacctcattgttctctggtcttgcagctatcttaaa

SEQ ID NO: 140554 - DNA, 468 bp, Zea mays
  Clone ID: MRT4577_5966C.1
ggccgctttttttttttttttattgttttatttttttttttttttttttttttttttttttgccacccactaaggaggccgtccatgtatggaaaaaacaaactgttggtctgtctgtactaactaaggggggtgccgactggtaaatcagccactcccttatttcaagccaggcctggctgtgggcgggggattgcaataaaacacaacccattccattactaacgatggtaagaaacagattaaatggggggggcaagctcacgcatgatggcttcctcaaagagggcacactcactctcactaatccattcattatatatataaataagctcgctgagtgcgtgaacaaacaggcggaatgaattctgactgacagaacataaaggatgctcaatcaaatactttatgtaagttaagtactcaataaaaactactcgcgtggataaagaacgggaagaaaaagac

SEQ ID NO: 140555 - DNA, 936 bp, Zea mays
  Clone ID: MRT4577_59670C.1
gcaagttacaaaaattttatattattttatcggagtggttacaaaagtataagtttgaaatatatgctagctcaagggatcatcctcaataagaagtatagaagggttacttagacttataagaaggctgagcccaccggcacttaacaccatcaacaacagcacaaagttagaacctgaaaaacaacagggaataaaaccctgagtatggaattactcagcaagacttacccgactaaagaaaagactctcaagggtatgctggttatatgggagtcaaggtaaggcttttcaatattcaaagactctgttttgcagaaatgcttactaaagtggatccttaaaaatccaattttatttatcaagttaagtaaaattacctgcactagagttctttctaccctagttcaatcactggtcctgcactagccaattcttaacaaaagcccatcgtctttagtggaatgctacgtgtagggcagtgaccaagtcttcataaccgcgaaggtacggcgatccgaatcgattatactcagctgaggatctccaatcacacgacatatgtagcacttaacccttgcatatgtcaacccgccaccggggttcttaagaccggatcaggttcacgcaaaccgagagcacagatacaccaccgtccagcctcttgccacggagggtacacgctactctcgccaccgctccacgcccatttcgtgttatcttattccggccttagtctgcccgaggcaaggcttacccatgacgaggcatgtgaccagttaaagggtcctcggtcagcacgcctacatacgcgttaatccttaaccaacctgggtagaacatcacctgttcctagcccaagtttcaatttaagtatttccatccttaggattgtgtatgttccttaggatgaaagagcatcacagggaactttgc

SEQ ID NO: 140556 - DNA, 292 bp, Zea mays
  Clone ID: MRT4577_59671C.1
cgcgctcgacgctcccgtcgctgtcggccaccgcgctgcgctgcgctgctcgcagagctcgtcccgacgctcgtccgaagaaattcaaatccggggcgctcgcgtcactcccagcgacaaatccgcgcgtagattctgctcccaattggaacccgcatgcgctggccatgttcacggaggggctagatcgcgacgccctcaagtgggtgcgagatggacagggagcggcggcgctgcatagccacgaccggatggatgcgctgcgttccgtgcgcggaagagccggccgcgg

SEQ ID NO: 140557 - DNA, 1704 bp, Zea mays
  Clone ID: MRT4577_59672C.1
cacacacaccaatatttttgcagcggaaatactattaccaaattttacaagttacaaaaattttatattattttatcggagtgattacaaaagtataagtttgaaatatatgctagctcaaatgaccatcctcaataagaagtatagaaggagtacttagacttataagaaggccgagcccaccggcacttaacaccatcaacagcatcacaaagttaggacctgaaaaacaacagggaataaaaccctgagtacggaattactcagcaagacttacccgactaaggaaaagactctcaagggtatgctggctagagggattcaaggtatggcttatcaagaatcaaagactctgttttgcacaaaagcttactaggagtggatccttaaaatccaattttattgtcaggttaagtaaacttacttatctctagagttctctctaacctagttcaaacacttatcctgaactagccaagttcttaatttatccttcatcttcactggattgctctgtgtagggcagtgaccaagtcttcataaccgcgaaggtacggcgatccgaatcgattatactcagctgaggatctccaatcacacgacatatgtagcacttaacccttgcatatgtcaacccgccaccgagtttcttaagaccagatcaggttcacgcaaaccgagagcacagatacaccaccgtccagcctcttgccacggagggtacacgctactctcgccaccgctccacgcccatttcgtgttatcttattctggccttagtctgcccgaggcaaggcttacccatgacgaggcatgtgaccagttaaagggtcctcggtcagcacgcctacatacgcattaatccttaaccaacctgggtagaacatcacctgttcctaacccaagtctcaatttaagtatttccatccttaggattgtgtctgttccttaggatgaaagagcatcacaggaaactttgcagtaagatcccactattgctccaaatgaaaatattcttgcaggtagaagccatcctctcccgggttagactgaggacaacctctatccacaaggtctaagcaaggctaagcatttttgtaaatcatattttgatacttcacagaagtatctataaaggtatggatatcaaggaaagcaatgcatcaaagggttccaagcaactcctatgaacctaatgcacatttcactagacttaaagtgtgcgaaaagtatttaaaaacacaaggaaaggggttgcatgcaccggggcttgcctttgttcacaggtgagtcaggctcggatccgcagatgtcgaagtagagccaagtccctgcctgagattccaaaggtggtggtgtcttctcttcagtcacttcactctcttcttcgttttctggccacggtaaagtggaagatctgcaggtgtggtcaccagacacattcagtgccttgatcgatggaattgggcgcgtccagggtatgatttggggaaggaagagcaatactgctgactgaagctactcactatggttgatgatcgaggcacggatcactgcactggcttctgctttctttccctcaccctgttgcttcaaggaagcccacgccggtgctgcagggtgaagattatccagggcaagggagggaggtgaagataggatggcactgttctggatatttgcacaggtgatatttcagtgatg

SEQ ID NO: 140558 - DNA, 594 bp, Zea mays
  unsure (1)..(594): unsure at all n locations
  Clone ID: MRT4577_59673C.1
ccggccgggaacgcanttcccgacttgantcaactgctgagacnctcccctcgagcgcgacagccaatcgaagccgactatacggtcatggactccaccggtaccgtatcagggggtaaggctaagaaagcagctcccgcgcgctaggtcggcggaccaaggaagaagtctcttgcccaggtgcgagaaggacgggctccagatccccgccggccgacatcgggcgctacttgaataatgggctctaccctcaccgaggcggcaccggagcccccgaatacctcgccgctgccctccaatacctcggccctgaagttctggagctccctggtcatgctgccagggacaaccagaacactcccattattccaccccacgggcttctggcgatccggaaccacgactagcttgggaagctgctgggcagcgtgaccatcgctcacggtgtagtgctccccaatatcaaccctgatctgctgtccaacaacaccgggttcacgaggccagagtgtggagtaaggagcgacagtccccccaaaaggtcgcccagtcccccaagaatgcatagactgactgactggagtgatctgatgc

SEQ ID NO: 140559 - DNA, 1424 bp, Zea mays
  Clone ID: MRT4577_59674C.1
ggccgcttttttttttttttttttcggttgcatgcaccggggcttgcctgcaataacactaggttagtgttgttagacgttgtccacttggcgatcatcctttgttctgatacttgttccgattatccatcttcaggttaatccaccagcatcatcttgcgaattagtccgcgcttggggtcgacttgagtcatcttccgcatcacgtgattaattatcgcaccgtttccacagctgacacgaatccgtgagatcggtagcgattttccgatccaggcaatttgtcgagcgcttagggaatatcgcgatgagaacttcgtcttcacccgattcttgagattgcttgatcacgcacggattgacgacgaccttcgattgtagtcttgagcgagctggtgagtggggttgagcaggagatgacgggtttgacgactcgactgtgaatgacacaacgacgagctgggacaggatccgagctaataggcacaatatggaatagtgaccagcatgacggacgaactaaatcgtggcgaggtcgacgacgagataaggattttaaagccgagcgagccgagagagcacgctggcgagcaggaacaggacacgcggcgagactcgacgagaaaactcgacacgccgtggcgagcagagaacctcacgcgcgcaatagaggagctcgacgacgaccggttaaagggagcttgacacacgcagcaggaacgagcagcagacgccgagctgaggaacaacggcgaggtcgcggccaagccgggcgaggaacacgcgaccagcaccaagggcgattcacctgcgcaggggcgagctgcgcgcgacagtagagctggagcagggaacgtaggaagtggaggcgagctggactgctggccagtgactcacggcacggcgagcacgagcacagagaaagggaaagcgcagggccgagcagtgagccggcgcgtgccagggaagaacaacgcttgcgcgggagcctgacaagggcacgacagacagcttcgacggcagccatggaggggctccgagctgtggtcgagaaacgggagcgcgacaccagggagtttcacggcgccggagctggaggaggaaggagagcgggtgggctgggcgctggctaagggagaaggagctccggccggctggaagttggaggcgggctggggcagagaggagcagccggtgctggaaaagatgggcgctgaacagggaacctgcgtgcagcacatggaggaagcggaaggagcagaggtcggatgagctcggagaggagttcggctggggataaaatagcagtgttcagcggtgagatttttccgagcggcgtgatttttctaggaagccgatgaagccagtacggttagcggcaaaaaaaaaaatctgacgaccccggccgaacccgagggtacccc

SEQ ID NO: 140560 - DNA, 425 bp, Zea mays
  Clone ID: MRT4577_59675C.1
ggccgcttttttttttttttttttgttttttttttttttttttttttttttttttttttttttttttttttttttttttttttttttttttttttaaacaaaaacattggcccaaccacctcaaatagaaatttaaaaggggccttcacccaaccacaaaattgcatcacatttgggggggcaaaacaaaggcaaggccccctgcaaaaaacaccccccacaaatttgttcaaaaaaaacccatttgggggggggttaaaaaaaccctacgggcgggcacaaaaattttggcaaaattattttctcaaaaccgggggttaaaatcatcaaaggccccatgggcccccaagcccctccttttgatctttggggaacccaccccggggaagaaaccctccatgttttggcacacaaaaaagggtggg

SEQ ID NO: 140561 - DNA, 369 bp, Zea mays
  unsure (1)..(369): unsure at all n locations
  Clone ID: MRT4577_59676C.1
cgggnaaaaaaacgcacaaannannnagaccaacnagcaacanagnaaagcacaagaggggaccaacaanggcagccaaaaannnngccgccggaagcnccngggnannncngcaagggcggggacggngaccannnacccgcaaggcncacaagcnccaagagcnnnccngcgncccccggaccacgcaccagcggngncnncggnaggggaaaacccaannnnngaacccgacagganccaacaggcaancgcagcnggaagcgaaccnnaaaaacccgggngccgccaacaancaacagcccaaaaacagcagngaccganggagcaaagaagggcacaaaacaggagggcacaacaacaacaaca

SEQ ID NO: 140562 - DNA, 2458 bp, Zea mays
  unsure (1)..(2458): unsure at all n locations
  Clone ID: MRT4577_59677C.1
aagtggttcaaagaaaataactttaaactattataaattatttatagttttgaaatatatgctagctcaagggatcatcctcnaataagaagtatagaagggttacttagacttataagaaggccgagcccaccggcacttaacaccatcaacaacagcacaaagttagaacctgaaaaacaacagggaataaaaccctgagtatggaattactcagcaagacttacccgactaaagaaaagactctcaangggtatgctggctagagggattcaaggtatggcttatcaagaatcaaagactctttttgcagaaaagcttactagaagtgggtccttaagccataattttacattacaaattaagtacttttcctgaatctagatttgcctaatctagagcattcacttgtcctacactagctttcttttaaaatccaacttttgtttcgcttgttatctacgatgagggtcgaagatccagtcttcatatccgagaagttcggcgatccgaatcgattaatacccagctggggatctccaaccacacgacatatgcttctcttaactcttttgcacatgtctaccattcccacggatcctccaccacatgaacaggttcgcgccacccgagagcacaccaccccttttaggcggtcctttgccaggagggtacgtgccactctcgccatctctccacgcccagtgcgcgattgtcttttcatgtatggaatagccgggttcaagcttaccctgtcccattctcagggcatgtggctagataagatagtccttgatcaacaggcctacatacgcatccaatccttaattgacccgggcggagcatcacctgttcctagcccaagtctcgatttaagtatttccatccttaggattgtgtctgttccttaggatgaaagagcatcacagggaactttgcagtaagatcccactattgctccaaacgaaaatattcttgcaggtagaagctatcctctccatggttaaattgaggacaacctctatccacaagatctaagcaaggctaagcatttttgtaaatcatattttgatacttcacagaagtatctataaaggtatggatatcaaggaaagcaatgcatcaaagggcttcaagtaactcctatgaacctaatgcacattccactagacttaagtgtgcaaaaagtatttaaaaacacaaggaaaggggttgcatgcaccggggcttgcctgggtaacactaggttagtgtttgttagacgatgtccacttgacgatcatcctttttcccgatacttgcttcgtctgtccatctccagttccgttcatcagcaccatcttgtggtcgactcagttctggttctccgtatcgcgtagttaattcacgtaccatgtccgaatcgactcggagctatgatttcgacgaggttatccggtttgaaccattcatcgaacaccatgtgtgcgtcgatcttcccaaaatcaaacaatcaatattcggcaagaacatcggtgccgatctccccaacacgcgacgagcaccagtccactcattttgccaaacagggagctgcaggggcgcacggccagcgggcacgaggaaacgacgatagcggggagcgagctcgcggcgcagcacgacgtgactgtggttgccggtgaactcggcaatcacgatgcgaggagcaggagaacggttggggcgagctcgacagggaacagcagagccagcgacgccagagagctcggcacggtggaacacgcgaccaaggtgttccctatcacgctccatgacacaacgctgctgagcgcgttacagaggcgaacgacaacgatgatggagtagcagctagcggtttgactctaaggcgatgtcatgcccatgcttgaggaaggtttgtgtcctggccacggcaagcacgaccaacgcagcggaggagaaacgagtcgttggcgatgatagcgcctaccgacagcagtgcgcgaggccggcgaacagaagcaagatccgagttggaaccgagatcaccggcgagctcacgcacgcatgggagggagataggtgtgagcaggaaggtcaacggcggccatgggcgacggcgagctgcagaccggcccaacagcgagaacaacagagagggcgagctggagtagagggcagagccgagcttgaatagggaccaggcgcggccatgaagatgagctgggcacgagcgagcagagacggggcgtccgccagcaggaaataaggagcggcgccatggggacaagcttgagggagcaggaggccggggcgagcaggacgcacggctggagagggcgagctgctcggccaacccggaggagcagggactgaccgatggccaaagtttgaagaaggcaacacaaactgctcccaggcatacagtaaagaagtcactagcgctggagataggaatggctgatttcagctgttg

SEQ ID NO: 140563 - DNA, 354 bp, Zea mays
  Clone ID: MRT4577_59678C.1
ggggtgggggttttttgacgtcacaagtgtaatatatcaaaagacaatgcaataaaggcgtaaagagagtagagtaactttattacatcatttagacaatagtgtcttaaaaagtatcatcatcaaagtacaatagaattaaacatggacactcttccataggaaggtgactggtgcatcgttagacttagttctcatcgacatcatctgcaaagtcttcttcatcaccctcttgctcgaacgtgtcctgcgggtcgtcttcgaacgtgtttggtccatctatcacacagtcagcttctggtaacacttggccttcacgcctatgatctggatctggggcgagaccccggccgg

SEQ ID NO: 140564 - DNA, 372 bp, Zea mays
  unsure (1)..(372): unsure at all n locations
  Clone ID: MRT4577_59679C.1
cgacgagaagcgcgagttcaccaccgtcatgaagaagccgttgcgcccgcgtctcgtgccaaggagttgatcggacatcagacttcaatagtgaactttttggacaaattaataaaatagacgatctagcagctcgtctaatagcagatcatggagttactaaaaccagctctttaccgagcacagaactttgccgagggcggtactcggcaaagtctgctttgccgagtgcccgataaaaagcactcggcaaaggcgtggattccgatagtaacttgttttctacattatttttactttttcttttctaataatataatttatttcttgaaatgnangannnaaaaaaaaaaaanaaannnaaaaagggcg

SEQ ID NO: 140565 - DNA, 1487 bp, Zea mays
  Clone ID: MRT4577_5967C.1
tcactatgccgctagggttttctcctgccaattgctaatgctgatctccacaactgtgtggctagcatgccaggctttggtggcatgatgagagcatgcgatgccagggcctgcaacaatcaatatcctcaggcagccgaaagtgacaccatcagtcttgaccttggtgtagctatcggcccttaccacggcgatgcaacaaaccagatgcagccctcagttccgaggccaatggaatctcctgggctcgatgccgctccgatggagataatgttccgggtccccaggttatgtgtacgatcattctggaggtggaagaccctaccctggggatgactctaatgatgatgatgacttggactcgaaacgcaggaaaatggaatctgctggtatcgacgccgctttgatgggtaaaccaaatcgtgagcctcgtgttgttgtacaaactgttagtgaagttgatatcttggacgatgggtatcgctggcgcaaatatgggcagaaagtagtgaaaggaaatcccaacccacggagttactacaaatgcacaaatacaggatgcccggtcaggaagcatgttgagagagcatcacatgacccgaagtcagtgatcacaacatatgaaggaaaacataaccatgaagtccctgtttccaggaatgcaagccatgagatgtccacagctcccatgaagcctgctgtgcatcctattaacagcaacatgccaggccttggtggcatgatgagagcatgtgatgccagggccttcaacaatcaatattctcaggcagctgaaagtgacaccatcagtcttgaccttggtgtaggtatcagccctaaccacagcgatgcaacaaaccagatgcagccctcagttccagaacctatgcagtatcagatgcgacacatggctcctgtgtacggtagcatgggacttccaggaatgcctgtgccagcaatacctggcagcatgtacggttccagagaagaaaaaggaaacgaagggtttactttcaaagctgcacctttggaccgatcagctaacttatgttacagtagtgctggtaacttagtgatgggtccatgagtgcctcttctgatggctatacctccatgaatcacacctatcaccgtcgtcatgaagttctcttcagaagatgctcctctacttcgtatcgtccgcacataattggaggcggtcaaggtatacctgggagctgcagcgatggcacatgatgtcttttgctgtgtggatgaactcgctgtatgtgacgctgcagctaaacattcgttgtacagcaaaccagttatgattaattagattatgataatttggttatgtaaacttctttctggacataaccgaagagccatctggtggcaaagctttgttatctcctgcatatgaacgatgccagtttgacattcatatgaaatgaaatatatcatttcacaaaaaaaaaaaaaaaaaaaaaaaaaaaaaaaaa

SEQ ID NO: 140566 - DNA, 2476 bp, Zea mays
  Clone ID: MRT4577_59680C.1
agcgaaaatgttattaccaaattttacaagttacaaaaattttactttgtacatgatcggagtgattacaaaagtataagtttgaaatatatgctagctcaagtgaccatcctcaataagaagtatagaagagttacttagacttataagaaggccgagcccactggcacttaacaccatcaacaatagcataaaagttaaaacctgaaaaacaacaggcaataaaaccctgagtatggaattactcagcaagacttacccgactaaagaaaagactctcaaggatatgctgtatttgggaatcaaggagaggctttagcaagaatcaacttagatacttttgcagaaatagcttactaaagtgagtccttactttcaacattttaatgctagattaagtattaatagaccttgtttgcatctagtctaatttcaccatcacattaatcaatccaacatgatttttgctcattaagattccatccatgacttagattgcacggcagtgaccaagtcttcatgtccgcgaagttacggcgatccgaatcgattatacttagctgaggatctccaatcacacgacatatgtagcacttaatccttgcatatgtcaacccgccaccggggttcttaagaccagaacaggttcacgcgaaccgagagcacagatacaccaccgtccagcctcttgccacggagggtacacgctactctcgccaccgctccacgcccattccgtgttatcttattctggccttagtctgcccgaggcaaggcttacccatgacgaggcatgtgaccagttaaagggtcctcgatcatcaagcctacatacgcatccaatccttaatcaacctgggtagaacatcacctgttcctagcccaagtcccgatttaagtatttccacccttaggattgtttgtgttccttaggatgaaaagagcatcacagggaactttgcagtaagatcccaccacgctctcaatgaaaatattcttgcaggtaaaagccatctttcctcaggataacccctgagctaggcagtattgcaaaagacaacctctaaccacaagatctaagcagggctaagcatttttgtaaatcatattttgatacttcaccagaagtatctataaaggtatggatatcaaggaaggcaatgcatcaaagggtttcaagcaactcctataaacctaatgcacatttcactagacttaaagtgtgcaaaaattatttgaaaacacaaggaaggggttgcatgcaccggggcttgcctggaataaacactaggttagtgtttgttaggtggcgaccacttgacgatcagcctttgttccgatacttgcttcgtccatctatctttgggttaatccatcaatattatcttgcggagaagctcacactttccagcatcttgtggtcgactcagttttggtcctcgtttccacagctcacacgaatccgcgagatcggtagcgattttccggtccaggcaatttgtcgagcgcttggggaatatggcgctgctagcttcgtcttcacccgattcttgggatttcttgctgatgcacggaacgacgacgactttgagctaaagtcgggtgcgagctggtgaggtggggtcgaactgggactagaggacgacgaacgccatggcgggttagagactggatttaacaacggtgttgtatcatggcaaatagaaaatcgatgatcgaccaagaggtgatcggcgagttgaacgactccgacgatttgacggccatagacgcagccgggataactaaaaatactacgacagctaagaatcaactcggagacgacgacgggcacgcacgagaggagctcgacgcggaaacttgacacgccgttgcgagcagagaattttcgtgcgcacgacaaacaacgaaagagcaagttgcgcatgcgcagagagctcgacaacccgcagcagggactagcagggcgcgagctgcgcgcaggcgcgcgacgaccacgacaaaggagcagagacggcgagcacgcgcgcaggaaagggacctcggccatgggcagggactcgcgaccggcaagctgaaggagatggacgtggcatgaacggacagagggagcaggaggttcacgacgggagcagagaagtcggcacgcaggggagaacagcggccgagcaagagctagagcttcaccgacgtgccgagaggaaggctgcgcgcgcaggggagttgagcgccgagcgaacgcagggagatgttgagctcgcgcgcagggctgaggaacgcgcgcgcaggcagagccgctcggcagagcgcgagcgagcagggagacgcggcaccagagctggggctaggcgcgacggacagagatggagcgagcagaggcagctggggagaagaagaccgcacacgaaggataagcagcctgcgcgtgaaaatatcaagcgcgcggcgttcccggccggcctcgagggtcccaatg

SEQ ID NO: 140567 - DNA, 1971 bp, Zea mays
  Clone ID: MRT4577_59681C.1
ggccgcttttttttttttttttttgcagcggaaatcttattaccaaattttacaggttacaaaaattttacattattttatcggagtgattacaaaagtataagtttgaaatatataccatcctcattaagaagtatagaagaactacctagacttataagaaggtcgagcccaccggcacttaacaacatcatcagcagcacaaaactataccctgaaaaacaacagggaataaaaccctgagtatggaattactcagcaagacttacccgactaaagaaaagactctcaagggtatgctggaattgggaatcaaggagaggctttagcaagaatcaacttagatacttttgtagaaatagcttactaaagtgaatccttgctttcaatgttttaacaccagattaaatattaatagactctgtttgcatctggtctaatttcaccatctcatcaatacaacatcatttttattcttgaggttcacatcgtgacttaggttgtagggaagtgatcaagtcttcataaccgcgaaggtacgacgatctgaatcgattatactcagctgaggatctccgatcacacgacatatgtagcacttaacccttgcatatgtcaacccaccaccggggttcttaagaccagatcaggttcacgtgaaccgagagcacagatacaccaccgtccagcctcttgccacggaaggtacacgctactctcaccaccgctccacgcccattctgtgttatcttattctggccttagtctgcccgagataaggcttacccatgacgaggcatgtgaccagttaaagggtcctcgatcagcatgcctacatacgcattcaatccttaatcaacctgggtagaacatcacctgttcctagcccaagttccgatttaagtacttccatccttaggattgtttcgtgttccttaggatgaaaagagcatcacaggaaactttgcagtaagatcccaccatgctcccaatgaaaatatattcttgctggtagatgccatccgtactcaggatactccctgagctaggcattattgcaaagcacaacctctatccaccagatctaagcagggctaagcatttttgtaaacaatatttgatacttccaaagaagtatctataacaggaatggatatcaaggtagtcaatgcatcaaatagttttcaagcatctcctataacttaatgcacatttcactagacttaaagtgtataaaagtcttttaaaaatacaaggaaaggggtaaatgcaccggggcttgccttattgcagtgaagaggtactctatccctctattaaacctcagttagatggctcctccacttgatcagcagccactggagtagattcctcttcagtcaccacttcagcttgaatattcactccttctggtaggagttctttgccgagcatggaacaagtagtacacggccaagaatacttgtgggaaaccttatccacggggaggtgaaaaacggttgggtttggtcaccacaggcaagaggttggcattcagctctagagtaaaacaaacttggtggctgaaagagagggtgcacaccagcaagaataccaggactccaacacctttgtagtggactgggactacagctcgagaacaagggagaaaagcttttctgaactcagtcgtggaacacactgaataaataggcagggggaggggtcactgagcgcatccagtccatggggagaaggaggcaaacctgggctacggagggggttataccagcagtacttagactgcacactcaagtagtgaactttggctagaatttgagggcaaggaagaaatcttcactcaatacggcagcccaaggtactaaatataggggcaggtgcagtggagctcatccacgcttgataaggaggattcctagagtgctagcacaccaaaggttcaaaaacgtggcatacaagcactaccccggc

SEQ ID NO: 140568 - DNA, 249 bp, Zea mays
  Clone ID: MRT4577_59682C.1
atagctatgtcgaggaacgaggcctctactgtgttctgtgctccgcgcatgttgcagctggtcgcttgatcgaaagatgtttcagcctcccatctgctagctatgatacagatggttcctgataataatgatgacatattctgtgcataaaaaaaaaaaaaaaaaaaaaaagcttgtacctgacccaccggacgaccgggcaggtgtaccaaactttttttcttttttttttttttttttgtggtttta

SEQ ID NO: 140569 - DNA, 2447 bp, Zea mays
  Clone ID: MRT4577_59683C.1
gcagcggaaatcttagtaccaaattttacaggttacaaaaattttacattgtacatgaccggggtgattacaaaggtgattcaaagaaataactttaaactgttataaattatttataagtttaaaatatatgctagctcaagtgaccatcctcaataagaagataaagatggggtatacttatataagaaggccgagcccaccggcacttaacaccatcaacagcagcacaaaactataacctgaaaaacaacagggaataaaaccctgagtatggaattactcagcaagacttacccgactaaagaaaagactctcaaggatatgctggatttgggaatcaaggagaggctttagcaagaatcaacttagatacctttgcagaaatagcttactaaagtgagtccttactttcaatattttaacgccagattaaatattaatagactctatttgcatctggtctaatttcaccatctcatcaatacaacatcatttttattcataatgtttacatcctgacttaggttgtaggtcggagatcaagtctccactctccggggatataacggcgatccgaatcgatttactcagctgaggatctctaaccacacgacatatgtagcacttaacccttgcatatgtcaaccgttcccacggatcctccactacatgaacaggtccacgccacccgagagcacaccaccccttttaggcgatcctttgccaggagggtacgtgccactctcgccatctctccactcccagtgcgcgattgtcttttcatgtatggaatagccgggttcaagcttaccctgtcccatttccagggcatgtggctagttaagatagtccttgatcaacaggcctacatatgcatccaatccttaactaacctgggtagaacatcacctgttcctagcccaagtcccgatttaagtactttcatccttaggattgtttatgttcctaggatgaaaagagcatcaaagggaactttgcagtaagatcccaccacgctctcaacaaaaatattcttgcaggtagaagccatctttccccaggataacccctaagctaggccttaatgcaaaagacaacctctatccacaagatctgagaagggctaagtatttttttaaatcatattttgatacttcaccagaagtatctataaaggtatggatatcaaggaaggcaatgcatcaatggttccaagcaactcctataaacctaatgcacattttactagacttaaagtgcgcaaaaattatttaaaaacacaaggaaggggttgcatgcaccggggcttgcgtggaataaacactgggttagtgtttgttagccggcgtccactttacgaccatcttcaggtttgtccatcagcatcatcctgcggaatagcccgcgcttggggtcgacttaagtcatcttccgcatcatgtgattaattatcgcaccgtttcaacagctgacacgaatccgcgagatcggtagcgattttccgatccaggcaatttgtcgagcgcttgagaaatatcgcgctgctaaattcgtcttcacccgattcttgagattgcttgatgatgcacggattgacgacgaccttcgattgtagtcttgagcgagctggtgaggtggggttgagcagaagatgacgagtttgacgactggactgtgaatgacacaacgacgagctaggacaggatccgagctaataggcacaatatggaatagtgaccagcacgacggacgaactaagtcgtggcgaggtcgacgacgagatagggattttaaagccgagcgagccgagagggcacgctggcgagcaggaaacaggacgcgcggcgagactcgacgaggaaacttgacacgccgtggcgaacagagaacctcgcgcgcgcaatagaggagctcgacgacgagcagttaacgcaaactccgagattccccgatacgaagctgacagatcgaatcgactcaaattgcgcaatcagatccatccctcagggttctcatcgaacacgagatgcgcaagccacgacatcggtagcgagtgaggtcgacaacaaggctggggctgctgcacacacgacacaacaacgtagacagttagcacggcgagcagggacgacgggcgaactctggtttaggcgaacagaacgtgacacagggagcttgaggtgcgggttcacgcatccatagccgaacggtggagctgaggccaagcgccggctgtgaagaacgtcggctattacagggagtcgcagacgagggatttccatgtccggcgcagggaatggcggcgcagaagaacagagacgcgggctatcgacgagatgggatccgacgcgcgtaggagagagagacagctgagcgcgcagcgatgggagcagggagcgcatgcaggaagctagtcgggcgcggtagcaggagcttgcaccagg

SEQ ID NO: 140570 - DNA, 361 bp, Zea mays
  Clone ID: MRT4577_59684C.1
accccaaggccaaattttttaaccttcatcccctttaggggtccataaacaattacttaaaacgacctgtttttgaattttttattcaagccgaaaagaatgcagggcacacgtcctttatgcgtttattccccacatttttttttgtccagcacaacactttttcacactttttttgaccacttttaaaccgctccgggtgttttttttaaacctttaagccaggggttactccacaacgctcccttaaaaattgagctgaacgttttcctacttctcgctggacaaacctttgcgagcgcccaaacatttttttttttgaggaacttctcaccgttcaccaaaattaggggaatttttt

SEQ ID NO: 140571 - DNA, 359 bp, Zea mays
  Clone ID: MRT4577_59685C.1
atttccatctggagctactgccttgccctcataggatctaagacatggcacccaagaaggccaagagaagggcagcagcagaagggagctccaatgttttctccatgtttgaccagactcagatccaggagttcaaggaggctttcactgtaattgatcagaacagggatggcattattgacaaggaggatcttcgggacacctttgcggccatgggccgtctcaatgtgaagaatgaggaactcgacgccatgatgaaggaagccagtgggcctatcaacttcactgtcttcctgaccatgtttggggagaagctgaagggtgcggaccccgaggatgtgatcactggagccttcaag

SEQ ID NO: 140572 - DNA, 1521 bp, Zea mays
  Clone ID: MRT4577_59686C.1
acaaaagtgattcaaagaaataactttgaactgttataaattatttctatttttgaaatatatgctagctcaagtgaccatcctcaataagaagtatagaagagttacttagacttataagaacgccgagcccaccggcacttaacaccatcaacagcagcacaaagttaaaacctgaaaaacaacagggaataaaaccctgagtatggaattactcagcaagacttacccgactaaagaaaagagtctcaagggtatgctagatttaggaatcaaggagaggctcttagcaagaatcaacttagatacttttgcagaaatagcttactaaagtgagtccttactttcaatattttaatgccagattaaatattaatagactctgtttgcatctggtttaatttctccatctcatcaatataacatcatttttattcatgaggttcacatcctgacttaggttgcaggtcagtgaccaagtcttcatgtccgcgaagttacggcgatctgaatcgattatactcagctgaggcatctccaatcacacgacatatgtagcacttaacccttgcatatgtcaacttgccaacaggtttcttaagaccagaccgggttcacgccaaccgagagcacagatacactaccgtccaacctcttgccacggagggtacacgcaactctcgccatctctccactcccattgtgtgttggcctttctggtattagtctgcccgaggcaaagcttatccatgatgaggcatgtgaccagttaaaaggtcctcaatcatcaagcctacatcgacatggtccttaatcgactcaaacggagacactacaccgagactcccttctcgtgcaagtcaaccacccggtctcagctttatcatttaaaactcaaagtttggtacctggcagaggtacatcttttctgatgttgaacccatcatggcctttgacggatccaccatcaagtcttttctttgtaaaaattcccatccactatgaagcatcaccttttgtttttaaaacaaaacattttgtttttctaaagcaaggctaagcatcaaaaatcctttgtaaaacagggatttcaagggatggtaatcaattttccaaggaaggaaatgcaggaattgttttagcaatcaactcctatcacctaatgcatcaagcaagtgataaagatttttaaaacacaaggaggggtggtaaatgcaccggggcttgcctgagtaacactaggttagtgttgttaggtgacgtccacttgacgattattcatgtcctagcacttgattaggcaggttcgttcatcagcttcatcctgcggattagtccgtgcttggggtcgacttggcttgtcttccgcatcgcgcgattaattaacgtacctgaataaaatgcattatgcatatgaatgcatatagacaggaatatttcaaatctaaataatactacgcgatagcgaattaaacacctaacgacgaggcgttgtaccatttcatacggaaacactagtta

SEQ ID NO: 140573 - DNA, 558 bp, Zea mays
  Clone ID: MRT4577_59687C.1
tttttttttttttttttccccccgaccaagacccaattcaatatcttaataggaagaatgtcttgatccgcctcgtatatctatcatttgtgttgatctggaatcgagattggaatgccttgctctgcctaatcgtgaatagtatatgcctcatcccgctagccagatctctaccgtcttattgatcgaaagctagggatacttatttattttcttgatgattgaaaagctagtttgaattcgttgatctgccgataccgggccccatttcactggccagcgagcttgtgtattactttgcaaatgaagcgtatctctttgatttacttctgttgatgtctcgaaccgcttagcggttagttttagttaaggatagcaatgctattgtccattccgtctagccgctattgtccaattatagtacagtgtcagttaggacgggcctgcccctgcttgcttcctcgagagtgagagaaggaagtcctagagaggggcactatttcttccgagaagtgcaagatggggaataacctattgtattgatatcgctgagtcaag

SEQ ID NO: 140574 - DNA, 665 bp, Zea mays
  Clone ID: MRT4577_59688C.1
acaccaacagtttgcatcggaaatcttattaccaaattttacaagttacaaaaattttactttgtacatgatcgaagtgattacaaaagtgattcaaagaaataactttgaactattataaactatttatagttttgaaatatatgctaggtcaagtgaccatcctcaataagaagataaagacggggtatacttatataagaaggccgagcccaccggcacttaacaccatcaacaacatcacaagactataacctgaaaaacaatagggaataaaccctgagtatggaattactcaataagacttacccgactaaagaaaagactctcaagggtatgctggaattgggaatcaaggagaggctttagcaagaatcaacttagatacttttgcagaaatagcttactaaagtgaatccttactttcaatgttttaacgccagattaaatattaatagactctgtttgcatctggtctaatttcaccatctcatcaatacaacatcatttttattcttgaggttcacatcctgacttaggttgtaggggaagtgaccaagtcttcataaccgcgaaggtacggcgatccgaatcgattatactcagctgaggatctccaatcacacgacatatgtagcacttaacccttgcatatgtcaacccgc

SEQ ID NO: 140575 - DNA, 532 bp, Zea mays
  Clone ID: MRT4577_59689C.1
gttaaaagatattattctggctatttttattggaaaacggattctttccgaatcttagacccaaaggggtgggctgaacttattcacattctaccatgtggtaaggagatccctacagccctaataccctaacaagggggacgtcaagtgttaatccatcatggccaatgcacagctttacatgtgttgtcaccttccaagaaccaaacagggttcctgcgaaaatgcatatccctgttaacttcattcgctgaaactatgtaccccgtgtcaaacccattttgcccaccataaggccgctgacaccatacactgatgacttgaagccatatttgggattaaaagaaccaccaaaatcttccttgcaagctttaatacttggaacgagcacataaacgtatcatattacactcatcatgggaccagcgcttggctttattatggcacaatacattatggggctgaaaaatattggtacgagttgacagcttgcgaaaaacagactactctttggcaacctcatatgctgggc

SEQ ID NO: 140576 - DNA, 2349 bp, Zea mays
  Clone ID: MRT4577_5968C.1
ttcggggccactttccccaaactgcccttcccaccatcccctctaggctccaaaaccaccacctagctgctcgtcgctccttgtctcgtctccttcactcacctccccccgcggcccgcgccaatggccgattcgccaaaccctagctccggcgaccttcccgccggcgctgggtgctcgccggagaagccggtcctggcggatcgacgtgtgtctgcgctcgccggcgccggcgcgaggtacaaggccatgtcccccgcgcggctgccgatatcgcgggagccgtgcctcaccatccccaccgggtttagccccggagctctcctcgagtcccccgtcctcctcaacaacttcaaggttgaaccgtctcccacaaccggtactctgagcatggctgcaaacatgaacaagagcactcatccggacatactgccttcgcctagggataattcagctgatagtggccaagaagatggaggctctcgggagtttgaattcaagcctcatctcaattctcaatcgtcggctactgcagtcaacaatcaaaatcatcatgacattcctatgcaaaatcatggctcaaatcatgcctcaccatctagcaatttgatgactgaaaataaacctctatgctcacgggaatcgagtcacacagcaaatgtttcaagtgctccaaaccaacctgtttcaatagtttgtccatctgacaacatgcctgctgaagttggtacatcagagatgcacctgataaatagctctgaaaatgctgcccaggagacacaaactgaaaatgtagctgaaaaatcagcagaggatggctataattggcgcaaatatggacagaagcatgtcaagggaagtgaaaatcctagaagttattacaagtgcactcatcctaattgtgaagttaaaaagctattagagcgttcgcttgatggtcagattactgaagttgtttataaagggcatcataatcatcccaagccccaaccaaatagaaggttagctgctggtgcagttccttcaagccaggctgaagaaagatacgatggtgtggcacctattgaagacaaaccttcaaatatttattccaacctctgtaaccaagcacattcagctggcatggttgataatgttccgggtccagcaagtgatgatgatgttgatgctggaggtggaagaccctaccctggggatgactctaatgatgatgatgacttggactcaaaacgcaggaaaatggaatctgctggtatcgatgctgctttgatgggtaaaccaaatcgcgagccccgtgtcgttgtacaaactgttagtgaagttgatatcttggatgatgggtatcgctggcgcaaatatgggcagaaagtagtgaaaggaaatcccaacccacggagttactacaagtgcacacatacaggatgcccggtcaggaagcatgttgagagagcatcacatgacccgaagtcggtgatcacaacatatgaaggaaaacataaccatgaagtccctgtttccaggaatgcaagccatgagatgtccacagctcccatgaagcctgctgtgcatcctattaacagcaacatgccaggccttggtggcatgatgagagcatgtgatgccaggggccttcaccaatcaatattctcaggcagctgaaagtgacaccatcagtcttgacctttggtgtaggcatcagcccctacccacagcgatgcaacaaaccaaatgcagccttcagttccagaatctatgcagtatcaaatgcaacacatggctcctgtatatggtagcatgggacttccaggaatgcctgtgacagcagtacctggaaatgcagctagcagcatatacggttctagagaagaaaacggaaatgaagggtttactttcaaagccgcaccattggaccgatcaactaacttatgttacagtagtgctggtaacttagtgatgggtccatgagtgtctctgctgatggtcatacctccatgaagcacatattaccgtaatcatgaagattgcttcagaaggtgctctactgtgtatcgtcatccacacataattgaatcggaggtggtcaaggtatacctgggagctgcagcgttgacacatgagccttttgctgttttggatgtacttgctgtatgtgacgctgcagctcaacattcgttgtacagcaaaccagttatgattaattagattctgataatttggttatgtaaacttctttctgtactggaatatgggatagaaccaaagatccgtctggtggcaaagctttgttatgccctgcatatgaacggtgccagtttgatatccatatgaaatgaaatatatcatttcacc

SEQ ID NO: 140577 - DNA, 502 bp, Zea mays
  Clone ID: MRT4577_59690C.1
acacacacaacattttttgcagcggaaatcttattaccaaattttacaggttacaaaaattttacattattttatcagagtgattacaaaagtataaatttgaaatatatgctagctcaagtgaccatcctcaataagaagaatagaagaagtacttagacatataagaaggccgagcccaccggcacttaacacaccatcaacagcagcacaaaactataacctgaaaaacaacagtgaataaaaccctgagtatggaattactcagcaagacttacccgactaaagaaaagactctcaagggtatgctggaattgggaatcaaggagaggctttagcaagagtcaacttagatgcttttgcagaaatagcttactaaagtgagtccttactttcaatattttaatgccaaattaagtattaatagactctgtttgcatatggtctacttttaccatttcatcaatacaacatcatttttattattaatgctcacatcctg

SEQ ID NO: 140578 - DNA, 173 bp, Zea mays
  Clone ID: MRT4577_59691C.1
ccgcgcgtccgacaggatcttgcaaggttagggacccaggggttacacattttataactgaaaaacacatgggcggtttttgaggttgccaagttttaatttaaatgcaaatccacttggccaccaccatgtaccaaagcaggcttttaacattaaaggagaatgtttttttt

SEQ ID NO: 140579 - DNA, 189 bp, Zea mays
  unsure (1)..(189): unsure at all n locations
  Clone ID: MRT4577_59692C.1
gtgatgaaacgatgcatcngnttcattttgtnccttntcatttttaacttttcatgttgagnactacgctgaaagcaaatgaacgnccctcattggtcagtttgtttccgagaaaaaaannaaagttangtaaatcgntcagtntaatntagaaatccaaatananggggcngncnntttattcatttt

SEQ ID NO: 140580 - DNA, 410 bp, Zea mays
  Clone ID: MRT4577_59693C.1
gaggtaccaggcgagctcccgttaacctgtctgccagctgctctgcaaatggagtcccgtgctctcgccctcgtctccgtcctcttcctctctctgcttcgtgccgccacggccaccaccgctggaaccgccgacggcacgcagtggtggggatacgtggaggttcggccgaaggctcacctgttctggtggtactacaagagcccccaggcccagagggtgtccacgcccaccaagccatggccgaccgtcctctggctgcagggtggcccgggagcgtccggcgtcggggtcggcaacttcctggaggtcgggccgctcaacggcgacatgaagccacgcagctcgacatggctgcacaagggcaacctcatcttcgtggacaaacctgtgggggtcggatacagcta

SEQ ID NO: 140581 - DNA, 1027 bp, Zea mays
  Clone ID: MRT4577_59694C.1
cttgggttcctcgatgccggccggggaatagagttttacctagaataggtttggtcctccagaaaacatcccaggtggtctatctgatcactgtcgagactcgagaggcgcatgaggagcttgggtttgacagcggaagaacaggaagtggattactatctccaatcccatgcagataggcttcattgcaagatctccgattagttaagggcaacgcgaagaagggggtctcttgccagttgccaccagcttgagcttctcaaactgcaggagcagcacaaggatcatcgggaggaagagagtcgccgtctcgccgactccgggctcccggaccccgcactcgccatcacgcaccctgcgcaagcagcgaagcgtccacttccacatgggcgacgccgtcaacctccttgagtcgctgccgcttgatgtactgataaaaatcttgtgcaaggtgaactacagtgatctgaggcaccttctcctagtgtcaaaacaagtcaaggaagcaacaatttatgctagggagctgcatttcaagttttcgacgccgtcggcgaagtccgtttttagagacgaggaaaccggcggcgacgacgacaattgcccttgcgcgcccaagcaacaccgggctgcaaagtcacgcttgcggagccagaacctagagagcatcgccgtcaacctgtcggcgtcgttcgagagcatgctccccgaggtctagatgtaaatatacgacatccacatgttttcagtttgtgatccgttcgtgcttgtatctagtagtttcaggttacaagtttagtggcttttgtagcccacgttatagagaggctcctaaaatattgagaatagtatactcggatgcgtgattactagtcttaagtaattatagatatatggtcgtacgtagttcttcaatgttgtgattgaagaacacacgcgatgtcttctctaatcttctgtgtacctatatcttgtaagttatttattgtcaaagagatgtcaattctcttatgcgtacgcatgctgc

SEQ ID NO: 140582 - DNA, 231 bp, Zea mays
  Clone ID: MRT4577_59695C.1
ggccgagcgcgacgcctgtgcttcagcaggctagctccgctgtccgctccgccgctcactaactagctgctggaccgcgcctccctccatcgcgccggcgcgcgcgcctagctataggagagccgccttttcatggtcgggacgagatgcctcgcctcgcattcctccgccgctccctccccgcgaggcttctcgcgcgagcgtgggtggtggttggagtccctttgagcc

SEQ ID NO: 140583 - DNA, 193 bp, Zea mays
  unsure (1)..(193): unsure at all n locations
  Clone ID: MRT4577_59696C.1
gttgagtntnnccgaatgtgtacctcgaggccggccgggnatgacttccctcacactaatagggctcttcgtctccccgtaaccaggccacgacatcatacctactgacaccgagtcgacccaaccaaacacaccgccaatgcataaatgtcgcgcaaccaagccaacgagtagagcgacccgctgaaatgta

SEQ ID NO: 140584 - DNA, 540 bp, Zea mays
  Clone ID: MRT4577_59697C.1
atcttttctctattagtttatcatattctttctttgatactcaccattgctgttccttattgtttcattcttttggtccacgcctaatttttacttattaaacacgggaacagaacttgtgctccacatccatgccaatgagcttggtcggggaacggttgagctcccctcttcaaacagcaagtcttggccaccgtagacctcaaacccaggaatacactctgcaaggagaggatcctattcattgacgccacataacccatggtcagactgattcagacagtcattgttttgtctgaggatttcctctgttgagatccacctgcctaaaacccatcttcttcagctccgtaaggaacttcttctcaatgcgaacatgcagttctgacagcttaggaaccacatccctaacaagtggaggcacaccaaaagcccctgttgcaagctcaggggcaataggatgagcatgaactggggctgaaaagtgtatagctgaaggcaagacaggggtaataggtgaccgtgggtgactcgtgacga

SEQ ID NO: 140585 - DNA, 2475 bp, Zea mays
  Clone ID: MRT4577_59698C.1
gagcatcacagggaactttgcagtaagatcccaccattgctccaaatgaaaatattcttgcaggtagaagccatcctttctcgagctaggctgaggacaacctctatccacaagatctaagcagggctaagcatttttgtaaaacatattttgatacttcaccagaagtatctataaaggtatggatgtcaaggaaagcaatgcatcaaagggttccaagcaactcctataaacctaatgcacatttcactagacttaaagtgtgcaaaaattatttaaaaacacaaggaaggggttgcatgcaccggggcttgcctgggtaacactagtttagtgttgttagacgatgaccacttgacgagtatccctcgatcaagcacttgcttgctttaaccatcttcaggttggttcatcagcatcatcctgcggattagcccgcacttggggtcgacttgagtcatcttccgcatcacgtgattaattatcgcaccgtttccacagctgacacgaatccgcgagatcggtagcgattttccgatccaagcaatttgtcgagcgcttaggaaaaatcgcgctgctaacttcgtcttgggatttcttgacgacgcacaaaaacgacgacgatcttcgattgaagtcttcgaccgagcacttgataagcgatacgcaaggacctcgcttatttttgtctaatgttcgggattcggggttcgacgagatcgagcagagaagaatgaggttcggcaagctcgacgacgatacgagagggtgacgtatatagagttgtaggtctagcgagctgacacaagtgacagagatagccgcgtatggcagcagcacgttgacagtctatggatttgggtgttttatcgaataggcaggatgcgaggagccgaacaattacttgaacatggtcgacggcgaggtctgccggaagagaatatcggcacacgatgcggcacgacgaacgcgcatagcttcaaaaccacacgcgcgagacccaactactacgcactgcgcattaggaacaagcgcacgcgatagcgaacccggttgatgagcctaacgacacagggccaagcgacaaacacaattggcgaggtcgatgacgcgatggaaattaaagccgagcgagccgagaaggcgcgctggcgaacaggaaacaggacacacagcgagactcgacgaggaaactcgatacaccgttgcgagcaacgaacttcgcgcgcaatagaagagctcgacgataaccggttagagggagcttgacacgcgcagcagggacgagcagcaggcgccgagctgcgcgcaggcacgcgacggccacggcaaggaagctccgtgagctaggcgactgcgcgtccgtcaagcagagcagggcagtcgtgccatgcagagcagggcagtcgtgccatgagaaagaagctgcgcacggctagagagcagcgcgcggcgagggaagcagactccggcaaatcccagggcgcggccatgggagactcggtaggcacggccgagcagagatggagctcggcaaactccatgggcgagcagagcgcgcagggctgggcaaaccaggacgcgcacagggcgatggcaagactgagcggcgcgtagggaagaacgcgcgtagaaccagggcgcgacatggacacaggagtgcgtgcaggggcagagggacgcgccgaagggagctaggtacgaaagaactgtgagcaggggcaagctcgcacggaagaagtcgctcggctgggcgcgcagagctccaagcgaatgagctgagcgatggcgcgcgaccagggcgagcaccggcagagagacgtccggccgacgactgctgtgaagatggctaggccgagcgcgggaaagagggagaggagacgcgcggcacagaaaaagggacaggggcggcgaccatcgaacagaggggagagggaggggcttgagcggggtacagggcgcgagtagagagaactggaaggagctcgacgggctcgcggctgggagcagtaccaccatggttgggagctgcaagggcgcggcaccagggagctccgagcagggacgccgcggtccgagcgcaggaagccgggcggggcgcgcgacgcagagagcagcgctggcagaagaactcgcgcgcgcgccagggagctaggaacggcgcgacacgcaggggaggggatccggcgcagggagctcggggcgcagagcaccatggctgtccgaggcgagcgcgcccgcagcctgggcgggctgggaaacaaccagggcgcgcgagattcggtggagaagcaggacagatgccgcggccagggaagctccacggcgggctggaacagagactgagcacttgccgtacgtagggaatggagaggagatgggagaggatagagatggacggtgaagaaaaatcttgcggccgaaagaaatcaaaaacaaaggcggctggatttttccacgggctgcgggatttct

SEQ ID NO: 140586 - DNA, 269 bp, Zea mays
  Clone ID: MRT4577_59699C.1
ggagcacttggatttgcctggcatggattgcgtgtttgtaggtggtaactcatccgagtgtggggaccacagtgctgatggcatccccgtatgacagatggcacagctggagcaccgcaggcgccaactagcccggatctctcactgaccagcgctagggctgcaataggaacctggctggctggctccagggcccgggctcttatccgggaacagtgctgatcttatttgcctagatgaacaaagcacttggtagagaaggacaaaaa

SEQ ID NO: 140587 - DNA, 221 bp, Zea mays
  unsure (1)..(221): unsure at all n locations
  Clone ID: MRT4577_5969C.1
agccaacgcacacccagcgatcctcgncnngcggcctcgtcccccacttatggaatgagggctnnnacccaggacatggcggaagccgaccagatggagagcaagggtgtgcaaagctcggctagcccgtgtcgcctccacaagcgggagaatggagacgacgacgacgacacggaggaagagggctaagcccgcccaccgccacaagcgagagatcggag

SEQ ID NO: 140588 - DNA, 374 bp, Zea mays
  Clone ID: MRT4577_596C.1
agacagtctagttttgagacgggatgcatgatatatcaacgtatgcatttgcgtaggactaagctgacatggtgatacacacaggtctgtagcatgcatacaggccgatgaatggaatgcatgctggcttagacatatgtgctcgacaagtcgtaccatagaggggactaactctgactgtgcgtaagacatgggacacagatgtgaaccaaatggatatcacgctgagcgagtttagctaatgaaaaaaaaatagggctgtcaggacatgacgatctatcttacttaggcgctcttgcgaatctatgagtgttgtatagatgaacatatagtcaaataactgaccagcgtgttaaccattagagctgggaaaa

SEQ ID NO: 140589 - DNA, 574 bp, Zea mays
  Clone ID: MRT4577_59700C.1
gttttggggctgtttggaagcctttttgacctgaagccttgcaggtccaaaatagttattaaatccttacttaattatggaactaagtgcttttggggcagaggcatgttgatctagtgagatcttgatccttggatgaagttacttatggagttttaagcttttgcttgaggccttggttggggtaattccctggtttacccaagtgatttcaattcggtcactttaatcgagcgataagaaataggtgtattcttgtcatgtgctttaattgtagtgtttctgttctccacctctccttgtaagagtttgcattacatggcattcattcttatatatacctatatggttatatttagaacgcgaagaagaagtggaagtccctgaagagaagacaacaccacctttggagtctcaggcagggtctcgtctctactttaacatctgcgggcctgagactaactcatctataaacaaaggcaagccccggtgcatgcaacccctttccttgtgtttttaaatacttttcgcacactttaagtctagtgaaatgtgcattaggttcataggagtt

SEQ ID NO: 140590 - DNA, 284 bp, Zea mays
  Clone ID: MRT4577_59701C.1
gtgctgtcccgacgccaagcgccgccggacgttcgtcgatagctcgatgcaggaggccattggcgcgcagtacatgcagaggcatctgcccaagctggagccatttctgcgcagagtcgtgcaggaggaggtgcacaatgttcttatccgacacatcgattccgcacacaggttagcctctactacgcactgattgctaagctgctgcatcactatttaacgttcagactgccgagtctccgtggtcgtggactacaacatggctaaatgcaatgcatgctggt

SEQ ID NO: 140591 - DNA, 733 bp, Zea mays
  Clone ID: MRT4577_59702C.1
tttttttttttttttttgtagcagaaatcttattaccaaattttacaagttacaaaaattttacattatattcatcggagtgatttcaaaaatataagtttgaaatatatgctagctcaagtgaccatcctcaataagaagtatagaagagttacttagacatataagaaggccgagcccaccagcacttaacaccatcacagcagcacaaagttataccctgggtaacactaggttagtgtttgttaggcaaccacttggcgagcatcctttggcttggcactcgtttagattatccatcttccggttcgtccatcagcatcatcctgcggattagcccgcgcttggggtcgacttggctcgtcttccgtatcacgcgattaattaacgtaccgttatcaacttgattcagtgtttgcgggaacgacgacagtctttgattgaagtcttcgatcaaacagctgacgagtacggaacggagcttcactttcttttccatccacaacttttggaatctctctatattaagtagaactccgcataaacgacgacgattcttgttttagcctttcgccgagcacttgggcatcaaccaagggcttgcttctctatatcttcttgggattcttttgtctacgcgaacacaagtcggagacgacacgtagggactggcattgagacgagacaacggaacaacgacgaactagcgagctgaaccacgacgagtgatgtc

SEQ ID NO: 140592 - DNA, 730 bp, Zea mays
  unsure (1)..(730): unsure at all n locations
  Clone ID: MRT4577_59703C.1
aggtagaagccatcctctcctgggttaaattgaggacaacctctatccacaagatctaagcaaggctaagcatttttgtaaatcatattttgatacttcacagaagtatctataaaggtatggatatcaaggaaagcaatgcatcaaagggtttcaaacaactcctatgaccctaatgcacatttcactagacttaaagtgtgcgaaaagtatttaaaaacacaaggaaaggggttgcatgcaccggggcttgcctttgttagtaggtgagtcaggctcggactcgcagatgtcgaagtagagccaagtctctgcctgagattccaaaggtggtgatgtcttttcttcagtcacttcgatctcttcttcgttttctggccacggtgatgtggacaatggtcaccacgcagagggctggcgtgcttggctctggttcagatcaaggctagagactgggaagagagttatctctagtatgagcacaagaactctattctcctttccgtggtctgaaaatagagcttgagacagggaggaaacctcactggaccctgccttttaagcttgctgaaatgggcagatgtcccatgaacctgtccagcatgcagtggagttgtgttctcagggtgtcagccacacatgcacttcattacgtggctcacatgctcactgccacacaggttcacagcacagctcaaagacattgaatgtggtcatctnccaattacag

SEQ ID NO: 140593 - DNA, 881 bp, Zea mays
  Clone ID: MRT4577_59704C.1
cgcagcggaaatcttattaccaaattttataggttacaaaaattttacattattttatcggagtgattacaaaagtataagtttgaaatatatgctagcttaagtgatcatcctcaataagaagtatagaagagttacttagacttataagaaggccgagcccaccggcacttaacaccatcaacaacagcacaaagttaaaacctgaaaaacaacagggaataaaaccctgagtatggaattactcagcaagacttacccgactaaagaaaagactctcaaggatatgctggatttgggaatcaaggagaggctttagcaagaatcaacttagatacttttgcagaaatagcttactaaagtgagtccttactttcaatattttaatgccagattaagtattaatagactttgtttgcatatggtctactttcaccatctcatcaatacaacatcatttttattcataatgttcacatcctgacttaggttgcaggtcagtgaccaagtcttcataaccgcgaaggtacggcgatccgaatcgattatactcagctgaggatctccaatcacacgacatatgtagcacttaacccttgcatatgtcaactcgccaccggggttcttaagaccagatcaggttcacgcaaaccgagagcacagatacaccaccgtccagcctcttgccacagagggtacacgctatcccgccaccgctccacgcccatttcgtgttatcttattctggccttagtctgcccgaggcaaagcttaccctgtcccatttccagggtatgcggctagctaagatagtccttgctctatcaagtctacatacgcattcaatccttaatcaacctgcgtagaacatcacctgttcc

SEQ ID NO: 140594 - DNA, 262 bp, Zea mays
  Clone ID: MRT4577_59705C.1
gggggcacatattacgaatagagagggaacaccacctgatgtattcttcaaactgagggccaaatataagaagtggacaatcgctacatcattccatcgcaagactgcgtctccaacaccaaaacacgtggaagatttgtgacagggcatgcaaccgcgacaacatccatgatgaacaccaactatggatctcgcaccaacgaggatgcccaaggcaaacaagaatcttattgactccaggaaaaaaattgatgctgttctc

SEQ ID NO: 140595 - DNA, 638 bp, Zea mays
  Clone ID: MRT4577_59706C.1
acaggttacaaaaattttacattagtttatcggagtgattacaaaagtataagtttgaaatatatgctagctcaagggatcatcctcaataagaagtatagaagggttacttagacttataagaaggccgagcccaccggcacttaacaccatcaacaacagcacaaagttagaaccgtttcaatagccgactcgaattcgcgagatccgtagtgatttttcgatccaggcaattgtcaaacgcttggggaatatcgcgctgctagcttcgtcttcacccgattcttgggatccttgatgacgcgcggaacgacgacgagatcgagtctggagcgagctagcgagatggaatccgagcagggtcgacgactggcgaccactacagactgggagttggggcgaactgcgtgcagatgagcggtgcagatgagcgggtcggactcagcggccgagcagacccgacccagtagcgagaacaaacagagggggcgagctggagtatggacagagtcgagctgggcgactgggtgagatccgggctaggggaagctttggccatgggaattccgagcagaagcagaggcgagcaaaatggatggcgagctcgcgcgcgcaggaagcaggaaacaaccgcgcga

SEQ ID NO: 140596 - DNA, 346 bp, Zea mays
  Clone ID: MRT4577_59707C.1
taattcggcattgagttactaacacccaatttttataaactctagcggttaacgacgaccggcctgcttcattcctggagacgaacgtgtgcaagcaggcgcagccgtcgtcgcatctagacaaatcggtcgggtcgcaaggacaatatgaggcaggcactcgtgccgcgctggaagaaactgacggggccgtgcgcagagaaagcctgcggcactccaacgtaatcctgtcgatgacgatagcgaacccgaagccgggctacgtagactacgccgtgtgtgccaacgcctgcaaaacacacaccgaaggcagaggcaacgctgcgagcgacagccccgactgcag

SEQ ID NO: 140597 - DNA, 538 bp, Zea mays
  Clone ID: MRT4577_59708C.1
cacatgcacctgtcttgtctcaaagacctcagactgctatgcatgtgcatcagataacttaacaggatccgtccgattgcctcaaggacatcggataaaccacgaacaaccagaaccgcgggattaagtaacacaaatcacatacaccaacctttttgcagcggaattcttactaccaaattttacaagttacaaaaattttacattattttatcggagtggttacaaaagtataagtttgaaatatatgctagctcaaatgaccatcctcaataagaagtatagaagggttacttagacttataagaaggccgagcccactggcacttaacaccatcacaacagcacaaggttagacctgaaaaacaacagggaaataaaccctgagtatggaattactcagcaagtcttacccgactaaagaaaagactctcaagggtatgctggttatatgggagtcaaggtaaggcttttcaataatcaaagacttgttttgcagaaatgcttactaaagtggatccttaaaatccagttttat

SEQ ID NO: 140598 - DNA, 785 bp, Zea mays
  Clone ID: MRT4577_59709C.1
gcagtggaaatactattaccaaattttacaagttacaaaaattttatattattttatcggagtgattacaaaagtataagtttgaaatatatgctagctcatgggaccatcctcaataagaagtatagaagaagtacttagacttataagaaggccgagcccaccggcacttaacaccatcacagcagcataaggttagaacctgggtaacactaggttagtgtttgttagacgatgtccacttgacgaccatccttgtcctagcacttgatcaggcaggttcgttcatcagcatcaccatgcggagtagcccgcgcttggggtcgacttgagtcatcttccgcatcacgtgattaattatcgcaccgcttcagcagctgacacgaatccgcgagatcggtagcgattttccgatccaggcaatttgtcgagcgcttggggaatatcgcgctgctagcttcgtcttcacccgattcttgggatttcttgctgacgcacggattgacgacgagatggagacttgcggggtcgagtacgacgaggagttccgagggtcgacataagcagcacgaaattggaaatcaaatcatcaaagtcgacgagcacgtcgtgggcacaacgtgggtcgacgacgagatcgtgtttggagcgagctggtgaggtgggagtcgagcaggggataacgtgtttgacgactcgacggcaaacgacgcgacgacgagcagcggagagaagcaggcggccgagctaggagggaggctgcgcgcgtggggaaacggcaagcg

SEQ ID NO: 140599 - DNA, 147 bp, Zea mays
  Clone ID: MRT4577_5970C.1
gttggagtaaatgcggggcatatacacgatttgagagaatttagaagcgctgccacaagggcgaacacaagcacaatgacgccccgaaaaaaacaacaacactagaaaccgaccaacaatcaggagaaccaaatacaaggggaacac

SEQ ID NO: 140600 - DNA, 576 bp, Zea mays
  unsure (1)..(576): unsure at all n locations
  Clone ID: MRT4577_59710C.1
ctttggtnctcttctcatgctcaaggtataatgtctccagatattttatgtgccatatattattgttaaaattggcagtttagttttcccaaatacataccaagcaaaaataacttaaaatatctggatcacatttcctaggaatttttaggtggatatcattctaaactttgtgagtgagaagaatcctatctgctggttgctgagtatatcaagtgggacctaggtccaggactcaatctcagcgtgagcgaggcatatggagcgttcatctgaagcacatatcttgggttggcatttagcaaaaagctgggagctttgctttcttcctagatttacttagcatatgctatatattttactcaatgtgtatgagtgtgtttgtttttgttgcctgtttttctcagtagaactggaatctgacatctattggtataccagactttctaggtcttctatctttaagtgattatttccagcttagctaaattaactggattatcacttatcttgtagaatcagttcactttgaggtatttatgtaatttgggagaagtatgtcgctcttatattctt

SEQ ID NO: 140601 - DNA, 1044 bp, Zea mays
  Clone ID: MRT4577_59711C.1
cgcagcggaaatcttattaccaaattttacaggttacaaaaattttacattattttatcggagtgattacaaaagtataagtttgaaatatatgctagctcaagtgaccatcctcattaagaggtatagaagaagtacttagacttataagaaggccgagcccaccggcacttaacaccatcatcagcagcacaaaactataccctgggtaacattgtgttagtgtttgttagacgacgtccacttgacgatcatccttgtcctaacacttgatcaggcaggttcgttcataaacatctccatgcggagtagcccgcgcttggggtcgacttgagtcatcttccgcatcacgtgattaattatcgcaccgtttcaacagatgacacgaatccgcgagatcggtagcgattttctgatccaggccatttgtcgagcgcttgaggaatatcgcgttgctagcttcgtcttcacccgattcttgggatttcttgatgacgcacggaattacgacgagatcgagtctggagcgagctggcgagatggaatccgagcagggtcgacgacttgtgaccactacgaacgggagttggggcaagctgagcgcgaggaagcaccatggtggcgtcacggcagggaacgacggaacgctacgcgcgcgacgaggaagctggaagccacgacaagggagctcggcggccatcgccatggcgacgagcgagcagaggagaagtactgcgcgcggttggggaaagaagtagaggaactcgagttcttgggagaggctgggcgtgcgtcgcgagcagagggagctgggcggctgagcaccagagacccgcgcgaggagctgggcgcgcgtcagggaaagcgcccaggcagagagacgaactgcagatggaggctgatcctgggaacggcggccatgtgcaagcatagtcgggcacctgggagggcttcggcaggggaagaaacacgtgtgggagctccatggctcccaacaggggaagaagacagcgtcgctggcaaatgctaagcggagggcggcgg
